United States Patent Application Publication US 2005/0255487 A1 - sequence listing, part 5

SEQ ID NO: 110063 - RNA, 19 nt, Homo sapiens
  misc_RNA (1)...(19): siRNA sense strand
gauuuuauccuucaccaua

SEQ ID NO: 110064 - RNA, 19 nt, Homo sapiens
  misc_RNA (1)...(19): siRNA sense strand
caaggauacuacgugauuc

SEQ ID NO: 110065 - RNA, 19 nt, Homo sapiens
  misc_RNA (1)...(19): siRNA sense strand
aaugaucacucaaacuucu

SEQ ID NO: 110066 - RNA, 19 nt, Homo sapiens
  misc_RNA (1)...(19): siRNA sense strand
gaagaccauggcauagaga

SEQ ID NO: 110067 - RNA, 19 nt, Homo sapiens
  misc_RNA (1)...(19): siRNA sense strand
ccauuuggacaaguuauuu

SEQ ID NO: 110068 - RNA, 19 nt, Homo sapiens
  misc_RNA (1)...(19): siRNA sense strand
ccucaaccauauauucuac

SEQ ID NO: 110069 - RNA, 19 nt, Homo sapiens
  misc_RNA (1)...(19): siRNA sense strand
uauugcaucuccuguaucu

SEQ ID NO: 110070 - RNA, 19 nt, Homo sapiens
  misc_RNA (1)...(19): siRNA sense strand
cgagacgucuaaugaccau

SEQ ID NO: 110071 - RNA, 19 nt, Homo sapiens
  misc_RNA (1)...(19): siRNA sense strand
aagcuguuauuggucauuu

SEQ ID NO: 110072 - RNA, 19 nt, Homo sapiens
  misc_RNA (1)...(19): siRNA sense strand
cacucaaacuucuauuaca

SEQ ID NO: 110073 - RNA, 19 nt, Homo sapiens
  misc_RNA (1)...(19): siRNA sense strand
gcuggaaugacacuuacuu

SEQ ID NO: 110074 - RNA, 19 nt, Homo sapiens
  misc_RNA (1)...(19): siRNA sense strand
aagcucaaauggcaaagca

SEQ ID NO: 110075 - RNA, 19 nt, Homo sapiens
  misc_RNA (1)...(19): siRNA sense strand
ucacucaaacuucuauuac

SEQ ID NO: 110076 - RNA, 19 nt, Homo sapiens
  misc_RNA (1)...(19): siRNA sense strand
aaaauagucuccacaaagg

SEQ ID NO: 110077 - RNA, 19 nt, Homo sapiens
  misc_RNA (1)...(19): siRNA sense strand
cagcaguaauaacaacagu

SEQ ID NO: 110078 - RNA, 19 nt, Homo sapiens
  misc_RNA (1)...(19): siRNA sense strand
cuccauggaugagcaagaa

SEQ ID NO: 110079 - RNA, 19 nt, Homo sapiens
  misc_RNA (1)...(19): siRNA sense strand
agagacagaacccaaacaa

SEQ ID NO: 110080 - RNA, 19 nt, Homo sapiens
  misc_RNA (1)...(19): siRNA sense strand
uaggauggaaucaacagaa

SEQ ID NO: 110081 - RNA, 19 nt, Homo sapiens
  misc_RNA (1)...(19): siRNA sense strand
ucaaccauaugggaaaaua

SEQ ID NO: 110082 - RNA, 19 nt, Homo sapiens
  misc_RNA (1)...(19): siRNA sense strand
gcaaagcaacaggaacaag

SEQ ID NO: 110083 - RNA, 19 nt, Homo sapiens
  misc_RNA (1)...(19): siRNA sense strand
ggagccuacuugccacagu

SEQ ID NO: 110084 - RNA, 19 nt, Homo sapiens
  misc_RNA (1)...(19): siRNA sense strand
ggaacauacaugccugcaa

SEQ ID NO: 110085 - RNA, 19 nt, Homo sapiens
  misc_RNA (1)...(19): siRNA sense strand
aaaccauuuggacaaguua

SEQ ID NO: 110086 - RNA, 19 nt, Homo sapiens
  misc_RNA (1)...(19): siRNA sense strand
augcaaagguuaugguuuu

SEQ ID NO: 110087 - RNA, 19 nt, Homo sapiens
  misc_RNA (1)...(19): siRNA sense strand
caaaugcaaagguuauggu

SEQ ID NO: 110088 - RNA, 19 nt, Homo sapiens
  misc_RNA (1)...(19): siRNA sense strand
cuauauugcaucuccugua

SEQ ID NO: 110089 - RNA, 19 nt, Homo sapiens
  misc_RNA (1)...(19): siRNA sense strand
cuggaaugacacuuacuua

SEQ ID NO: 110090 - RNA, 19 nt, Homo sapiens
  misc_RNA (1)...(19): siRNA sense strand
gguacaagucgugguguug

SEQ ID NO: 110091 - RNA, 19 nt, Homo sapiens
  misc_RNA (1)...(19): siRNA sense strand
uggcaaagcaacaggaaca

SEQ ID NO: 110092 - RNA, 19 nt, Homo sapiens
  misc_RNA (1)...(19): siRNA sense strand
caaccucuacauuucuaau

SEQ ID NO: 110093 - RNA, 19 nt, Homo sapiens
  misc_RNA (1)...(19): siRNA sense strand
accaaccucuacauuucua

SEQ ID NO: 110094 - RNA, 19 nt, Homo sapiens
  misc_RNA (1)...(19): siRNA sense strand
gcaagaacuagaaaauaug

SEQ ID NO: 110095 - RNA, 19 nt, Homo sapiens
  misc_RNA (1)...(19): siRNA sense strand
ggagcacaccaugucacua

SEQ ID NO: 110096 - RNA, 19 nt, Homo sapiens
  misc_RNA (1)...(19): siRNA sense strand
gcaaccucaaccauauauu

SEQ ID NO: 110097 - RNA, 19 nt, Homo sapiens
  misc_RNA (1)...(19): siRNA sense strand
ccaccagcaguaauaacaa

SEQ ID NO: 110098 - RNA, 19 nt, Homo sapiens
  misc_RNA (1)...(19): siRNA sense strand
gaagcuguuauuggucauu

SEQ ID NO: 110099 - RNA, 19 nt, Homo sapiens
  misc_RNA (1)...(19): siRNA sense strand
cauggaugagcaagaacua

SEQ ID NO: 110100 - RNA, 19 nt, Homo sapiens
  misc_RNA (1)...(19): siRNA sense strand
ucaaccauauauucuacag

SEQ ID NO: 110101 - RNA, 19 nt, Homo sapiens
  misc_RNA (1)...(19): siRNA sense strand
gcuguuauuggucauuuua

SEQ ID NO: 110102 - RNA, 19 nt, Homo sapiens
  misc_RNA (1)...(19): siRNA sense strand
guguaaguuugcugaugga

SEQ ID NO: 110103 - RNA, 19 nt, Homo sapiens
  misc_RNA (1)...(19): siRNA sense strand
cacuacagcccgcaucaau

SEQ ID NO: 110104 - RNA, 19 nt, Homo sapiens
  misc_RNA (1)...(19): siRNA sense strand
caccagcaguaauaacaac

SEQ ID NO: 110105 - RNA, 19 nt, Homo sapiens
  misc_RNA (1)...(19): siRNA sense strand
ccauauaccuuucaaccua

SEQ ID NO: 110106 - RNA, 19 nt, Homo sapiens
  misc_RNA (1)...(19): siRNA sense strand
gacagaacccaaacaaaua

SEQ ID NO: 110107 - RNA, 19 nt, Homo sapiens
  misc_RNA (1)...(19): siRNA sense strand
gaaugacacuuacuuacga

SEQ ID NO: 110108 - RNA, 19 nt, Homo sapiens
  misc_RNA (1)...(19): siRNA sense strand
gaugcaaccucaaccauau

SEQ ID NO: 110109 - RNA, 19 nt, Homo sapiens
  misc_RNA (1)...(19): siRNA sense strand
gaagcucugucaaccauau

SEQ ID NO: 110110 - RNA, 19 nt, Homo sapiens
  misc_RNA (1)...(19): siRNA sense strand
caaguuauuucuacaagga

SEQ ID NO: 110111 - RNA, 19 nt, Homo sapiens
  misc_RNA (1)...(19): siRNA sense strand
acaaauacaucccuaaugg

SEQ ID NO: 110112 - RNA, 19 nt, Homo sapiens
  misc_RNA (1)...(19): siRNA sense strand
gaaccuuuauuguguaagu

SEQ ID NO: 110113 - RNA, 19 nt, Homo sapiens
  misc_RNA (1)...(19): siRNA sense strand
cuaccaaccucuacauuuc

SEQ ID NO: 110114 - RNA, 19 nt, Homo sapiens
  misc_RNA (1)...(19): siRNA sense strand
ggaagaccauggcauagag

SEQ ID NO: 110115 - RNA, 19 nt, Homo sapiens
  misc_RNA (1)...(19): siRNA sense strand
ggaugcaaccucaaccaua

SEQ ID NO: 110116 - RNA, 19 nt, Homo sapiens
  misc_RNA (1)...(19): siRNA sense strand
agacagaacccaaacaaau

SEQ ID NO: 110117 - RNA, 19 nt, Homo sapiens
  misc_RNA (1)...(19): siRNA sense strand
cgaaugaucacucaaacuu

SEQ ID NO: 110118 - RNA, 19 nt, Homo sapiens
  misc_RNA (1)...(19): siRNA sense strand
cauauaccuuucaaccuaa

SEQ ID NO: 110119 - RNA, 19 nt, Homo sapiens
  misc_RNA (1)...(19): siRNA sense strand
caaagcaacaggaacaaga

SEQ ID NO: 110120 - RNA, 19 nt, Homo sapiens
  misc_RNA (1)...(19): siRNA sense strand
cguguuaacucccucaaug

SEQ ID NO: 110121 - RNA, 19 nt, Homo sapiens
  misc_RNA (1)...(19): siRNA sense strand
uauauugcaucuccuguau

SEQ ID NO: 110122 - RNA, 19 nt, Homo sapiens
  misc_RNA (1)...(19): siRNA sense strand
ggacaaguuauuucuacaa

SEQ ID NO: 110123 - RNA, 19 nt, Homo sapiens
  misc_RNA (1)...(19): siRNA sense strand
ggaaaauagucuccacaaa

SEQ ID NO: 110124 - RNA, 19 nt, Homo sapiens
  misc_RNA (1)...(19): siRNA sense strand
gguguuggcuuugcuagga

SEQ ID NO: 110125 - RNA, 19 nt, Homo sapiens
  misc_RNA (1)...(19): siRNA sense strand
cagaaccuuuauuguguaa

SEQ ID NO: 110126 - RNA, 19 nt, Homo sapiens
  misc_RNA (1)...(19): siRNA sense strand
cuacagcccgcaucaauga

SEQ ID NO: 110127 - RNA, 19 nt, Homo sapiens
  misc_RNA (1)...(19): siRNA sense strand
gcaguaauaacaacaguag

SEQ ID NO: 110128 - RNA, 19 nt, Homo sapiens
  misc_RNA (1)...(19): siRNA sense strand
auacaucccuaauggaaga

SEQ ID NO: 110129 - RNA, 19 nt, Homo sapiens
  misc_RNA (1)...(19): siRNA sense strand
cuacgugauuccaguggua

SEQ ID NO: 110130 - RNA, 19 nt, Homo sapiens
  misc_RNA (1)...(19): siRNA sense strand
caaccucaaccauauauuc

SEQ ID NO: 110131 - RNA, 19 nt, Homo sapiens
  misc_RNA (1)...(19): siRNA sense strand
gcuacaaaccgaaugauca

SEQ ID NO: 110132 - RNA, 19 nt, Homo sapiens
  misc_RNA (1)...(19): siRNA sense strand
acagaaccuuuauugugua

SEQ ID NO: 110133 - RNA, 19 nt, Homo sapiens
  misc_RNA (1)...(19): siRNA sense strand
gacaaguuauuucuacaag

SEQ ID NO: 110134 - RNA, 19 nt, Homo sapiens
  misc_RNA (1)...(19): siRNA sense strand
caaaccgaaugaucacuca

SEQ ID NO: 110135 - RNA, 19 nt, Homo sapiens
  misc_RNA (1)...(19): siRNA sense strand
acaaggauacuacgugauu

SEQ ID NO: 110136 - RNA, 19 nt, Homo sapiens
  misc_RNA (1)...(19): siRNA sense strand
gcaaaacgaaccucuauau

SEQ ID NO: 110137 - RNA, 19 nt, Homo sapiens
  misc_RNA (1)...(19): siRNA sense strand
gugaagcucugucaaccau

SEQ ID NO: 110138 - RNA, 19 nt, Homo sapiens
  misc_RNA (1)...(19): siRNA sense strand
ucuauuacacccuauauug

SEQ ID NO: 110139 - RNA, 19 nt, Homo sapiens
  misc_RNA (1)...(19): siRNA sense strand
caaacaaauacaucccuaa

SEQ ID NO: 110140 - RNA, 19 nt, Homo sapiens
  misc_RNA (1)...(19): siRNA sense strand
ccucuacauuucuaauuug

SEQ ID NO: 110141 - RNA, 19 nt, Homo sapiens
  misc_RNA (1)...(19): siRNA sense strand
gaaaauagucuccacaaag

SEQ ID NO: 110142 - RNA, 19 nt, Homo sapiens
  misc_RNA (1)...(19): siRNA sense strand
aaauacaucccuaauggaa

SEQ ID NO: 110143 - RNA, 19 nt, Homo sapiens
  misc_RNA (1)...(19): siRNA sense strand
gagacagaacccaaacaaa

SEQ ID NO: 110144 - RNA, 19 nt, Homo sapiens
  misc_RNA (1)...(19): siRNA sense strand
gaaaauaugcucaaaccau

SEQ ID NO: 110145 - RNA, 19 nt, Homo sapiens
  misc_RNA (1)...(19): siRNA sense strand
ggaggcaaguggucaacag

SEQ ID NO: 110146 - RNA, 19 nt, Homo sapiens
  misc_RNA (1)...(19): siRNA sense strand
uaagacaccaccaggaguu

SEQ ID NO: 110147 - RNA, 19 nt, Homo sapiens
  misc_RNA (1)...(19): siRNA sense strand
gcaccaccagcaguaauaa

SEQ ID NO: 110148 - RNA, 19 nt, Homo sapiens
  misc_RNA (1)...(19): siRNA sense strand
gaacccaaacaaauacauc

SEQ ID NO: 110149 - RNA, 19 nt, Homo sapiens
  misc_RNA (1)...(19): siRNA sense strand
gagcacaccaugucacuac

SEQ ID NO: 110150 - RNA, 19 nt, Homo sapiens
  misc_RNA (1)...(19): siRNA sense strand
caacuacagcugcuauaca

SEQ ID NO: 110151 - RNA, 19 nt, Homo sapiens
  misc_RNA (1)...(19): siRNA sense strand
ggaaugacacuuacuuacg

SEQ ID NO: 110152 - RNA, 19 nt, Homo sapiens
  misc_RNA (1)...(19): siRNA sense strand
gagcaagaacuagaaaaua

SEQ ID NO: 110153 - RNA, 19 nt, Homo sapiens
  misc_RNA (1)...(19): siRNA sense strand
ccuuucaaccuaauaagua

SEQ ID NO: 110154 - RNA, 19 nt, Homo sapiens
  misc_RNA (1)...(19): siRNA sense strand
cuacagcugcuauacagaa

SEQ ID NO: 110155 - RNA, 19 nt, Homo sapiens
  misc_RNA (1)...(19): siRNA sense strand
aggauggaaucaacagaaa

SEQ ID NO: 110156 - RNA, 19 nt, Homo sapiens
  misc_RNA (1)...(19): siRNA sense strand
gaugagcaagaacuagaaa

SEQ ID NO: 110157 - RNA, 19 nt, Homo sapiens
  misc_RNA (1)...(19): siRNA sense strand
gaugggaucagcucagcaa

SEQ ID NO: 110158 - RNA, 19 nt, Homo sapiens
  misc_RNA (1)...(19): siRNA sense strand
ccuaccaaccucuacauuu

SEQ ID NO: 110159 - RNA, 19 nt, Homo sapiens
  misc_RNA (1)...(19): siRNA sense strand
gaaugaucacucaaacuuc

SEQ ID NO: 110160 - RNA, 19 nt, Homo sapiens
  misc_RNA (1)...(19): siRNA sense strand
uagcagcaguagcaacuca

SEQ ID NO: 110161 - RNA, 19 nt, Homo sapiens
  misc_RNA (1)...(19): siRNA sense strand
caaauacaucccuaaugga

SEQ ID NO: 110162 - RNA, 19 nt, Homo sapiens
  misc_RNA (1)...(19): siRNA sense strand
ggaugagcaagaacuagaa

SEQ ID NO: 110163 - RNA, 19 nt, Homo sapiens
  misc_RNA (1)...(19): siRNA sense strand
gauuuuauccuucaccaua

SEQ ID NO: 110164 - RNA, 19 nt, Homo sapiens
  misc_RNA (1)...(19): siRNA sense strand
caaggauacuacgugauuc

SEQ ID NO: 110165 - RNA, 19 nt, Homo sapiens
  misc_RNA (1)...(19): siRNA sense strand
aaugaucacucaaacuucu

SEQ ID NO: 110166 - RNA, 19 nt, Homo sapiens
  misc_RNA (1)...(19): siRNA sense strand
gaagaccauggcauagaga

SEQ ID NO: 110167 - RNA, 19 nt, Homo sapiens
  misc_RNA (1)...(19): siRNA sense strand
ccauuuggacaaguuauuu

SEQ ID NO: 110168 - RNA, 19 nt, Homo sapiens
  misc_RNA (1)...(19): siRNA sense strand
ccucaaccauauauucuac

SEQ ID NO: 110169 - RNA, 19 nt, Homo sapiens
  misc_RNA (1)...(19): siRNA sense strand
uauugcaucuccuguaucu

SEQ ID NO: 110170 - RNA, 19 nt, Homo sapiens
  misc_RNA (1)...(19): siRNA sense strand
cgagacgucuaaugaccau

SEQ ID NO: 110171 - RNA, 19 nt, Homo sapiens
  misc_RNA (1)...(19): siRNA sense strand
aagcuguuauuggucauuu

SEQ ID NO: 110172 - RNA, 19 nt, Homo sapiens
  misc_RNA (1)...(19): siRNA sense strand
cacucaaacuucuauuaca

SEQ ID NO: 110173 - RNA, 19 nt, Homo sapiens
  misc_RNA (1)...(19): siRNA sense strand
gcuggaaugacacuuacuu

SEQ ID NO: 110174 - RNA, 19 nt, Homo sapiens
  misc_RNA (1)...(19): siRNA sense strand
aagcucaaauggcaaagca

SEQ ID NO: 110175 - RNA, 19 nt, Homo sapiens
  misc_RNA (1)...(19): siRNA sense strand
ucacucaaacuucuauuac

SEQ ID NO: 110176 - RNA, 19 nt, Homo sapiens
  misc_RNA (1)...(19): siRNA sense strand
aaaauagucuccacaaagg

SEQ ID NO: 110177 - RNA, 19 nt, Homo sapiens
  misc_RNA (1)...(19): siRNA sense strand
cagcaguaauaacaacagu

SEQ ID NO: 110178 - RNA, 19 nt, Homo sapiens
  misc_RNA (1)...(19): siRNA sense strand
cuccauggaugagcaagaa

SEQ ID NO: 110179 - RNA, 19 nt, Homo sapiens
  misc_RNA (1)...(19): siRNA sense strand
agagacagaacccaaacaa

SEQ ID NO: 110180 - RNA, 19 nt, Homo sapiens
  misc_RNA (1)...(19): siRNA sense strand
uaggauggaaucaacagaa

SEQ ID NO: 110181 - RNA, 19 nt, Homo sapiens
  misc_RNA (1)...(19): siRNA sense strand
ucaaccauaugggaaaaua

SEQ ID NO: 110182 - RNA, 19 nt, Homo sapiens
  misc_RNA (1)...(19): siRNA sense strand
gcaaagcaacaggaacaag

SEQ ID NO: 110183 - RNA, 19 nt, Homo sapiens
  misc_RNA (1)...(19): siRNA sense strand
ggagccuacuugccacagu

SEQ ID NO: 110184 - RNA, 19 nt, Homo sapiens
  misc_RNA (1)...(19): siRNA sense strand
ggaacauacaugccugcaa

SEQ ID NO: 110185 - RNA, 19 nt, Homo sapiens
  misc_RNA (1)...(19): siRNA sense strand
aaaccauuuggacaaguua

SEQ ID NO: 110186 - RNA, 19 nt, Homo sapiens
  misc_RNA (1)...(19): siRNA sense strand
augcaaagguuaugguuuu

SEQ ID NO: 110187 - RNA, 19 nt, Homo sapiens
  misc_RNA (1)...(19): siRNA sense strand
caaaugcaaagguuauggu

SEQ ID NO: 110188 - RNA, 19 nt, Homo sapiens
  misc_RNA (1)...(19): siRNA sense strand
cuauauugcaucuccugua

SEQ ID NO: 110189 - RNA, 19 nt, Homo sapiens
  misc_RNA (1)...(19): siRNA sense strand
cuggaaugacacuuacuua

SEQ ID NO: 110190 - RNA, 19 nt, Homo sapiens
  misc_RNA (1)...(19): siRNA sense strand
gguacaagucgugguguug

SEQ ID NO: 110191 - RNA, 19 nt, Homo sapiens
  misc_RNA (1)...(19): siRNA sense strand
uggcaaagcaacaggaaca

SEQ ID NO: 110192 - RNA, 19 nt, Homo sapiens
  misc_RNA (1)...(19): siRNA sense strand
caaccucuacauuucuaau

SEQ ID NO: 110193 - RNA, 19 nt, Homo sapiens
  misc_RNA (1)...(19): siRNA sense strand
accaaccucuacauuucua

SEQ ID NO: 110194 - RNA, 19 nt, Homo sapiens
  misc_RNA (1)...(19): siRNA sense strand
gcaagaacuagaaaauaug

SEQ ID NO: 110195 - RNA, 19 nt, Homo sapiens
  misc_RNA (1)...(19): siRNA sense strand
ggagcacaccaugucacua

SEQ ID NO: 110196 - RNA, 19 nt, Homo sapiens
  misc_RNA (1)...(19): siRNA sense strand
gcaaccucaaccauauauu

SEQ ID NO: 110197 - RNA, 19 nt, Homo sapiens
  misc_RNA (1)...(19): siRNA sense strand
ccaccagcaguaauaacaa

SEQ ID NO: 110198 - RNA, 19 nt, Homo sapiens
  misc_RNA (1)...(19): siRNA sense strand
gaagcuguuauuggucauu

SEQ ID NO: 110199 - RNA, 19 nt, Homo sapiens
  misc_RNA (1)...(19): siRNA sense strand
cauggaugagcaagaacua

SEQ ID NO: 110200 - RNA, 19 nt, Homo sapiens
  misc_RNA (1)...(19): siRNA sense strand
ucaaccauauauucuacag

SEQ ID NO: 110201 - RNA, 19 nt, Homo sapiens
  misc_RNA (1)...(19): siRNA sense strand
gcuguuauuggucauuuua

SEQ ID NO: 110202 - RNA, 19 nt, Homo sapiens
  misc_RNA (1)...(19): siRNA sense strand
guguaaguuugcugaugga

SEQ ID NO: 110203 - RNA, 19 nt, Homo sapiens
  misc_RNA (1)...(19): siRNA sense strand
cacuacagcccgcaucaau

SEQ ID NO: 110204 - RNA, 19 nt, Homo sapiens
  misc_RNA (1)...(19): siRNA sense strand
caccagcaguaauaacaac

SEQ ID NO: 110205 - RNA, 19 nt, Homo sapiens
  misc_RNA (1)...(19): siRNA sense strand
gagcuuacaucucccagua

SEQ ID NO: 110206 - RNA, 19 nt, Homo sapiens
  misc_RNA (1)...(19): siRNA sense strand
gcaagauuguuuccacuaa

SEQ ID NO: 110207 - RNA, 19 nt, Homo sapiens
  misc_RNA (1)...(19): siRNA sense strand
cagcagagguguuggcuuu

SEQ ID NO: 110208 - RNA, 19 nt, Homo sapiens
  misc_RNA (1)...(19): siRNA sense strand
ggacaagaccacaaacaaa

SEQ ID NO: 110209 - RNA, 19 nt, Homo sapiens
  misc_RNA (1)...(19): siRNA sense strand
ccacagcucuucagaaugg

SEQ ID NO: 110210 - RNA, 19 nt, Homo sapiens
  misc_RNA (1)...(19): siRNA sense strand
gaaacaacaagaagccaua

SEQ ID NO: 110211 - RNA, 19 nt, Homo sapiens
  misc_RNA (1)...(19): siRNA sense strand
gaaaugaccagcugagcaa

SEQ ID NO: 110212 - RNA, 19 nt, Homo sapiens
  misc_RNA (1)...(19): siRNA sense strand
gcuauggcuuuguagauuu

SEQ ID NO: 110213 - RNA, 19 nt, Homo sapiens
  misc_RNA (1)...(19): siRNA sense strand
ucagacaucuccucuacaa

SEQ ID NO: 110214 - RNA, 19 nt, Homo sapiens
  misc_RNA (1)...(19): siRNA sense strand
gaacaggaccccacaaauu

SEQ ID NO: 110215 - RNA, 19 nt, Homo sapiens
  misc_RNA (1)...(19): siRNA sense strand
caccacagcucuucagaau

SEQ ID NO: 110216 - RNA, 19 nt, Homo sapiens
  misc_RNA (1)...(19): siRNA sense strand
gacaucuccucuacaagua

SEQ ID NO: 110217 - RNA, 19 nt, Homo sapiens
  misc_RNA (1)...(19): siRNA sense strand
ggucuauucuuuccaguuc

SEQ ID NO: 110218 - RNA, 19 nt, Homo sapiens
  misc_RNA (1)...(19): siRNA sense strand
gacaagaccacaaacaaau

SEQ ID NO: 110219 - RNA, 19 nt, Homo sapiens
  misc_RNA (1)...(19): siRNA sense strand
ggaugcaccaccauucaua

SEQ ID NO: 110220 - RNA, 19 nt, Homo sapiens
  misc_RNA (1)...(19): siRNA sense strand
caagaagccauauguguca

SEQ ID NO: 110221 - RNA, 19 nt, Homo sapiens
  misc_RNA (1)...(19): siRNA sense strand
gguguuggcuuugcaagga

SEQ ID NO: 110222 - RNA, 19 nt, Homo sapiens
  misc_RNA (1)...(19): siRNA sense strand
ggcuauggcuuuguagauu

SEQ ID NO: 110223 - RNA, 19 nt, Homo sapiens
  misc_RNA (1)...(19): siRNA sense strand
gccaaggaaugcagacaug

SEQ ID NO: 110224 - RNA, 19 nt, Homo sapiens
  misc_RNA (1)...(19): siRNA sense strand
ccauauggcaagauuguuu

SEQ ID NO: 110225 - RNA, 19 nt, Homo sapiens
  misc_RNA (1)...(19): siRNA sense strand
caucaucacccacuuuaau

SEQ ID NO: 110226 - RNA, 19 nt, Homo sapiens
  misc_RNA (1)...(19): siRNA sense strand
gagagcagcggccaacaga

SEQ ID NO: 110227 - RNA, 19 nt, Homo sapiens
  misc_RNA (1)...(19): siRNA sense strand
ccaccuagcccaagcaaca

SEQ ID NO: 110228 - RNA, 19 nt, Homo sapiens
  misc_RNA (1)...(19): siRNA sense strand
gaaacgacagaaccaagga

SEQ ID NO: 110229 - RNA, 19 nt, Homo sapiens
  misc_RNA (1)...(19): siRNA sense strand
gccaucaucacccacuuua

SEQ ID NO: 110230 - RNA, 19 nt, Homo sapiens
  misc_RNA (1)...(19): siRNA sense strand
ccacaaauuuauacaucuc

SEQ ID NO: 110231 - RNA, 19 nt, Homo sapiens
  misc_RNA (1)...(19): siRNA sense strand
ccaagcaacaguacaccua

SEQ ID NO: 110232 - RNA, 19 nt, Homo sapiens
  misc_RNA (1)...(19): siRNA sense strand
caagauuguuuccacuaag

SEQ ID NO: 110233 - RNA, 19 nt, Homo sapiens
  misc_RNA (1)...(19): siRNA sense strand
caacaagaagccauaugug

SEQ ID NO: 110234 - RNA, 19 nt, Homo sapiens
  misc_RNA (1)...(19): siRNA sense strand
caagcaacaguacaccuaa

SEQ ID NO: 110235 - RNA, 19 nt, Homo sapiens
  misc_RNA (1)...(19): siRNA sense strand
ccuaacagcaguaguggaa

SEQ ID NO: 110236 - RNA, 19 nt, Homo sapiens
  misc_RNA (1)...(19): siRNA sense strand
gcuuacaucucccaguaca

SEQ ID NO: 110237 - RNA, 19 nt, Homo sapiens
  misc_RNA (1)...(19): siRNA sense strand
gaccacaaacaaauguaaa

SEQ ID NO: 110238 - RNA, 19 nt, Homo sapiens
  misc_RNA (1)...(19): siRNA sense strand
ucacccacuuuaauggaaa

SEQ ID NO: 110239 - RNA, 19 nt, Homo sapiens
  misc_RNA (1)...(19): siRNA sense strand
ggacgcacccucagagcau

SEQ ID NO: 110240 - RNA, 19 nt, Homo sapiens
  misc_RNA (1)...(19): siRNA sense strand
caagaccacaaacaaaugu

SEQ ID NO: 110241 - RNA, 19 nt, Homo sapiens
  misc_RNA (1)...(19): siRNA sense strand
agacaucuccucuacaagu

SEQ ID NO: 110242 - RNA, 19 nt, Homo sapiens
  misc_RNA (1)...(19): siRNA sense strand
ccucuccugugucuucgua

SEQ ID NO: 110243 - RNA, 19 nt, Homo sapiens
  misc_RNA (1)...(19): siRNA sense strand
caaagaaacgacagaacca

SEQ ID NO: 110244 - RNA, 19 nt, Homo sapiens
  misc_RNA (1)...(19): siRNA sense strand
gaagcccuuuggccagguu

SEQ ID NO: 110245 - RNA, 19 nt, Homo sapiens
  misc_RNA (1)...(19): siRNA sense strand
gucaauggaugagcaggaa

SEQ ID NO: 110246 - RNA, 19 nt, Homo sapiens
  misc_RNA (1)...(19): siRNA sense strand
cagcagauggcaccaccua

SEQ ID NO: 110247 - RNA, 19 nt, Homo sapiens
  misc_RNA (1)...(19): siRNA sense strand
cauccgaucccuugcuuug

SEQ ID NO: 110248 - RNA, 19 nt, Homo sapiens
  misc_RNA (1)...(19): siRNA sense strand
caauagaaacaacaagaag

SEQ ID NO: 110249 - RNA, 19 nt, Homo sapiens
  misc_RNA (1)...(19): siRNA sense strand
gcagagguguuggcuuugc

SEQ ID NO: 110250 - RNA, 19 nt, Homo sapiens
  misc_RNA (1)...(19): siRNA sense strand
gaagugugaagccaucauc

SEQ ID NO: 110251 - RNA, 19 nt, Homo sapiens
  misc_RNA (1)...(19): siRNA sense strand
gagcagcggccaacagaac

SEQ ID NO: 110252 - RNA, 19 nt, Homo sapiens
  misc_RNA (1)...(19): siRNA sense strand
acucagacaucuccucuac

SEQ ID NO: 110253 - RNA, 19 nt, Homo sapiens
  misc_RNA (1)...(19): siRNA sense strand
acaacaagaagccauaugu

SEQ ID NO: 110254 - RNA, 19 nt, Homo sapiens
  misc_RNA (1)...(19): siRNA sense strand
cagcaguaguggaagcaau

SEQ ID NO: 110255 - RNA, 19 nt, Homo sapiens
  misc_RNA (1)...(19): siRNA sense strand
gcagcacaggcacguauau

SEQ ID NO: 110256 - RNA, 19 nt, Homo sapiens
  misc_RNA (1)...(19): siRNA sense strand
ggcaagauuguuuccacua

SEQ ID NO: 110257 - RNA, 19 nt, Homo sapiens
  misc_RNA (1)...(19): siRNA sense strand
gcacuacugaccaagaucu

SEQ ID NO: 110258 - RNA, 19 nt, Homo sapiens
  misc_RNA (1)...(19): siRNA sense strand
aggcacagauggcaaagca

SEQ ID NO: 110259 - RNA, 19 nt, Homo sapiens
  misc_RNA (1)...(19): siRNA sense strand
gagcaaaaccaaccuauac

SEQ ID NO: 110260 - RNA, 19 nt, Homo sapiens
  misc_RNA (1)...(19): siRNA sense strand
guaguggaagcaauggaaa

SEQ ID NO: 110261 - RNA, 19 nt, Homo sapiens
  misc_RNA (1)...(19): siRNA sense strand
cuaaggccauacuggacaa

SEQ ID NO: 110262 - RNA, 19 nt, Homo sapiens
  misc_RNA (1)...(19): siRNA sense strand
agaccacaaacaaauguaa

SEQ ID NO: 110263 - RNA, 19 nt, Homo sapiens
  misc_RNA (1)...(19): siRNA sense strand
cagcagcacaggcacguau

SEQ ID NO: 110264 - RNA, 19 nt, Homo sapiens
  misc_RNA (1)...(19): siRNA sense strand
caugcagccuucagguuca

SEQ ID NO: 110265 - RNA, 19 nt, Homo sapiens
  misc_RNA (1)...(19): siRNA sense strand
gauggcaaagcaacaggaa

SEQ ID NO: 110266 - RNA, 19 nt, Homo sapiens
  misc_RNA (1)...(19): siRNA sense strand
acaagaccacaaacaaaug

SEQ ID NO: 110267 - RNA, 19 nt, Homo sapiens
  misc_RNA (1)...(19): siRNA sense strand
acaccuaacagcaguagug

SEQ ID NO: 110268 - RNA, 19 nt, Homo sapiens
  misc_RNA (1)...(19): siRNA sense strand
ucaaaccucccacugucaa

SEQ ID NO: 110269 - RNA, 19 nt, Homo sapiens
  misc_RNA (1)...(19): siRNA sense strand
aacaagaagccauaugugu

SEQ ID NO: 110270 - RNA, 19 nt, Homo sapiens
  misc_RNA (1)...(19): siRNA sense strand
uaccuuuccucuccugugu

SEQ ID NO: 110271 - RNA, 19 nt, Homo sapiens
  misc_RNA (1)...(19): siRNA sense strand
ccaccacagcucuucagaa

SEQ ID NO: 110272 - RNA, 19 nt, Homo sapiens
  misc_RNA (1)...(19): siRNA sense strand
gcuacaauagaaacaacaa

SEQ ID NO: 110273 - RNA, 19 nt, Homo sapiens
  misc_RNA (1)...(19): siRNA sense strand
uggacaagaccacaaacaa

SEQ ID NO: 110274 - RNA, 19 nt, Homo sapiens
  misc_RNA (1)...(19): siRNA sense strand
ucuauucuuuccaguucaa

SEQ ID NO: 110275 - RNA, 19 nt, Homo sapiens
  misc_RNA (1)...(19): siRNA sense strand
gugccuucuuccaguguuu

SEQ ID NO: 110276 - RNA, 19 nt, Homo sapiens
  misc_RNA (1)...(19): siRNA sense strand
uggcaaagcaacaggaaca

SEQ ID NO: 110277 - RNA, 19 nt, Homo sapiens
  misc_RNA (1)...(19): siRNA sense strand
gucacuggcucagcagaug

SEQ ID NO: 110278 - RNA, 19 nt, Homo sapiens
  misc_RNA (1)...(19): siRNA sense strand
cuuuccaguucaacaagua

SEQ ID NO: 110279 - RNA, 19 nt, Homo sapiens
  misc_RNA (1)...(19): siRNA sense strand
caggaugcuugcucagucu

SEQ ID NO: 110280 - RNA, 19 nt, Homo sapiens
  misc_RNA (1)...(19): siRNA sense strand
caucacccacuuuaaugga

SEQ ID NO: 110281 - RNA, 19 nt, Homo sapiens
  misc_RNA (1)...(19): siRNA sense strand
ggauugcaaccaggcacua

SEQ ID NO: 110282 - RNA, 19 nt, Homo sapiens
  misc_RNA (1)...(19): siRNA sense strand
aaacaacaagaagccauau

SEQ ID NO: 110283 - RNA, 19 nt, Homo sapiens
  misc_RNA (1)...(19): siRNA sense strand
aagauuguuuccacuaagg

SEQ ID NO: 110284 - RNA, 19 nt, Homo sapiens
  misc_RNA (1)...(19): siRNA sense strand
gaacaaggacgggaaguua

SEQ ID NO: 110285 - RNA, 19 nt, Homo sapiens
  misc_RNA (1)...(19): siRNA sense strand
ggacaaggaugauaaaauu

SEQ ID NO: 110286 - RNA, 19 nt, Homo sapiens
  misc_RNA (1)...(19): siRNA sense strand
gaagcuaacuaaagaggaa

SEQ ID NO: 110287 - RNA, 19 nt, Homo sapiens
  misc_RNA (1)...(19): siRNA sense strand
gaagccaagcuaccaauua

SEQ ID NO: 110288 - RNA, 19 nt, Homo sapiens
  misc_RNA (1)...(19): siRNA sense strand
gaacauaugaaggaaauug

SEQ ID NO: 110289 - RNA, 19 nt, Homo sapiens
  misc_RNA (1)...(19): siRNA sense strand
gauccucccucaagauuau

SEQ ID NO: 110290 - RNA, 19 nt, Homo sapiens
  misc_RNA (1)...(19): siRNA sense strand
aaacaaggaugagaagcua

SEQ ID NO: 110291 - RNA, 19 nt, Homo sapiens
  misc_RNA (1)...(19): siRNA sense strand
gccaaagucuggaaggauu

SEQ ID NO: 110292 - RNA, 19 nt, Homo sapiens
  misc_RNA (1)...(19): siRNA sense strand
gggagcaguuuaacgaauu

SEQ ID NO: 110293 - RNA, 19 nt, Homo sapiens
  misc_RNA (1)...(19): siRNA sense strand
cugaagaguuugaacauau

SEQ ID NO: 110294 - RNA, 19 nt, Homo sapiens
  misc_RNA (1)...(19): siRNA sense strand
ccgcagaguuucaugauuc

SEQ ID NO: 110295 - RNA, 19 nt, Homo sapiens
  misc_RNA (1)...(19): siRNA sense strand
ggaagauuguugaucgaau

SEQ ID NO: 110296 - RNA, 19 nt, Homo sapiens
  misc_RNA (1)...(19): siRNA sense strand
gaugagaagcuaacuaaag

SEQ ID NO: 110297 - RNA, 19 nt, Homo sapiens
  misc_RNA (1)...(19): siRNA sense strand
ggacgggaaguuagacaaa

SEQ ID NO: 110298 - RNA, 19 nt, Homo sapiens
  misc_RNA (1)...(19): siRNA sense strand
gaaguuagacaaagaugag

SEQ ID NO: 110299 - RNA, 19 nt, Homo sapiens
  misc_RNA (1)...(19): siRNA sense strand
ggagaacuggaacauguuu

SEQ ID NO: 110300 - RNA, 19 nt, Homo sapiens
  misc_RNA (1)...(19): siRNA sense strand
augagaagcuaacuaaaga

SEQ ID NO: 110301 - RNA, 19 nt, Homo sapiens
  misc_RNA (1)...(19): siRNA sense strand
gggauggguuuguggauca

SEQ ID NO: 110302 - RNA, 19 nt, Homo sapiens
  misc_RNA (1)...(19): siRNA sense strand
ggaucaggaugaguauauu

SEQ ID NO: 110303 - RNA, 19 nt, Homo sapiens
  misc_RNA (1)...(19): siRNA sense strand
cagaucaucacaccuuuaa

SEQ ID NO: 110304 - RNA, 19 nt, Homo sapiens
  misc_RNA (1)...(19): siRNA sense strand
uggaggacaucgacaagaa

SEQ ID NO: 110305 - RNA, 19 nt, Homo sapiens
  misc_RNA (1)...(19): siRNA sense strand
ugaagaguuugaacauaug

SEQ ID NO: 110306 - RNA, 19 nt, Homo sapiens
  misc_RNA (1)...(19): siRNA sense strand
gaugagagaagauucaaag

SEQ ID NO: 110307 - RNA, 19 nt, Homo sapiens
  misc_RNA (1)...(19): siRNA sense strand
ccugaagaguuugaacaua

SEQ ID NO: 110308 - RNA, 19 nt, Homo sapiens
  misc_RNA (1)...(19): siRNA sense strand
gaucaaacgggugcagaaa

SEQ ID NO: 110309 - RNA, 19 nt, Homo sapiens
  misc_RNA (1)...(19): siRNA sense strand
ggaaguuagacaaagauga

SEQ ID NO: 110310 - RNA, 19 nt, Homo sapiens
  misc_RNA (1)...(19): siRNA sense strand
aaacaagccaccuaugguu

SEQ ID NO: 110311 - RNA, 19 nt, Homo sapiens
  misc_RNA (1)...(19): siRNA sense strand
gauaaugucgccaaagucu

SEQ ID NO: 110312 - RNA, 19 nt, Homo sapiens
  misc_RNA (1)...(19): siRNA sense strand
gaggaaauauuggagaacu

SEQ ID NO: 110313 - RNA, 19 nt, Homo sapiens
  misc_RNA (1)...(19): siRNA sense strand
ugaaggaaauugugguuuu

SEQ ID NO: 110314 - RNA, 19 nt, Homo sapiens
  misc_RNA (1)...(19): siRNA sense strand
gaagaguuugaacauauga

SEQ ID NO: 110315 - RNA, 19 nt, Homo sapiens
  misc_RNA (1)...(19): siRNA sense strand
gaucaucacaccuuuaaaa

SEQ ID NO: 110316 - RNA, 19 nt, Homo sapiens
  misc_RNA (1)...(19): siRNA sense strand
ccaaagucuggaaggauua

SEQ ID NO: 110317 - RNA, 19 nt, Homo sapiens
  misc_RNA (1)...(19): siRNA sense strand
aagaggaaauauuggagaa

SEQ ID NO: 110318 - RNA, 19 nt, Homo sapiens
  misc_RNA (1)...(19): siRNA sense strand
ggagcaguuuaacgaauuc

SEQ ID NO: 110319 - RNA, 19 nt, Homo sapiens
  misc_RNA (1)...(19): siRNA sense strand
gaucaggaugaguauauug

SEQ ID NO: 110320 - RNA, 19 nt, Homo sapiens
  misc_RNA (1)...(19): siRNA sense strand
uaucagaacgggagcaguu

SEQ ID NO: 110321 - RNA, 19 nt, Homo sapiens
  misc_RNA (1)...(19): siRNA sense strand
uuggagaacuggaacaugu

SEQ ID NO: 110322 - RNA, 19 nt, Homo sapiens
  misc_RNA (1)...(19): siRNA sense strand
gauagggacaaggaugaua

SEQ ID NO: 110323 - RNA, 19 nt, Homo sapiens
  misc_RNA (1)...(19): siRNA sense strand
ggaagccaagcuaccaauu

SEQ ID NO: 110324 - RNA, 19 nt, Homo sapiens
  misc_RNA (1)...(19): siRNA sense strand
gaaggaaauugugguuuug

SEQ ID NO: 110325 - RNA, 19 nt, Homo sapiens
  misc_RNA (1)...(19): siRNA sense strand
caccuaugguuacuaccua

SEQ ID NO: 110326 - RNA, 19 nt, Homo sapiens
  misc_RNA (1)...(19): siRNA sense strand
caaacaagccaccuauggu

SEQ ID NO: 110327 - RNA, 19 nt, Homo sapiens
  misc_RNA (1)...(19): siRNA sense strand
gguauaugaaucagacaaa

SEQ ID NO: 110328 - RNA, 19 nt, Homo sapiens
  misc_RNA (1)...(19): siRNA sense strand
gagaggcuagggaagauug

SEQ ID NO: 110329 - RNA, 19 nt, Homo sapiens
  misc_RNA (1)...(19): siRNA sense strand
cagaacgggagcaguuuaa

SEQ ID NO: 110330 - RNA, 19 nt, Homo sapiens
  misc_RNA (1)...(19): siRNA sense strand
ucagaacgggagcaguuua

SEQ ID NO: 110331 - RNA, 19 nt, Homo sapiens
  misc_RNA (1)...(19): siRNA sense strand
ggauccucccucaagauua

SEQ ID NO: 110332 - RNA, 19 nt, Homo sapiens
  misc_RNA (1)...(19): siRNA sense strand
cuaaagaggaaauauugga

SEQ ID NO: 110333 - RNA, 19 nt, Homo sapiens
  misc_RNA (1)...(19): siRNA sense strand
aggaugagaagcuaacuaa

SEQ ID NO: 110334 - RNA, 19 nt, Homo sapiens
  misc_RNA (1)...(19): siRNA sense strand
ggaucaaacgggugcagaa

SEQ ID NO: 110335 - RNA, 19 nt, Homo sapiens
  misc_RNA (1)...(19): siRNA sense strand
aagccaagcuaccaauuac

SEQ ID NO: 110336 - RNA, 19 nt, Homo sapiens
  misc_RNA (1)...(19): siRNA sense strand
ucagaucaucacaccuuua

SEQ ID NO: 110337 - RNA, 19 nt, Homo sapiens
  misc_RNA (1)...(19): siRNA sense strand
aacaagccaccuaugguua

SEQ ID NO: 110338 - RNA, 19 nt, Homo sapiens
  misc_RNA (1)...(19): siRNA sense strand
uugauaaugucgccaaagu

SEQ ID NO: 110339 - RNA, 19 nt, Homo sapiens
  misc_RNA (1)...(19): siRNA sense strand
ggaugagaagcuaacuaaa

SEQ ID NO: 110340 - RNA, 19 nt, Homo sapiens
  misc_RNA (1)...(19): siRNA sense strand
uccgggaucugaacaagga

SEQ ID NO: 110341 - RNA, 19 nt, Homo sapiens
  misc_RNA (1)...(19): siRNA sense strand
gaaauugugguuuuggaaa

SEQ ID NO: 110342 - RNA, 19 nt, Homo sapiens
  misc_RNA (1)...(19): siRNA sense strand
ccucaauggugaccugaca

SEQ ID NO: 110343 - RNA, 19 nt, Homo sapiens
  misc_RNA (1)...(19): siRNA sense strand
gggauggcuuugucacuac

SEQ ID NO: 110344 - RNA, 19 nt, Homo sapiens
  misc_RNA (1)...(19): siRNA sense strand
gaacggggauggguuugug

SEQ ID NO: 110345 - RNA, 19 nt, Homo sapiens
  misc_RNA (1)...(19): siRNA sense strand
gcugccacgugaugagaga

SEQ ID NO: 110346 - RNA, 19 nt, Homo sapiens
  misc_RNA (1)...(19): siRNA sense strand
uggaaacccuggaggacau

SEQ ID NO: 110347 - RNA, 19 nt, Homo sapiens
  misc_RNA (1)...(19): siRNA sense strand
ggggauggcuuugucacua

SEQ ID NO: 110348 - RNA, 19 nt, Homo sapiens
  misc_RNA (1)...(19): siRNA sense strand
caaagcugcagaccucaau

SEQ ID NO: 110349 - RNA, 19 nt, Homo sapiens
  misc_RNA (1)...(19): siRNA sense strand
acaaacaagccaccuaugg

SEQ ID NO: 110350 - RNA, 19 nt, Homo sapiens
  misc_RNA (1)...(19): siRNA sense strand
gcuaacuaaagaggaaaua

SEQ ID NO: 110351 - RNA, 19 nt, Homo sapiens
  misc_RNA (1)...(19): siRNA sense strand
guuagacaaagaugagauu

SEQ ID NO: 110352 - RNA, 19 nt, Homo sapiens
  misc_RNA (1)...(19): siRNA sense strand
gacgggaaguuagacaaag

SEQ ID NO: 110353 - RNA, 19 nt, Homo sapiens
  misc_RNA (1)...(19): siRNA sense strand
gaacgggagcaguuuaacg

SEQ ID NO: 110354 - RNA, 19 nt, Homo sapiens
  misc_RNA (1)...(19): siRNA sense strand
cgggagcaguuuaacgaau

SEQ ID NO: 110355 - RNA, 19 nt, Homo sapiens
  misc_RNA (1)...(19): siRNA sense strand
uaugguuacuaccuaggaa

SEQ ID NO: 110356 - RNA, 19 nt, Homo sapiens
  misc_RNA (1)...(19): siRNA sense strand
acgggaaguuagacaaaga

SEQ ID NO: 110357 - RNA, 19 nt, Homo sapiens
  misc_RNA (1)...(19): siRNA sense strand
uggaucaggaugaguauau

SEQ ID NO: 110358 - RNA, 19 nt, Homo sapiens
  misc_RNA (1)...(19): siRNA sense strand
auagggacaaggaugauaa

SEQ ID NO: 110359 - RNA, 19 nt, Homo sapiens
  misc_RNA (1)...(19): siRNA sense strand
cggggaagaucucacaaaa

SEQ ID NO: 110360 - RNA, 19 nt, Homo sapiens
  misc_RNA (1)...(19): siRNA sense strand
gcaucugguauaugaauca

SEQ ID NO: 110361 - RNA, 19 nt, Homo sapiens
  misc_RNA (1)...(19): siRNA sense strand
acaaggacgggaaguuaga

SEQ ID NO: 110362 - RNA, 19 nt, Homo sapiens
  misc_RNA (1)...(19): siRNA sense strand
acaaccagagcuuccagua

SEQ ID NO: 110363 - RNA, 19 nt, Homo sapiens
  misc_RNA (1)...(19): siRNA sense strand
auacaaacaagccaccuau

SEQ ID NO: 110364 - RNA, 19 nt, Homo sapiens
  misc_RNA (1)...(19): siRNA sense strand
gggaagauuguugaucgaa

SEQ ID NO: 110365 - RNA, 19 nt, Homo sapiens
  misc_RNA (1)...(19): siRNA sense strand
agaguuucaugauucuuca

SEQ ID NO: 110366 - RNA, 19 nt, Homo sapiens
  misc_RNA (1)...(19): siRNA sense strand
cuucagaucaucacaccuu

SEQ ID NO: 110367 - RNA, 19 nt, Homo sapiens
  misc_RNA (1)...(19): siRNA sense strand
cagaguuucaugauucuuc

SEQ ID NO: 110368 - RNA, 19 nt, Homo sapiens
  misc_RNA (1)...(19): siRNA sense strand
ggagaggcuagggaagauu

SEQ ID NO: 110369 - RNA, 19 nt, Homo sapiens
  misc_RNA (1)...(19): siRNA sense strand
ugaacaaggacgggaaguu

SEQ ID NO: 110370 - RNA, 19 nt, Homo sapiens
  misc_RNA (1)...(19): siRNA sense strand
ucaaacgggugcagaaaag

SEQ ID NO: 110371 - RNA, 19 nt, Homo sapiens
  misc_RNA (1)...(19): siRNA sense strand
caaccagagcuuccaguac

SEQ ID NO: 110372 - RNA, 19 nt, Homo sapiens
  misc_RNA (1)...(19): siRNA sense strand
cuggaaggauuaugauagg

SEQ ID NO: 110373 - RNA, 19 nt, Homo sapiens
  misc_RNA (1)...(19): siRNA sense strand
uuucaugauucuucagauc

SEQ ID NO: 110374 - RNA, 19 nt, Homo sapiens
  misc_RNA (1)...(19): siRNA sense strand
gagaacuggaacauguuug

SEQ ID NO: 110375 - RNA, 19 nt, Homo sapiens
  misc_RNA (1)...(19): siRNA sense strand
caaagucuggaaggauuau

SEQ ID NO: 110376 - RNA, 19 nt, Homo sapiens
  misc_RNA (1)...(19): siRNA sense strand
gcugaaaaccuggaucaaa

SEQ ID NO: 110377 - RNA, 19 nt, Homo sapiens
  misc_RNA (1)...(19): siRNA sense strand
aauggugaccugacagcua

SEQ ID NO: 110378 - RNA, 19 nt, Homo sapiens
  misc_RNA (1)...(19): siRNA sense strand
guuugaacauaugaaggaa

SEQ ID NO: 110379 - RNA, 19 nt, Homo sapiens
  misc_RNA (1)...(19): siRNA sense strand
aaauauuggagaacuggaa

SEQ ID NO: 110380 - RNA, 19 nt, Homo sapiens
  misc_RNA (1)...(19): siRNA sense strand
agacuggguuuuaucagaa

SEQ ID NO: 110381 - RNA, 19 nt, Homo sapiens
  misc_RNA (1)...(19): siRNA sense strand
caagaacggggauggguuu

SEQ ID NO: 110382 - RNA, 19 nt, Homo sapiens
  misc_RNA (1)...(19): siRNA sense strand
gcagacagcuccaugauga

SEQ ID NO: 110383 - RNA, 19 nt, Homo sapiens
  misc_RNA (1)...(19): siRNA sense strand
ucaagaagcuuuagaagaa

SEQ ID NO: 110384 - RNA, 19 nt, Homo sapiens
  misc_RNA (1)...(19): siRNA sense strand
uuaggaagcuucacuuaaa

SEQ ID NO: 110385 - RNA, 19 nt, Homo sapiens
  misc_RNA (1)...(19): siRNA sense strand
aggaagauguggaugaaua

SEQ ID NO: 110386 - RNA, 19 nt, Homo sapiens
  misc_RNA (1)...(19): siRNA sense strand
gacaagaagcgauuugaaa

SEQ ID NO: 110387 - RNA, 19 nt, Homo sapiens
  misc_RNA (1)...(19): siRNA sense strand
ccagugaagccacagauua

SEQ ID NO: 110388 - RNA, 19 nt, Homo sapiens
  misc_RNA (1)...(19): siRNA sense strand
gauguaugaucgugugauu

SEQ ID NO: 110389 - RNA, 19 nt, Homo sapiens
  misc_RNA (1)...(19): siRNA sense strand
gaacacugcucuggaugau

SEQ ID NO: 110390 - RNA, 19 nt, Homo sapiens
  misc_RNA (1)...(19): siRNA sense strand
cagaauggauacuuguuga

SEQ ID NO: 110391 - RNA, 19 nt, Homo sapiens
  misc_RNA (1)...(19): siRNA sense strand
ggugauggauuuguuaguu

SEQ ID NO: 110392 - RNA, 19 nt, Homo sapiens
  misc_RNA (1)...(19): siRNA sense strand
ugacuugggaugaauauaa

SEQ ID NO: 110393 - RNA, 19 nt, Homo sapiens
  misc_RNA (1)...(19): siRNA sense strand
ggaugaauauguuaaacuc

SEQ ID NO: 110394 - RNA, 19 nt, Homo sapiens
  misc_RNA (1)...(19): siRNA sense strand
ggauccaacugcaaaugaa

SEQ ID NO: 110395 - RNA, 19 nt, Homo sapiens
  misc_RNA (1)...(19): siRNA sense strand
ggacucagauggcuuucuc

SEQ ID NO: 110396 - RNA, 19 nt, Homo sapiens
  misc_RNA (1)...(19): siRNA sense strand
ggaggcgcuucaucuaauu

SEQ ID NO: 110397 - RNA, 19 nt, Homo sapiens
  misc_RNA (1)...(19): siRNA sense strand
ggauucaggucccgguuug

SEQ ID NO: 110398 - RNA, 19 nt, Homo sapiens
  misc_RNA (1)...(19): siRNA sense strand
ggacaagaagcgauuugaa

SEQ ID NO: 110399 - RNA, 19 nt, Homo sapiens
  misc_RNA (1)...(19): siRNA sense strand
aaaugaagauccagaaugg

SEQ ID NO: 110400 - RNA, 19 nt, Homo sapiens
  misc_RNA (1)...(19): siRNA sense strand
gugauggauuuguuaguuu

SEQ ID NO: 110401 - RNA, 19 nt, Homo sapiens
  misc_RNA (1)...(19): siRNA sense strand
ggauucagaugucuuuuaa

SEQ ID NO: 110402 - RNA, 19 nt, Homo sapiens
  misc_RNA (1)...(19): siRNA sense strand
ccaggaagauguggaugaa

SEQ ID NO: 110403 - RNA, 19 nt, Homo sapiens
  misc_RNA (1)...(19): siRNA sense strand
gaggaggcgcuucaucuaa

SEQ ID NO: 110404 - RNA, 19 nt, Homo sapiens
  misc_RNA (1)...(19): siRNA sense strand
caaaugaagauccagaaug

SEQ ID NO: 110405 - RNA, 19 nt, Homo sapiens
  misc_RNA (1)...(19): siRNA sense strand
ggauacuuguugagaaaga

SEQ ID NO: 110406 - RNA, 19 nt, Homo sapiens
  misc_RNA (1)...(19): siRNA sense strand
cgugaaugauuaugacaaa

SEQ ID NO: 110407 - RNA, 19 nt, Homo sapiens
  misc_RNA (1)...(19): siRNA sense strand
ugagaacacugcucuggau

SEQ ID NO: 110408 - RNA, 19 nt, Homo sapiens
  misc_RNA (1)...(19): siRNA sense strand
guucauggauucagauguc

SEQ ID NO: 110409 - RNA, 19 nt, Homo sapiens
  misc_RNA (1)...(19): siRNA sense strand
ggaagauguggaugaauau

SEQ ID NO: 110410 - RNA, 19 nt, Homo sapiens
  misc_RNA (1)...(19): siRNA sense strand
gugauugacuuugaugaga

SEQ ID NO: 110411 - RNA, 19 nt, Homo sapiens
  misc_RNA (1)...(19): siRNA sense strand
cagauggcuuucucacuga

SEQ ID NO: 110412 - RNA, 19 nt, Homo sapiens
  misc_RNA (1)...(19): siRNA sense strand
gaauggauacuuguugaga

SEQ ID NO: 110413 - RNA, 19 nt, Homo sapiens
  misc_RNA (1)...(19): siRNA sense strand
uaaaggacaagaagcgauu

SEQ ID NO: 110414 - RNA, 19 nt, Homo sapiens
  misc_RNA (1)...(19): siRNA sense strand
gcaaaugaagauccagaau

SEQ ID NO: 110415 - RNA, 19 nt, Homo sapiens
  misc_RNA (1)...(19): siRNA sense strand
gugaugauacugugacuug

SEQ ID NO: 110416 - RNA, 19 nt, Homo sapiens
  misc_RNA (1)...(19): siRNA sense strand
ugauugacuuugaugagaa

SEQ ID NO: 110417 - RNA, 19 nt, Homo sapiens
  misc_RNA (1)...(19): siRNA sense strand
agauguggaugaauauguu

SEQ ID NO: 110418 - RNA, 19 nt, Homo sapiens
  misc_RNA (1)...(19): siRNA sense strand
ugauggauuuguuaguuug

SEQ ID NO: 110419 - RNA, 19 nt, Homo sapiens
  misc_RNA (1)...(19): siRNA sense strand
ugcaggcgaucauaaagaa

SEQ ID NO: 110420 - RNA, 19 nt, Homo sapiens
  misc_RNA (1)...(19): siRNA sense strand
uaaagaaaaucgacuugga

SEQ ID NO: 110421 - RNA, 19 nt, Homo sapiens
  misc_RNA (1)...(19): siRNA sense strand
gauuacaggugggauccaa

SEQ ID NO: 110422 - RNA, 19 nt, Homo sapiens
  misc_RNA (1)...(19): siRNA sense strand
gauguggaugaauauguua

SEQ ID NO: 110423 - RNA, 19 nt, Homo sapiens
  misc_RNA (1)...(19): siRNA sense strand
ugagcauccugaagaaguu

SEQ ID NO: 110424 - RNA, 19 nt, Homo sapiens
  misc_RNA (1)...(19): siRNA sense strand
uguaugaucgugugauuga

SEQ ID NO: 110425 - RNA, 19 nt, Homo sapiens
  misc_RNA (1)...(19): siRNA sense strand
gggauccaacugcaaauga

SEQ ID NO: 110426 - RNA, 19 nt, Homo sapiens
  misc_RNA (1)...(19): siRNA sense strand
ggaagcuucacuuaaagga

SEQ ID NO: 110427 - RNA, 19 nt, Homo sapiens
  misc_RNA (1)...(19): siRNA sense strand
gaaaaucgacuuggacuca

SEQ ID NO: 110428 - RNA, 19 nt, Homo sapiens
  misc_RNA (1)...(19): siRNA sense strand
ccagaauggauacuuguug

SEQ ID NO: 110429 - RNA, 19 nt, Homo sapiens
  misc_RNA (1)...(19): siRNA sense strand
ggugggauccaacugcaaa

SEQ ID NO: 110430 - RNA, 19 nt, Homo sapiens
  misc_RNA (1)...(19): siRNA sense strand
ggucccgguuugagucuug

SEQ ID NO: 110431 - RNA, 19 nt, Homo sapiens
  misc_RNA (1)...(19): siRNA sense strand
cagugaagccacagauuau

SEQ ID NO: 110432 - RNA, 19 nt, Homo sapiens
  misc_RNA (1)...(19): siRNA sense strand
aggaggcgcuucaucuaau

SEQ ID NO: 110433 - RNA, 19 nt, Homo sapiens
  misc_RNA (1)...(19): siRNA sense strand
aauggauacuuguugagaa

SEQ ID NO: 110434 - RNA, 19 nt, Homo sapiens
  misc_RNA (1)...(19): siRNA sense strand
gauuauaugacggaauuug

SEQ ID NO: 110435 - RNA, 19 nt, Homo sapiens
  misc_RNA (1)...(19): siRNA sense strand
gaagauguggaugaauaug

SEQ ID NO: 110436 - RNA, 19 nt, Homo sapiens
  misc_RNA (1)...(19): siRNA sense strand
uaggaagcuucacuuaaag

SEQ ID NO: 110437 - RNA, 19 nt, Homo sapiens
  misc_RNA (1)...(19): siRNA sense strand
auggauacuuguugagaaa

SEQ ID NO: 110438 - RNA, 19 nt, Homo sapiens
  misc_RNA (1)...(19): siRNA sense strand
gacuugggaugaauauaac

SEQ ID NO: 110439 - RNA, 19 nt, Homo sapiens
  misc_RNA (1)...(19): siRNA sense strand
agacugcaggcgaucauaa

SEQ ID NO: 110440 - RNA, 19 nt, Homo sapiens
  misc_RNA (1)...(19): siRNA sense strand
caagaagcuuuagaagaac

SEQ ID NO: 110441 - RNA, 19 nt, Homo sapiens
  misc_RNA (1)...(19): siRNA sense strand
gacugcaggcgaucauaaa

SEQ ID NO: 110442 - RNA, 19 nt, Homo sapiens
  misc_RNA (1)...(19): siRNA sense strand
aaaucgacuuggacucaga

SEQ ID NO: 110443 - RNA, 19 nt, Homo sapiens
  misc_RNA (1)...(19): siRNA sense strand
agaggaggcgcuucaucua

SEQ ID NO: 110444 - RNA, 19 nt, Homo sapiens
  misc_RNA (1)...(19): siRNA sense strand
cauggauucagaugucuuu

SEQ ID NO: 110445 - RNA, 19 nt, Homo sapiens
  misc_RNA (1)...(19): siRNA sense strand
ucacuuaaaggacaagaag

SEQ ID NO: 110446 - RNA, 19 nt, Homo sapiens
  misc_RNA (1)...(19): siRNA sense strand
uuuaggaagcuucacuuaa

SEQ ID NO: 110447 - RNA, 19 nt, Homo sapiens
  misc_RNA (1)...(19): siRNA sense strand
gcaggcgaucauaaagaaa

SEQ ID NO: 110448 - RNA, 19 nt, Homo sapiens
  misc_RNA (1)...(19): siRNA sense strand
cauucaagaagcuuuagaa

SEQ ID NO: 110449 - RNA, 19 nt, Homo sapiens
  misc_RNA (1)...(19): siRNA sense strand
ugucauucaagaagcuuua

SEQ ID NO: 110450 - RNA, 19 nt, Homo sapiens
  misc_RNA (1)...(19): siRNA sense strand
uaaacucggccacgaagag

SEQ ID NO: 110451 - RNA, 19 nt, Homo sapiens
  misc_RNA (1)...(19): siRNA sense strand
caagaggaggcgcuucauc

SEQ ID NO: 110452 - RNA, 19 nt, Homo sapiens
  misc_RNA (1)...(19): siRNA sense strand
agaaagacagauucgugaa

SEQ ID NO: 110453 - RNA, 19 nt, Homo sapiens
  misc_RNA (1)...(19): siRNA sense strand
gauugacuuugaugagaac

SEQ ID NO: 110454 - RNA, 19 nt, Homo sapiens
  misc_RNA (1)...(19): siRNA sense strand
aacccggacuuguuucuca

SEQ ID NO: 110455 - RNA, 19 nt, Homo sapiens
  misc_RNA (1)...(19): siRNA sense strand
aagaagcuuuagaagaaca

SEQ ID NO: 110456 - RNA, 19 nt, Homo sapiens
  misc_RNA (1)...(19): siRNA sense strand
gaucgugugauugacuuug

SEQ ID NO: 110457 - RNA, 19 nt, Homo sapiens
  misc_RNA (1)...(19): siRNA sense strand
ucagaugucuuuuaagcau

SEQ ID NO: 110458 - RNA, 19 nt, Homo sapiens
  misc_RNA (1)...(19): siRNA sense strand
aauggugauggauuuguua

SEQ ID NO: 110459 - RNA, 19 nt, Homo sapiens
  misc_RNA (1)...(19): siRNA sense strand
ccugaagaaguugauuaua

SEQ ID NO: 110460 - RNA, 19 nt, Homo sapiens
  misc_RNA (1)...(19): siRNA sense strand
acaagaagcgauuugaaaa

SEQ ID NO: 110461 - RNA, 19 nt, Homo sapiens
  misc_RNA (1)...(19): siRNA sense strand
agaacacugcucuggauga

SEQ ID NO: 110462 - RNA, 19 nt, Homo sapiens
  misc_RNA (1)...(19): siRNA sense strand
cacaagaggaggcgcuuca

SEQ ID NO: 110463 - RNA, 19 nt, Homo sapiens
  misc_RNA (1)...(19): siRNA sense strand
cuuuaggaagcuucacuua

SEQ ID NO: 110464 - RNA, 19 nt, Homo sapiens
  misc_RNA (1)...(19): siRNA sense strand
gaagaugacuuuaugugua

SEQ ID NO: 110465 - RNA, 19 nt, Homo sapiens
  misc_RNA (1)...(19): siRNA sense strand
guaaauagcucccguaaag

SEQ ID NO: 110466 - RNA, 19 nt, Homo sapiens
  misc_RNA (1)...(19): siRNA sense strand
ggaauuaauuggccugaua

SEQ ID NO: 110467 - RNA, 19 nt, Homo sapiens
  misc_RNA (1)...(19): siRNA sense strand
gcaugaagaugaagaguuu

SEQ ID NO: 110468 - RNA, 19 nt, Homo sapiens
  misc_RNA (1)...(19): siRNA sense strand
ggacacauauuauuugaug

SEQ ID NO: 110469 - RNA, 19 nt, Homo sapiens
  misc_RNA (1)...(19): siRNA sense strand
aaacugagaugaagaaaga

SEQ ID NO: 110470 - RNA, 19 nt, Homo sapiens
  misc_RNA (1)...(19): siRNA sense strand
gaggaugacuucaaacaaa

SEQ ID NO: 110471 - RNA, 19 nt, Homo sapiens
  misc_RNA (1)...(19): siRNA sense strand
uaaagaggaugacuucaaa

SEQ ID NO: 110472 - RNA, 19 nt, Homo sapiens
  misc_RNA (1)...(19): siRNA sense strand
gaaagcagccuucacaaga

SEQ ID NO: 110473 - RNA, 19 nt, Homo sapiens
  misc_RNA (1)...(19): siRNA sense strand
guucuaagcuggcaauuau

SEQ ID NO: 110474 - RNA, 19 nt, Homo sapiens
  misc_RNA (1)...(19): siRNA sense strand
agaaagagcuacaguccua

SEQ ID NO: 110475 - RNA, 19 nt, Homo sapiens
  misc_RNA (1)...(19): siRNA sense strand
ggacaagucagaucucuuu

SEQ ID NO: 110476 - RNA, 19 nt, Homo sapiens
  misc_RNA (1)...(19): siRNA sense strand
gcucugggcuccaaagaaa

SEQ ID NO: 110477 - RNA, 19 nt, Homo sapiens
  misc_RNA (1)...(19): siRNA sense strand
gaggagacguugcagguaa

SEQ ID NO: 110478 - RNA, 19 nt, Homo sapiens
  misc_RNA (1)...(19): siRNA sense strand
ugaagaagaugacuuuaug

SEQ ID NO: 110479 - RNA, 19 nt, Homo sapiens
  misc_RNA (1)...(19): siRNA sense strand
guccaaagaucuaauaaga

SEQ ID NO: 110480 - RNA, 19 nt, Homo sapiens
  misc_RNA (1)...(19): siRNA sense strand
ggagcagccucuucaguaa

SEQ ID NO: 110481 - RNA, 19 nt, Homo sapiens
  misc_RNA (1)...(19): siRNA sense strand
ccaaagaucuaauaagaag

SEQ ID NO: 110482 - RNA, 19 nt, Homo sapiens
  misc_RNA (1)...(19): siRNA sense strand
gaagauggccuguugaauc

SEQ ID NO: 110483 - RNA, 19 nt, Homo sapiens
  misc_RNA (1)...(19): siRNA sense strand
gaccuggccuugcauauga

SEQ ID NO: 110484 - RNA, 19 nt, Homo sapiens
  misc_RNA (1)...(19): siRNA sense strand
gcaagaaauccaaguauga

SEQ ID NO: 110485 - RNA, 19 nt, Homo sapiens
  misc_RNA (1)...(19): siRNA sense strand
acacuaagaccaagaauaa

SEQ ID NO: 110486 - RNA, 19 nt, Homo sapiens
  misc_RNA (1)...(19): siRNA sense strand
guaaagcauuaaccuauga

SEQ ID NO: 110487 - RNA, 19 nt, Homo sapiens
  misc_RNA (1)...(19): siRNA sense strand
gaaacgcacuaauuaucaa

SEQ ID NO: 110488 - RNA, 19 nt, Homo sapiens
  misc_RNA (1)...(19): siRNA sense strand
gcacuaauuaucaagcuua

SEQ ID NO: 110489 - RNA, 19 nt, Homo sapiens
  misc_RNA (1)...(19): siRNA sense strand
gauuaucugucgcuucuaa

SEQ ID NO: 110490 - RNA, 19 nt, Homo sapiens
  misc_RNA (1)...(19): siRNA sense strand
gaacaauaccagcaucaaa

SEQ ID NO: 110491 - RNA, 19 nt, Homo sapiens
  misc_RNA (1)...(19): siRNA sense strand
caagauaucagacagguuu

SEQ ID NO: 110492 - RNA, 19 nt, Homo sapiens
  misc_RNA (1)...(19): siRNA sense strand
gaaaagaaacgcacuaauu

SEQ ID NO: 110493 - RNA, 19 nt, Homo sapiens
  misc_RNA (1)...(19): siRNA sense strand
ggaaggccuuauauuugua

SEQ ID NO: 110494 - RNA, 19 nt, Homo sapiens
  misc_RNA (1)...(19): siRNA sense strand
ggaagcaaaguaaauauga

SEQ ID NO: 110495 - RNA, 19 nt, Homo sapiens
  misc_RNA (1)...(19): siRNA sense strand
gaaagaccaagaugcuaua

SEQ ID NO: 110496 - RNA, 19 nt, Homo sapiens
  misc_RNA (1)...(19): siRNA sense strand
ucacaagagcuuacaauaa

SEQ ID NO: 110497 - RNA, 19 nt, Homo sapiens
  misc_RNA (1)...(19): siRNA sense strand
gaagaaagaguccaaacug

SEQ ID NO: 110498 - RNA, 19 nt, Homo sapiens
  misc_RNA (1)...(19): siRNA sense strand
uaucgaagcuacuuaaauc

SEQ ID NO: 110499 - RNA, 19 nt, Homo sapiens
  misc_RNA (1)...(19): siRNA sense strand
gcaguugcaugaagaugaa

SEQ ID NO: 110500 - RNA, 19 nt, Homo sapiens
  misc_RNA (1)...(19): siRNA sense strand
agaaacagaugaagaagau

SEQ ID NO: 110501 - RNA, 19 nt, Homo sapiens
  misc_RNA (1)...(19): siRNA sense strand
agaccaagaugcuauagaa

SEQ ID NO: 110502 - RNA, 19 nt, Homo sapiens
  misc_RNA (1)...(19): siRNA sense strand
ggagacugcucacauguca

SEQ ID NO: 110503 - RNA, 19 nt, Homo sapiens
  misc_RNA (1)...(19): siRNA sense strand
gaaguaaagcauuaaccua

SEQ ID NO: 110504 - RNA, 19 nt, Homo sapiens
  misc_RNA (1)...(19): siRNA sense strand
ggccaagucucuaauugaa

SEQ ID NO: 110505 - RNA, 19 nt, Homo sapiens
  misc_RNA (1)...(19): siRNA sense strand
cagcacaaguuucagauga

SEQ ID NO: 110506 - RNA, 19 nt, Homo sapiens
  misc_RNA (1)...(19): siRNA sense strand
gauuaagggugcuaugaug

SEQ ID NO: 110507 - RNA, 19 nt, Homo sapiens
  misc_RNA (1)...(19): siRNA sense strand
gagaauaucauggaaauca

SEQ ID NO: 110508 - RNA, 19 nt, Homo sapiens
  misc_RNA (1)...(19): siRNA sense strand
gaccagagcugugccaaca

SEQ ID NO: 110509 - RNA, 19 nt, Homo sapiens
  misc_RNA (1)...(19): siRNA sense strand
ucuaagggaugcacuugua

SEQ ID NO: 110510 - RNA, 19 nt, Homo sapiens
  misc_RNA (1)...(19): siRNA sense strand
ggacuguaaacauggauua

SEQ ID NO: 110511 - RNA, 19 nt, Homo sapiens
  misc_RNA (1)...(19): siRNA sense strand
gcaauuacagcuugaugaa

SEQ ID NO: 110512 - RNA, 19 nt, Homo sapiens
  misc_RNA (1)...(19): siRNA sense strand
gcacucgucuacaggcaaa

SEQ ID NO: 110513 - RNA, 19 nt, Homo sapiens
  misc_RNA (1)...(19): siRNA sense strand
aaacaaagucugaugaaga

SEQ ID NO: 110514 - RNA, 19 nt, Homo sapiens
  misc_RNA (1)...(19): siRNA sense strand
ccagagcugugccaacaaa

SEQ ID NO: 110515 - RNA, 19 nt, Homo sapiens
  misc_RNA (1)...(19): siRNA sense strand
ggaaguguccaaagaucua

SEQ ID NO: 110516 - RNA, 19 nt, Homo sapiens
  misc_RNA (1)...(19): siRNA sense strand
caaaaggacuguaaacaug

SEQ ID NO: 110517 - RNA, 19 nt, Homo sapiens
  misc_RNA (1)...(19): siRNA sense strand
cauaugcgauggugaccua

SEQ ID NO: 110518 - RNA, 19 nt, Homo sapiens
  misc_RNA (1)...(19): siRNA sense strand
gcaagugacacccggagua

SEQ ID NO: 110519 - RNA, 19 nt, Homo sapiens
  misc_RNA (1)...(19): siRNA sense strand
guaaagaggaugacuucaa

SEQ ID NO: 110520 - RNA, 19 nt, Homo sapiens
  misc_RNA (1)...(19): siRNA sense strand
gaauuaauuggccugauaa

SEQ ID NO: 110521 - RNA, 19 nt, Homo sapiens
  misc_RNA (1)...(19): siRNA sense strand
gcaaagaaaggaauaaagg

SEQ ID NO: 110522 - RNA, 19 nt, Homo sapiens
  misc_RNA (1)...(19): siRNA sense strand
aacaaagucugaugaagaa

SEQ ID NO: 110523 - RNA, 19 nt, Homo sapiens
  misc_RNA (1)...(19): siRNA sense strand
ggaguaauaccaaguggaa

SEQ ID NO: 110524 - RNA, 19 nt, Homo sapiens
  misc_RNA (1)...(19): siRNA sense strand
gaccaagaauaagccuuua

SEQ ID NO: 110525 - RNA, 19 nt, Homo sapiens
  misc_RNA (1)...(19): siRNA sense strand
gaagaucuacaaauaguca

SEQ ID NO: 110526 - RNA, 19 nt, Homo sapiens
  misc_RNA (1)...(19): siRNA sense strand
ugaugaagauggccuguug

SEQ ID NO: 110527 - RNA, 19 nt, Homo sapiens
  misc_RNA (1)...(19): siRNA sense strand
uggcaaaccuagucccuuu

SEQ ID NO: 110528 - RNA, 19 nt, Homo sapiens
  misc_RNA (1)...(19): siRNA sense strand
ggcaagaaauccaaguaug

SEQ ID NO: 110529 - RNA, 19 nt, Homo sapiens
  misc_RNA (1)...(19): siRNA sense strand
gagaauggaagaucuacaa

SEQ ID NO: 110530 - RNA, 19 nt, Homo sapiens
  misc_RNA (1)...(19): siRNA sense strand
gugaaacaguaaagaagaa

SEQ ID NO: 110531 - RNA, 19 nt, Homo sapiens
  misc_RNA (1)...(19): siRNA sense strand
gcucucugguucauuauug

SEQ ID NO: 110532 - RNA, 19 nt, Homo sapiens
  misc_RNA (1)...(19): siRNA sense strand
cagcaaggcuaggaauuug

SEQ ID NO: 110533 - RNA, 19 nt, Homo sapiens
  misc_RNA (1)...(19): siRNA sense strand
gaggccaagucucuaauug

SEQ ID NO: 110534 - RNA, 19 nt, Homo sapiens
  misc_RNA (1)...(19): siRNA sense strand
gaagaugguggcaagcaaa

SEQ ID NO: 110535 - RNA, 19 nt, Homo sapiens
  misc_RNA (1)...(19): siRNA sense strand
ggccuuauauuuguaauca

SEQ ID NO: 110536 - RNA, 19 nt, Homo sapiens
  misc_RNA (1)...(19): siRNA sense strand
aauuacagcuugaugaaga

SEQ ID NO: 110537 - RNA, 19 nt, Homo sapiens
  misc_RNA (1)...(19): siRNA sense strand
uggaaggccuuauauuugu

SEQ ID NO: 110538 - RNA, 19 nt, Homo sapiens
  misc_RNA (1)...(19): siRNA sense strand
gcuaugaugucuauugcau

SEQ ID NO: 110539 - RNA, 19 nt, Homo sapiens
  misc_RNA (1)...(19): siRNA sense strand
gcagguggcugaggagaca

SEQ ID NO: 110540 - RNA, 19 nt, Homo sapiens
  misc_RNA (1)...(19): siRNA sense strand
caggaaaugucagcaagaa

SEQ ID NO: 110541 - RNA, 19 nt, Homo sapiens
  misc_RNA (1)...(19): siRNA sense strand
gaugaagaguuugccagaa

SEQ ID NO: 110542 - RNA, 19 nt, Homo sapiens
  misc_RNA (1)...(19): siRNA sense strand
ucagacagguuuuacauaa

SEQ ID NO: 110543 - RNA, 19 nt, Homo sapiens
  misc_RNA (1)...(19): siRNA sense strand
cggaaauucuuuggaguaa

SEQ ID NO: 110544 - RNA, 19 nt, Homo sapiens
  misc_RNA (1)...(19): siRNA sense strand
caagaaauccaaguaugaa

SEQ ID NO: 110545 - RNA, 19 nt, Homo sapiens
  misc_RNA (1)...(19): siRNA sense strand
gauggccuguugaaucuga

SEQ ID NO: 110546 - RNA, 19 nt, Homo sapiens
  misc_RNA (1)...(19): siRNA sense strand
cuacuuaaaucgagaaggu

SEQ ID NO: 110547 - RNA, 19 nt, Homo sapiens
  misc_RNA (1)...(19): siRNA sense strand
cagcuucccugguguguca

SEQ ID NO: 110548 - RNA, 19 nt, Homo sapiens
  misc_RNA (1)...(19): siRNA sense strand
ggacauucggaaauucuuu

SEQ ID NO: 110549 - RNA, 19 nt, Homo sapiens
  misc_RNA (1)...(19): siRNA sense strand
gggaagcacucgucuacag

SEQ ID NO: 110550 - RNA, 19 nt, Homo sapiens
  misc_RNA (1)...(19): siRNA sense strand
cuaggaauuuggcugauga

SEQ ID NO: 110551 - RNA, 19 nt, Homo sapiens
  misc_RNA (1)...(19): siRNA sense strand
gaauaaaggaaaucaaggu

SEQ ID NO: 110552 - RNA, 19 nt, Homo sapiens
  misc_RNA (1)...(19): siRNA sense strand
aaacagaugaagaagauga

SEQ ID NO: 110553 - RNA, 19 nt, Homo sapiens
  misc_RNA (1)...(19): siRNA sense strand
aaaugaagaugacucucaa

SEQ ID NO: 110554 - RNA, 19 nt, Homo sapiens
  misc_RNA (1)...(19): siRNA sense strand
aggcaaacaugaucguauu

SEQ ID NO: 110555 - RNA, 19 nt, Homo sapiens
  misc_RNA (1)...(19): siRNA sense strand
gcacgaaguaaagcauuaa

SEQ ID NO: 110556 - RNA, 19 nt, Homo sapiens
  misc_RNA (1)...(19): siRNA sense strand
gaacugaaugcaagugaca

SEQ ID NO: 110557 - RNA, 19 nt, Homo sapiens
  misc_RNA (1)...(19): siRNA sense strand
gaugaggccaagucucuaa

SEQ ID NO: 110558 - RNA, 19 nt, Homo sapiens
  misc_RNA (1)...(19): siRNA sense strand
gagaggcaguugcaugaag

SEQ ID NO: 110559 - RNA, 19 nt, Homo sapiens
  misc_RNA (1)...(19): siRNA sense strand
gagucuggauuaaaugaug

SEQ ID NO: 110560 - RNA, 19 nt, Homo sapiens
  misc_RNA (1)...(19): siRNA sense strand
uggaagaucuacaaauagu

SEQ ID NO: 110561 - RNA, 19 nt, Homo sapiens
  misc_RNA (1)...(19): siRNA sense strand
gaauggaagaucuacaaau

SEQ ID NO: 110562 - RNA, 19 nt, Homo sapiens
  misc_RNA (1)...(19): siRNA sense strand
uaaaugaagaugacucuca

SEQ ID NO: 110563 - RNA, 19 nt, Homo sapiens
  misc_RNA (1)...(19): siRNA sense strand
ccaagaugcuauagaaacu

SEQ ID NO: 110564 - RNA, 19 nt, Homo sapiens
  misc_RNA (1)...(19): siRNA sense strand
ccaaggacaugaagaacaa

SEQ ID NO: 110565 - RNA, 19 nt, Homo sapiens
  misc_RNA (1)...(19): siRNA sense strand
ucaagaaggucaagucaca

SEQ ID NO: 110566 - RNA, 19 nt, Homo sapiens
  misc_RNA (1)...(19): siRNA sense strand
uggagaagcugcugguuca

SEQ ID NO: 110567 - RNA, 19 nt, Homo sapiens
  misc_RNA (1)...(19): siRNA sense strand
ggacucguacccucgcuuu

SEQ ID NO: 110568 - RNA, 19 nt, Homo sapiens
  misc_RNA (1)...(19): siRNA sense strand
gcuucgaccuggcacagaa

SEQ ID NO: 110569 - RNA, 19 nt, Homo sapiens
  misc_RNA (1)...(19): siRNA sense strand
agaagcugcugguucacaa

SEQ ID NO: 110570 - RNA, 19 nt, Homo sapiens
  misc_RNA (1)...(19): siRNA sense strand
gugaggagaaucuggaguu

SEQ ID NO: 110571 - RNA, 19 nt, Homo sapiens
  misc_RNA (1)...(19): siRNA sense strand
gaagcugcugguucacaaa

SEQ ID NO: 110572 - RNA, 19 nt, Homo sapiens
  misc_RNA (1)...(19): siRNA sense strand
cauccaaggccaagaagau

SEQ ID NO: 110573 - RNA, 19 nt, Homo sapiens
  misc_RNA (1)...(19): siRNA sense strand
gcugcugguucacaaauac

SEQ ID NO: 110574 - RNA, 19 nt, Homo sapiens
  misc_RNA (1)...(19): siRNA sense strand
ucacaaauacggguuagca

SEQ ID NO: 110575 - RNA, 19 nt, Homo sapiens
  misc_RNA (1)...(19): siRNA sense strand
cuuauuaaccagaagaaga

SEQ ID NO: 110576 - RNA, 19 nt, Homo sapiens
  misc_RNA (1)...(19): siRNA sense strand
cauucaagcccaccucaga

SEQ ID NO: 110577 - RNA, 19 nt, Homo sapiens
  misc_RNA (1)...(19): siRNA sense strand
ugaggagaaucuggaguuc

SEQ ID NO: 110578 - RNA, 19 nt, Homo sapiens
  misc_RNA (1)...(19): siRNA sense strand
gggcaaggcagacaaaaug

SEQ ID NO: 110579 - RNA, 19 nt, Homo sapiens
  misc_RNA (1)...(19): siRNA sense strand
caucuucgggcucauggaa

SEQ ID NO: 110580 - RNA, 19 nt, Homo sapiens
  misc_RNA (1)...(19): siRNA sense strand
gccaaggacaugaagaaca

SEQ ID NO: 110581 - RNA, 19 nt, Homo sapiens
  misc_RNA (1)...(19): siRNA sense strand
ugaguucagugaggagaau

SEQ ID NO: 110582 - RNA, 19 nt, Homo sapiens
  misc_RNA (1)...(19): siRNA sense strand
gagaagcugcugguucaca

SEQ ID NO: 110583 - RNA, 19 nt, Homo sapiens
  misc_RNA (1)...(19): siRNA sense strand
ggaccuuauuaaccagaag

SEQ ID NO: 110584 - RNA, 19 nt, Homo sapiens
  misc_RNA (1)...(19): siRNA sense strand
gggagcacaccaaggacaa

SEQ ID NO: 110585 - RNA, 19 nt, Homo sapiens
  misc_RNA (1)...(19): siRNA sense strand
gaccucuaccuggaccuua

SEQ ID NO: 110586 - RNA, 19 nt, Homo sapiens
  misc_RNA (1)...(19): siRNA sense strand
gaccuuauuaaccagaaga

SEQ ID NO: 110587 - RNA, 19 nt, Homo sapiens
  misc_RNA (1)...(19): siRNA sense strand
ccaaggacaugaagaacaa

SEQ ID NO: 110588 - RNA, 19 nt, Homo sapiens
  misc_RNA (1)...(19): siRNA sense strand
ucaagaaggucaagucaca

SEQ ID NO: 110589 - RNA, 19 nt, Homo sapiens
  misc_RNA (1)...(19): siRNA sense strand
uggagaagcugcugguuca

SEQ ID NO: 110590 - RNA, 19 nt, Homo sapiens
  misc_RNA (1)...(19): siRNA sense strand
ggacucguacccucgcuuu

SEQ ID NO: 110591 - RNA, 19 nt, Homo sapiens
  misc_RNA (1)...(19): siRNA sense strand
gcuucgaccuggcacagaa

SEQ ID NO: 110592 - RNA, 19 nt, Homo sapiens
  misc_RNA (1)...(19): siRNA sense strand
agaagcugcugguucacaa

SEQ ID NO: 110593 - RNA, 19 nt, Homo sapiens
  misc_RNA (1)...(19): siRNA sense strand
gugaggagaaucuggaguu

SEQ ID NO: 110594 - RNA, 19 nt, Homo sapiens
  misc_RNA (1)...(19): siRNA sense strand
gaagcugcugguucacaaa

SEQ ID NO: 110595 - RNA, 19 nt, Homo sapiens
  misc_RNA (1)...(19): siRNA sense strand
cauccaaggccaagaagau

SEQ ID NO: 110596 - RNA, 19 nt, Homo sapiens
  misc_RNA (1)...(19): siRNA sense strand
gcugcugguucacaaauac

SEQ ID NO: 110597 - RNA, 19 nt, Homo sapiens
  misc_RNA (1)...(19): siRNA sense strand
ucacaaauacggguuagca

SEQ ID NO: 110598 - RNA, 19 nt, Homo sapiens
  misc_RNA (1)...(19): siRNA sense strand
cuuauuaaccagaagaaga

SEQ ID NO: 110599 - RNA, 19 nt, Homo sapiens
  misc_RNA (1)...(19): siRNA sense strand
cauucaagcccaccucaga

SEQ ID NO: 110600 - RNA, 19 nt, Homo sapiens
  misc_RNA (1)...(19): siRNA sense strand
ugaggagaaucuggaguuc

SEQ ID NO: 110601 - RNA, 19 nt, Homo sapiens
  misc_RNA (1)...(19): siRNA sense strand
gggcaaggcagacaaaaug

SEQ ID NO: 110602 - RNA, 19 nt, Homo sapiens
  misc_RNA (1)...(19): siRNA sense strand
caucuucgggcucauggaa

SEQ ID NO: 110603 - RNA, 19 nt, Homo sapiens
  misc_RNA (1)...(19): siRNA sense strand
gccaaggacaugaagaaca

SEQ ID NO: 110604 - RNA, 19 nt, Homo sapiens
  misc_RNA (1)...(19): siRNA sense strand
ugaguucagugaggagaau

SEQ ID NO: 110605 - RNA, 19 nt, Homo sapiens
  misc_RNA (1)...(19): siRNA sense strand
gagaagcugcugguucaca

SEQ ID NO: 110606 - RNA, 19 nt, Homo sapiens
  misc_RNA (1)...(19): siRNA sense strand
ggaccuuauuaaccagaag

SEQ ID NO: 110607 - RNA, 19 nt, Homo sapiens
  misc_RNA (1)...(19): siRNA sense strand
gggagcacaccaaggacaa

SEQ ID NO: 110608 - RNA, 19 nt, Homo sapiens
  misc_RNA (1)...(19): siRNA sense strand
gaccucuaccuggaccuua

SEQ ID NO: 110609 - RNA, 19 nt, Homo sapiens
  misc_RNA (1)...(19): siRNA sense strand
gaccuuauuaaccagaaga

SEQ ID NO: 110610 - RNA, 19 nt, Homo sapiens
  misc_RNA (1)...(19): siRNA sense strand
ccaaggacaugaagaacaa

SEQ ID NO: 110611 - RNA, 19 nt, Homo sapiens
  misc_RNA (1)...(19): siRNA sense strand
ucaagaaggucaagucaca

SEQ ID NO: 110612 - RNA, 19 nt, Homo sapiens
  misc_RNA (1)...(19): siRNA sense strand
uggagaagcugcugguuca

SEQ ID NO: 110613 - RNA, 19 nt, Homo sapiens
  misc_RNA (1)...(19): siRNA sense strand
ggacucguacccucgcuuu

SEQ ID NO: 110614 - RNA, 19 nt, Homo sapiens
  misc_RNA (1)...(19): siRNA sense strand
gcuucgaccuggcacagaa

SEQ ID NO: 110615 - RNA, 19 nt, Homo sapiens
  misc_RNA (1)...(19): siRNA sense strand
agaagcugcugguucacaa

SEQ ID NO: 110616 - RNA, 19 nt, Homo sapiens
  misc_RNA (1)...(19): siRNA sense strand
gugaggagaaucuggaguu

SEQ ID NO: 110617 - RNA, 19 nt, Homo sapiens
  misc_RNA (1)...(19): siRNA sense strand
gaagcugcugguucacaaa

SEQ ID NO: 110618 - RNA, 19 nt, Homo sapiens
  misc_RNA (1)...(19): siRNA sense strand
cauccaaggccaagaagau

SEQ ID NO: 110619 - RNA, 19 nt, Homo sapiens
  misc_RNA (1)...(19): siRNA sense strand
gcugcugguucacaaauac

SEQ ID NO: 110620 - RNA, 19 nt, Homo sapiens
  misc_RNA (1)...(19): siRNA sense strand
ucacaaauacggguuagca

SEQ ID NO: 110621 - RNA, 19 nt, Homo sapiens
  misc_RNA (1)...(19): siRNA sense strand
cuuauuaaccagaagaaga

SEQ ID NO: 110622 - RNA, 19 nt, Homo sapiens
  misc_RNA (1)...(19): siRNA sense strand
cauucaagcccaccucaga

SEQ ID NO: 110623 - RNA, 19 nt, Homo sapiens
  misc_RNA (1)...(19): siRNA sense strand
ugaggagaaucuggaguuc

SEQ ID NO: 110624 - RNA, 19 nt, Homo sapiens
  misc_RNA (1)...(19): siRNA sense strand
gggcaaggcagacaaaaug

SEQ ID NO: 110625 - RNA, 19 nt, Homo sapiens
  misc_RNA (1)...(19): siRNA sense strand
caucuucgggcucauggaa

SEQ ID NO: 110626 - RNA, 19 nt, Homo sapiens
  misc_RNA (1)...(19): siRNA sense strand
gccaaggacaugaagaaca

SEQ ID NO: 110627 - RNA, 19 nt, Homo sapiens
  misc_RNA (1)...(19): siRNA sense strand
ugaguucagugaggagaau

SEQ ID NO: 110628 - RNA, 19 nt, Homo sapiens
  misc_RNA (1)...(19): siRNA sense strand
gagaagcugcugguucaca

SEQ ID NO: 110629 - RNA, 19 nt, Homo sapiens
  misc_RNA (1)...(19): siRNA sense strand
ggaccuuauuaaccagaag

SEQ ID NO: 110630 - RNA, 19 nt, Homo sapiens
  misc_RNA (1)...(19): siRNA sense strand
gggagcacaccaaggacaa

SEQ ID NO: 110631 - RNA, 19 nt, Homo sapiens
  misc_RNA (1)...(19): siRNA sense strand
gaccucuaccuggaccuua

SEQ ID NO: 110632 - RNA, 19 nt, Homo sapiens
  misc_RNA (1)...(19): siRNA sense strand
gaccuuauuaaccagaaga

SEQ ID NO: 110633 - RNA, 19 nt, Homo sapiens
  misc_RNA (1)...(19): siRNA sense strand
ucaagaaggucaagucaca

SEQ ID NO: 110634 - RNA, 19 nt, Homo sapiens
  misc_RNA (1)...(19): siRNA sense strand
uggagaagcugcugguuca

SEQ ID NO: 110635 - RNA, 19 nt, Homo sapiens
  misc_RNA (1)...(19): siRNA sense strand
ggacucguacccucgcuuu

SEQ ID NO: 110636 - RNA, 19 nt, Homo sapiens
  misc_RNA (1)...(19): siRNA sense strand
gcuucgaccuggcacagaa

SEQ ID NO: 110637 - RNA, 19 nt, Homo sapiens
  misc_RNA (1)...(19): siRNA sense strand
agaagcugcugguucacaa

SEQ ID NO: 110638 - RNA, 19 nt, Homo sapiens
  misc_RNA (1)...(19): siRNA sense strand
gugaggagaaucuggaguu

SEQ ID NO: 110639 - RNA, 19 nt, Homo sapiens
  misc_RNA (1)...(19): siRNA sense strand
gaagcugcugguucacaaa

SEQ ID NO: 110640 - RNA, 19 nt, Homo sapiens
  misc_RNA (1)...(19): siRNA sense strand
cauccaaggccaagaagau

SEQ ID NO: 110641 - RNA, 19 nt, Homo sapiens
  misc_RNA (1)...(19): siRNA sense strand
gcugcugguucacaaauac

SEQ ID NO: 110642 - RNA, 19 nt, Homo sapiens
  misc_RNA (1)...(19): siRNA sense strand
ucacaaauacggguuagca

SEQ ID NO: 110643 - RNA, 19 nt, Homo sapiens
  misc_RNA (1)...(19): siRNA sense strand
cuuauuaaccagaagaaga

SEQ ID NO: 110644 - RNA, 19 nt, Homo sapiens
  misc_RNA (1)...(19): siRNA sense strand
cauucaagcccaccucaga

SEQ ID NO: 110645 - RNA, 19 nt, Homo sapiens
  misc_RNA (1)...(19): siRNA sense strand
ugaggagaaucuggaguuc

SEQ ID NO: 110646 - RNA, 19 nt, Homo sapiens
  misc_RNA (1)...(19): siRNA sense strand
ugaguucagugaggagaau

SEQ ID NO: 110647 - RNA, 19 nt, Homo sapiens
  misc_RNA (1)...(19): siRNA sense strand
caucuucgggcucauggaa

SEQ ID NO: 110648 - RNA, 19 nt, Homo sapiens
  misc_RNA (1)...(19): siRNA sense strand
gggcaaggcagacaaaaug

SEQ ID NO: 110649 - RNA, 19 nt, Homo sapiens
  misc_RNA (1)...(19): siRNA sense strand
gagaagcugcugguucaca

SEQ ID NO: 110650 - RNA, 19 nt, Homo sapiens
  misc_RNA (1)...(19): siRNA sense strand
ggaccuuauuaaccagaag

SEQ ID NO: 110651 - RNA, 19 nt, Homo sapiens
  misc_RNA (1)...(19): siRNA sense strand
gggagcacaccaaggacaa

SEQ ID NO: 110652 - RNA, 19 nt, Homo sapiens
  misc_RNA (1)...(19): siRNA sense strand
gaccucuaccuggaccuua

SEQ ID NO: 110653 - RNA, 19 nt, Homo sapiens
  misc_RNA (1)...(19): siRNA sense strand
gaccuuauuaaccagaaga

SEQ ID NO: 110654 - RNA, 19 nt, Homo sapiens
  misc_RNA (1)...(19): siRNA sense strand
ccaaggacaugaagaacaa

SEQ ID NO: 110655 - RNA, 19 nt, Homo sapiens
  misc_RNA (1)...(19): siRNA sense strand
ucaagaaggucaagucaca

SEQ ID NO: 110656 - RNA, 19 nt, Homo sapiens
  misc_RNA (1)...(19): siRNA sense strand
uggagaagcugcugguuca

SEQ ID NO: 110657 - RNA, 19 nt, Homo sapiens
  misc_RNA (1)...(19): siRNA sense strand
ggacucguacccucgcuuu

SEQ ID NO: 110658 - RNA, 19 nt, Homo sapiens
  misc_RNA (1)...(19): siRNA sense strand
gcuucgaccuggcacagaa

SEQ ID NO: 110659 - RNA, 19 nt, Homo sapiens
  misc_RNA (1)...(19): siRNA sense strand
agaagcugcugguucacaa

SEQ ID NO: 110660 - RNA, 19 nt, Homo sapiens
  misc_RNA (1)...(19): siRNA sense strand
gugaggagaaucuggaguu

SEQ ID NO: 110661 - RNA, 19 nt, Homo sapiens
  misc_RNA (1)...(19): siRNA sense strand
gaagcugcugguucacaaa

SEQ ID NO: 110662 - RNA, 19 nt, Homo sapiens
  misc_RNA (1)...(19): siRNA sense strand
cauccaaggccaagaagau

SEQ ID NO: 110663 - RNA, 19 nt, Homo sapiens
  misc_RNA (1)...(19): siRNA sense strand
gcugcugguucacaaauac

SEQ ID NO: 110664 - RNA, 19 nt, Homo sapiens
  misc_RNA (1)...(19): siRNA sense strand
ucacaaauacggguuagca

SEQ ID NO: 110665 - RNA, 19 nt, Homo sapiens
  misc_RNA (1)...(19): siRNA sense strand
cuuauuaaccagaagaaga

SEQ ID NO: 110666 - RNA, 19 nt, Homo sapiens
  misc_RNA (1)...(19): siRNA sense strand
cauucaagcccaccucaga

SEQ ID NO: 110667 - RNA, 19 nt, Homo sapiens
  misc_RNA (1)...(19): siRNA sense strand
ugaggagaaucuggaguuc

SEQ ID NO: 110668 - RNA, 19 nt, Homo sapiens
  misc_RNA (1)...(19): siRNA sense strand
gggcaaggcagacaaaaug

SEQ ID NO: 110669 - RNA, 19 nt, Homo sapiens
  misc_RNA (1)...(19): siRNA sense strand
caucuucgggcucauggaa

SEQ ID NO: 110670 - RNA, 19 nt, Homo sapiens
  misc_RNA (1)...(19): siRNA sense strand
gccaaggacaugaagaaca

SEQ ID NO: 110671 - RNA, 19 nt, Homo sapiens
  misc_RNA (1)...(19): siRNA sense strand
ugaguucagugaggagaau

SEQ ID NO: 110672 - RNA, 19 nt, Homo sapiens
  misc_RNA (1)...(19): siRNA sense strand
gagaagcugcugguucaca

SEQ ID NO: 110673 - RNA, 19 nt, Homo sapiens
  misc_RNA (1)...(19): siRNA sense strand
ggaccuuauuaaccagaag

SEQ ID NO: 110674 - RNA, 19 nt, Homo sapiens
  misc_RNA (1)...(19): siRNA sense strand
gggagcacaccaaggacaa

SEQ ID NO: 110675 - RNA, 19 nt, Homo sapiens
  misc_RNA (1)...(19): siRNA sense strand
gaccucuaccuggaccuua

SEQ ID NO: 110676 - RNA, 19 nt, Homo sapiens
  misc_RNA (1)...(19): siRNA sense strand
gaccuuauuaaccagaaga

SEQ ID NO: 110677 - RNA, 19 nt, Homo sapiens
  misc_RNA (1)...(19): siRNA sense strand
ccaaggacaugaagaacaa

SEQ ID NO: 110678 - RNA, 19 nt, Homo sapiens
  misc_RNA (1)...(19): siRNA sense strand
ucaagaaggucaagucaca

SEQ ID NO: 110679 - RNA, 19 nt, Homo sapiens
  misc_RNA (1)...(19): siRNA sense strand
uggagaagcugcugguuca

SEQ ID NO: 110680 - RNA, 19 nt, Homo sapiens
  misc_RNA (1)...(19): siRNA sense strand
ggacucguacccucgcuuu

SEQ ID NO: 110681 - RNA, 19 nt, Homo sapiens
  misc_RNA (1)...(19): siRNA sense strand
gcuucgaccuggcacagaa

SEQ ID NO: 110682 - RNA, 19 nt, Homo sapiens
  misc_RNA (1)...(19): siRNA sense strand
agaagcugcugguucacaa

SEQ ID NO: 110683 - RNA, 19 nt, Homo sapiens
  misc_RNA (1)...(19): siRNA sense strand
gugaggagaaucuggaguu

SEQ ID NO: 110684 - RNA, 19 nt, Homo sapiens
  misc_RNA (1)...(19): siRNA sense strand
gaagcugcugguucacaaa

SEQ ID NO: 110685 - RNA, 19 nt, Homo sapiens
  misc_RNA (1)...(19): siRNA sense strand
cauccaaggccaagaagau

SEQ ID NO: 110686 - RNA, 19 nt, Homo sapiens
  misc_RNA (1)...(19): siRNA sense strand
gcugcugguucacaaauac

SEQ ID NO: 110687 - RNA, 19 nt, Homo sapiens
  misc_RNA (1)...(19): siRNA sense strand
ucacaaauacggguuagca

SEQ ID NO: 110688 - RNA, 19 nt, Homo sapiens
  misc_RNA (1)...(19): siRNA sense strand
cuuauuaaccagaagaaga

SEQ ID NO: 110689 - RNA, 19 nt, Homo sapiens
  misc_RNA (1)...(19): siRNA sense strand
cauucaagcccaccucaga

SEQ ID NO: 110690 - RNA, 19 nt, Homo sapiens
  misc_RNA (1)...(19): siRNA sense strand
ugaggagaaucuggaguuc

SEQ ID NO: 110691 - RNA, 19 nt, Homo sapiens
  misc_RNA (1)...(19): siRNA sense strand
gggcaaggcagacaaaaug

SEQ ID NO: 110692 - RNA, 19 nt, Homo sapiens
  misc_RNA (1)...(19): siRNA sense strand
caucuucgggcucauggaa

SEQ ID NO: 110693 - RNA, 19 nt, Homo sapiens
  misc_RNA (1)...(19): siRNA sense strand
gccaaggacaugaagaaca

SEQ ID NO: 110694 - RNA, 19 nt, Homo sapiens
  misc_RNA (1)...(19): siRNA sense strand
ugaguucagugaggagaau

SEQ ID NO: 110695 - RNA, 19 nt, Homo sapiens
  misc_RNA (1)...(19): siRNA sense strand
gagaagcugcugguucaca

SEQ ID NO: 110696 - RNA, 19 nt, Homo sapiens
  misc_RNA (1)...(19): siRNA sense strand
ggaccuuauuaaccagaag

SEQ ID NO: 110697 - RNA, 19 nt, Homo sapiens
  misc_RNA (1)...(19): siRNA sense strand
gggagcacaccaaggacaa

SEQ ID NO: 110698 - RNA, 19 nt, Homo sapiens
  misc_RNA (1)...(19): siRNA sense strand
gaccucuaccuggaccuua

SEQ ID NO: 110699 - RNA, 19 nt, Homo sapiens
  misc_RNA (1)...(19): siRNA sense strand
gaccuuauuaaccagaaga

SEQ ID NO: 110700 - RNA, 19 nt, Homo sapiens
  misc_RNA (1)...(19): siRNA sense strand
uaaaagagcuuccagaauu

SEQ ID NO: 110701 - RNA, 19 nt, Homo sapiens
  misc_RNA (1)...(19): siRNA sense strand
gaagaagauuugccugaug

SEQ ID NO: 110702 - RNA, 19 nt, Homo sapiens
  misc_RNA (1)...(19): siRNA sense strand
gcaaaggagaucuacauga

SEQ ID NO: 110703 - RNA, 19 nt, Homo sapiens
  misc_RNA (1)...(19): siRNA sense strand
ggaagaagauuugccugau

SEQ ID NO: 110704 - RNA, 19 nt, Homo sapiens
  misc_RNA (1)...(19): siRNA sense strand
caaaggagaucuacaugac

SEQ ID NO: 110705 - RNA, 19 nt, Homo sapiens
  misc_RNA (1)...(19): siRNA sense strand
ggaagaggaagaagauuug

SEQ ID NO: 110706 - RNA, 19 nt, Homo sapiens
  misc_RNA (1)...(19): siRNA sense strand
uggagaaucugcuggaaga

SEQ ID NO: 110707 - RNA, 19 nt, Homo sapiens
  misc_RNA (1)...(19): siRNA sense strand
gagcuuccagaauuuauaa

SEQ ID NO: 110708 - RNA, 19 nt, Homo sapiens
  misc_RNA (1)...(19): siRNA sense strand
gaagaaccgcacccucuga

SEQ ID NO: 110709 - RNA, 19 nt, Homo sapiens
  misc_RNA (1)...(19): siRNA sense strand
gaaccgcacccucugaugu

SEQ ID NO: 110710 - RNA, 19 nt, Homo sapiens
  misc_RNA (1)...(19): siRNA sense strand
gaucuuuaaucucaugaag

SEQ ID NO: 110711 - RNA, 19 nt, Homo sapiens
  misc_RNA (1)...(19): siRNA sense strand
gaaccgaggaagaggaaga

SEQ ID NO: 110712 - RNA, 19 nt, Homo sapiens
  misc_RNA (1)...(19): siRNA sense strand
cggcaucccuggagaaucu

SEQ ID NO: 110713 - RNA, 19 nt, Homo sapiens
  misc_RNA (1)...(19): siRNA sense strand
acgagaagauccuggaaga

SEQ ID NO: 110714 - RNA, 19 nt, Homo sapiens
  misc_RNA (1)...(19): siRNA sense strand
gcuagcaugugaagauuuu

SEQ ID NO: 110715 - RNA, 19 nt, Homo sapiens
  misc_RNA (1)...(19): siRNA sense strand
aaagagcuuccagaauuua

SEQ ID NO: 110716 - RNA, 19 nt, Homo sapiens
  misc_RNA (1)...(19): siRNA sense strand
caagagcacagccaaaugg

SEQ ID NO: 110717 - RNA, 19 nt, Homo sapiens
  misc_RNA (1)...(19): siRNA sense strand
gagaagauccuggaagaac

SEQ ID NO: 110718 - RNA, 19 nt, Homo sapiens
  misc_RNA (1)...(19): siRNA sense strand
aaaagagcuuccagaauuu

SEQ ID NO: 110719 - RNA, 19 nt, Homo sapiens
  misc_RNA (1)...(19): siRNA sense strand
gugaaaagauuuagggaau

SEQ ID NO: 110720 - RNA, 19 nt, Homo sapiens
  misc_RNA (1)...(19): siRNA sense strand
uacagccgcuuucuuaagu

SEQ ID NO: 110721 - RNA, 19 nt, Homo sapiens
  misc_RNA (1)...(19): siRNA sense strand
ggagaucuacaugaccuuu

SEQ ID NO: 110722 - RNA, 19 nt, Homo sapiens
  misc_RNA (1)...(19): siRNA sense strand
cgacagcuacagccgcuuu

SEQ ID NO: 110723 - RNA, 19 nt, Homo sapiens
  misc_RNA (1)...(19): siRNA sense strand
cgaggaagaggaagaagau

SEQ ID NO: 110724 - RNA, 19 nt, Homo sapiens
  misc_RNA (1)...(19): siRNA sense strand
gcuacagccgcuuucuuaa

SEQ ID NO: 110725 - RNA, 19 nt, Homo sapiens
  misc_RNA (1)...(19): siRNA sense strand
cagaaggcgugaaaagauu

SEQ ID NO: 110726 - RNA, 19 nt, Homo sapiens
  misc_RNA (1)...(19): siRNA sense strand
aggaagaggaagaagauuu

SEQ ID NO: 110727 - RNA, 19 nt, Homo sapiens
  misc_RNA (1)...(19): siRNA sense strand
ugaccuuucuguccagcaa

SEQ ID NO: 110728 - RNA, 19 nt, Homo sapiens
  misc_RNA (1)...(19): siRNA sense strand
gccgcuuucuuaagucuga

SEQ ID NO: 110729 - RNA, 19 nt, Homo sapiens
  misc_RNA (1)...(19): siRNA sense strand
gaaacuccaggaccagauc

SEQ ID NO: 110730 - RNA, 19 nt, Homo sapiens
  misc_RNA (1)...(19): siRNA sense strand
uccaggaccagaucuuuaa

SEQ ID NO: 110731 - RNA, 19 nt, Homo sapiens
  misc_RNA (1)...(19): siRNA sense strand
agcuacagccgcuuucuua

SEQ ID NO: 110732 - RNA, 19 nt, Homo sapiens
  misc_RNA (1)...(19): siRNA sense strand
agacgcagaugcaggaaaa

SEQ ID NO: 110733 - RNA, 19 nt, Homo sapiens
  misc_RNA (1)...(19): siRNA sense strand
caacgagaagauccuggaa

SEQ ID NO: 110734 - RNA, 19 nt, Homo sapiens
  misc_RNA (1)...(19): siRNA sense strand
gcgaaccgaggaagaggaa

SEQ ID NO: 110735 - RNA, 19 nt, Homo sapiens
  misc_RNA (1)...(19): siRNA sense strand
gcuaaaagagcuuccagaa

SEQ ID NO: 110736 - RNA, 19 nt, Homo sapiens
  misc_RNA (1)...(19): siRNA sense strand
uggcuagcaugugaagauu

SEQ ID NO: 110737 - RNA, 19 nt, Homo sapiens
  misc_RNA (1)...(19): siRNA sense strand
agauuugccugaugcucaa

SEQ ID NO: 110738 - RNA, 19 nt, Homo sapiens
  misc_RNA (1)...(19): siRNA sense strand
ucaagagcacagccaaaug

SEQ ID NO: 110739 - RNA, 19 nt, Homo sapiens
  misc_RNA (1)...(19): siRNA sense strand
cuccaggaccagaucuuua

SEQ ID NO: 110740 - RNA, 19 nt, Homo sapiens
  misc_RNA (1)...(19): siRNA sense strand
ggcaaaggagaucuacaug

SEQ ID NO: 110741 - RNA, 19 nt, Homo sapiens
  misc_RNA (1)...(19): siRNA sense strand
cuacagccgcuuucuuaag

SEQ ID NO: 110742 - RNA, 19 nt, Homo sapiens
  misc_RNA (1)...(19): siRNA sense strand
gaaggcgugaaaagauuua

SEQ ID NO: 110743 - RNA, 19 nt, Homo sapiens
  misc_RNA (1)...(19): siRNA sense strand
aagauaagacgcagaugca

SEQ ID NO: 110744 - RNA, 19 nt, Homo sapiens
  misc_RNA (1)...(19): siRNA sense strand
agagcuuccagaauuuaua

SEQ ID NO: 110745 - RNA, 19 nt, Homo sapiens
  misc_RNA (1)...(19): siRNA sense strand
cgagaagauccuggaagaa

SEQ ID NO: 110746 - RNA, 19 nt, Homo sapiens
  misc_RNA (1)...(19): siRNA sense strand
ucaugaaguacgacagcua

SEQ ID NO: 110747 - RNA, 19 nt, Homo sapiens
  misc_RNA (1)...(19): siRNA sense strand
cuagagagauuaacauuga

SEQ ID NO: 110748 - RNA, 19 nt, Homo sapiens
  misc_RNA (1)...(19): siRNA sense strand
ugaagaagcucagaaaaua

SEQ ID NO: 110749 - RNA, 19 nt, Homo sapiens
  misc_RNA (1)...(19): siRNA sense strand
gagagacuaucaucaggaa

SEQ ID NO: 110750 - RNA, 19 nt, Homo sapiens
  misc_RNA (1)...(19): siRNA sense strand
ggaacccacugaaacaugu

SEQ ID NO: 110751 - RNA, 19 nt, Homo sapiens
  misc_RNA (1)...(19): siRNA sense strand
ggaauuguuggauuuguaa

SEQ ID NO: 110752 - RNA, 19 nt, Homo sapiens
  misc_RNA (1)...(19): siRNA sense strand
gauggcaugugaaaccuau

SEQ ID NO: 110753 - RNA, 19 nt, Homo sapiens
  misc_RNA (1)...(19): siRNA sense strand
uguaagaugugcagagaug

SEQ ID NO: 110754 - RNA, 19 nt, Homo sapiens
  misc_RNA (1)...(19): siRNA sense strand
ccagauuucuaaagucaga

SEQ ID NO: 110755 - RNA, 19 nt, Homo sapiens
  misc_RNA (1)...(19): siRNA sense strand
gcacagugacgagaauauu

SEQ ID NO: 110756 - RNA, 19 nt, Homo sapiens
  misc_RNA (1)...(19): siRNA sense strand
cggaauuguuggauuugua

SEQ ID NO: 110757 - RNA, 19 nt, Homo sapiens
  misc_RNA (1)...(19): siRNA sense strand
gagauuaacauugacaguu

SEQ ID NO: 110758 - RNA, 19 nt, Homo sapiens
  misc_RNA (1)...(19): siRNA sense strand
ggagcacagugacgagaau

SEQ ID NO: 110759 - RNA, 19 nt, Homo sapiens
  misc_RNA (1)...(19): siRNA sense strand
caugugaaaccuauaagaa

SEQ ID NO: 110760 - RNA, 19 nt, Homo sapiens
  misc_RNA (1)...(19): siRNA sense strand
agauuaacauugacaguuc

SEQ ID NO: 110761 - RNA, 19 nt, Homo sapiens
  misc_RNA (1)...(19): siRNA sense strand
caagagagacuaucaucag

SEQ ID NO: 110762 - RNA, 19 nt, Homo sapiens
  misc_RNA (1)...(19): siRNA sense strand
aggcggaauuguuggauuu

SEQ ID NO: 110763 - RNA, 19 nt, Homo sapiens
  misc_RNA (1)...(19): siRNA sense strand
gagacuaucaucaggaaca

SEQ ID NO: 110764 - RNA, 19 nt, Homo sapiens
  misc_RNA (1)...(19): siRNA sense strand
gugacgagaauauucaauu

SEQ ID NO: 110765 - RNA, 19 nt, Homo sapiens
  misc_RNA (1)...(19): siRNA sense strand
gcaugugaaaccuauaaga

SEQ ID NO: 110766 - RNA, 19 nt, Homo sapiens
  misc_RNA (1)...(19): siRNA sense strand
uacaaaauaugguccagua

SEQ ID NO: 110767 - RNA, 19 nt, Homo sapiens
  misc_RNA (1)...(19): siRNA sense strand
aaacuaugcaguccaacaa

SEQ ID NO: 110768 - RNA, 19 nt, Homo sapiens
  misc_RNA (1)...(19): siRNA sense strand
gacaagagagacuaucauc

SEQ ID NO: 110769 - RNA, 19 nt, Homo sapiens
  misc_RNA (1)...(19): siRNA sense strand
ucacgguggagcagaauuu

SEQ ID NO: 110770 - RNA, 19 nt, Homo sapiens
  misc_RNA (1)...(19): siRNA sense strand
gagcacagugacgagaaua

SEQ ID NO: 110771 - RNA, 19 nt, Homo sapiens
  misc_RNA (1)...(19): siRNA sense strand
uaagaugugcagagaugaa

SEQ ID NO: 110772 - RNA, 19 nt, Homo sapiens
  misc_RNA (1)...(19): siRNA sense strand
aaaccuuacuuuggaggaa

SEQ ID NO: 110773 - RNA, 19 nt, Homo sapiens
  misc_RNA (1)...(19): siRNA sense strand
caucaggaacauucaggaa

SEQ ID NO: 110774 - RNA, 19 nt, Homo sapiens
  misc_RNA (1)...(19): siRNA sense strand
agucagaaauguaccaaaa

SEQ ID NO: 110775 - RNA, 19 nt, Homo sapiens
  misc_RNA (1)...(19): siRNA sense strand
uacagugggcccagucuuu

SEQ ID NO: 110776 - RNA, 19 nt, Homo sapiens
  misc_RNA (1)...(19): siRNA sense strand
caggcggaauuguuggauu

SEQ ID NO: 110777 - RNA, 19 nt, Homo sapiens
  misc_RNA (1)...(19): siRNA sense strand
uggcaugugaaaccuauaa

SEQ ID NO: 110778 - RNA, 19 nt, Homo sapiens
  misc_RNA (1)...(19): siRNA sense strand
ugaaaacuaugcaguccaa

SEQ ID NO: 110779 - RNA, 19 nt, Homo sapiens
  misc_RNA (1)...(19): siRNA sense strand
gcggaauuguuggauuugu

SEQ ID NO: 110780 - RNA, 19 nt, Homo sapiens
  misc_RNA (1)...(19): siRNA sense strand
aauucuggauggcauguga

SEQ ID NO: 110781 - RNA, 19 nt, Homo sapiens
  misc_RNA (1)...(19): siRNA sense strand
gaacccacugaaacauguu

SEQ ID NO: 110782 - RNA, 19 nt, Homo sapiens
  misc_RNA (1)...(19): siRNA sense strand
uuuguaagaugugcagaga

SEQ ID NO: 110783 - RNA, 19 nt, Homo sapiens
  misc_RNA (1)...(19): siRNA sense strand
ccuagagagauuaacauug

SEQ ID NO: 110784 - RNA, 19 nt, Homo sapiens
  misc_RNA (1)...(19): siRNA sense strand
guccaacaacaguuucuga

SEQ ID NO: 110785 - RNA, 19 nt, Homo sapiens
  misc_RNA (1)...(19): siRNA sense strand
acagugacgagaauauuca

SEQ ID NO: 110786 - RNA, 19 nt, Homo sapiens
  misc_RNA (1)...(19): siRNA sense strand
ucuaaagucagaaauguac

SEQ ID NO: 110787 - RNA, 19 nt, Homo sapiens
  misc_RNA (1)...(19): siRNA sense strand
cgacaagagagacuaucau

SEQ ID NO: 110788 - RNA, 19 nt, Homo sapiens
  misc_RNA (1)...(19): siRNA sense strand
ggauggcaugugaaaccua

SEQ ID NO: 110789 - RNA, 19 nt, Homo sapiens
  misc_RNA (1)...(19): siRNA sense strand
uguuggauuuguaagaugu

SEQ ID NO: 110790 - RNA, 19 nt, Homo sapiens
  misc_RNA (1)...(19): siRNA sense strand
acuaugcaguccaacaaca

SEQ ID NO: 110791 - RNA, 19 nt, Homo sapiens
  misc_RNA (1)...(19): siRNA sense strand
gaagaagcucagaaaauag

SEQ ID NO: 110792 - RNA, 19 nt, Homo sapiens
  misc_RNA (1)...(19): siRNA sense strand
acaagagagacuaucauca

SEQ ID NO: 110793 - RNA, 19 nt, Homo sapiens
  misc_RNA (1)...(19): siRNA sense strand
cuagagagauuaacauuga

SEQ ID NO: 110794 - RNA, 19 nt, Homo sapiens
  misc_RNA (1)...(19): siRNA sense strand
ugaagaagcucagaaaaua

SEQ ID NO: 110795 - RNA, 19 nt, Homo sapiens
  misc_RNA (1)...(19): siRNA sense strand
gagagacuaucaucaggaa

SEQ ID NO: 110796 - RNA, 19 nt, Homo sapiens
  misc_RNA (1)...(19): siRNA sense strand
ggaacccacugaaacaugu

SEQ ID NO: 110797 - RNA, 19 nt, Homo sapiens
  misc_RNA (1)...(19): siRNA sense strand
ggaauuguuggauuuguaa

SEQ ID NO: 110798 - RNA, 19 nt, Homo sapiens
  misc_RNA (1)...(19): siRNA sense strand
gauggcaugugaaaccuau

SEQ ID NO: 110799 - RNA, 19 nt, Homo sapiens
  misc_RNA (1)...(19): siRNA sense strand
uguaagaugugcagagaug

SEQ ID NO: 110800 - RNA, 19 nt, Homo sapiens
  misc_RNA (1)...(19): siRNA sense strand
ccagauuucuaaagucaga

SEQ ID NO: 110801 - RNA, 19 nt, Homo sapiens
  misc_RNA (1)...(19): siRNA sense strand
gcacagugacgagaauauu

SEQ ID NO: 110802 - RNA, 19 nt, Homo sapiens
  misc_RNA (1)...(19): siRNA sense strand
cggaauuguuggauuugua

SEQ ID NO: 110803 - RNA, 19 nt, Homo sapiens
  misc_RNA (1)...(19): siRNA sense strand
gagauuaacauugacaguu

SEQ ID NO: 110804 - RNA, 19 nt, Homo sapiens
  misc_RNA (1)...(19): siRNA sense strand
ggagcacagugacgagaau

SEQ ID NO: 110805 - RNA, 19 nt, Homo sapiens
  misc_RNA (1)...(19): siRNA sense strand
caugugaaaccuauaagaa

SEQ ID NO: 110806 - RNA, 19 nt, Homo sapiens
  misc_RNA (1)...(19): siRNA sense strand
agauuaacauugacaguuc

SEQ ID NO: 110807 - RNA, 19 nt, Homo sapiens
  misc_RNA (1)...(19): siRNA sense strand
caagagagacuaucaucag

SEQ ID NO: 110808 - RNA, 19 nt, Homo sapiens
  misc_RNA (1)...(19): siRNA sense strand
aggcggaauuguuggauuu

SEQ ID NO: 110809 - RNA, 19 nt, Homo sapiens
  misc_RNA (1)...(19): siRNA sense strand
gagacuaucaucaggaaca

SEQ ID NO: 110810 - RNA, 19 nt, Homo sapiens
  misc_RNA (1)...(19): siRNA sense strand
gugacgagaauauucaauu

SEQ ID NO: 110811 - RNA, 19 nt, Homo sapiens
  misc_RNA (1)...(19): siRNA sense strand
gcaugugaaaccuauaaga

SEQ ID NO: 110812 - RNA, 19 nt, Homo sapiens
  misc_RNA (1)...(19): siRNA sense strand
uacaaaauaugguccagua

SEQ ID NO: 110813 - RNA, 19 nt, Homo sapiens
  misc_RNA (1)...(19): siRNA sense strand
aaacuaugcaguccaacaa

SEQ ID NO: 110814 - RNA, 19 nt, Homo sapiens
  misc_RNA (1)...(19): siRNA sense strand
gacaagagagacuaucauc

SEQ ID NO: 110815 - RNA, 19 nt, Homo sapiens
  misc_RNA (1)...(19): siRNA sense strand
ucacgguggagcagaauuu

SEQ ID NO: 110816 - RNA, 19 nt, Homo sapiens
  misc_RNA (1)...(19): siRNA sense strand
gagcacagugacgagaaua

SEQ ID NO: 110817 - RNA, 19 nt, Homo sapiens
  misc_RNA (1)...(19): siRNA sense strand
uaagaugugcagagaugaa

SEQ ID NO: 110818 - RNA, 19 nt, Homo sapiens
  misc_RNA (1)...(19): siRNA sense strand
aaaccuuacuuuggaggaa

SEQ ID NO: 110819 - RNA, 19 nt, Homo sapiens
  misc_RNA (1)...(19): siRNA sense strand
caucaggaacauucaggaa

SEQ ID NO: 110820 - RNA, 19 nt, Homo sapiens
  misc_RNA (1)...(19): siRNA sense strand
agucagaaauguaccaaaa

SEQ ID NO: 110821 - RNA, 19 nt, Homo sapiens
  misc_RNA (1)...(19): siRNA sense strand
uacagugggcccagucuuu

SEQ ID NO: 110822 - RNA, 19 nt, Homo sapiens
  misc_RNA (1)...(19): siRNA sense strand
caggcggaauuguuggauu

SEQ ID NO: 110823 - RNA, 19 nt, Homo sapiens
  misc_RNA (1)...(19): siRNA sense strand
uggcaugugaaaccuauaa

SEQ ID NO: 110824 - RNA, 19 nt, Homo sapiens
  misc_RNA (1)...(19): siRNA sense strand
ugaaaacuaugcaguccaa

SEQ ID NO: 110825 - RNA, 19 nt, Homo sapiens
  misc_RNA (1)...(19): siRNA sense strand
gcggaauuguuggauuugu

SEQ ID NO: 110826 - RNA, 19 nt, Homo sapiens
  misc_RNA (1)...(19): siRNA sense strand
aauucuggauggcauguga

SEQ ID NO: 110827 - RNA, 19 nt, Homo sapiens
  misc_RNA (1)...(19): siRNA sense strand
gaacccacugaaacauguu

SEQ ID NO: 110828 - RNA, 19 nt, Homo sapiens
  misc_RNA (1)...(19): siRNA sense strand
uuuguaagaugugcagaga

SEQ ID NO: 110829 - RNA, 19 nt, Homo sapiens
  misc_RNA (1)...(19): siRNA sense strand
ccuagagagauuaacauug

SEQ ID NO: 110830 - RNA, 19 nt, Homo sapiens
  misc_RNA (1)...(19): siRNA sense strand
guccaacaacaguuucuga

SEQ ID NO: 110831 - RNA, 19 nt, Homo sapiens
  misc_RNA (1)...(19): siRNA sense strand
acagugacgagaauauuca

SEQ ID NO: 110832 - RNA, 19 nt, Homo sapiens
  misc_RNA (1)...(19): siRNA sense strand
ucuaaagucagaaauguac

SEQ ID NO: 110833 - RNA, 19 nt, Homo sapiens
  misc_RNA (1)...(19): siRNA sense strand
cgacaagagagacuaucau

SEQ ID NO: 110834 - RNA, 19 nt, Homo sapiens
  misc_RNA (1)...(19): siRNA sense strand
ggauggcaugugaaaccua

SEQ ID NO: 110835 - RNA, 19 nt, Homo sapiens
  misc_RNA (1)...(19): siRNA sense strand
uguuggauuuguaagaugu

SEQ ID NO: 110836 - RNA, 19 nt, Homo sapiens
  misc_RNA (1)...(19): siRNA sense strand
acuaugcaguccaacaaca

SEQ ID NO: 110837 - RNA, 19 nt, Homo sapiens
  misc_RNA (1)...(19): siRNA sense strand
gaagaagcucagaaaauag

SEQ ID NO: 110838 - RNA, 19 nt, Homo sapiens
  misc_RNA (1)...(19): siRNA sense strand
acaagagagacuaucauca

SEQ ID NO: 110839 - RNA, 19 nt, Homo sapiens
  misc_RNA (1)...(19): siRNA sense strand
ggagagagccaaagaguuc

SEQ ID NO: 110840 - RNA, 19 nt, Homo sapiens
  misc_RNA (1)...(19): siRNA sense strand
gaagacacguacccugaug

SEQ ID NO: 110841 - RNA, 19 nt, Homo sapiens
  misc_RNA (1)...(19): siRNA sense strand
gcaaagagaauagaaacuu

SEQ ID NO: 110842 - RNA, 19 nt, Homo sapiens
  misc_RNA (1)...(19): siRNA sense strand
caaagagaauagaaacuuc

SEQ ID NO: 110843 - RNA, 19 nt, Homo sapiens
  misc_RNA (1)...(19): siRNA sense strand
gaucuuucuucacaaauca

SEQ ID NO: 110844 - RNA, 19 nt, Homo sapiens
  misc_RNA (1)...(19): siRNA sense strand
aaacacagcaaagagaaua

SEQ ID NO: 110845 - RNA, 19 nt, Homo sapiens
  misc_RNA (1)...(19): siRNA sense strand
gcaguaaacacagcaaaga

SEQ ID NO: 110846 - RNA, 19 nt, Homo sapiens
  misc_RNA (1)...(19): siRNA sense strand
gagcugggcugcgauacug

SEQ ID NO: 110847 - RNA, 19 nt, Homo sapiens
  misc_RNA (1)...(19): siRNA sense strand
gugaggaguucaagaagau

SEQ ID NO: 110848 - RNA, 19 nt, Homo sapiens
  misc_RNA (1)...(19): siRNA sense strand
guaaacacagcaaagagaa

SEQ ID NO: 110849 - RNA, 19 nt, Homo sapiens
  misc_RNA (1)...(19): siRNA sense strand
gggcacaccagaucuuuga

SEQ ID NO: 110850 - RNA, 19 nt, Homo sapiens
  misc_RNA (1)...(19): siRNA sense strand
ggaucuuucuucacaaauc

SEQ ID NO: 110851 - RNA, 19 nt, Homo sapiens
  misc_RNA (1)...(19): siRNA sense strand
cacguacccugauggagaa

SEQ ID NO: 110852 - RNA, 19 nt, Homo sapiens
  misc_RNA (1)...(19): siRNA sense strand
ugugaggaguucaagaaga

SEQ ID NO: 110853 - RNA, 19 nt, Homo sapiens
  misc_RNA (1)...(19): siRNA sense strand
guacccugauggagaagga

SEQ ID NO: 110854 - RNA, 19 nt, Homo sapiens
  misc_RNA (1)...(19): siRNA sense strand
ggaagacacguacccugau

SEQ ID NO: 110855 - RNA, 19 nt, Homo sapiens
  misc_RNA (1)...(19): siRNA sense strand
gcagugaggccccuaaaga

SEQ ID NO: 110856 - RNA, 19 nt, Homo sapiens
  misc_RNA (1)...(19): siRNA sense strand
ccagaucuuugaggaguuc

SEQ ID NO: 110857 - RNA, 19 nt, Homo sapiens
  misc_RNA (1)...(19): siRNA sense strand
gugaggagaaccuggaguu

SEQ ID NO: 110858 - RNA, 19 nt, Homo sapiens
  misc_RNA (1)...(19): siRNA sense strand
gaucuuugaggaguucauu

SEQ ID NO: 110859 - RNA, 19 nt, Homo sapiens
  misc_RNA (1)...(19): siRNA sense strand
ccuaaagaggucaacauug

SEQ ID NO: 110860 - RNA, 19 nt, Homo sapiens
  misc_RNA (1)...(19): siRNA sense strand
ccugugaggaguucaagaa

SEQ ID NO: 110861 - RNA, 19 nt, Homo sapiens
  misc_RNA (1)...(19): siRNA sense strand
ucagagcugggcugcgaua

SEQ ID NO: 110862 - RNA, 19 nt, Homo sapiens
  misc_RNA (1)...(19): siRNA sense strand
ugggaguacuggcaaguuc

SEQ ID NO: 110863 - RNA, 19 nt, Homo sapiens
  misc_RNA (1)...(19): siRNA sense strand
cagcaaagagaauagaaac

SEQ ID NO: 110864 - RNA, 19 nt, Homo sapiens
  misc_RNA (1)...(19): siRNA sense strand
acagccacaugcuuugaug

SEQ ID NO: 110865 - RNA, 19 nt, Homo sapiens
  misc_RNA (1)...(19): siRNA sense strand
ccacagccacaugcuuuga

SEQ ID NO: 110866 - RNA, 19 nt, Homo sapiens
  misc_RNA (1)...(19): siRNA sense strand
acgcuuuccugaagacaga

SEQ ID NO: 110867 - RNA, 19 nt, Homo sapiens
  misc_RNA (1)...(19): siRNA sense strand
ggggaucuuucuucacaaa

SEQ ID NO: 110868 - RNA, 19 nt, Homo sapiens
  misc_RNA (1)...(19): siRNA sense strand
ugccacagccacaugcuuu

SEQ ID NO: 110869 - RNA, 19 nt, Homo sapiens
  misc_RNA (1)...(19): siRNA sense strand
aguaaacacagcaaagaga

SEQ ID NO: 110870 - RNA, 19 nt, Homo sapiens
  misc_RNA (1)...(19): siRNA sense strand
uggcugccuuccacgcuuu

SEQ ID NO: 110871 - RNA, 19 nt, Homo sapiens
  misc_RNA (1)...(19): siRNA sense strand
acagcaaagagaauagaaa

SEQ ID NO: 110872 - RNA, 19 nt, Homo sapiens
  misc_RNA (1)...(19): siRNA sense strand
uaaacacagcaaagagaau

SEQ ID NO: 110873 - RNA, 19 nt, Homo sapiens
  misc_RNA (1)...(19): siRNA sense strand
gggcaguaaacacagcaaa

SEQ ID NO: 110874 - RNA, 19 nt, Homo sapiens
  misc_RNA (1)...(19): siRNA sense strand
ggaguacuggcaaguucga

SEQ ID NO: 110875 - RNA, 19 nt, Homo sapiens
  misc_RNA (1)...(19): siRNA sense strand
gaucugauguugguuauua

SEQ ID NO: 110876 - RNA, 19 nt, Homo sapiens
  misc_RNA (1)...(19): siRNA sense strand
gcaacaagaugaauuagaa

SEQ ID NO: 110877 - RNA, 19 nt, Homo sapiens
  misc_RNA (1)...(19): siRNA sense strand
gaaagggagucaacuauga

SEQ ID NO: 110878 - RNA, 19 nt, Homo sapiens
  misc_RNA (1)...(19): siRNA sense strand
gcagacacguggccuaaua

SEQ ID NO: 110879 - RNA, 19 nt, Homo sapiens
  misc_RNA (1)...(19): siRNA sense strand
ggagucaacuaugaaauua

SEQ ID NO: 110880 - RNA, 19 nt, Homo sapiens
  misc_RNA (1)...(19): siRNA sense strand
gaaagcucaugaucacuua

SEQ ID NO: 110881 - RNA, 19 nt, Homo sapiens
  misc_RNA (1)...(19): siRNA sense strand
gaucaacagucucaguaua

SEQ ID NO: 110882 - RNA, 19 nt, Homo sapiens
  misc_RNA (1)...(19): siRNA sense strand
gaaucagacugguuaguuu

SEQ ID NO: 110883 - RNA, 19 nt, Homo sapiens
  misc_RNA (1)...(19): siRNA sense strand
aaacggaacugcaauucua

SEQ ID NO: 110884 - RNA, 19 nt, Homo sapiens
  misc_RNA (1)...(19): siRNA sense strand
gaaauacagucacauuauc

SEQ ID NO: 110885 - RNA, 19 nt, Homo sapiens
  misc_RNA (1)...(19): siRNA sense strand
caacauuucuguagaugaa

SEQ ID NO: 110886 - RNA, 19 nt, Homo sapiens
  misc_RNA (1)...(19): siRNA sense strand
gaaaggacguggaaacaag

SEQ ID NO: 110887 - RNA, 19 nt, Homo sapiens
  misc_RNA (1)...(19): siRNA sense strand
gaagagacccaguaacuug

SEQ ID NO: 110888 - RNA, 19 nt, Homo sapiens
  misc_RNA (1)...(19): siRNA sense strand
gagcaacuccaacaucuua

SEQ ID NO: 110889 - RNA, 19 nt, Homo sapiens
  misc_RNA (1)...(19): siRNA sense strand
ccaagacucucgaaucaaa

SEQ ID NO: 110890 - RNA, 19 nt, Homo sapiens
  misc_RNA (1)...(19): siRNA sense strand
agaaacaucugccauuaaa

SEQ ID NO: 110891 - RNA, 19 nt, Homo sapiens
  misc_RNA (1)...(19): siRNA sense strand
gggcaaagcugaagcaucu

SEQ ID NO: 110892 - RNA, 19 nt, Homo sapiens
  misc_RNA (1)...(19): siRNA sense strand
ggaugacagugcagaauuu

SEQ ID NO: 110893 - RNA, 19 nt, Homo sapiens
  misc_RNA (1)...(19): siRNA sense strand
uuaaaggacucaaaccuaa

SEQ ID NO: 110894 - RNA, 19 nt, Homo sapiens
  misc_RNA (1)...(19): siRNA sense strand
gaagacagguuguugacau

SEQ ID NO: 110895 - RNA, 19 nt, Homo sapiens
  misc_RNA (1)...(19): siRNA sense strand
gaaacggacuuacuaguac

SEQ ID NO: 110896 - RNA, 19 nt, Homo sapiens
  misc_RNA (1)...(19): siRNA sense strand
gagagaccaucauuuguga

SEQ ID NO: 110897 - RNA, 19 nt, Homo sapiens
  misc_RNA (1)...(19): siRNA sense strand
gauaugaaauccgagauga

SEQ ID NO: 110898 - RNA, 19 nt, Homo sapiens
  misc_RNA (1)...(19): siRNA sense strand
gcaacaacaugaacaaugg

SEQ ID NO: 110899 - RNA, 19 nt, Homo sapiens
  misc_RNA (1)...(19): siRNA sense strand
gaaacucgauaccacauca

SEQ ID NO: 110900 - RNA, 19 nt, Homo sapiens
  misc_RNA (1)...(19): siRNA sense strand
aagaggauauucuaccuua

SEQ ID NO: 110901 - RNA, 19 nt, Homo sapiens
  misc_RNA (1)...(19): siRNA sense strand
ugaaagcuaugaccaagaa

SEQ ID NO: 110902 - RNA, 19 nt, Homo sapiens
  misc_RNA (1)...(19): siRNA sense strand
gaaagaggagaagauaaua

SEQ ID NO: 110903 - RNA, 19 nt, Homo sapiens
  misc_RNA (1)...(19): siRNA sense strand
gugcagaauuuaaauguga

SEQ ID NO: 110904 - RNA, 19 nt, Homo sapiens
  misc_RNA (1)...(19): siRNA sense strand
ggugacagcuggugacaug

SEQ ID NO: 110905 - RNA, 19 nt, Homo sapiens
  misc_RNA (1)...(19): siRNA sense strand
gcagguacuuggaggauau

SEQ ID NO: 110906 - RNA, 19 nt, Homo sapiens
  misc_RNA (1)...(19): siRNA sense strand
gagggcagcuaaugcauau

SEQ ID NO: 110907 - RNA, 19 nt, Homo sapiens
  misc_RNA (1)...(19): siRNA sense strand
gaggagaagauaauaauga

SEQ ID NO: 110908 - RNA, 19 nt, Homo sapiens
  misc_RNA (1)...(19): siRNA sense strand
gcagaaauacagucacauu

SEQ ID NO: 110909 - RNA, 19 nt, Homo sapiens
  misc_RNA (1)...(19): siRNA sense strand
gaacagacagaucaucaga

SEQ ID NO: 110910 - RNA, 19 nt, Homo sapiens
  misc_RNA (1)...(19): siRNA sense strand
gcagagaaaccuacacaga

SEQ ID NO: 110911 - RNA, 19 nt, Homo sapiens
  misc_RNA (1)...(19): siRNA sense strand
gcaaauguaggucgaagaa

SEQ ID NO: 110912 - RNA, 19 nt, Homo sapiens
  misc_RNA (1)...(19): siRNA sense strand
gacaguagaucaacagucu

SEQ ID NO: 110913 - RNA, 19 nt, Homo sapiens
  misc_RNA (1)...(19): siRNA sense strand
ggauguauuugcaacaaga

SEQ ID NO: 110914 - RNA, 19 nt, Homo sapiens
  misc_RNA (1)...(19): siRNA sense strand
ucaacagucucaguauaua

SEQ ID NO: 110915 - RNA, 19 nt, Homo sapiens
  misc_RNA (1)...(19): siRNA sense strand
gaggaaagcucaugaucac

SEQ ID NO: 110916 - RNA, 19 nt, Homo sapiens
  misc_RNA (1)...(19): siRNA sense strand
gagaugaucauaccuugaa

SEQ ID NO: 110917 - RNA, 19 nt, Homo sapiens
  misc_RNA (1)...(19): siRNA sense strand
acucaaaccuaaugcaauu

SEQ ID NO: 110918 - RNA, 19 nt, Homo sapiens
  misc_RNA (1)...(19): siRNA sense strand
gcuauaaagucaccuacug

SEQ ID NO: 110919 - RNA, 19 nt, Homo sapiens
  misc_RNA (1)...(19): siRNA sense strand
gagagagaguggagacaga

SEQ ID NO: 110920 - RNA, 19 nt, Homo sapiens
  misc_RNA (1)...(19): siRNA sense strand
caagauguccuaccaacaa

SEQ ID NO: 110921 - RNA, 19 nt, Homo sapiens
  misc_RNA (1)...(19): siRNA sense strand
ggaaagcucaugaucacuu

SEQ ID NO: 110922 - RNA, 19 nt, Homo sapiens
  misc_RNA (1)...(19): siRNA sense strand
agacucaucucauccaaga

SEQ ID NO: 110923 - RNA, 19 nt, Homo sapiens
  misc_RNA (1)...(19): siRNA sense strand
aauaucagauccagugaaa

SEQ ID NO: 110924 - RNA, 19 nt, Homo sapiens
  misc_RNA (1)...(19): siRNA sense strand
cagaaauacagucacauua

SEQ ID NO: 110925 - RNA, 19 nt, Homo sapiens
  misc_RNA (1)...(19): siRNA sense strand
ucaagaaccuccacauuuu

SEQ ID NO: 110926 - RNA, 19 nt, Homo sapiens
  misc_RNA (1)...(19): siRNA sense strand
ucaaacaguuggagaaugg

SEQ ID NO: 110927 - RNA, 19 nt, Homo sapiens
  misc_RNA (1)...(19): siRNA sense strand
aaauguaggucgaagaaau

SEQ ID NO: 110928 - RNA, 19 nt, Homo sapiens
  misc_RNA (1)...(19): siRNA sense strand
gaggauauucuaccuuauu

SEQ ID NO: 110929 - RNA, 19 nt, Homo sapiens
  misc_RNA (1)...(19): siRNA sense strand
agagaaaccuacacagaug

SEQ ID NO: 110930 - RNA, 19 nt, Homo sapiens
  misc_RNA (1)...(19): siRNA sense strand
caaagauuaucgagcaaau

SEQ ID NO: 110931 - RNA, 19 nt, Homo sapiens
  misc_RNA (1)...(19): siRNA sense strand
aaaacaagcugaacaaaga

SEQ ID NO: 110932 - RNA, 19 nt, Homo sapiens
  misc_RNA (1)...(19): siRNA sense strand
ggagcagccuguuggauca

SEQ ID NO: 110933 - RNA, 19 nt, Homo sapiens
  misc_RNA (1)...(19): siRNA sense strand
uauaguacauggacggaaa

SEQ ID NO: 110934 - RNA, 19 nt, Homo sapiens
  misc_RNA (1)...(19): siRNA sense strand
guaacuguauccaagaaug

SEQ ID NO: 110935 - RNA, 19 nt, Homo sapiens
  misc_RNA (1)...(19): siRNA sense strand
gacaagguccugugaauca

SEQ ID NO: 110936 - RNA, 19 nt, Homo sapiens
  misc_RNA (1)...(19): siRNA sense strand
cgggaugacuucagacaaa

SEQ ID NO: 110937 - RNA, 19 nt, Homo sapiens
  misc_RNA (1)...(19): siRNA sense strand
acagaugucagcagaaaua

SEQ ID NO: 110938 - RNA, 19 nt, Homo sapiens
  misc_RNA (1)...(19): siRNA sense strand
guacuuggaggauaugaaa

SEQ ID NO: 110939 - RNA, 19 nt, Homo sapiens
  misc_RNA (1)...(19): siRNA sense strand
gaagaacuccagcccaugu

SEQ ID NO: 110940 - RNA, 19 nt, Homo sapiens
  misc_RNA (1)...(19): siRNA sense strand
gcaacuccaacaucuuaua

SEQ ID NO: 110941 - RNA, 19 nt, Homo sapiens
  misc_RNA (1)...(19): siRNA sense strand
ggaaguuacagaugugauu

SEQ ID NO: 110942 - RNA, 19 nt, Homo sapiens
  misc_RNA (1)...(19): siRNA sense strand
cacaaugacugcuccauca

SEQ ID NO: 110943 - RNA, 19 nt, Homo sapiens
  misc_RNA (1)...(19): siRNA sense strand
agaaacggacuuacuagua

SEQ ID NO: 110944 - RNA, 19 nt, Homo sapiens
  misc_RNA (1)...(19): siRNA sense strand
ggaggaaagcucaugauca

SEQ ID NO: 110945 - RNA, 19 nt, Homo sapiens
  misc_RNA (1)...(19): siRNA sense strand
agaguaugcuggucugaaa

SEQ ID NO: 110946 - RNA, 19 nt, Homo sapiens
  misc_RNA (1)...(19): siRNA sense strand
gaagagaaacggacuuacu

SEQ ID NO: 110947 - RNA, 19 nt, Homo sapiens
  misc_RNA (1)...(19): siRNA sense strand
ugacagugcagaauuuaaa

SEQ ID NO: 110948 - RNA, 19 nt, Homo sapiens
  misc_RNA (1)...(19): siRNA sense strand
ugaaagaggagaagauaau

SEQ ID NO: 110949 - RNA, 19 nt, Homo sapiens
  misc_RNA (1)...(19): siRNA sense strand
guaggucgaagaaauauug

SEQ ID NO: 110950 - RNA, 19 nt, Homo sapiens
  misc_RNA (1)...(19): siRNA sense strand
ggcaagaacacccaaggua

SEQ ID NO: 110951 - RNA, 19 nt, Homo sapiens
  misc_RNA (1)...(19): siRNA sense strand
ggaaugguccaagaguaua

SEQ ID NO: 110952 - RNA, 19 nt, Homo sapiens
  misc_RNA (1)...(19): siRNA sense strand
gggagucaacuaugaaauu

SEQ ID NO: 110953 - RNA, 19 nt, Homo sapiens
  misc_RNA (1)...(19): siRNA sense strand
aaggagaaccugcaacuuu

SEQ ID NO: 110954 - RNA, 19 nt, Homo sapiens
  misc_RNA (1)...(19): siRNA sense strand
cagggcagccuacuccuua

SEQ ID NO: 110955 - RNA, 19 nt, Homo sapiens
  misc_RNA (1)...(19): siRNA sense strand
ccaacuggauaacaaacaa

SEQ ID NO: 110956 - RNA, 19 nt, Homo sapiens
  misc_RNA (1)...(19): siRNA sense strand
ucgcccagcugauuguaua

SEQ ID NO: 110957 - RNA, 19 nt, Homo sapiens
  misc_RNA (1)...(19): siRNA sense strand
gagcagauagugaaaucaa

SEQ ID NO: 110958 - RNA, 19 nt, Homo sapiens
  misc_RNA (1)...(19): siRNA sense strand
gaaucaaacaguuggagaa

SEQ ID NO: 110959 - RNA, 19 nt, Homo sapiens
  misc_RNA (1)...(19): siRNA sense strand
uuagagagaccaucauuug

SEQ ID NO: 110960 - RNA, 19 nt, Homo sapiens
  misc_RNA (1)...(19): siRNA sense strand
ggaaguacgaccuguagug

SEQ ID NO: 110961 - RNA, 19 nt, Homo sapiens
  misc_RNA (1)...(19): siRNA sense strand
gaacacccaagguaccaaa

SEQ ID NO: 110962 - RNA, 19 nt, Homo sapiens
  misc_RNA (1)...(19): siRNA sense strand
acaaccaacuggauaacaa

SEQ ID NO: 110963 - RNA, 19 nt, Homo sapiens
  misc_RNA (1)...(19): siRNA sense strand
acagcaaccucacuaccua

SEQ ID NO: 110964 - RNA, 19 nt, Homo sapiens
  misc_RNA (1)...(19): siRNA sense strand
acaagcagguccagagaga

SEQ ID NO: 110965 - RNA, 19 nt, Homo sapiens
  misc_RNA (1)...(19): siRNA sense strand
ugacauggguucauacacu

SEQ ID NO: 110966 - RNA, 19 nt, Homo sapiens
  misc_RNA (1)...(19): siRNA sense strand
gaaauccgagaugaucaua

SEQ ID NO: 110967 - RNA, 19 nt, Homo sapiens
  misc_RNA (1)...(19): siRNA sense strand
gaugacagugcagaauuua

SEQ ID NO: 110968 - RNA, 19 nt, Homo sapiens
  misc_RNA (1)...(19): siRNA sense strand
ucgaagaaauauugcagaa

SEQ ID NO: 110969 - RNA, 19 nt, Homo sapiens
  misc_RNA (1)...(19): siRNA sense strand
ggaaaggacguggaaacaa

SEQ ID NO: 110970 - RNA, 19 nt, Homo sapiens
  misc_RNA (1)...(19): siRNA sense strand
uagaagaggaggaagauga

SEQ ID NO: 110971 - RNA, 19 nt, Homo sapiens
  misc_RNA (1)...(19): siRNA sense strand
uauaacaaccaacuggaua

SEQ ID NO: 110972 - RNA, 19 nt, Homo sapiens
  misc_RNA (1)...(19): siRNA sense strand
cggagaaucagacugguua

SEQ ID NO: 110973 - RNA, 19 nt, Homo sapiens
  misc_RNA (1)...(19): siRNA sense strand
ggacucaaaccuaaugcaa

SEQ ID NO: 110974 - RNA, 19 nt, Homo sapiens
  misc_RNA (1)...(19): siRNA sense strand
cagcagaaauacagucaca

SEQ ID NO: 110975 - RNA, 19 nt, Homo sapiens
  misc_RNA (1)...(19): siRNA sense strand
gaucugauguugguuauua

SEQ ID NO: 110976 - RNA, 19 nt, Homo sapiens
  misc_RNA (1)...(19): siRNA sense strand
gcaacaagaugaauuagaa

SEQ ID NO: 110977 - RNA, 19 nt, Homo sapiens
  misc_RNA (1)...(19): siRNA sense strand
gaaagggagucaacuauga

SEQ ID NO: 110978 - RNA, 19 nt, Homo sapiens
  misc_RNA (1)...(19): siRNA sense strand
gcagacacguggccuaaua

SEQ ID NO: 110979 - RNA, 19 nt, Homo sapiens
  misc_RNA (1)...(19): siRNA sense strand
ggagucaacuaugaaauua

SEQ ID NO: 110980 - RNA, 19 nt, Homo sapiens
  misc_RNA (1)...(19): siRNA sense strand
gaaagcucaugaucacuua

SEQ ID NO: 110981 - RNA, 19 nt, Homo sapiens
  misc_RNA (1)...(19): siRNA sense strand
gaucaacagucucaguaua

SEQ ID NO: 110982 - RNA, 19 nt, Homo sapiens
  misc_RNA (1)...(19): siRNA sense strand
gaaucagacugguuaguuu

SEQ ID NO: 110983 - RNA, 19 nt, Homo sapiens
  misc_RNA (1)...(19): siRNA sense strand
aaacggaacugcaauucua

SEQ ID NO: 110984 - RNA, 19 nt, Homo sapiens
  misc_RNA (1)...(19): siRNA sense strand
gaaauacagucacauuauc

SEQ ID NO: 110985 - RNA, 19 nt, Homo sapiens
  misc_RNA (1)...(19): siRNA sense strand
caacauuucuguagaugaa

SEQ ID NO: 110986 - RNA, 19 nt, Homo sapiens
  misc_RNA (1)...(19): siRNA sense strand
gaaaggacguggaaacaag

SEQ ID NO: 110987 - RNA, 19 nt, Homo sapiens
  misc_RNA (1)...(19): siRNA sense strand
gaagagacccaguaacuug

SEQ ID NO: 110988 - RNA, 19 nt, Homo sapiens
  misc_RNA (1)...(19): siRNA sense strand
gagcaacuccaacaucuua

SEQ ID NO: 110989 - RNA, 19 nt, Homo sapiens
  misc_RNA (1)...(19): siRNA sense strand
ccaagacucucgaaucaaa

SEQ ID NO: 110990 - RNA, 19 nt, Homo sapiens
  misc_RNA (1)...(19): siRNA sense strand
agaaacaucugccauuaaa

SEQ ID NO: 110991 - RNA, 19 nt, Homo sapiens
  misc_RNA (1)...(19): siRNA sense strand
gggcaaagcugaagcaucu

SEQ ID NO: 110992 - RNA, 19 nt, Homo sapiens
  misc_RNA (1)...(19): siRNA sense strand
ggaugacagugcagaauuu

SEQ ID NO: 110993 - RNA, 19 nt, Homo sapiens
  misc_RNA (1)...(19): siRNA sense strand
uuaaaggacucaaaccuaa

SEQ ID NO: 110994 - RNA, 19 nt, Homo sapiens
  misc_RNA (1)...(19): siRNA sense strand
gaagacagguuguugacau

SEQ ID NO: 110995 - RNA, 19 nt, Homo sapiens
  misc_RNA (1)...(19): siRNA sense strand
gaaacggacuuacuaguac

SEQ ID NO: 110996 - RNA, 19 nt, Homo sapiens
  misc_RNA (1)...(19): siRNA sense strand
gagagaccaucauuuguga

SEQ ID NO: 110997 - RNA, 19 nt, Homo sapiens
  misc_RNA (1)...(19): siRNA sense strand
gauaugaaauccgagauga

SEQ ID NO: 110998 - RNA, 19 nt, Homo sapiens
  misc_RNA (1)...(19): siRNA sense strand
gcaacaacaugaacaaugg

SEQ ID NO: 110999 - RNA, 19 nt, Homo sapiens
  misc_RNA (1)...(19): siRNA sense strand
gaaacucgauaccacauca

SEQ ID NO: 111000 - RNA, 19 nt, Homo sapiens
  misc_RNA (1)...(19): siRNA sense strand
aagaggauauucuaccuua

SEQ ID NO: 111001 - RNA, 19 nt, Homo sapiens
  misc_RNA (1)...(19): siRNA sense strand
ugaaagcuaugaccaagaa

SEQ ID NO: 111002 - RNA, 19 nt, Homo sapiens
  misc_RNA (1)...(19): siRNA sense strand
gaaagaggagaagauaaua

SEQ ID NO: 111003 - RNA, 19 nt, Homo sapiens
  misc_RNA (1)...(19): siRNA sense strand
gugcagaauuuaaauguga

SEQ ID NO: 111004 - RNA, 19 nt, Homo sapiens
  misc_RNA (1)...(19): siRNA sense strand
ggugacagcuggugacaug

SEQ ID NO: 111005 - RNA, 19 nt, Homo sapiens
  misc_RNA (1)...(19): siRNA sense strand
gcagguacuuggaggauau

SEQ ID NO: 111006 - RNA, 19 nt, Homo sapiens
  misc_RNA (1)...(19): siRNA sense strand
gagggcagcuaaugcauau

SEQ ID NO: 111007 - RNA, 19 nt, Homo sapiens
  misc_RNA (1)...(19): siRNA sense strand
gaggagaagauaauaauga

SEQ ID NO: 111008 - RNA, 19 nt, Homo sapiens
  misc_RNA (1)...(19): siRNA sense strand
gcagaaauacagucacauu

SEQ ID NO: 111009 - RNA, 19 nt, Homo sapiens
  misc_RNA (1)...(19): siRNA sense strand
gaacagacagaucaucaga

SEQ ID NO: 111010 - RNA, 19 nt, Homo sapiens
  misc_RNA (1)...(19): siRNA sense strand
gcagagaaaccuacacaga

SEQ ID NO: 111011 - RNA, 19 nt, Homo sapiens
  misc_RNA (1)...(19): siRNA sense strand
gcaaauguaggucgaagaa

SEQ ID NO: 111012 - RNA, 19 nt, Homo sapiens
  misc_RNA (1)...(19): siRNA sense strand
gacaguagaucaacagucu

SEQ ID NO: 111013 - RNA, 19 nt, Homo sapiens
  misc_RNA (1)...(19): siRNA sense strand
ggauguauuugcaacaaga

SEQ ID NO: 111014 - RNA, 19 nt, Homo sapiens
  misc_RNA (1)...(19): siRNA sense strand
ucaacagucucaguauaua

SEQ ID NO: 111015 - RNA, 19 nt, Homo sapiens
  misc_RNA (1)...(19): siRNA sense strand
gaggaaagcucaugaucac

SEQ ID NO: 111016 - RNA, 19 nt, Homo sapiens
  misc_RNA (1)...(19): siRNA sense strand
gagaugaucauaccuugaa

SEQ ID NO: 111017 - RNA, 19 nt, Homo sapiens
  misc_RNA (1)...(19): siRNA sense strand
acucaaaccuaaugcaauu

SEQ ID NO: 111018 - RNA, 19 nt, Homo sapiens
  misc_RNA (1)...(19): siRNA sense strand
gcuauaaagucaccuacug

SEQ ID NO: 111019 - RNA, 19 nt, Homo sapiens
  misc_RNA (1)...(19): siRNA sense strand
gagagagaguggagacaga

SEQ ID NO: 111020 - RNA, 19 nt, Homo sapiens
  misc_RNA (1)...(19): siRNA sense strand
caagauguccuaccaacaa

SEQ ID NO: 111021 - RNA, 19 nt, Homo sapiens
  misc_RNA (1)...(19): siRNA sense strand
ggaaagcucaugaucacuu

SEQ ID NO: 111022 - RNA, 19 nt, Homo sapiens
  misc_RNA (1)...(19): siRNA sense strand
agacucaucucauccaaga

SEQ ID NO: 111023 - RNA, 19 nt, Homo sapiens
  misc_RNA (1)...(19): siRNA sense strand
aauaucagauccagugaaa

SEQ ID NO: 111024 - RNA, 19 nt, Homo sapiens
  misc_RNA (1)...(19): siRNA sense strand
cagaaauacagucacauua

SEQ ID NO: 111025 - RNA, 19 nt, Homo sapiens
  misc_RNA (1)...(19): siRNA sense strand
ucaagaaccuccacauuuu

SEQ ID NO: 111026 - RNA, 19 nt, Homo sapiens
  misc_RNA (1)...(19): siRNA sense strand
ucaaacaguuggagaaugg

SEQ ID NO: 111027 - RNA, 19 nt, Homo sapiens
  misc_RNA (1)...(19): siRNA sense strand
aaauguaggucgaagaaau

SEQ ID NO: 111028 - RNA, 19 nt, Homo sapiens
  misc_RNA (1)...(19): siRNA sense strand
gaggauauucuaccuuauu

SEQ ID NO: 111029 - RNA, 19 nt, Homo sapiens
  misc_RNA (1)...(19): siRNA sense strand
agagaaaccuacacagaug

SEQ ID NO: 111030 - RNA, 19 nt, Homo sapiens
  misc_RNA (1)...(19): siRNA sense strand
caaagauuaucgagcaaau

SEQ ID NO: 111031 - RNA, 19 nt, Homo sapiens
  misc_RNA (1)...(19): siRNA sense strand
aaaacaagcugaacaaaga

SEQ ID NO: 111032 - RNA, 19 nt, Homo sapiens
  misc_RNA (1)...(19): siRNA sense strand
ggagcagccuguuggauca

SEQ ID NO: 111033 - RNA, 19 nt, Homo sapiens
  misc_RNA (1)...(19): siRNA sense strand
uauaguacauggacggaaa

SEQ ID NO: 111034 - RNA, 19 nt, Homo sapiens
  misc_RNA (1)...(19): siRNA sense strand
guaacuguauccaagaaug

SEQ ID NO: 111035 - RNA, 19 nt, Homo sapiens
  misc_RNA (1)...(19): siRNA sense strand
gacaagguccugugaauca

SEQ ID NO: 111036 - RNA, 19 nt, Homo sapiens
  misc_RNA (1)...(19): siRNA sense strand
cgggaugacuucagacaaa

SEQ ID NO: 111037 - RNA, 19 nt, Homo sapiens
  misc_RNA (1)...(19): siRNA sense strand
acagaugucagcagaaaua

SEQ ID NO: 111038 - RNA, 19 nt, Homo sapiens
  misc_RNA (1)...(19): siRNA sense strand
guacuuggaggauaugaaa

SEQ ID NO: 111039 - RNA, 19 nt, Homo sapiens
  misc_RNA (1)...(19): siRNA sense strand
gaagaacuccagcccaugu

SEQ ID NO: 111040 - RNA, 19 nt, Homo sapiens
  misc_RNA (1)...(19): siRNA sense strand
gcaacuccaacaucuuaua

SEQ ID NO: 111041 - RNA, 19 nt, Homo sapiens
  misc_RNA (1)...(19): siRNA sense strand
ggaaguuacagaugugauu

SEQ ID NO: 111042 - RNA, 19 nt, Homo sapiens
  misc_RNA (1)...(19): siRNA sense strand
cacaaugacugcuccauca

SEQ ID NO: 111043 - RNA, 19 nt, Homo sapiens
  misc_RNA (1)...(19): siRNA sense strand
agaaacggacuuacuagua

SEQ ID NO: 111044 - RNA, 19 nt, Homo sapiens
  misc_RNA (1)...(19): siRNA sense strand
ggaggaaagcucaugauca

SEQ ID NO: 111045 - RNA, 19 nt, Homo sapiens
  misc_RNA (1)...(19): siRNA sense strand
agaguaugcuggucugaaa

SEQ ID NO: 111046 - RNA, 19 nt, Homo sapiens
  misc_RNA (1)...(19): siRNA sense strand
gaagagaaacggacuuacu

SEQ ID NO: 111047 - RNA, 19 nt, Homo sapiens
  misc_RNA (1)...(19): siRNA sense strand
ugacagugcagaauuuaaa

SEQ ID NO: 111048 - RNA, 19 nt, Homo sapiens
  misc_RNA (1)...(19): siRNA sense strand
ugaaagaggagaagauaau

SEQ ID NO: 111049 - RNA, 19 nt, Homo sapiens
  misc_RNA (1)...(19): siRNA sense strand
guaggucgaagaaauauug

SEQ ID NO: 111050 - RNA, 19 nt, Homo sapiens
  misc_RNA (1)...(19): siRNA sense strand
ggcaagaacacccaaggua

SEQ ID NO: 111051 - RNA, 19 nt, Homo sapiens
  misc_RNA (1)...(19): siRNA sense strand
ggaaugguccaagaguaua

SEQ ID NO: 111052 - RNA, 19 nt, Homo sapiens
  misc_RNA (1)...(19): siRNA sense strand
gggagucaacuaugaaauu

SEQ ID NO: 111053 - RNA, 19 nt, Homo sapiens
  misc_RNA (1)...(19): siRNA sense strand
aaggagaaccugcaacuuu

SEQ ID NO: 111054 - RNA, 19 nt, Homo sapiens
  misc_RNA (1)...(19): siRNA sense strand
cagggcagccuacuccuua

SEQ ID NO: 111055 - RNA, 19 nt, Homo sapiens
  misc_RNA (1)...(19): siRNA sense strand
ccaacuggauaacaaacaa

SEQ ID NO: 111056 - RNA, 19 nt, Homo sapiens
  misc_RNA (1)...(19): siRNA sense strand
ucgcccagcugauuguaua

SEQ ID NO: 111057 - RNA, 19 nt, Homo sapiens
  misc_RNA (1)...(19): siRNA sense strand
gagcagauagugaaaucaa

SEQ ID NO: 111058 - RNA, 19 nt, Homo sapiens
  misc_RNA (1)...(19): siRNA sense strand
gaaucaaacaguuggagaa

SEQ ID NO: 111059 - RNA, 19 nt, Homo sapiens
  misc_RNA (1)...(19): siRNA sense strand
uuagagagaccaucauuug

SEQ ID NO: 111060 - RNA, 19 nt, Homo sapiens
  misc_RNA (1)...(19): siRNA sense strand
ggaaguacgaccuguagug

SEQ ID NO: 111061 - RNA, 19 nt, Homo sapiens
  misc_RNA (1)...(19): siRNA sense strand
gaacacccaagguaccaaa

SEQ ID NO: 111062 - RNA, 19 nt, Homo sapiens
  misc_RNA (1)...(19): siRNA sense strand
acaaccaacuggauaacaa

SEQ ID NO: 111063 - RNA, 19 nt, Homo sapiens
  misc_RNA (1)...(19): siRNA sense strand
acagcaaccucacuaccua

SEQ ID NO: 111064 - RNA, 19 nt, Homo sapiens
  misc_RNA (1)...(19): siRNA sense strand
acaagcagguccagagaga

SEQ ID NO: 111065 - RNA, 19 nt, Homo sapiens
  misc_RNA (1)...(19): siRNA sense strand
ugacauggguucauacacu

SEQ ID NO: 111066 - RNA, 19 nt, Homo sapiens
  misc_RNA (1)...(19): siRNA sense strand
gaaauccgagaugaucaua

SEQ ID NO: 111067 - RNA, 19 nt, Homo sapiens
  misc_RNA (1)...(19): siRNA sense strand
gaugacagugcagaauuua

SEQ ID NO: 111068 - RNA, 19 nt, Homo sapiens
  misc_RNA (1)...(19): siRNA sense strand
ucgaagaaauauugcagaa

SEQ ID NO: 111069 - RNA, 19 nt, Homo sapiens
  misc_RNA (1)...(19): siRNA sense strand
ggaaaggacguggaaacaa

SEQ ID NO: 111070 - RNA, 19 nt, Homo sapiens
  misc_RNA (1)...(19): siRNA sense strand
uagaagaggaggaagauga

SEQ ID NO: 111071 - RNA, 19 nt, Homo sapiens
  misc_RNA (1)...(19): siRNA sense strand
uauaacaaccaacuggaua

SEQ ID NO: 111072 - RNA, 19 nt, Homo sapiens
  misc_RNA (1)...(19): siRNA sense strand
cggagaaucagacugguua

SEQ ID NO: 111073 - RNA, 19 nt, Homo sapiens
  misc_RNA (1)...(19): siRNA sense strand
ggacucaaaccuaaugcaa

SEQ ID NO: 111074 - RNA, 19 nt, Homo sapiens
  misc_RNA (1)...(19): siRNA sense strand
cagcagaaauacagucaca

SEQ ID NO: 111075 - RNA, 19 nt, Homo sapiens
  misc_RNA (1)...(19): siRNA sense strand
caacacgucccuaacuugu

SEQ ID NO: 111076 - RNA, 19 nt, Homo sapiens
  misc_RNA (1)...(19): siRNA sense strand
gcaccagauuguccuugug

SEQ ID NO: 111077 - RNA, 19 nt, Homo sapiens
  misc_RNA (1)...(19): siRNA sense strand
gcgucaagcucaccguugu

SEQ ID NO: 111078 - RNA, 19 nt, Homo sapiens
  misc_RNA (1)...(19): siRNA sense strand
gugguccugugcacguuua

SEQ ID NO: 111079 - RNA, 19 nt, Homo sapiens
  misc_RNA (1)...(19): siRNA sense strand
uggcuacccugaaccagau

SEQ ID NO: 111080 - RNA, 19 nt, Homo sapiens
  misc_RNA (1)...(19): siRNA sense strand
ggccucaacacgucccuaa

SEQ ID NO: 111081 - RNA, 19 nt, Homo sapiens
  misc_RNA (1)...(19): siRNA sense strand
ucaacacgucccuaacuug

SEQ ID NO: 111082 - RNA, 19 nt, Homo sapiens
  misc_RNA (1)...(19): siRNA sense strand
guggccacgugcagaagaa

SEQ ID NO: 111083 - RNA, 19 nt, Homo sapiens
  misc_RNA (1)...(19): siRNA sense strand
cucaacacgucccuaacuu

SEQ ID NO: 111084 - RNA, 19 nt, Homo sapiens
  misc_RNA (1)...(19): siRNA sense strand
caacacgucccuaacuugu

SEQ ID NO: 111085 - RNA, 19 nt, Homo sapiens
  misc_RNA (1)...(19): siRNA sense strand
gcaccagauuguccuugug

SEQ ID NO: 111086 - RNA, 19 nt, Homo sapiens
  misc_RNA (1)...(19): siRNA sense strand
gcgucaagcucaccguugu

SEQ ID NO: 111087 - RNA, 19 nt, Homo sapiens
  misc_RNA (1)...(19): siRNA sense strand
gugguccugugcacguuua

SEQ ID NO: 111088 - RNA, 19 nt, Homo sapiens
  misc_RNA (1)...(19): siRNA sense strand
uggcuacccugaaccagau

SEQ ID NO: 111089 - RNA, 19 nt, Homo sapiens
  misc_RNA (1)...(19): siRNA sense strand
ggccucaacacgucccuaa

SEQ ID NO: 111090 - RNA, 19 nt, Homo sapiens
  misc_RNA (1)...(19): siRNA sense strand
ucaacacgucccuaacuug

SEQ ID NO: 111091 - RNA, 19 nt, Homo sapiens
  misc_RNA (1)...(19): siRNA sense strand
guggccacgugcagaagaa

SEQ ID NO: 111092 - RNA, 19 nt, Homo sapiens
  misc_RNA (1)...(19): siRNA sense strand
cucaacacgucccuaacuu

SEQ ID NO: 111093 - RNA, 19 nt, Homo sapiens
  misc_RNA (1)...(19): siRNA sense strand
caacacgucccuaacuugu

SEQ ID NO: 111094 - RNA, 19 nt, Homo sapiens
  misc_RNA (1)...(19): siRNA sense strand
gcaccagauuguccuugug

SEQ ID NO: 111095 - RNA, 19 nt, Homo sapiens
  misc_RNA (1)...(19): siRNA sense strand
gcgucaagcucaccguugu

SEQ ID NO: 111096 - RNA, 19 nt, Homo sapiens
  misc_RNA (1)...(19): siRNA sense strand
gugguccugugcacguuua

SEQ ID NO: 111097 - RNA, 19 nt, Homo sapiens
  misc_RNA (1)...(19): siRNA sense strand
uggcuacccugaaccagau

SEQ ID NO: 111098 - RNA, 19 nt, Homo sapiens
  misc_RNA (1)...(19): siRNA sense strand
ggccucaacacgucccuaa

SEQ ID NO: 111099 - RNA, 19 nt, Homo sapiens
  misc_RNA (1)...(19): siRNA sense strand
ucaacacgucccuaacuug

SEQ ID NO: 111100 - RNA, 19 nt, Homo sapiens
  misc_RNA (1)...(19): siRNA sense strand
guggccacgugcagaagaa

SEQ ID NO: 111101 - RNA, 19 nt, Homo sapiens
  misc_RNA (1)...(19): siRNA sense strand
cucaacacgucccuaacuu

SEQ ID NO: 111102 - RNA, 19 nt, Homo sapiens
  misc_RNA (1)...(19): siRNA sense strand
gggaagaacuuuaaggaua

SEQ ID NO: 111103 - RNA, 19 nt, Homo sapiens
  misc_RNA (1)...(19): siRNA sense strand
gaaaggaacugugaagaga

SEQ ID NO: 111104 - RNA, 19 nt, Homo sapiens
  misc_RNA (1)...(19): siRNA sense strand
ccacagacccugaagauua

SEQ ID NO: 111105 - RNA, 19 nt, Homo sapiens
  misc_RNA (1)...(19): siRNA sense strand
ggagcuagguccaugaaua

SEQ ID NO: 111106 - RNA, 19 nt, Homo sapiens
  misc_RNA (1)...(19): siRNA sense strand
gcaaauggcuccugcaaag

SEQ ID NO: 111107 - RNA, 19 nt, Homo sapiens
  misc_RNA (1)...(19): siRNA sense strand
ggaagaacuuuaaggauau

SEQ ID NO: 111108 - RNA, 19 nt, Homo sapiens
  misc_RNA (1)...(19): siRNA sense strand
gagaaggacuauaccauau

SEQ ID NO: 111109 - RNA, 19 nt, Homo sapiens
  misc_RNA (1)...(19): siRNA sense strand
gaagaacaccuaacaacaa

SEQ ID NO: 111110 - RNA, 19 nt, Homo sapiens
  misc_RNA (1)...(19): siRNA sense strand
gaaacugaauguuccaaug

SEQ ID NO: 111111 - RNA, 19 nt, Homo sapiens
  misc_RNA (1)...(19): siRNA sense strand
gaaggucaaugcuggcaaa

SEQ ID NO: 111112 - RNA, 19 nt, Homo sapiens
  misc_RNA (1)...(19): siRNA sense strand
gaaaugcacaagcaacuuu

SEQ ID NO: 111113 - RNA, 19 nt, Homo sapiens
  misc_RNA (1)...(19): siRNA sense strand
gcaaacagaucucccuuuu

SEQ ID NO: 111114 - RNA, 19 nt, Homo sapiens
  misc_RNA (1)...(19): siRNA sense strand
ucacucagaugauguauag

SEQ ID NO: 111115 - RNA, 19 nt, Homo sapiens
  misc_RNA (1)...(19): siRNA sense strand
caagaaggauccacguuuc

SEQ ID NO: 111116 - RNA, 19 nt, Homo sapiens
  misc_RNA (1)...(19): siRNA sense strand
gacaacaccaucuucuuua

SEQ ID NO: 111117 - RNA, 19 nt, Homo sapiens
  misc_RNA (1)...(19): siRNA sense strand
gcacaaucuuuaccucaga

SEQ ID NO: 111118 - RNA, 19 nt, Homo sapiens
  misc_RNA (1)...(19): siRNA sense strand
gaaggacuauaccauaugg

SEQ ID NO: 111119 - RNA, 19 nt, Homo sapiens
  misc_RNA (1)...(19): siRNA sense strand
gaacaccuaacaacaaaug

SEQ ID NO: 111120 - RNA, 19 nt, Homo sapiens
  misc_RNA (1)...(19): siRNA sense strand
gaagauggcugcauuuugg

SEQ ID NO: 111121 - RNA, 19 nt, Homo sapiens
  misc_RNA (1)...(19): siRNA sense strand
gagacuauguugugaccaa

SEQ ID NO: 111122 - RNA, 19 nt, Homo sapiens
  misc_RNA (1)...(19): siRNA sense strand
aagaacaccuaacaacaaa

SEQ ID NO: 111123 - RNA, 19 nt, Homo sapiens
  misc_RNA (1)...(19): siRNA sense strand
gcucuggaauuauggagaa

SEQ ID NO: 111124 - RNA, 19 nt, Homo sapiens
  misc_RNA (1)...(19): siRNA sense strand
gagcacagcagccguccua

SEQ ID NO: 111125 - RNA, 19 nt, Homo sapiens
  misc_RNA (1)...(19): siRNA sense strand
aaacagaauuccaagucaa

SEQ ID NO: 111126 - RNA, 19 nt, Homo sapiens
  misc_RNA (1)...(19): siRNA sense strand
gaauuuggcauggcuauug

SEQ ID NO: 111127 - RNA, 19 nt, Homo sapiens
  misc_RNA (1)...(19): siRNA sense strand
gaacuucagacuugggaaa

SEQ ID NO: 111128 - RNA, 19 nt, Homo sapiens
  misc_RNA (1)...(19): siRNA sense strand
aaacagaucucccuuuuca

SEQ ID NO: 111129 - RNA, 19 nt, Homo sapiens
  misc_RNA (1)...(19): siRNA sense strand
gagcuagguccaugaauau

SEQ ID NO: 111130 - RNA, 19 nt, Homo sapiens
  misc_RNA (1)...(19): siRNA sense strand
gggaagaaauccacaaagc

SEQ ID NO: 111131 - RNA, 19 nt, Homo sapiens
  misc_RNA (1)...(19): siRNA sense strand
agacaacaccaucuucuuu

SEQ ID NO: 111132 - RNA, 19 nt, Homo sapiens
  misc_RNA (1)...(19): siRNA sense strand
ggacacagccucccacacu

SEQ ID NO: 111133 - RNA, 19 nt, Homo sapiens
  misc_RNA (1)...(19): siRNA sense strand
ucagaauggucgagacuau

SEQ ID NO: 111134 - RNA, 19 nt, Homo sapiens
  misc_RNA (1)...(19): siRNA sense strand
cacagacccugaagauuau

SEQ ID NO: 111135 - RNA, 19 nt, Homo sapiens
  misc_RNA (1)...(19): siRNA sense strand
cgacaucucuacacuacca

SEQ ID NO: 111136 - RNA, 19 nt, Homo sapiens
  misc_RNA (1)...(19): siRNA sense strand
gacacagccucccacacua

SEQ ID NO: 111137 - RNA, 19 nt, Homo sapiens
  misc_RNA (1)...(19): siRNA sense strand
agagaaggacuauaccaua

SEQ ID NO: 111138 - RNA, 19 nt, Homo sapiens
  misc_RNA (1)...(19): siRNA sense strand
gagugcagccuucauauuc

SEQ ID NO: 111139 - RNA, 19 nt, Homo sapiens
  misc_RNA (1)...(19): siRNA sense strand
ccucugugauggcugauaa

SEQ ID NO: 111140 - RNA, 19 nt, Homo sapiens
  misc_RNA (1)...(19): siRNA sense strand
gcaggagugcucauuguga

SEQ ID NO: 111141 - RNA, 19 nt, Homo sapiens
  misc_RNA (1)...(19): siRNA sense strand
caagcgugcucuccgaaga

SEQ ID NO: 111142 - RNA, 19 nt, Homo sapiens
  misc_RNA (1)...(19): siRNA sense strand
ggaccgacaucucuacacu

SEQ ID NO: 111143 - RNA, 19 nt, Homo sapiens
  misc_RNA (1)...(19): siRNA sense strand
gauuaugggaagaacuuua

SEQ ID NO: 111144 - RNA, 19 nt, Homo sapiens
  misc_RNA (1)...(19): siRNA sense strand
caggagugcucauugugaa

SEQ ID NO: 111145 - RNA, 19 nt, Homo sapiens
  misc_RNA (1)...(19): siRNA sense strand
gagaagaacaccuaacaac

SEQ ID NO: 111146 - RNA, 19 nt, Homo sapiens
  misc_RNA (1)...(19): siRNA sense strand
ggucgagacuauguuguga

SEQ ID NO: 111147 - RNA, 19 nt, Homo sapiens
  misc_RNA (1)...(19): siRNA sense strand
ucacuggccuagcuucaga

SEQ ID NO: 111148 - RNA, 19 nt, Homo sapiens
  misc_RNA (1)...(19): siRNA sense strand
ugauuaaguucuccacaga

SEQ ID NO: 111149 - RNA, 19 nt, Homo sapiens
  misc_RNA (1)...(19): siRNA sense strand
ggaagaaauccacaaagca

SEQ ID NO: 111150 - RNA, 19 nt, Homo sapiens
  misc_RNA (1)...(19): siRNA sense strand
ggguuuggcacaaucuuua

SEQ ID NO: 111151 - RNA, 19 nt, Homo sapiens
  misc_RNA (1)...(19): siRNA sense strand
cagcagccguccuaucaau

SEQ ID NO: 111152 - RNA, 19 nt, Homo sapiens
  misc_RNA (1)...(19): siRNA sense strand
gaucagacaacaccaucuu

SEQ ID NO: 111153 - RNA, 19 nt, Homo sapiens
  misc_RNA (1)...(19): siRNA sense strand
aaauccaguucgagaagua

SEQ ID NO: 111154 - RNA, 19 nt, Homo sapiens
  misc_RNA (1)...(19): siRNA sense strand
gaucucagaggcucaguau

SEQ ID NO: 111155 - RNA, 19 nt, Homo sapiens
  misc_RNA (1)...(19): siRNA sense strand
ccaugaauaucagcauuug

SEQ ID NO: 111156 - RNA, 19 nt, Homo sapiens
  misc_RNA (1)...(19): siRNA sense strand
ucucaucaauaacaccuuu

SEQ ID NO: 111157 - RNA, 19 nt, Homo sapiens
  misc_RNA (1)...(19): siRNA sense strand
ggaagagaagaacaccuaa

SEQ ID NO: 111158 - RNA, 19 nt, Homo sapiens
  misc_RNA (1)...(19): siRNA sense strand
uuaugaagauggcugcauu

SEQ ID NO: 111159 - RNA, 19 nt, Homo sapiens
  misc_RNA (1)...(19): siRNA sense strand
auggagaacuucagacuug

SEQ ID NO: 111160 - RNA, 19 nt, Homo sapiens
  misc_RNA (1)...(19): siRNA sense strand
ugugauggcugauaaggau

SEQ ID NO: 111161 - RNA, 19 nt, Homo sapiens
  misc_RNA (1)...(19): siRNA sense strand
gauccacguuucaacagau

SEQ ID NO: 111162 - RNA, 19 nt, Homo sapiens
  misc_RNA (1)...(19): siRNA sense strand
ggauccacguuucaacaga

SEQ ID NO: 111163 - RNA, 19 nt, Homo sapiens
  misc_RNA (1)...(19): siRNA sense strand
acaagaaggauccacguuu

SEQ ID NO: 111164 - RNA, 19 nt, Homo sapiens
  misc_RNA (1)...(19): siRNA sense strand
gauauuacagaucucauca

SEQ ID NO: 111165 - RNA, 19 nt, Homo sapiens
  misc_RNA (1)...(19): siRNA sense strand
uggcaaaccuacacguuca

SEQ ID NO: 111166 - RNA, 19 nt, Homo sapiens
  misc_RNA (1)...(19): siRNA sense strand
ggaauuauggagaacuuca

SEQ ID NO: 111167 - RNA, 19 nt, Homo sapiens
  misc_RNA (1)...(19): siRNA sense strand
gaucgaggcauugucuauu

SEQ ID NO: 111168 - RNA, 19 nt, Homo sapiens
  misc_RNA (1)...(19): siRNA sense strand
gauugaugcuggucacagu

SEQ ID NO: 111169 - RNA, 19 nt, Homo sapiens
  misc_RNA (1)...(19): siRNA sense strand
cggaagagaagaacaccua

SEQ ID NO: 111170 - RNA, 19 nt, Homo sapiens
  misc_RNA (1)...(19): siRNA sense strand
gggcuacaaagaacaguuu

SEQ ID NO: 111171 - RNA, 19 nt, Homo sapiens
  misc_RNA (1)...(19): siRNA sense strand
ggucaaugcuggcaaaccu

SEQ ID NO: 111172 - RNA, 19 nt, Homo sapiens
  misc_RNA (1)...(19): siRNA sense strand
caagucaaauucuguucca

SEQ ID NO: 111173 - RNA, 19 nt, Homo sapiens
  misc_RNA (1)...(19): siRNA sense strand
uggaggacuuucucuguga

SEQ ID NO: 111174 - RNA, 19 nt, Homo sapiens
  misc_RNA (1)...(19): siRNA sense strand
gaagagaaggacuauacca

SEQ ID NO: 111175 - RNA, 19 nt, Homo sapiens
  misc_RNA (1)...(19): siRNA sense strand
gugaagagaaggacuauac

SEQ ID NO: 111176 - RNA, 19 nt, Homo sapiens
  misc_RNA (1)...(19): siRNA sense strand
agaaauccacaaagcagua

SEQ ID NO: 111177 - RNA, 19 nt, Homo sapiens
  misc_RNA (1)...(19): siRNA sense strand
cagccucccacacuaauaa

SEQ ID NO: 111178 - RNA, 19 nt, Homo sapiens
  misc_RNA (1)...(19): siRNA sense strand
gcaagucauccguguguca

SEQ ID NO: 111179 - RNA, 19 nt, Homo sapiens
  misc_RNA (1)...(19): siRNA sense strand
gguuacuccuggacaaaga

SEQ ID NO: 111180 - RNA, 19 nt, Homo sapiens
  misc_RNA (1)...(19): siRNA sense strand
caucagauuuugcgaagaa

SEQ ID NO: 111181 - RNA, 19 nt, Homo sapiens
  misc_RNA (1)...(19): siRNA sense strand
uggaugguguggaugcuuu

SEQ ID NO: 111182 - RNA, 19 nt, Homo sapiens
  misc_RNA (1)...(19): siRNA sense strand
gcaucauuguggccauuga

SEQ ID NO: 111183 - RNA, 19 nt, Homo sapiens
  misc_RNA (1)...(19): siRNA sense strand
guauagcccucagaauucu

SEQ ID NO: 111184 - RNA, 19 nt, Homo sapiens
  misc_RNA (1)...(19): siRNA sense strand
ggaggacuuucucugugau

SEQ ID NO: 111185 - RNA, 19 nt, Homo sapiens
  misc_RNA (1)...(19): siRNA sense strand
gcacagcagccguccuauc

SEQ ID NO: 111186 - RNA, 19 nt, Homo sapiens
  misc_RNA (1)...(19): siRNA sense strand
uccagaccaugaucacuuu

SEQ ID NO: 111187 - RNA, 19 nt, Homo sapiens
  misc_RNA (1)...(19): siRNA sense strand
ggcauugucuauuccaagu

SEQ ID NO: 111188 - RNA, 19 nt, Homo sapiens
  misc_RNA (1)...(19): siRNA sense strand
gaaauccacaaagcaguau

SEQ ID NO: 111189 - RNA, 19 nt, Homo sapiens
  misc_RNA (1)...(19): siRNA sense strand
cagcauguguuugaugauc

SEQ ID NO: 111190 - RNA, 19 nt, Homo sapiens
  misc_RNA (1)...(19): siRNA sense strand
gguaaauccaguucgagaa

SEQ ID NO: 111191 - RNA, 19 nt, Homo sapiens
  misc_RNA (1)...(19): siRNA sense strand
caacaacacgcaccagcau

SEQ ID NO: 111192 - RNA, 19 nt, Homo sapiens
  misc_RNA (1)...(19): siRNA sense strand
guccaugaauaucagcauu

SEQ ID NO: 111193 - RNA, 19 nt, Homo sapiens
  misc_RNA (1)...(19): siRNA sense strand
ccagggaccccaucuauuu

SEQ ID NO: 111194 - RNA, 19 nt, Homo sapiens
  misc_RNA (1)...(19): siRNA sense strand
cacagcagccguccuauca

SEQ ID NO: 111195 - RNA, 19 nt, Homo sapiens
  misc_RNA (1)...(19): siRNA sense strand
gcaccagcauguguuugau

SEQ ID NO: 111196 - RNA, 19 nt, Homo sapiens
  misc_RNA (1)...(19): siRNA sense strand
gagagacggacuuuaccaa

SEQ ID NO: 111197 - RNA, 19 nt, Homo sapiens
  misc_RNA (1)...(19): siRNA sense strand
gcggagagacggacuuuac

SEQ ID NO: 111198 - RNA, 19 nt, Homo sapiens
  misc_RNA (1)...(19): siRNA sense strand
gccuguggguguccaagaa

SEQ ID NO: 111199 - RNA, 19 nt, Homo sapiens
  misc_RNA (1)...(19): siRNA sense strand
uauaucgaagugaggauua

SEQ ID NO: 111200 - RNA, 19 nt, Homo sapiens
  misc_RNA (1)...(19): siRNA sense strand
uaaguucuccacagacgaa

SEQ ID NO: 111201 - RNA, 19 nt, Homo sapiens
  misc_RNA (1)...(19): siRNA sense strand
gcagccguccuaucaaugu

SEQ ID NO: 111202 - RNA, 19 nt, Homo sapiens
  misc_RNA (1)...(19): siRNA sense strand
gcaaagagggugacaaguu

SEQ ID NO: 111203 - RNA, 19 nt, Homo sapiens
  misc_RNA (1)...(19): siRNA sense strand
caaagagggugacaaguuc

SEQ ID NO: 111204 - RNA, 19 nt, Homo sapiens
  misc_RNA (1)...(19): siRNA sense strand
caugauguguaacgaauuc

SEQ ID NO: 111205 - RNA, 19 nt, Homo sapiens
  misc_RNA (1)...(19): siRNA sense strand
gauaagcagcccaggaaga

SEQ ID NO: 111206 - RNA, 19 nt, Homo sapiens
  misc_RNA (1)...(19): siRNA sense strand
gccaugauguguaacgaau

SEQ ID NO: 111207 - RNA, 19 nt, Homo sapiens
  misc_RNA (1)...(19): siRNA sense strand
cagauaagcagcccaggaa

SEQ ID NO: 111208 - RNA, 19 nt, Homo sapiens
  misc_RNA (1)...(19): siRNA sense strand
uccagaagcugaugagcaa

SEQ ID NO: 111209 - RNA, 19 nt, Homo sapiens
  misc_RNA (1)...(19): siRNA sense strand
gauguguaacgaauucuuu

SEQ ID NO: 111210 - RNA, 19 nt, Homo sapiens
  misc_RNA (1)...(19): siRNA sense strand
ggacaacgagguggacuuc

SEQ ID NO: 111211 - RNA, 19 nt, Homo sapiens
  misc_RNA (1)...(19): siRNA sense strand
gggcaaagagggugacaag

SEQ ID NO: 111212 - RNA, 19 nt, Homo sapiens
  misc_RNA (1)...(19): siRNA sense strand
gugacaaguucaagcucaa

SEQ ID NO: 111213 - RNA, 19 nt, Homo sapiens
  misc_RNA (1)...(19): siRNA sense strand
uguccaccuuccacaagua

SEQ ID NO: 111214 - RNA, 19 nt, Homo sapiens
  misc_RNA (1)...(19): siRNA sense strand
ccacaaguacucgggcaaa

SEQ ID NO: 111215 - RNA, 19 nt, Homo sapiens
  misc_RNA (1)...(19): siRNA sense strand
uguaacgaauucuuugaag

SEQ ID NO: 111216 - RNA, 19 nt, Homo sapiens
  misc_RNA (1)...(19): siRNA sense strand
caaguacucgggcaaagag

SEQ ID NO: 111217 - RNA, 19 nt, Homo sapiens
  misc_RNA (1)...(19): siRNA sense strand
ggacuuccaagaguacugu

SEQ ID NO: 111218 - RNA, 19 nt, Homo sapiens
  misc_RNA (1)...(19): siRNA sense strand
auaagcagcccaggaagaa

SEQ ID NO: 111219 - RNA, 19 nt, Homo sapiens
  misc_RNA (1)...(19): siRNA sense strand
gaaaaggacagaugaagcu

SEQ ID NO: 111220 - RNA, 19 nt, Homo sapiens
  misc_RNA (1)...(19): siRNA sense strand
aguucaagcucaacaaguc

SEQ ID NO: 111221 - RNA, 19 nt, Homo sapiens
  misc_RNA (1)...(19): siRNA sense strand
caaguucaagcucaacaag

SEQ ID NO: 111222 - RNA, 19 nt, Homo sapiens
  misc_RNA (1)...(19): siRNA sense strand
guguaacgaauucuuugaa

SEQ ID NO: 111223 - RNA, 19 nt, Homo sapiens
  misc_RNA (1)...(19): siRNA sense strand
aagcagcccaggaagaaau

SEQ ID NO: 111224 - RNA, 19 nt, Homo sapiens
  misc_RNA (1)...(19): siRNA sense strand
gcaaagagggugacaaguu

SEQ ID NO: 111225 - RNA, 19 nt, Homo sapiens
  misc_RNA (1)...(19): siRNA sense strand
caaagagggugacaaguuc

SEQ ID NO: 111226 - RNA, 19 nt, Homo sapiens
  misc_RNA (1)...(19): siRNA sense strand
caugauguguaacgaauuc

SEQ ID NO: 111227 - RNA, 19 nt, Homo sapiens
  misc_RNA (1)...(19): siRNA sense strand
gauaagcagcccaggaaga

SEQ ID NO: 111228 - RNA, 19 nt, Homo sapiens
  misc_RNA (1)...(19): siRNA sense strand
gccaugauguguaacgaau

SEQ ID NO: 111229 - RNA, 19 nt, Homo sapiens
  misc_RNA (1)...(19): siRNA sense strand
cagauaagcagcccaggaa

SEQ ID NO: 111230 - RNA, 19 nt, Homo sapiens
  misc_RNA (1)...(19): siRNA sense strand
uccagaagcugaugagcaa

SEQ ID NO: 111231 - RNA, 19 nt, Homo sapiens
  misc_RNA (1)...(19): siRNA sense strand
gauguguaacgaauucuuu

SEQ ID NO: 111232 - RNA, 19 nt, Homo sapiens
  misc_RNA (1)...(19): siRNA sense strand
ggacaacgagguggacuuc

SEQ ID NO: 111233 - RNA, 19 nt, Homo sapiens
  misc_RNA (1)...(19): siRNA sense strand
gggcaaagagggugacaag

SEQ ID NO: 111234 - RNA, 19 nt, Homo sapiens
  misc_RNA (1)...(19): siRNA sense strand
gugacaaguucaagcucaa

SEQ ID NO: 111235 - RNA, 19 nt, Homo sapiens
  misc_RNA (1)...(19): siRNA sense strand
uguccaccuuccacaagua

SEQ ID NO: 111236 - RNA, 19 nt, Homo sapiens
  misc_RNA (1)...(19): siRNA sense strand
ccacaaguacucgggcaaa

SEQ ID NO: 111237 - RNA, 19 nt, Homo sapiens
  misc_RNA (1)...(19): siRNA sense strand
uguaacgaauucuuugaag

SEQ ID NO: 111238 - RNA, 19 nt, Homo sapiens
  misc_RNA (1)...(19): siRNA sense strand
caaguacucgggcaaagag

SEQ ID NO: 111239 - RNA, 19 nt, Homo sapiens
  misc_RNA (1)...(19): siRNA sense strand
ggacuuccaagaguacugu

SEQ ID NO: 111240 - RNA, 19 nt, Homo sapiens
  misc_RNA (1)...(19): siRNA sense strand
auaagcagcccaggaagaa

SEQ ID NO: 111241 - RNA, 19 nt, Homo sapiens
  misc_RNA (1)...(19): siRNA sense strand
gaaaaggacagaugaagcu

SEQ ID NO: 111242 - RNA, 19 nt, Homo sapiens
  misc_RNA (1)...(19): siRNA sense strand
aguucaagcucaacaaguc

SEQ ID NO: 111243 - RNA, 19 nt, Homo sapiens
  misc_RNA (1)...(19): siRNA sense strand
caaguucaagcucaacaag

SEQ ID NO: 111244 - RNA, 19 nt, Homo sapiens
  misc_RNA (1)...(19): siRNA sense strand
guguaacgaauucuuugaa

SEQ ID NO: 111245 - RNA, 19 nt, Homo sapiens
  misc_RNA (1)...(19): siRNA sense strand
aagcagcccaggaagaaau

SEQ ID NO: 111246 - RNA, 19 nt, Homo sapiens
  misc_RNA (1)...(19): siRNA sense strand
ucaaagagcuggugcgaaa

SEQ ID NO: 111247 - RNA, 19 nt, Homo sapiens
  misc_RNA (1)...(19): siRNA sense strand
ggacacaaaugcagacaag

SEQ ID NO: 111248 - RNA, 19 nt, Homo sapiens
  misc_RNA (1)...(19): siRNA sense strand
agaaggagaauaagaauga

SEQ ID NO: 111249 - RNA, 19 nt, Homo sapiens
  misc_RNA (1)...(19): siRNA sense strand
ucaagaaggagaauaagaa

SEQ ID NO: 111250 - RNA, 19 nt, Homo sapiens
  misc_RNA (1)...(19): siRNA sense strand
uggaggaccuggacacaaa

SEQ ID NO: 111251 - RNA, 19 nt, Homo sapiens
  misc_RNA (1)...(19): siRNA sense strand
gaaggagaauaagaaugaa

SEQ ID NO: 111252 - RNA, 19 nt, Homo sapiens
  misc_RNA (1)...(19): siRNA sense strand
ggucauagaacacaucaug

SEQ ID NO: 111253 - RNA, 19 nt, Homo sapiens
  misc_RNA (1)...(19): siRNA sense strand
caacauagagaccaucauc

SEQ ID NO: 111254 - RNA, 19 nt, Homo sapiens
  misc_RNA (1)...(19): siRNA sense strand
ucaacaccuuccaccaaua

SEQ ID NO: 111255 - RNA, 19 nt, Homo sapiens
  misc_RNA (1)...(19): siRNA sense strand
gcagcuggaacgcaacaua

SEQ ID NO: 111256 - RNA, 19 nt, Homo sapiens
  misc_RNA (1)...(19): siRNA sense strand
gcgaaaagaucugcaaaau

SEQ ID NO: 111257 - RNA, 19 nt, Homo sapiens
  misc_RNA (1)...(19): siRNA sense strand
caagaaggagaauaagaau

SEQ ID NO: 111258 - RNA, 19 nt, Homo sapiens
  misc_RNA (1)...(19): siRNA sense strand
caucaacaccuuccaccaa

SEQ ID NO: 111259 - RNA, 19 nt, Homo sapiens
  misc_RNA (1)...(19): siRNA sense strand
acauagagaccaucaucaa

SEQ ID NO: 111260 - RNA, 19 nt, Homo sapiens
  misc_RNA (1)...(19): siRNA sense strand
ucauagaacacaucaugga

SEQ ID NO: 111261 - RNA, 19 nt, Homo sapiens
  misc_RNA (1)...(19): siRNA sense strand
gcccuggccaccaccauaa

SEQ ID NO: 111262 - RNA, 19 nt, Homo sapiens
  misc_RNA (1)...(19): siRNA sense strand
caacaccuuccaccaauac

SEQ ID NO: 111263 - RNA, 19 nt, Homo sapiens
  misc_RNA (1)...(19): siRNA sense strand
ccaccaauacucugugaag

SEQ ID NO: 111264 - RNA, 19 nt, Homo sapiens
  misc_RNA (1)...(19): siRNA sense strand
acacaaaugcagacaagca

SEQ ID NO: 111265 - RNA, 19 nt, Homo sapiens
  misc_RNA (1)...(19): siRNA sense strand
cgaaaagaucugcaaaauu

SEQ ID NO: 111266 - RNA, 19 nt, Homo sapiens
  misc_RNA (1)...(19): siRNA sense strand
gaaaaggucauagaacaca

SEQ ID NO: 111267 - RNA, 19 nt, Homo sapiens
  misc_RNA (1)...(19): siRNA sense strand
ggaccuggacacaaaugca

SEQ ID NO: 111268 - RNA, 19 nt, Homo sapiens
  misc_RNA (1)...(19): siRNA sense strand
auagagaccaucaucaaca

SEQ ID NO: 111269 - RNA, 19 nt, Homo sapiens
  misc_RNA (1)...(19): siRNA sense strand
cagcuggaacgcaacauag

SEQ ID NO: 111270 - RNA, 19 nt, Homo sapiens
  misc_RNA (1)...(19): siRNA sense strand
ggaggaccuggacacaaau

SEQ ID NO: 111271 - RNA, 19 nt, Homo sapiens
  misc_RNA (1)...(19): siRNA sense strand
ggaccaagaugaucagaaa

SEQ ID NO: 111272 - RNA, 19 nt, Homo sapiens
  misc_RNA (1)...(19): siRNA sense strand
ggaagagggugauuuagau

SEQ ID NO: 111273 - RNA, 19 nt, Homo sapiens
  misc_RNA (1)...(19): siRNA sense strand
gaagaugacucggauacaa

SEQ ID NO: 111274 - RNA, 19 nt, Homo sapiens
  misc_RNA (1)...(19): siRNA sense strand
uaagagggaugauaaaugu

SEQ ID NO: 111275 - RNA, 19 nt, Homo sapiens
  misc_RNA (1)...(19): siRNA sense strand
ggaggaagaggaccuauuu

SEQ ID NO: 111276 - RNA, 19 nt, Homo sapiens
  misc_RNA (1)...(19): siRNA sense strand
gaaaaccucugacaaaaga

SEQ ID NO: 111277 - RNA, 19 nt, Homo sapiens
  misc_RNA (1)...(19): siRNA sense strand
ucaaagaggucuagcaaag

SEQ ID NO: 111278 - RNA, 19 nt, Homo sapiens
  misc_RNA (1)...(19): siRNA sense strand
ggacuguaguaauggauaa

SEQ ID NO: 111279 - RNA, 19 nt, Homo sapiens
  misc_RNA (1)...(19): siRNA sense strand
gaaggcaauugaagaugaa

SEQ ID NO: 111280 - RNA, 19 nt, Homo sapiens
  misc_RNA (1)...(19): siRNA sense strand
agacggagcuccacggaaa

SEQ ID NO: 111281 - RNA, 19 nt, Homo sapiens
  misc_RNA (1)...(19): siRNA sense strand
ugacagaucuacaaaccuu

SEQ ID NO: 111282 - RNA, 19 nt, Homo sapiens
  misc_RNA (1)...(19): siRNA sense strand
gaugauaaaugugacagaa

SEQ ID NO: 111283 - RNA, 19 nt, Homo sapiens
  misc_RNA (1)...(19): siRNA sense strand
gaagaggaccuauuugaca

SEQ ID NO: 111284 - RNA, 19 nt, Homo sapiens
  misc_RNA (1)...(19): siRNA sense strand
gcgcuaccauucugacuuu

SEQ ID NO: 111285 - RNA, 19 nt, Homo sapiens
  misc_RNA (1)...(19): siRNA sense strand
ugagggcgcugaucagaaa

SEQ ID NO: 111286 - RNA, 19 nt, Homo sapiens
  misc_RNA (1)...(19): siRNA sense strand
gaagaaggcaauugaagau

SEQ ID NO: 111287 - RNA, 19 nt, Homo sapiens
  misc_RNA (1)...(19): siRNA sense strand
cgaacggacuguaguaaug

SEQ ID NO: 111288 - RNA, 19 nt, Homo sapiens
  misc_RNA (1)...(19): siRNA sense strand
caucugacuucacuauauu

SEQ ID NO: 111289 - RNA, 19 nt, Homo sapiens
  misc_RNA (1)...(19): siRNA sense strand
aaccagagcuacagauuug

SEQ ID NO: 111290 - RNA, 19 nt, Homo sapiens
  misc_RNA (1)...(19): siRNA sense strand
ggacaaagaaacuauaaac

SEQ ID NO: 111291 - RNA, 19 nt, Homo sapiens
  misc_RNA (1)...(19): siRNA sense strand
agaaggcaauugaagauga

SEQ ID NO: 111292 - RNA, 19 nt, Homo sapiens
  misc_RNA (1)...(19): siRNA sense strand
gagcaacagugacagaucu

SEQ ID NO: 111293 - RNA, 19 nt, Homo sapiens
  misc_RNA (1)...(19): siRNA sense strand
aagcagaaauugauaaugg

SEQ ID NO: 111294 - RNA, 19 nt, Homo sapiens
  misc_RNA (1)...(19): siRNA sense strand
ggaggaaguuugauuuuga

SEQ ID NO: 111295 - RNA, 19 nt, Homo sapiens
  misc_RNA (1)...(19): siRNA sense strand
gaaccgaggaggaauguca

SEQ ID NO: 111296 - RNA, 19 nt, Homo sapiens
  misc_RNA (1)...(19): siRNA sense strand
gaagaggguguggaagaua

SEQ ID NO: 111297 - RNA, 19 nt, Homo sapiens
  misc_RNA (1)...(19): siRNA sense strand
gaaaagaugaugcuaagaa

SEQ ID NO: 111298 - RNA, 19 nt, Homo sapiens
  misc_RNA (1)...(19): siRNA sense strand
gaagagggugauuuagauu

SEQ ID NO: 111299 - RNA, 19 nt, Homo sapiens
  misc_RNA (1)...(19): siRNA sense strand
gaugagcgcuaccauucug

SEQ ID NO: 111300 - RNA, 19 nt, Homo sapiens
  misc_RNA (1)...(19): siRNA sense strand
gaggacaaagaaacuauaa

SEQ ID NO: 111301 - RNA, 19 nt, Homo sapiens
  misc_RNA (1)...(19): siRNA sense strand
gaacgagaaggacagcauu

SEQ ID NO: 111302 - RNA, 19 nt, Homo sapiens
  misc_RNA (1)...(19): siRNA sense strand
caaccagagcuacagauuu

SEQ ID NO: 111303 - RNA, 19 nt, Homo sapiens
  misc_RNA (1)...(19): siRNA sense strand
aagaggguguggaagauaa

SEQ ID NO: 111304 - RNA, 19 nt, Homo sapiens
  misc_RNA (1)...(19): siRNA sense strand
ggucgcagcaguuguggua

SEQ ID NO: 111305 - RNA, 19 nt, Homo sapiens
  misc_RNA (1)...(19): siRNA sense strand
ucaucugacuucacuauau

SEQ ID NO: 111306 - RNA, 19 nt, Homo sapiens
  misc_RNA (1)...(19): siRNA sense strand
gaugaagcagaaauugaua

SEQ ID NO: 111307 - RNA, 19 nt, Homo sapiens
  misc_RNA (1)...(19): siRNA sense strand
ggaugaagcagaaauugau

SEQ ID NO: 111308 - RNA, 19 nt, Homo sapiens
  misc_RNA (1)...(19): siRNA sense strand
ggacaucgacaucauggau

SEQ ID NO: 111309 - RNA, 19 nt, Homo sapiens
  misc_RNA (1)...(19): siRNA sense strand
cgaagacgaugaugcugau

SEQ ID NO: 111310 - RNA, 19 nt, Homo sapiens
  misc_RNA (1)...(19): siRNA sense strand
gaagguucaaggucaauga

SEQ ID NO: 111311 - RNA, 19 nt, Homo sapiens
  misc_RNA (1)...(19): siRNA sense strand
gaagacgggaggaaguuug

SEQ ID NO: 111312 - RNA, 19 nt, Homo sapiens
  misc_RNA (1)...(19): siRNA sense strand
gcaguugugguagaaauuu

SEQ ID NO: 111313 - RNA, 19 nt, Homo sapiens
  misc_RNA (1)...(19): siRNA sense strand
guaaaucugagccaguaaa

SEQ ID NO: 111314 - RNA, 19 nt, Homo sapiens
  misc_RNA (1)...(19): siRNA sense strand
caaggagccucggaaguca

SEQ ID NO: 111315 - RNA, 19 nt, Homo sapiens
  misc_RNA (1)...(19): siRNA sense strand
ugaagaaggcaauugaaga

SEQ ID NO: 111316 - RNA, 19 nt, Homo sapiens
  misc_RNA (1)...(19): siRNA sense strand
gagcuacagauuugaagaa

SEQ ID NO: 111317 - RNA, 19 nt, Homo sapiens
  misc_RNA (1)...(19): siRNA sense strand
gcagaaauugauaauggaa

SEQ ID NO: 111318 - RNA, 19 nt, Homo sapiens
  misc_RNA (1)...(19): siRNA sense strand
guaaggaccaagaugauca

SEQ ID NO: 111319 - RNA, 19 nt, Homo sapiens
  misc_RNA (1)...(19): siRNA sense strand
gcaaagaagacgggaggaa

SEQ ID NO: 111320 - RNA, 19 nt, Homo sapiens
  misc_RNA (1)...(19): siRNA sense strand
cggagcagcuucaggaaca

SEQ ID NO: 111321 - RNA, 19 nt, Homo sapiens
  misc_RNA (1)...(19): siRNA sense strand
gcaaaucagccagcagaga

SEQ ID NO: 111322 - RNA, 19 nt, Homo sapiens
  misc_RNA (1)...(19): siRNA sense strand
agagggugauuuagauuug

SEQ ID NO: 111323 - RNA, 19 nt, Homo sapiens
  misc_RNA (1)...(19): siRNA sense strand
ucaggaacaugcuauagag

SEQ ID NO: 111324 - RNA, 19 nt, Homo sapiens
  misc_RNA (1)...(19): siRNA sense strand
caucaaagaggucuagcaa

SEQ ID NO: 111325 - RNA, 19 nt, Homo sapiens
  misc_RNA (1)...(19): siRNA sense strand
ccagagauagcaaagaaga

SEQ ID NO: 111326 - RNA, 19 nt, Homo sapiens
  misc_RNA (1)...(19): siRNA sense strand
ugacuucacuauauuacag

SEQ ID NO: 111327 - RNA, 19 nt, Homo sapiens
  misc_RNA (1)...(19): siRNA sense strand
gaugggagaacgagaagga

SEQ ID NO: 111328 - RNA, 19 nt, Homo sapiens
  misc_RNA (1)...(19): siRNA sense strand
agccagagauagcaaagaa

SEQ ID NO: 111329 - RNA, 19 nt, Homo sapiens
  misc_RNA (1)...(19): siRNA sense strand
gcgagaggacggacuguga

SEQ ID NO: 111330 - RNA, 19 nt, Homo sapiens
  misc_RNA (1)...(19): siRNA sense strand
gcgcaaaccagaagaagag

SEQ ID NO: 111331 - RNA, 19 nt, Homo sapiens
  misc_RNA (1)...(19): siRNA sense strand
cagcaguugugguagaaau

SEQ ID NO: 111332 - RNA, 19 nt, Homo sapiens
  misc_RNA (1)...(19): siRNA sense strand
ugaguucucccgaagauga

SEQ ID NO: 111333 - RNA, 19 nt, Homo sapiens
  misc_RNA (1)...(19): siRNA sense strand
gccagaaaaugagaaaaua

SEQ ID NO: 111334 - RNA, 19 nt, Homo sapiens
  misc_RNA (1)...(19): siRNA sense strand
ggauaucaguguguuggau

SEQ ID NO: 111335 - RNA, 19 nt, Homo sapiens
  misc_RNA (1)...(19): siRNA sense strand
ggacagcauuacccagaac

SEQ ID NO: 111336 - RNA, 19 nt, Homo sapiens
  misc_RNA (1)...(19): siRNA sense strand
ggacaggagagaagguuca

SEQ ID NO: 111337 - RNA, 19 nt, Homo sapiens
  misc_RNA (1)...(19): siRNA sense strand
ggaccgcuuccacgacuuu

SEQ ID NO: 111338 - RNA, 19 nt, Homo sapiens
  misc_RNA (1)...(19): siRNA sense strand
caaagagagagcuuccaaa

SEQ ID NO: 111339 - RNA, 19 nt, Homo sapiens
  misc_RNA (1)...(19): siRNA sense strand
ccaaagagagagcuuccaa

SEQ ID NO: 111340 - RNA, 19 nt, Homo sapiens
  misc_RNA (1)...(19): siRNA sense strand
gaaagaaaaccucugacaa

SEQ ID NO: 111341 - RNA, 19 nt, Homo sapiens
  misc_RNA (1)...(19): siRNA sense strand
gagcuccacggaaagauga

SEQ ID NO: 111342 - RNA, 19 nt, Homo sapiens
  misc_RNA (1)...(19): siRNA sense strand
gcauuaaccaccugcacaa

SEQ ID NO: 111343 - RNA, 19 nt, Homo sapiens
  misc_RNA (1)...(19): siRNA sense strand
cagcagaagaggccacaaa

SEQ ID NO: 111344 - RNA, 19 nt, Homo sapiens
  misc_RNA (1)...(19): siRNA sense strand
ccuguuagcgguagugaaa

SEQ ID NO: 111345 - RNA, 19 nt, Homo sapiens
  misc_RNA (1)...(19): siRNA sense strand
gaagaugaaggugguaauc

SEQ ID NO: 111346 - RNA, 19 nt, Homo sapiens
  misc_RNA (1)...(19): siRNA sense strand
gggaaacuuguaaaucuga

SEQ ID NO: 111347 - RNA, 19 nt, Homo sapiens
  misc_RNA (1)...(19): siRNA sense strand
gagcugaggaaacggaaug

SEQ ID NO: 111348 - RNA, 19 nt, Homo sapiens
  misc_RNA (1)...(19): siRNA sense strand
aaagaaaaccucugacaaa

SEQ ID NO: 111349 - RNA, 19 nt, Homo sapiens
  misc_RNA (1)...(19): siRNA sense strand
gacaucgacaucauggaua

SEQ ID NO: 111350 - RNA, 19 nt, Homo sapiens
  misc_RNA (1)...(19): siRNA sense strand
gaccgaacggacuguagua

SEQ ID NO: 111351 - RNA, 19 nt, Homo sapiens
  misc_RNA (1)...(19): siRNA sense strand
guuaguggacucucuucua

SEQ ID NO: 111352 - RNA, 19 nt, Homo sapiens
  misc_RNA (1)...(19): siRNA sense strand
cggaagagggugauuuaga

SEQ ID NO: 111353 - RNA, 19 nt, Homo sapiens
  misc_RNA (1)...(19): siRNA sense strand
ugguaauccugacgaaauu

SEQ ID NO: 111354 - RNA, 19 nt, Homo sapiens
  misc_RNA (1)...(19): siRNA sense strand
ugauggagcggcugaagaa

SEQ ID NO: 111355 - RNA, 19 nt, Homo sapiens
  misc_RNA (1)...(19): siRNA sense strand
ggaaaacucuggggaugga

SEQ ID NO: 111356 - RNA, 19 nt, Homo sapiens
  misc_RNA (1)...(19): siRNA sense strand
ggcuauggcucugacaaga

SEQ ID NO: 111357 - RNA, 19 nt, Homo sapiens
  misc_RNA (1)...(19): siRNA sense strand
gcgagaugaugccuauugg

SEQ ID NO: 111358 - RNA, 19 nt, Homo sapiens
  misc_RNA (1)...(19): siRNA sense strand
aagccaggaucgcaaauca

SEQ ID NO: 111359 - RNA, 19 nt, Homo sapiens
  misc_RNA (1)...(19): siRNA sense strand
agaguaaggaccaagauga

SEQ ID NO: 111360 - RNA, 19 nt, Homo sapiens
  misc_RNA (1)...(19): siRNA sense strand
ggaagaggaccuauuugac

SEQ ID NO: 111361 - RNA, 19 nt, Homo sapiens
  misc_RNA (1)...(19): siRNA sense strand
uguguuggaugaagcagaa

SEQ ID NO: 111362 - RNA, 19 nt, Homo sapiens
  misc_RNA (1)...(19): siRNA sense strand
gaacggacuguaguaaugg

SEQ ID NO: 111363 - RNA, 19 nt, Homo sapiens
  misc_RNA (1)...(19): siRNA sense strand
gaaagcuugcggaggaaga

SEQ ID NO: 111364 - RNA, 19 nt, Homo sapiens
  misc_RNA (1)...(19): siRNA sense strand
agaagaagaggguguggaa

SEQ ID NO: 111365 - RNA, 19 nt, Homo sapiens
  misc_RNA (1)...(19): siRNA sense strand
gugguaauccugacgaaau

SEQ ID NO: 111366 - RNA, 19 nt, Homo sapiens
  misc_RNA (1)...(19): siRNA sense strand
guggcaagguggcgagaga

SEQ ID NO: 111367 - RNA, 19 nt, Homo sapiens
  misc_RNA (1)...(19): siRNA sense strand
ggcgagaugaugccuauug

SEQ ID NO: 111368 - RNA, 19 nt, Homo sapiens
  misc_RNA (1)...(19): siRNA sense strand
aaggagaagucgagcaaca

SEQ ID NO: 111369 - RNA, 19 nt, Homo sapiens
  misc_RNA (1)...(19): siRNA sense strand
gaaaagggucgcagcaguu

SEQ ID NO: 111370 - RNA, 19 nt, Homo sapiens
  misc_RNA (1)...(19): siRNA sense strand
guaauccugacgaaauuga

SEQ ID NO: 111371 - RNA, 19 nt, Homo sapiens
  misc_RNA (1)...(19): siRNA sense strand
gaaguaugaugacuccuuu

SEQ ID NO: 111372 - RNA, 19 nt, Homo sapiens
  misc_RNA (1)...(19): siRNA sense strand
ggaagcguguuacuuacaa

SEQ ID NO: 111373 - RNA, 19 nt, Homo sapiens
  misc_RNA (1)...(19): siRNA sense strand
acaaagaggugcucagcuu

SEQ ID NO: 111374 - RNA, 19 nt, Homo sapiens
  misc_RNA (1)...(19): siRNA sense strand
gaggucaucuugaauugga

SEQ ID NO: 111375 - RNA, 19 nt, Homo sapiens
  misc_RNA (1)...(19): siRNA sense strand
ugaaggagaucaugaaggu

SEQ ID NO: 111376 - RNA, 19 nt, Homo sapiens
  misc_RNA (1)...(19): siRNA sense strand
gcgcuaagguggccaucaa

SEQ ID NO: 111377 - RNA, 19 nt, Homo sapiens
  misc_RNA (1)...(19): siRNA sense strand
caaccuggcugugaacgaa

SEQ ID NO: 111378 - RNA, 19 nt, Homo sapiens
  misc_RNA (1)...(19): siRNA sense strand
aauggaagcguguuacuua

SEQ ID NO: 111379 - RNA, 19 nt, Homo sapiens
  misc_RNA (1)...(19): siRNA sense strand
gaagcguguuacuuacaaa

SEQ ID NO: 111380 - RNA, 19 nt, Homo sapiens
  misc_RNA (1)...(19): siRNA sense strand
gaugaauggaagcguguua

SEQ ID NO: 111381 - RNA, 19 nt, Homo sapiens
  misc_RNA (1)...(19): siRNA sense strand
ggauccaguuccucgugua

SEQ ID NO: 111382 - RNA, 19 nt, Homo sapiens
  misc_RNA (1)...(19): siRNA sense strand
caaggagacgccucuguga

SEQ ID NO: 111383 - RNA, 19 nt, Homo sapiens
  misc_RNA (1)...(19): siRNA sense strand
ugggcaagcucaugaaaca

SEQ ID NO: 111384 - RNA, 19 nt, Homo sapiens
  misc_RNA (1)...(19): siRNA sense strand
gagaugaucacaggcaaga

SEQ ID NO: 111385 - RNA, 19 nt, Homo sapiens
  misc_RNA (1)...(19): siRNA sense strand
gaauggaagcguguuacuu

SEQ ID NO: 111386 - RNA, 19 nt, Homo sapiens
  misc_RNA (1)...(19): siRNA sense strand
ccgaggucaucuugaauug

SEQ ID NO: 111387 - RNA, 19 nt, Homo sapiens
  misc_RNA (1)...(19): siRNA sense strand
gcacacuggaugaauggaa

SEQ ID NO: 111388 - RNA, 19 nt, Homo sapiens
  misc_RNA (1)...(19): siRNA sense strand
gcgaggaccggauccaguu

SEQ ID NO: 111389 - RNA, 19 nt, Homo sapiens
  misc_RNA (1)...(19): siRNA sense strand
gcaggcagacagugagaug

SEQ ID NO: 111390 - RNA, 19 nt, Homo sapiens
  misc_RNA (1)...(19): siRNA sense strand
gccaggaggugaccaagac

SEQ ID NO: 111391 - RNA, 19 nt, Homo sapiens
  misc_RNA (1)...(19): siRNA sense strand
gaccugggcaagcucauga

SEQ ID NO: 111392 - RNA, 19 nt, Homo sapiens
  misc_RNA (1)...(19): siRNA sense strand
ugaaggggcugagguauau

SEQ ID NO: 111393 - RNA, 19 nt, Homo sapiens
  misc_RNA (1)...(19): siRNA sense strand
gcacaugcgccacgagaac

SEQ ID NO: 111394 - RNA, 19 nt, Homo sapiens
  misc_RNA (1)...(19): siRNA sense strand
cguauucacuccugaugag

SEQ ID NO: 111395 - RNA, 19 nt, Homo sapiens
  misc_RNA (1)...(19): siRNA sense strand
gcacgacacggaagaugag

SEQ ID NO: 111396 - RNA, 19 nt, Homo sapiens
  misc_RNA (1)...(19): siRNA sense strand
gcuaagguggccaucaaga

SEQ ID NO: 111397 - RNA, 19 nt, Homo sapiens
  misc_RNA (1)...(19): siRNA sense strand
cugaugagacccuggauga

SEQ ID NO: 111398 - RNA, 19 nt, Homo sapiens
  misc_RNA (1)...(19): siRNA sense strand
ugaagggccuccccgaauu

SEQ ID NO: 111399 - RNA, 19 nt, Homo sapiens
  misc_RNA (1)...(19): siRNA sense strand
cuaagguggccaucaagaa

SEQ ID NO: 111400 - RNA, 19 nt, Homo sapiens
  misc_RNA (1)...(19): siRNA sense strand
uaagguggccaucaagaag

SEQ ID NO: 111401 - RNA, 19 nt, Homo sapiens
  misc_RNA (1)...(19): siRNA sense strand
ugacuccuuugacgacguu

SEQ ID NO: 111402 - RNA, 19 nt, Homo sapiens
  misc_RNA (1)...(19): siRNA sense strand
cgaagacugugagcugaag

SEQ ID NO: 111403 - RNA, 19 nt, Homo sapiens
  misc_RNA (1)...(19): siRNA sense strand
gaauuggagaagaaggauu

SEQ ID NO: 111404 - RNA, 19 nt, Homo sapiens
  misc_RNA (1)...(19): siRNA sense strand
uggaccagcugaaggagau

SEQ ID NO: 111405 - RNA, 19 nt, Homo sapiens
  misc_RNA (1)...(19): siRNA sense strand
aauuggagaagaaggauuu

SEQ ID NO: 111406 - RNA, 19 nt, Homo sapiens
  misc_RNA (1)...(19): siRNA sense strand
ccaggcaggcagacaguga

SEQ ID NO: 111407 - RNA, 19 nt, Homo sapiens
  misc_RNA (1)...(19): siRNA sense strand
gcguguuacuuacaaagag

SEQ ID NO: 111408 - RNA, 19 nt, Homo sapiens
  misc_RNA (1)...(19): siRNA sense strand
cagcugaaggagaucauga

SEQ ID NO: 111409 - RNA, 19 nt, Homo sapiens
  misc_RNA (1)...(19): siRNA sense strand
gaugagacccuggaugacu

SEQ ID NO: 111410 - RNA, 19 nt, Homo sapiens
  misc_RNA (1)...(19): siRNA sense strand
ccggcaaccuggcugugaa

SEQ ID NO: 111411 - RNA, 19 nt, Homo sapiens
  misc_RNA (1)...(19): siRNA sense strand
ggacguauucacuccugau

SEQ ID NO: 111412 - RNA, 19 nt, Homo sapiens
  misc_RNA (1)...(19): siRNA sense strand
gcuggcccaucccuacuuc

SEQ ID NO: 111413 - RNA, 19 nt, Homo sapiens
  misc_RNA (1)...(19): siRNA sense strand
uggaugacuucacggacuu

SEQ ID NO: 111414 - RNA, 19 nt, Homo sapiens
  misc_RNA (1)...(19): siRNA sense strand
ccucuauccugaccaaugc

SEQ ID NO: 111415 - RNA, 19 nt, Homo sapiens
  misc_RNA (1)...(19): siRNA sense strand
aaagaggugcucagcuuca

SEQ ID NO: 111416 - RNA, 19 nt, Homo sapiens
  misc_RNA (1)...(19): siRNA sense strand
agaaguaugaugacuccuu

SEQ ID NO: 111417 - RNA, 19 nt, Homo sapiens
  misc_RNA (1)...(19): siRNA sense strand
cucccgaggucaucuugaa

SEQ ID NO: 111418 - RNA, 19 nt, Homo sapiens
  misc_RNA (1)...(19): siRNA sense strand
agaaggauuuugccucuau

SEQ ID NO: 111419 - RNA, 19 nt, Homo sapiens
  misc_RNA (1)...(19): siRNA sense strand
gaagacugugagcugaaga

SEQ ID NO: 111420 - RNA, 19 nt, Homo sapiens
  misc_RNA (1)...(19): siRNA sense strand
aguaugaugacuccuuuga

SEQ ID NO: 111421 - RNA, 19 nt, Homo sapiens
  misc_RNA (1)...(19): siRNA sense strand
aagaggugcucagcuucaa

SEQ ID NO: 111422 - RNA, 19 nt, Homo sapiens
  misc_RNA (1)...(19): siRNA sense strand
gaagaaugcaguuaaauac

SEQ ID NO: 111423 - RNA, 19 nt, Homo sapiens
  misc_RNA (1)...(19): siRNA sense strand
gaaagcugaagacguggua

SEQ ID NO: 111424 - RNA, 19 nt, Homo sapiens
  misc_RNA (1)...(19): siRNA sense strand
gagugaagaaugcaguuaa

SEQ ID NO: 111425 - RNA, 19 nt, Homo sapiens
  misc_RNA (1)...(19): siRNA sense strand
gggcuucucugcagcacau

SEQ ID NO: 111426 - RNA, 19 nt, Homo sapiens
  misc_RNA (1)...(19): siRNA sense strand
agugaagaaugcaguuaaa

SEQ ID NO: 111427 - RNA, 19 nt, Homo sapiens
  misc_RNA (1)...(19): siRNA sense strand
acaagagagugaagaaugc

SEQ ID NO: 111428 - RNA, 19 nt, Homo sapiens
  misc_RNA (1)...(19): siRNA sense strand
guacuucaagggagccauu

SEQ ID NO: 111429 - RNA, 19 nt, Homo sapiens
  misc_RNA (1)...(19): siRNA sense strand
caacaagagagugaagaau

SEQ ID NO: 111430 - RNA, 19 nt, Homo sapiens
  misc_RNA (1)...(19): siRNA sense strand
gaagacgugguaccagaca

SEQ ID NO: 111431 - RNA, 19 nt, Homo sapiens
  misc_RNA (1)...(19): siRNA sense strand
aacaagagagugaagaaug

SEQ ID NO: 111432 - RNA, 19 nt, Homo sapiens
  misc_RNA (1)...(19): siRNA sense strand
caacaacaagagagugaag

SEQ ID NO: 111433 - RNA, 19 nt, Homo sapiens
  misc_RNA (1)...(19): siRNA sense strand
acaacaagagagugaagaa

SEQ ID NO: 111434 - RNA, 19 nt, Homo sapiens
  misc_RNA (1)...(19): siRNA sense strand
gagagugaagaaugcaguu

SEQ ID NO: 111435 - RNA, 19 nt, Homo sapiens
  misc_RNA (1)...(19): siRNA sense strand
gcagcucgagggaccaaug

SEQ ID NO: 111436 - RNA, 19 nt, Homo sapiens
  misc_RNA (1)...(19): siRNA sense strand
agaaugcaguuaaauaccu

SEQ ID NO: 111437 - RNA, 19 nt, Homo sapiens
  misc_RNA (1)...(19): siRNA sense strand
agagugaagaaugcaguua

SEQ ID NO: 111438 - RNA, 19 nt, Homo sapiens
  misc_RNA (1)...(19): siRNA sense strand
gugaagaaugcaguuaaau

SEQ ID NO: 111439 - RNA, 19 nt, Homo sapiens
  misc_RNA (1)...(19): siRNA sense strand
agaaguggguccagaaaua

SEQ ID NO: 111440 - RNA, 19 nt, Homo sapiens
  misc_RNA (1)...(19): siRNA sense strand
ccacaaaaguucauaguug

SEQ ID NO: 111441 - RNA, 19 nt, Homo sapiens
  misc_RNA (1)...(19): siRNA sense strand
uaagaaguggguccagaaa

SEQ ID NO: 111442 - RNA, 19 nt, Homo sapiens
  misc_RNA (1)...(19): siRNA sense strand
ccaggugucauccuccuaa

SEQ ID NO: 111443 - RNA, 19 nt, Homo sapiens
  misc_RNA (1)...(19): siRNA sense strand
cacaaaaguucauaguuga

SEQ ID NO: 111444 - RNA, 19 nt, Homo sapiens
  misc_RNA (1)...(19): siRNA sense strand
gaaguggguccagaaauac

SEQ ID NO: 111445 - RNA, 19 nt, Homo sapiens
  misc_RNA (1)...(19): siRNA sense strand
gcucugcugccucgucuau

SEQ ID NO: 111446 - RNA, 19 nt, Homo sapiens
  misc_RNA (1)...(19): siRNA sense strand
gaucugugcugaccccaau

SEQ ID NO: 111447 - RNA, 19 nt, Homo sapiens
  misc_RNA (1)...(19): siRNA sense strand
ccuugcagcugcccuccuu

SEQ ID NO: 111448 - RNA, 19 nt, Homo sapiens
  misc_RNA (1)...(19): siRNA sense strand
gugcugaccccaauaagaa

SEQ ID NO: 111449 - RNA, 19 nt, Homo sapiens
  misc_RNA (1)...(19): siRNA sense strand
cugcuccugugcacaaguu

SEQ ID NO: 111450 - RNA, 19 nt, Homo sapiens
  misc_RNA (1)...(19): siRNA sense strand
gaaaggaaagggcuccaaa

SEQ ID NO: 111451 - RNA, 19 nt, Homo sapiens
  misc_RNA (1)...(19): siRNA sense strand
gaagauucccgccaagguu

SEQ ID NO: 111452 - RNA, 19 nt, Homo sapiens
  misc_RNA (1)...(19): siRNA sense strand
caucccagcuauccuguuc

SEQ ID NO: 111453 - RNA, 19 nt, Homo sapiens
  misc_RNA (1)...(19): siRNA sense strand
cuccaagacuggcaagaaa

SEQ ID NO: 111454 - RNA, 19 nt, Homo sapiens
  misc_RNA (1)...(19): siRNA sense strand
ucaaguacagccaaaggaa

SEQ ID NO: 111455 - RNA, 19 nt, Homo sapiens
  misc_RNA (1)...(19): siRNA sense strand
gagccuccuuauccugguu

SEQ ID NO: 111456 - RNA, 19 nt, Homo sapiens
  misc_RNA (1)...(19): siRNA sense strand
ucaggacuguugccucaag

SEQ ID NO: 111457 - RNA, 19 nt, Homo sapiens
  misc_RNA (1)...(19): siRNA sense strand
ccaagguuguccgcagcua

SEQ ID NO: 111458 - RNA, 19 nt, Homo sapiens
  misc_RNA (1)...(19): siRNA sense strand
ggacuguugccucaaguac

SEQ ID NO: 111459 - RNA, 19 nt, Homo sapiens
  misc_RNA (1)...(19): siRNA sense strand
guacagccaaaggaagauu

SEQ ID NO: 111460 - RNA, 19 nt, Homo sapiens
  misc_RNA (1)...(19): siRNA sense strand
uauccugguucuggccuuu

SEQ ID NO: 111461 - RNA, 19 nt, Homo sapiens
  misc_RNA (1)...(19): siRNA sense strand
ucccagcuauccuguucuu

SEQ ID NO: 111462 - RNA, 19 nt, Homo sapiens
  misc_RNA (1)...(19): siRNA sense strand
gcuaugugcagacccaaag

SEQ ID NO: 111463 - RNA, 19 nt, Homo sapiens
  misc_RNA (1)...(19): siRNA sense strand
ccaagagaauuccugagaa

SEQ ID NO: 111464 - RNA, 19 nt, Homo sapiens
  misc_RNA (1)...(19): siRNA sense strand
caagggcccuguccagaga

SEQ ID NO: 111465 - RNA, 19 nt, Homo sapiens
  misc_RNA (1)...(19): siRNA sense strand
gagauauccuggcaaccaa

SEQ ID NO: 111466 - RNA, 19 nt, Homo sapiens
  misc_RNA (1)...(19): siRNA sense strand
caaccaaaccaccugcuaa

SEQ ID NO: 111467 - RNA, 19 nt, Homo sapiens
  misc_RNA (1)...(19): siRNA sense strand
caagagaauuccugagaac

SEQ ID NO: 111468 - RNA, 19 nt, Homo sapiens
  misc_RNA (1)...(19): siRNA sense strand
guccagagguacaugaaga

SEQ ID NO: 111469 - RNA, 19 nt, Homo sapiens
  misc_RNA (1)...(19): siRNA sense strand
gcaaccaaaccaccugcua

SEQ ID NO: 111470 - RNA, 19 nt, Homo sapiens
  misc_RNA (1)...(19): siRNA sense strand
ccaagaagggccagcaguu

SEQ ID NO: 111471 - RNA, 19 nt, Homo sapiens
  misc_RNA (1)...(19): siRNA sense strand
ggccugaugaccauaguaa

SEQ ID NO: 111472 - RNA, 19 nt, Homo sapiens
  misc_RNA (1)...(19): siRNA sense strand
aggaguggguccagaggua

SEQ ID NO: 111473 - RNA, 19 nt, Homo sapiens
  misc_RNA (1)...(19): siRNA sense strand
caagaagggccagcaguuc

SEQ ID NO: 111474 - RNA, 19 nt, Homo sapiens
  misc_RNA (1)...(19): siRNA sense strand
gcauguucuuuguuuccaa

SEQ ID NO: 111475 - RNA, 19 nt, Homo sapiens
  misc_RNA (1)...(19): siRNA sense strand
ccagggcaguggcugucaa

SEQ ID NO: 111476 - RNA, 19 nt, Homo sapiens
  misc_RNA (1)...(19): siRNA sense strand
uaaccagccuucuguuccu

SEQ ID NO: 111477 - RNA, 19 nt, Homo sapiens
  misc_RNA (1)...(19): siRNA sense strand
ccucaaggcaggagugauc

SEQ ID NO: 111478 - RNA, 19 nt, Homo sapiens
  misc_RNA (1)...(19): siRNA sense strand
uccaagagaauuccugaga

SEQ ID NO: 111479 - RNA, 19 nt, Homo sapiens
  misc_RNA (1)...(19): siRNA sense strand
cauaguaaccagccuucug

SEQ ID NO: 111480 - RNA, 19 nt, Homo sapiens
  misc_RNA (1)...(19): siRNA sense strand
ugcugcauguucuuuguuu

SEQ ID NO: 111481 - RNA, 19 nt, Homo sapiens
  misc_RNA (1)...(19): siRNA sense strand
gaagggccagcaguucugu

SEQ ID NO: 111482 - RNA, 19 nt, Homo sapiens
  misc_RNA (1)...(19): siRNA sense strand
caaggcaggagugaucuuc

SEQ ID NO: 111483 - RNA, 19 nt, Homo sapiens
  misc_RNA (1)...(19): siRNA sense strand
gcacuugucuucccucuca

SEQ ID NO: 111484 - RNA, 19 nt, Homo sapiens
  misc_RNA (1)...(19): siRNA sense strand
gagcgguucuggaauaaga

SEQ ID NO: 111485 - RNA, 19 nt, Homo sapiens
  misc_RNA (1)...(19): siRNA sense strand
cagaaaugcuguuccuuug

SEQ ID NO: 111486 - RNA, 19 nt, Homo sapiens
  misc_RNA (1)...(19): siRNA sense strand
gaacuuugagucuuauuug

SEQ ID NO: 111487 - RNA, 19 nt, Homo sapiens
  misc_RNA (1)...(19): siRNA sense strand
gcacugauccacacagcua

SEQ ID NO: 111488 - RNA, 19 nt, Homo sapiens
  misc_RNA (1)...(19): siRNA sense strand
gaaccacggccaaagaaga

SEQ ID NO: 111489 - RNA, 19 nt, Homo sapiens
  misc_RNA (1)...(19): siRNA sense strand
gcacugguauugcuuugag

SEQ ID NO: 111490 - RNA, 19 nt, Homo sapiens
  misc_RNA (1)...(19): siRNA sense strand
ucagaaaugcuguuccuuu

SEQ ID NO: 111491 - RNA, 19 nt, Homo sapiens
  misc_RNA (1)...(19): siRNA sense strand
gauccacacagcuaaguuu

SEQ ID NO: 111492 - RNA, 19 nt, Homo sapiens
  misc_RNA (1)...(19): siRNA sense strand
ggaaaaggccugaagauuc

SEQ ID NO: 111493 - RNA, 19 nt, Homo sapiens
  misc_RNA (1)...(19): siRNA sense strand
ccacauuacuaucuacagu

SEQ ID NO: 111494 - RNA, 19 nt, Homo sapiens
  misc_RNA (1)...(19): siRNA sense strand
ggaacuuugagucuuauuu

SEQ ID NO: 111495 - RNA, 19 nt, Homo sapiens
  misc_RNA (1)...(19): siRNA sense strand
ugucuucccucucauguau

SEQ ID NO: 111496 - RNA, 19 nt, Homo sapiens
  misc_RNA (1)...(19): siRNA sense strand
cugggaacuuugagucuua

SEQ ID NO: 111497 - RNA, 19 nt, Homo sapiens
  misc_RNA (1)...(19): siRNA sense strand
ccacacagcuaaguuugca

SEQ ID NO: 111498 - RNA, 19 nt, Homo sapiens
  misc_RNA (1)...(19): siRNA sense strand
gaaaaggccugaagauucc

SEQ ID NO: 111499 - RNA, 19 nt, Homo sapiens
  misc_RNA (1)...(19): siRNA sense strand
acauuacuaucuacaguug

SEQ ID NO: 111500 - RNA, 19 nt, Homo sapiens
  misc_RNA (1)...(19): siRNA sense strand
uggcaugucggcccuguua

SEQ ID NO: 111501 - RNA, 19 nt, Homo sapiens
  misc_RNA (1)...(19): siRNA sense strand
auggagcgguucuggaaua

SEQ ID NO: 111502 - RNA, 19 nt, Homo sapiens
  misc_RNA (1)...(19): siRNA sense strand
gggaaccacggccaaagaa

SEQ ID NO: 111503 - RNA, 19 nt, Homo sapiens
  misc_RNA (1)...(19): siRNA sense strand
gugguuguccugguucuua

SEQ ID NO: 111504 - RNA, 19 nt, Homo sapiens
  misc_RNA (1)...(19): siRNA sense strand
uuacuguguuguccucuau

SEQ ID NO: 111505 - RNA, 19 nt, Homo sapiens
  misc_RNA (1)...(19): siRNA sense strand
gugcaggggucucucuuuu

SEQ ID NO: 111506 - RNA, 19 nt, Homo sapiens
  misc_RNA (1)...(19): siRNA sense strand
gaagagauggagcgguucu

SEQ ID NO: 111507 - RNA, 19 nt, Homo sapiens
  misc_RNA (1)...(19): siRNA sense strand
uaucagaaaugcuguuccu

SEQ ID NO: 111508 - RNA, 19 nt, Homo sapiens
  misc_RNA (1)...(19): siRNA sense strand
cuuugagucuuauuuggaa

SEQ ID NO: 111509 - RNA, 19 nt, Homo sapiens
  misc_RNA (1)...(19): siRNA sense strand
uggagugguuguccugguu

SEQ ID NO: 111510 - RNA, 19 nt, Homo sapiens
  misc_RNA (1)...(19): siRNA sense strand
uggagcgguucuggaauaa

SEQ ID NO: 111511 - RNA, 19 nt, Homo sapiens
  misc_RNA (1)...(19): siRNA sense strand
agauggagcgguucuggaa

SEQ ID NO: 111512 - RNA, 19 nt, Homo sapiens
  misc_RNA (1)...(19): siRNA sense strand
agucuuauuuggaacuugu

SEQ ID NO: 111513 - RNA, 19 nt, Homo sapiens
  misc_RNA (1)...(19): siRNA sense strand
gagacacguuggucgucau

SEQ ID NO: 111514 - RNA, 19 nt, Homo sapiens
  misc_RNA (1)...(19): siRNA sense strand
ccugggaacuuugagucuu

SEQ ID NO: 111515 - RNA, 19 nt, Homo sapiens
  misc_RNA (1)...(19): siRNA sense strand
caccguggcacugguauug

SEQ ID NO: 111516 - RNA, 19 nt, Homo sapiens
  misc_RNA (1)...(19): siRNA sense strand
acacguuggucgucauugc

SEQ ID NO: 111517 - RNA, 19 nt, Homo sapiens
  misc_RNA (1)...(19): siRNA sense strand
gcucauaucucagcauuuc

SEQ ID NO: 111518 - RNA, 19 nt, Homo sapiens
  misc_RNA (1)...(19): siRNA sense strand
ggaccgaccuaucccagaa

SEQ ID NO: 111519 - RNA, 19 nt, Homo sapiens
  misc_RNA (1)...(19): siRNA sense strand
gcucugcgauggacuauuc

SEQ ID NO: 111520 - RNA, 19 nt, Homo sapiens
  misc_RNA (1)...(19): siRNA sense strand
gcgagaggguugucagugu

SEQ ID NO: 111521 - RNA, 19 nt, Homo sapiens
  misc_RNA (1)...(19): siRNA sense strand
uugcugggcuuugcuauuu

SEQ ID NO: 111522 - RNA, 19 nt, Homo sapiens
  misc_RNA (1)...(19): siRNA sense strand
gcuuugcuauuucaacuau

SEQ ID NO: 111523 - RNA, 19 nt, Homo sapiens
  misc_RNA (1)...(19): siRNA sense strand
cgagaggguugucaguguu

SEQ ID NO: 111524 - RNA, 19 nt, Homo sapiens
  misc_RNA (1)...(19): siRNA sense strand
acuuucagcuuuaaccuuu

SEQ ID NO: 111525 - RNA, 19 nt, Homo sapiens
  misc_RNA (1)...(19): siRNA sense strand
gagaggguugucaguguuu

SEQ ID NO: 111526 - RNA, 19 nt, Homo sapiens
  misc_RNA (1)...(19): siRNA sense strand
gcuuccggcugcuuauuug

SEQ ID NO: 111527 - RNA, 19 nt, Homo sapiens
  misc_RNA (1)...(19): siRNA sense strand
cgagcucuguugcuucgaa

SEQ ID NO: 111528 - RNA, 19 nt, Homo sapiens
  misc_RNA (1)...(19): siRNA sense strand
gggcuuugcuauuucaacu

SEQ ID NO: 111529 - RNA, 19 nt, Homo sapiens
  misc_RNA (1)...(19): siRNA sense strand
gcugggcuuugcuauuuca

SEQ ID NO: 111530 - RNA, 19 nt, Homo sapiens
  misc_RNA (1)...(19): siRNA sense strand
cagaccugcucauaucuca

SEQ ID NO: 111531 - RNA, 19 nt, Homo sapiens
  misc_RNA (1)...(19): siRNA sense strand
cugcagcccucacucuuca

SEQ ID NO: 111532 - RNA, 19 nt, Homo sapiens
  misc_RNA (1)...(19): siRNA sense strand
uuucaacuaucacgaugug

SEQ ID NO: 111533 - RNA, 19 nt, Homo sapiens
  misc_RNA (1)...(19): siRNA sense strand
uuuggcacuuucagcuuua

SEQ ID NO: 111534 - RNA, 19 nt, Homo sapiens
  misc_RNA (1)...(19): siRNA sense strand
gcuccaaggcugcaucucu

SEQ ID NO: 111535 - RNA, 19 nt, Homo sapiens
  misc_RNA (1)...(19): siRNA sense strand
guuacugacuauguucaug

SEQ ID NO: 111536 - RNA, 19 nt, Homo sapiens
  misc_RNA (1)...(19): siRNA sense strand
ucauaucucagcauuucuu

SEQ ID NO: 111537 - RNA, 19 nt, Homo sapiens
  misc_RNA (1)...(19): siRNA sense strand
gggcaucugcaaagcuguu

SEQ ID NO: 111538 - RNA, 19 nt, Homo sapiens
  misc_RNA (1)...(19): siRNA sense strand
gggaugccuugcagaaagc

SEQ ID NO: 111539 - RNA, 19 nt, Homo sapiens
  misc_RNA (1)...(19): siRNA sense strand
cguuugcggugcccuagga

SEQ ID NO: 111540 - RNA, 19 nt, Homo sapiens
  misc_RNA (1)...(19): siRNA sense strand
ucaccgagccaccauucug

SEQ ID NO: 111541 - RNA, 19 nt, Homo sapiens
  misc_RNA (1)...(19): siRNA sense strand
gcagggcuuuuggcacuuu

SEQ ID NO: 111542 - RNA, 19 nt, Homo sapiens
  misc_RNA (1)...(19): siRNA sense strand
gcagcccucacucuucaug

SEQ ID NO: 111543 - RNA, 19 nt, Homo sapiens
  misc_RNA (1)...(19): siRNA sense strand
gaaaggaaaucaucgaaua

SEQ ID NO: 111544 - RNA, 19 nt, Homo sapiens
  misc_RNA (1)...(19): siRNA sense strand
caggagagcugccucauua

SEQ ID NO: 111545 - RNA, 19 nt, Homo sapiens
  misc_RNA (1)...(19): siRNA sense strand
gaacguacuuugcacauug

SEQ ID NO: 111546 - RNA, 19 nt, Homo sapiens
  misc_RNA (1)...(19): siRNA sense strand
caauauaccagcaacauua

SEQ ID NO: 111547 - RNA, 19 nt, Homo sapiens
  misc_RNA (1)...(19): siRNA sense strand
ccagagagaucauguguca

SEQ ID NO: 111548 - RNA, 19 nt, Homo sapiens
  misc_RNA (1)...(19): siRNA sense strand
gaagaagauugcaggaguu

SEQ ID NO: 111549 - RNA, 19 nt, Homo sapiens
  misc_RNA (1)...(19): siRNA sense strand
ugaacagucugcaaguuua

SEQ ID NO: 111550 - RNA, 19 nt, Homo sapiens
  misc_RNA (1)...(19): siRNA sense strand
gcacaaguguaaagugaug

SEQ ID NO: 111551 - RNA, 19 nt, Homo sapiens
  misc_RNA (1)...(19): siRNA sense strand
ccaaucgggucaucauuaa

SEQ ID NO: 111552 - RNA, 19 nt, Homo sapiens
  misc_RNA (1)...(19): siRNA sense strand
guggagaccuggugugaaa

SEQ ID NO: 111553 - RNA, 19 nt, Homo sapiens
  misc_RNA (1)...(19): siRNA sense strand
gaaagcagcaucagguaga

SEQ ID NO: 111554 - RNA, 19 nt, Homo sapiens
  misc_RNA (1)...(19): siRNA sense strand
cagaggagcuggagaacga

SEQ ID NO: 111555 - RNA, 19 nt, Homo sapiens
  misc_RNA (1)...(19): siRNA sense strand
agagauaccugggcgauuu

SEQ ID NO: 111556 - RNA, 19 nt, Homo sapiens
  misc_RNA (1)...(19): siRNA sense strand
auacuaccuucgccaauua

SEQ ID NO: 111557 - RNA, 19 nt, Homo sapiens
  misc_RNA (1)...(19): siRNA sense strand
gaucaugugucagucuuug

SEQ ID NO: 111558 - RNA, 19 nt, Homo sapiens
  misc_RNA (1)...(19): siRNA sense strand
aggaagcccugcugagaua

SEQ ID NO: 111559 - RNA, 19 nt, Homo sapiens
  misc_RNA (1)...(19): siRNA sense strand
cagugagaguguacaaaua

SEQ ID NO: 111560 - RNA, 19 nt, Homo sapiens
  misc_RNA (1)...(19): siRNA sense strand
gcugcaagcuggauguaga

SEQ ID NO: 111561 - RNA, 19 nt, Homo sapiens
  misc_RNA (1)...(19): siRNA sense strand
cuggaggccugcuggauua

SEQ ID NO: 111562 - RNA, 19 nt, Homo sapiens
  misc_RNA (1)...(19): siRNA sense strand
ggaccugccugguggacuu

SEQ ID NO: 111563 - RNA, 19 nt, Homo sapiens
  misc_RNA (1)...(19): siRNA sense strand
ggaacguacuuugcacauu

SEQ ID NO: 111564 - RNA, 19 nt, Homo sapiens
  misc_RNA (1)...(19): siRNA sense strand
uggauuacaucgacaaaga

SEQ ID NO: 111565 - RNA, 19 nt, Homo sapiens
  misc_RNA (1)...(19): siRNA sense strand
gaacaaugugcagcucaua

SEQ ID NO: 111566 - RNA, 19 nt, Homo sapiens
  misc_RNA (1)...(19): siRNA sense strand
gagaaagcagcaucaggua

SEQ ID NO: 111567 - RNA, 19 nt, Homo sapiens
  misc_RNA (1)...(19): siRNA sense strand
ggacugagaccaucuacca

SEQ ID NO: 111568 - RNA, 19 nt, Homo sapiens
  misc_RNA (1)...(19): siRNA sense strand
ggaggaagcccugcugaga

SEQ ID NO: 111569 - RNA, 19 nt, Homo sapiens
  misc_RNA (1)...(19): siRNA sense strand
gugcaggguucccauguga

SEQ ID NO: 111570 - RNA, 19 nt, Homo sapiens
  misc_RNA (1)...(19): siRNA sense strand
gaagauugcaggaguugau

SEQ ID NO: 111571 - RNA, 19 nt, Homo sapiens
  misc_RNA (1)...(19): siRNA sense strand
ugacaaagccagagagauc

SEQ ID NO: 111572 - RNA, 19 nt, Homo sapiens
  misc_RNA (1)...(19): siRNA sense strand
gcacgggauuuuaauauug

SEQ ID NO: 111573 - RNA, 19 nt, Homo sapiens
  misc_RNA (1)...(19): siRNA sense strand
gagaucaugugucagucuu

SEQ ID NO: 111574 - RNA, 19 nt, Homo sapiens
  misc_RNA (1)...(19): siRNA sense strand
ucgcacaaguguaaaguga

SEQ ID NO: 111575 - RNA, 19 nt, Homo sapiens
  misc_RNA (1)...(19): siRNA sense strand
ggagagcugccucauuaga

SEQ ID NO: 111576 - RNA, 19 nt, Homo sapiens
  misc_RNA (1)...(19): siRNA sense strand
aauuauggcugccuaugaa

SEQ ID NO: 111577 - RNA, 19 nt, Homo sapiens
  misc_RNA (1)...(19): siRNA sense strand
ccucugaucugcaaagaag

SEQ ID NO: 111578 - RNA, 19 nt, Homo sapiens
  misc_RNA (1)...(19): siRNA sense strand
gcuccaugaucuccaggua

SEQ ID NO: 111579 - RNA, 19 nt, Homo sapiens
  misc_RNA (1)...(19): siRNA sense strand
ggaaaggaaaucaucgaau

SEQ ID NO: 111580 - RNA, 19 nt, Homo sapiens
  misc_RNA (1)...(19): siRNA sense strand
ggaacaaugugcagcucau

SEQ ID NO: 111581 - RNA, 19 nt, Homo sapiens
  misc_RNA (1)...(19): siRNA sense strand
ucagagacaucuucaucau

SEQ ID NO: 111582 - RNA, 19 nt, Homo sapiens
  misc_RNA (1)...(19): siRNA sense strand
ggaaaucaucgaauacuac

SEQ ID NO: 111583 - RNA, 19 nt, Homo sapiens
  misc_RNA (1)...(19): siRNA sense strand
gcaaugaaacaauauacca

SEQ ID NO: 111584 - RNA, 19 nt, Homo sapiens
  misc_RNA (1)...(19): siRNA sense strand
aguguaaagugauguacua

SEQ ID NO: 111585 - RNA, 19 nt, Homo sapiens
  misc_RNA (1)...(19): siRNA sense strand
guggaugccucgucaguca

SEQ ID NO: 111586 - RNA, 19 nt, Homo sapiens
  misc_RNA (1)...(19): siRNA sense strand
ccgaccacaucaagagaua

SEQ ID NO: 111587 - RNA, 19 nt, Homo sapiens
  misc_RNA (1)...(19): siRNA sense strand
gaugacaacaccagaagga

SEQ ID NO: 111588 - RNA, 19 nt, Homo sapiens
  misc_RNA (1)...(19): siRNA sense strand
guuaguccguucauugaug

SEQ ID NO: 111589 - RNA, 19 nt, Homo sapiens
  misc_RNA (1)...(19): siRNA sense strand
guaaaugaagaacggcuaa

SEQ ID NO: 111590 - RNA, 19 nt, Homo sapiens
  misc_RNA (1)...(19): siRNA sense strand
caaagagauuauuccagau

SEQ ID NO: 111591 - RNA, 19 nt, Homo sapiens
  misc_RNA (1)...(19): siRNA sense strand
gcaggucucuucgcacaag

SEQ ID NO: 111592 - RNA, 19 nt, Homo sapiens
  misc_RNA (1)...(19): siRNA sense strand
cugaagcucuggacugaga

SEQ ID NO: 111593 - RNA, 19 nt, Homo sapiens
  misc_RNA (1)...(19): siRNA sense strand
aauacuaccuucgccaauu

SEQ ID NO: 111594 - RNA, 19 nt, Homo sapiens
  misc_RNA (1)...(19): siRNA sense strand
ccucgucagucaucacuug

SEQ ID NO: 111595 - RNA, 19 nt, Homo sapiens
  misc_RNA (1)...(19): siRNA sense strand
uuacaucgacaaagagauu

SEQ ID NO: 111596 - RNA, 19 nt, Homo sapiens
  misc_RNA (1)...(19): siRNA sense strand
aggaaaucaucgaauacua

SEQ ID NO: 111597 - RNA, 19 nt, Homo sapiens
  misc_RNA (1)...(19): siRNA sense strand
ucucuucgcacaaguguaa

SEQ ID NO: 111598 - RNA, 19 nt, Homo sapiens
  misc_RNA (1)...(19): siRNA sense strand
caagcuggauguagaugca

SEQ ID NO: 111599 - RNA, 19 nt, Homo sapiens
  misc_RNA (1)...(19): siRNA sense strand
ccagugagaguguacaaau

SEQ ID NO: 111600 - RNA, 19 nt, Homo sapiens
  misc_RNA (1)...(19): siRNA sense strand
ggagaacgaagaccugaag

SEQ ID NO: 111601 - RNA, 19 nt, Homo sapiens
  misc_RNA (1)...(19): siRNA sense strand
gaggccaacuacccugaga

SEQ ID NO: 111602 - RNA, 19 nt, Homo sapiens
  misc_RNA (1)...(19): siRNA sense strand
cccagaagcugcccucaag

SEQ ID NO: 111603 - RNA, 19 nt, Homo sapiens
  misc_RNA (1)...(19): siRNA sense strand
gaacagucugcaaguuuag

SEQ ID NO: 111604 - RNA, 19 nt, Homo sapiens
  misc_RNA (1)...(19): siRNA sense strand
uccaaucgggucaucauua

SEQ ID NO: 111605 - RNA, 19 nt, Homo sapiens
  misc_RNA (1)...(19): siRNA sense strand
gaugcgaagagaauacaaa

SEQ ID NO: 111606 - RNA, 19 nt, Homo sapiens
  misc_RNA (1)...(19): siRNA sense strand
cuaaggcgaugcgaagaga

SEQ ID NO: 111607 - RNA, 19 nt, Homo sapiens
  misc_RNA (1)...(19): siRNA sense strand
uaauuauggcugccuauga

SEQ ID NO: 111608 - RNA, 19 nt, Homo sapiens
  misc_RNA (1)...(19): siRNA sense strand
gaucugcaaagaaggagaa

SEQ ID NO: 111609 - RNA, 19 nt, Homo sapiens
  misc_RNA (1)...(19): siRNA sense strand
gaggaagcccugcugagau

SEQ ID NO: 111610 - RNA, 19 nt, Homo sapiens
  misc_RNA (1)...(19): siRNA sense strand
gcaaaauuccaaaagauga

SEQ ID NO: 111611 - RNA, 19 nt, Homo sapiens
  misc_RNA (1)...(19): siRNA sense strand
gauuucagagguuccauga

SEQ ID NO: 111612 - RNA, 19 nt, Homo sapiens
  misc_RNA (1)...(19): siRNA sense strand
gggcaaaauuccaaaagau

SEQ ID NO: 111613 - RNA, 19 nt, Homo sapiens
  misc_RNA (1)...(19): siRNA sense strand
ggcaucaucacgacaaaga

SEQ ID NO: 111614 - RNA, 19 nt, Homo sapiens
  misc_RNA (1)...(19): siRNA sense strand
gaauacuaccuucgccaau

SEQ ID NO: 111615 - RNA, 19 nt, Homo sapiens
  misc_RNA (1)...(19): siRNA sense strand
gugaucggcucggaggauu

SEQ ID NO: 111616 - RNA, 19 nt, Homo sapiens
  misc_RNA (1)...(19): siRNA sense strand
agucaucacuugggauuuc

SEQ ID NO: 111617 - RNA, 19 nt, Homo sapiens
  misc_RNA (1)...(19): siRNA sense strand
gauuacaucgacaaagaga

SEQ ID NO: 111618 - RNA, 19 nt, Homo sapiens
  misc_RNA (1)...(19): siRNA sense strand
gacaacaccagaaggaagu

SEQ ID NO: 111619 - RNA, 19 nt, Homo sapiens
  misc_RNA (1)...(19): siRNA sense strand
uagacuacauucuugaaac

SEQ ID NO: 111620 - RNA, 19 nt, Homo sapiens
  misc_RNA (1)...(19): siRNA sense strand
cagaagcugcccucaagga

SEQ ID NO: 111621 - RNA, 19 nt, Homo sapiens
  misc_RNA (1)...(19): siRNA sense strand
caaaggggacauuguguuu

SEQ ID NO: 111622 - RNA, 19 nt, Homo sapiens
  misc_RNA (1)...(19): siRNA sense strand
ggauuucgacgugugcaaa

SEQ ID NO: 111623 - RNA, 19 nt, Homo sapiens
  misc_RNA (1)...(19): siRNA sense strand
agagauuauuccagauuuc

SEQ ID NO: 111624 - RNA, 19 nt, Homo sapiens
  misc_RNA (1)...(19): siRNA sense strand
cgacaaagagauuauucca

SEQ ID NO: 111625 - RNA, 19 nt, Homo sapiens
  misc_RNA (1)...(19): siRNA sense strand
gggcaccccugacgacaaa

SEQ ID NO: 111626 - RNA, 19 nt, Homo sapiens
  misc_RNA (1)...(19): siRNA sense strand
gaagaagaaggcauaaccu

SEQ ID NO: 111627 - RNA, 19 nt, Homo sapiens
  misc_RNA (1)...(19): siRNA sense strand
agagagaucaugugucagu

SEQ ID NO: 111628 - RNA, 19 nt, Homo sapiens
  misc_RNA (1)...(19): siRNA sense strand
gagauaccugggcgauuug

SEQ ID NO: 111629 - RNA, 19 nt, Homo sapiens
  misc_RNA (1)...(19): siRNA sense strand
aaucgggucaucauuaaug

SEQ ID NO: 111630 - RNA, 19 nt, Homo sapiens
  misc_RNA (1)...(19): siRNA sense strand
acaauauaccagcaacauu

SEQ ID NO: 111631 - RNA, 19 nt, Homo sapiens
  misc_RNA (1)...(19): siRNA sense strand
uugaacagucugcaaguuu

SEQ ID NO: 111632 - RNA, 19 nt, Homo sapiens
  misc_RNA (1)...(19): siRNA sense strand
gucugcaaguuuagauauu

SEQ ID NO: 111633 - RNA, 19 nt, Homo sapiens
  misc_RNA (1)...(19): siRNA sense strand
caucauccuccaagaaaca

SEQ ID NO: 111634 - RNA, 19 nt, Homo sapiens
  misc_RNA (1)...(19): siRNA sense strand
caagaggucgccacaacca

SEQ ID NO: 111635 - RNA, 19 nt, Homo sapiens
  misc_RNA (1)...(19): siRNA sense strand
ucagucaucacuugggauu

SEQ ID NO: 111636 - RNA, 19 nt, Homo sapiens
  misc_RNA (1)...(19): siRNA sense strand
gaggccugcuggauuacau

SEQ ID NO: 111637 - RNA, 19 nt, Homo sapiens
  misc_RNA (1)...(19): siRNA sense strand
gacaaagccagagagauca

SEQ ID NO: 111638 - RNA, 19 nt, Homo sapiens
  misc_RNA (1)...(19): siRNA sense strand
ccaacuacccugagacacu

SEQ ID NO: 111639 - RNA, 19 nt, Homo sapiens
  misc_RNA (1)...(19): siRNA sense strand
acaaugugcagcucauaga

SEQ ID NO: 111640 - RNA, 19 nt, Homo sapiens
  misc_RNA (1)...(19): siRNA sense strand
auuagaagaagaaggcaua

SEQ ID NO: 111641 - RNA, 19 nt, Homo sapiens
  misc_RNA (1)...(19): siRNA sense strand
uccaagaggucgccacaac

SEQ ID NO: 111642 - RNA, 19 nt, Homo sapiens
  misc_RNA (1)...(19): siRNA sense strand
gcugguuaguccguucauu

SEQ ID NO: 111643 - RNA, 19 nt, Homo sapiens
  misc_RNA (1)...(19): siRNA sense strand
gagcagagccuccgcugaa

SEQ ID NO: 111644 - RNA, 19 nt, Homo sapiens
  misc_RNA (1)...(19): siRNA sense strand
ccagagaaauaacagacaa

SEQ ID NO: 111645 - RNA, 19 nt, Homo sapiens
  misc_RNA (1)...(19): siRNA sense strand
ggagagcgccaucuucaau

SEQ ID NO: 111646 - RNA, 19 nt, Homo sapiens
  misc_RNA (1)...(19): siRNA sense strand
gaaggucgcagcccucaga

SEQ ID NO: 111647 - RNA, 19 nt, Homo sapiens
  misc_RNA (1)...(19): siRNA sense strand
agaaauaacagacaaguca

SEQ ID NO: 111648 - RNA, 19 nt, Homo sapiens
  misc_RNA (1)...(19): siRNA sense strand
gguggucacugcugucuuc

SEQ ID NO: 111649 - RNA, 19 nt, Homo sapiens
  misc_RNA (1)...(19): siRNA sense strand
uggcacagcuggugaucaa

SEQ ID NO: 111650 - RNA, 19 nt, Homo sapiens
  misc_RNA (1)...(19): siRNA sense strand
ggucacugcugucuucauc

SEQ ID NO: 111651 - RNA, 19 nt, Homo sapiens
  misc_RNA (1)...(19): siRNA sense strand
ggcauucccuggccacguu

SEQ ID NO: 111652 - RNA, 19 nt, Homo sapiens
  misc_RNA (1)...(19): siRNA sense strand
guucaaacccucaccacuu

SEQ ID NO: 111653 - RNA, 19 nt, Homo sapiens
  misc_RNA (1)...(19): siRNA sense strand
ggacaccagagaaauaaca

SEQ ID NO: 111654 - RNA, 19 nt, Homo sapiens
  misc_RNA (1)...(19): siRNA sense strand
agagcgccaucuucaauga

SEQ ID NO: 111655 - RNA, 19 nt, Homo sapiens
  misc_RNA (1)...(19): siRNA sense strand
gugggacaccagagaaaua

SEQ ID NO: 111656 - RNA, 19 nt, Homo sapiens
  misc_RNA (1)...(19): siRNA sense strand
gcacagcuggugaucaaag

SEQ ID NO: 111657 - RNA, 19 nt, Homo sapiens
  misc_RNA (1)...(19): siRNA sense strand
uucaaacccucaccacuug

SEQ ID NO: 111658 - RNA, 19 nt, Homo sapiens
  misc_RNA (1)...(19): siRNA sense strand
gcaggagagcgccaucuuc

SEQ ID NO: 111659 - RNA, 19 nt, Homo sapiens
  misc_RNA (1)...(19): siRNA sense strand
caggagagcgccaucuuca

SEQ ID NO: 111660 - RNA, 19 nt, Homo sapiens
  misc_RNA (1)...(19): siRNA sense strand
caacccuuguuuccauaug

SEQ ID NO: 111661 - RNA, 19 nt, Homo sapiens
  misc_RNA (1)...(19): siRNA sense strand
ggagguuucaggugcagaa

SEQ ID NO: 111662 - RNA, 19 nt, Homo sapiens
  misc_RNA (1)...(19): siRNA sense strand
gagagcgccaucuucaaug

SEQ ID NO: 111663 - RNA, 19 nt, Homo sapiens
  misc_RNA (1)...(19): siRNA sense strand
ccaacgccuucucccaugu

SEQ ID NO: 111664 - RNA, 19 nt, Homo sapiens
  misc_RNA (1)...(19): siRNA sense strand
cccaacccuuguuuccaua

SEQ ID NO: 111665 - RNA, 19 nt, Homo sapiens
  misc_RNA (1)...(19): siRNA sense strand
gagaaauaacagacaaguc

SEQ ID NO: 111666 - RNA, 19 nt, Homo sapiens
  misc_RNA (1)...(19): siRNA sense strand
caagucacgcuggagguuu

SEQ ID NO: 111667 - RNA, 19 nt, Homo sapiens
  misc_RNA (1)...(19): siRNA sense strand
augcugggcuguacaugug

SEQ ID NO: 111668 - RNA, 19 nt, Homo sapiens
  misc_RNA (1)...(19): siRNA sense strand
gcgagaacaccgucauguc

SEQ ID NO: 111669 - RNA, 19 nt, Homo sapiens
  misc_RNA (1)...(19): siRNA sense strand
ugggacaccagagaaauaa

SEQ ID NO: 111670 - RNA, 19 nt, Homo sapiens
  misc_RNA (1)...(19): siRNA sense strand
ggacagaaguggaaauauu

SEQ ID NO: 111671 - RNA, 19 nt, Homo sapiens
  misc_RNA (1)...(19): siRNA sense strand
gcaaagcacugaaguugaa

SEQ ID NO: 111672 - RNA, 19 nt, Homo sapiens
  misc_RNA (1)...(19): siRNA sense strand
gaaagaccuuggagaaauu

SEQ ID NO: 111673 - RNA, 19 nt, Homo sapiens
  misc_RNA (1)...(19): siRNA sense strand
gaacaacacugggauuuca

SEQ ID NO: 111674 - RNA, 19 nt, Homo sapiens
  misc_RNA (1)...(19): siRNA sense strand
auaaagagcuucugaaaca

SEQ ID NO: 111675 - RNA, 19 nt, Homo sapiens
  misc_RNA (1)...(19): siRNA sense strand
ggauuuggauguaguaaug

SEQ ID NO: 111676 - RNA, 19 nt, Homo sapiens
  misc_RNA (1)...(19): siRNA sense strand
gacagaaguggaaauauua

SEQ ID NO: 111677 - RNA, 19 nt, Homo sapiens
  misc_RNA (1)...(19): siRNA sense strand
cauggcaccugaaagaaua

SEQ ID NO: 111678 - RNA, 19 nt, Homo sapiens
  misc_RNA (1)...(19): siRNA sense strand
gcaaauaauggcaguuaaa

SEQ ID NO: 111679 - RNA, 19 nt, Homo sapiens
  misc_RNA (1)...(19): siRNA sense strand
gauaucaaaccuuccaaua

SEQ ID NO: 111680 - RNA, 19 nt, Homo sapiens
  misc_RNA (1)...(19): siRNA sense strand
ugaaagaccuuggagaaau

SEQ ID NO: 111681 - RNA, 19 nt, Homo sapiens
  misc_RNA (1)...(19): siRNA sense strand
caaaccaagugggcaaaua

SEQ ID NO: 111682 - RNA, 19 nt, Homo sapiens
  misc_RNA (1)...(19): siRNA sense strand
gauaugauguccgcucuga

SEQ ID NO: 111683 - RNA, 19 nt, Homo sapiens
  misc_RNA (1)...(19): siRNA sense strand
gcccauacauuguucaguu

SEQ ID NO: 111684 - RNA, 19 nt, Homo sapiens
  misc_RNA (1)...(19): siRNA sense strand
gcacugaaguugaauuuug

SEQ ID NO: 111685 - RNA, 19 nt, Homo sapiens
  misc_RNA (1)...(19): siRNA sense strand
gcaaauccaccuuucaaau

SEQ ID NO: 111686 - RNA, 19 nt, Homo sapiens
  misc_RNA (1)...(19): siRNA sense strand
gcucugaugucuggaguuu

SEQ ID NO: 111687 - RNA, 19 nt, Homo sapiens
  misc_RNA (1)...(19): siRNA sense strand
gaaagcacuaaaccacuua

SEQ ID NO: 111688 - RNA, 19 nt, Homo sapiens
  misc_RNA (1)...(19): siRNA sense strand
uaacacaagucgugaaagg

SEQ ID NO: 111689 - RNA, 19 nt, Homo sapiens
  misc_RNA (1)...(19): siRNA sense strand
guauaaagagcuucugaaa

SEQ ID NO: 111690 - RNA, 19 nt, Homo sapiens
  misc_RNA (1)...(19): siRNA sense strand
caucaacuuugucaacuug

SEQ ID NO: 111691 - RNA, 19 nt, Homo sapiens
  misc_RNA (1)...(19): siRNA sense strand
ugaaagcacuaaaccacuu

SEQ ID NO: 111692 - RNA, 19 nt, Homo sapiens
  misc_RNA (1)...(19): siRNA sense strand
gggcaaauaauggcaguua

SEQ ID NO: 111693 - RNA, 19 nt, Homo sapiens
  misc_RNA (1)...(19): siRNA sense strand
gaggucgcaugcuauguuu

SEQ ID NO: 111694 - RNA, 19 nt, Homo sapiens
  misc_RNA (1)...(19): siRNA sense strand
gaaauauuaagcucuguga

SEQ ID NO: 111695 - RNA, 19 nt, Homo sapiens
  misc_RNA (1)...(19): siRNA sense strand
guauggaacucaugucuac

SEQ ID NO: 111696 - RNA, 19 nt, Homo sapiens
  misc_RNA (1)...(19): siRNA sense strand
acagcaagguuuacucuga

SEQ ID NO: 111697 - RNA, 19 nt, Homo sapiens
  misc_RNA (1)...(19): siRNA sense strand
ucugaaacaucccuuuauu

SEQ ID NO: 111698 - RNA, 19 nt, Homo sapiens
  misc_RNA (1)...(19): siRNA sense strand
ccacaggccgauuuccuua

SEQ ID NO: 111699 - RNA, 19 nt, Homo sapiens
  misc_RNA (1)...(19): siRNA sense strand
ggcaaauaauggcaguuaa

SEQ ID NO: 111700 - RNA, 19 nt, Homo sapiens
  misc_RNA (1)...(19): siRNA sense strand
cagcaagguuuacucugaa

SEQ ID NO: 111701 - RNA, 19 nt, Homo sapiens
  misc_RNA (1)...(19): siRNA sense strand
ccaaaaggccaaaguauaa

SEQ ID NO: 111702 - RNA, 19 nt, Homo sapiens
  misc_RNA (1)...(19): siRNA sense strand
caaauccaccuuucaaauc

SEQ ID NO: 111703 - RNA, 19 nt, Homo sapiens
  misc_RNA (1)...(19): siRNA sense strand
ggacgaggagcuuaugguu

SEQ ID NO: 111704 - RNA, 19 nt, Homo sapiens
  misc_RNA (1)...(19): siRNA sense strand
guaaugcggaguagugauu

SEQ ID NO: 111705 - RNA, 19 nt, Homo sapiens
  misc_RNA (1)...(19): siRNA sense strand
aaaccaagugggcaaauaa

SEQ ID NO: 111706 - RNA, 19 nt, Homo sapiens
  misc_RNA (1)...(19): siRNA sense strand
gagggugacuguuggaucu

SEQ ID NO: 111707 - RNA, 19 nt, Homo sapiens
  misc_RNA (1)...(19): siRNA sense strand
gaaauuggacgaggagcuu

SEQ ID NO: 111708 - RNA, 19 nt, Homo sapiens
  misc_RNA (1)...(19): siRNA sense strand
cuaccucguuugauaaguu

SEQ ID NO: 111709 - RNA, 19 nt, Homo sapiens
  misc_RNA (1)...(19): siRNA sense strand
uuugucaacuugugccuua

SEQ ID NO: 111710 - RNA, 19 nt, Homo sapiens
  misc_RNA (1)...(19): siRNA sense strand
ucacagagauaucaaaccu

SEQ ID NO: 111711 - RNA, 19 nt, Homo sapiens
  misc_RNA (1)...(19): siRNA sense strand
gaucacauuguaugaguug

SEQ ID NO: 111712 - RNA, 19 nt, Homo sapiens
  misc_RNA (1)...(19): siRNA sense strand
gggaucacauuguaugagu

SEQ ID NO: 111713 - RNA, 19 nt, Homo sapiens
  misc_RNA (1)...(19): siRNA sense strand
ucagagagggugacuguug

SEQ ID NO: 111714 - RNA, 19 nt, Homo sapiens
  misc_RNA (1)...(19): siRNA sense strand
gcugaguaauucugaggaa

SEQ ID NO: 111715 - RNA, 19 nt, Homo sapiens
  misc_RNA (1)...(19): siRNA sense strand
acucaugucuaccucguuu

SEQ ID NO: 111716 - RNA, 19 nt, Homo sapiens
  misc_RNA (1)...(19): siRNA sense strand
guaguaaugcggaguagug

SEQ ID NO: 111717 - RNA, 19 nt, Homo sapiens
  misc_RNA (1)...(19): siRNA sense strand
gcgcaucacgacaaggaua

SEQ ID NO: 111718 - RNA, 19 nt, Homo sapiens
  misc_RNA (1)...(19): siRNA sense strand
caaaaucacuuuagcaacu

SEQ ID NO: 111719 - RNA, 19 nt, Homo sapiens
  misc_RNA (1)...(19): siRNA sense strand
auacauggcaccugaaaga

SEQ ID NO: 111720 - RNA, 19 nt, Homo sapiens
  misc_RNA (1)...(19): siRNA sense strand
gaagaucuccccugaacaa

SEQ ID NO: 111721 - RNA, 19 nt, Homo sapiens
  misc_RNA (1)...(19): siRNA sense strand
ggucaacaguggaugaaaa

SEQ ID NO: 111722 - RNA, 19 nt, Homo sapiens
  misc_RNA (1)...(19): siRNA sense strand
ggaucacauuguaugaguu

SEQ ID NO: 111723 - RNA, 19 nt, Homo sapiens
  misc_RNA (1)...(19): siRNA sense strand
ucccagcucucccauguau

SEQ ID NO: 111724 - RNA, 19 nt, Homo sapiens
  misc_RNA (1)...(19): siRNA sense strand
gccaaaguauaaagagcuu

SEQ ID NO: 111725 - RNA, 19 nt, Homo sapiens
  misc_RNA (1)...(19): siRNA sense strand
gauguaguaaugcggagua

SEQ ID NO: 111726 - RNA, 19 nt, Homo sapiens
  misc_RNA (1)...(19): siRNA sense strand
ucccauguaugucgauuga

SEQ ID NO: 111727 - RNA, 19 nt, Homo sapiens
  misc_RNA (1)...(19): siRNA sense strand
gcauugagucaucaggaaa

SEQ ID NO: 111728 - RNA, 19 nt, Homo sapiens
  misc_RNA (1)...(19): siRNA sense strand
caaaucuacagcaagguuu

SEQ ID NO: 111729 - RNA, 19 nt, Homo sapiens
  misc_RNA (1)...(19): siRNA sense strand
cccauacauuguucaguuu

SEQ ID NO: 111730 - RNA, 19 nt, Homo sapiens
  misc_RNA (1)...(19): siRNA sense strand
gaguagugauugcccauac

SEQ ID NO: 111731 - RNA, 19 nt, Homo sapiens
  misc_RNA (1)...(19): siRNA sense strand
acacauagagagacugaga

SEQ ID NO: 111732 - RNA, 19 nt, Homo sapiens
  misc_RNA (1)...(19): siRNA sense strand
ccguugaggucgcaugcua

SEQ ID NO: 111733 - RNA, 19 nt, Homo sapiens
  misc_RNA (1)...(19): siRNA sense strand
aaauccaccuuucaaaucu

SEQ ID NO: 111734 - RNA, 19 nt, Homo sapiens
  misc_RNA (1)...(19): siRNA sense strand
gguaaacgcaaagcacuga

SEQ ID NO: 111735 - RNA, 19 nt, Homo sapiens
  misc_RNA (1)...(19): siRNA sense strand
gauguuauuccagaagaaa

SEQ ID NO: 111736 - RNA, 19 nt, Homo sapiens
  misc_RNA (1)...(19): siRNA sense strand
ggacuugaaagaccuugga

SEQ ID NO: 111737 - RNA, 19 nt, Homo sapiens
  misc_RNA (1)...(19): siRNA sense strand
acgaggagcuuaugguucu

SEQ ID NO: 111738 - RNA, 19 nt, Homo sapiens
  misc_RNA (1)...(19): siRNA sense strand
ucagcagcaugcaggguaa

SEQ ID NO: 111739 - RNA, 19 nt, Homo sapiens
  misc_RNA (1)...(19): siRNA sense strand
uuaugguucugucaacaaa

SEQ ID NO: 111740 - RNA, 19 nt, Homo sapiens
  misc_RNA (1)...(19): siRNA sense strand
cugaaacaucccuuuauuu

SEQ ID NO: 111741 - RNA, 19 nt, Homo sapiens
  misc_RNA (1)...(19): siRNA sense strand
caagagaugcuggcuguag

SEQ ID NO: 111742 - RNA, 19 nt, Homo sapiens
  misc_RNA (1)...(19): siRNA sense strand
ccacacauagagagacuga

SEQ ID NO: 111743 - RNA, 19 nt, Homo sapiens
  misc_RNA (1)...(19): siRNA sense strand
gcacuaaaccacuuaaaag

SEQ ID NO: 111744 - RNA, 19 nt, Homo sapiens
  misc_RNA (1)...(19): siRNA sense strand
ggugacuguuggaucugua

SEQ ID NO: 111745 - RNA, 19 nt, Homo sapiens
  misc_RNA (1)...(19): siRNA sense strand
ucuuauggauuuggaugua

SEQ ID NO: 111746 - RNA, 19 nt, Homo sapiens
  misc_RNA (1)...(19): siRNA sense strand
ucaaaucuacagcaagguu

SEQ ID NO: 111747 - RNA, 19 nt, Homo sapiens
  misc_RNA (1)...(19): siRNA sense strand
cgcaugcuauguuuguaaa

SEQ ID NO: 111748 - RNA, 19 nt, Homo sapiens
  misc_RNA (1)...(19): siRNA sense strand
gaaacaucccuuuauuuug

SEQ ID NO: 111749 - RNA, 19 nt, Homo sapiens
  misc_RNA (1)...(19): siRNA sense strand
gauguccgcucugaugucu

SEQ ID NO: 111750 - RNA, 19 nt, Homo sapiens
  misc_RNA (1)...(19): siRNA sense strand
gagcuuaugguucugucaa

SEQ ID NO: 111751 - RNA, 19 nt, Homo sapiens
  misc_RNA (1)...(19): siRNA sense strand
cugcagaggacuugaaaga

SEQ ID NO: 111752 - RNA, 19 nt, Homo sapiens
  misc_RNA (1)...(19): siRNA sense strand
cggcaucaguggacagcuu

SEQ ID NO: 111753 - RNA, 19 nt, Homo sapiens
  misc_RNA (1)...(19): siRNA sense strand
gaaguggaaauauuaagcu

SEQ ID NO: 111754 - RNA, 19 nt, Homo sapiens
  misc_RNA (1)...(19): siRNA sense strand
ccaagugggcaaauaaugg

SEQ ID NO: 111755 - RNA, 19 nt, Homo sapiens
  misc_RNA (1)...(19): siRNA sense strand
ggaguagugauugcccaua

SEQ ID NO: 111756 - RNA, 19 nt, Homo sapiens
  misc_RNA (1)...(19): siRNA sense strand
gaucaaaugccagcuacuc

SEQ ID NO: 111757 - RNA, 19 nt, Homo sapiens
  misc_RNA (1)...(19): siRNA sense strand
ugaggucgcaugcuauguu

SEQ ID NO: 111758 - RNA, 19 nt, Homo sapiens
  misc_RNA (1)...(19): siRNA sense strand
uaaagagcuucugaaacau

SEQ ID NO: 111759 - RNA, 19 nt, Homo sapiens
  misc_RNA (1)...(19): siRNA sense strand
ccaaaguggaauaguguau

SEQ ID NO: 111760 - RNA, 19 nt, Homo sapiens
  misc_RNA (1)...(19): siRNA sense strand
ucugaugucuggaguuugg

SEQ ID NO: 111761 - RNA, 19 nt, Homo sapiens
  misc_RNA (1)...(19): siRNA sense strand
ggacucuauugccaagaca

SEQ ID NO: 111762 - RNA, 19 nt, Homo sapiens
  misc_RNA (1)...(19): siRNA sense strand
gacagcuuguggacucuau

SEQ ID NO: 111763 - RNA, 19 nt, Homo sapiens
  misc_RNA (1)...(19): siRNA sense strand
auauuaagcucugugacuu

SEQ ID NO: 111764 - RNA, 19 nt, Homo sapiens
  misc_RNA (1)...(19): siRNA sense strand
uaccucguuugauaaguuu

SEQ ID NO: 111765 - RNA, 19 nt, Homo sapiens
  misc_RNA (1)...(19): siRNA sense strand
aaaucuacagcaagguuua

SEQ ID NO: 111766 - RNA, 19 nt, Homo sapiens
  misc_RNA (1)...(19): siRNA sense strand
cuugaaagaccuuggagaa

SEQ ID NO: 111767 - RNA, 19 nt, Homo sapiens
  misc_RNA (1)...(19): siRNA sense strand
cuucugaaacaucccuuua

SEQ ID NO: 111768 - RNA, 19 nt, Homo sapiens
  misc_RNA (1)...(19): siRNA sense strand
uaugauguccgcucugaug

SEQ ID NO: 111769 - RNA, 19 nt, Homo sapiens
  misc_RNA (1)...(19): siRNA sense strand
uagagagacugagaacaca

SEQ ID NO: 111770 - RNA, 19 nt, Homo sapiens
  misc_RNA (1)...(19): siRNA sense strand
ggaaaggccucuugauguu

SEQ ID NO: 111771 - RNA, 19 nt, Homo sapiens
  misc_RNA (1)...(19): siRNA sense strand
ggagagaucagcuuaguaa

SEQ ID NO: 111772 - RNA, 19 nt, Homo sapiens
  misc_RNA (1)...(19): siRNA sense strand
gcgacgagcugccugucua

SEQ ID NO: 111773 - RNA, 19 nt, Homo sapiens
  misc_RNA (1)...(19): siRNA sense strand
caacggugguggauguaaa

SEQ ID NO: 111774 - RNA, 19 nt, Homo sapiens
  misc_RNA (1)...(19): siRNA sense strand
gauguuaaguggauagaca

SEQ ID NO: 111775 - RNA, 19 nt, Homo sapiens
  misc_RNA (1)...(19): siRNA sense strand
ucacaacggugguggaugu

SEQ ID NO: 111776 - RNA, 19 nt, Homo sapiens
  misc_RNA (1)...(19): siRNA sense strand
gaacucaagucccgcucau

SEQ ID NO: 111777 - RNA, 19 nt, Homo sapiens
  misc_RNA (1)...(19): siRNA sense strand
gaccguggcgugugcauuu

SEQ ID NO: 111778 - RNA, 19 nt, Homo sapiens
  misc_RNA (1)...(19): siRNA sense strand
acucaagucccgcucauua

SEQ ID NO: 111779 - RNA, 19 nt, Homo sapiens
  misc_RNA (1)...(19): siRNA sense strand
aaaggccucuugauguuga

SEQ ID NO: 111780 - RNA, 19 nt, Homo sapiens
  misc_RNA (1)...(19): siRNA sense strand
aaccacagcuggcccgaaa

SEQ ID NO: 111781 - RNA, 19 nt, Homo sapiens
  misc_RNA (1)...(19): siRNA sense strand
gcacaugcccuggaacauc

SEQ ID NO: 111782 - RNA, 19 nt, Homo sapiens
  misc_RNA (1)...(19): siRNA sense strand
gggcgcaccagucguagua

SEQ ID NO: 111783 - RNA, 19 nt, Homo sapiens
  misc_RNA (1)...(19): siRNA sense strand
ggaugaugcuucuugaaaa

SEQ ID NO: 111784 - RNA, 19 nt, Homo sapiens
  misc_RNA (1)...(19): siRNA sense strand
cuacagcuauguuauucau

SEQ ID NO: 111785 - RNA, 19 nt, Homo sapiens
  misc_RNA (1)...(19): siRNA sense strand
gaaaggccucuugauguug

SEQ ID NO: 111786 - RNA, 19 nt, Homo sapiens
  misc_RNA (1)...(19): siRNA sense strand
guacaggaaaggccucuug

SEQ ID NO: 111787 - RNA, 19 nt, Homo sapiens
  misc_RNA (1)...(19): siRNA sense strand
caggaaaggccucuugaug

SEQ ID NO: 111788 - RNA, 19 nt, Homo sapiens
  misc_RNA (1)...(19): siRNA sense strand
cacaugcccuggaacauca

SEQ ID NO: 111789 - RNA, 19 nt, Homo sapiens
  misc_RNA (1)...(19): siRNA sense strand
aagagaggcugcaggaaca

SEQ ID NO: 111790 - RNA, 19 nt, Homo sapiens
  misc_RNA (1)...(19): siRNA sense strand
ucaugaagauguacaacca

SEQ ID NO: 111791 - RNA, 19 nt, Homo sapiens
  misc_RNA (1)...(19): siRNA sense strand
ggaggauguuaaguggaua

SEQ ID NO: 111792 - RNA, 19 nt, Homo sapiens
  misc_RNA (1)...(19): siRNA sense strand
gugcugcgcuucuucuucu

SEQ ID NO: 111793 - RNA, 19 nt, Homo sapiens
  misc_RNA (1)...(19): siRNA sense strand
aaauggagagaucagcuua

SEQ ID NO: 111794 - RNA, 19 nt, Homo sapiens
  misc_RNA (1)...(19): siRNA sense strand
gagaucagcuuaguaaaag

SEQ ID NO: 111795 - RNA, 19 nt, Homo sapiens
  misc_RNA (1)...(19): siRNA sense strand
cggaggauguuaaguggau

SEQ ID NO: 111796 - RNA, 19 nt, Homo sapiens
  misc_RNA (1)...(19): siRNA sense strand
gacaugaugguacaggaaa

SEQ ID NO: 111797 - RNA, 19 nt, Homo sapiens
  misc_RNA (1)...(19): siRNA sense strand
gcgcaccagucguaguaau

SEQ ID NO: 111798 - RNA, 19 nt, Homo sapiens
  misc_RNA (1)...(19): siRNA sense strand
gaucuucaaguccucauca

SEQ ID NO: 111799 - RNA, 19 nt, Homo sapiens
  misc_RNA (1)...(19): siRNA sense strand
cccgaucggugcaagugua

SEQ ID NO: 111800 - RNA, 19 nt, Homo sapiens
  misc_RNA (1)...(19): siRNA sense strand
agacaucacaccagacaug

SEQ ID NO: 111801 - RNA, 19 nt, Homo sapiens
  misc_RNA (1)...(19): siRNA sense strand
aaacuaggagugcccagaa

SEQ ID NO: 111802 - RNA, 19 nt, Homo sapiens
  misc_RNA (1)...(19): siRNA sense strand
gaugaugcuucuugaaaau

SEQ ID NO: 111803 - RNA, 19 nt, Homo sapiens
  misc_RNA (1)...(19): siRNA sense strand
cagccagucccaagaagaa

SEQ ID NO: 111804 - RNA, 19 nt, Homo sapiens
  misc_RNA (1)...(19): siRNA sense strand
gucccaagaagaacauuaa

SEQ ID NO: 111805 - RNA, 19 nt, Homo sapiens
  misc_RNA (1)...(19): siRNA sense strand
aggaaaggccucuugaugu

SEQ ID NO: 111806 - RNA, 19 nt, Homo sapiens
  misc_RNA (1)...(19): siRNA sense strand
gcggugcgcaucccuaugu

SEQ ID NO: 111807 - RNA, 19 nt, Homo sapiens
  misc_RNA (1)...(19): siRNA sense strand
cucuugauguugacuguaa

SEQ ID NO: 111808 - RNA, 19 nt, Homo sapiens
  misc_RNA (1)...(19): siRNA sense strand
aggaugaugcuucuugaaa

SEQ ID NO: 111809 - RNA, 19 nt, Homo sapiens
  misc_RNA (1)...(19): siRNA sense strand
gagagaucagcuuaguaaa

SEQ ID NO: 111810 - RNA, 19 nt, Homo sapiens
  misc_RNA (1)...(19): siRNA sense strand
caagucccgcucauuacaa

SEQ ID NO: 111811 - RNA, 19 nt, Homo sapiens
  misc_RNA (1)...(19): siRNA sense strand
gacaucacaccagacauga

SEQ ID NO: 111812 - RNA, 19 nt, Homo sapiens
  misc_RNA (1)...(19): siRNA sense strand
aagucccgcucauuacaaa

SEQ ID NO: 111813 - RNA, 19 nt, Homo sapiens
  misc_RNA (1)...(19): siRNA sense strand
ggaagagaggcugcaggaa

SEQ ID NO: 111814 - RNA, 19 nt, Homo sapiens
  misc_RNA (1)...(19): siRNA sense strand
aaauucuucuugccagugu

SEQ ID NO: 111815 - RNA, 19 nt, Homo sapiens
  misc_RNA (1)...(19): siRNA sense strand
ucacgcggaugcccaacca

SEQ ID NO: 111816 - RNA, 19 nt, Homo sapiens
  misc_RNA (1)...(19): siRNA sense strand
ucaagucccgcucauuaca

SEQ ID NO: 111817 - RNA, 19 nt, Homo sapiens
  misc_RNA (1)...(19): siRNA sense strand
aacuacagcuauguuauuc

SEQ ID NO: 111818 - RNA, 19 nt, Homo sapiens
  misc_RNA (1)...(19): siRNA sense strand
cagaggaguggcugcaaug

SEQ ID NO: 111819 - RNA, 19 nt, Homo sapiens
  misc_RNA (1)...(19): siRNA sense strand
aaaccagccagucccaaga

SEQ ID NO: 111820 - RNA, 19 nt, Homo sapiens
  misc_RNA (1)...(19): siRNA sense strand
aguaaaagauccauacagu

SEQ ID NO: 111821 - RNA, 19 nt, Homo sapiens
  misc_RNA (1)...(19): siRNA sense strand
ggaacagcggagaacaguu

SEQ ID NO: 111822 - RNA, 19 nt, Homo sapiens
  misc_RNA (1)...(19): siRNA sense strand
gucccgcucauuacaaauu

SEQ ID NO: 111823 - RNA, 19 nt, Homo sapiens
  misc_RNA (1)...(19): siRNA sense strand
ucaaggagaucaagauaga

SEQ ID NO: 111824 - RNA, 19 nt, Homo sapiens
  misc_RNA (1)...(19): siRNA sense strand
gagaugaaguuugcaguca

SEQ ID NO: 111825 - RNA, 19 nt, Homo sapiens
  misc_RNA (1)...(19): siRNA sense strand
ucaaauucauguucuccua

SEQ ID NO: 111826 - RNA, 19 nt, Homo sapiens
  misc_RNA (1)...(19): siRNA sense strand
gcugggacaagaagaauaa

SEQ ID NO: 111827 - RNA, 19 nt, Homo sapiens
  misc_RNA (1)...(19): siRNA sense strand
gcagucaaauucauguucu

SEQ ID NO: 111828 - RNA, 19 nt, Homo sapiens
  misc_RNA (1)...(19): siRNA sense strand
caucaaggagaucaagaua

SEQ ID NO: 111829 - RNA, 19 nt, Homo sapiens
  misc_RNA (1)...(19): siRNA sense strand
cuacuacccuuucuucuac

SEQ ID NO: 111830 - RNA, 19 nt, Homo sapiens
  misc_RNA (1)...(19): siRNA sense strand
gaauaaggagaugaaguuu

SEQ ID NO: 111831 - RNA, 19 nt, Homo sapiens
  misc_RNA (1)...(19): siRNA sense strand
agaauaaggagaugaaguu

SEQ ID NO: 111832 - RNA, 19 nt, Homo sapiens
  misc_RNA (1)...(19): siRNA sense strand
gaugugcuccagugacuuu

SEQ ID NO: 111833 - RNA, 19 nt, Homo sapiens
  misc_RNA (1)...(19): siRNA sense strand
caagaagaauaaggagaug

SEQ ID NO: 111834 - RNA, 19 nt, Homo sapiens
  misc_RNA (1)...(19): siRNA sense strand
auaaggagaugaaguuugc

SEQ ID NO: 111835 - RNA, 19 nt, Homo sapiens
  misc_RNA (1)...(19): siRNA sense strand
gggacaagaagaauaagga

SEQ ID NO: 111836 - RNA, 19 nt, Homo sapiens
  misc_RNA (1)...(19): siRNA sense strand
caagaucugcgcccagugu

SEQ ID NO: 111837 - RNA, 19 nt, Homo sapiens
  misc_RNA (1)...(19): siRNA sense strand
ggagaucaagauagagaau

SEQ ID NO: 111838 - RNA, 19 nt, Homo sapiens
  misc_RNA (1)...(19): siRNA sense strand
agaagaauaaggagaugaa

SEQ ID NO: 111839 - RNA, 19 nt, Homo sapiens
  misc_RNA (1)...(19): siRNA sense strand
gcaucaaggagaucaagau

SEQ ID NO: 111840 - RNA, 19 nt, Homo sapiens
  misc_RNA (1)...(19): siRNA sense strand
gagccuggccgaagugaag

SEQ ID NO: 111841 - RNA, 19 nt, Homo sapiens
  misc_RNA (1)...(19): siRNA sense strand
acaagaagaauaaggagau

SEQ ID NO: 111842 - RNA, 19 nt, Homo sapiens
  misc_RNA (1)...(19): siRNA sense strand
cagaugugcuccagugacu

SEQ ID NO: 111843 - RNA, 19 nt, Homo sapiens
  misc_RNA (1)...(19): siRNA sense strand
ucuacuacccuuucuucua

SEQ ID NO: 111844 - RNA, 19 nt, Homo sapiens
  misc_RNA (1)...(19): siRNA sense strand
agaugaaguuugcagucaa

SEQ ID NO: 111845 - RNA, 19 nt, Homo sapiens
  misc_RNA (1)...(19): siRNA sense strand
agaucaagauagagaaugg

SEQ ID NO: 111846 - RNA, 19 nt, Homo sapiens
  misc_RNA (1)...(19): siRNA sense strand
gcugauuggagcccagaaa

SEQ ID NO: 111847 - RNA, 19 nt, Homo sapiens
  misc_RNA (1)...(19): siRNA sense strand
gagaucaagauagagaaug

SEQ ID NO: 111848 - RNA, 19 nt, Homo sapiens
  misc_RNA (1)...(19): siRNA sense strand
gcugcgaggaguacgacua

SEQ ID NO: 111849 - RNA, 19 nt, Homo sapiens
  misc_RNA (1)...(19): siRNA sense strand
aaggagaucaagauagaga

SEQ ID NO: 111850 - RNA, 19 nt, Homo sapiens
  misc_RNA (1)...(19): siRNA sense strand
gugcuccagugacuuugug

SEQ ID NO: 111851 - RNA, 19 nt, Homo sapiens
  misc_RNA (1)...(19): siRNA sense strand
aauaaggagaugaaguuug

SEQ ID NO: 111852 - RNA, 19 nt, Homo sapiens
  misc_RNA (1)...(19): siRNA sense strand
gaagaauaaggagaugaag

SEQ ID NO: 111853 - RNA, 19 nt, Homo sapiens
  misc_RNA (1)...(19): siRNA sense strand
ccauaaagguguucucaua

SEQ ID NO: 111854 - RNA, 19 nt, Homo sapiens
  misc_RNA (1)...(19): siRNA sense strand
caacguaggugcuuuaagg

SEQ ID NO: 111855 - RNA, 19 nt, Homo sapiens
  misc_RNA (1)...(19): siRNA sense strand
ucgaagagcuaaauguaga

SEQ ID NO: 111856 - RNA, 19 nt, Homo sapiens
  misc_RNA (1)...(19): siRNA sense strand
ggacgaaggccagaccaaa

SEQ ID NO: 111857 - RNA, 19 nt, Homo sapiens
  misc_RNA (1)...(19): siRNA sense strand
aaucgaagagcuaaaugua

SEQ ID NO: 111858 - RNA, 19 nt, Homo sapiens
  misc_RNA (1)...(19): siRNA sense strand
ggcgaagucggaccaauuu

SEQ ID NO: 111859 - RNA, 19 nt, Homo sapiens
  misc_RNA (1)...(19): siRNA sense strand
gaaaaucaacuccauaaag

SEQ ID NO: 111860 - RNA, 19 nt, Homo sapiens
  misc_RNA (1)...(19): siRNA sense strand
gaagagcuaaauguagaaa

SEQ ID NO: 111861 - RNA, 19 nt, Homo sapiens
  misc_RNA (1)...(19): siRNA sense strand
cuuguagagucgcaccuua

SEQ ID NO: 111862 - RNA, 19 nt, Homo sapiens
  misc_RNA (1)...(19): siRNA sense strand
gagugcagguuugguuuca

SEQ ID NO: 111863 - RNA, 19 nt, Homo sapiens
  misc_RNA (1)...(19): siRNA sense strand
cgaagucggaccaauuuca

SEQ ID NO: 111864 - RNA, 19 nt, Homo sapiens
  misc_RNA (1)...(19): siRNA sense strand
aaaaucaacuccauaaagg

SEQ ID NO: 111865 - RNA, 19 nt, Homo sapiens
  misc_RNA (1)...(19): siRNA sense strand
ugucaacguaggugcuuua

SEQ ID NO: 111866 - RNA, 19 nt, Homo sapiens
  misc_RNA (1)...(19): siRNA sense strand
cauaaagguguucucauag

SEQ ID NO: 111867 - RNA, 19 nt, Homo sapiens
  misc_RNA (1)...(19): siRNA sense strand
cuuuaaggaugccauuuca

SEQ ID NO: 111868 - RNA, 19 nt, Homo sapiens
  misc_RNA (1)...(19): siRNA sense strand
auaaagguguucucauagg

SEQ ID NO: 111869 - RNA, 19 nt, Homo sapiens
  misc_RNA (1)...(19): siRNA sense strand
ucaacuccauaaagguguu

SEQ ID NO: 111870 - RNA, 19 nt, Homo sapiens
  misc_RNA (1)...(19): siRNA sense strand
gcuuuaaggaugccauuuc

SEQ ID NO: 111871 - RNA, 19 nt, Homo sapiens
  misc_RNA (1)...(19): siRNA sense strand
caauuucacccuggaacaa

SEQ ID NO: 111872 - RNA, 19 nt, Homo sapiens
  misc_RNA (1)...(19): siRNA sense strand
caagaaaaucaacuccaua

SEQ ID NO: 111873 - RNA, 19 nt, Homo sapiens
  misc_RNA (1)...(19): siRNA sense strand
gaggcgaagucggaccaau

SEQ ID NO: 111874 - RNA, 19 nt, Homo sapiens
  misc_RNA (1)...(19): siRNA sense strand
cgaagagcuaaauguagaa

SEQ ID NO: 111875 - RNA, 19 nt, Homo sapiens
  misc_RNA (1)...(19): siRNA sense strand
guagagucgcaccuuaugu

SEQ ID NO: 111876 - RNA, 19 nt, Homo sapiens
  misc_RNA (1)...(19): siRNA sense strand
caaaaucgaagagcuaaau

SEQ ID NO: 111877 - RNA, 19 nt, Homo sapiens
  misc_RNA (1)...(19): siRNA sense strand
gaagucggaccaauuucac

SEQ ID NO: 111878 - RNA, 19 nt, Homo sapiens
  misc_RNA (1)...(19): siRNA sense strand
ccauaaagguguucucaua

SEQ ID NO: 111879 - RNA, 19 nt, Homo sapiens
  misc_RNA (1)...(19): siRNA sense strand
caacguaggugcuuuaagg

SEQ ID NO: 111880 - RNA, 19 nt, Homo sapiens
  misc_RNA (1)...(19): siRNA sense strand
ucgaagagcuaaauguaga

SEQ ID NO: 111881 - RNA, 19 nt, Homo sapiens
  misc_RNA (1)...(19): siRNA sense strand
ggacgaaggccagaccaaa

SEQ ID NO: 111882 - RNA, 19 nt, Homo sapiens
  misc_RNA (1)...(19): siRNA sense strand
aaucgaagagcuaaaugua

SEQ ID NO: 111883 - RNA, 19 nt, Homo sapiens
  misc_RNA (1)...(19): siRNA sense strand
ggcgaagucggaccaauuu

SEQ ID NO: 111884 - RNA, 19 nt, Homo sapiens
  misc_RNA (1)...(19): siRNA sense strand
gaaaaucaacuccauaaag

SEQ ID NO: 111885 - RNA, 19 nt, Homo sapiens
  misc_RNA (1)...(19): siRNA sense strand
gaagagcuaaauguagaaa

SEQ ID NO: 111886 - RNA, 19 nt, Homo sapiens
  misc_RNA (1)...(19): siRNA sense strand
cuuguagagucgcaccuua

SEQ ID NO: 111887 - RNA, 19 nt, Homo sapiens
  misc_RNA (1)...(19): siRNA sense strand
gagugcagguuugguuuca

SEQ ID NO: 111888 - RNA, 19 nt, Homo sapiens
  misc_RNA (1)...(19): siRNA sense strand
cgaagucggaccaauuuca

SEQ ID NO: 111889 - RNA, 19 nt, Homo sapiens
  misc_RNA (1)...(19): siRNA sense strand
aaaaucaacuccauaaagg

SEQ ID NO: 111890 - RNA, 19 nt, Homo sapiens
  misc_RNA (1)...(19): siRNA sense strand
ugucaacguaggugcuuua

SEQ ID NO: 111891 - RNA, 19 nt, Homo sapiens
  misc_RNA (1)...(19): siRNA sense strand
cauaaagguguucucauag

SEQ ID NO: 111892 - RNA, 19 nt, Homo sapiens
  misc_RNA (1)...(19): siRNA sense strand
cuuuaaggaugccauuuca

SEQ ID NO: 111893 - RNA, 19 nt, Homo sapiens
  misc_RNA (1)...(19): siRNA sense strand
auaaagguguucucauagg

SEQ ID NO: 111894 - RNA, 19 nt, Homo sapiens
  misc_RNA (1)...(19): siRNA sense strand
ucaacuccauaaagguguu

SEQ ID NO: 111895 - RNA, 19 nt, Homo sapiens
  misc_RNA (1)...(19): siRNA sense strand
gcuuuaaggaugccauuuc

SEQ ID NO: 111896 - RNA, 19 nt, Homo sapiens
  misc_RNA (1)...(19): siRNA sense strand
gaaagggauggaggacgaa

SEQ ID NO: 111897 - RNA, 19 nt, Homo sapiens
  misc_RNA (1)...(19): siRNA sense strand
caauuucacccuggaacaa

SEQ ID NO: 111898 - RNA, 19 nt, Homo sapiens
  misc_RNA (1)...(19): siRNA sense strand
ggagcugaaagaucgcaaa

SEQ ID NO: 111899 - RNA, 19 nt, Homo sapiens
  misc_RNA (1)...(19): siRNA sense strand
caagaaaaucaacuccaua

SEQ ID NO: 111900 - RNA, 19 nt, Homo sapiens
  misc_RNA (1)...(19): siRNA sense strand
gagcugaaagaucgcaaag

SEQ ID NO: 111901 - RNA, 19 nt, Homo sapiens
  misc_RNA (1)...(19): siRNA sense strand
gaggcgaagucggaccaau

SEQ ID NO: 111902 - RNA, 19 nt, Homo sapiens
  misc_RNA (1)...(19): siRNA sense strand
cgaagagcuaaauguagaa

SEQ ID NO: 111903 - RNA, 19 nt, Homo sapiens
  misc_RNA (1)...(19): siRNA sense strand
guagagucgcaccuuaugu

SEQ ID NO: 111904 - RNA, 19 nt, Homo sapiens
  misc_RNA (1)...(19): siRNA sense strand
caaaaucgaagagcuaaau

SEQ ID NO: 111905 - RNA, 19 nt, Homo sapiens
  misc_RNA (1)...(19): siRNA sense strand
gaagucggaccaauuucac

SEQ ID NO: 111906 - RNA, 19 nt, Homo sapiens
  misc_RNA (1)...(19): siRNA sense strand
ggucagaacuccucagaua

SEQ ID NO: 111907 - RNA, 19 nt, Homo sapiens
  misc_RNA (1)...(19): siRNA sense strand
gacaauaucuaccuggauu

SEQ ID NO: 111908 - RNA, 19 nt, Homo sapiens
  misc_RNA (1)...(19): siRNA sense strand
uaacuacaguccucauaaa

SEQ ID NO: 111909 - RNA, 19 nt, Homo sapiens
  misc_RNA (1)...(19): siRNA sense strand
gaaacuagacauuccauug

SEQ ID NO: 111910 - RNA, 19 nt, Homo sapiens
  misc_RNA (1)...(19): siRNA sense strand
uggcugaucucccagaaua

SEQ ID NO: 111911 - RNA, 19 nt, Homo sapiens
  misc_RNA (1)...(19): siRNA sense strand
caaguugccuauacaguug

SEQ ID NO: 111912 - RNA, 19 nt, Homo sapiens
  misc_RNA (1)...(19): siRNA sense strand
caaagcaggcugguuaaua

SEQ ID NO: 111913 - RNA, 19 nt, Homo sapiens
  misc_RNA (1)...(19): siRNA sense strand
agaggaaacuggcaagaaa

SEQ ID NO: 111914 - RNA, 19 nt, Homo sapiens
  misc_RNA (1)...(19): siRNA sense strand
cuacauagcagacagguuu

SEQ ID NO: 111915 - RNA, 19 nt, Homo sapiens
  misc_RNA (1)...(19): siRNA sense strand
cacaauggccuaugagaua

SEQ ID NO: 111916 - RNA, 19 nt, Homo sapiens
  misc_RNA (1)...(19): siRNA sense strand
gaaacuggcaagaaauuga

SEQ ID NO: 111917 - RNA, 19 nt, Homo sapiens
  misc_RNA (1)...(19): siRNA sense strand
ccacaucuguuccucaaug

SEQ ID NO: 111918 - RNA, 19 nt, Homo sapiens
  misc_RNA (1)...(19): siRNA sense strand
cguaagcucugccuccuaa

SEQ ID NO: 111919 - RNA, 19 nt, Homo sapiens
  misc_RNA (1)...(19): siRNA sense strand
uuuauuggcucuaugagua

SEQ ID NO: 111920 - RNA, 19 nt, Homo sapiens
  misc_RNA (1)...(19): siRNA sense strand
aaagcaggcugguuaauag

SEQ ID NO: 111921 - RNA, 19 nt, Homo sapiens
  misc_RNA (1)...(19): siRNA sense strand
gcuacgagguggacuggaa

SEQ ID NO: 111922 - RNA, 19 nt, Homo sapiens
  misc_RNA (1)...(19): siRNA sense strand
ggaucacaauggccuauga

SEQ ID NO: 111923 - RNA, 19 nt, Homo sapiens
  misc_RNA (1)...(19): siRNA sense strand
gggcggagauaucggagaa

SEQ ID NO: 111924 - RNA, 19 nt, Homo sapiens
  misc_RNA (1)...(19): siRNA sense strand
uuaagcacaucgcaaagaa

SEQ ID NO: 111925 - RNA, 19 nt, Homo sapiens
  misc_RNA (1)...(19): siRNA sense strand
gaaacuaaagggaaagcuu

SEQ ID NO: 111926 - RNA, 19 nt, Homo sapiens
  misc_RNA (1)...(19): siRNA sense strand
ccucagauaaggaaacaua

SEQ ID NO: 111927 - RNA, 19 nt, Homo sapiens
  misc_RNA (1)...(19): siRNA sense strand
gggaaagcuuugccugaga

SEQ ID NO: 111928 - RNA, 19 nt, Homo sapiens
  misc_RNA (1)...(19): siRNA sense strand
aaacuagacauuccauuga

SEQ ID NO: 111929 - RNA, 19 nt, Homo sapiens
  misc_RNA (1)...(19): siRNA sense strand
ugauuuaccuccaaguuca

SEQ ID NO: 111930 - RNA, 19 nt, Homo sapiens
  misc_RNA (1)...(19): siRNA sense strand
ucacuaacaucuggcuuga

SEQ ID NO: 111931 - RNA, 19 nt, Homo sapiens
  misc_RNA (1)...(19): siRNA sense strand
ccaaguugccuauacaguu

SEQ ID NO: 111932 - RNA, 19 nt, Homo sapiens
  misc_RNA (1)...(19): siRNA sense strand
ugacauugguggcaucauc

SEQ ID NO: 111933 - RNA, 19 nt, Homo sapiens
  misc_RNA (1)...(19): siRNA sense strand
cagauaaggaaacauacua

SEQ ID NO: 111934 - RNA, 19 nt, Homo sapiens
  misc_RNA (1)...(19): siRNA sense strand
cuacaguccucauaaaugc

SEQ ID NO: 111935 - RNA, 19 nt, Homo sapiens
  misc_RNA (1)...(19): siRNA sense strand
aaagaugauuuaccuccaa

SEQ ID NO: 111936 - RNA, 19 nt, Homo sapiens
  misc_RNA (1)...(19): siRNA sense strand
ccagcugccuucaugauca

SEQ ID NO: 111937 - RNA, 19 nt, Homo sapiens
  misc_RNA (1)...(19): siRNA sense strand
ggaguucucauggccauuu

SEQ ID NO: 111938 - RNA, 19 nt, Homo sapiens
  misc_RNA (1)...(19): siRNA sense strand
cagaggaacugaacuacac

SEQ ID NO: 111939 - RNA, 19 nt, Homo sapiens
  misc_RNA (1)...(19): siRNA sense strand
acucugcccugguugaauu

SEQ ID NO: 111940 - RNA, 19 nt, Homo sapiens
  misc_RNA (1)...(19): siRNA sense strand
gaugauuuaccuccaaguu

SEQ ID NO: 111941 - RNA, 19 nt, Homo sapiens
  misc_RNA (1)...(19): siRNA sense strand
ggucaaugcugagcuguac

SEQ ID NO: 111942 - RNA, 19 nt, Homo sapiens
  misc_RNA (1)...(19): siRNA sense strand
ggagauaucggagaacagu

SEQ ID NO: 111943 - RNA, 19 nt, Homo sapiens
  misc_RNA (1)...(19): siRNA sense strand
gaaaauaugcaaagaccaa

SEQ ID NO: 111944 - RNA, 19 nt, Homo sapiens
  misc_RNA (1)...(19): siRNA sense strand
gcugaagccaugagaauca

SEQ ID NO: 111945 - RNA, 19 nt, Homo sapiens
  misc_RNA (1)...(19): siRNA sense strand
ucauuaagcacaucgcaaa

SEQ ID NO: 111946 - RNA, 19 nt, Homo sapiens
  misc_RNA (1)...(19): siRNA sense strand
ccugagacuugaagaggaa

SEQ ID NO: 111947 - RNA, 19 nt, Homo sapiens
  misc_RNA (1)...(19): siRNA sense strand
ggaggggaguuucacuuuu

SEQ ID NO: 111948 - RNA, 19 nt, Homo sapiens
  misc_RNA (1)...(19): siRNA sense strand
uccagaaacuaaagggaaa

SEQ ID NO: 111949 - RNA, 19 nt, Homo sapiens
  misc_RNA (1)...(19): siRNA sense strand
ggaaacuggcaagaaauug

SEQ ID NO: 111950 - RNA, 19 nt, Homo sapiens
  misc_RNA (1)...(19): siRNA sense strand
ggagaacaguggggauuuu

SEQ ID NO: 111951 - RNA, 19 nt, Homo sapiens
  misc_RNA (1)...(19): siRNA sense strand
cuaacuacaguccucauaa

SEQ ID NO: 111952 - RNA, 19 nt, Homo sapiens
  misc_RNA (1)...(19): siRNA sense strand
guccacaucuguuccucaa

SEQ ID NO: 111953 - RNA, 19 nt, Homo sapiens
  misc_RNA (1)...(19): siRNA sense strand
ugauauugauguacaacug

SEQ ID NO: 111954 - RNA, 19 nt, Homo sapiens
  misc_RNA (1)...(19): siRNA sense strand
gaagaggaaacuggcaaga

SEQ ID NO: 111955 - RNA, 19 nt, Homo sapiens
  misc_RNA (1)...(19): siRNA sense strand
gcggagauaucggagaaca

SEQ ID NO: 111956 - RNA, 19 nt, Homo sapiens
  misc_RNA (1)...(19): siRNA sense strand
cuaccuggauuucuucuac

SEQ ID NO: 111957 - RNA, 19 nt, Homo sapiens
  misc_RNA (1)...(19): siRNA sense strand
gcagaggaacugaacuaca

SEQ ID NO: 111958 - RNA, 19 nt, Homo sapiens
  misc_RNA (1)...(19): siRNA sense strand
uuaccaaguugccuauaca

SEQ ID NO: 111959 - RNA, 19 nt, Homo sapiens
  misc_RNA (1)...(19): siRNA sense strand
cuucuacucugcccugguu

SEQ ID NO: 111960 - RNA, 19 nt, Homo sapiens
  misc_RNA (1)...(19): siRNA sense strand
gagaaucauuaagcacauc

SEQ ID NO: 111961 - RNA, 19 nt, Homo sapiens
  misc_RNA (1)...(19): siRNA sense strand
gaggaaacuggcaagaaau

SEQ ID NO: 111962 - RNA, 19 nt, Homo sapiens
  misc_RNA (1)...(19): siRNA sense strand
caaccuauacguggauguu

SEQ ID NO: 111963 - RNA, 19 nt, Homo sapiens
  misc_RNA (1)...(19): siRNA sense strand
guucagaaacuagacauuc

SEQ ID NO: 111964 - RNA, 19 nt, Homo sapiens
  misc_RNA (1)...(19): siRNA sense strand
gagcucccgcugaugguuu

SEQ ID NO: 111965 - RNA, 19 nt, Homo sapiens
  misc_RNA (1)...(19): siRNA sense strand
ucagaacuccucagauaag

SEQ ID NO: 111966 - RNA, 19 nt, Homo sapiens
  misc_RNA (1)...(19): siRNA sense strand
gcaaagcaggcugguuaau

SEQ ID NO: 111967 - RNA, 19 nt, Homo sapiens
  misc_RNA (1)...(19): siRNA sense strand
aaacuggcaagaaauugaa

SEQ ID NO: 111968 - RNA, 19 nt, Homo sapiens
  misc_RNA (1)...(19): siRNA sense strand
aacuagacauuccauugaa

SEQ ID NO: 111969 - RNA, 19 nt, Homo sapiens
  misc_RNA (1)...(19): siRNA sense strand
uccaaggacuggucagcaa

SEQ ID NO: 111970 - RNA, 19 nt, Homo sapiens
  misc_RNA (1)...(19): siRNA sense strand
agacauuccauugaacuaa

SEQ ID NO: 111971 - RNA, 19 nt, Homo sapiens
  misc_RNA (1)...(19): siRNA sense strand
gucagaacuccucagauaa

SEQ ID NO: 111972 - RNA, 19 nt, Homo sapiens
  misc_RNA (1)...(19): siRNA sense strand
gcccaacuucuucuucuug

SEQ ID NO: 111973 - RNA, 19 nt, Homo sapiens
  misc_RNA (1)...(19): siRNA sense strand
ccagucaucagugaaugua

SEQ ID NO: 111974 - RNA, 19 nt, Homo sapiens
  misc_RNA (1)...(19): siRNA sense strand
ugagaaucauuaagcacau

SEQ ID NO: 111975 - RNA, 19 nt, Homo sapiens
  misc_RNA (1)...(19): siRNA sense strand
ggcuugagcucccgcugau

SEQ ID NO: 111976 - RNA, 19 nt, Homo sapiens
  misc_RNA (1)...(19): siRNA sense strand
caucagugaauguaggauu

SEQ ID NO: 111977 - RNA, 19 nt, Homo sapiens
  misc_RNA (1)...(19): siRNA sense strand
accuauacguggauguuaa

SEQ ID NO: 111978 - RNA, 19 nt, Homo sapiens
  misc_RNA (1)...(19): siRNA sense strand
cgaggaagccgaaaauaug

SEQ ID NO: 111979 - RNA, 19 nt, Homo sapiens
  misc_RNA (1)...(19): siRNA sense strand
ucacaauggccuaugagau

SEQ ID NO: 111980 - RNA, 19 nt, Homo sapiens
  misc_RNA (1)...(19): siRNA sense strand
cagccugucuggccucagu

SEQ ID NO: 111981 - RNA, 19 nt, Homo sapiens
  misc_RNA (1)...(19): siRNA sense strand
cuauuccagucaucaguga

SEQ ID NO: 111982 - RNA, 19 nt, Homo sapiens
  misc_RNA (1)...(19): siRNA sense strand
ggaccuauuccagucauca

SEQ ID NO: 111983 - RNA, 19 nt, Homo sapiens
  misc_RNA (1)...(19): siRNA sense strand
caccgaguuuaaccuggua

SEQ ID NO: 111984 - RNA, 19 nt, Homo sapiens
  misc_RNA (1)...(19): siRNA sense strand
ccaaggacuggucagcaaa

SEQ ID NO: 111985 - RNA, 19 nt, Homo sapiens
  misc_RNA (1)...(19): siRNA sense strand
gaguuuaaccugguaugug

SEQ ID NO: 111986 - RNA, 19 nt, Homo sapiens
  misc_RNA (1)...(19): siRNA sense strand
gguggcugaucucccagaa

SEQ ID NO: 111987 - RNA, 19 nt, Homo sapiens
  misc_RNA (1)...(19): siRNA sense strand
ccuaacuacaguccucaua

SEQ ID NO: 111988 - RNA, 19 nt, Homo sapiens
  misc_RNA (1)...(19): siRNA sense strand
cagacagguuuggccguaa

SEQ ID NO: 111989 - RNA, 19 nt, Homo sapiens
  misc_RNA (1)...(19): siRNA sense strand
ggaggugguugcaguucac

SEQ ID NO: 111990 - RNA, 19 nt, Homo sapiens
  misc_RNA (1)...(19): siRNA sense strand
cugcagaggaacugaacua

SEQ ID NO: 111991 - RNA, 19 nt, Homo sapiens
  misc_RNA (1)...(19): siRNA sense strand
caucuguuccucaaugugu

SEQ ID NO: 111992 - RNA, 19 nt, Homo sapiens
  misc_RNA (1)...(19): siRNA sense strand
auaucuaccuggauuucuu

SEQ ID NO: 111993 - RNA, 19 nt, Homo sapiens
  misc_RNA (1)...(19): siRNA sense strand
caauaucuaccuggauuuc

SEQ ID NO: 111994 - RNA, 19 nt, Homo sapiens
  misc_RNA (1)...(19): siRNA sense strand
cuggaggucuggugcuguu

SEQ ID NO: 111995 - RNA, 19 nt, Homo sapiens
  misc_RNA (1)...(19): siRNA sense strand
uaagcacaucgcaaagaaa

SEQ ID NO: 111996 - RNA, 19 nt, Homo sapiens
  misc_RNA (1)...(19): siRNA sense strand
ggaaccagagcaccuucga

SEQ ID NO: 111997 - RNA, 19 nt, Homo sapiens
  misc_RNA (1)...(19): siRNA sense strand
ucacgccauuccuggucua

SEQ ID NO: 111998 - RNA, 19 nt, Homo sapiens
  misc_RNA (1)...(19): siRNA sense strand
gauagucugccuggucaau

SEQ ID NO: 111999 - RNA, 19 nt, Homo sapiens
  misc_RNA (1)...(19): siRNA sense strand
aggaaacuggcaagaaauu

SEQ ID NO: 112000 - RNA, 19 nt, Homo sapiens
  misc_RNA (1)...(19): siRNA sense strand
cuucauuucuugacuuggu

SEQ ID NO: 112001 - RNA, 19 nt, Homo sapiens
  misc_RNA (1)...(19): siRNA sense strand
gcuguugcuuccagaaacu

SEQ ID NO: 112002 - RNA, 19 nt, Homo sapiens
  misc_RNA (1)...(19): siRNA sense strand
gacauugguggcaucauca

SEQ ID NO: 112003 - RNA, 19 nt, Homo sapiens
  misc_RNA (1)...(19): siRNA sense strand
cccuugggcugcaucaaau

SEQ ID NO: 112004 - RNA, 19 nt, Homo sapiens
  misc_RNA (1)...(19): siRNA sense strand
aagcucugccuccuaacua

SEQ ID NO: 112005 - RNA, 19 nt, Homo sapiens
  misc_RNA (1)...(19): siRNA sense strand
agacagguuuggccguaag

SEQ ID NO: 112006 - RNA, 19 nt, Homo sapiens
  misc_RNA (1)...(19): siRNA sense strand
ggucagaacuccucagaua

SEQ ID NO: 112007 - RNA, 19 nt, Homo sapiens
  misc_RNA (1)...(19): siRNA sense strand
gacaauaucuaccuggauu

SEQ ID NO: 112008 - RNA, 19 nt, Homo sapiens
  misc_RNA (1)...(19): siRNA sense strand
uaacuacaguccucauaaa

SEQ ID NO: 112009 - RNA, 19 nt, Homo sapiens
  misc_RNA (1)...(19): siRNA sense strand
uggcugaucucccagaaua

SEQ ID NO: 112010 - RNA, 19 nt, Homo sapiens
  misc_RNA (1)...(19): siRNA sense strand
caaguugccuauacaguug

SEQ ID NO: 112011 - RNA, 19 nt, Homo sapiens
  misc_RNA (1)...(19): siRNA sense strand
caaagcaggcugguuaaua

SEQ ID NO: 112012 - RNA, 19 nt, Homo sapiens
  misc_RNA (1)...(19): siRNA sense strand
agaggaaacuggcaagaaa

SEQ ID NO: 112013 - RNA, 19 nt, Homo sapiens
  misc_RNA (1)...(19): siRNA sense strand
cuacauagcagacagguuu

SEQ ID NO: 112014 - RNA, 19 nt, Homo sapiens
  misc_RNA (1)...(19): siRNA sense strand
gaaacuggcaagaaauuga

SEQ ID NO: 112015 - RNA, 19 nt, Homo sapiens
  misc_RNA (1)...(19): siRNA sense strand
cguaagcucugccuccuaa

SEQ ID NO: 112016 - RNA, 19 nt, Homo sapiens
  misc_RNA (1)...(19): siRNA sense strand
uuuauuggcucuaugagua

SEQ ID NO: 112017 - RNA, 19 nt, Homo sapiens
  misc_RNA (1)...(19): siRNA sense strand
aaagcaggcugguuaauag

SEQ ID NO: 112018 - RNA, 19 nt, Homo sapiens
  misc_RNA (1)...(19): siRNA sense strand
gcuacgagguggacuggaa

SEQ ID NO: 112019 - RNA, 19 nt, Homo sapiens
  misc_RNA (1)...(19): siRNA sense strand
gggcggagauaucggagaa

SEQ ID NO: 112020 - RNA, 19 nt, Homo sapiens
  misc_RNA (1)...(19): siRNA sense strand
uuaagcacaucgcaaagaa

SEQ ID NO: 112021 - RNA, 19 nt, Homo sapiens
  misc_RNA (1)...(19): siRNA sense strand
ccucagauaaggaaacaua

SEQ ID NO: 112022 - RNA, 19 nt, Homo sapiens
  misc_RNA (1)...(19): siRNA sense strand
ccaaguugccuauacaguu

SEQ ID NO: 112023 - RNA, 19 nt, Homo sapiens
  misc_RNA (1)...(19): siRNA sense strand
cagauaaggaaacauacua

SEQ ID NO: 112024 - RNA, 19 nt, Homo sapiens
  misc_RNA (1)...(19): siRNA sense strand
cuacaguccucauaaaugc

SEQ ID NO: 112025 - RNA, 19 nt, Homo sapiens
  misc_RNA (1)...(19): siRNA sense strand
ccagcugccuucaugauca

SEQ ID NO: 112026 - RNA, 19 nt, Homo sapiens
  misc_RNA (1)...(19): siRNA sense strand
ggaguucucauggccauuu

SEQ ID NO: 112027 - RNA, 19 nt, Homo sapiens
  misc_RNA (1)...(19): siRNA sense strand
cagaggaacugaacuacac

SEQ ID NO: 112028 - RNA, 19 nt, Homo sapiens
  misc_RNA (1)...(19): siRNA sense strand
acucugcccugguugaauu

SEQ ID NO: 112029 - RNA, 19 nt, Homo sapiens
  misc_RNA (1)...(19): siRNA sense strand
ggagauaucggagaacagu

SEQ ID NO: 112030 - RNA, 19 nt, Homo sapiens
  misc_RNA (1)...(19): siRNA sense strand
gcugaagccaugagaauca

SEQ ID NO: 112031 - RNA, 19 nt, Homo sapiens
  misc_RNA (1)...(19): siRNA sense strand
ucauuaagcacaucgcaaa

SEQ ID NO: 112032 - RNA, 19 nt, Homo sapiens
  misc_RNA (1)...(19): siRNA sense strand
ccugagacuugaagaggaa

SEQ ID NO: 112033 - RNA, 19 nt, Homo sapiens
  misc_RNA (1)...(19): siRNA sense strand
ggaggggaguuucacuuuu

SEQ ID NO: 112034 - RNA, 19 nt, Homo sapiens
  misc_RNA (1)...(19): siRNA sense strand
ggaaacuggcaagaaauug

SEQ ID NO: 112035 - RNA, 19 nt, Homo sapiens
  misc_RNA (1)...(19): siRNA sense strand
ggagaacaguggggauuuu

SEQ ID NO: 112036 - RNA, 19 nt, Homo sapiens
  misc_RNA (1)...(19): siRNA sense strand
cuaacuacaguccucauaa

SEQ ID NO: 112037 - RNA, 19 nt, Homo sapiens
  misc_RNA (1)...(19): siRNA sense strand
ugauauugauguacaacug

SEQ ID NO: 112038 - RNA, 19 nt, Homo sapiens
  misc_RNA (1)...(19): siRNA sense strand
gaagaggaaacuggcaaga

SEQ ID NO: 112039 - RNA, 19 nt, Homo sapiens
  misc_RNA (1)...(19): siRNA sense strand
gcggagauaucggagaaca

SEQ ID NO: 112040 - RNA, 19 nt, Homo sapiens
  misc_RNA (1)...(19): siRNA sense strand
gcagaggaacugaacuaca

SEQ ID NO: 112041 - RNA, 19 nt, Homo sapiens
  misc_RNA (1)...(19): siRNA sense strand
cuaccuggauuucuucuac

SEQ ID NO: 112042 - RNA, 19 nt, Homo sapiens
  misc_RNA (1)...(19): siRNA sense strand
uuaccaaguugccuauaca

SEQ ID NO: 112043 - RNA, 19 nt, Homo sapiens
  misc_RNA (1)...(19): siRNA sense strand
cuucuacucugcccugguu

SEQ ID NO: 112044 - RNA, 19 nt, Homo sapiens
  misc_RNA (1)...(19): siRNA sense strand
gagaaucauuaagcacauc

SEQ ID NO: 112045 - RNA, 19 nt, Homo sapiens
  misc_RNA (1)...(19): siRNA sense strand
gaggaaacuggcaagaaau

SEQ ID NO: 112046 - RNA, 19 nt, Homo sapiens
  misc_RNA (1)...(19): siRNA sense strand
caaccuauacguggauguu

SEQ ID NO: 112047 - RNA, 19 nt, Homo sapiens
  misc_RNA (1)...(19): siRNA sense strand
ucagaacuccucagauaag

SEQ ID NO: 112048 - RNA, 19 nt, Homo sapiens
  misc_RNA (1)...(19): siRNA sense strand
gcaaagcaggcugguuaau

SEQ ID NO: 112049 - RNA, 19 nt, Homo sapiens
  misc_RNA (1)...(19): siRNA sense strand
aaacuggcaagaaauugaa

SEQ ID NO: 112050 - RNA, 19 nt, Homo sapiens
  misc_RNA (1)...(19): siRNA sense strand
uccaaggacuggucagcaa

SEQ ID NO: 112051 - RNA, 19 nt, Homo sapiens
  misc_RNA (1)...(19): siRNA sense strand
gucagaacuccucagauaa

SEQ ID NO: 112052 - RNA, 19 nt, Homo sapiens
  misc_RNA (1)...(19): siRNA sense strand
ccagucaucagugaaugua

SEQ ID NO: 112053 - RNA, 19 nt, Homo sapiens
  misc_RNA (1)...(19): siRNA sense strand
gcccaacuucuucuucuug

SEQ ID NO: 112054 - RNA, 19 nt, Homo sapiens
  misc_RNA (1)...(19): siRNA sense strand
caucagugaauguaggauu

SEQ ID NO: 112055 - RNA, 19 nt, Homo sapiens
  misc_RNA (1)...(19): siRNA sense strand
ugagaaucauuaagcacau

SEQ ID NO: 112056 - RNA, 19 nt, Homo sapiens
  misc_RNA (1)...(19): siRNA sense strand
ggaccuauuccagucauca

SEQ ID NO: 112057 - RNA, 19 nt, Homo sapiens
  misc_RNA (1)...(19): siRNA sense strand
cagccugucuggccucagu

SEQ ID NO: 112058 - RNA, 19 nt, Homo sapiens
  misc_RNA (1)...(19): siRNA sense strand
caccgaguuuaaccuggua

SEQ ID NO: 112059 - RNA, 19 nt, Homo sapiens
  misc_RNA (1)...(19): siRNA sense strand
ccaaggacuggucagcaaa

SEQ ID NO: 112060 - RNA, 19 nt, Homo sapiens
  misc_RNA (1)...(19): siRNA sense strand
accuauacguggauguuaa

SEQ ID NO: 112061 - RNA, 19 nt, Homo sapiens
  misc_RNA (1)...(19): siRNA sense strand
cuauuccagucaucaguga

SEQ ID NO: 112062 - RNA, 19 nt, Homo sapiens
  misc_RNA (1)...(19): siRNA sense strand
cagacagguuuggccguaa

SEQ ID NO: 112063 - RNA, 19 nt, Homo sapiens
  misc_RNA (1)...(19): siRNA sense strand
gaguuuaaccugguaugug

SEQ ID NO: 112064 - RNA, 19 nt, Homo sapiens
  misc_RNA (1)...(19): siRNA sense strand
gguggcugaucucccagaa

SEQ ID NO: 112065 - RNA, 19 nt, Homo sapiens
  misc_RNA (1)...(19): siRNA sense strand
ccuaacuacaguccucaua

SEQ ID NO: 112066 - RNA, 19 nt, Homo sapiens
  misc_RNA (1)...(19): siRNA sense strand
cugcagaggaacugaacua

SEQ ID NO: 112067 - RNA, 19 nt, Homo sapiens
  misc_RNA (1)...(19): siRNA sense strand
auaucuaccuggauuucuu

SEQ ID NO: 112068 - RNA, 19 nt, Homo sapiens
  misc_RNA (1)...(19): siRNA sense strand
caauaucuaccuggauuuc

SEQ ID NO: 112069 - RNA, 19 nt, Homo sapiens
  misc_RNA (1)...(19): siRNA sense strand
ggaggugguugcaguucac

SEQ ID NO: 112070 - RNA, 19 nt, Homo sapiens
  misc_RNA (1)...(19): siRNA sense strand
ggaaccagagcaccuucga

SEQ ID NO: 112071 - RNA, 19 nt, Homo sapiens
  misc_RNA (1)...(19): siRNA sense strand
aggaaacuggcaagaaauu

SEQ ID NO: 112072 - RNA, 19 nt, Homo sapiens
  misc_RNA (1)...(19): siRNA sense strand
uaagcacaucgcaaagaaa

SEQ ID NO: 112073 - RNA, 19 nt, Homo sapiens
  misc_RNA (1)...(19): siRNA sense strand
cuucauuucuugacuuggu

SEQ ID NO: 112074 - RNA, 19 nt, Homo sapiens
  misc_RNA (1)...(19): siRNA sense strand
cccuugggcugcaucaaau

SEQ ID NO: 112075 - RNA, 19 nt, Homo sapiens
  misc_RNA (1)...(19): siRNA sense strand
agacagguuuggccguaag

SEQ ID NO: 112076 - RNA, 19 nt, Homo sapiens
  misc_RNA (1)...(19): siRNA sense strand
gcucuauuacuggugcaua

SEQ ID NO: 112077 - RNA, 19 nt, Homo sapiens
  misc_RNA (1)...(19): siRNA sense strand
aagcucugccuccuaacua

SEQ ID NO: 112078 - RNA, 19 nt, Homo sapiens
  misc_RNA (1)...(19): siRNA sense strand
ucuucuucuugcucuauua

SEQ ID NO: 112079 - RNA, 19 nt, Homo sapiens
  misc_RNA (1)...(19): siRNA sense strand
auucccagcugccuucaug

SEQ ID NO: 112080 - RNA, 19 nt, Homo sapiens
  misc_RNA (1)...(19): siRNA sense strand
guccaucgucaccgaguuu

SEQ ID NO: 112081 - RNA, 19 nt, Homo sapiens
  misc_RNA (1)...(19): siRNA sense strand
ccuugcaggugacaauauc

SEQ ID NO: 112082 - RNA, 19 nt, Homo sapiens
  misc_RNA (1)...(19): siRNA sense strand
gaaugcugaagccaugaga

SEQ ID NO: 112083 - RNA, 19 nt, Homo sapiens
  misc_RNA (1)...(19): siRNA sense strand
gaguucucauggccauuuc

SEQ ID NO: 112084 - RNA, 19 nt, Homo sapiens
  misc_RNA (1)...(19): siRNA sense strand
aagaggaaacuggcaagaa

SEQ ID NO: 112085 - RNA, 19 nt, Homo sapiens
  misc_RNA (1)...(19): siRNA sense strand
gcugaucucccagaauaag

SEQ ID NO: 112086 - RNA, 19 nt, Homo sapiens
  misc_RNA (1)...(19): siRNA sense strand
ugguugcaguucacaguug

SEQ ID NO: 112087 - RNA, 19 nt, Homo sapiens
  misc_RNA (1)...(19): siRNA sense strand
caagucaguucguauaaua

SEQ ID NO: 112088 - RNA, 19 nt, Homo sapiens
  misc_RNA (1)...(19): siRNA sense strand
ggccagaucuccaacuaug

SEQ ID NO: 112089 - RNA, 19 nt, Homo sapiens
  misc_RNA (1)...(19): siRNA sense strand
gcaagucaguucguauaau

SEQ ID NO: 112090 - RNA, 19 nt, Homo sapiens
  misc_RNA (1)...(19): siRNA sense strand
ggaagaaugugcuguucgu

SEQ ID NO: 112091 - RNA, 19 nt, Homo sapiens
  misc_RNA (1)...(19): siRNA sense strand
ccaacuauguggcagcauu

SEQ ID NO: 112092 - RNA, 19 nt, Homo sapiens
  misc_RNA (1)...(19): siRNA sense strand
guuaaaagauggucaagaa

SEQ ID NO: 112093 - RNA, 19 nt, Homo sapiens
  misc_RNA (1)...(19): siRNA sense strand
ccauaucagugggcuauuu

SEQ ID NO: 112094 - RNA, 19 nt, Homo sapiens
  misc_RNA (1)...(19): siRNA sense strand
guuaggagugugcauauuu

SEQ ID NO: 112095 - RNA, 19 nt, Homo sapiens
  misc_RNA (1)...(19): siRNA sense strand
gaccagaugcuaagaguca

SEQ ID NO: 112096 - RNA, 19 nt, Homo sapiens
  misc_RNA (1)...(19): siRNA sense strand
ugacagccauccucaccuu

SEQ ID NO: 112097 - RNA, 19 nt, Homo sapiens
  misc_RNA (1)...(19): siRNA sense strand
uuugugaacugcuuccuuu

SEQ ID NO: 112098 - RNA, 19 nt, Homo sapiens
  misc_RNA (1)...(19): siRNA sense strand
acacaaggauguuaaaaga

SEQ ID NO: 112099 - RNA, 19 nt, Homo sapiens
  misc_RNA (1)...(19): siRNA sense strand
gcuaagagucaaaggaaug

SEQ ID NO: 112100 - RNA, 19 nt, Homo sapiens
  misc_RNA (1)...(19): siRNA sense strand
gcuugauacuccuaacuug

SEQ ID NO: 112101 - RNA, 19 nt, Homo sapiens
  misc_RNA (1)...(19): siRNA sense strand
cauccugucucccuacuuc

SEQ ID NO: 112102 - RNA, 19 nt, Homo sapiens
  misc_RNA (1)...(19): siRNA sense strand
gcaguguccuucucuucau

SEQ ID NO: 112103 - RNA, 19 nt, Homo sapiens
  misc_RNA (1)...(19): siRNA sense strand
aguggaaccugguguguga

SEQ ID NO: 112104 - RNA, 19 nt, Homo sapiens
  misc_RNA (1)...(19): siRNA sense strand
cuguugggcuccuucauuu

SEQ ID NO: 112105 - RNA, 19 nt, Homo sapiens
  misc_RNA (1)...(19): siRNA sense strand
caagaaaggcccacaaucc

SEQ ID NO: 112106 - RNA, 19 nt, Homo sapiens
  misc_RNA (1)...(19): siRNA sense strand
ggcugcugcugcaauauuu

SEQ ID NO: 112107 - RNA, 19 nt, Homo sapiens
  misc_RNA (1)...(19): siRNA sense strand
caacuauguggcagcauuu

SEQ ID NO: 112108 - RNA, 19 nt, Homo sapiens
  misc_RNA (1)...(19): siRNA sense strand
ccuggcugcugcugcaaua

SEQ ID NO: 112109 - RNA, 19 nt, Homo sapiens
  misc_RNA (1)...(19): siRNA sense strand
gcuguugggcuccuucauu

SEQ ID NO: 112110 - RNA, 19 nt, Homo sapiens
  misc_RNA (1)...(19): siRNA sense strand
uaaaagcacagccuucuaa

SEQ ID NO: 112111 - RNA, 19 nt, Homo sapiens
  misc_RNA (1)...(19): siRNA sense strand
agaccuaaguuccaagaag

SEQ ID NO: 112112 - RNA, 19 nt, Homo sapiens
  misc_RNA (1)...(19): siRNA sense strand
ccaagucacacaaggaugu

SEQ ID NO: 112113 - RNA, 19 nt, Homo sapiens
  misc_RNA (1)...(19): siRNA sense strand
gcucagcgccagcaucauc

SEQ ID NO: 112114 - RNA, 19 nt, Homo sapiens
  misc_RNA (1)...(19): siRNA sense strand
ggugauggugggcaaguuu

SEQ ID NO: 112115 - RNA, 19 nt, Homo sapiens
  misc_RNA (1)...(19): siRNA sense strand
cgaagaauuuugagauguu

SEQ ID NO: 112116 - RNA, 19 nt, Homo sapiens
  misc_RNA (1)...(19): siRNA sense strand
caaaggaaugaaacacaga

SEQ ID NO: 112117 - RNA, 19 nt, Homo sapiens
  misc_RNA (1)...(19): siRNA sense strand
gaccauaucagugggcuau

SEQ ID NO: 112118 - RNA, 19 nt, Homo sapiens
  misc_RNA (1)...(19): siRNA sense strand
ggcaagucaguucguauaa

SEQ ID NO: 112119 - RNA, 19 nt, Homo sapiens
  misc_RNA (1)...(19): siRNA sense strand
uggcaagucaguucguaua

SEQ ID NO: 112120 - RNA, 19 nt, Homo sapiens
  misc_RNA (1)...(19): siRNA sense strand
uacaagaccuaaguuccaa

SEQ ID NO: 112121 - RNA, 19 nt, Homo sapiens
  misc_RNA (1)...(19): siRNA sense strand
ugguugaagucccagcaua

SEQ ID NO: 112122 - RNA, 19 nt, Homo sapiens
  misc_RNA (1)...(19): siRNA sense strand
ccccagacuuguauuauuu

SEQ ID NO: 112123 - RNA, 19 nt, Homo sapiens
  misc_RNA (1)...(19): siRNA sense strand
acaaggauguuaaaagaug

SEQ ID NO: 112124 - RNA, 19 nt, Homo sapiens
  misc_RNA (1)...(19): siRNA sense strand
agacaccauugaccagaug

SEQ ID NO: 112125 - RNA, 19 nt, Homo sapiens
  misc_RNA (1)...(19): siRNA sense strand
cuacaguccuggugauggu

SEQ ID NO: 112126 - RNA, 19 nt, Homo sapiens
  misc_RNA (1)...(19): siRNA sense strand
ccagaucuccaacuaugug

SEQ ID NO: 112127 - RNA, 19 nt, Homo sapiens
  misc_RNA (1)...(19): siRNA sense strand
cagccauccucaccuuguu

SEQ ID NO: 112128 - RNA, 19 nt, Homo sapiens
  misc_RNA (1)...(19): siRNA sense strand
cuacuucguuuaccuuggu

SEQ ID NO: 112129 - RNA, 19 nt, Homo sapiens
  misc_RNA (1)...(19): siRNA sense strand
gaagucccagcauaugugu

SEQ ID NO: 112130 - RNA, 19 nt, Homo sapiens
  misc_RNA (1)...(19): siRNA sense strand
aauauucucuacguuagga

SEQ ID NO: 112131 - RNA, 19 nt, Homo sapiens
  misc_RNA (1)...(19): siRNA sense strand
cauggccacugcccucuuc

SEQ ID NO: 112132 - RNA, 19 nt, Homo sapiens
  misc_RNA (1)...(19): siRNA sense strand
caagaccuaaguuccaaga

SEQ ID NO: 112133 - RNA, 19 nt, Homo sapiens
  misc_RNA (1)...(19): siRNA sense strand
ugccaaagccaaugggauu

SEQ ID NO: 112134 - RNA, 19 nt, Homo sapiens
  misc_RNA (1)...(19): siRNA sense strand
ugggccagaucuccaacua

SEQ ID NO: 112135 - RNA, 19 nt, Homo sapiens
  misc_RNA (1)...(19): siRNA sense strand
gaugcuaagagucaaagga

SEQ ID NO: 112136 - RNA, 19 nt, Homo sapiens
  misc_RNA (1)...(19): siRNA sense strand
gguugaagucccagcauau

SEQ ID NO: 112137 - RNA, 19 nt, Homo sapiens
  misc_RNA (1)...(19): siRNA sense strand
cuucgaaccuggaauaucc

SEQ ID NO: 112138 - RNA, 19 nt, Homo sapiens
  misc_RNA (1)...(19): siRNA sense strand
ucaccaucauguccauaau

SEQ ID NO: 112139 - RNA, 19 nt, Homo sapiens
  misc_RNA (1)...(19): siRNA sense strand
gcaggagagcugucuggau

SEQ ID NO: 112140 - RNA, 19 nt, Homo sapiens
  misc_RNA (1)...(19): siRNA sense strand
ccacaacauucuggaucug

SEQ ID NO: 112141 - RNA, 19 nt, Homo sapiens
  misc_RNA (1)...(19): siRNA sense strand
cagacaccauugaccagau

SEQ ID NO: 112142 - RNA, 19 nt, Homo sapiens
  misc_RNA (1)...(19): siRNA sense strand
gucaguucguauaauauuc

SEQ ID NO: 112143 - RNA, 19 nt, Homo sapiens
  misc_RNA (1)...(19): siRNA sense strand
ucaagaaaggcccacaauc

SEQ ID NO: 112144 - RNA, 19 nt, Homo sapiens
  misc_RNA (1)...(19): siRNA sense strand
aaaggaaugaaacacagaa

SEQ ID NO: 112145 - RNA, 19 nt, Homo sapiens
  misc_RNA (1)...(19): siRNA sense strand
ugaagucccagcauaugug

SEQ ID NO: 112146 - RNA, 19 nt, Homo sapiens
  misc_RNA (1)...(19): siRNA sense strand
cugcuucgaaccuggaaua

SEQ ID NO: 112147 - RNA, 19 nt, Homo sapiens
  misc_RNA (1)...(19): siRNA sense strand
ugaguuacaagaccuaagu

SEQ ID NO: 112148 - RNA, 19 nt, Homo sapiens
  misc_RNA (1)...(19): siRNA sense strand
gauguuugucgugcuguuu

SEQ ID NO: 112149 - RNA, 19 nt, Homo sapiens
  misc_RNA (1)...(19): siRNA sense strand
ggucaagaaaggcccacaa

SEQ ID NO: 112150 - RNA, 19 nt, Homo sapiens
  misc_RNA (1)...(19): siRNA sense strand
cuaagagucaaaggaauga

SEQ ID NO: 112151 - RNA, 19 nt, Homo sapiens
  misc_RNA (1)...(19): siRNA sense strand
ggcaguguccuucucuuca

SEQ ID NO: 112152 - RNA, 19 nt, Homo sapiens
  misc_RNA (1)...(19): siRNA sense strand
gaagaggcagaggugauca

SEQ ID NO: 112153 - RNA, 19 nt, Homo sapiens
  misc_RNA (1)...(19): siRNA sense strand
guugggcuccuucauuuca

SEQ ID NO: 112154 - RNA, 19 nt, Homo sapiens
  misc_RNA (1)...(19): siRNA sense strand
acuguuugcuuacuucauc

SEQ ID NO: 112155 - RNA, 19 nt, Homo sapiens
  misc_RNA (1)...(19): siRNA sense strand
gccacuguuugcuuacuuc

SEQ ID NO: 112156 - RNA, 19 nt, Homo sapiens
  misc_RNA (1)...(19): siRNA sense strand
gcaugggccagaucuccaa

SEQ ID NO: 112157 - RNA, 19 nt, Homo sapiens
  misc_RNA (1)...(19): siRNA sense strand
acauggugcugccacuguu

SEQ ID NO: 112158 - RNA, 19 nt, Homo sapiens
  misc_RNA (1)...(19): siRNA sense strand
cuucgugggugugcuguug

SEQ ID NO: 112159 - RNA, 19 nt, Homo sapiens
  misc_RNA (1)...(19): siRNA sense strand
uuugggcuuucgcuugaua

SEQ ID NO: 112160 - RNA, 19 nt, Homo sapiens
  misc_RNA (1)...(19): siRNA sense strand
gcguggcacucuggugguu

SEQ ID NO: 112161 - RNA, 19 nt, Homo sapiens
  misc_RNA (1)...(19): siRNA sense strand
ucagcuuccugcagaucuu

SEQ ID NO: 112162 - RNA, 19 nt, Homo sapiens
  misc_RNA (1)...(19): siRNA sense strand
gucaccaucauguccauaa

SEQ ID NO: 112163 - RNA, 19 nt, Homo sapiens
  misc_RNA (1)...(19): siRNA sense strand
uuacaagaccuaaguucca

SEQ ID NO: 112164 - RNA, 19 nt, Homo sapiens
  misc_RNA (1)...(19): siRNA sense strand
ugcugccacuguuugcuua

SEQ ID NO: 112165 - RNA, 19 nt, Homo sapiens
  misc_RNA (1)...(19): siRNA sense strand
cguuaggagugugcauauu

SEQ ID NO: 112166 - RNA, 19 nt, Homo sapiens
  misc_RNA (1)...(19): siRNA sense strand
cgugcuguuuguccuugua

SEQ ID NO: 112167 - RNA, 19 nt, Homo sapiens
  misc_RNA (1)...(19): siRNA sense strand
aagagucaaaggaaugaaa

SEQ ID NO: 112168 - RNA, 19 nt, Homo sapiens
  misc_RNA (1)...(19): siRNA sense strand
ccggaagaaugugcuguuc

SEQ ID NO: 112169 - RNA, 19 nt, Homo sapiens
  misc_RNA (1)...(19): siRNA sense strand
guggcacucuggugguuca

SEQ ID NO: 112170 - RNA, 19 nt, Homo sapiens
  misc_RNA (1)...(19): siRNA sense strand
uuaggagugugcauauuuu

SEQ ID NO: 112171 - RNA, 19 nt, Homo sapiens
  misc_RNA (1)...(19): siRNA sense strand
caacauucuggaucugcuu

SEQ ID NO: 112172 - RNA, 19 nt, Homo sapiens
  misc_RNA (1)...(19): siRNA sense strand
ccagacuuguauuauuugg

SEQ ID NO: 112173 - RNA, 19 nt, Homo sapiens
  misc_RNA (1)...(19): siRNA sense strand
cuucaaagcuggagucugu

SEQ ID NO: 112174 - RNA, 19 nt, Homo sapiens
  misc_RNA (1)...(19): siRNA sense strand
ggccaauguuugaugcuua

SEQ ID NO: 112175 - RNA, 19 nt, Homo sapiens
  misc_RNA (1)...(19): siRNA sense strand
gccaauguuugaugcuuaa

SEQ ID NO: 112176 - RNA, 19 nt, Homo sapiens
  misc_RNA (1)...(19): siRNA sense strand
ggaggaagccugggaagug

SEQ ID NO: 112177 - RNA, 19 nt, Homo sapiens
  misc_RNA (1)...(19): siRNA sense strand
ugacuuauggccaauguuu

SEQ ID NO: 112178 - RNA, 19 nt, Homo sapiens
  misc_RNA (1)...(19): siRNA sense strand
ugacacuuguggcaucaaa

SEQ ID NO: 112179 - RNA, 19 nt, Homo sapiens
  misc_RNA (1)...(19): siRNA sense strand
guggaaggcucuggaaagu

SEQ ID NO: 112180 - RNA, 19 nt, Homo sapiens
  misc_RNA (1)...(19): siRNA sense strand
ugugggaaauccugcguuu

SEQ ID NO: 112181 - RNA, 19 nt, Homo sapiens
  misc_RNA (1)...(19): siRNA sense strand
agucuguccuccuaagaaa

SEQ ID NO: 112182 - RNA, 19 nt, Homo sapiens
  misc_RNA (1)...(19): siRNA sense strand
gagucuguccuccuaagaa

SEQ ID NO: 112183 - RNA, 19 nt, Homo sapiens
  misc_RNA (1)...(19): siRNA sense strand
gggaagaagagauguuguc

SEQ ID NO: 112184 - RNA, 19 nt, Homo sapiens
  misc_RNA (1)...(19): siRNA sense strand
gcccagugccuuagauaca

SEQ ID NO: 112185 - RNA, 19 nt, Homo sapiens
  misc_RNA (1)...(19): siRNA sense strand
caauuucugugagauggau

SEQ ID NO: 112186 - RNA, 19 nt, Homo sapiens
  misc_RNA (1)...(19): siRNA sense strand
ucuggaaaguccuucaaag

SEQ ID NO: 112187 - RNA, 19 nt, Homo sapiens
  misc_RNA (1)...(19): siRNA sense strand
cccagugccuuagauacaa

SEQ ID NO: 112188 - RNA, 19 nt, Homo sapiens
  misc_RNA (1)...(19): siRNA sense strand
acacuuguggcaucaaaug

SEQ ID NO: 112189 - RNA, 19 nt, Homo sapiens
  misc_RNA (1)...(19): siRNA sense strand
aaaucugcccagugccuua

SEQ ID NO: 112190 - RNA, 19 nt, Homo sapiens
  misc_RNA (1)...(19): siRNA sense strand
cagggaagaagagauguug

SEQ ID NO: 112191 - RNA, 19 nt, Homo sapiens
  misc_RNA (1)...(19): siRNA sense strand
gggcaugugugggaaaucc

SEQ ID NO: 112192 - RNA, 19 nt, Homo sapiens
  misc_RNA (1)...(19): siRNA sense strand
caaaugccuggauccuguu

SEQ ID NO: 112193 - RNA, 19 nt, Homo sapiens
  misc_RNA (1)...(19): siRNA sense strand
uaacauagcucgagaggua

SEQ ID NO: 112194 - RNA, 19 nt, Homo sapiens
  misc_RNA (1)...(19): siRNA sense strand
gaacaccuuugcagaauaa

SEQ ID NO: 112195 - RNA, 19 nt, Homo sapiens
  misc_RNA (1)...(19): siRNA sense strand
gaggaaauguuacaaauga

SEQ ID NO: 112196 - RNA, 19 nt, Homo sapiens
  misc_RNA (1)...(19): siRNA sense strand
ugaugaagcucacagaaua

SEQ ID NO: 112197 - RNA, 19 nt, Homo sapiens
  misc_RNA (1)...(19): siRNA sense strand
gaagagaugacauugauaa

SEQ ID NO: 112198 - RNA, 19 nt, Homo sapiens
  misc_RNA (1)...(19): siRNA sense strand
ggaaagacuucaugcaguu

SEQ ID NO: 112199 - RNA, 19 nt, Homo sapiens
  misc_RNA (1)...(19): siRNA sense strand
ggaaauggacccagaauau

SEQ ID NO: 112200 - RNA, 19 nt, Homo sapiens
  misc_RNA (1)...(19): siRNA sense strand
gcacagaaaucuccaacau

SEQ ID NO: 112201 - RNA, 19 nt, Homo sapiens
  misc_RNA (1)...(19): siRNA sense strand
gaagaaaccaguacgugua

SEQ ID NO: 112202 - RNA, 19 nt, Homo sapiens
  misc_RNA (1)...(19): siRNA sense strand
gggagaagauuauagagaa

SEQ ID NO: 112203 - RNA, 19 nt, Homo sapiens
  misc_RNA (1)...(19): siRNA sense strand
gaacuauacugaggaagaa

SEQ ID NO: 112204 - RNA, 19 nt, Homo sapiens
  misc_RNA (1)...(19): siRNA sense strand
guaacacucugauuucauu

SEQ ID NO: 112205 - RNA, 19 nt, Homo sapiens
  misc_RNA (1)...(19): siRNA sense strand
ggacauugaacaaaguuua

SEQ ID NO: 112206 - RNA, 19 nt, Homo sapiens
  misc_RNA (1)...(19): siRNA sense strand
gcacagagcaagaagaaga

SEQ ID NO: 112207 - RNA, 19 nt, Homo sapiens
  misc_RNA (1)...(19): siRNA sense strand
ggaacaccuuugcagaaua

SEQ ID NO: 112208 - RNA, 19 nt, Homo sapiens
  misc_RNA (1)...(19): siRNA sense strand
agaagaagaugaagagcua

SEQ ID NO: 112209 - RNA, 19 nt, Homo sapiens
  misc_RNA (1)...(19): siRNA sense strand
ugaauugguugaucucuuu

SEQ ID NO: 112210 - RNA, 19 nt, Homo sapiens
  misc_RNA (1)...(19): siRNA sense strand
caacgagaaugguauacaa

SEQ ID NO: 112211 - RNA, 19 nt, Homo sapiens
  misc_RNA (1)...(19): siRNA sense strand
gaagagaggauuguagaaa

SEQ ID NO: 112212 - RNA, 19 nt, Homo sapiens
  misc_RNA (1)...(19): siRNA sense strand
gagaugacauugauaacau

SEQ ID NO: 112213 - RNA, 19 nt, Homo sapiens
  misc_RNA (1)...(19): siRNA sense strand
ggcgauaccuggucauuga

SEQ ID NO: 112214 - RNA, 19 nt, Homo sapiens
  misc_RNA (1)...(19): siRNA sense strand
ggagaagauuauagagaaa

SEQ ID NO: 112215 - RNA, 19 nt, Homo sapiens
  misc_RNA (1)...(19): siRNA sense strand
gcagaugacuuugauucuu

SEQ ID NO: 112216 - RNA, 19 nt, Homo sapiens
  misc_RNA (1)...(19): siRNA sense strand
gaaccugguccaccuuaua

SEQ ID NO: 112217 - RNA, 19 nt, Homo sapiens
  misc_RNA (1)...(19): siRNA sense strand
cuaaagcgccuaaaucuga

SEQ ID NO: 112218 - RNA, 19 nt, Homo sapiens
  misc_RNA (1)...(19): siRNA sense strand
gaagaaacgggcaacuaaa

SEQ ID NO: 112219 - RNA, 19 nt, Homo sapiens
  misc_RNA (1)...(19): siRNA sense strand
aaagaagacugcagagaug

SEQ ID NO: 112220 - RNA, 19 nt, Homo sapiens
  misc_RNA (1)...(19): siRNA sense strand
gagacucgauucaauuguu

SEQ ID NO: 112221 - RNA, 19 nt, Homo sapiens
  misc_RNA (1)...(19): siRNA sense strand
ggacugaauugguugaucu

SEQ ID NO: 112222 - RNA, 19 nt, Homo sapiens
  misc_RNA (1)...(19): siRNA sense strand
caacgaaggaucaguauca

SEQ ID NO: 112223 - RNA, 19 nt, Homo sapiens
  misc_RNA (1)...(19): siRNA sense strand
gaugaagacauuacaacua

SEQ ID NO: 112224 - RNA, 19 nt, Homo sapiens
  misc_RNA (1)...(19): siRNA sense strand
guugacagaugaagacauu

SEQ ID NO: 112225 - RNA, 19 nt, Homo sapiens
  misc_RNA (1)...(19): siRNA sense strand
caacaaggaagacucauug

SEQ ID NO: 112226 - RNA, 19 nt, Homo sapiens
  misc_RNA (1)...(19): siRNA sense strand
uuacacaacuggaugaaug

SEQ ID NO: 112227 - RNA, 19 nt, Homo sapiens
  misc_RNA (1)...(19): siRNA sense strand
ugacuuugauucuugguuu

SEQ ID NO: 112228 - RNA, 19 nt, Homo sapiens
  misc_RNA (1)...(19): siRNA sense strand
ggaaagagagagagcagaa

SEQ ID NO: 112229 - RNA, 19 nt, Homo sapiens
  misc_RNA (1)...(19): siRNA sense strand
agaagagucugccaccuaa

SEQ ID NO: 112230 - RNA, 19 nt, Homo sapiens
  misc_RNA (1)...(19): siRNA sense strand
gaagagcuacugucugaga

SEQ ID NO: 112231 - RNA, 19 nt, Homo sapiens
  misc_RNA (1)...(19): siRNA sense strand
gauugaaccuccuaaacga

SEQ ID NO: 112232 - RNA, 19 nt, Homo sapiens
  misc_RNA (1)...(19): siRNA sense strand
gagagugaguugacagaug

SEQ ID NO: 112233 - RNA, 19 nt, Homo sapiens
  misc_RNA (1)...(19): siRNA sense strand
gagaagagucugccaccua

SEQ ID NO: 112234 - RNA, 19 nt, Homo sapiens
  misc_RNA (1)...(19): siRNA sense strand
cagaugacuuugauucuug

SEQ ID NO: 112235 - RNA, 19 nt, Homo sapiens
  misc_RNA (1)...(19): siRNA sense strand
gaaauggacccagaauaug

SEQ ID NO: 112236 - RNA, 19 nt, Homo sapiens
  misc_RNA (1)...(19): siRNA sense strand
gaagcaagaauucaacgaa

SEQ ID NO: 112237 - RNA, 19 nt, Homo sapiens
  misc_RNA (1)...(19): siRNA sense strand
ggaguauucagcuguauuu

SEQ ID NO: 112238 - RNA, 19 nt, Homo sapiens
  misc_RNA (1)...(19): siRNA sense strand
agaaagagcugagauaaaa

SEQ ID NO: 112239 - RNA, 19 nt, Homo sapiens
  misc_RNA (1)...(19): siRNA sense strand
guacguguauuccgucuca

SEQ ID NO: 112240 - RNA, 19 nt, Homo sapiens
  misc_RNA (1)...(19): siRNA sense strand
ggaauuaaccuggcaagug

SEQ ID NO: 112241 - RNA, 19 nt, Homo sapiens
  misc_RNA (1)...(19): siRNA sense strand
acagaaaucuccaacaucu

SEQ ID NO: 112242 - RNA, 19 nt, Homo sapiens
  misc_RNA (1)...(19): siRNA sense strand
ugagaaauauggaagagau

SEQ ID NO: 112243 - RNA, 19 nt, Homo sapiens
  misc_RNA (1)...(19): siRNA sense strand
guagaaagagcugagauaa

SEQ ID NO: 112244 - RNA, 19 nt, Homo sapiens
  misc_RNA (1)...(19): siRNA sense strand
agaaagagaggauaaauuc

SEQ ID NO: 112245 - RNA, 19 nt, Homo sapiens
  misc_RNA (1)...(19): siRNA sense strand
gaagaaagagaggauaaau

SEQ ID NO: 112246 - RNA, 19 nt, Homo sapiens
  misc_RNA (1)...(19): siRNA sense strand
acaacuggaugaaugaauu

SEQ ID NO: 112247 - RNA, 19 nt, Homo sapiens
  misc_RNA (1)...(19): siRNA sense strand
gaagacauuacaacuauuc

SEQ ID NO: 112248 - RNA, 19 nt, Homo sapiens
  misc_RNA (1)...(19): siRNA sense strand
agacucgauucaauuguua

SEQ ID NO: 112249 - RNA, 19 nt, Homo sapiens
  misc_RNA (1)...(19): siRNA sense strand
gaagcucacagaauaaaga

SEQ ID NO: 112250 - RNA, 19 nt, Homo sapiens
  misc_RNA (1)...(19): siRNA sense strand
ggcaagugcugaugugguu

SEQ ID NO: 112251 - RNA, 19 nt, Homo sapiens
  misc_RNA (1)...(19): siRNA sense strand
ggaacguugcaaugaauua

SEQ ID NO: 112252 - RNA, 19 nt, Homo sapiens
  misc_RNA (1)...(19): siRNA sense strand
agagugaguugacagauga

SEQ ID NO: 112253 - RNA, 19 nt, Homo sapiens
  misc_RNA (1)...(19): siRNA sense strand
gcaagaagaagaugaagag

SEQ ID NO: 112254 - RNA, 19 nt, Homo sapiens
  misc_RNA (1)...(19): siRNA sense strand
cugaggaggucauggagua

SEQ ID NO: 112255 - RNA, 19 nt, Homo sapiens
  misc_RNA (1)...(19): siRNA sense strand
agaagaaacgggcaacuaa

SEQ ID NO: 112256 - RNA, 19 nt, Homo sapiens
  misc_RNA (1)...(19): siRNA sense strand
augaagagcuacugucuga

SEQ ID NO: 112257 - RNA, 19 nt, Homo sapiens
  misc_RNA (1)...(19): siRNA sense strand
gcaaaggaaagaacuauac

SEQ ID NO: 112258 - RNA, 19 nt, Homo sapiens
  misc_RNA (1)...(19): siRNA sense strand
cgaaggaucaguaucaaga

SEQ ID NO: 112259 - RNA, 19 nt, Homo sapiens
  misc_RNA (1)...(19): siRNA sense strand
uggaagagaugacauugau

SEQ ID NO: 112260 - RNA, 19 nt, Homo sapiens
  misc_RNA (1)...(19): siRNA sense strand
uuuauugccugaugucuuu

SEQ ID NO: 112261 - RNA, 19 nt, Homo sapiens
  misc_RNA (1)...(19): siRNA sense strand
gauacaaggcuccauuuca

SEQ ID NO: 112262 - RNA, 19 nt, Homo sapiens
  misc_RNA (1)...(19): siRNA sense strand
gcuggagacuaccgccaua

SEQ ID NO: 112263 - RNA, 19 nt, Homo sapiens
  misc_RNA (1)...(19): siRNA sense strand
aaagaacuauacugaggaa

SEQ ID NO: 112264 - RNA, 19 nt, Homo sapiens
  misc_RNA (1)...(19): siRNA sense strand
gcaaugaauuacaggacau

SEQ ID NO: 112265 - RNA, 19 nt, Homo sapiens
  misc_RNA (1)...(19): siRNA sense strand
cccagaauaugaagagaaa

SEQ ID NO: 112266 - RNA, 19 nt, Homo sapiens
  misc_RNA (1)...(19): siRNA sense strand
cgaaaguguuguaaucauc

SEQ ID NO: 112267 - RNA, 19 nt, Homo sapiens
  misc_RNA (1)...(19): siRNA sense strand
agaauaaccugcaugaacu

SEQ ID NO: 112268 - RNA, 19 nt, Homo sapiens
  misc_RNA (1)...(19): siRNA sense strand
acuaaccgcuugcuccuaa

SEQ ID NO: 112269 - RNA, 19 nt, Homo sapiens
  misc_RNA (1)...(19): siRNA sense strand
caucuccacugaacaugaa

SEQ ID NO: 112270 - RNA, 19 nt, Homo sapiens
  misc_RNA (1)...(19): siRNA sense strand
agauuugacugguuuauca

SEQ ID NO: 112271 - RNA, 19 nt, Homo sapiens
  misc_RNA (1)...(19): siRNA sense strand
gaaaccaguacguguauuc

SEQ ID NO: 112272 - RNA, 19 nt, Homo sapiens
  misc_RNA (1)...(19): siRNA sense strand
gagaagggcgagaagaaga

SEQ ID NO: 112273 - RNA, 19 nt, Homo sapiens
  misc_RNA (1)...(19): siRNA sense strand
gcaaauucaucuuuaugcu

SEQ ID NO: 112274 - RNA, 19 nt, Homo sapiens
  misc_RNA (1)...(19): siRNA sense strand
gaugaagcucacagaauaa

SEQ ID NO: 112275 - RNA, 19 nt, Homo sapiens
  misc_RNA (1)...(19): siRNA sense strand
gaaauugaggaaagagaga

SEQ ID NO: 112276 - RNA, 19 nt, Homo sapiens
  misc_RNA (1)...(19): siRNA sense strand
guuuagauuugacugguuu

SEQ ID NO: 112277 - RNA, 19 nt, Homo sapiens
  misc_RNA (1)...(19): siRNA sense strand
caagauacaaggcuccauu

SEQ ID NO: 112278 - RNA, 19 nt, Homo sapiens
  misc_RNA (1)...(19): siRNA sense strand
ucacacaggguuucacaaa

SEQ ID NO: 112279 - RNA, 19 nt, Homo sapiens
  misc_RNA (1)...(19): siRNA sense strand
ggauaaauuccuagaagug

SEQ ID NO: 112280 - RNA, 19 nt, Homo sapiens
  misc_RNA (1)...(19): siRNA sense strand
gcucacagaauaaagaaug

SEQ ID NO: 112281 - RNA, 19 nt, Homo sapiens
  misc_RNA (1)...(19): siRNA sense strand
auacaaggcuccauuucau

SEQ ID NO: 112282 - RNA, 19 nt, Homo sapiens
  misc_RNA (1)...(19): siRNA sense strand
ggaagagaugacauugaua

SEQ ID NO: 112283 - RNA, 19 nt, Homo sapiens
  misc_RNA (1)...(19): siRNA sense strand
aaacuggacuaaacgagau

SEQ ID NO: 112284 - RNA, 19 nt, Homo sapiens
  misc_RNA (1)...(19): siRNA sense strand
aaagauugauggagcugaa

SEQ ID NO: 112285 - RNA, 19 nt, Homo sapiens
  misc_RNA (1)...(19): siRNA sense strand
uaaagcgccuaaaucugaa

SEQ ID NO: 112286 - RNA, 19 nt, Homo sapiens
  misc_RNA (1)...(19): siRNA sense strand
agagaggauuguagaaaga

SEQ ID NO: 112287 - RNA, 19 nt, Homo sapiens
  misc_RNA (1)...(19): siRNA sense strand
gaaagagagagagcagaaa

SEQ ID NO: 112288 - RNA, 19 nt, Homo sapiens
  misc_RNA (1)...(19): siRNA sense strand
gaauuaagacaguguguac

SEQ ID NO: 112289 - RNA, 19 nt, Homo sapiens
  misc_RNA (1)...(19): siRNA sense strand
gcaagaauucaacgaagga

SEQ ID NO: 112290 - RNA, 19 nt, Homo sapiens
  misc_RNA (1)...(19): siRNA sense strand
ugauggagcugaaccucuu

SEQ ID NO: 112291 - RNA, 19 nt, Homo sapiens
  misc_RNA (1)...(19): siRNA sense strand
cgcaguggaugccuacuuu

SEQ ID NO: 112292 - RNA, 19 nt, Homo sapiens
  misc_RNA (1)...(19): siRNA sense strand
cauuacaacuauucuggaa

SEQ ID NO: 112293 - RNA, 19 nt, Homo sapiens
  misc_RNA (1)...(19): siRNA sense strand
uaacauagcucgagaggua

SEQ ID NO: 112294 - RNA, 19 nt, Homo sapiens
  misc_RNA (1)...(19): siRNA sense strand
gaacaccuuugcagaauaa

SEQ ID NO: 112295 - RNA, 19 nt, Homo sapiens
  misc_RNA (1)...(19): siRNA sense strand
gaggaaauguuacaaauga

SEQ ID NO: 112296 - RNA, 19 nt, Homo sapiens
  misc_RNA (1)...(19): siRNA sense strand
ugaugaagcucacagaaua

SEQ ID NO: 112297 - RNA, 19 nt, Homo sapiens
  misc_RNA (1)...(19): siRNA sense strand
gaagagaugacauugauaa

SEQ ID NO: 112298 - RNA, 19 nt, Homo sapiens
  misc_RNA (1)...(19): siRNA sense strand
ggaaagacuucaugcaguu

SEQ ID NO: 112299 - RNA, 19 nt, Homo sapiens
  misc_RNA (1)...(19): siRNA sense strand
ggaaauggacccagaauau

SEQ ID NO: 112300 - RNA, 19 nt, Homo sapiens
  misc_RNA (1)...(19): siRNA sense strand
gcacagaaaucuccaacau

SEQ ID NO: 112301 - RNA, 19 nt, Homo sapiens
  misc_RNA (1)...(19): siRNA sense strand
gaagaaaccaguacgugua

SEQ ID NO: 112302 - RNA, 19 nt, Homo sapiens
  misc_RNA (1)...(19): siRNA sense strand
gggagaagauuauagagaa

SEQ ID NO: 112303 - RNA, 19 nt, Homo sapiens
  misc_RNA (1)...(19): siRNA sense strand
gaacuauacugaggaagaa

SEQ ID NO: 112304 - RNA, 19 nt, Homo sapiens
  misc_RNA (1)...(19): siRNA sense strand
guaacacucugauuucauu

SEQ ID NO: 112305 - RNA, 19 nt, Homo sapiens
  misc_RNA (1)...(19): siRNA sense strand
ggacauugaacaaaguuua

SEQ ID NO: 112306 - RNA, 19 nt, Homo sapiens
  misc_RNA (1)...(19): siRNA sense strand
gcacagagcaagaagaaga

SEQ ID NO: 112307 - RNA, 19 nt, Homo sapiens
  misc_RNA (1)...(19): siRNA sense strand
ggaacaccuuugcagaaua

SEQ ID NO: 112308 - RNA, 19 nt, Homo sapiens
  misc_RNA (1)...(19): siRNA sense strand
agaagaagaugaagagcua

SEQ ID NO: 112309 - RNA, 19 nt, Homo sapiens
  misc_RNA (1)...(19): siRNA sense strand
ugaauugguugaucucuuu

SEQ ID NO: 112310 - RNA, 19 nt, Homo sapiens
  misc_RNA (1)...(19): siRNA sense strand
caacgagaaugguauacaa

SEQ ID NO: 112311 - RNA, 19 nt, Homo sapiens
  misc_RNA (1)...(19): siRNA sense strand
gaagagaggauuguagaaa

SEQ ID NO: 112312 - RNA, 19 nt, Homo sapiens
  misc_RNA (1)...(19): siRNA sense strand
gagaugacauugauaacau

SEQ ID NO: 112313 - RNA, 19 nt, Homo sapiens
  misc_RNA (1)...(19): siRNA sense strand
ggcgauaccuggucauuga

SEQ ID NO: 112314 - RNA, 19 nt, Homo sapiens
  misc_RNA (1)...(19): siRNA sense strand
ggagaagauuauagagaaa

SEQ ID NO: 112315 - RNA, 19 nt, Homo sapiens
  misc_RNA (1)...(19): siRNA sense strand
gcagaugacuuugauucuu

SEQ ID NO: 112316 - RNA, 19 nt, Homo sapiens
  misc_RNA (1)...(19): siRNA sense strand
gaaccugguccaccuuaua

SEQ ID NO: 112317 - RNA, 19 nt, Homo sapiens
  misc_RNA (1)...(19): siRNA sense strand
cuaaagcgccuaaaucuga

SEQ ID NO: 112318 - RNA, 19 nt, Homo sapiens
  misc_RNA (1)...(19): siRNA sense strand
gaagaaacgggcaacuaaa

SEQ ID NO: 112319 - RNA, 19 nt, Homo sapiens
  misc_RNA (1)...(19): siRNA sense strand
aaagaagacugcagagaug

SEQ ID NO: 112320 - RNA, 19 nt, Homo sapiens
  misc_RNA (1)...(19): siRNA sense strand
gagacucgauucaauuguu

SEQ ID NO: 112321 - RNA, 19 nt, Homo sapiens
  misc_RNA (1)...(19): siRNA sense strand
ggacugaauugguugaucu

SEQ ID NO: 112322 - RNA, 19 nt, Homo sapiens
  misc_RNA (1)...(19): siRNA sense strand
caacgaaggaucaguauca

SEQ ID NO: 112323 - RNA, 19 nt, Homo sapiens
  misc_RNA (1)...(19): siRNA sense strand
gaugaagacauuacaacua

SEQ ID NO: 112324 - RNA, 19 nt, Homo sapiens
  misc_RNA (1)...(19): siRNA sense strand
guugacagaugaagacauu

SEQ ID NO: 112325 - RNA, 19 nt, Homo sapiens
  misc_RNA (1)...(19): siRNA sense strand
caacaaggaagacucauug

SEQ ID NO: 112326 - RNA, 19 nt, Homo sapiens
  misc_RNA (1)...(19): siRNA sense strand
uuacacaacuggaugaaug

SEQ ID NO: 112327 - RNA, 19 nt, Homo sapiens
  misc_RNA (1)...(19): siRNA sense strand
ugacuuugauucuugguuu

SEQ ID NO: 112328 - RNA, 19 nt, Homo sapiens
  misc_RNA (1)...(19): siRNA sense strand
ggaaagagagagagcagaa

SEQ ID NO: 112329 - RNA, 19 nt, Homo sapiens
  misc_RNA (1)...(19): siRNA sense strand
agaagagucugccaccuaa

SEQ ID NO: 112330 - RNA, 19 nt, Homo sapiens
  misc_RNA (1)...(19): siRNA sense strand
gaagagcuacugucugaga

SEQ ID NO: 112331 - RNA, 19 nt, Homo sapiens
  misc_RNA (1)...(19): siRNA sense strand
gauugaaccuccuaaacga

SEQ ID NO: 112332 - RNA, 19 nt, Homo sapiens
  misc_RNA (1)...(19): siRNA sense strand
gagagugaguugacagaug

SEQ ID NO: 112333 - RNA, 19 nt, Homo sapiens
  misc_RNA (1)...(19): siRNA sense strand
gagaagagucugccaccua

SEQ ID NO: 112334 - RNA, 19 nt, Homo sapiens
  misc_RNA (1)...(19): siRNA sense strand
cagaugacuuugauucuug

SEQ ID NO: 112335 - RNA, 19 nt, Homo sapiens
  misc_RNA (1)...(19): siRNA sense strand
gaaauggacccagaauaug

SEQ ID NO: 112336 - RNA, 19 nt, Homo sapiens
  misc_RNA (1)...(19): siRNA sense strand
gaagcaagaauucaacgaa

SEQ ID NO: 112337 - RNA, 19 nt, Homo sapiens
  misc_RNA (1)...(19): siRNA sense strand
ggaguauucagcuguauuu

SEQ ID NO: 112338 - RNA, 19 nt, Homo sapiens
  misc_RNA (1)...(19): siRNA sense strand
agaaagagcugagauaaaa

SEQ ID NO: 112339 - RNA, 19 nt, Homo sapiens
  misc_RNA (1)...(19): siRNA sense strand
guacguguauuccgucuca

SEQ ID NO: 112340 - RNA, 19 nt, Homo sapiens
  misc_RNA (1)...(19): siRNA sense strand
ggaauuaaccuggcaagug

SEQ ID NO: 112341 - RNA, 19 nt, Homo sapiens
  misc_RNA (1)...(19): siRNA sense strand
acagaaaucuccaacaucu

SEQ ID NO: 112342 - RNA, 19 nt, Homo sapiens
  misc_RNA (1)...(19): siRNA sense strand
ugagaaauauggaagagau

SEQ ID NO: 112343 - RNA, 19 nt, Homo sapiens
  misc_RNA (1)...(19): siRNA sense strand
guagaaagagcugagauaa

SEQ ID NO: 112344 - RNA, 19 nt, Homo sapiens
  misc_RNA (1)...(19): siRNA sense strand
agaaagagaggauaaauuc

SEQ ID NO: 112345 - RNA, 19 nt, Homo sapiens
  misc_RNA (1)...(19): siRNA sense strand
gaagaaagagaggauaaau

SEQ ID NO: 112346 - RNA, 19 nt, Homo sapiens
  misc_RNA (1)...(19): siRNA sense strand
acaacuggaugaaugaauu

SEQ ID NO: 112347 - RNA, 19 nt, Homo sapiens
  misc_RNA (1)...(19): siRNA sense strand
gaagacauuacaacuauuc

SEQ ID NO: 112348 - RNA, 19 nt, Homo sapiens
  misc_RNA (1)...(19): siRNA sense strand
agacucgauucaauuguua

SEQ ID NO: 112349 - RNA, 19 nt, Homo sapiens
  misc_RNA (1)...(19): siRNA sense strand
gaagcucacagaauaaaga

SEQ ID NO: 112350 - RNA, 19 nt, Homo sapiens
  misc_RNA (1)...(19): siRNA sense strand
ggcaagugcugaugugguu

SEQ ID NO: 112351 - RNA, 19 nt, Homo sapiens
  misc_RNA (1)...(19): siRNA sense strand
ggaacguugcaaugaauua

SEQ ID NO: 112352 - RNA, 19 nt, Homo sapiens
  misc_RNA (1)...(19): siRNA sense strand
agagugaguugacagauga

SEQ ID NO: 112353 - RNA, 19 nt, Homo sapiens
  misc_RNA (1)...(19): siRNA sense strand
gcaagaagaagaugaagag

SEQ ID NO: 112354 - RNA, 19 nt, Homo sapiens
  misc_RNA (1)...(19): siRNA sense strand
cugaggaggucauggagua

SEQ ID NO: 112355 - RNA, 19 nt, Homo sapiens
  misc_RNA (1)...(19): siRNA sense strand
agaagaaacgggcaacuaa

SEQ ID NO: 112356 - RNA, 19 nt, Homo sapiens
  misc_RNA (1)...(19): siRNA sense strand
augaagagcuacugucuga

SEQ ID NO: 112357 - RNA, 19 nt, Homo sapiens
  misc_RNA (1)...(19): siRNA sense strand
gcaaaggaaagaacuauac

SEQ ID NO: 112358 - RNA, 19 nt, Homo sapiens
  misc_RNA (1)...(19): siRNA sense strand
cgaaggaucaguaucaaga

SEQ ID NO: 112359 - RNA, 19 nt, Homo sapiens
  misc_RNA (1)...(19): siRNA sense strand
uggaagagaugacauugau

SEQ ID NO: 112360 - RNA, 19 nt, Homo sapiens
  misc_RNA (1)...(19): siRNA sense strand
uuuauugccugaugucuuu

SEQ ID NO: 112361 - RNA, 19 nt, Homo sapiens
  misc_RNA (1)...(19): siRNA sense strand
gauacaaggcuccauuuca

SEQ ID NO: 112362 - RNA, 19 nt, Homo sapiens
  misc_RNA (1)...(19): siRNA sense strand
gcuggagacuaccgccaua

SEQ ID NO: 112363 - RNA, 19 nt, Homo sapiens
  misc_RNA (1)...(19): siRNA sense strand
aaagaacuauacugaggaa

SEQ ID NO: 112364 - RNA, 19 nt, Homo sapiens
  misc_RNA (1)...(19): siRNA sense strand
gcaaugaauuacaggacau

SEQ ID NO: 112365 - RNA, 19 nt, Homo sapiens
  misc_RNA (1)...(19): siRNA sense strand
cccagaauaugaagagaaa

SEQ ID NO: 112366 - RNA, 19 nt, Homo sapiens
  misc_RNA (1)...(19): siRNA sense strand
cgaaaguguuguaaucauc

SEQ ID NO: 112367 - RNA, 19 nt, Homo sapiens
  misc_RNA (1)...(19): siRNA sense strand
agaauaaccugcaugaacu

SEQ ID NO: 112368 - RNA, 19 nt, Homo sapiens
  misc_RNA (1)...(19): siRNA sense strand
acuaaccgcuugcuccuaa

SEQ ID NO: 112369 - RNA, 19 nt, Homo sapiens
  misc_RNA (1)...(19): siRNA sense strand
caucuccacugaacaugaa

SEQ ID NO: 112370 - RNA, 19 nt, Homo sapiens
  misc_RNA (1)...(19): siRNA sense strand
agauuugacugguuuauca

SEQ ID NO: 112371 - RNA, 19 nt, Homo sapiens
  misc_RNA (1)...(19): siRNA sense strand
gaaaccaguacguguauuc

SEQ ID NO: 112372 - RNA, 19 nt, Homo sapiens
  misc_RNA (1)...(19): siRNA sense strand
gagaagggcgagaagaaga

SEQ ID NO: 112373 - RNA, 19 nt, Homo sapiens
  misc_RNA (1)...(19): siRNA sense strand
gcaaauucaucuuuaugcu

SEQ ID NO: 112374 - RNA, 19 nt, Homo sapiens
  misc_RNA (1)...(19): siRNA sense strand
gaugaagcucacagaauaa

SEQ ID NO: 112375 - RNA, 19 nt, Homo sapiens
  misc_RNA (1)...(19): siRNA sense strand
gaaauugaggaaagagaga

SEQ ID NO: 112376 - RNA, 19 nt, Homo sapiens
  misc_RNA (1)...(19): siRNA sense strand
guuuagauuugacugguuu

SEQ ID NO: 112377 - RNA, 19 nt, Homo sapiens
  misc_RNA (1)...(19): siRNA sense strand
caagauacaaggcuccauu

SEQ ID NO: 112378 - RNA, 19 nt, Homo sapiens
  misc_RNA (1)...(19): siRNA sense strand
ucacacaggguuucacaaa

SEQ ID NO: 112379 - RNA, 19 nt, Homo sapiens
  misc_RNA (1)...(19): siRNA sense strand
ggauaaauuccuagaagug

SEQ ID NO: 112380 - RNA, 19 nt, Homo sapiens
  misc_RNA (1)...(19): siRNA sense strand
gcucacagaauaaagaaug

SEQ ID NO: 112381 - RNA, 19 nt, Homo sapiens
  misc_RNA (1)...(19): siRNA sense strand
auacaaggcuccauuucau

SEQ ID NO: 112382 - RNA, 19 nt, Homo sapiens
  misc_RNA (1)...(19): siRNA sense strand
ggaagagaugacauugaua

SEQ ID NO: 112383 - RNA, 19 nt, Homo sapiens
  misc_RNA (1)...(19): siRNA sense strand
aaacuggacuaaacgagau

SEQ ID NO: 112384 - RNA, 19 nt, Homo sapiens
  misc_RNA (1)...(19): siRNA sense strand
aaagauugauggagcugaa

SEQ ID NO: 112385 - RNA, 19 nt, Homo sapiens
  misc_RNA (1)...(19): siRNA sense strand
uaaagcgccuaaaucugaa

SEQ ID NO: 112386 - RNA, 19 nt, Homo sapiens
  misc_RNA (1)...(19): siRNA sense strand
agagaggauuguagaaaga

SEQ ID NO: 112387 - RNA, 19 nt, Homo sapiens
  misc_RNA (1)...(19): siRNA sense strand
gaaagagagagagcagaaa

SEQ ID NO: 112388 - RNA, 19 nt, Homo sapiens
  misc_RNA (1)...(19): siRNA sense strand
gaauuaagacaguguguac

SEQ ID NO: 112389 - RNA, 19 nt, Homo sapiens
  misc_RNA (1)...(19): siRNA sense strand
gcaagaauucaacgaagga

SEQ ID NO: 112390 - RNA, 19 nt, Homo sapiens
  misc_RNA (1)...(19): siRNA sense strand
ugauggagcugaaccucuu

SEQ ID NO: 112391 - RNA, 19 nt, Homo sapiens
  misc_RNA (1)...(19): siRNA sense strand
cgcaguggaugccuacuuu

SEQ ID NO: 112392 - RNA, 19 nt, Homo sapiens
  misc_RNA (1)...(19): siRNA sense strand
cauuacaacuauucuggaa

SEQ ID NO: 112393 - RNA, 19 nt, Homo sapiens
  misc_RNA (1)...(19): siRNA sense strand
gcaaagaacuuccaccauu

SEQ ID NO: 112394 - RNA, 19 nt, Homo sapiens
  misc_RNA (1)...(19): siRNA sense strand
uaaaggagauaguccauua

SEQ ID NO: 112395 - RNA, 19 nt, Homo sapiens
  misc_RNA (1)...(19): siRNA sense strand
gaacaacacugaucaucug

SEQ ID NO: 112396 - RNA, 19 nt, Homo sapiens
  misc_RNA (1)...(19): siRNA sense strand
ggagauaguccauuacaua

SEQ ID NO: 112397 - RNA, 19 nt, Homo sapiens
  misc_RNA (1)...(19): siRNA sense strand
ccagaugacuuucuaacua

SEQ ID NO: 112398 - RNA, 19 nt, Homo sapiens
  misc_RNA (1)...(19): siRNA sense strand
gaagcaggaucuccaacua

SEQ ID NO: 112399 - RNA, 19 nt, Homo sapiens
  misc_RNA (1)...(19): siRNA sense strand
gcagaccucuuccuauuga

SEQ ID NO: 112400 - RNA, 19 nt, Homo sapiens
  misc_RNA (1)...(19): siRNA sense strand
aaagaagaaucccaacaua

SEQ ID NO: 112401 - RNA, 19 nt, Homo sapiens
  misc_RNA (1)...(19): siRNA sense strand
caauuugccuggauucuuu

SEQ ID NO: 112402 - RNA, 19 nt, Homo sapiens
  misc_RNA (1)...(19): siRNA sense strand
gauagagaaugguggcaua

SEQ ID NO: 112403 - RNA, 19 nt, Homo sapiens
  misc_RNA (1)...(19): siRNA sense strand
caacauuccugucuuuaau

SEQ ID NO: 112404 - RNA, 19 nt, Homo sapiens
  misc_RNA (1)...(19): siRNA sense strand
gaagaucagugcuuugaca

SEQ ID NO: 112405 - RNA, 19 nt, Homo sapiens
  misc_RNA (1)...(19): siRNA sense strand
gaaccggccuuacuuucaa

SEQ ID NO: 112406 - RNA, 19 nt, Homo sapiens
  misc_RNA (1)...(19): siRNA sense strand
gaugaggaaugugcaauuu

SEQ ID NO: 112407 - RNA, 19 nt, Homo sapiens
  misc_RNA (1)...(19): siRNA sense strand
ggaccaagcuauaguaugc

SEQ ID NO: 112408 - RNA, 19 nt, Homo sapiens
  misc_RNA (1)...(19): siRNA sense strand
gcagaaaugauauacauga

SEQ ID NO: 112409 - RNA, 19 nt, Homo sapiens
  misc_RNA (1)...(19): siRNA sense strand
ggaaguacuugcagacugu

SEQ ID NO: 112410 - RNA, 19 nt, Homo sapiens
  misc_RNA (1)...(19): siRNA sense strand
gcaagaaguuaucaucaca

SEQ ID NO: 112411 - RNA, 19 nt, Homo sapiens
  misc_RNA (1)...(19): siRNA sense strand
gaugacaacugaacagcuu

SEQ ID NO: 112412 - RNA, 19 nt, Homo sapiens
  misc_RNA (1)...(19): siRNA sense strand
caaagaacuuccaccauuc

SEQ ID NO: 112413 - RNA, 19 nt, Homo sapiens
  misc_RNA (1)...(19): siRNA sense strand
gaaagaagauggguuuuga

SEQ ID NO: 112414 - RNA, 19 nt, Homo sapiens
  misc_RNA (1)...(19): siRNA sense strand
gcaggagccuuuggaacua

SEQ ID NO: 112415 - RNA, 19 nt, Homo sapiens
  misc_RNA (1)...(19): siRNA sense strand
aaaggacucuguugaagaa

SEQ ID NO: 112416 - RNA, 19 nt, Homo sapiens
  misc_RNA (1)...(19): siRNA sense strand
gaaaugauacaccugaaga

SEQ ID NO: 112417 - RNA, 19 nt, Homo sapiens
  misc_RNA (1)...(19): siRNA sense strand
uauagaagauguggcauuu

SEQ ID NO: 112418 - RNA, 19 nt, Homo sapiens
  misc_RNA (1)...(19): siRNA sense strand
gagaaggaccgaccagaaa

SEQ ID NO: 112419 - RNA, 19 nt, Homo sapiens
  misc_RNA (1)...(19): siRNA sense strand
gaaagaagaaucccaacau

SEQ ID NO: 112420 - RNA, 19 nt, Homo sapiens
  misc_RNA (1)...(19): siRNA sense strand
agaaguagauuccguuuua

SEQ ID NO: 112421 - RNA, 19 nt, Homo sapiens
  misc_RNA (1)...(19): siRNA sense strand
ggaaccagcugaggcuauu

SEQ ID NO: 112422 - RNA, 19 nt, Homo sapiens
  misc_RNA (1)...(19): siRNA sense strand
ggaguugguuugaaucugu

SEQ ID NO: 112423 - RNA, 19 nt, Homo sapiens
  misc_RNA (1)...(19): siRNA sense strand
gaaggcagagccacuauug

SEQ ID NO: 112424 - RNA, 19 nt, Homo sapiens
  misc_RNA (1)...(19): siRNA sense strand
gcaggaucuucuaagguua

SEQ ID NO: 112425 - RNA, 19 nt, Homo sapiens
  misc_RNA (1)...(19): siRNA sense strand
gaggagagaccaagaacaa

SEQ ID NO: 112426 - RNA, 19 nt, Homo sapiens
  misc_RNA (1)...(19): siRNA sense strand
caaaugcagugucuuccaa

SEQ ID NO: 112427 - RNA, 19 nt, Homo sapiens
  misc_RNA (1)...(19): siRNA sense strand
gaagagagaaagauuuauc

SEQ ID NO: 112428 - RNA, 19 nt, Homo sapiens
  misc_RNA (1)...(19): siRNA sense strand
ggacuuaggcguuuacagu

SEQ ID NO: 112429 - RNA, 19 nt, Homo sapiens
  misc_RNA (1)...(19): siRNA sense strand
ggacaugccauacgaaauc

SEQ ID NO: 112430 - RNA, 19 nt, Homo sapiens
  misc_RNA (1)...(19): siRNA sense strand
caagagggauccaguuugg

SEQ ID NO: 112431 - RNA, 19 nt, Homo sapiens
  misc_RNA (1)...(19): siRNA sense strand
agaagaaucccaacauaaa

SEQ ID NO: 112432 - RNA, 19 nt, Homo sapiens
  misc_RNA (1)...(19): siRNA sense strand
caaauuuguugccauacuu

SEQ ID NO: 112433 - RNA, 19 nt, Homo sapiens
  misc_RNA (1)...(19): siRNA sense strand
gcauuaacuucaucuguuc

SEQ ID NO: 112434 - RNA, 19 nt, Homo sapiens
  misc_RNA (1)...(19): siRNA sense strand
caaguuggccauuuaaaga

SEQ ID NO: 112435 - RNA, 19 nt, Homo sapiens
  misc_RNA (1)...(19): siRNA sense strand
acacgggaguaguuaauaa

SEQ ID NO: 112436 - RNA, 19 nt, Homo sapiens
  misc_RNA (1)...(19): siRNA sense strand
ggauuuguguuuacucguu

SEQ ID NO: 112437 - RNA, 19 nt, Homo sapiens
  misc_RNA (1)...(19): siRNA sense strand
uuacaacauuccugucuuu

SEQ ID NO: 112438 - RNA, 19 nt, Homo sapiens
  misc_RNA (1)...(19): siRNA sense strand
gcagauguccugggucuuu

SEQ ID NO: 112439 - RNA, 19 nt, Homo sapiens
  misc_RNA (1)...(19): siRNA sense strand
guacuccaauccagaauuc

SEQ ID NO: 112440 - RNA, 19 nt, Homo sapiens
  misc_RNA (1)...(19): siRNA sense strand
gauaguccauuacauagca

SEQ ID NO: 112441 - RNA, 19 nt, Homo sapiens
  misc_RNA (1)...(19): siRNA sense strand
aaacuuggaggaaacaaua

SEQ ID NO: 112442 - RNA, 19 nt, Homo sapiens
  misc_RNA (1)...(19): siRNA sense strand
uggcagaccucuuccuauu

SEQ ID NO: 112443 - RNA, 19 nt, Homo sapiens
  misc_RNA (1)...(19): siRNA sense strand
gacaacaaauuggcacaaa

SEQ ID NO: 112444 - RNA, 19 nt, Homo sapiens
  misc_RNA (1)...(19): siRNA sense strand
guaaaggacucuguugaag

SEQ ID NO: 112445 - RNA, 19 nt, Homo sapiens
  misc_RNA (1)...(19): siRNA sense strand
caagugaauugccgcagaa

SEQ ID NO: 112446 - RNA, 19 nt, Homo sapiens
  misc_RNA (1)...(19): siRNA sense strand
gagaaagauuuaucagucu

SEQ ID NO: 112447 - RNA, 19 nt, Homo sapiens
  misc_RNA (1)...(19): siRNA sense strand
ugacuuagaaucagaaaga

SEQ ID NO: 112448 - RNA, 19 nt, Homo sapiens
  misc_RNA (1)...(19): siRNA sense strand
gaucagugcuuugacagau

SEQ ID NO: 112449 - RNA, 19 nt, Homo sapiens
  misc_RNA (1)...(19): siRNA sense strand
cguuuacagucccuaauua

SEQ ID NO: 112450 - RNA, 19 nt, Homo sapiens
  misc_RNA (1)...(19): siRNA sense strand
caacuuucuuuccacguuu

SEQ ID NO: 112451 - RNA, 19 nt, Homo sapiens
  misc_RNA (1)...(19): siRNA sense strand
gaagaaguagauuccguuu

SEQ ID NO: 112452 - RNA, 19 nt, Homo sapiens
  misc_RNA (1)...(19): siRNA sense strand
ggucagaagcaagaaguua

SEQ ID NO: 112453 - RNA, 19 nt, Homo sapiens
  misc_RNA (1)...(19): siRNA sense strand
cugaagaacugagaaagaa

SEQ ID NO: 112454 - RNA, 19 nt, Homo sapiens
  misc_RNA (1)...(19): siRNA sense strand
gaugaagagagaaagauuu

SEQ ID NO: 112455 - RNA, 19 nt, Homo sapiens
  misc_RNA (1)...(19): siRNA sense strand
ggaugaaggacaugccaua

SEQ ID NO: 112456 - RNA, 19 nt, Homo sapiens
  misc_RNA (1)...(19): siRNA sense strand
ggaaacaauaccagugaaa

SEQ ID NO: 112457 - RNA, 19 nt, Homo sapiens
  misc_RNA (1)...(19): siRNA sense strand
gauguuaucccuccagaug

SEQ ID NO: 112458 - RNA, 19 nt, Homo sapiens
  misc_RNA (1)...(19): siRNA sense strand
cgggaguaguuaauaauaa

SEQ ID NO: 112459 - RNA, 19 nt, Homo sapiens
  misc_RNA (1)...(19): siRNA sense strand
gaggaaacaauaccaguga

SEQ ID NO: 112460 - RNA, 19 nt, Homo sapiens
  misc_RNA (1)...(19): siRNA sense strand
guauggaguucauggaaau

SEQ ID NO: 112461 - RNA, 19 nt, Homo sapiens
  misc_RNA (1)...(19): siRNA sense strand
uaaagccucuggauuugug

SEQ ID NO: 112462 - RNA, 19 nt, Homo sapiens
  misc_RNA (1)...(19): siRNA sense strand
ggagaugaaggaggacuua

SEQ ID NO: 112463 - RNA, 19 nt, Homo sapiens
  misc_RNA (1)...(19): siRNA sense strand
ugaaggacaugccauacga

SEQ ID NO: 112464 - RNA, 19 nt, Homo sapiens
  misc_RNA (1)...(19): siRNA sense strand
gacauccaguucaaagauu

SEQ ID NO: 112465 - RNA, 19 nt, Homo sapiens
  misc_RNA (1)...(19): siRNA sense strand
acauuacacuuucagauga

SEQ ID NO: 112466 - RNA, 19 nt, Homo sapiens
  misc_RNA (1)...(19): siRNA sense strand
ucagaaagaagauggguuu

SEQ ID NO: 112467 - RNA, 19 nt, Homo sapiens
  misc_RNA (1)...(19): siRNA sense strand
cagaggaaauugaaacaag

SEQ ID NO: 112468 - RNA, 19 nt, Homo sapiens
  misc_RNA (1)...(19): siRNA sense strand
agaauguccuccagaagaa

SEQ ID NO: 112469 - RNA, 19 nt, Homo sapiens
  misc_RNA (1)...(19): siRNA sense strand
gcgaaaugacuuauacuau

SEQ ID NO: 112470 - RNA, 19 nt, Homo sapiens
  misc_RNA (1)...(19): siRNA sense strand
gaagcaagaaguuaucauc

SEQ ID NO: 112471 - RNA, 19 nt, Homo sapiens
  misc_RNA (1)...(19): siRNA sense strand
uauaaugcuucuguccuua

SEQ ID NO: 112472 - RNA, 19 nt, Homo sapiens
  misc_RNA (1)...(19): siRNA sense strand
ggacauccaguucaaagau

SEQ ID NO: 112473 - RNA, 19 nt, Homo sapiens
  misc_RNA (1)...(19): siRNA sense strand
gaagaacaaagacaagcaa

SEQ ID NO: 112474 - RNA, 19 nt, Homo sapiens
  misc_RNA (1)...(19): siRNA sense strand
gcagauggacuaagcaaag

SEQ ID NO: 112475 - RNA, 19 nt, Homo sapiens
  misc_RNA (1)...(19): siRNA sense strand
uaacgaugacucuaugaaa

SEQ ID NO: 112476 - RNA, 19 nt, Homo sapiens
  misc_RNA (1)...(19): siRNA sense strand
uuacaacgagauccuaaua

SEQ ID NO: 112477 - RNA, 19 nt, Homo sapiens
  misc_RNA (1)...(19): siRNA sense strand
ugccauacuuaccuucuua

SEQ ID NO: 112478 - RNA, 19 nt, Homo sapiens
  misc_RNA (1)...(19): siRNA sense strand
acacuuagaagaacaaaga

SEQ ID NO: 112479 - RNA, 19 nt, Homo sapiens
  misc_RNA (1)...(19): siRNA sense strand
agagaaugguggcauagaa

SEQ ID NO: 112480 - RNA, 19 nt, Homo sapiens
  misc_RNA (1)...(19): siRNA sense strand
cagaugacuuucuaacuag

SEQ ID NO: 112481 - RNA, 19 nt, Homo sapiens
  misc_RNA (1)...(19): siRNA sense strand
aaucagauguacacuugaa

SEQ ID NO: 112482 - RNA, 19 nt, Homo sapiens
  misc_RNA (1)...(19): siRNA sense strand
ggaacagcgaaaugacuua

SEQ ID NO: 112483 - RNA, 19 nt, Homo sapiens
  misc_RNA (1)...(19): siRNA sense strand
cagaucaguugaagaaaca

SEQ ID NO: 112484 - RNA, 19 nt, Homo sapiens
  misc_RNA (1)...(19): siRNA sense strand
uaucauggacaacaaauug

SEQ ID NO: 112485 - RNA, 19 nt, Homo sapiens
  misc_RNA (1)...(19): siRNA sense strand
agcaggaucuccaacuaua

SEQ ID NO: 112486 - RNA, 19 nt, Homo sapiens
  misc_RNA (1)...(19): siRNA sense strand
cgcauugacugacuuaaga

SEQ ID NO: 112487 - RNA, 19 nt, Homo sapiens
  misc_RNA (1)...(19): siRNA sense strand
gcacgcauugacugacuua

SEQ ID NO: 112488 - RNA, 19 nt, Homo sapiens
  misc_RNA (1)...(19): siRNA sense strand
caacccaguauuucagaua

SEQ ID NO: 112489 - RNA, 19 nt, Homo sapiens
  misc_RNA (1)...(19): siRNA sense strand
gagccacuauuggaaggua

SEQ ID NO: 112490 - RNA, 19 nt, Homo sapiens
  misc_RNA (1)...(19): siRNA sense strand
aaaguuugguuguuucuca

SEQ ID NO: 112491 - RNA, 19 nt, Homo sapiens
  misc_RNA (1)...(19): siRNA sense strand
acauccaguucaaagauua

SEQ ID NO: 112492 - RNA, 19 nt, Homo sapiens
  misc_RNA (1)...(19): siRNA sense strand
ccacgccucucauauccaa

SEQ ID NO: 112493 - RNA, 19 nt, Homo sapiens
  misc_RNA (1)...(19): siRNA sense strand
gcaaagaacuuccaccauu

SEQ ID NO: 112494 - RNA, 19 nt, Homo sapiens
  misc_RNA (1)...(19): siRNA sense strand
uaaaggagauaguccauua

SEQ ID NO: 112495 - RNA, 19 nt, Homo sapiens
  misc_RNA (1)...(19): siRNA sense strand
gaacaacacugaucaucug

SEQ ID NO: 112496 - RNA, 19 nt, Homo sapiens
  misc_RNA (1)...(19): siRNA sense strand
ggagauaguccauuacaua

SEQ ID NO: 112497 - RNA, 19 nt, Homo sapiens
  misc_RNA (1)...(19): siRNA sense strand
ccagaugacuuucuaacua

SEQ ID NO: 112498 - RNA, 19 nt, Homo sapiens
  misc_RNA (1)...(19): siRNA sense strand
gaagcaggaucuccaacua

SEQ ID NO: 112499 - RNA, 19 nt, Homo sapiens
  misc_RNA (1)...(19): siRNA sense strand
gcagaccucuuccuauuga

SEQ ID NO: 112500 - RNA, 19 nt, Homo sapiens
  misc_RNA (1)...(19): siRNA sense strand
aaagaagaaucccaacaua

SEQ ID NO: 112501 - RNA, 19 nt, Homo sapiens
  misc_RNA (1)...(19): siRNA sense strand
caauuugccuggauucuuu

SEQ ID NO: 112502 - RNA, 19 nt, Homo sapiens
  misc_RNA (1)...(19): siRNA sense strand
gauagagaaugguggcaua

SEQ ID NO: 112503 - RNA, 19 nt, Homo sapiens
  misc_RNA (1)...(19): siRNA sense strand
caacauuccugucuuuaau

SEQ ID NO: 112504 - RNA, 19 nt, Homo sapiens
  misc_RNA (1)...(19): siRNA sense strand
gaagaucagugcuuugaca

SEQ ID NO: 112505 - RNA, 19 nt, Homo sapiens
  misc_RNA (1)...(19): siRNA sense strand
gaaccggccuuacuuucaa

SEQ ID NO: 112506 - RNA, 19 nt, Homo sapiens
  misc_RNA (1)...(19): siRNA sense strand
gaugaggaaugugcaauuu

SEQ ID NO: 112507 - RNA, 19 nt, Homo sapiens
  misc_RNA (1)...(19): siRNA sense strand
ggaccaagcuauaguaugc

SEQ ID NO: 112508 - RNA, 19 nt, Homo sapiens
  misc_RNA (1)...(19): siRNA sense strand
gcagaaaugauauacauga

SEQ ID NO: 112509 - RNA, 19 nt, Homo sapiens
  misc_RNA (1)...(19): siRNA sense strand
ggaaguacuugcagacugu

SEQ ID NO: 112510 - RNA, 19 nt, Homo sapiens
  misc_RNA (1)...(19): siRNA sense strand
gcaagaaguuaucaucaca

SEQ ID NO: 112511 - RNA, 19 nt, Homo sapiens
  misc_RNA (1)...(19): siRNA sense strand
gaugacaacugaacagcuu

SEQ ID NO: 112512 - RNA, 19 nt, Homo sapiens
  misc_RNA (1)...(19): siRNA sense strand
caaagaacuuccaccauuc

SEQ ID NO: 112513 - RNA, 19 nt, Homo sapiens
  misc_RNA (1)...(19): siRNA sense strand
gaaagaagauggguuuuga

SEQ ID NO: 112514 - RNA, 19 nt, Homo sapiens
  misc_RNA (1)...(19): siRNA sense strand
gcaggagccuuuggaacua

SEQ ID NO: 112515 - RNA, 19 nt, Homo sapiens
  misc_RNA (1)...(19): siRNA sense strand
aaaggacucuguugaagaa

SEQ ID NO: 112516 - RNA, 19 nt, Homo sapiens
  misc_RNA (1)...(19): siRNA sense strand
gaaaugauacaccugaaga

SEQ ID NO: 112517 - RNA, 19 nt, Homo sapiens
  misc_RNA (1)...(19): siRNA sense strand
uauagaagauguggcauuu

SEQ ID NO: 112518 - RNA, 19 nt, Homo sapiens
  misc_RNA (1)...(19): siRNA sense strand
gagaaggaccgaccagaaa

SEQ ID NO: 112519 - RNA, 19 nt, Homo sapiens
  misc_RNA (1)...(19): siRNA sense strand
gaaagaagaaucccaacau

SEQ ID NO: 112520 - RNA, 19 nt, Homo sapiens
  misc_RNA (1)...(19): siRNA sense strand
agaaguagauuccguuuua

SEQ ID NO: 112521 - RNA, 19 nt, Homo sapiens
  misc_RNA (1)...(19): siRNA sense strand
ggaaccagcugaggcuauu

SEQ ID NO: 112522 - RNA, 19 nt, Homo sapiens
  misc_RNA (1)...(19): siRNA sense strand
ggaguugguuugaaucugu

SEQ ID NO: 112523 - RNA, 19 nt, Homo sapiens
  misc_RNA (1)...(19): siRNA sense strand
gaaggcagagccacuauug

SEQ ID NO: 112524 - RNA, 19 nt, Homo sapiens
  misc_RNA (1)...(19): siRNA sense strand
gcaggaucuucuaagguua

SEQ ID NO: 112525 - RNA, 19 nt, Homo sapiens
  misc_RNA (1)...(19): siRNA sense strand
gaggagagaccaagaacaa

SEQ ID NO: 112526 - RNA, 19 nt, Homo sapiens
  misc_RNA (1)...(19): siRNA sense strand
caaaugcagugucuuccaa

SEQ ID NO: 112527 - RNA, 19 nt, Homo sapiens
  misc_RNA (1)...(19): siRNA sense strand
gaagagagaaagauuuauc

SEQ ID NO: 112528 - RNA, 19 nt, Homo sapiens
  misc_RNA (1)...(19): siRNA sense strand
ggacuuaggcguuuacagu

SEQ ID NO: 112529 - RNA, 19 nt, Homo sapiens
  misc_RNA (1)...(19): siRNA sense strand
ggacaugccauacgaaauc

SEQ ID NO: 112530 - RNA, 19 nt, Homo sapiens
  misc_RNA (1)...(19): siRNA sense strand
caagagggauccaguuugg

SEQ ID NO: 112531 - RNA, 19 nt, Homo sapiens
  misc_RNA (1)...(19): siRNA sense strand
agaagaaucccaacauaaa

SEQ ID NO: 112532 - RNA, 19 nt, Homo sapiens
  misc_RNA (1)...(19): siRNA sense strand
caaauuuguugccauacuu

SEQ ID NO: 112533 - RNA, 19 nt, Homo sapiens
  misc_RNA (1)...(19): siRNA sense strand
gcauuaacuucaucuguuc

SEQ ID NO: 112534 - RNA, 19 nt, Homo sapiens
  misc_RNA (1)...(19): siRNA sense strand
caaguuggccauuuaaaga

SEQ ID NO: 112535 - RNA, 19 nt, Homo sapiens
  misc_RNA (1)...(19): siRNA sense strand
acacgggaguaguuaauaa

SEQ ID NO: 112536 - RNA, 19 nt, Homo sapiens
  misc_RNA (1)...(19): siRNA sense strand
ggauuuguguuuacucguu

SEQ ID NO: 112537 - RNA, 19 nt, Homo sapiens
  misc_RNA (1)...(19): siRNA sense strand
uuacaacauuccugucuuu

SEQ ID NO: 112538 - RNA, 19 nt, Homo sapiens
  misc_RNA (1)...(19): siRNA sense strand
gcagauguccugggucuuu

SEQ ID NO: 112539 - RNA, 19 nt, Homo sapiens
  misc_RNA (1)...(19): siRNA sense strand
guacuccaauccagaauuc

SEQ ID NO: 112540 - RNA, 19 nt, Homo sapiens
  misc_RNA (1)...(19): siRNA sense strand
gauaguccauuacauagca

SEQ ID NO: 112541 - RNA, 19 nt, Homo sapiens
  misc_RNA (1)...(19): siRNA sense strand
aaacuuggaggaaacaaua

SEQ ID NO: 112542 - RNA, 19 nt, Homo sapiens
  misc_RNA (1)...(19): siRNA sense strand
uggcagaccucuuccuauu

SEQ ID NO: 112543 - RNA, 19 nt, Homo sapiens
  misc_RNA (1)...(19): siRNA sense strand
gacaacaaauuggcacaaa

SEQ ID NO: 112544 - RNA, 19 nt, Homo sapiens
  misc_RNA (1)...(19): siRNA sense strand
guaaaggacucuguugaag

SEQ ID NO: 112545 - RNA, 19 nt, Homo sapiens
  misc_RNA (1)...(19): siRNA sense strand
caagugaauugccgcagaa

SEQ ID NO: 112546 - RNA, 19 nt, Homo sapiens
  misc_RNA (1)...(19): siRNA sense strand
gagaaagauuuaucagucu

SEQ ID NO: 112547 - RNA, 19 nt, Homo sapiens
  misc_RNA (1)...(19): siRNA sense strand
ugacuuagaaucagaaaga

SEQ ID NO: 112548 - RNA, 19 nt, Homo sapiens
  misc_RNA (1)...(19): siRNA sense strand
gaucagugcuuugacagau

SEQ ID NO: 112549 - RNA, 19 nt, Homo sapiens
  misc_RNA (1)...(19): siRNA sense strand
cguuuacagucccuaauua

SEQ ID NO: 112550 - RNA, 19 nt, Homo sapiens
  misc_RNA (1)...(19): siRNA sense strand
caacuuucuuuccacguuu

SEQ ID NO: 112551 - RNA, 19 nt, Homo sapiens
  misc_RNA (1)...(19): siRNA sense strand
gaagaaguagauuccguuu

SEQ ID NO: 112552 - RNA, 19 nt, Homo sapiens
  misc_RNA (1)...(19): siRNA sense strand
ggucagaagcaagaaguua

SEQ ID NO: 112553 - RNA, 19 nt, Homo sapiens
  misc_RNA (1)...(19): siRNA sense strand
cugaagaacugagaaagaa

SEQ ID NO: 112554 - RNA, 19 nt, Homo sapiens
  misc_RNA (1)...(19): siRNA sense strand
gaugaagagagaaagauuu

SEQ ID NO: 112555 - RNA, 19 nt, Homo sapiens
  misc_RNA (1)...(19): siRNA sense strand
ggaugaaggacaugccaua

SEQ ID NO: 112556 - RNA, 19 nt, Homo sapiens
  misc_RNA (1)...(19): siRNA sense strand
ggaaacaauaccagugaaa

SEQ ID NO: 112557 - RNA, 19 nt, Homo sapiens
  misc_RNA (1)...(19): siRNA sense strand
gauguuaucccuccagaug

SEQ ID NO: 112558 - RNA, 19 nt, Homo sapiens
  misc_RNA (1)...(19): siRNA sense strand
cgggaguaguuaauaauaa

SEQ ID NO: 112559 - RNA, 19 nt, Homo sapiens
  misc_RNA (1)...(19): siRNA sense strand
gaggaaacaauaccaguga

SEQ ID NO: 112560 - RNA, 19 nt, Homo sapiens
  misc_RNA (1)...(19): siRNA sense strand
guauggaguucauggaaau

SEQ ID NO: 112561 - RNA, 19 nt, Homo sapiens
  misc_RNA (1)...(19): siRNA sense strand
uaaagccucuggauuugug

SEQ ID NO: 112562 - RNA, 19 nt, Homo sapiens
  misc_RNA (1)...(19): siRNA sense strand
ggagaugaaggaggacuua

SEQ ID NO: 112563 - RNA, 19 nt, Homo sapiens
  misc_RNA (1)...(19): siRNA sense strand
ugaaggacaugccauacga

SEQ ID NO: 112564 - RNA, 19 nt, Homo sapiens
  misc_RNA (1)...(19): siRNA sense strand
gacauccaguucaaagauu

SEQ ID NO: 112565 - RNA, 19 nt, Homo sapiens
  misc_RNA (1)...(19): siRNA sense strand
acauuacacuuucagauga

SEQ ID NO: 112566 - RNA, 19 nt, Homo sapiens
  misc_RNA (1)...(19): siRNA sense strand
ucagaaagaagauggguuu

SEQ ID NO: 112567 - RNA, 19 nt, Homo sapiens
  misc_RNA (1)...(19): siRNA sense strand
cagaggaaauugaaacaag

SEQ ID NO: 112568 - RNA, 19 nt, Homo sapiens
  misc_RNA (1)...(19): siRNA sense strand
agaauguccuccagaagaa

SEQ ID NO: 112569 - RNA, 19 nt, Homo sapiens
  misc_RNA (1)...(19): siRNA sense strand
gcgaaaugacuuauacuau

SEQ ID NO: 112570 - RNA, 19 nt, Homo sapiens
  misc_RNA (1)...(19): siRNA sense strand
gaagcaagaaguuaucauc

SEQ ID NO: 112571 - RNA, 19 nt, Homo sapiens
  misc_RNA (1)...(19): siRNA sense strand
uauaaugcuucuguccuua

SEQ ID NO: 112572 - RNA, 19 nt, Homo sapiens
  misc_RNA (1)...(19): siRNA sense strand
ggacauccaguucaaagau

SEQ ID NO: 112573 - RNA, 19 nt, Homo sapiens
  misc_RNA (1)...(19): siRNA sense strand
gaagaacaaagacaagcaa

SEQ ID NO: 112574 - RNA, 19 nt, Homo sapiens
  misc_RNA (1)...(19): siRNA sense strand
gcagauggacuaagcaaag

SEQ ID NO: 112575 - RNA, 19 nt, Homo sapiens
  misc_RNA (1)...(19): siRNA sense strand
uaacgaugacucuaugaaa

SEQ ID NO: 112576 - RNA, 19 nt, Homo sapiens
  misc_RNA (1)...(19): siRNA sense strand
uuacaacgagauccuaaua

SEQ ID NO: 112577 - RNA, 19 nt, Homo sapiens
  misc_RNA (1)...(19): siRNA sense strand
ugccauacuuaccuucuua

SEQ ID NO: 112578 - RNA, 19 nt, Homo sapiens
  misc_RNA (1)...(19): siRNA sense strand
acacuuagaagaacaaaga

SEQ ID NO: 112579 - RNA, 19 nt, Homo sapiens
  misc_RNA (1)...(19): siRNA sense strand
agagaaugguggcauagaa

SEQ ID NO: 112580 - RNA, 19 nt, Homo sapiens
  misc_RNA (1)...(19): siRNA sense strand
cagaugacuuucuaacuag

SEQ ID NO: 112581 - RNA, 19 nt, Homo sapiens
  misc_RNA (1)...(19): siRNA sense strand
aaucagauguacacuugaa

SEQ ID NO: 112582 - RNA, 19 nt, Homo sapiens
  misc_RNA (1)...(19): siRNA sense strand
ggaacagcgaaaugacuua

SEQ ID NO: 112583 - RNA, 19 nt, Homo sapiens
  misc_RNA (1)...(19): siRNA sense strand
cagaucaguugaagaaaca

SEQ ID NO: 112584 - RNA, 19 nt, Homo sapiens
  misc_RNA (1)...(19): siRNA sense strand
uaucauggacaacaaauug

SEQ ID NO: 112585 - RNA, 19 nt, Homo sapiens
  misc_RNA (1)...(19): siRNA sense strand
agcaggaucuccaacuaua

SEQ ID NO: 112586 - RNA, 19 nt, Homo sapiens
  misc_RNA (1)...(19): siRNA sense strand
cgcauugacugacuuaaga

SEQ ID NO: 112587 - RNA, 19 nt, Homo sapiens
  misc_RNA (1)...(19): siRNA sense strand
gcacgcauugacugacuua

SEQ ID NO: 112588 - RNA, 19 nt, Homo sapiens
  misc_RNA (1)...(19): siRNA sense strand
caacccaguauuucagaua

SEQ ID NO: 112589 - RNA, 19 nt, Homo sapiens
  misc_RNA (1)...(19): siRNA sense strand
gagccacuauuggaaggua

SEQ ID NO: 112590 - RNA, 19 nt, Homo sapiens
  misc_RNA (1)...(19): siRNA sense strand
aaaguuugguuguuucuca

SEQ ID NO: 112591 - RNA, 19 nt, Homo sapiens
  misc_RNA (1)...(19): siRNA sense strand
acauccaguucaaagauua

SEQ ID NO: 112592 - RNA, 19 nt, Homo sapiens
  misc_RNA (1)...(19): siRNA sense strand
ccacgccucucauauccaa

SEQ ID NO: 112593 - RNA, 19 nt, Homo sapiens
  misc_RNA (1)...(19): siRNA sense strand
gaaaggagcugcccgagua

SEQ ID NO: 112594 - RNA, 19 nt, Homo sapiens
  misc_RNA (1)...(19): siRNA sense strand
gcacaccgcugcagaacaa

SEQ ID NO: 112595 - RNA, 19 nt, Homo sapiens
  misc_RNA (1)...(19): siRNA sense strand
ccaaggauuucaaggaaua

SEQ ID NO: 112596 - RNA, 19 nt, Homo sapiens
  misc_RNA (1)...(19): siRNA sense strand
ccaagaagaugaagaagau

SEQ ID NO: 112597 - RNA, 19 nt, Homo sapiens
  misc_RNA (1)...(19): siRNA sense strand
gaaaguggcucagaagaag

SEQ ID NO: 112598 - RNA, 19 nt, Homo sapiens
  misc_RNA (1)...(19): siRNA sense strand
gaaggaggaugacagugaa

SEQ ID NO: 112599 - RNA, 19 nt, Homo sapiens
  misc_RNA (1)...(19): siRNA sense strand
gaucauggccuacaagaug

SEQ ID NO: 112600 - RNA, 19 nt, Homo sapiens
  misc_RNA (1)...(19): siRNA sense strand
agacagcccucaaugcuaa

SEQ ID NO: 112601 - RNA, 19 nt, Homo sapiens
  misc_RNA (1)...(19): siRNA sense strand
gaaccaaagcgaccauuga

SEQ ID NO: 112602 - RNA, 19 nt, Homo sapiens
  misc_RNA (1)...(19): siRNA sense strand
gcaaggagguggacuacag

SEQ ID NO: 112603 - RNA, 19 nt, Homo sapiens
  misc_RNA (1)...(19): siRNA sense strand
ggucaaugguguccucaaa

SEQ ID NO: 112604 - RNA, 19 nt, Homo sapiens
  misc_RNA (1)...(19): siRNA sense strand
gaccagcacucccaagguu

SEQ ID NO: 112605 - RNA, 19 nt, Homo sapiens
  misc_RNA (1)...(19): siRNA sense strand
ugaagaaaguggcucagaa

SEQ ID NO: 112606 - RNA, 19 nt, Homo sapiens
  misc_RNA (1)...(19): siRNA sense strand
gaaggucaccgcaugaaga

SEQ ID NO: 112607 - RNA, 19 nt, Homo sapiens
  misc_RNA (1)...(19): siRNA sense strand
uuaaauaccucaggcuuga

SEQ ID NO: 112608 - RNA, 19 nt, Homo sapiens
  misc_RNA (1)...(19): siRNA sense strand
ggcagaagcaccaggaaua

SEQ ID NO: 112609 - RNA, 19 nt, Homo sapiens
  misc_RNA (1)...(19): siRNA sense strand
ccaaggcaguggccacgua

SEQ ID NO: 112610 - RNA, 19 nt, Homo sapiens
  misc_RNA (1)...(19): siRNA sense strand
gcaccaagacccugaugaa

SEQ ID NO: 112611 - RNA, 19 nt, Homo sapiens
  misc_RNA (1)...(19): siRNA sense strand
caagcaagaugucgaugau

SEQ ID NO: 112612 - RNA, 19 nt, Homo sapiens
  misc_RNA (1)...(19): siRNA sense strand
caucauggaagauuacuuu

SEQ ID NO: 112613 - RNA, 19 nt, Homo sapiens
  misc_RNA (1)...(19): siRNA sense strand
gaggaaaccauucucauca

SEQ ID NO: 112614 - RNA, 19 nt, Homo sapiens
  misc_RNA (1)...(19): siRNA sense strand
gaagauuacuuugcguauc

SEQ ID NO: 112615 - RNA, 19 nt, Homo sapiens
  misc_RNA (1)...(19): siRNA sense strand
ggaaaccauucucaucauc

SEQ ID NO: 112616 - RNA, 19 nt, Homo sapiens
  misc_RNA (1)...(19): siRNA sense strand
caccaggaauaccucaaua

SEQ ID NO: 112617 - RNA, 19 nt, Homo sapiens
  misc_RNA (1)...(19): siRNA sense strand
ccaagccggucgugaguga

SEQ ID NO: 112618 - RNA, 19 nt, Homo sapiens
  misc_RNA (1)...(19): siRNA sense strand
ggaggaguuugaucuguuc

SEQ ID NO: 112619 - RNA, 19 nt, Homo sapiens
  misc_RNA (1)...(19): siRNA sense strand
ggacagacgccugccauug

SEQ ID NO: 112620 - RNA, 19 nt, Homo sapiens
  misc_RNA (1)...(19): siRNA sense strand
ccaucgcgcucaucacgua

SEQ ID NO: 112621 - RNA, 19 nt, Homo sapiens
  misc_RNA (1)...(19): siRNA sense strand
cagcaggccucaugguaug

SEQ ID NO: 112622 - RNA, 19 nt, Homo sapiens
  misc_RNA (1)...(19): siRNA sense strand
agaugucgaugaugaauau

SEQ ID NO: 112623 - RNA, 19 nt, Homo sapiens
  misc_RNA (1)...(19): siRNA sense strand
gaagaaaguggcucagaag

SEQ ID NO: 112624 - RNA, 19 nt, Homo sapiens
  misc_RNA (1)...(19): siRNA sense strand
gaagaagauuccagaucca

SEQ ID NO: 112625 - RNA, 19 nt, Homo sapiens
  misc_RNA (1)...(19): siRNA sense strand
ucaacgaccuagagaagga

SEQ ID NO: 112626 - RNA, 19 nt, Homo sapiens
  misc_RNA (1)...(19): siRNA sense strand
gaagauaaaggagcgcauu

SEQ ID NO: 112627 - RNA, 19 nt, Homo sapiens
  misc_RNA (1)...(19): siRNA sense strand
cacccaaccucaccaagaa

SEQ ID NO: 112628 - RNA, 19 nt, Homo sapiens
  misc_RNA (1)...(19): siRNA sense strand
gcagacacugugaucauuu

SEQ ID NO: 112629 - RNA, 19 nt, Homo sapiens
  misc_RNA (1)...(19): siRNA sense strand
aauuugagcuucuugauag

SEQ ID NO: 112630 - RNA, 19 nt, Homo sapiens
  misc_RNA (1)...(19): siRNA sense strand
ggaagucgaggcccaguug

SEQ ID NO: 112631 - RNA, 19 nt, Homo sapiens
  misc_RNA (1)...(19): siRNA sense strand
ggaagaccauccagaccau

SEQ ID NO: 112632 - RNA, 19 nt, Homo sapiens
  misc_RNA (1)...(19): siRNA sense strand
ucaaugguguccucaaaca

SEQ ID NO: 112633 - RNA, 19 nt, Homo sapiens
  misc_RNA (1)...(19): siRNA sense strand
ugauagaauucuucccaaa

SEQ ID NO: 112634 - RNA, 19 nt, Homo sapiens
  misc_RNA (1)...(19): siRNA sense strand
gagcacaaacgcaucaaug

SEQ ID NO: 112635 - RNA, 19 nt, Homo sapiens
  misc_RNA (1)...(19): siRNA sense strand
ucucaacgcuguccaacug

SEQ ID NO: 112636 - RNA, 19 nt, Homo sapiens
  misc_RNA (1)...(19): siRNA sense strand
gcgacucacugacggagaa

SEQ ID NO: 112637 - RNA, 19 nt, Homo sapiens
  misc_RNA (1)...(19): siRNA sense strand
ggaguuugaucuguucaug

SEQ ID NO: 112638 - RNA, 19 nt, Homo sapiens
  misc_RNA (1)...(19): siRNA sense strand
guacaugauuguggacgaa

SEQ ID NO: 112639 - RNA, 19 nt, Homo sapiens
  misc_RNA (1)...(19): siRNA sense strand
acgaguacaucaucaaaga

SEQ ID NO: 112640 - RNA, 19 nt, Homo sapiens
  misc_RNA (1)...(19): siRNA sense strand
gaggaccgcucaggaagug

SEQ ID NO: 112641 - RNA, 19 nt, Homo sapiens
  misc_RNA (1)...(19): siRNA sense strand
gcaagcccguggacuucaa

SEQ ID NO: 112642 - RNA, 19 nt, Homo sapiens
  misc_RNA (1)...(19): siRNA sense strand
ggaggaaaccauucucauc

SEQ ID NO: 112643 - RNA, 19 nt, Homo sapiens
  misc_RNA (1)...(19): siRNA sense strand
gcaagcucaucgaccagaa

SEQ ID NO: 112644 - RNA, 19 nt, Homo sapiens
  misc_RNA (1)...(19): siRNA sense strand
cugagaagcuggagaagca

SEQ ID NO: 112645 - RNA, 19 nt, Homo sapiens
  misc_RNA (1)...(19): siRNA sense strand
ggcagacacugugaucauu

SEQ ID NO: 112646 - RNA, 19 nt, Homo sapiens
  misc_RNA (1)...(19): siRNA sense strand
gacgagaccagccagauga

SEQ ID NO: 112647 - RNA, 19 nt, Homo sapiens
  misc_RNA (1)...(19): siRNA sense strand
ggaccugaaugaggaggaa

SEQ ID NO: 112648 - RNA, 19 nt, Homo sapiens
  misc_RNA (1)...(19): siRNA sense strand
gaggaggaccgcucaggaa

SEQ ID NO: 112649 - RNA, 19 nt, Homo sapiens
  misc_RNA (1)...(19): siRNA sense strand
gaggagguccggcagaaga

SEQ ID NO: 112650 - RNA, 19 nt, Homo sapiens
  misc_RNA (1)...(19): siRNA sense strand
ccucguggaucaucaagga

SEQ ID NO: 112651 - RNA, 19 nt, Homo sapiens
  misc_RNA (1)...(19): siRNA sense strand
acaaagugcugcuguucug

SEQ ID NO: 112652 - RNA, 19 nt, Homo sapiens
  misc_RNA (1)...(19): siRNA sense strand
gagacagcccucaaugcua

SEQ ID NO: 112653 - RNA, 19 nt, Homo sapiens
  misc_RNA (1)...(19): siRNA sense strand
gaggaggaguuugaucugu

SEQ ID NO: 112654 - RNA, 19 nt, Homo sapiens
  misc_RNA (1)...(19): siRNA sense strand
agcaagaugucgaugauga

SEQ ID NO: 112655 - RNA, 19 nt, Homo sapiens
  misc_RNA (1)...(19): siRNA sense strand
aggaauaccucaauagcau

SEQ ID NO: 112656 - RNA, 19 nt, Homo sapiens
  misc_RNA (1)...(19): siRNA sense strand
ucaccaagaagaugaagaa

SEQ ID NO: 112657 - RNA, 19 nt, Homo sapiens
  misc_RNA (1)...(19): siRNA sense strand
ggaagauuacuuugcguau

SEQ ID NO: 112658 - RNA, 19 nt, Homo sapiens
  misc_RNA (1)...(19): siRNA sense strand
gcaagaugucgaugaugaa

SEQ ID NO: 112659 - RNA, 19 nt, Homo sapiens
  misc_RNA (1)...(19): siRNA sense strand
ugccaaggauuucaaggaa

SEQ ID NO: 112660 - RNA, 19 nt, Homo sapiens
  misc_RNA (1)...(19): siRNA sense strand
gaaguggcagcgaagaaga

SEQ ID NO: 112661 - RNA, 19 nt, Homo sapiens
  misc_RNA (1)...(19): siRNA sense strand
agaaggaggaugacaguga

SEQ ID NO: 112662 - RNA, 19 nt, Homo sapiens
  misc_RNA (1)...(19): siRNA sense strand
gcucaucacguaccucaug

SEQ ID NO: 112663 - RNA, 19 nt, Homo sapiens
  misc_RNA (1)...(19): siRNA sense strand
gagaaugccaagcaagaug

SEQ ID NO: 112664 - RNA, 19 nt, Homo sapiens
  misc_RNA (1)...(19): siRNA sense strand
gcuccgaggucugauagug

SEQ ID NO: 112665 - RNA, 19 nt, Homo sapiens
  misc_RNA (1)...(19): siRNA sense strand
ggacacagcgcuggagaca

SEQ ID NO: 112666 - RNA, 19 nt, Homo sapiens
  misc_RNA (1)...(19): siRNA sense strand
uggaguacgucaucaagug

SEQ ID NO: 112667 - RNA, 19 nt, Homo sapiens
  misc_RNA (1)...(19): siRNA sense strand
gcaugccucuaguccaguu

SEQ ID NO: 112668 - RNA, 19 nt, Homo sapiens
  misc_RNA (1)...(19): siRNA sense strand
ucacugagaagcuggagaa

SEQ ID NO: 112669 - RNA, 19 nt, Homo sapiens
  misc_RNA (1)...(19): siRNA sense strand
ggacaacaugcaccagaug

SEQ ID NO: 112670 - RNA, 19 nt, Homo sapiens
  misc_RNA (1)...(19): siRNA sense strand
uggagcggcugaccuguga

SEQ ID NO: 112671 - RNA, 19 nt, Homo sapiens
  misc_RNA (1)...(19): siRNA sense strand
cugcuguucugccaaauga

SEQ ID NO: 112672 - RNA, 19 nt, Homo sapiens
  misc_RNA (1)...(19): siRNA sense strand
gugcugcuguucugccaaa

SEQ ID NO: 112673 - RNA, 19 nt, Homo sapiens
  misc_RNA (1)...(19): siRNA sense strand
gagccucggguaaauuuga

SEQ ID NO: 112674 - RNA, 19 nt, Homo sapiens
  misc_RNA (1)...(19): siRNA sense strand
ccaagacccugaugaacac

SEQ ID NO: 112675 - RNA, 19 nt, Homo sapiens
  misc_RNA (1)...(19): siRNA sense strand
caagauccguuggaaguac

SEQ ID NO: 112676 - RNA, 19 nt, Homo sapiens
  misc_RNA (1)...(19): siRNA sense strand
agucagcgcuuauggucaa

SEQ ID NO: 112677 - RNA, 19 nt, Homo sapiens
  misc_RNA (1)...(19): siRNA sense strand
gaggucugauagugaagaa

SEQ ID NO: 112678 - RNA, 19 nt, Homo sapiens
  misc_RNA (1)...(19): siRNA sense strand
ggagacagcccucaaugcu

SEQ ID NO: 112679 - RNA, 19 nt, Homo sapiens
  misc_RNA (1)...(19): siRNA sense strand
ggaauaccucaauagcauu

SEQ ID NO: 112680 - RNA, 19 nt, Homo sapiens
  misc_RNA (1)...(19): siRNA sense strand
ggaagagggcgaggaggaa

SEQ ID NO: 112681 - RNA, 19 nt, Homo sapiens
  misc_RNA (1)...(19): siRNA sense strand
agaaaguggcucagaagaa

SEQ ID NO: 112682 - RNA, 19 nt, Homo sapiens
  misc_RNA (1)...(19): siRNA sense strand
gcaccaggaauaccucaau

SEQ ID NO: 112683 - RNA, 19 nt, Homo sapiens
  misc_RNA (1)...(19): siRNA sense strand
gcguaucgcggcuuuaaau

SEQ ID NO: 112684 - RNA, 19 nt, Homo sapiens
  misc_RNA (1)...(19): siRNA sense strand
guaaauuugagcuucuuga

SEQ ID NO: 112685 - RNA, 19 nt, Homo sapiens
  misc_RNA (1)...(19): siRNA sense strand
gcuccgagaaggacaagaa

SEQ ID NO: 112686 - RNA, 19 nt, Homo sapiens
  misc_RNA (1)...(19): siRNA sense strand
gcacauccucgccaagauc

SEQ ID NO: 112687 - RNA, 19 nt, Homo sapiens
  misc_RNA (1)...(19): siRNA sense strand
cguacgaguuugacaagug

SEQ ID NO: 112688 - RNA, 19 nt, Homo sapiens
  misc_RNA (1)...(19): siRNA sense strand
acaaccagaugaaaggaau

SEQ ID NO: 112689 - RNA, 19 nt, Homo sapiens
  misc_RNA (1)...(19): siRNA sense strand
gaagaagaagauuccagau

SEQ ID NO: 112690 - RNA, 19 nt, Homo sapiens
  misc_RNA (1)...(19): siRNA sense strand
acacggagcgggagcagaa

SEQ ID NO: 112691 - RNA, 19 nt, Homo sapiens
  misc_RNA (1)...(19): siRNA sense strand
gagcaaccaaccacaaagu

SEQ ID NO: 112692 - RNA, 19 nt, Homo sapiens
  misc_RNA (1)...(19): siRNA sense strand
ucaacagcguggaggagaa

SEQ ID NO: 112693 - RNA, 19 nt, Homo sapiens
  misc_RNA (1)...(19): siRNA sense strand
gaaagaagcucuagaacaa

SEQ ID NO: 112694 - RNA, 19 nt, Homo sapiens
  misc_RNA (1)...(19): siRNA sense strand
gaaguuggcuaacaaauug

SEQ ID NO: 112695 - RNA, 19 nt, Homo sapiens
  misc_RNA (1)...(19): siRNA sense strand
gcugaaguaugcugaauua

SEQ ID NO: 112696 - RNA, 19 nt, Homo sapiens
  misc_RNA (1)...(19): siRNA sense strand
gaacuugacuggagaugug

SEQ ID NO: 112697 - RNA, 19 nt, Homo sapiens
  misc_RNA (1)...(19): siRNA sense strand
ugaaggagcugaagaggaa

SEQ ID NO: 112698 - RNA, 19 nt, Homo sapiens
  misc_RNA (1)...(19): siRNA sense strand
gagcagaccaaucacauua

SEQ ID NO: 112699 - RNA, 19 nt, Homo sapiens
  misc_RNA (1)...(19): siRNA sense strand
gaaguaugcugaauuacga

SEQ ID NO: 112700 - RNA, 19 nt, Homo sapiens
  misc_RNA (1)...(19): siRNA sense strand
caaaguguuucauggauuu

SEQ ID NO: 112701 - RNA, 19 nt, Homo sapiens
  misc_RNA (1)...(19): siRNA sense strand
gaagaagagugggaagaaa

SEQ ID NO: 112702 - RNA, 19 nt, Homo sapiens
  misc_RNA (1)...(19): siRNA sense strand
gcaaaguguuucauggauu

SEQ ID NO: 112703 - RNA, 19 nt, Homo sapiens
  misc_RNA (1)...(19): siRNA sense strand
gcaccuggcugcaguggaa

SEQ ID NO: 112704 - RNA, 19 nt, Homo sapiens
  misc_RNA (1)...(19): siRNA sense strand
gcagaccaaucacauuauu

SEQ ID NO: 112705 - RNA, 19 nt, Homo sapiens
  misc_RNA (1)...(19): siRNA sense strand
guacugacauuuacuccaa

SEQ ID NO: 112706 - RNA, 19 nt, Homo sapiens
  misc_RNA (1)...(19): siRNA sense strand
gaagaaaguagaacaugaa

SEQ ID NO: 112707 - RNA, 19 nt, Homo sapiens
  misc_RNA (1)...(19): siRNA sense strand
ggaaauccaguuaugagua

SEQ ID NO: 112708 - RNA, 19 nt, Homo sapiens
  misc_RNA (1)...(19): siRNA sense strand
gaagaucuaaccaaggaua

SEQ ID NO: 112709 - RNA, 19 nt, Homo sapiens
  misc_RNA (1)...(19): siRNA sense strand
ggaugaaggugauaaagca

SEQ ID NO: 112710 - RNA, 19 nt, Homo sapiens
  misc_RNA (1)...(19): siRNA sense strand
uugaagagcuggaaacuau

SEQ ID NO: 112711 - RNA, 19 nt, Homo sapiens
  misc_RNA (1)...(19): siRNA sense strand
gaacauguuggaagucgua

SEQ ID NO: 112712 - RNA, 19 nt, Homo sapiens
  misc_RNA (1)...(19): siRNA sense strand
gaaauccaguuaugaguac

SEQ ID NO: 112713 - RNA, 19 nt, Homo sapiens
  misc_RNA (1)...(19): siRNA sense strand
caacaccuguacccaauau

SEQ ID NO: 112714 - RNA, 19 nt, Homo sapiens
  misc_RNA (1)...(19): siRNA sense strand
ugacagagcagaccaauca

SEQ ID NO: 112715 - RNA, 19 nt, Homo sapiens
  misc_RNA (1)...(19): siRNA sense strand
cgacaucagggaacauuua

SEQ ID NO: 112716 - RNA, 19 nt, Homo sapiens
  misc_RNA (1)...(19): siRNA sense strand
ggaacaaagugucggaaca

SEQ ID NO: 112717 - RNA, 19 nt, Homo sapiens
  misc_RNA (1)...(19): siRNA sense strand
gaacauuuacggaugagaa

SEQ ID NO: 112718 - RNA, 19 nt, Homo sapiens
  misc_RNA (1)...(19): siRNA sense strand
caaacucccugcaaagugu

SEQ ID NO: 112719 - RNA, 19 nt, Homo sapiens
  misc_RNA (1)...(19): siRNA sense strand
ugaagaaacuagagaucaa

SEQ ID NO: 112720 - RNA, 19 nt, Homo sapiens
  misc_RNA (1)...(19): siRNA sense strand
cucaacagaugcuaaauuu

SEQ ID NO: 112721 - RNA, 19 nt, Homo sapiens
  misc_RNA (1)...(19): siRNA sense strand
ggagaugugugugcuguga

SEQ ID NO: 112722 - RNA, 19 nt, Homo sapiens
  misc_RNA (1)...(19): siRNA sense strand
aaauacaccuguuaaagga

SEQ ID NO: 112723 - RNA, 19 nt, Homo sapiens
  misc_RNA (1)...(19): siRNA sense strand
ggaugaaugaggaggauua

SEQ ID NO: 112724 - RNA, 19 nt, Homo sapiens
  misc_RNA (1)...(19): siRNA sense strand
aaacauuggugcagaacaa

SEQ ID NO: 112725 - RNA, 19 nt, Homo sapiens
  misc_RNA (1)...(19): siRNA sense strand
ucaccaaacucccugcaaa

SEQ ID NO: 112726 - RNA, 19 nt, Homo sapiens
  misc_RNA (1)...(19): siRNA sense strand
gaucaaacuucgacauuuu

SEQ ID NO: 112727 - RNA, 19 nt, Homo sapiens
  misc_RNA (1)...(19): siRNA sense strand
ugaaugaggaggauuauga

SEQ ID NO: 112728 - RNA, 19 nt, Homo sapiens
  misc_RNA (1)...(19): siRNA sense strand
agaagaaaguagaacauga

SEQ ID NO: 112729 - RNA, 19 nt, Homo sapiens
  misc_RNA (1)...(19): siRNA sense strand
ggaacaggauagugaagug

SEQ ID NO: 112730 - RNA, 19 nt, Homo sapiens
  misc_RNA (1)...(19): siRNA sense strand
ccaagacuccagaaauaua

SEQ ID NO: 112731 - RNA, 19 nt, Homo sapiens
  misc_RNA (1)...(19): siRNA sense strand
aagaagaucuaaccaagga

SEQ ID NO: 112732 - RNA, 19 nt, Homo sapiens
  misc_RNA (1)...(19): siRNA sense strand
gaaacuagagaucaaacuu

SEQ ID NO: 112733 - RNA, 19 nt, Homo sapiens
  misc_RNA (1)...(19): siRNA sense strand
gaagaaagaaagaucaagu

SEQ ID NO: 112734 - RNA, 19 nt, Homo sapiens
  misc_RNA (1)...(19): siRNA sense strand
gcaaugggaccuccuccua

SEQ ID NO: 112735 - RNA, 19 nt, Homo sapiens
  misc_RNA (1)...(19): siRNA sense strand
guaaagaaagagaaaguga

SEQ ID NO: 112736 - RNA, 19 nt, Homo sapiens
  misc_RNA (1)...(19): siRNA sense strand
ccgcaggccuagcuguuua

SEQ ID NO: 112737 - RNA, 19 nt, Homo sapiens
  misc_RNA (1)...(19): siRNA sense strand
ugaaagauaucaucaaacg

SEQ ID NO: 112738 - RNA, 19 nt, Homo sapiens
  misc_RNA (1)...(19): siRNA sense strand
ccugguagcucucuugguu

SEQ ID NO: 112739 - RNA, 19 nt, Homo sapiens
  misc_RNA (1)...(19): siRNA sense strand
gaaagaggaagaugagcaa

SEQ ID NO: 112740 - RNA, 19 nt, Homo sapiens
  misc_RNA (1)...(19): siRNA sense strand
cuacagaacccaucucgaa

SEQ ID NO: 112741 - RNA, 19 nt, Homo sapiens
  misc_RNA (1)...(19): siRNA sense strand
ggaagaagagugggaagaa

SEQ ID NO: 112742 - RNA, 19 nt, Homo sapiens
  misc_RNA (1)...(19): siRNA sense strand
ugagaccggugaugagaaa

SEQ ID NO: 112743 - RNA, 19 nt, Homo sapiens
  misc_RNA (1)...(19): siRNA sense strand
ccagacagcuaugauacuu

SEQ ID NO: 112744 - RNA, 19 nt, Homo sapiens
  misc_RNA (1)...(19): siRNA sense strand
gagaucaaacuucgacauu

SEQ ID NO: 112745 - RNA, 19 nt, Homo sapiens
  misc_RNA (1)...(19): siRNA sense strand
gaagaaacuagagaucaaa

SEQ ID NO: 112746 - RNA, 19 nt, Homo sapiens
  misc_RNA (1)...(19): siRNA sense strand
gcaagcacuacaagaagua

SEQ ID NO: 112747 - RNA, 19 nt, Homo sapiens
  misc_RNA (1)...(19): siRNA sense strand
ggaagagaauggacugaac

SEQ ID NO: 112748 - RNA, 19 nt, Homo sapiens
  misc_RNA (1)...(19): siRNA sense strand
gaaugaagagccagucaga

SEQ ID NO: 112749 - RNA, 19 nt, Homo sapiens
  misc_RNA (1)...(19): siRNA sense strand
ggauuucaaccaagaauga

SEQ ID NO: 112750 - RNA, 19 nt, Homo sapiens
  misc_RNA (1)...(19): siRNA sense strand
agucagaaguccagaaaga

SEQ ID NO: 112751 - RNA, 19 nt, Homo sapiens
  misc_RNA (1)...(19): siRNA sense strand
gaagagaacaaagaacuca

SEQ ID NO: 112752 - RNA, 19 nt, Homo sapiens
  misc_RNA (1)...(19): siRNA sense strand
gauaccaaaucagaagaaa

SEQ ID NO: 112753 - RNA, 19 nt, Homo sapiens
  misc_RNA (1)...(19): siRNA sense strand
acccauaccuugagaauuc

SEQ ID NO: 112754 - RNA, 19 nt, Homo sapiens
  misc_RNA (1)...(19): siRNA sense strand
acaagacgaugaagaaugg

SEQ ID NO: 112755 - RNA, 19 nt, Homo sapiens
  misc_RNA (1)...(19): siRNA sense strand
ggagguaccacuggaauug

SEQ ID NO: 112756 - RNA, 19 nt, Homo sapiens
  misc_RNA (1)...(19): siRNA sense strand
caaggaugauuggaacaaa

SEQ ID NO: 112757 - RNA, 19 nt, Homo sapiens
  misc_RNA (1)...(19): siRNA sense strand
auccaagacuccagaaaua

SEQ ID NO: 112758 - RNA, 19 nt, Homo sapiens
  misc_RNA (1)...(19): siRNA sense strand
auaggaagccugugaguuu

SEQ ID NO: 112759 - RNA, 19 nt, Homo sapiens
  misc_RNA (1)...(19): siRNA sense strand
gcucaacagaugcuaaauu

SEQ ID NO: 112760 - RNA, 19 nt, Homo sapiens
  misc_RNA (1)...(19): siRNA sense strand
caaguugacccggaaagua

SEQ ID NO: 112761 - RNA, 19 nt, Homo sapiens
  misc_RNA (1)...(19): siRNA sense strand
ggaggcgccuuaugucaca

SEQ ID NO: 112762 - RNA, 19 nt, Homo sapiens
  misc_RNA (1)...(19): siRNA sense strand
gaagagcuggaaacuauca

SEQ ID NO: 112763 - RNA, 19 nt, Homo sapiens
  misc_RNA (1)...(19): siRNA sense strand
ggaagaagaaaguagaaca

SEQ ID NO: 112764 - RNA, 19 nt, Homo sapiens
  misc_RNA (1)...(19): siRNA sense strand
gagugaggauaccaaauca

SEQ ID NO: 112765 - RNA, 19 nt, Homo sapiens
  misc_RNA (1)...(19): siRNA sense strand
ggaauugguugaagcucau

SEQ ID NO: 112766 - RNA, 19 nt, Homo sapiens
  misc_RNA (1)...(19): siRNA sense strand
gaagucguacucaggauga

SEQ ID NO: 112767 - RNA, 19 nt, Homo sapiens
  misc_RNA (1)...(19): siRNA sense strand
caaagugucggaacauguu

SEQ ID NO: 112768 - RNA, 19 nt, Homo sapiens
  misc_RNA (1)...(19): siRNA sense strand
gaacuuuggucuccguacu

SEQ ID NO: 112769 - RNA, 19 nt, Homo sapiens
  misc_RNA (1)...(19): siRNA sense strand
agaggaagaugagcaagaa

SEQ ID NO: 112770 - RNA, 19 nt, Homo sapiens
  misc_RNA (1)...(19): siRNA sense strand
cggaugcuccuaccaauaa

SEQ ID NO: 112771 - RNA, 19 nt, Homo sapiens
  misc_RNA (1)...(19): siRNA sense strand
ugauguugaugcugaaauu

SEQ ID NO: 112772 - RNA, 19 nt, Homo sapiens
  misc_RNA (1)...(19): siRNA sense strand
uggaacagcugaaguaugc

SEQ ID NO: 112773 - RNA, 19 nt, Homo sapiens
  misc_RNA (1)...(19): siRNA sense strand
gaagaagaaaguagaacau

SEQ ID NO: 112774 - RNA, 19 nt, Homo sapiens
  misc_RNA (1)...(19): siRNA sense strand
gcacgagccucugggaaag

SEQ ID NO: 112775 - RNA, 19 nt, Homo sapiens
  misc_RNA (1)...(19): siRNA sense strand
gaaaauaggaagccuguga

SEQ ID NO: 112776 - RNA, 19 nt, Homo sapiens
  misc_RNA (1)...(19): siRNA sense strand
ugaaguuggcuaacaaauu

SEQ ID NO: 112777 - RNA, 19 nt, Homo sapiens
  misc_RNA (1)...(19): siRNA sense strand
gaacaaagugucggaacau

SEQ ID NO: 112778 - RNA, 19 nt, Homo sapiens
  misc_RNA (1)...(19): siRNA sense strand
gaagagaauggacugaaca

SEQ ID NO: 112779 - RNA, 19 nt, Homo sapiens
  misc_RNA (1)...(19): siRNA sense strand
agaugaagauccugccaaa

SEQ ID NO: 112780 - RNA, 19 nt, Homo sapiens
  misc_RNA (1)...(19): siRNA sense strand
gggaagcgcagaagucaga

SEQ ID NO: 112781 - RNA, 19 nt, Homo sapiens
  misc_RNA (1)...(19): siRNA sense strand
cagcggauuucaaccaaga

SEQ ID NO: 112782 - RNA, 19 nt, Homo sapiens
  misc_RNA (1)...(19): siRNA sense strand
caucucgaauggaucguaa

SEQ ID NO: 112783 - RNA, 19 nt, Homo sapiens
  misc_RNA (1)...(19): siRNA sense strand
agacacaaaugaagaaacu

SEQ ID NO: 112784 - RNA, 19 nt, Homo sapiens
  misc_RNA (1)...(19): siRNA sense strand
gaacaggauagugaaguga

SEQ ID NO: 112785 - RNA, 19 nt, Homo sapiens
  misc_RNA (1)...(19): siRNA sense strand
gggaagauaaugugacaga

SEQ ID NO: 112786 - RNA, 19 nt, Homo sapiens
  misc_RNA (1)...(19): siRNA sense strand
ccaacagaaucacggaaga

SEQ ID NO: 112787 - RNA, 19 nt, Homo sapiens
  misc_RNA (1)...(19): siRNA sense strand
gaaaagagaagcaaguguu

SEQ ID NO: 112788 - RNA, 19 nt, Homo sapiens
  misc_RNA (1)...(19): siRNA sense strand
gaggaaaggaagaugaaga

SEQ ID NO: 112789 - RNA, 19 nt, Homo sapiens
  misc_RNA (1)...(19): siRNA sense strand
aaacuaucauggacagaga

SEQ ID NO: 112790 - RNA, 19 nt, Homo sapiens
  misc_RNA (1)...(19): siRNA sense strand
caaaugaagaaacuagaga

SEQ ID NO: 112791 - RNA, 19 nt, Homo sapiens
  misc_RNA (1)...(19): siRNA sense strand
uggaggcccuggagaugua

SEQ ID NO: 112792 - RNA, 19 nt, Homo sapiens
  misc_RNA (1)...(19): siRNA sense strand
gaacaggagacccuucuac

SEQ ID NO: 112793 - RNA, 19 nt, Homo sapiens
  misc_RNA (1)...(19): siRNA sense strand
ggaggaagauggcagauaa

SEQ ID NO: 112794 - RNA, 19 nt, Homo sapiens
  misc_RNA (1)...(19): siRNA sense strand
acagauggcuuccaaguaa

SEQ ID NO: 112795 - RNA, 19 nt, Homo sapiens
  misc_RNA (1)...(19): siRNA sense strand
gaagauggcagauaagguu

SEQ ID NO: 112796 - RNA, 19 nt, Homo sapiens
  misc_RNA (1)...(19): siRNA sense strand
ggagacagauggcuuccaa

SEQ ID NO: 112797 - RNA, 19 nt, Homo sapiens
  misc_RNA (1)...(19): siRNA sense strand
gagauuucaugcucaguuu

SEQ ID NO: 112798 - RNA, 19 nt, Homo sapiens
  misc_RNA (1)...(19): siRNA sense strand
gagacgagcugcuuucuac

SEQ ID NO: 112799 - RNA, 19 nt, Homo sapiens
  misc_RNA (1)...(19): siRNA sense strand
ucauugagcuggacaagga

SEQ ID NO: 112800 - RNA, 19 nt, Homo sapiens
  misc_RNA (1)...(19): siRNA sense strand
uuaagagccucgucauuga

SEQ ID NO: 112801 - RNA, 19 nt, Homo sapiens
  misc_RNA (1)...(19): siRNA sense strand
gggaguacaucaacugcaa

SEQ ID NO: 112802 - RNA, 19 nt, Homo sapiens
  misc_RNA (1)...(19): siRNA sense strand
gaacaggugcugggaauuc

SEQ ID NO: 112803 - RNA, 19 nt, Homo sapiens
  misc_RNA (1)...(19): siRNA sense strand
acauggaucucuuggcuuu

SEQ ID NO: 112804 - RNA, 19 nt, Homo sapiens
  misc_RNA (1)...(19): siRNA sense strand
gagaucgccucccuugaug

SEQ ID NO: 112805 - RNA, 19 nt, Homo sapiens
  misc_RNA (1)...(19): siRNA sense strand
ggaucuacauuuccaauac

SEQ ID NO: 112806 - RNA, 19 nt, Homo sapiens
  misc_RNA (1)...(19): siRNA sense strand
gcaaacagaagaggaaguu

SEQ ID NO: 112807 - RNA, 19 nt, Homo sapiens
  misc_RNA (1)...(19): siRNA sense strand
caagauccaugagaccauu

SEQ ID NO: 112808 - RNA, 19 nt, Homo sapiens
  misc_RNA (1)...(19): siRNA sense strand
ccacugaaggcccaaauga

SEQ ID NO: 112809 - RNA, 19 nt, Homo sapiens
  misc_RNA (1)...(19): siRNA sense strand
caucaaccaugucauuagu

SEQ ID NO: 112810 - RNA, 19 nt, Homo sapiens
  misc_RNA (1)...(19): siRNA sense strand
gauccuagcaaacagaaga

SEQ ID NO: 112811 - RNA, 19 nt, Homo sapiens
  misc_RNA (1)...(19): siRNA sense strand
cgccagaucuucaguugug

SEQ ID NO: 112812 - RNA, 19 nt, Homo sapiens
  misc_RNA (1)...(19): siRNA sense strand
gacagauggcuuccaagua

SEQ ID NO: 112813 - RNA, 19 nt, Homo sapiens
  misc_RNA (1)...(19): siRNA sense strand
caacugcaaccguuacuuc

SEQ ID NO: 112814 - RNA, 19 nt, Homo sapiens
  misc_RNA (1)...(19): siRNA sense strand
gauggcagauaagguucua

SEQ ID NO: 112815 - RNA, 19 nt, Homo sapiens
  misc_RNA (1)...(19): siRNA sense strand
ucaaccaugucauuagugu

SEQ ID NO: 112816 - RNA, 19 nt, Homo sapiens
  misc_RNA (1)...(19): siRNA sense strand
cagauggcuuccaaguaaa

SEQ ID NO: 112817 - RNA, 19 nt, Homo sapiens
  misc_RNA (1)...(19): siRNA sense strand
ggagagacgagcugcuuuc

SEQ ID NO: 112818 - RNA, 19 nt, Homo sapiens
  misc_RNA (1)...(19): siRNA sense strand
gauccaggaggccaucaaa

SEQ ID NO: 112819 - RNA, 19 nt, Homo sapiens
  misc_RNA (1)...(19): siRNA sense strand
gcaguaggcaggcacaucu

SEQ ID NO: 112820 - RNA, 19 nt, Homo sapiens
  misc_RNA (1)...(19): siRNA sense strand
aaaagccucugacacaaaa

SEQ ID NO: 112821 - RNA, 19 nt, Homo sapiens
  misc_RNA (1)...(19): siRNA sense strand
uggaacaggugcugggaau

SEQ ID NO: 112822 - RNA, 19 nt, Homo sapiens
  misc_RNA (1)...(19): siRNA sense strand
uuuaagagccucgucauug

SEQ ID NO: 112823 - RNA, 19 nt, Homo sapiens
  misc_RNA (1)...(19): siRNA sense strand
aaggaaaacugcuggauga

SEQ ID NO: 112824 - RNA, 19 nt, Homo sapiens
  misc_RNA (1)...(19): siRNA sense strand
ugaagacccagagagauuu

SEQ ID NO: 112825 - RNA, 19 nt, Homo sapiens
  misc_RNA (1)...(19): siRNA sense strand
gaggagagacgagcugcuu

SEQ ID NO: 112826 - RNA, 19 nt, Homo sapiens
  misc_RNA (1)...(19): siRNA sense strand
gaaagcuucggaucuacau

SEQ ID NO: 112827 - RNA, 19 nt, Homo sapiens
  misc_RNA (1)...(19): siRNA sense strand
cugaagacccagagagauu

SEQ ID NO: 112828 - RNA, 19 nt, Homo sapiens
  misc_RNA (1)...(19): siRNA sense strand
aagcuucggaucuacauuu

SEQ ID NO: 112829 - RNA, 19 nt, Homo sapiens
  misc_RNA (1)...(19): siRNA sense strand
gaucuacauuuccaauacg

SEQ ID NO: 112830 - RNA, 19 nt, Homo sapiens
  misc_RNA (1)...(19): siRNA sense strand
ugucaucaaccaugucauu

SEQ ID NO: 112831 - RNA, 19 nt, Homo sapiens
  misc_RNA (1)...(19): siRNA sense strand
cuggagaccucaacgucaa

SEQ ID NO: 112832 - RNA, 19 nt, Homo sapiens
  misc_RNA (1)...(19): siRNA sense strand
gaagacccagagagauuuc

SEQ ID NO: 112833 - RNA, 19 nt, Homo sapiens
  misc_RNA (1)...(19): siRNA sense strand
gaaggcaggaacuggaaca

SEQ ID NO: 112834 - RNA, 19 nt, Homo sapiens
  misc_RNA (1)...(19): siRNA sense strand
gucaucaaccaugucauua

SEQ ID NO: 112835 - RNA, 19 nt, Homo sapiens
  misc_RNA (1)...(19): siRNA sense strand
gcaauuuucuggccucuac

SEQ ID NO: 112836 - RNA, 19 nt, Homo sapiens
  misc_RNA (1)...(19): siRNA sense strand
ggaagauggcagauaaggu

SEQ ID NO: 112837 - RNA, 19 nt, Homo sapiens
  misc_RNA (1)...(19): siRNA sense strand
gcgaaggcaggaacuggaa

SEQ ID NO: 112838 - RNA, 19 nt, Homo sapiens
  misc_RNA (1)...(19): siRNA sense strand
guaggcaggcacaucuuug

SEQ ID NO: 112839 - RNA, 19 nt, Homo sapiens
  misc_RNA (1)...(19): siRNA sense strand
gaugucaagauccaugaga

SEQ ID NO: 112840 - RNA, 19 nt, Homo sapiens
  misc_RNA (1)...(19): siRNA sense strand
gagcgggaguacaucaacu

SEQ ID NO: 112841 - RNA, 19 nt, Homo sapiens
  misc_RNA (1)...(19): siRNA sense strand
gaugauccuagcaaacaga

SEQ ID NO: 112842 - RNA, 19 nt, Homo sapiens
  misc_RNA (1)...(19): siRNA sense strand
ccauugucaucaaccaugu

SEQ ID NO: 112843 - RNA, 19 nt, Homo sapiens
  misc_RNA (1)...(19): siRNA sense strand
ggagcuuguuccagagucu

SEQ ID NO: 112844 - RNA, 19 nt, Homo sapiens
  misc_RNA (1)...(19): siRNA sense strand
gauuucaugcucaguuuua

SEQ ID NO: 112845 - RNA, 19 nt, Homo sapiens
  misc_RNA (1)...(19): siRNA sense strand
ccaccaaucagcaggagau

SEQ ID NO: 112846 - RNA, 19 nt, Homo sapiens
  misc_RNA (1)...(19): siRNA sense strand
cuagcaaacagaagaggaa

SEQ ID NO: 112847 - RNA, 19 nt, Homo sapiens
  misc_RNA (1)...(19): siRNA sense strand
agacagauggcuuccaagu

SEQ ID NO: 112848 - RNA, 19 nt, Homo sapiens
  misc_RNA (1)...(19): siRNA sense strand
cccuguggcuuuacaucaa

SEQ ID NO: 112849 - RNA, 19 nt, Homo sapiens
  misc_RNA (1)...(19): siRNA sense strand
ggaacaggugcugggaauu

SEQ ID NO: 112850 - RNA, 19 nt, Homo sapiens
  misc_RNA (1)...(19): siRNA sense strand
ggacuucauccaggaaugg

SEQ ID NO: 112851 - RNA, 19 nt, Homo sapiens
  misc_RNA (1)...(19): siRNA sense strand
gaucgccucccuugauguc

SEQ ID NO: 112852 - RNA, 19 nt, Homo sapiens
  misc_RNA (1)...(19): siRNA sense strand
gacccuaacgaccagaaga

SEQ ID NO: 112853 - RNA, 19 nt, Homo sapiens
  misc_RNA (1)...(19): siRNA sense strand
cggaucuacauuuccaaua

SEQ ID NO: 112854 - RNA, 19 nt, Homo sapiens
  misc_RNA (1)...(19): siRNA sense strand
gguucuaccucagcgaauc

SEQ ID NO: 112855 - RNA, 19 nt, Homo sapiens
  misc_RNA (1)...(19): siRNA sense strand
gcacaaccagcugcaggau

SEQ ID NO: 112856 - RNA, 19 nt, Homo sapiens
  misc_RNA (1)...(19): siRNA sense strand
ccaccacccaggagacaga

SEQ ID NO: 112857 - RNA, 19 nt, Homo sapiens
  misc_RNA (1)...(19): siRNA sense strand
gggaauucgccugaccuaa

SEQ ID NO: 112858 - RNA, 19 nt, Homo sapiens
  misc_RNA (1)...(19): siRNA sense strand
aggcguacauggaucucuu

SEQ ID NO: 112859 - RNA, 19 nt, Homo sapiens
  misc_RNA (1)...(19): siRNA sense strand
agagauuucaugcucaguu

SEQ ID NO: 112860 - RNA, 19 nt, Homo sapiens
  misc_RNA (1)...(19): siRNA sense strand
gguuaaagaggaggaagau

SEQ ID NO: 112861 - RNA, 19 nt, Homo sapiens
  misc_RNA (1)...(19): siRNA sense strand
ggaggaagauggcugacaa

SEQ ID NO: 112862 - RNA, 19 nt, Homo sapiens
  misc_RNA (1)...(19): siRNA sense strand
gaagauggcugacaaaauc

SEQ ID NO: 112863 - RNA, 19 nt, Homo sapiens
  misc_RNA (1)...(19): siRNA sense strand
ucagugcucuggacaguaa

SEQ ID NO: 112864 - RNA, 19 nt, Homo sapiens
  misc_RNA (1)...(19): siRNA sense strand
cagagggacuucaugcuaa

SEQ ID NO: 112865 - RNA, 19 nt, Homo sapiens
  misc_RNA (1)...(19): siRNA sense strand
ggacucccaugacaaggaa

SEQ ID NO: 112866 - RNA, 19 nt, Homo sapiens
  misc_RNA (1)...(19): siRNA sense strand
ucaucgagcuggacaaaga

SEQ ID NO: 112867 - RNA, 19 nt, Homo sapiens
  misc_RNA (1)...(19): siRNA sense strand
gacaaggaauacaucaaug

SEQ ID NO: 112868 - RNA, 19 nt, Homo sapiens
  misc_RNA (1)...(19): siRNA sense strand
gcaaacagaagcggaaguu

SEQ ID NO: 112869 - RNA, 19 nt, Homo sapiens
  misc_RNA (1)...(19): siRNA sense strand
gaucagugcucuggacagu

SEQ ID NO: 112870 - RNA, 19 nt, Homo sapiens
  misc_RNA (1)...(19): siRNA sense strand
ggagguggaggagccauua

SEQ ID NO: 112871 - RNA, 19 nt, Homo sapiens
  misc_RNA (1)...(19): siRNA sense strand
uaagauccaugagacgauu

SEQ ID NO: 112872 - RNA, 19 nt, Homo sapiens
  misc_RNA (1)...(19): siRNA sense strand
gagaggaaacuggaucaaa

SEQ ID NO: 112873 - RNA, 19 nt, Homo sapiens
  misc_RNA (1)...(19): siRNA sense strand
uaaaccagcucaagaucca

SEQ ID NO: 112874 - RNA, 19 nt, Homo sapiens
  misc_RNA (1)...(19): siRNA sense strand
ggcaguaugugaagaccaa

SEQ ID NO: 112875 - RNA, 19 nt, Homo sapiens
  misc_RNA (1)...(19): siRNA sense strand
caaaggcuauguccaagac

SEQ ID NO: 112876 - RNA, 19 nt, Homo sapiens
  misc_RNA (1)...(19): siRNA sense strand
ccagagggacuucaugcua

SEQ ID NO: 112877 - RNA, 19 nt, Homo sapiens
  misc_RNA (1)...(19): siRNA sense strand
acauggaccucuuggcauu

SEQ ID NO: 112878 - RNA, 19 nt, Homo sapiens
  misc_RNA (1)...(19): siRNA sense strand
ucaaggugaugacagaugu

SEQ ID NO: 112879 - RNA, 19 nt, Homo sapiens
  misc_RNA (1)...(19): siRNA sense strand
gaugaucccagcaaacaga

SEQ ID NO: 112880 - RNA, 19 nt, Homo sapiens
  misc_RNA (1)...(19): siRNA sense strand
ugacaaggaauacaucaau

SEQ ID NO: 112881 - RNA, 19 nt, Homo sapiens
  misc_RNA (1)...(19): siRNA sense strand
gaugagcagcuuccuccua

SEQ ID NO: 112882 - RNA, 19 nt, Homo sapiens
  misc_RNA (1)...(19): siRNA sense strand
agaggaaacuggaucaaac

SEQ ID NO: 112883 - RNA, 19 nt, Homo sapiens
  misc_RNA (1)...(19): siRNA sense strand
ggaagcugcgacucuauau

SEQ ID NO: 112884 - RNA, 19 nt, Homo sapiens
  misc_RNA (1)...(19): siRNA sense strand
gacaaaauccucccucaaa

SEQ ID NO: 112885 - RNA, 19 nt, Homo sapiens
  misc_RNA (1)...(19): siRNA sense strand
acaaguauuuccagcagau

SEQ ID NO: 112886 - RNA, 19 nt, Homo sapiens
  misc_RNA (1)...(19): siRNA sense strand
ccucacagcccugcuauug

SEQ ID NO: 112887 - RNA, 19 nt, Homo sapiens
  misc_RNA (1)...(19): siRNA sense strand
ugaagaggcccaugaagca

SEQ ID NO: 112888 - RNA, 19 nt, Homo sapiens
  misc_RNA (1)...(19): siRNA sense strand
gcaggacucccaugacaag

SEQ ID NO: 112889 - RNA, 19 nt, Homo sapiens
  misc_RNA (1)...(19): siRNA sense strand
gaagaggcccaugaagcaa

SEQ ID NO: 112890 - RNA, 19 nt, Homo sapiens
  misc_RNA (1)...(19): siRNA sense strand
ccauaaaccagcucaagau

SEQ ID NO: 112891 - RNA, 19 nt, Homo sapiens
  misc_RNA (1)...(19): siRNA sense strand
caauugucaucaaccaugu

SEQ ID NO: 112892 - RNA, 19 nt, Homo sapiens
  misc_RNA (1)...(19): siRNA sense strand
gacaguaagauccaugaga

SEQ ID NO: 112893 - RNA, 19 nt, Homo sapiens
  misc_RNA (1)...(19): siRNA sense strand
cggaagcugcgacucuaua

SEQ ID NO: 112894 - RNA, 19 nt, Homo sapiens
  misc_RNA (1)...(19): siRNA sense strand
gcacgcugcuccucaugcu

SEQ ID NO: 112895 - RNA, 19 nt, Homo sapiens
  misc_RNA (1)...(19): siRNA sense strand
ggucaucgagcuggacaaa

SEQ ID NO: 112896 - RNA, 19 nt, Homo sapiens
  misc_RNA (1)...(19): siRNA sense strand
cugcaggacucccaugaca

SEQ ID NO: 112897 - RNA, 19 nt, Homo sapiens
  misc_RNA (1)...(19): siRNA sense strand
gagacgauugaguccauaa

SEQ ID NO: 112898 - RNA, 19 nt, Homo sapiens
  misc_RNA (1)...(19): siRNA sense strand
gaggaagauggcugacaaa

SEQ ID NO: 112899 - RNA, 19 nt, Homo sapiens
  misc_RNA (1)...(19): siRNA sense strand
augagcagcuuccuccuau

SEQ ID NO: 112900 - RNA, 19 nt, Homo sapiens
  misc_RNA (1)...(19): siRNA sense strand
ucaagaguuuggucaucga

SEQ ID NO: 112901 - RNA, 19 nt, Homo sapiens
  misc_RNA (1)...(19): siRNA sense strand
ugagacgauugaguccaua

SEQ ID NO: 112902 - RNA, 19 nt, Homo sapiens
  misc_RNA (1)...(19): siRNA sense strand
ggacggcuuccaggugaaa

SEQ ID NO: 112903 - RNA, 19 nt, Homo sapiens
  misc_RNA (1)...(19): siRNA sense strand
ccaaaggcuauguccaaga

SEQ ID NO: 112904 - RNA, 19 nt, Homo sapiens
  misc_RNA (1)...(19): siRNA sense strand
cucuauaucuccaacacuu

SEQ ID NO: 112905 - RNA, 19 nt, Homo sapiens
  misc_RNA (1)...(19): siRNA sense strand
guucucuucuuucuucaag

SEQ ID NO: 112906 - RNA, 19 nt, Homo sapiens
  misc_RNA (1)...(19): siRNA sense strand
ggauuccgacggcagcauu

SEQ ID NO: 112907 - RNA, 19 nt, Homo sapiens
  misc_RNA (1)...(19): siRNA sense strand
gggaagcuccuggaugauc

SEQ ID NO: 112908 - RNA, 19 nt, Homo sapiens
  misc_RNA (1)...(19): siRNA sense strand
gagguggaggagccauuaa

SEQ ID NO: 112909 - RNA, 19 nt, Homo sapiens
  misc_RNA (1)...(19): siRNA sense strand
gcugaaguuuucugagauu

SEQ ID NO: 112910 - RNA, 19 nt, Homo sapiens
  misc_RNA (1)...(19): siRNA sense strand
gaagcugcgacucuauauc

SEQ ID NO: 112911 - RNA, 19 nt, Homo sapiens
  misc_RNA (1)...(19): siRNA sense strand
ucaauggggacaaguauuu

SEQ ID NO: 112912 - RNA, 19 nt, Homo sapiens
  misc_RNA (1)...(19): siRNA sense strand
ggaaacuggaucaaaccau

SEQ ID NO: 112913 - RNA, 19 nt, Homo sapiens
  misc_RNA (1)...(19): siRNA sense strand
gggacuucaugcuaagcuu

SEQ ID NO: 112914 - RNA, 19 nt, Homo sapiens
  misc_RNA (1)...(19): siRNA sense strand
guaagauccaugagacgau

SEQ ID NO: 112915 - RNA, 19 nt, Homo sapiens
  misc_RNA (1)...(19): siRNA sense strand
ggaagauggcugacaaaau

SEQ ID NO: 112916 - RNA, 19 nt, Homo sapiens
  misc_RNA (1)...(19): siRNA sense strand
cauaaaccagcucaagauc

SEQ ID NO: 112917 - RNA, 19 nt, Homo sapiens
  misc_RNA (1)...(19): siRNA sense strand
caaggugaugacagaugua

SEQ ID NO: 112918 - RNA, 19 nt, Homo sapiens
  misc_RNA (1)...(19): siRNA sense strand
gcugcacgcugcuccucau

SEQ ID NO: 112919 - RNA, 19 nt, Homo sapiens
  misc_RNA (1)...(19): siRNA sense strand
aggcuuacauggaccucuu

SEQ ID NO: 112920 - RNA, 19 nt, Homo sapiens
  misc_RNA (1)...(19): siRNA sense strand
gauccagagggacuucaug

SEQ ID NO: 112921 - RNA, 19 nt, Homo sapiens
  misc_RNA (1)...(19): siRNA sense strand
aagcugcgacucuauaucu

SEQ ID NO: 112922 - RNA, 19 nt, Homo sapiens
  misc_RNA (1)...(19): siRNA sense strand
gguggaggagccauuaaag

SEQ ID NO: 112923 - RNA, 19 nt, Homo sapiens
  misc_RNA (1)...(19): siRNA sense strand
gcaaugagcuggaggagau

SEQ ID NO: 112924 - RNA, 19 nt, Homo sapiens
  misc_RNA (1)...(19): siRNA sense strand
gcaaugagaucgauacaca

SEQ ID NO: 112925 - RNA, 19 nt, Homo sapiens
  misc_RNA (1)...(19): siRNA sense strand
gcgaagggcugaccaguug

SEQ ID NO: 112926 - RNA, 19 nt, Homo sapiens
  misc_RNA (1)...(19): siRNA sense strand
guaacaagcuuaaaucaag

SEQ ID NO: 112927 - RNA, 19 nt, Homo sapiens
  misc_RNA (1)...(19): siRNA sense strand
gaaggcugauuccaacaaa

SEQ ID NO: 112928 - RNA, 19 nt, Homo sapiens
  misc_RNA (1)...(19): siRNA sense strand
ggacuuugguuauguugga

SEQ ID NO: 112929 - RNA, 19 nt, Homo sapiens
  misc_RNA (1)...(19): siRNA sense strand
gaguaaagaugcugguauc

SEQ ID NO: 112930 - RNA, 19 nt, Homo sapiens
  misc_RNA (1)...(19): siRNA sense strand
ggaaagcacccgucguaug

SEQ ID NO: 112931 - RNA, 19 nt, Homo sapiens
  misc_RNA (1)...(19): siRNA sense strand
gaaagcacccgucguaugc

SEQ ID NO: 112932 - RNA, 19 nt, Homo sapiens
  misc_RNA (1)...(19): siRNA sense strand
gguaucaggacuuugguua

SEQ ID NO: 112933 - RNA, 19 nt, Homo sapiens
  misc_RNA (1)...(19): siRNA sense strand
caaccaacgugcaacaaag

SEQ ID NO: 112934 - RNA, 19 nt, Homo sapiens
  misc_RNA (1)...(19): siRNA sense strand
gcugaugagucgcuggaaa

SEQ ID NO: 112935 - RNA, 19 nt, Homo sapiens
  misc_RNA (1)...(19): siRNA sense strand
ugagaucgauacacagaau

SEQ ID NO: 112936 - RNA, 19 nt, Homo sapiens
  misc_RNA (1)...(19): siRNA sense strand
uaucaggacuuugguuaug

SEQ ID NO: 112937 - RNA, 19 nt, Homo sapiens
  misc_RNA (1)...(19): siRNA sense strand
ugaaauggaugaaaaccua

SEQ ID NO: 112938 - RNA, 19 nt, Homo sapiens
  misc_RNA (1)...(19): siRNA sense strand
cagccagccugcucgugua

SEQ ID NO: 112939 - RNA, 19 nt, Homo sapiens
  misc_RNA (1)...(19): siRNA sense strand
ucacauggcccuggauaug

SEQ ID NO: 112940 - RNA, 19 nt, Homo sapiens
  misc_RNA (1)...(19): siRNA sense strand
ggaugaacaaggagaacaa

SEQ ID NO: 112941 - RNA, 19 nt, Homo sapiens
  misc_RNA (1)...(19): siRNA sense strand
ucaggacuuugguuauguu

SEQ ID NO: 112942 - RNA, 19 nt, Homo sapiens
  misc_RNA (1)...(19): siRNA sense strand
ccaaccaacgugcaacaaa

SEQ ID NO: 112943 - RNA, 19 nt, Homo sapiens
  misc_RNA (1)...(19): siRNA sense strand
gagaguaaagaugcuggua

SEQ ID NO: 112944 - RNA, 19 nt, Homo sapiens
  misc_RNA (1)...(19): siRNA sense strand
ggccgaagacgcagacaug

SEQ ID NO: 112945 - RNA, 19 nt, Homo sapiens
  misc_RNA (1)...(19): siRNA sense strand
ggauaugggcaaugagauc

SEQ ID NO: 112946 - RNA, 19 nt, Homo sapiens
  misc_RNA (1)...(19): siRNA sense strand
cuggaaagcacccgucgua

SEQ ID NO: 112947 - RNA, 19 nt, Homo sapiens
  misc_RNA (1)...(19): siRNA sense strand
aacaaaugaugcccgagaa

SEQ ID NO: 112948 - RNA, 19 nt, Homo sapiens
  misc_RNA (1)...(19): siRNA sense strand
caacaaaaccagaauugau

SEQ ID NO: 112949 - RNA, 19 nt, Homo sapiens
  misc_RNA (1)...(19): siRNA sense strand
ggacgaacgggagcagaug

SEQ ID NO: 112950 - RNA, 19 nt, Homo sapiens
  misc_RNA (1)...(19): siRNA sense strand
ucgacaggaucauggagaa

SEQ ID NO: 112951 - RNA, 19 nt, Homo sapiens
  misc_RNA (1)...(19): siRNA sense strand
gagaaaaugaaauggauga

SEQ ID NO: 112952 - RNA, 19 nt, Homo sapiens
  misc_RNA (1)...(19): siRNA sense strand
acaaagaugcugggaagug

SEQ ID NO: 112953 - RNA, 19 nt, Homo sapiens
  misc_RNA (1)...(19): siRNA sense strand
gaauugaugaggccaacca

SEQ ID NO: 112954 - RNA, 19 nt, Homo sapiens
  misc_RNA (1)...(19): siRNA sense strand
gcaggugagcggcaucauc

SEQ ID NO: 112955 - RNA, 19 nt, Homo sapiens
  misc_RNA (1)...(19): siRNA sense strand
ccagccugcucguguagug

SEQ ID NO: 112956 - RNA, 19 nt, Homo sapiens
  misc_RNA (1)...(19): siRNA sense strand
gcugguaucaggacuuugg

SEQ ID NO: 112957 - RNA, 19 nt, Homo sapiens
  misc_RNA (1)...(19): siRNA sense strand
acaaaugaugcccgagaaa

SEQ ID NO: 112958 - RNA, 19 nt, Homo sapiens
  misc_RNA (1)...(19): siRNA sense strand
guaucaggacuuugguuau

SEQ ID NO: 112959 - RNA, 19 nt, Homo sapiens
  misc_RNA (1)...(19): siRNA sense strand
aaugagaucgauacacaga

SEQ ID NO: 112960 - RNA, 19 nt, Homo sapiens
  misc_RNA (1)...(19): siRNA sense strand
guaaagaugcugguaucag

SEQ ID NO: 112961 - RNA, 19 nt, Homo sapiens
  misc_RNA (1)...(19): siRNA sense strand
cgucacauggcccuggaua

SEQ ID NO: 112962 - RNA, 19 nt, Homo sapiens
  misc_RNA (1)...(19): siRNA sense strand
gcugaccaguuggcugaug

SEQ ID NO: 112963 - RNA, 19 nt, Homo sapiens
  misc_RNA (1)...(19): siRNA sense strand
cugaccaguuggcugauga

SEQ ID NO: 112964 - RNA, 19 nt, Homo sapiens
  misc_RNA (1)...(19): siRNA sense strand
ucauggagaaggcugauuc

SEQ ID NO: 112965 - RNA, 19 nt, Homo sapiens
  misc_RNA (1)...(19): siRNA sense strand
caaaugaugcccgagaaaa

SEQ ID NO: 112966 - RNA, 19 nt, Homo sapiens
  misc_RNA (1)...(19): siRNA sense strand
gaugcugggaagugguuaa

SEQ ID NO: 112967 - RNA, 19 nt, Homo sapiens
  misc_RNA (1)...(19): siRNA sense strand
agaguaaagaugcugguau

SEQ ID NO: 112968 - RNA, 19 nt, Homo sapiens
  misc_RNA (1)...(19): siRNA sense strand
guugaagagaguaaagaug

SEQ ID NO: 112969 - RNA, 19 nt, Homo sapiens
  misc_RNA (1)...(19): siRNA sense strand
gcaaugagcuggaggagau

SEQ ID NO: 112970 - RNA, 19 nt, Homo sapiens
  misc_RNA (1)...(19): siRNA sense strand
gcaaugagaucgauacaca

SEQ ID NO: 112971 - RNA, 19 nt, Homo sapiens
  misc_RNA (1)...(19): siRNA sense strand
gcgaagggcugaccaguug

SEQ ID NO: 112972 - RNA, 19 nt, Homo sapiens
  misc_RNA (1)...(19): siRNA sense strand
guaacaagcuuaaaucaag

SEQ ID NO: 112973 - RNA, 19 nt, Homo sapiens
  misc_RNA (1)...(19): siRNA sense strand
gaaggcugauuccaacaaa

SEQ ID NO: 112974 - RNA, 19 nt, Homo sapiens
  misc_RNA (1)...(19): siRNA sense strand
ggacuuugguuauguugga

SEQ ID NO: 112975 - RNA, 19 nt, Homo sapiens
  misc_RNA (1)...(19): siRNA sense strand
gaguaaagaugcugguauc

SEQ ID NO: 112976 - RNA, 19 nt, Homo sapiens
  misc_RNA (1)...(19): siRNA sense strand
ggaaagcacccgucguaug

SEQ ID NO: 112977 - RNA, 19 nt, Homo sapiens
  misc_RNA (1)...(19): siRNA sense strand
gaaagcacccgucguaugc

SEQ ID NO: 112978 - RNA, 19 nt, Homo sapiens
  misc_RNA (1)...(19): siRNA sense strand
gguaucaggacuuugguua

SEQ ID NO: 112979 - RNA, 19 nt, Homo sapiens
  misc_RNA (1)...(19): siRNA sense strand
caaccaacgugcaacaaag

SEQ ID NO: 112980 - RNA, 19 nt, Homo sapiens
  misc_RNA (1)...(19): siRNA sense strand
gcugaugagucgcuggaaa

SEQ ID NO: 112981 - RNA, 19 nt, Homo sapiens
  misc_RNA (1)...(19): siRNA sense strand
ugagaucgauacacagaau

SEQ ID NO: 112982 - RNA, 19 nt, Homo sapiens
  misc_RNA (1)...(19): siRNA sense strand
uaucaggacuuugguuaug

SEQ ID NO: 112983 - RNA, 19 nt, Homo sapiens
  misc_RNA (1)...(19): siRNA sense strand
ugaaauggaugaaaaccua

SEQ ID NO: 112984 - RNA, 19 nt, Homo sapiens
  misc_RNA (1)...(19): siRNA sense strand
cagccagccugcucgugua

SEQ ID NO: 112985 - RNA, 19 nt, Homo sapiens
  misc_RNA (1)...(19): siRNA sense strand
ucacauggcccuggauaug

SEQ ID NO: 112986 - RNA, 19 nt, Homo sapiens
  misc_RNA (1)...(19): siRNA sense strand
ggaugaacaaggagaacaa

SEQ ID NO: 112987 - RNA, 19 nt, Homo sapiens
  misc_RNA (1)...(19): siRNA sense strand
ucaggacuuugguuauguu

SEQ ID NO: 112988 - RNA, 19 nt, Homo sapiens
  misc_RNA (1)...(19): siRNA sense strand
ccaaccaacgugcaacaaa

SEQ ID NO: 112989 - RNA, 19 nt, Homo sapiens
  misc_RNA (1)...(19): siRNA sense strand
gagaguaaagaugcuggua

SEQ ID NO: 112990 - RNA, 19 nt, Homo sapiens
  misc_RNA (1)...(19): siRNA sense strand
ggccgaagacgcagacaug

SEQ ID NO: 112991 - RNA, 19 nt, Homo sapiens
  misc_RNA (1)...(19): siRNA sense strand
ggauaugggcaaugagauc

SEQ ID NO: 112992 - RNA, 19 nt, Homo sapiens
  misc_RNA (1)...(19): siRNA sense strand
cuggaaagcacccgucgua

SEQ ID NO: 112993 - RNA, 19 nt, Homo sapiens
  misc_RNA (1)...(19): siRNA sense strand
aacaaaugaugcccgagaa

SEQ ID NO: 112994 - RNA, 19 nt, Homo sapiens
  misc_RNA (1)...(19): siRNA sense strand
caacaaaaccagaauugau

SEQ ID NO: 112995 - RNA, 19 nt, Homo sapiens
  misc_RNA (1)...(19): siRNA sense strand
ggacgaacgggagcagaug

SEQ ID NO: 112996 - RNA, 19 nt, Homo sapiens
  misc_RNA (1)...(19): siRNA sense strand
ucgacaggaucauggagaa

SEQ ID NO: 112997 - RNA, 19 nt, Homo sapiens
  misc_RNA (1)...(19): siRNA sense strand
gagaaaaugaaauggauga

SEQ ID NO: 112998 - RNA, 19 nt, Homo sapiens
  misc_RNA (1)...(19): siRNA sense strand
acaaagaugcugggaagug

SEQ ID NO: 112999 - RNA, 19 nt, Homo sapiens
  misc_RNA (1)...(19): siRNA sense strand
gaauugaugaggccaacca

SEQ ID NO: 113000 - RNA, 19 nt, Homo sapiens
  misc_RNA (1)...(19): siRNA sense strand
gcaggugagcggcaucauc

SEQ ID NO: 113001 - RNA, 19 nt, Homo sapiens
  misc_RNA (1)...(19): siRNA sense strand
ccagccugcucguguagug

SEQ ID NO: 113002 - RNA, 19 nt, Homo sapiens
  misc_RNA (1)...(19): siRNA sense strand
gcugguaucaggacuuugg

SEQ ID NO: 113003 - RNA, 19 nt, Homo sapiens
  misc_RNA (1)...(19): siRNA sense strand
acaaaugaugcccgagaaa

SEQ ID NO: 113004 - RNA, 19 nt, Homo sapiens
  misc_RNA (1)...(19): siRNA sense strand
guaucaggacuuugguuau

SEQ ID NO: 113005 - RNA, 19 nt, Homo sapiens
  misc_RNA (1)...(19): siRNA sense strand
aaugagaucgauacacaga

SEQ ID NO: 113006 - RNA, 19 nt, Homo sapiens
  misc_RNA (1)...(19): siRNA sense strand
guaaagaugcugguaucag

SEQ ID NO: 113007 - RNA, 19 nt, Homo sapiens
  misc_RNA (1)...(19): siRNA sense strand
cgucacauggcccuggaua

SEQ ID NO: 113008 - RNA, 19 nt, Homo sapiens
  misc_RNA (1)...(19): siRNA sense strand
gcugaccaguuggcugaug

SEQ ID NO: 113009 - RNA, 19 nt, Homo sapiens
  misc_RNA (1)...(19): siRNA sense strand
cugaccaguuggcugauga

SEQ ID NO: 113010 - RNA, 19 nt, Homo sapiens
  misc_RNA (1)...(19): siRNA sense strand
ucauggagaaggcugauuc

SEQ ID NO: 113011 - RNA, 19 nt, Homo sapiens
  misc_RNA (1)...(19): siRNA sense strand
caaaugaugcccgagaaaa

SEQ ID NO: 113012 - RNA, 19 nt, Homo sapiens
  misc_RNA (1)...(19): siRNA sense strand
gaugcugggaagugguuaa

SEQ ID NO: 113013 - RNA, 19 nt, Homo sapiens
  misc_RNA (1)...(19): siRNA sense strand
agaguaaagaugcugguau

SEQ ID NO: 113014 - RNA, 19 nt, Homo sapiens
  misc_RNA (1)...(19): siRNA sense strand
guugaagagaguaaagaug

SEQ ID NO: 113015 - RNA, 19 nt, Homo sapiens
  misc_RNA (1)...(19): siRNA sense strand
ccaggaagcugcugaagaa

SEQ ID NO: 113016 - RNA, 19 nt, Homo sapiens
  misc_RNA (1)...(19): siRNA sense strand
ggaggaauaucaggaguau

SEQ ID NO: 113017 - RNA, 19 nt, Homo sapiens
  misc_RNA (1)...(19): siRNA sense strand
ccacaggacuggugaagag

SEQ ID NO: 113018 - RNA, 19 nt, Homo sapiens
  misc_RNA (1)...(19): siRNA sense strand
ggaauucccuacugaucug

SEQ ID NO: 113019 - RNA, 19 nt, Homo sapiens
  misc_RNA (1)...(19): siRNA sense strand
gggaggagcuguguucucu

SEQ ID NO: 113020 - RNA, 19 nt, Homo sapiens
  misc_RNA (1)...(19): siRNA sense strand
ggaagcugcugaagaacca

SEQ ID NO: 113021 - RNA, 19 nt, Homo sapiens
  misc_RNA (1)...(19): siRNA sense strand
aggaauaucaggaguauga

SEQ ID NO: 113022 - RNA, 19 nt, Homo sapiens
  misc_RNA (1)...(19): siRNA sense strand
ggaacaggccucacaucug

SEQ ID NO: 113023 - RNA, 19 nt, Homo sapiens
  misc_RNA (1)...(19): siRNA sense strand
gcugaagaaccacugauug

SEQ ID NO: 113024 - RNA, 19 nt, Homo sapiens
  misc_RNA (1)...(19): siRNA sense strand
ccgagaaggugugguacaa

SEQ ID NO: 113025 - RNA, 19 nt, Homo sapiens
  misc_RNA (1)...(19): siRNA sense strand
gacccgagaagguguggua

SEQ ID NO: 113026 - RNA, 19 nt, Homo sapiens
  misc_RNA (1)...(19): siRNA sense strand
cugaagaaccacugauuga

SEQ ID NO: 113027 - RNA, 19 nt, Homo sapiens
  misc_RNA (1)...(19): siRNA sense strand
gguacaagguguggcuuca

SEQ ID NO: 113028 - RNA, 19 nt, Homo sapiens
  misc_RNA (1)...(19): siRNA sense strand
ccaaggaacaggccucaca

SEQ ID NO: 113029 - RNA, 19 nt, Homo sapiens
  misc_RNA (1)...(19): siRNA sense strand
gaggaauucccuacugauc

SEQ ID NO: 113030 - RNA, 19 nt, Homo sapiens
  misc_RNA (1)...(19): siRNA sense strand
ggaaguggcccaggaagcu

SEQ ID NO: 113031 - RNA, 19 nt, Homo sapiens
  misc_RNA (1)...(19): siRNA sense strand
ggaggaauucccuacugau

SEQ ID NO: 113032 - RNA, 19 nt, Homo sapiens
  misc_RNA (1)...(19): siRNA sense strand
uacaagguguggcuucagu

SEQ ID NO: 113033 - RNA, 19 nt, Homo sapiens
  misc_RNA (1)...(19): siRNA sense strand
ggaagcaagacccgagaag

SEQ ID NO: 113034 - RNA, 19 nt, Homo sapiens
  misc_RNA (1)...(19): siRNA sense strand
cggcggagaagaccaagga

SEQ ID NO: 113035 - RNA, 19 nt, Homo sapiens
  misc_RNA (1)...(19): siRNA sense strand
aagcaagacccgagaaggu

SEQ ID NO: 113036 - RNA, 19 nt, Homo sapiens
  misc_RNA (1)...(19): siRNA sense strand
gagccaagaccaaggagaa

SEQ ID NO: 113037 - RNA, 19 nt, Homo sapiens
  misc_RNA (1)...(19): siRNA sense strand
gaccaaggagaauguugua

SEQ ID NO: 113038 - RNA, 19 nt, Homo sapiens
  misc_RNA (1)...(19): siRNA sense strand
caaggagaauguuguacag

SEQ ID NO: 113039 - RNA, 19 nt, Homo sapiens
  misc_RNA (1)...(19): siRNA sense strand
ccaaagagaaagaggaagu

SEQ ID NO: 113040 - RNA, 19 nt, Homo sapiens
  misc_RNA (1)...(19): siRNA sense strand
cagcugagaagaccaagga

SEQ ID NO: 113041 - RNA, 19 nt, Homo sapiens
  misc_RNA (1)...(19): siRNA sense strand
ccaaggagaauguuguaca

SEQ ID NO: 113042 - RNA, 19 nt, Homo sapiens
  misc_RNA (1)...(19): siRNA sense strand
ugaccucaguggccgagaa

SEQ ID NO: 113043 - RNA, 19 nt, Homo sapiens
  misc_RNA (1)...(19): siRNA sense strand
ccaagaccaaggagaaugu

SEQ ID NO: 113044 - RNA, 19 nt, Homo sapiens
  misc_RNA (1)...(19): siRNA sense strand
ucaacacuguggccaccaa

SEQ ID NO: 113045 - RNA, 19 nt, Homo sapiens
  misc_RNA (1)...(19): siRNA sense strand
gacggaagcagcugagaag

SEQ ID NO: 113046 - RNA, 19 nt, Homo sapiens
  misc_RNA (1)...(19): siRNA sense strand
ugacggaagcagcugagaa

SEQ ID NO: 113047 - RNA, 19 nt, Homo sapiens
  misc_RNA (1)...(19): siRNA sense strand
ggaggaggcggagaacauc

SEQ ID NO: 113048 - RNA, 19 nt, Homo sapiens
  misc_RNA (1)...(19): siRNA sense strand
ugagcagcgucaacacugu

SEQ ID NO: 113049 - RNA, 19 nt, Homo sapiens
  misc_RNA (1)...(19): siRNA sense strand
caaagagaaagaggaagug

SEQ ID NO: 113050 - RNA, 19 nt, Homo sapiens
  misc_RNA (1)...(19): siRNA sense strand
gcuucuccaucgccaagga

SEQ ID NO: 113051 - RNA, 19 nt, Homo sapiens
  misc_RNA (1)...(19): siRNA sense strand
gcagaaagguuuaagauga

SEQ ID NO: 113052 - RNA, 19 nt, Homo sapiens
  misc_RNA (1)...(19): siRNA sense strand
gaagugaaauugcagauga

SEQ ID NO: 113053 - RNA, 19 nt, Homo sapiens
  misc_RNA (1)...(19): siRNA sense strand
ucaaacagcugucuucaug

SEQ ID NO: 113054 - RNA, 19 nt, Homo sapiens
  misc_RNA (1)...(19): siRNA sense strand
ggaaaucaauguguaaaug

SEQ ID NO: 113055 - RNA, 19 nt, Homo sapiens
  misc_RNA (1)...(19): siRNA sense strand
aagaagcagugauguauua

SEQ ID NO: 113056 - RNA, 19 nt, Homo sapiens
  misc_RNA (1)...(19): siRNA sense strand
guuagaaccuggaaacgua

SEQ ID NO: 113057 - RNA, 19 nt, Homo sapiens
  misc_RNA (1)...(19): siRNA sense strand
uaaggaaugugccauauau

SEQ ID NO: 113058 - RNA, 19 nt, Homo sapiens
  misc_RNA (1)...(19): siRNA sense strand
gggagaagcugucaccuau

SEQ ID NO: 113059 - RNA, 19 nt, Homo sapiens
  misc_RNA (1)...(19): siRNA sense strand
aaacagcugucuucaugua

SEQ ID NO: 113060 - RNA, 19 nt, Homo sapiens
  misc_RNA (1)...(19): siRNA sense strand
gagaagcugucaccuauuc

SEQ ID NO: 113061 - RNA, 19 nt, Homo sapiens
  misc_RNA (1)...(19): siRNA sense strand
uuacagaacuggaauagug

SEQ ID NO: 113062 - RNA, 19 nt, Homo sapiens
  misc_RNA (1)...(19): siRNA sense strand
gaagauggcgguggagaua

SEQ ID NO: 113063 - RNA, 19 nt, Homo sapiens
  misc_RNA (1)...(19): siRNA sense strand
ggaaagcuuauguggauua

SEQ ID NO: 113064 - RNA, 19 nt, Homo sapiens
  misc_RNA (1)...(19): siRNA sense strand
uaacuagacuccuuaaucu

SEQ ID NO: 113065 - RNA, 19 nt, Homo sapiens
  misc_RNA (1)...(19): siRNA sense strand
uaacagggcucuggaacuu

SEQ ID NO: 113066 - RNA, 19 nt, Homo sapiens
  misc_RNA (1)...(19): siRNA sense strand
caccaaagauuauccauca

SEQ ID NO: 113067 - RNA, 19 nt, Homo sapiens
  misc_RNA (1)...(19): siRNA sense strand
caaagauuauccaucauug

SEQ ID NO: 113068 - RNA, 19 nt, Homo sapiens
  misc_RNA (1)...(19): siRNA sense strand
ccacuguaguugccuauaa

SEQ ID NO: 113069 - RNA, 19 nt, Homo sapiens
  misc_RNA (1)...(19): siRNA sense strand
guaaaguacuagauguuga

SEQ ID NO: 113070 - RNA, 19 nt, Homo sapiens
  misc_RNA (1)...(19): siRNA sense strand
caaucgagcucaagcagaa

SEQ ID NO: 113071 - RNA, 19 nt, Homo sapiens
  misc_RNA (1)...(19): siRNA sense strand
agaaggaaaucaaugugua

SEQ ID NO: 113072 - RNA, 19 nt, Homo sapiens
  misc_RNA (1)...(19): siRNA sense strand
aagaugauguugacacuaa

SEQ ID NO: 113073 - RNA, 19 nt, Homo sapiens
  misc_RNA (1)...(19): siRNA sense strand
gaguaaagcagaaagguuu

SEQ ID NO: 113074 - RNA, 19 nt, Homo sapiens
  misc_RNA (1)...(19): siRNA sense strand
gaaggaaaucaauguguaa

SEQ ID NO: 113075 - RNA, 19 nt, Homo sapiens
  misc_RNA (1)...(19): siRNA sense strand
caaauagagcagcauguua

SEQ ID NO: 113076 - RNA, 19 nt, Homo sapiens
  misc_RNA (1)...(19): siRNA sense strand
uaaauacagcgaaugcuua

SEQ ID NO: 113077 - RNA, 19 nt, Homo sapiens
  misc_RNA (1)...(19): siRNA sense strand
gcagaaaucaaauuacaga

SEQ ID NO: 113078 - RNA, 19 nt, Homo sapiens
  misc_RNA (1)...(19): siRNA sense strand
ugucagagguugaaagaga

SEQ ID NO: 113079 - RNA, 19 nt, Homo sapiens
  misc_RNA (1)...(19): siRNA sense strand
ggaaaaggaugguuauuca

SEQ ID NO: 113080 - RNA, 19 nt, Homo sapiens
  misc_RNA (1)...(19): siRNA sense strand
uaucagcgcuucccacugu

SEQ ID NO: 113081 - RNA, 19 nt, Homo sapiens
  misc_RNA (1)...(19): siRNA sense strand
uaaagacgcccucaguaaa

SEQ ID NO: 113082 - RNA, 19 nt, Homo sapiens
  misc_RNA (1)...(19): siRNA sense strand
ggaagaaggaaaucaaugu

SEQ ID NO: 113083 - RNA, 19 nt, Homo sapiens
  misc_RNA (1)...(19): siRNA sense strand
ucaugaaacugagacauuu

SEQ ID NO: 113084 - RNA, 19 nt, Homo sapiens
  misc_RNA (1)...(19): siRNA sense strand
cauaaaggacucaagaauu

SEQ ID NO: 113085 - RNA, 19 nt, Homo sapiens
  misc_RNA (1)...(19): siRNA sense strand
gaagcagugauguauuaua

SEQ ID NO: 113086 - RNA, 19 nt, Homo sapiens
  misc_RNA (1)...(19): siRNA sense strand
gaaggaaaauugagauuca

SEQ ID NO: 113087 - RNA, 19 nt, Homo sapiens
  misc_RNA (1)...(19): siRNA sense strand
cuacagaagauuugaguaa

SEQ ID NO: 113088 - RNA, 19 nt, Homo sapiens
  misc_RNA (1)...(19): siRNA sense strand
gaagaagcagugauguauu

SEQ ID NO: 113089 - RNA, 19 nt, Homo sapiens
  misc_RNA (1)...(19): siRNA sense strand
gaagauauacaggcccuaa

SEQ ID NO: 113090 - RNA, 19 nt, Homo sapiens
  misc_RNA (1)...(19): siRNA sense strand
gaacgugaaagccuucuau

SEQ ID NO: 113091 - RNA, 19 nt, Homo sapiens
  misc_RNA (1)...(19): siRNA sense strand
cagcaggucuaacugagaa

SEQ ID NO: 113092 - RNA, 19 nt, Homo sapiens
  misc_RNA (1)...(19): siRNA sense strand
cagaaaagcuuaauugauc

SEQ ID NO: 113093 - RNA, 19 nt, Homo sapiens
  misc_RNA (1)...(19): siRNA sense strand
agcgaaugcuuaaagauua

SEQ ID NO: 113094 - RNA, 19 nt, Homo sapiens
  misc_RNA (1)...(19): siRNA sense strand
ggagcuggauggaccaaau

SEQ ID NO: 113095 - RNA, 19 nt, Homo sapiens
  misc_RNA (1)...(19): siRNA sense strand
guaacuagacuccuuaauc

SEQ ID NO: 113096 - RNA, 19 nt, Homo sapiens
  misc_RNA (1)...(19): siRNA sense strand
gaacuucauccauucucua

SEQ ID NO: 113097 - RNA, 19 nt, Homo sapiens
  misc_RNA (1)...(19): siRNA sense strand
caaguauuauugaggcaaa

SEQ ID NO: 113098 - RNA, 19 nt, Homo sapiens
  misc_RNA (1)...(19): siRNA sense strand
gaaagcuuauguggauuau

SEQ ID NO: 113099 - RNA, 19 nt, Homo sapiens
  misc_RNA (1)...(19): siRNA sense strand
ugggaaagcuuauguggau

SEQ ID NO: 113100 - RNA, 19 nt, Homo sapiens
  misc_RNA (1)...(19): siRNA sense strand
gauaaugauuuggccaaga

SEQ ID NO: 113101 - RNA, 19 nt, Homo sapiens
  misc_RNA (1)...(19): siRNA sense strand
gauaagacagcaccauuca

SEQ ID NO: 113102 - RNA, 19 nt, Homo sapiens
  misc_RNA (1)...(19): siRNA sense strand
gaaugugccauauauacaa

SEQ ID NO: 113103 - RNA, 19 nt, Homo sapiens
  misc_RNA (1)...(19): siRNA sense strand
guuaacaggcuaucaagaa

SEQ ID NO: 113104 - RNA, 19 nt, Homo sapiens
  misc_RNA (1)...(19): siRNA sense strand
ccauugaacaucuagauuu

SEQ ID NO: 113105 - RNA, 19 nt, Homo sapiens
  misc_RNA (1)...(19): siRNA sense strand
ccaaagauuauccaucauu

SEQ ID NO: 113106 - RNA, 19 nt, Homo sapiens
  misc_RNA (1)...(19): siRNA sense strand
cagaaagguuuaagaugau

SEQ ID NO: 113107 - RNA, 19 nt, Homo sapiens
  misc_RNA (1)...(19): siRNA sense strand
cgugaaagccuucuauaga

SEQ ID NO: 113108 - RNA, 19 nt, Homo sapiens
  misc_RNA (1)...(19): siRNA sense strand
caauaaggaaugugccaua

SEQ ID NO: 113109 - RNA, 19 nt, Homo sapiens
  misc_RNA (1)...(19): siRNA sense strand
gcaaaugacaguguuaaca

SEQ ID NO: 113110 - RNA, 19 nt, Homo sapiens
  misc_RNA (1)...(19): siRNA sense strand
guaguugccuauaacaauc

SEQ ID NO: 113111 - RNA, 19 nt, Homo sapiens
  misc_RNA (1)...(19): siRNA sense strand
ggaaugggauaaauuugac

SEQ ID NO: 113112 - RNA, 19 nt, Homo sapiens
  misc_RNA (1)...(19): siRNA sense strand
caacucaggagauuaugaa

SEQ ID NO: 113113 - RNA, 19 nt, Homo sapiens
  misc_RNA (1)...(19): siRNA sense strand
aagcaaagcaggacuguga

SEQ ID NO: 113114 - RNA, 19 nt, Homo sapiens
  misc_RNA (1)...(19): siRNA sense strand
aacaggcuaucaagaauuu

SEQ ID NO: 113115 - RNA, 19 nt, Homo sapiens
  misc_RNA (1)...(19): siRNA sense strand
gaacuggaauagugcuuuu

SEQ ID NO: 113116 - RNA, 19 nt, Homo sapiens
  misc_RNA (1)...(19): siRNA sense strand
guaaauacagcgaaugcuu

SEQ ID NO: 113117 - RNA, 19 nt, Homo sapiens
  misc_RNA (1)...(19): siRNA sense strand
acuagacuccuuaaucuua

SEQ ID NO: 113118 - RNA, 19 nt, Homo sapiens
  misc_RNA (1)...(19): siRNA sense strand
gauauaaagaguuggguau

SEQ ID NO: 113119 - RNA, 19 nt, Homo sapiens
  misc_RNA (1)...(19): siRNA sense strand
cagcgaaugcuuaaagauu

SEQ ID NO: 113120 - RNA, 19 nt, Homo sapiens
  misc_RNA (1)...(19): siRNA sense strand
gaagaaggaaaucaaugug

SEQ ID NO: 113121 - RNA, 19 nt, Homo sapiens
  misc_RNA (1)...(19): siRNA sense strand
gcuagcaaaugacaguguu

SEQ ID NO: 113122 - RNA, 19 nt, Homo sapiens
  misc_RNA (1)...(19): siRNA sense strand
auaaugauuuggccaagaa

SEQ ID NO: 113123 - RNA, 19 nt, Homo sapiens
  misc_RNA (1)...(19): siRNA sense strand
cucaggagauuaugaagaa

SEQ ID NO: 113124 - RNA, 19 nt, Homo sapiens
  misc_RNA (1)...(19): siRNA sense strand
gggaagcuacagaagauuu

SEQ ID NO: 113125 - RNA, 19 nt, Homo sapiens
  misc_RNA (1)...(19): siRNA sense strand
gcucauaaaggacucaaga

SEQ ID NO: 113126 - RNA, 19 nt, Homo sapiens
  misc_RNA (1)...(19): siRNA sense strand
auaaagacgcccucaguaa

SEQ ID NO: 113127 - RNA, 19 nt, Homo sapiens
  misc_RNA (1)...(19): siRNA sense strand
gaaaaggucuuggaguuag

SEQ ID NO: 113128 - RNA, 19 nt, Homo sapiens
  misc_RNA (1)...(19): siRNA sense strand
gagguaacuagacuccuua

SEQ ID NO: 113129 - RNA, 19 nt, Homo sapiens
  misc_RNA (1)...(19): siRNA sense strand
aaaguuauccuacuagauc

SEQ ID NO: 113130 - RNA, 19 nt, Homo sapiens
  misc_RNA (1)...(19): siRNA sense strand
uauaaagaguuggguauca

SEQ ID NO: 113131 - RNA, 19 nt, Homo sapiens
  misc_RNA (1)...(19): siRNA sense strand
gugaaagccuucuauagac

SEQ ID NO: 113132 - RNA, 19 nt, Homo sapiens
  misc_RNA (1)...(19): siRNA sense strand
ggaaugugccauauauaca

SEQ ID NO: 113133 - RNA, 19 nt, Homo sapiens
  misc_RNA (1)...(19): siRNA sense strand
gacuccagcuagcaaauga

SEQ ID NO: 113134 - RNA, 19 nt, Homo sapiens
  misc_RNA (1)...(19): siRNA sense strand
ugaagaagcagugauguau

SEQ ID NO: 113135 - RNA, 19 nt, Homo sapiens
  misc_RNA (1)...(19): siRNA sense strand
aagacgcccucaguaaaua

SEQ ID NO: 113136 - RNA, 19 nt, Homo sapiens
  misc_RNA (1)...(19): siRNA sense strand
cagaagauuugaguaaagu

SEQ ID NO: 113137 - RNA, 19 nt, Homo sapiens
  misc_RNA (1)...(19): siRNA sense strand
cauugaacaucuagauuuc

SEQ ID NO: 113138 - RNA, 19 nt, Homo sapiens
  misc_RNA (1)...(19): siRNA sense strand
gcuacuacauauaaacauc

SEQ ID NO: 113139 - RNA, 19 nt, Homo sapiens
  misc_RNA (1)...(19): siRNA sense strand
cagcaccauucaacaaaga

SEQ ID NO: 113140 - RNA, 19 nt, Homo sapiens
  misc_RNA (1)...(19): siRNA sense strand
uauaaagacgcccucagua

SEQ ID NO: 113141 - RNA, 19 nt, Homo sapiens
  misc_RNA (1)...(19): siRNA sense strand
ggagaaggaauguuuaaaa

SEQ ID NO: 113142 - RNA, 19 nt, Homo sapiens
  misc_RNA (1)...(19): siRNA sense strand
gaucuggugaggaaggaua

SEQ ID NO: 113143 - RNA, 19 nt, Homo sapiens
  misc_RNA (1)...(19): siRNA sense strand
gacagcaccauucaacaaa

SEQ ID NO: 113144 - RNA, 19 nt, Homo sapiens
  misc_RNA (1)...(19): siRNA sense strand
ggauaagacagcaccauuc

SEQ ID NO: 113145 - RNA, 19 nt, Homo sapiens
  misc_RNA (1)...(19): siRNA sense strand
ggacugugaucaggcacuu

SEQ ID NO: 113146 - RNA, 19 nt, Homo sapiens
  misc_RNA (1)...(19): siRNA sense strand
gauggccuaugaaacucua

SEQ ID NO: 113147 - RNA, 19 nt, Homo sapiens
  misc_RNA (1)...(19): siRNA sense strand
cuaugaauuuggucagauu

SEQ ID NO: 113148 - RNA, 19 nt, Homo sapiens
  misc_RNA (1)...(19): siRNA sense strand
cagaagacccugagaaacu

SEQ ID NO: 113149 - RNA, 19 nt, Homo sapiens
  misc_RNA (1)...(19): siRNA sense strand
uaacaggcuaucaagaauu

SEQ ID NO: 113150 - RNA, 19 nt, Homo sapiens
  misc_RNA (1)...(19): siRNA sense strand
uuaacaggcuaucaagaau

SEQ ID NO: 113151 - RNA, 19 nt, Homo sapiens
  misc_RNA (1)...(19): siRNA sense strand
gcagaaagguuuaagauga

SEQ ID NO: 113152 - RNA, 19 nt, Homo sapiens
  misc_RNA (1)...(19): siRNA sense strand
gaagugaaauugcagauga

SEQ ID NO: 113153 - RNA, 19 nt, Homo sapiens
  misc_RNA (1)...(19): siRNA sense strand
ucaaacagcugucuucaug

SEQ ID NO: 113154 - RNA, 19 nt, Homo sapiens
  misc_RNA (1)...(19): siRNA sense strand
ggaaaucaauguguaaaug

SEQ ID NO: 113155 - RNA, 19 nt, Homo sapiens
  misc_RNA (1)...(19): siRNA sense strand
aagaagcagugauguauua

SEQ ID NO: 113156 - RNA, 19 nt, Homo sapiens
  misc_RNA (1)...(19): siRNA sense strand
guuagaaccuggaaacgua

SEQ ID NO: 113157 - RNA, 19 nt, Homo sapiens
  misc_RNA (1)...(19): siRNA sense strand
uaaggaaugugccauauau

SEQ ID NO: 113158 - RNA, 19 nt, Homo sapiens
  misc_RNA (1)...(19): siRNA sense strand
gggagaagcugucaccuau

SEQ ID NO: 113159 - RNA, 19 nt, Homo sapiens
  misc_RNA (1)...(19): siRNA sense strand
aaacagcugucuucaugua

SEQ ID NO: 113160 - RNA, 19 nt, Homo sapiens
  misc_RNA (1)...(19): siRNA sense strand
gagaagcugucaccuauuc

SEQ ID NO: 113161 - RNA, 19 nt, Homo sapiens
  misc_RNA (1)...(19): siRNA sense strand
uuacagaacuggaauagug

SEQ ID NO: 113162 - RNA, 19 nt, Homo sapiens
  misc_RNA (1)...(19): siRNA sense strand
gaagauggcgguggagaua

SEQ ID NO: 113163 - RNA, 19 nt, Homo sapiens
  misc_RNA (1)...(19): siRNA sense strand
ggaaagcuuauguggauua

SEQ ID NO: 113164 - RNA, 19 nt, Homo sapiens
  misc_RNA (1)...(19): siRNA sense strand
uaacuagacuccuuaaucu

SEQ ID NO: 113165 - RNA, 19 nt, Homo sapiens
  misc_RNA (1)...(19): siRNA sense strand
uaacagggcucuggaacuu

SEQ ID NO: 113166 - RNA, 19 nt, Homo sapiens
  misc_RNA (1)...(19): siRNA sense strand
caccaaagauuauccauca

SEQ ID NO: 113167 - RNA, 19 nt, Homo sapiens
  misc_RNA (1)...(19): siRNA sense strand
caaagauuauccaucauug

SEQ ID NO: 113168 - RNA, 19 nt, Homo sapiens
  misc_RNA (1)...(19): siRNA sense strand
ccacuguaguugccuauaa

SEQ ID NO: 113169 - RNA, 19 nt, Homo sapiens
  misc_RNA (1)...(19): siRNA sense strand
guaaaguacuagauguuga

SEQ ID NO: 113170 - RNA, 19 nt, Homo sapiens
  misc_RNA (1)...(19): siRNA sense strand
caaucgagcucaagcagaa

SEQ ID NO: 113171 - RNA, 19 nt, Homo sapiens
  misc_RNA (1)...(19): siRNA sense strand
agaaggaaaucaaugugua

SEQ ID NO: 113172 - RNA, 19 nt, Homo sapiens
  misc_RNA (1)...(19): siRNA sense strand
aagaugauguugacacuaa

SEQ ID NO: 113173 - RNA, 19 nt, Homo sapiens
  misc_RNA (1)...(19): siRNA sense strand
gaguaaagcagaaagguuu

SEQ ID NO: 113174 - RNA, 19 nt, Homo sapiens
  misc_RNA (1)...(19): siRNA sense strand
gaaggaaaucaauguguaa

SEQ ID NO: 113175 - RNA, 19 nt, Homo sapiens
  misc_RNA (1)...(19): siRNA sense strand
caaauagagcagcauguua

SEQ ID NO: 113176 - RNA, 19 nt, Homo sapiens
  misc_RNA (1)...(19): siRNA sense strand
uaaauacagcgaaugcuua

SEQ ID NO: 113177 - RNA, 19 nt, Homo sapiens
  misc_RNA (1)...(19): siRNA sense strand
gcagaaaucaaauuacaga

SEQ ID NO: 113178 - RNA, 19 nt, Homo sapiens
  misc_RNA (1)...(19): siRNA sense strand
ugucagagguugaaagaga

SEQ ID NO: 113179 - RNA, 19 nt, Homo sapiens
  misc_RNA (1)...(19): siRNA sense strand
ggaaaaggaugguuauuca

SEQ ID NO: 113180 - RNA, 19 nt, Homo sapiens
  misc_RNA (1)...(19): siRNA sense strand
uaucagcgcuucccacugu

SEQ ID NO: 113181 - RNA, 19 nt, Homo sapiens
  misc_RNA (1)...(19): siRNA sense strand
uaaagacgcccucaguaaa

SEQ ID NO: 113182 - RNA, 19 nt, Homo sapiens
  misc_RNA (1)...(19): siRNA sense strand
ggaagaaggaaaucaaugu

SEQ ID NO: 113183 - RNA, 19 nt, Homo sapiens
  misc_RNA (1)...(19): siRNA sense strand
ucaugaaacugagacauuu

SEQ ID NO: 113184 - RNA, 19 nt, Homo sapiens
  misc_RNA (1)...(19): siRNA sense strand
cauaaaggacucaagaauu

SEQ ID NO: 113185 - RNA, 19 nt, Homo sapiens
  misc_RNA (1)...(19): siRNA sense strand
gaagcagugauguauuaua

SEQ ID NO: 113186 - RNA, 19 nt, Homo sapiens
  misc_RNA (1)...(19): siRNA sense strand
gaaggaaaauugagauuca

SEQ ID NO: 113187 - RNA, 19 nt, Homo sapiens
  misc_RNA (1)...(19): siRNA sense strand
cuacagaagauuugaguaa

SEQ ID NO: 113188 - RNA, 19 nt, Homo sapiens
  misc_RNA (1)...(19): siRNA sense strand
gaagaagcagugauguauu

SEQ ID NO: 113189 - RNA, 19 nt, Homo sapiens
  misc_RNA (1)...(19): siRNA sense strand
gaagauauacaggcccuaa

SEQ ID NO: 113190 - RNA, 19 nt, Homo sapiens
  misc_RNA (1)...(19): siRNA sense strand
gaacgugaaagccuucuau

SEQ ID NO: 113191 - RNA, 19 nt, Homo sapiens
  misc_RNA (1)...(19): siRNA sense strand
cagcaggucuaacugagaa

SEQ ID NO: 113192 - RNA, 19 nt, Homo sapiens
  misc_RNA (1)...(19): siRNA sense strand
cagaaaagcuuaauugauc

SEQ ID NO: 113193 - RNA, 19 nt, Homo sapiens
  misc_RNA (1)...(19): siRNA sense strand
agcgaaugcuuaaagauua

SEQ ID NO: 113194 - RNA, 19 nt, Homo sapiens
  misc_RNA (1)...(19): siRNA sense strand
ggagcuggauggaccaaau

SEQ ID NO: 113195 - RNA, 19 nt, Homo sapiens
  misc_RNA (1)...(19): siRNA sense strand
guaacuagacuccuuaauc

SEQ ID NO: 113196 - RNA, 19 nt, Homo sapiens
  misc_RNA (1)...(19): siRNA sense strand
gaacuucauccauucucua

SEQ ID NO: 113197 - RNA, 19 nt, Homo sapiens
  misc_RNA (1)...(19): siRNA sense strand
caaguauuauugaggcaaa

SEQ ID NO: 113198 - RNA, 19 nt, Homo sapiens
  misc_RNA (1)...(19): siRNA sense strand
gaaagcuuauguggauuau

SEQ ID NO: 113199 - RNA, 19 nt, Homo sapiens
  misc_RNA (1)...(19): siRNA sense strand
ugggaaagcuuauguggau

SEQ ID NO: 113200 - RNA, 19 nt, Homo sapiens
  misc_RNA (1)...(19): siRNA sense strand
gauaaugauuuggccaaga

SEQ ID NO: 113201 - RNA, 19 nt, Homo sapiens
  misc_RNA (1)...(19): siRNA sense strand
gauaagacagcaccauuca

SEQ ID NO: 113202 - RNA, 19 nt, Homo sapiens
  misc_RNA (1)...(19): siRNA sense strand
gaaugugccauauauacaa

SEQ ID NO: 113203 - RNA, 19 nt, Homo sapiens
  misc_RNA (1)...(19): siRNA sense strand
guuaacaggcuaucaagaa

SEQ ID NO: 113204 - RNA, 19 nt, Homo sapiens
  misc_RNA (1)...(19): siRNA sense strand
ccauugaacaucuagauuu

SEQ ID NO: 113205 - RNA, 19 nt, Homo sapiens
  misc_RNA (1)...(19): siRNA sense strand
ccaaagauuauccaucauu

SEQ ID NO: 113206 - RNA, 19 nt, Homo sapiens
  misc_RNA (1)...(19): siRNA sense strand
cagaaagguuuaagaugau

SEQ ID NO: 113207 - RNA, 19 nt, Homo sapiens
  misc_RNA (1)...(19): siRNA sense strand
cgugaaagccuucuauaga

SEQ ID NO: 113208 - RNA, 19 nt, Homo sapiens
  misc_RNA (1)...(19): siRNA sense strand
caauaaggaaugugccaua

SEQ ID NO: 113209 - RNA, 19 nt, Homo sapiens
  misc_RNA (1)...(19): siRNA sense strand
gcaaaugacaguguuaaca

SEQ ID NO: 113210 - RNA, 19 nt, Homo sapiens
  misc_RNA (1)...(19): siRNA sense strand
guaguugccuauaacaauc

SEQ ID NO: 113211 - RNA, 19 nt, Homo sapiens
  misc_RNA (1)...(19): siRNA sense strand
ggaaugggauaaauuugac

SEQ ID NO: 113212 - RNA, 19 nt, Homo sapiens
  misc_RNA (1)...(19): siRNA sense strand
caacucaggagauuaugaa

SEQ ID NO: 113213 - RNA, 19 nt, Homo sapiens
  misc_RNA (1)...(19): siRNA sense strand
aagcaaagcaggacuguga

SEQ ID NO: 113214 - RNA, 19 nt, Homo sapiens
  misc_RNA (1)...(19): siRNA sense strand
aacaggcuaucaagaauuu

SEQ ID NO: 113215 - RNA, 19 nt, Homo sapiens
  misc_RNA (1)...(19): siRNA sense strand
gaacuggaauagugcuuuu

SEQ ID NO: 113216 - RNA, 19 nt, Homo sapiens
  misc_RNA (1)...(19): siRNA sense strand
guaaauacagcgaaugcuu

SEQ ID NO: 113217 - RNA, 19 nt, Homo sapiens
  misc_RNA (1)...(19): siRNA sense strand
acuagacuccuuaaucuua

SEQ ID NO: 113218 - RNA, 19 nt, Homo sapiens
  misc_RNA (1)...(19): siRNA sense strand
gauauaaagaguuggguau

SEQ ID NO: 113219 - RNA, 19 nt, Homo sapiens
  misc_RNA (1)...(19): siRNA sense strand
cagcgaaugcuuaaagauu

SEQ ID NO: 113220 - RNA, 19 nt, Homo sapiens
  misc_RNA (1)...(19): siRNA sense strand
gaagaaggaaaucaaugug

SEQ ID NO: 113221 - RNA, 19 nt, Homo sapiens
  misc_RNA (1)...(19): siRNA sense strand
gcuagcaaaugacaguguu

SEQ ID NO: 113222 - RNA, 19 nt, Homo sapiens
  misc_RNA (1)...(19): siRNA sense strand
auaaugauuuggccaagaa

SEQ ID NO: 113223 - RNA, 19 nt, Homo sapiens
  misc_RNA (1)...(19): siRNA sense strand
cucaggagauuaugaagaa

SEQ ID NO: 113224 - RNA, 19 nt, Homo sapiens
  misc_RNA (1)...(19): siRNA sense strand
gggaagcuacagaagauuu

SEQ ID NO: 113225 - RNA, 19 nt, Homo sapiens
  misc_RNA (1)...(19): siRNA sense strand
gcucauaaaggacucaaga

SEQ ID NO: 113226 - RNA, 19 nt, Homo sapiens
  misc_RNA (1)...(19): siRNA sense strand
auaaagacgcccucaguaa

SEQ ID NO: 113227 - RNA, 19 nt, Homo sapiens
  misc_RNA (1)...(19): siRNA sense strand
gaaaaggucuuggaguuag

SEQ ID NO: 113228 - RNA, 19 nt, Homo sapiens
  misc_RNA (1)...(19): siRNA sense strand
gagguaacuagacuccuua

SEQ ID NO: 113229 - RNA, 19 nt, Homo sapiens
  misc_RNA (1)...(19): siRNA sense strand
aaaguuauccuacuagauc

SEQ ID NO: 113230 - RNA, 19 nt, Homo sapiens
  misc_RNA (1)...(19): siRNA sense strand
uauaaagaguuggguauca

SEQ ID NO: 113231 - RNA, 19 nt, Homo sapiens
  misc_RNA (1)...(19): siRNA sense strand
gugaaagccuucuauagac

SEQ ID NO: 113232 - RNA, 19 nt, Homo sapiens
  misc_RNA (1)...(19): siRNA sense strand
ggaaugugccauauauaca

SEQ ID NO: 113233 - RNA, 19 nt, Homo sapiens
  misc_RNA (1)...(19): siRNA sense strand
gacuccagcuagcaaauga

SEQ ID NO: 113234 - RNA, 19 nt, Homo sapiens
  misc_RNA (1)...(19): siRNA sense strand
ugaagaagcagugauguau

SEQ ID NO: 113235 - RNA, 19 nt, Homo sapiens
  misc_RNA (1)...(19): siRNA sense strand
aagacgcccucaguaaaua

SEQ ID NO: 113236 - RNA, 19 nt, Homo sapiens
  misc_RNA (1)...(19): siRNA sense strand
cagaagauuugaguaaagu

SEQ ID NO: 113237 - RNA, 19 nt, Homo sapiens
  misc_RNA (1)...(19): siRNA sense strand
cauugaacaucuagauuuc

SEQ ID NO: 113238 - RNA, 19 nt, Homo sapiens
  misc_RNA (1)...(19): siRNA sense strand
gcuacuacauauaaacauc

SEQ ID NO: 113239 - RNA, 19 nt, Homo sapiens
  misc_RNA (1)...(19): siRNA sense strand
cagcaccauucaacaaaga

SEQ ID NO: 113240 - RNA, 19 nt, Homo sapiens
  misc_RNA (1)...(19): siRNA sense strand
uauaaagacgcccucagua

SEQ ID NO: 113241 - RNA, 19 nt, Homo sapiens
  misc_RNA (1)...(19): siRNA sense strand
ggagaaggaauguuuaaaa

SEQ ID NO: 113242 - RNA, 19 nt, Homo sapiens
  misc_RNA (1)...(19): siRNA sense strand
gaucuggugaggaaggaua

SEQ ID NO: 113243 - RNA, 19 nt, Homo sapiens
  misc_RNA (1)...(19): siRNA sense strand
gacagcaccauucaacaaa

SEQ ID NO: 113244 - RNA, 19 nt, Homo sapiens
  misc_RNA (1)...(19): siRNA sense strand
ggauaagacagcaccauuc

SEQ ID NO: 113245 - RNA, 19 nt, Homo sapiens
  misc_RNA (1)...(19): siRNA sense strand
ggacugugaucaggcacuu

SEQ ID NO: 113246 - RNA, 19 nt, Homo sapiens
  misc_RNA (1)...(19): siRNA sense strand
gauggccuaugaaacucua

SEQ ID NO: 113247 - RNA, 19 nt, Homo sapiens
  misc_RNA (1)...(19): siRNA sense strand
cuaugaauuuggucagauu

SEQ ID NO: 113248 - RNA, 19 nt, Homo sapiens
  misc_RNA (1)...(19): siRNA sense strand
cagaagacccugagaaacu

SEQ ID NO: 113249 - RNA, 19 nt, Homo sapiens
  misc_RNA (1)...(19): siRNA sense strand
uaacaggcuaucaagaauu

SEQ ID NO: 113250 - RNA, 19 nt, Homo sapiens
  misc_RNA (1)...(19): siRNA sense strand
uuaacaggcuaucaagaau

SEQ ID NO: 113251 - RNA, 19 nt, Homo sapiens
  misc_RNA (1)...(19): siRNA sense strand
gaaauucaccuucgauguu

SEQ ID NO: 113252 - RNA, 19 nt, Homo sapiens
  misc_RNA (1)...(19): siRNA sense strand
cagaagacaucccacgauu

SEQ ID NO: 113253 - RNA, 19 nt, Homo sapiens
  misc_RNA (1)...(19): siRNA sense strand
gugaagauccagauucuaa

SEQ ID NO: 113254 - RNA, 19 nt, Homo sapiens
  misc_RNA (1)...(19): siRNA sense strand
gaaugaaccuaaggagaug

SEQ ID NO: 113255 - RNA, 19 nt, Homo sapiens
  misc_RNA (1)...(19): siRNA sense strand
gaagacaucccacgauuac

SEQ ID NO: 113256 - RNA, 19 nt, Homo sapiens
  misc_RNA (1)...(19): siRNA sense strand
acaaggagguguccacugu

SEQ ID NO: 113257 - RNA, 19 nt, Homo sapiens
  misc_RNA (1)...(19): siRNA sense strand
caccuucgauguugagaaa

SEQ ID NO: 113258 - RNA, 19 nt, Homo sapiens
  misc_RNA (1)...(19): siRNA sense strand
caggaacacugccuacuuc

SEQ ID NO: 113259 - RNA, 19 nt, Homo sapiens
  misc_RNA (1)...(19): siRNA sense strand
cuaaggagaugcugacucu

SEQ ID NO: 113260 - RNA, 19 nt, Homo sapiens
  misc_RNA (1)...(19): siRNA sense strand
gggcugagcguguuguuau

SEQ ID NO: 113261 - RNA, 19 nt, Homo sapiens
  misc_RNA (1)...(19): siRNA sense strand
ggaaauucaccuucgaugu

SEQ ID NO: 113262 - RNA, 19 nt, Homo sapiens
  misc_RNA (1)...(19): siRNA sense strand
gcaagcacacgcccaacuu

SEQ ID NO: 113263 - RNA, 19 nt, Homo sapiens
  misc_RNA (1)...(19): siRNA sense strand
aaauucaccuucgauguug

SEQ ID NO: 113264 - RNA, 19 nt, Homo sapiens
  misc_RNA (1)...(19): siRNA sense strand
agaagacaucccacgauua

SEQ ID NO: 113265 - RNA, 19 nt, Homo sapiens
  misc_RNA (1)...(19): siRNA sense strand
ggaaccacaugggcaggaa

SEQ ID NO: 113266 - RNA, 19 nt, Homo sapiens
  misc_RNA (1)...(19): siRNA sense strand
agaaugaaccuaaggagau

SEQ ID NO: 113267 - RNA, 19 nt, Homo sapiens
  misc_RNA (1)...(19): siRNA sense strand
ucuuuggccuccagguuua

SEQ ID NO: 113268 - RNA, 19 nt, Homo sapiens
  misc_RNA (1)...(19): siRNA sense strand
cgacaucacucugcagcau

SEQ ID NO: 113269 - RNA, 19 nt, Homo sapiens
  misc_RNA (1)...(19): siRNA sense strand
gcagaagacaucccacgau

SEQ ID NO: 113270 - RNA, 19 nt, Homo sapiens
  misc_RNA (1)...(19): siRNA sense strand
aaggagaugcugacucuaa

SEQ ID NO: 113271 - RNA, 19 nt, Homo sapiens
  misc_RNA (1)...(19): siRNA sense strand
uggaaucgcuucagcuucu

SEQ ID NO: 113272 - RNA, 19 nt, Homo sapiens
  misc_RNA (1)...(19): siRNA sense strand
caagcacacgcccaacuuu

SEQ ID NO: 113273 - RNA, 19 nt, Homo sapiens
  misc_RNA (1)...(19): siRNA sense strand
ggucuccaguagucucuga

SEQ ID NO: 113274 - RNA, 19 nt, Homo sapiens
  misc_RNA (1)...(19): siRNA sense strand
gagaugcugacucuaagug

SEQ ID NO: 113275 - RNA, 19 nt, Homo sapiens
  misc_RNA (1)...(19): siRNA sense strand
cugcugagccucuuucugu

SEQ ID NO: 113276 - RNA, 19 nt, Homo sapiens
  misc_RNA (1)...(19): siRNA sense strand
gccuccagguuuaugauga

SEQ ID NO: 113277 - RNA, 19 nt, Homo sapiens
  misc_RNA (1)...(19): siRNA sense strand
ccuccagguuuaugaugaa

SEQ ID NO: 113278 - RNA, 19 nt, Homo sapiens
  misc_RNA (1)...(19): siRNA sense strand
aaggagguguccacuguuc

SEQ ID NO: 113279 - RNA, 19 nt, Homo sapiens
  misc_RNA (1)...(19): siRNA sense strand
aggccgagcuggauaaacu

SEQ ID NO: 113280 - RNA, 19 nt, Homo sapiens
  misc_RNA (1)...(19): siRNA sense strand
guaccuggucucuccuuug

SEQ ID NO: 113281 - RNA, 19 nt, Homo sapiens
  misc_RNA (1)...(19): siRNA sense strand
gaagauccagauucuaagc

SEQ ID NO: 113282 - RNA, 19 nt, Homo sapiens
  misc_RNA (1)...(19): siRNA sense strand
caaggugaagauccagauu

SEQ ID NO: 113283 - RNA, 19 nt, Homo sapiens
  misc_RNA (1)...(19): siRNA sense strand
gggaauugcugggcuuuug

SEQ ID NO: 113284 - RNA, 19 nt, Homo sapiens
  misc_RNA (1)...(19): siRNA sense strand
uaccuggucucuccuuugg

SEQ ID NO: 113285 - RNA, 19 nt, Homo sapiens
  misc_RNA (1)...(19): siRNA sense strand
ccaucgaccugcagaagac

SEQ ID NO: 113286 - RNA, 19 nt, Homo sapiens
  misc_RNA (1)...(19): siRNA sense strand
gagugcagcugagcgacau

SEQ ID NO: 113287 - RNA, 19 nt, Homo sapiens
  misc_RNA (1)...(19): siRNA sense strand
gcgagagaguggccaagcu

SEQ ID NO: 113288 - RNA, 19 nt, Homo sapiens
  misc_RNA (1)...(19): siRNA sense strand
ggucuuuggccuccagguu

SEQ ID NO: 113289 - RNA, 19 nt, Homo sapiens
  misc_RNA (1)...(19): siRNA sense strand
ggaacacugccuacuucug

SEQ ID NO: 113290 - RNA, 19 nt, Homo sapiens
  misc_RNA (1)...(19): siRNA sense strand
acaggaacacugccuacuu

SEQ ID NO: 113291 - RNA, 19 nt, Homo sapiens
  misc_RNA (1)...(19): siRNA sense strand
cuuuccaccugcagaauga

SEQ ID NO: 113292 - RNA, 19 nt, Homo sapiens
  misc_RNA (1)...(19): siRNA sense strand
agauccagauucuaagcaa

SEQ ID NO: 113293 - RNA, 19 nt, Homo sapiens
  misc_RNA (1)...(19): siRNA sense strand
uggccaagcucguguucca

SEQ ID NO: 113294 - RNA, 19 nt, Homo sapiens
  misc_RNA (1)...(19): siRNA sense strand
agcgagaacagcucaauga

SEQ ID NO: 113295 - RNA, 19 nt, Homo sapiens
  misc_RNA (1)...(19): siRNA sense strand
ccuucgauguugagaaauc

SEQ ID NO: 113296 - RNA, 19 nt, Homo sapiens
  misc_RNA (1)...(19): siRNA sense strand
gcugagccucuuucuguca

SEQ ID NO: 113297 - RNA, 19 nt, Homo sapiens
  misc_RNA (1)...(19): siRNA sense strand
ggaaucgcuucagcuucug

SEQ ID NO: 113298 - RNA, 19 nt, Homo sapiens
  misc_RNA (1)...(19): siRNA sense strand
ggagaugcugacucuaagu

SEQ ID NO: 113299 - RNA, 19 nt, Homo sapiens
  misc_RNA (1)...(19): siRNA sense strand
uccauccgcuuccuguuca

SEQ ID NO: 113300 - RNA, 19 nt, Homo sapiens
  misc_RNA (1)...(19): siRNA sense strand
gaacagaacucuaacaaca

SEQ ID NO: 113301 - RNA, 19 nt, Homo sapiens
  misc_RNA (1)...(19): siRNA sense strand
gcaaagcacuuauggaaug

SEQ ID NO: 113302 - RNA, 19 nt, Homo sapiens
  misc_RNA (1)...(19): siRNA sense strand
ggacugaugucaaggcaua

SEQ ID NO: 113303 - RNA, 19 nt, Homo sapiens
  misc_RNA (1)...(19): siRNA sense strand
uaagaaggcugaauaacaa

SEQ ID NO: 113304 - RNA, 19 nt, Homo sapiens
  misc_RNA (1)...(19): siRNA sense strand
gaacuugguuguagagcua

SEQ ID NO: 113305 - RNA, 19 nt, Homo sapiens
  misc_RNA (1)...(19): siRNA sense strand
ggaagcagcucaucacugu

SEQ ID NO: 113306 - RNA, 19 nt, Homo sapiens
  misc_RNA (1)...(19): siRNA sense strand
ccucagaacuugcaacuuu

SEQ ID NO: 113307 - RNA, 19 nt, Homo sapiens
  misc_RNA (1)...(19): siRNA sense strand
ggacggaacugaagagauc

SEQ ID NO: 113308 - RNA, 19 nt, Homo sapiens
  misc_RNA (1)...(19): siRNA sense strand
gcacaaagccaccucuuga

SEQ ID NO: 113309 - RNA, 19 nt, Homo sapiens
  misc_RNA (1)...(19): siRNA sense strand
ggacaucgcugagaucaca

SEQ ID NO: 113310 - RNA, 19 nt, Homo sapiens
  misc_RNA (1)...(19): siRNA sense strand
gagaagcucugcaagaauc

SEQ ID NO: 113311 - RNA, 19 nt, Homo sapiens
  misc_RNA (1)...(19): siRNA sense strand
gaagccagaugaugaugaa

SEQ ID NO: 113312 - RNA, 19 nt, Homo sapiens
  misc_RNA (1)...(19): siRNA sense strand
gaccagauaugcaguuaga

SEQ ID NO: 113313 - RNA, 19 nt, Homo sapiens
  misc_RNA (1)...(19): siRNA sense strand
gaauggaaccuuugacuau

SEQ ID NO: 113314 - RNA, 19 nt, Homo sapiens
  misc_RNA (1)...(19): siRNA sense strand
gcaaaaccaugucuauuaa

SEQ ID NO: 113315 - RNA, 19 nt, Homo sapiens
  misc_RNA (1)...(19): siRNA sense strand
ggaauacacugagcagaga

SEQ ID NO: 113316 - RNA, 19 nt, Homo sapiens
  misc_RNA (1)...(19): siRNA sense strand
ggaaagaagucacauuagc

SEQ ID NO: 113317 - RNA, 19 nt, Homo sapiens
  misc_RNA (1)...(19): siRNA sense strand
gagagaauauggagagaca

SEQ ID NO: 113318 - RNA, 19 nt, Homo sapiens
  misc_RNA (1)...(19): siRNA sense strand
gcacaggauuggugacuca

SEQ ID NO: 113319 - RNA, 19 nt, Homo sapiens
  misc_RNA (1)...(19): siRNA sense strand
ccaaagagguacugguguu

SEQ ID NO: 113320 - RNA, 19 nt, Homo sapiens
  misc_RNA (1)...(19): siRNA sense strand
gaacuugcaacuuuaauuc

SEQ ID NO: 113321 - RNA, 19 nt, Homo sapiens
  misc_RNA (1)...(19): siRNA sense strand
ggagaaguauggguccuuu

SEQ ID NO: 113322 - RNA, 19 nt, Homo sapiens
  misc_RNA (1)...(19): siRNA sense strand
gaacugaagagaucgaaug

SEQ ID NO: 113323 - RNA, 19 nt, Homo sapiens
  misc_RNA (1)...(19): siRNA sense strand
gauuggcacuguugaagaa

SEQ ID NO: 113324 - RNA, 19 nt, Homo sapiens
  misc_RNA (1)...(19): siRNA sense strand
ccaaggaccagacaaauga

SEQ ID NO: 113325 - RNA, 19 nt, Homo sapiens
  misc_RNA (1)...(19): siRNA sense strand
gaaacuaacugcauuuacc

SEQ ID NO: 113326 - RNA, 19 nt, Homo sapiens
  misc_RNA (1)...(19): siRNA sense strand
ggagauggaugaggacuuc

SEQ ID NO: 113327 - RNA, 19 nt, Homo sapiens
  misc_RNA (1)...(19): siRNA sense strand
aaagcaaacucgauccaaa

SEQ ID NO: 113328 - RNA, 19 nt, Homo sapiens
  misc_RNA (1)...(19): siRNA sense strand
guagugaaguuuacguaug

SEQ ID NO: 113329 - RNA, 19 nt, Homo sapiens
  misc_RNA (1)...(19): siRNA sense strand
gggacaggcugcccuuuga

SEQ ID NO: 113330 - RNA, 19 nt, Homo sapiens
  misc_RNA (1)...(19): siRNA sense strand
gggaugaaccgaaggaauu

SEQ ID NO: 113331 - RNA, 19 nt, Homo sapiens
  misc_RNA (1)...(19): siRNA sense strand
acagugggauggagaagua

SEQ ID NO: 113332 - RNA, 19 nt, Homo sapiens
  misc_RNA (1)...(19): siRNA sense strand
cagcguggauuauaauaug

SEQ ID NO: 113333 - RNA, 19 nt, Homo sapiens
  misc_RNA (1)...(19): siRNA sense strand
cgaacaagaucaaggaaca

SEQ ID NO: 113334 - RNA, 19 nt, Homo sapiens
  misc_RNA (1)...(19): siRNA sense strand
caacaaggcccucaucuac

SEQ ID NO: 113335 - RNA, 19 nt, Homo sapiens
  misc_RNA (1)...(19): siRNA sense strand
gaacacaaugagacgauuu

SEQ ID NO: 113336 - RNA, 19 nt, Homo sapiens
  misc_RNA (1)...(19): siRNA sense strand
caaagcggaugaaaguaga

SEQ ID NO: 113337 - RNA, 19 nt, Homo sapiens
  misc_RNA (1)...(19): siRNA sense strand
aaagaaagauuggcacugu

SEQ ID NO: 113338 - RNA, 19 nt, Homo sapiens
  misc_RNA (1)...(19): siRNA sense strand
ggagaaugcaauccgcuua

SEQ ID NO: 113339 - RNA, 19 nt, Homo sapiens
  misc_RNA (1)...(19): siRNA sense strand
ggaauggaaccuuugacua

SEQ ID NO: 113340 - RNA, 19 nt, Homo sapiens
  misc_RNA (1)...(19): siRNA sense strand
gcgaaggccucagaacuug

SEQ ID NO: 113341 - RNA, 19 nt, Homo sapiens
  misc_RNA (1)...(19): siRNA sense strand
ugacggaacagaacucuaa

SEQ ID NO: 113342 - RNA, 19 nt, Homo sapiens
  misc_RNA (1)...(19): siRNA sense strand
gguggagaauguuaugaaa

SEQ ID NO: 113343 - RNA, 19 nt, Homo sapiens
  misc_RNA (1)...(19): siRNA sense strand
gagaggacaucgcugagau

SEQ ID NO: 113344 - RNA, 19 nt, Homo sapiens
  misc_RNA (1)...(19): siRNA sense strand
ggaagggaauuugcuggaa

SEQ ID NO: 113345 - RNA, 19 nt, Homo sapiens
  misc_RNA (1)...(19): siRNA sense strand
cugaagagaucgaaugaga

SEQ ID NO: 113346 - RNA, 19 nt, Homo sapiens
  misc_RNA (1)...(19): siRNA sense strand
gaaagaagucacauuagca

SEQ ID NO: 113347 - RNA, 19 nt, Homo sapiens
  misc_RNA (1)...(19): siRNA sense strand
gaugaggacuucgauguca

SEQ ID NO: 113348 - RNA, 19 nt, Homo sapiens
  misc_RNA (1)...(19): siRNA sense strand
gcagcaaagucacaauaca

SEQ ID NO: 113349 - RNA, 19 nt, Homo sapiens
  misc_RNA (1)...(19): siRNA sense strand
gaacgucggccguggcuau

SEQ ID NO: 113350 - RNA, 19 nt, Homo sapiens
  misc_RNA (1)...(19): siRNA sense strand
gaagcagccauaauagaaa

SEQ ID NO: 113351 - RNA, 19 nt, Homo sapiens
  misc_RNA (1)...(19): siRNA sense strand
gccauaaggaaucuaaaua

SEQ ID NO: 113352 - RNA, 19 nt, Homo sapiens
  misc_RNA (1)...(19): siRNA sense strand
gaagagaucgaaugagaag

SEQ ID NO: 113353 - RNA, 19 nt, Homo sapiens
  misc_RNA (1)...(19): siRNA sense strand
gaagaugaacucuaugaag

SEQ ID NO: 113354 - RNA, 19 nt, Homo sapiens
  misc_RNA (1)...(19): siRNA sense strand
acaagaggcugaugcuguu

SEQ ID NO: 113355 - RNA, 19 nt, Homo sapiens
  misc_RNA (1)...(19): siRNA sense strand
gaguauuuaucccgcuaua

SEQ ID NO: 113356 - RNA, 19 nt, Homo sapiens
  misc_RNA (1)...(19): siRNA sense strand
ccaguagccucagccauuu

SEQ ID NO: 113357 - RNA, 19 nt, Homo sapiens
  misc_RNA (1)...(19): siRNA sense strand
ggcgacagcuggcagagaa

SEQ ID NO: 113358 - RNA, 19 nt, Homo sapiens
  misc_RNA (1)...(19): siRNA sense strand
gaacauagaaaaccaaaga

SEQ ID NO: 113359 - RNA, 19 nt, Homo sapiens
  misc_RNA (1)...(19): siRNA sense strand
cugaugcuguugcagauua

SEQ ID NO: 113360 - RNA, 19 nt, Homo sapiens
  misc_RNA (1)...(19): siRNA sense strand
gagcacaagcgggcaguua

SEQ ID NO: 113361 - RNA, 19 nt, Homo sapiens
  misc_RNA (1)...(19): siRNA sense strand
gaauauggagagacagaaa

SEQ ID NO: 113362 - RNA, 19 nt, Homo sapiens
  misc_RNA (1)...(19): siRNA sense strand
gaauccaugugcgauguuu

SEQ ID NO: 113363 - RNA, 19 nt, Homo sapiens
  misc_RNA (1)...(19): siRNA sense strand
gcaaagagaagugcgucua

SEQ ID NO: 113364 - RNA, 19 nt, Homo sapiens
  misc_RNA (1)...(19): siRNA sense strand
ugaagcagccauaauagaa

SEQ ID NO: 113365 - RNA, 19 nt, Homo sapiens
  misc_RNA (1)...(19): siRNA sense strand
gaggaagauuggagaaaca

SEQ ID NO: 113366 - RNA, 19 nt, Homo sapiens
  misc_RNA (1)...(19): siRNA sense strand
ggagacagccauaaggaau

SEQ ID NO: 113367 - RNA, 19 nt, Homo sapiens
  misc_RNA (1)...(19): siRNA sense strand
gagacuuacugaacacaau

SEQ ID NO: 113368 - RNA, 19 nt, Homo sapiens
  misc_RNA (1)...(19): siRNA sense strand
ugggaaagaagucacauua

SEQ ID NO: 113369 - RNA, 19 nt, Homo sapiens
  misc_RNA (1)...(19): siRNA sense strand
ggacuucgaugucauuuuc

SEQ ID NO: 113370 - RNA, 19 nt, Homo sapiens
  misc_RNA (1)...(19): siRNA sense strand
gaaguccuguggagaugga

SEQ ID NO: 113371 - RNA, 19 nt, Homo sapiens
  misc_RNA (1)...(19): siRNA sense strand
gaaagucgagagagccaaa

SEQ ID NO: 113372 - RNA, 19 nt, Homo sapiens
  misc_RNA (1)...(19): siRNA sense strand
ccugauuccuccacucuaa

SEQ ID NO: 113373 - RNA, 19 nt, Homo sapiens
  misc_RNA (1)...(19): siRNA sense strand
ugagaacugugacaucaau

SEQ ID NO: 113374 - RNA, 19 nt, Homo sapiens
  misc_RNA (1)...(19): siRNA sense strand
uaugagaacugugacauca

SEQ ID NO: 113375 - RNA, 19 nt, Homo sapiens
  misc_RNA (1)...(19): siRNA sense strand
ccaaaccaguuaccaaucu

SEQ ID NO: 113376 - RNA, 19 nt, Homo sapiens
  misc_RNA (1)...(19): siRNA sense strand
ggaggaagauuggagaaac

SEQ ID NO: 113377 - RNA, 19 nt, Homo sapiens
  misc_RNA (1)...(19): siRNA sense strand
ucaagaagcgggucacaga

SEQ ID NO: 113378 - RNA, 19 nt, Homo sapiens
  misc_RNA (1)...(19): siRNA sense strand
cauaguagcagcaaaguca

SEQ ID NO: 113379 - RNA, 19 nt, Homo sapiens
  misc_RNA (1)...(19): siRNA sense strand
gaauuaauacacacacuca

SEQ ID NO: 113380 - RNA, 19 nt, Homo sapiens
  misc_RNA (1)...(19): siRNA sense strand
aaugaacgcucgcuaucaa

SEQ ID NO: 113381 - RNA, 19 nt, Homo sapiens
  misc_RNA (1)...(19): siRNA sense strand
caaacucgauccaaauacu

SEQ ID NO: 113382 - RNA, 19 nt, Homo sapiens
  misc_RNA (1)...(19): siRNA sense strand
ccaaaccauugaagaagga

SEQ ID NO: 113383 - RNA, 19 nt, Homo sapiens
  misc_RNA (1)...(19): siRNA sense strand
gauuaaacguugccuucau

SEQ ID NO: 113384 - RNA, 19 nt, Homo sapiens
  misc_RNA (1)...(19): siRNA sense strand
cuaagaaggcugaauaaca

SEQ ID NO: 113385 - RNA, 19 nt, Homo sapiens
  misc_RNA (1)...(19): siRNA sense strand
ccggagaucuucgcacaaa

SEQ ID NO: 113386 - RNA, 19 nt, Homo sapiens
  misc_RNA (1)...(19): siRNA sense strand
gaaccgagccagggaagga

SEQ ID NO: 113387 - RNA, 19 nt, Homo sapiens
  misc_RNA (1)...(19): siRNA sense strand
gagggaacuugguuguaga

SEQ ID NO: 113388 - RNA, 19 nt, Homo sapiens
  misc_RNA (1)...(19): siRNA sense strand
aaucggaccugaaguugga

SEQ ID NO: 113389 - RNA, 19 nt, Homo sapiens
  misc_RNA (1)...(19): siRNA sense strand
cagaccagauaugcaguua

SEQ ID NO: 113390 - RNA, 19 nt, Homo sapiens
  misc_RNA (1)...(19): siRNA sense strand
aggagaagcucugcaagaa

SEQ ID NO: 113391 - RNA, 19 nt, Homo sapiens
  misc_RNA (1)...(19): siRNA sense strand
gagaaugaacgcucgcuau

SEQ ID NO: 113392 - RNA, 19 nt, Homo sapiens
  misc_RNA (1)...(19): siRNA sense strand
cuacuuauauccaaaccau

SEQ ID NO: 113393 - RNA, 19 nt, Homo sapiens
  misc_RNA (1)...(19): siRNA sense strand
gcacccaaauugacgucuu

SEQ ID NO: 113394 - RNA, 19 nt, Homo sapiens
  misc_RNA (1)...(19): siRNA sense strand
ggacaggcuggaaaccuuu

SEQ ID NO: 113395 - RNA, 19 nt, Homo sapiens
  misc_RNA (1)...(19): siRNA sense strand
gcaggauggugaagaaagg

SEQ ID NO: 113396 - RNA, 19 nt, Homo sapiens
  misc_RNA (1)...(19): siRNA sense strand
ggcggucccucaucaagaa

SEQ ID NO: 113397 - RNA, 19 nt, Homo sapiens
  misc_RNA (1)...(19): siRNA sense strand
ggagggccuucuugacuca

SEQ ID NO: 113398 - RNA, 19 nt, Homo sapiens
  misc_RNA (1)...(19): siRNA sense strand
ggaaggagacagccauaag

SEQ ID NO: 113399 - RNA, 19 nt, Homo sapiens
  misc_RNA (1)...(19): siRNA sense strand
acaagggaauguugagaga

SEQ ID NO: 113400 - RNA, 19 nt, Homo sapiens
  misc_RNA (1)...(19): siRNA sense strand
gaacagaacucuaacaaca

SEQ ID NO: 113401 - RNA, 19 nt, Homo sapiens
  misc_RNA (1)...(19): siRNA sense strand
gcaaagcacuuauggaaug

SEQ ID NO: 113402 - RNA, 19 nt, Homo sapiens
  misc_RNA (1)...(19): siRNA sense strand
ggacugaugucaaggcaua

SEQ ID NO: 113403 - RNA, 19 nt, Homo sapiens
  misc_RNA (1)...(19): siRNA sense strand
uaagaaggcugaauaacaa

SEQ ID NO: 113404 - RNA, 19 nt, Homo sapiens
  misc_RNA (1)...(19): siRNA sense strand
gaacuugguuguagagcua

SEQ ID NO: 113405 - RNA, 19 nt, Homo sapiens
  misc_RNA (1)...(19): siRNA sense strand
ggaagcagcucaucacugu

SEQ ID NO: 113406 - RNA, 19 nt, Homo sapiens
  misc_RNA (1)...(19): siRNA sense strand
ccucagaacuugcaacuuu

SEQ ID NO: 113407 - RNA, 19 nt, Homo sapiens
  misc_RNA (1)...(19): siRNA sense strand
ggacggaacugaagagauc

SEQ ID NO: 113408 - RNA, 19 nt, Homo sapiens
  misc_RNA (1)...(19): siRNA sense strand
gcacaaagccaccucuuga

SEQ ID NO: 113409 - RNA, 19 nt, Homo sapiens
  misc_RNA (1)...(19): siRNA sense strand
ggacaucgcugagaucaca

SEQ ID NO: 113410 - RNA, 19 nt, Homo sapiens
  misc_RNA (1)...(19): siRNA sense strand
gagaagcucugcaagaauc

SEQ ID NO: 113411 - RNA, 19 nt, Homo sapiens
  misc_RNA (1)...(19): siRNA sense strand
gaagccagaugaugaugaa

SEQ ID NO: 113412 - RNA, 19 nt, Homo sapiens
  misc_RNA (1)...(19): siRNA sense strand
gaccagauaugcaguuaga

SEQ ID NO: 113413 - RNA, 19 nt, Homo sapiens
  misc_RNA (1)...(19): siRNA sense strand
gaauggaaccuuugacuau

SEQ ID NO: 113414 - RNA, 19 nt, Homo sapiens
  misc_RNA (1)...(19): siRNA sense strand
gcaaaaccaugucuauuaa

SEQ ID NO: 113415 - RNA, 19 nt, Homo sapiens
  misc_RNA (1)...(19): siRNA sense strand
ggaauacacugagcagaga

SEQ ID NO: 113416 - RNA, 19 nt, Homo sapiens
  misc_RNA (1)...(19): siRNA sense strand
ggaaagaagucacauuagc

SEQ ID NO: 113417 - RNA, 19 nt, Homo sapiens
  misc_RNA (1)...(19): siRNA sense strand
gagagaauauggagagaca

SEQ ID NO: 113418 - RNA, 19 nt, Homo sapiens
  misc_RNA (1)...(19): siRNA sense strand
gcacaggauuggugacuca

SEQ ID NO: 113419 - RNA, 19 nt, Homo sapiens
  misc_RNA (1)...(19): siRNA sense strand
ccaaagagguacugguguu

SEQ ID NO: 113420 - RNA, 19 nt, Homo sapiens
  misc_RNA (1)...(19): siRNA sense strand
gaacuugcaacuuuaauuc

SEQ ID NO: 113421 - RNA, 19 nt, Homo sapiens
  misc_RNA (1)...(19): siRNA sense strand
ggagaaguauggguccuuu

SEQ ID NO: 113422 - RNA, 19 nt, Homo sapiens
  misc_RNA (1)...(19): siRNA sense strand
gaacugaagagaucgaaug

SEQ ID NO: 113423 - RNA, 19 nt, Homo sapiens
  misc_RNA (1)...(19): siRNA sense strand
gauuggcacuguugaagaa

SEQ ID NO: 113424 - RNA, 19 nt, Homo sapiens
  misc_RNA (1)...(19): siRNA sense strand
ccaaggaccagacaaauga

SEQ ID NO: 113425 - RNA, 19 nt, Homo sapiens
  misc_RNA (1)...(19): siRNA sense strand
gaaacuaacugcauuuacc

SEQ ID NO: 113426 - RNA, 19 nt, Homo sapiens
  misc_RNA (1)...(19): siRNA sense strand
ggagauggaugaggacuuc

SEQ ID NO: 113427 - RNA, 19 nt, Homo sapiens
  misc_RNA (1)...(19): siRNA sense strand
aaagcaaacucgauccaaa

SEQ ID NO: 113428 - RNA, 19 nt, Homo sapiens
  misc_RNA (1)...(19): siRNA sense strand
guagugaaguuuacguaug

SEQ ID NO: 113429 - RNA, 19 nt, Homo sapiens
  misc_RNA (1)...(19): siRNA sense strand
gggacaggcugcccuuuga

SEQ ID NO: 113430 - RNA, 19 nt, Homo sapiens
  misc_RNA (1)...(19): siRNA sense strand
gggaugaaccgaaggaauu

SEQ ID NO: 113431 - RNA, 19 nt, Homo sapiens
  misc_RNA (1)...(19): siRNA sense strand
acagugggauggagaagua

SEQ ID NO: 113432 - RNA, 19 nt, Homo sapiens
  misc_RNA (1)...(19): siRNA sense strand
cagcguggauuauaauaug

SEQ ID NO: 113433 - RNA, 19 nt, Homo sapiens
  misc_RNA (1)...(19): siRNA sense strand
cgaacaagaucaaggaaca

SEQ ID NO: 113434 - RNA, 19 nt, Homo sapiens
  misc_RNA (1)...(19): siRNA sense strand
caacaaggcccucaucuac

SEQ ID NO: 113435 - RNA, 19 nt, Homo sapiens
  misc_RNA (1)...(19): siRNA sense strand
gaacacaaugagacgauuu

SEQ ID NO: 113436 - RNA, 19 nt, Homo sapiens
  misc_RNA (1)...(19): siRNA sense strand
caaagcggaugaaaguaga

SEQ ID NO: 113437 - RNA, 19 nt, Homo sapiens
  misc_RNA (1)...(19): siRNA sense strand
aaagaaagauuggcacugu

SEQ ID NO: 113438 - RNA, 19 nt, Homo sapiens
  misc_RNA (1)...(19): siRNA sense strand
ggagaaugcaauccgcuua

SEQ ID NO: 113439 - RNA, 19 nt, Homo sapiens
  misc_RNA (1)...(19): siRNA sense strand
ggaauggaaccuuugacua

SEQ ID NO: 113440 - RNA, 19 nt, Homo sapiens
  misc_RNA (1)...(19): siRNA sense strand
gcgaaggccucagaacuug

SEQ ID NO: 113441 - RNA, 19 nt, Homo sapiens
  misc_RNA (1)...(19): siRNA sense strand
ugacggaacagaacucuaa

SEQ ID NO: 113442 - RNA, 19 nt, Homo sapiens
  misc_RNA (1)...(19): siRNA sense strand
gguggagaauguuaugaaa

SEQ ID NO: 113443 - RNA, 19 nt, Homo sapiens
  misc_RNA (1)...(19): siRNA sense strand
gagaggacaucgcugagau

SEQ ID NO: 113444 - RNA, 19 nt, Homo sapiens
  misc_RNA (1)...(19): siRNA sense strand
ggaagggaauuugcuggaa

SEQ ID NO: 113445 - RNA, 19 nt, Homo sapiens
  misc_RNA (1)...(19): siRNA sense strand
cugaagagaucgaaugaga

SEQ ID NO: 113446 - RNA, 19 nt, Homo sapiens
  misc_RNA (1)...(19): siRNA sense strand
gaaagaagucacauuagca

SEQ ID NO: 113447 - RNA, 19 nt, Homo sapiens
  misc_RNA (1)...(19): siRNA sense strand
gaugaggacuucgauguca

SEQ ID NO: 113448 - RNA, 19 nt, Homo sapiens
  misc_RNA (1)...(19): siRNA sense strand
gcagcaaagucacaauaca

SEQ ID NO: 113449 - RNA, 19 nt, Homo sapiens
  misc_RNA (1)...(19): siRNA sense strand
gaacgucggccguggcuau

SEQ ID NO: 113450 - RNA, 19 nt, Homo sapiens
  misc_RNA (1)...(19): siRNA sense strand
gaagcagccauaauagaaa

SEQ ID NO: 113451 - RNA, 19 nt, Homo sapiens
  misc_RNA (1)...(19): siRNA sense strand
gccauaaggaaucuaaaua

SEQ ID NO: 113452 - RNA, 19 nt, Homo sapiens
  misc_RNA (1)...(19): siRNA sense strand
gaagagaucgaaugagaag

SEQ ID NO: 113453 - RNA, 19 nt, Homo sapiens
  misc_RNA (1)...(19): siRNA sense strand
gaagaugaacucuaugaag

SEQ ID NO: 113454 - RNA, 19 nt, Homo sapiens
  misc_RNA (1)...(19): siRNA sense strand
acaagaggcugaugcuguu

SEQ ID NO: 113455 - RNA, 19 nt, Homo sapiens
  misc_RNA (1)...(19): siRNA sense strand
gaguauuuaucccgcuaua

SEQ ID NO: 113456 - RNA, 19 nt, Homo sapiens
  misc_RNA (1)...(19): siRNA sense strand
ccaguagccucagccauuu

SEQ ID NO: 113457 - RNA, 19 nt, Homo sapiens
  misc_RNA (1)...(19): siRNA sense strand
ggcgacagcuggcagagaa

SEQ ID NO: 113458 - RNA, 19 nt, Homo sapiens
  misc_RNA (1)...(19): siRNA sense strand
gaacauagaaaaccaaaga

SEQ ID NO: 113459 - RNA, 19 nt, Homo sapiens
  misc_RNA (1)...(19): siRNA sense strand
cugaugcuguugcagauua

SEQ ID NO: 113460 - RNA, 19 nt, Homo sapiens
  misc_RNA (1)...(19): siRNA sense strand
gagcacaagcgggcaguua

SEQ ID NO: 113461 - RNA, 19 nt, Homo sapiens
  misc_RNA (1)...(19): siRNA sense strand
gaauauggagagacagaaa

SEQ ID NO: 113462 - RNA, 19 nt, Homo sapiens
  misc_RNA (1)...(19): siRNA sense strand
gaauccaugugcgauguuu

SEQ ID NO: 113463 - RNA, 19 nt, Homo sapiens
  misc_RNA (1)...(19): siRNA sense strand
gcaaagagaagugcgucua

SEQ ID NO: 113464 - RNA, 19 nt, Homo sapiens
  misc_RNA (1)...(19): siRNA sense strand
ugaagcagccauaauagaa

SEQ ID NO: 113465 - RNA, 19 nt, Homo sapiens
  misc_RNA (1)...(19): siRNA sense strand
gaggaagauuggagaaaca

SEQ ID NO: 113466 - RNA, 19 nt, Homo sapiens
  misc_RNA (1)...(19): siRNA sense strand
ggagacagccauaaggaau

SEQ ID NO: 113467 - RNA, 19 nt, Homo sapiens
  misc_RNA (1)...(19): siRNA sense strand
gagacuuacugaacacaau

SEQ ID NO: 113468 - RNA, 19 nt, Homo sapiens
  misc_RNA (1)...(19): siRNA sense strand
ugggaaagaagucacauua

SEQ ID NO: 113469 - RNA, 19 nt, Homo sapiens
  misc_RNA (1)...(19): siRNA sense strand
ggacuucgaugucauuuuc

SEQ ID NO: 113470 - RNA, 19 nt, Homo sapiens
  misc_RNA (1)...(19): siRNA sense strand
gaaguccuguggagaugga

SEQ ID NO: 113471 - RNA, 19 nt, Homo sapiens
  misc_RNA (1)...(19): siRNA sense strand
gaaagucgagagagccaaa

SEQ ID NO: 113472 - RNA, 19 nt, Homo sapiens
  misc_RNA (1)...(19): siRNA sense strand
ccugauuccuccacucuaa

SEQ ID NO: 113473 - RNA, 19 nt, Homo sapiens
  misc_RNA (1)...(19): siRNA sense strand
ugagaacugugacaucaau

SEQ ID NO: 113474 - RNA, 19 nt, Homo sapiens
  misc_RNA (1)...(19): siRNA sense strand
uaugagaacugugacauca

SEQ ID NO: 113475 - RNA, 19 nt, Homo sapiens
  misc_RNA (1)...(19): siRNA sense strand
ccaaaccaguuaccaaucu

SEQ ID NO: 113476 - RNA, 19 nt, Homo sapiens
  misc_RNA (1)...(19): siRNA sense strand
ggaggaagauuggagaaac

SEQ ID NO: 113477 - RNA, 19 nt, Homo sapiens
  misc_RNA (1)...(19): siRNA sense strand
ucaagaagcgggucacaga

SEQ ID NO: 113478 - RNA, 19 nt, Homo sapiens
  misc_RNA (1)...(19): siRNA sense strand
cauaguagcagcaaaguca

SEQ ID NO: 113479 - RNA, 19 nt, Homo sapiens
  misc_RNA (1)...(19): siRNA sense strand
gaauuaauacacacacuca

SEQ ID NO: 113480 - RNA, 19 nt, Homo sapiens
  misc_RNA (1)...(19): siRNA sense strand
aaugaacgcucgcuaucaa

SEQ ID NO: 113481 - RNA, 19 nt, Homo sapiens
  misc_RNA (1)...(19): siRNA sense strand
caaacucgauccaaauacu

SEQ ID NO: 113482 - RNA, 19 nt, Homo sapiens
  misc_RNA (1)...(19): siRNA sense strand
ccaaaccauugaagaagga

SEQ ID NO: 113483 - RNA, 19 nt, Homo sapiens
  misc_RNA (1)...(19): siRNA sense strand
gauuaaacguugccuucau

SEQ ID NO: 113484 - RNA, 19 nt, Homo sapiens
  misc_RNA (1)...(19): siRNA sense strand
cuaagaaggcugaauaaca

SEQ ID NO: 113485 - RNA, 19 nt, Homo sapiens
  misc_RNA (1)...(19): siRNA sense strand
ccggagaucuucgcacaaa

SEQ ID NO: 113486 - RNA, 19 nt, Homo sapiens
  misc_RNA (1)...(19): siRNA sense strand
gaaccgagccagggaagga

SEQ ID NO: 113487 - RNA, 19 nt, Homo sapiens
  misc_RNA (1)...(19): siRNA sense strand
gagggaacuugguuguaga

SEQ ID NO: 113488 - RNA, 19 nt, Homo sapiens
  misc_RNA (1)...(19): siRNA sense strand
aaucggaccugaaguugga

SEQ ID NO: 113489 - RNA, 19 nt, Homo sapiens
  misc_RNA (1)...(19): siRNA sense strand
cagaccagauaugcaguua

SEQ ID NO: 113490 - RNA, 19 nt, Homo sapiens
  misc_RNA (1)...(19): siRNA sense strand
aggagaagcucugcaagaa

SEQ ID NO: 113491 - RNA, 19 nt, Homo sapiens
  misc_RNA (1)...(19): siRNA sense strand
gagaaugaacgcucgcuau

SEQ ID NO: 113492 - RNA, 19 nt, Homo sapiens
  misc_RNA (1)...(19): siRNA sense strand
cuacuuauauccaaaccau

SEQ ID NO: 113493 - RNA, 19 nt, Homo sapiens
  misc_RNA (1)...(19): siRNA sense strand
gcacccaaauugacgucuu

SEQ ID NO: 113494 - RNA, 19 nt, Homo sapiens
  misc_RNA (1)...(19): siRNA sense strand
ggacaggcuggaaaccuuu

SEQ ID NO: 113495 - RNA, 19 nt, Homo sapiens
  misc_RNA (1)...(19): siRNA sense strand
gcaggauggugaagaaagg

SEQ ID NO: 113496 - RNA, 19 nt, Homo sapiens
  misc_RNA (1)...(19): siRNA sense strand
ggcggucccucaucaagaa

SEQ ID NO: 113497 - RNA, 19 nt, Homo sapiens
  misc_RNA (1)...(19): siRNA sense strand
ggagggccuucuugacuca

SEQ ID NO: 113498 - RNA, 19 nt, Homo sapiens
  misc_RNA (1)...(19): siRNA sense strand
ggaaggagacagccauaag

SEQ ID NO: 113499 - RNA, 19 nt, Homo sapiens
  misc_RNA (1)...(19): siRNA sense strand
acaagggaauguugagaga

SEQ ID NO: 113500 - RNA, 19 nt, Homo sapiens
  misc_RNA (1)...(19): siRNA sense strand
ggaaagaagugaucacaaa

SEQ ID NO: 113501 - RNA, 19 nt, Homo sapiens
  misc_RNA (1)...(19): siRNA sense strand
caacucaccugcauguuua

SEQ ID NO: 113502 - RNA, 19 nt, Homo sapiens
  misc_RNA (1)...(19): siRNA sense strand
ucaaggagcucaccaauga

SEQ ID NO: 113503 - RNA, 19 nt, Homo sapiens
  misc_RNA (1)...(19): siRNA sense strand
gaacaauucuccaaccuau

SEQ ID NO: 113504 - RNA, 19 nt, Homo sapiens
  misc_RNA (1)...(19): siRNA sense strand
gaucacagcucuuaaaauu

SEQ ID NO: 113505 - RNA, 19 nt, Homo sapiens
  misc_RNA (1)...(19): siRNA sense strand
ucauagcggugacugcuua

SEQ ID NO: 113506 - RNA, 19 nt, Homo sapiens
  misc_RNA (1)...(19): siRNA sense strand
gaggagaucacagcucuua

SEQ ID NO: 113507 - RNA, 19 nt, Homo sapiens
  misc_RNA (1)...(19): siRNA sense strand
ggagaucacagcucuuaaa

SEQ ID NO: 113508 - RNA, 19 nt, Homo sapiens
  misc_RNA (1)...(19): siRNA sense strand
gaagugaucacaaagagau

SEQ ID NO: 113509 - RNA, 19 nt, Homo sapiens
  misc_RNA (1)...(19): siRNA sense strand
gagaugaucgugaccaaga

SEQ ID NO: 113510 - RNA, 19 nt, Homo sapiens
  misc_RNA (1)...(19): siRNA sense strand
ugaacuccuugcauaagua

SEQ ID NO: 113511 - RNA, 19 nt, Homo sapiens
  misc_RNA (1)...(19): siRNA sense strand
ggaacaauucuccaaccua

SEQ ID NO: 113512 - RNA, 19 nt, Homo sapiens
  misc_RNA (1)...(19): siRNA sense strand
gaaagaagugaucacaaag

SEQ ID NO: 113513 - RNA, 19 nt, Homo sapiens
  misc_RNA (1)...(19): siRNA sense strand
gcaaaggaaagaagugauc

SEQ ID NO: 113514 - RNA, 19 nt, Homo sapiens
  misc_RNA (1)...(19): siRNA sense strand
uaaguacaauccauuugca

SEQ ID NO: 113515 - RNA, 19 nt, Homo sapiens
  misc_RNA (1)...(19): siRNA sense strand
gcaaaagcuuuccuugaug

SEQ ID NO: 113516 - RNA, 19 nt, Homo sapiens
  misc_RNA (1)...(19): siRNA sense strand
gaacuccuugcauaaguau

SEQ ID NO: 113517 - RNA, 19 nt, Homo sapiens
  misc_RNA (1)...(19): siRNA sense strand
acaacucaccugcauguuu

SEQ ID NO: 113518 - RNA, 19 nt, Homo sapiens
  misc_RNA (1)...(19): siRNA sense strand
caaauccucauccucaguu

SEQ ID NO: 113519 - RNA, 19 nt, Homo sapiens
  misc_RNA (1)...(19): siRNA sense strand
ugagcgccguggagaauga

SEQ ID NO: 113520 - RNA, 19 nt, Homo sapiens
  misc_RNA (1)...(19): siRNA sense strand
aaagaagugaucacaaaga

SEQ ID NO: 113521 - RNA, 19 nt, Homo sapiens
  misc_RNA (1)...(19): siRNA sense strand
aagcuuuccuugaugcaaa

SEQ ID NO: 113522 - RNA, 19 nt, Homo sapiens
  misc_RNA (1)...(19): siRNA sense strand
gaacggcaggaggauguuu

SEQ ID NO: 113523 - RNA, 19 nt, Homo sapiens
  misc_RNA (1)...(19): siRNA sense strand
ccucgaauccacauaguga

SEQ ID NO: 113524 - RNA, 19 nt, Homo sapiens
  misc_RNA (1)...(19): siRNA sense strand
aagucaagcucaccaacaa

SEQ ID NO: 113525 - RNA, 19 nt, Homo sapiens
  misc_RNA (1)...(19): siRNA sense strand
acaauucuccaaccuauuc

SEQ ID NO: 113526 - RNA, 19 nt, Homo sapiens
  misc_RNA (1)...(19): siRNA sense strand
ugacaacucaccugcaugu

SEQ ID NO: 113527 - RNA, 19 nt, Homo sapiens
  misc_RNA (1)...(19): siRNA sense strand
ccaacgccauguacuccuu

SEQ ID NO: 113528 - RNA, 19 nt, Homo sapiens
  misc_RNA (1)...(19): siRNA sense strand
cgggaaagagccugcagua

SEQ ID NO: 113529 - RNA, 19 nt, Homo sapiens
  misc_RNA (1)...(19): siRNA sense strand
gaauccacauagugagagu

SEQ ID NO: 113530 - RNA, 19 nt, Homo sapiens
  misc_RNA (1)...(19): siRNA sense strand
aagaagugaucacaaagag

SEQ ID NO: 113531 - RNA, 19 nt, Homo sapiens
  misc_RNA (1)...(19): siRNA sense strand
ggugacugcuuaucagaac

SEQ ID NO: 113532 - RNA, 19 nt, Homo sapiens
  misc_RNA (1)...(19): siRNA sense strand
gcaaagucaagcucaccaa

SEQ ID NO: 113533 - RNA, 19 nt, Homo sapiens
  misc_RNA (1)...(19): siRNA sense strand
gcugcaaucccaugacaau

SEQ ID NO: 113534 - RNA, 19 nt, Homo sapiens
  misc_RNA (1)...(19): siRNA sense strand
ccuaccagcuccagucagu

SEQ ID NO: 113535 - RNA, 19 nt, Homo sapiens
  misc_RNA (1)...(19): siRNA sense strand
gcaaauccucauccucagu

SEQ ID NO: 113536 - RNA, 19 nt, Homo sapiens
  misc_RNA (1)...(19): siRNA sense strand
caaaggaaagaagugauca

SEQ ID NO: 113537 - RNA, 19 nt, Homo sapiens
  misc_RNA (1)...(19): siRNA sense strand
guuuauccaugcugcaauc

SEQ ID NO: 113538 - RNA, 19 nt, Homo sapiens
  misc_RNA (1)...(19): siRNA sense strand
gcugagcgccguggagaau

SEQ ID NO: 113539 - RNA, 19 nt, Homo sapiens
  misc_RNA (1)...(19): siRNA sense strand
gucgccaccuuccauguga

SEQ ID NO: 113540 - RNA, 19 nt, Homo sapiens
  misc_RNA (1)...(19): siRNA sense strand
aaccuauucugacaacuca

SEQ ID NO: 113541 - RNA, 19 nt, Homo sapiens
  misc_RNA (1)...(19): siRNA sense strand
ucuccaaccuauucugaca

SEQ ID NO: 113542 - RNA, 19 nt, Homo sapiens
  misc_RNA (1)...(19): siRNA sense strand
gagccucgaauccacauag

SEQ ID NO: 113543 - RNA, 19 nt, Homo sapiens
  misc_RNA (1)...(19): siRNA sense strand
caucggaacaauucuccaa

SEQ ID NO: 113544 - RNA, 19 nt, Homo sapiens
  misc_RNA (1)...(19): siRNA sense strand
guacaauccauuugcaaaa

SEQ ID NO: 113545 - RNA, 19 nt, Homo sapiens
  misc_RNA (1)...(19): siRNA sense strand
cacaaugccagcccaccua

SEQ ID NO: 113546 - RNA, 19 nt, Homo sapiens
  misc_RNA (1)...(19): siRNA sense strand
ucugacaacucaccugcau

SEQ ID NO: 113547 - RNA, 19 nt, Homo sapiens
  misc_RNA (1)...(19): siRNA sense strand
caaccuauucugacaacuc

SEQ ID NO: 113548 - RNA, 19 nt, Homo sapiens
  misc_RNA (1)...(19): siRNA sense strand
gacaaccaccgcuggaagu

SEQ ID NO: 113549 - RNA, 19 nt, Homo sapiens
  misc_RNA (1)...(19): siRNA sense strand
ccugagacccaguucauag

SEQ ID NO: 113550 - RNA, 19 nt, Homo sapiens
  misc_RNA (1)...(19): siRNA sense strand
ggauguuuccggugcugaa

SEQ ID NO: 113551 - RNA, 19 nt, Homo sapiens
  misc_RNA (1)...(19): siRNA sense strand
ugcaaaagcuuuccuugau

SEQ ID NO: 113552 - RNA, 19 nt, Homo sapiens
  misc_RNA (1)...(19): siRNA sense strand
cugaacuccuugcauaagu

SEQ ID NO: 113553 - RNA, 19 nt, Homo sapiens
  misc_RNA (1)...(19): siRNA sense strand
agaugaucgugaccaagaa

SEQ ID NO: 113554 - RNA, 19 nt, Homo sapiens
  misc_RNA (1)...(19): siRNA sense strand
gagaucacagcucuuaaaa

SEQ ID NO: 113555 - RNA, 19 nt, Homo sapiens
  misc_RNA (1)...(19): siRNA sense strand
ggccagaucaugcugaacu

SEQ ID NO: 113556 - RNA, 19 nt, Homo sapiens
  misc_RNA (1)...(19): siRNA sense strand
gagcuguggcugcgcuuca

SEQ ID NO: 113557 - RNA, 19 nt, Homo sapiens
  misc_RNA (1)...(19): siRNA sense strand
uagcggugacugcuuauca

SEQ ID NO: 113558 - RNA, 19 nt, Homo sapiens
  misc_RNA (1)...(19): siRNA sense strand
gcugaacuccuugcauaag

SEQ ID NO: 113559 - RNA, 19 nt, Homo sapiens
  misc_RNA (1)...(19): siRNA sense strand
ucaccugcauguuuaucca

SEQ ID NO: 113560 - RNA, 19 nt, Homo sapiens
  misc_RNA (1)...(19): siRNA sense strand
aaauccucauccucaguuu

SEQ ID NO: 113561 - RNA, 19 nt, Homo sapiens
  misc_RNA (1)...(19): siRNA sense strand
gaacugcaauggcuacuua

SEQ ID NO: 113562 - RNA, 19 nt, Homo sapiens
  misc_RNA (1)...(19): siRNA sense strand
ggacagaaguuaugaagaa

SEQ ID NO: 113563 - RNA, 19 nt, Homo sapiens
  misc_RNA (1)...(19): siRNA sense strand
gaaacacguugaugaguua

SEQ ID NO: 113564 - RNA, 19 nt, Homo sapiens
  misc_RNA (1)...(19): siRNA sense strand
gaucaacuuuggaaacuua

SEQ ID NO: 113565 - RNA, 19 nt, Homo sapiens
  misc_RNA (1)...(19): siRNA sense strand
caacauaaauuuccagaga

SEQ ID NO: 113566 - RNA, 19 nt, Homo sapiens
  misc_RNA (1)...(19): siRNA sense strand
ccaagaagcugcaaauaau

SEQ ID NO: 113567 - RNA, 19 nt, Homo sapiens
  misc_RNA (1)...(19): siRNA sense strand
ggaaacacguugaugaguu

SEQ ID NO: 113568 - RNA, 19 nt, Homo sapiens
  misc_RNA (1)...(19): siRNA sense strand
gagcuuggguugguucuua

SEQ ID NO: 113569 - RNA, 19 nt, Homo sapiens
  misc_RNA (1)...(19): siRNA sense strand
ggaagcaguuguugauuau

SEQ ID NO: 113570 - RNA, 19 nt, Homo sapiens
  misc_RNA (1)...(19): siRNA sense strand
gugaugagauugauugaaa

SEQ ID NO: 113571 - RNA, 19 nt, Homo sapiens
  misc_RNA (1)...(19): siRNA sense strand
caguagaccuuccuguuua

SEQ ID NO: 113572 - RNA, 19 nt, Homo sapiens
  misc_RNA (1)...(19): siRNA sense strand
gcauuaagguuccaucaga

SEQ ID NO: 113573 - RNA, 19 nt, Homo sapiens
  misc_RNA (1)...(19): siRNA sense strand
gauggauccuucaaucaua

SEQ ID NO: 113574 - RNA, 19 nt, Homo sapiens
  misc_RNA (1)...(19): siRNA sense strand
gaagggaacagguaaagaa

SEQ ID NO: 113575 - RNA, 19 nt, Homo sapiens
  misc_RNA (1)...(19): siRNA sense strand
gaagggaauuucaggcuau

SEQ ID NO: 113576 - RNA, 19 nt, Homo sapiens
  misc_RNA (1)...(19): siRNA sense strand
caaaggaggucuucauuuu

SEQ ID NO: 113577 - RNA, 19 nt, Homo sapiens
  misc_RNA (1)...(19): siRNA sense strand
uaacuuaaauccugaugug

SEQ ID NO: 113578 - RNA, 19 nt, Homo sapiens
  misc_RNA (1)...(19): siRNA sense strand
gaaugacccuguacccuau

SEQ ID NO: 113579 - RNA, 19 nt, Homo sapiens
  misc_RNA (1)...(19): siRNA sense strand
uggaagcaguuguugauua

SEQ ID NO: 113580 - RNA, 19 nt, Homo sapiens
  misc_RNA (1)...(19): siRNA sense strand
ccaaggccauauaaauuaa

SEQ ID NO: 113581 - RNA, 19 nt, Homo sapiens
  misc_RNA (1)...(19): siRNA sense strand
ucaauaaacugcuaagucu

SEQ ID NO: 113582 - RNA, 19 nt, Homo sapiens
  misc_RNA (1)...(19): siRNA sense strand
gcauaagcaugacaguaaa

SEQ ID NO: 113583 - RNA, 19 nt, Homo sapiens
  misc_RNA (1)...(19): siRNA sense strand
gaagaagcauaaacauaag

SEQ ID NO: 113584 - RNA, 19 nt, Homo sapiens
  misc_RNA (1)...(19): siRNA sense strand
ggagucagauguugguuuc

SEQ ID NO: 113585 - RNA, 19 nt, Homo sapiens
  misc_RNA (1)...(19): siRNA sense strand
ugcaauggcuuuauuaaga

SEQ ID NO: 113586 - RNA, 19 nt, Homo sapiens
  misc_RNA (1)...(19): siRNA sense strand
ccagauaugucaguauuga

SEQ ID NO: 113587 - RNA, 19 nt, Homo sapiens
  misc_RNA (1)...(19): siRNA sense strand
ugaaacauaccacaucaua

SEQ ID NO: 113588 - RNA, 19 nt, Homo sapiens
  misc_RNA (1)...(19): siRNA sense strand
acuaagaacccaccauuua

SEQ ID NO: 113589 - RNA, 19 nt, Homo sapiens
  misc_RNA (1)...(19): siRNA sense strand
gaaaacagccuuaaacaug

SEQ ID NO: 113590 - RNA, 19 nt, Homo sapiens
  misc_RNA (1)...(19): siRNA sense strand
ggaauacuacacuauguuu

SEQ ID NO: 113591 - RNA, 19 nt, Homo sapiens
  misc_RNA (1)...(19): siRNA sense strand
gcaaacaguguagaauaua

SEQ ID NO: 113592 - RNA, 19 nt, Homo sapiens
  misc_RNA (1)...(19): siRNA sense strand
gcauaaacauaagcacaaa

SEQ ID NO: 113593 - RNA, 19 nt, Homo sapiens
  misc_RNA (1)...(19): siRNA sense strand
gggaacagguaaagaacaa

SEQ ID NO: 113594 - RNA, 19 nt, Homo sapiens
  misc_RNA (1)...(19): siRNA sense strand
ugaggaagguagaauuuga

SEQ ID NO: 113595 - RNA, 19 nt, Homo sapiens
  misc_RNA (1)...(19): siRNA sense strand
cagagaaaccucaauuauu

SEQ ID NO: 113596 - RNA, 19 nt, Homo sapiens
  misc_RNA (1)...(19): siRNA sense strand
gaacggacaugugccaagu

SEQ ID NO: 113597 - RNA, 19 nt, Homo sapiens
  misc_RNA (1)...(19): siRNA sense strand
gaagguagaauuugagcaa

SEQ ID NO: 113598 - RNA, 19 nt, Homo sapiens
  misc_RNA (1)...(19): siRNA sense strand
guugcaaacuugaauagaa

SEQ ID NO: 113599 - RNA, 19 nt, Homo sapiens
  misc_RNA (1)...(19): siRNA sense strand
ggcaagcgcuccacucuca

SEQ ID NO: 113600 - RNA, 19 nt, Homo sapiens
  misc_RNA (1)...(19): siRNA sense strand
ugcacucacugauauauua

SEQ ID NO: 113601 - RNA, 19 nt, Homo sapiens
  misc_RNA (1)...(19): siRNA sense strand
agagagaggugcucauguu

SEQ ID NO: 113602 - RNA, 19 nt, Homo sapiens
  misc_RNA (1)...(19): siRNA sense strand
caucagagcuauggaaaca

SEQ ID NO: 113603 - RNA, 19 nt, Homo sapiens
  misc_RNA (1)...(19): siRNA sense strand
cagcaaacaguguagaaua

SEQ ID NO: 113604 - RNA, 19 nt, Homo sapiens
  misc_RNA (1)...(19): siRNA sense strand
gaugagacaccuuugacua

SEQ ID NO: 113605 - RNA, 19 nt, Homo sapiens
  misc_RNA (1)...(19): siRNA sense strand
gcacggaagggaacaggua

SEQ ID NO: 113606 - RNA, 19 nt, Homo sapiens
  misc_RNA (1)...(19): siRNA sense strand
gcaauggcuuuauuaagag

SEQ ID NO: 113607 - RNA, 19 nt, Homo sapiens
  misc_RNA (1)...(19): siRNA sense strand
gcauaagauucucaacaug

SEQ ID NO: 113608 - RNA, 19 nt, Homo sapiens
  misc_RNA (1)...(19): siRNA sense strand
ugaugaggcuuauguugaa

SEQ ID NO: 113609 - RNA, 19 nt, Homo sapiens
  misc_RNA (1)...(19): siRNA sense strand
gcccaaggccauauaaauu

SEQ ID NO: 113610 - RNA, 19 nt, Homo sapiens
  misc_RNA (1)...(19): siRNA sense strand
gcuccacucucagucuuua

SEQ ID NO: 113611 - RNA, 19 nt, Homo sapiens
  misc_RNA (1)...(19): siRNA sense strand
ggcauaagauucucaacau

SEQ ID NO: 113612 - RNA, 19 nt, Homo sapiens
  misc_RNA (1)...(19): siRNA sense strand
gaaagcccaaggccauaua

SEQ ID NO: 113613 - RNA, 19 nt, Homo sapiens
  misc_RNA (1)...(19): siRNA sense strand
ugcaauggcuacuuaauau

SEQ ID NO: 113614 - RNA, 19 nt, Homo sapiens
  misc_RNA (1)...(19): siRNA sense strand
caaacaacuuuaugagcuu

SEQ ID NO: 113615 - RNA, 19 nt, Homo sapiens
  misc_RNA (1)...(19): siRNA sense strand
gaguaccgccauuggauua

SEQ ID NO: 113616 - RNA, 19 nt, Homo sapiens
  misc_RNA (1)...(19): siRNA sense strand
ugagagagauguuguugca

SEQ ID NO: 113617 - RNA, 19 nt, Homo sapiens
  misc_RNA (1)...(19): siRNA sense strand
ucaauaaagcauccacaua

SEQ ID NO: 113618 - RNA, 19 nt, Homo sapiens
  misc_RNA (1)...(19): siRNA sense strand
aaacagagaaaccucaauu

SEQ ID NO: 113619 - RNA, 19 nt, Homo sapiens
  misc_RNA (1)...(19): siRNA sense strand
cccaaggccauauaaauua

SEQ ID NO: 113620 - RNA, 19 nt, Homo sapiens
  misc_RNA (1)...(19): siRNA sense strand
uaacuauuaucgugcagaa

SEQ ID NO: 113621 - RNA, 19 nt, Homo sapiens
  misc_RNA (1)...(19): siRNA sense strand
gcacagcaggaauccauuu

SEQ ID NO: 113622 - RNA, 19 nt, Homo sapiens
  misc_RNA (1)...(19): siRNA sense strand
gacuauacaucuccuggaa

SEQ ID NO: 113623 - RNA, 19 nt, Homo sapiens
  misc_RNA (1)...(19): siRNA sense strand
gcugaaacauaccacauca

SEQ ID NO: 113624 - RNA, 19 nt, Homo sapiens
  misc_RNA (1)...(19): siRNA sense strand
ggagaacuuugcauuaagg

SEQ ID NO: 113625 - RNA, 19 nt, Homo sapiens
  misc_RNA (1)...(19): siRNA sense strand
uguagaauauaccgaguaa

SEQ ID NO: 113626 - RNA, 19 nt, Homo sapiens
  misc_RNA (1)...(19): siRNA sense strand
cucccgaucugcuuuaaua

SEQ ID NO: 113627 - RNA, 19 nt, Homo sapiens
  misc_RNA (1)...(19): siRNA sense strand
aaagcugucuugaauccua

SEQ ID NO: 113628 - RNA, 19 nt, Homo sapiens
  misc_RNA (1)...(19): siRNA sense strand
aaucauacacugcaaauug

SEQ ID NO: 113629 - RNA, 19 nt, Homo sapiens
  misc_RNA (1)...(19): siRNA sense strand
ggaucaguauggaauuuau

SEQ ID NO: 113630 - RNA, 19 nt, Homo sapiens
  misc_RNA (1)...(19): siRNA sense strand
uaaagguccugaagauaca

SEQ ID NO: 113631 - RNA, 19 nt, Homo sapiens
  misc_RNA (1)...(19): siRNA sense strand
gcaaugaagcccugguaga

SEQ ID NO: 113632 - RNA, 19 nt, Homo sapiens
  misc_RNA (1)...(19): siRNA sense strand
caaagauauucagccguua

SEQ ID NO: 113633 - RNA, 19 nt, Homo sapiens
  misc_RNA (1)...(19): siRNA sense strand
ccaaaggaggucuucauuu

SEQ ID NO: 113634 - RNA, 19 nt, Homo sapiens
  misc_RNA (1)...(19): siRNA sense strand
gagacaccuuugacuagaa

SEQ ID NO: 113635 - RNA, 19 nt, Homo sapiens
  misc_RNA (1)...(19): siRNA sense strand
caagagcaguguuucuaca

SEQ ID NO: 113636 - RNA, 19 nt, Homo sapiens
  misc_RNA (1)...(19): siRNA sense strand
caauaaagcauccacauac

SEQ ID NO: 113637 - RNA, 19 nt, Homo sapiens
  misc_RNA (1)...(19): siRNA sense strand
uaaagaggagcuagacaaa

SEQ ID NO: 113638 - RNA, 19 nt, Homo sapiens
  misc_RNA (1)...(19): siRNA sense strand
uacaguagaugcugcaaug

SEQ ID NO: 113639 - RNA, 19 nt, Homo sapiens
  misc_RNA (1)...(19): siRNA sense strand
ggagacaagggcuuugaaa

SEQ ID NO: 113640 - RNA, 19 nt, Homo sapiens
  misc_RNA (1)...(19): siRNA sense strand
gacuuguacuucacacuuu

SEQ ID NO: 113641 - RNA, 19 nt, Homo sapiens
  misc_RNA (1)...(19): siRNA sense strand
ucacaugacuggagguuac

SEQ ID NO: 113642 - RNA, 19 nt, Homo sapiens
  misc_RNA (1)...(19): siRNA sense strand
gaaaauaggaucaguaugg

SEQ ID NO: 113643 - RNA, 19 nt, Homo sapiens
  misc_RNA (1)...(19): siRNA sense strand
gaaauucuuacaugucguu

SEQ ID NO: 113644 - RNA, 19 nt, Homo sapiens
  misc_RNA (1)...(19): siRNA sense strand
gauauacccugccauucca

SEQ ID NO: 113645 - RNA, 19 nt, Homo sapiens
  misc_RNA (1)...(19): siRNA sense strand
gaagaagaagcauaaacau

SEQ ID NO: 113646 - RNA, 19 nt, Homo sapiens
  misc_RNA (1)...(19): siRNA sense strand
caauggcuacuuaauauga

SEQ ID NO: 113647 - RNA, 19 nt, Homo sapiens
  misc_RNA (1)...(19): siRNA sense strand
ggacaugugccaagugauc

SEQ ID NO: 113648 - RNA, 19 nt, Homo sapiens
  misc_RNA (1)...(19): siRNA sense strand
gaugugcgacucauucuug

SEQ ID NO: 113649 - RNA, 19 nt, Homo sapiens
  misc_RNA (1)...(19): siRNA sense strand
ugaauuguguacauggaaa

SEQ ID NO: 113650 - RNA, 19 nt, Homo sapiens
  misc_RNA (1)...(19): siRNA sense strand
ucaguagaccuuccuguuu

SEQ ID NO: 113651 - RNA, 19 nt, Homo sapiens
  misc_RNA (1)...(19): siRNA sense strand
caaacaguguagaauauac

SEQ ID NO: 113652 - RNA, 19 nt, Homo sapiens
  misc_RNA (1)...(19): siRNA sense strand
ucuuggaacuggaaauaaa

SEQ ID NO: 113653 - RNA, 19 nt, Homo sapiens
  misc_RNA (1)...(19): siRNA sense strand
gaauauaccgaguaaggau

SEQ ID NO: 113654 - RNA, 19 nt, Homo sapiens
  misc_RNA (1)...(19): siRNA sense strand
ggcuauaucuauggacuuu

SEQ ID NO: 113655 - RNA, 19 nt, Homo sapiens
  misc_RNA (1)...(19): siRNA sense strand
uuacacagugccaugauua

SEQ ID NO: 113656 - RNA, 19 nt, Homo sapiens
  misc_RNA (1)...(19): siRNA sense strand
gacuauauuucccacaguu

SEQ ID NO: 113657 - RNA, 19 nt, Homo sapiens
  misc_RNA (1)...(19): siRNA sense strand
ugucuugaauccuaccaua

SEQ ID NO: 113658 - RNA, 19 nt, Homo sapiens
  misc_RNA (1)...(19): siRNA sense strand
ggacuuguacuucacacuu

SEQ ID NO: 113659 - RNA, 19 nt, Homo sapiens
  misc_RNA (1)...(19): siRNA sense strand
gcuguggacuuguacuuca

SEQ ID NO: 113660 - RNA, 19 nt, Homo sapiens
  misc_RNA (1)...(19): siRNA sense strand
cuucauuucccaucauuua

SEQ ID NO: 113661 - RNA, 19 nt, Homo sapiens
  misc_RNA (1)...(19): siRNA sense strand
ugaaagagcucgugcagaa

SEQ ID NO: 113662 - RNA, 19 nt, Homo sapiens
  misc_RNA (1)...(19): siRNA sense strand
gaagaaagugcaagaauau

SEQ ID NO: 113663 - RNA, 19 nt, Homo sapiens
  misc_RNA (1)...(19): siRNA sense strand
agaagaaagugcaagaaua

SEQ ID NO: 113664 - RNA, 19 nt, Homo sapiens
  misc_RNA (1)...(19): siRNA sense strand
ggaguaaacuugucagaag

SEQ ID NO: 113665 - RNA, 19 nt, Homo sapiens
  misc_RNA (1)...(19): siRNA sense strand
caaaggagaugcagcaaca

SEQ ID NO: 113666 - RNA, 19 nt, Homo sapiens
  misc_RNA (1)...(19): siRNA sense strand
gacagcagcuaaugugaaa

SEQ ID NO: 113667 - RNA, 19 nt, Homo sapiens
  misc_RNA (1)...(19): siRNA sense strand
ggacgaugaugacauuaau

SEQ ID NO: 113668 - RNA, 19 nt, Homo sapiens
  misc_RNA (1)...(19): siRNA sense strand
caacaaaggcuacagaauc

SEQ ID NO: 113669 - RNA, 19 nt, Homo sapiens
  misc_RNA (1)...(19): siRNA sense strand
gauaugagcaggcgaguga

SEQ ID NO: 113670 - RNA, 19 nt, Homo sapiens
  misc_RNA (1)...(19): siRNA sense strand
gagaaugggcaguuguuaa

SEQ ID NO: 113671 - RNA, 19 nt, Homo sapiens
  misc_RNA (1)...(19): siRNA sense strand
uuacaaggaugacgacaga

SEQ ID NO: 113672 - RNA, 19 nt, Homo sapiens
  misc_RNA (1)...(19): siRNA sense strand
gcagagaagaauauuagaa

SEQ ID NO: 113673 - RNA, 19 nt, Homo sapiens
  misc_RNA (1)...(19): siRNA sense strand
gaguaaacuugucagaaga

SEQ ID NO: 113674 - RNA, 19 nt, Homo sapiens
  misc_RNA (1)...(19): siRNA sense strand
gagcuuacccgccuugaga

SEQ ID NO: 113675 - RNA, 19 nt, Homo sapiens
  misc_RNA (1)...(19): siRNA sense strand
gcagaagauuucacaagca

SEQ ID NO: 113676 - RNA, 19 nt, Homo sapiens
  misc_RNA (1)...(19): siRNA sense strand
gaaagugcaagaauauuag

SEQ ID NO: 113677 - RNA, 19 nt, Homo sapiens
  misc_RNA (1)...(19): siRNA sense strand
cgaccaacauccagaacuu

SEQ ID NO: 113678 - RNA, 19 nt, Homo sapiens
  misc_RNA (1)...(19): siRNA sense strand
ccucagggaccucauauuu

SEQ ID NO: 113679 - RNA, 19 nt, Homo sapiens
  misc_RNA (1)...(19): siRNA sense strand
gaagauccagaacaguuaa

SEQ ID NO: 113680 - RNA, 19 nt, Homo sapiens
  misc_RNA (1)...(19): siRNA sense strand
caacuaccauaauuaagca

SEQ ID NO: 113681 - RNA, 19 nt, Homo sapiens
  misc_RNA (1)...(19): siRNA sense strand
aaccuuaccuugugccuuu

SEQ ID NO: 113682 - RNA, 19 nt, Homo sapiens
  misc_RNA (1)...(19): siRNA sense strand
ggaacuggcacaaaugaga

SEQ ID NO: 113683 - RNA, 19 nt, Homo sapiens
  misc_RNA (1)...(19): siRNA sense strand
gacgaggucuucuucaaca

SEQ ID NO: 113684 - RNA, 19 nt, Homo sapiens
  misc_RNA (1)...(19): siRNA sense strand
gaugaugacauuaaugaug

SEQ ID NO: 113685 - RNA, 19 nt, Homo sapiens
  misc_RNA (1)...(19): siRNA sense strand
gggcaguuguuaaugauuc

SEQ ID NO: 113686 - RNA, 19 nt, Homo sapiens
  misc_RNA (1)...(19): siRNA sense strand
aaacagcucagcagaagaa

SEQ ID NO: 113687 - RNA, 19 nt, Homo sapiens
  misc_RNA (1)...(19): siRNA sense strand
cguguuaccuggaaccaaa

SEQ ID NO: 113688 - RNA, 19 nt, Homo sapiens
  misc_RNA (1)...(19): siRNA sense strand
agaauuuacuggauggaaa

SEQ ID NO: 113689 - RNA, 19 nt, Homo sapiens
  misc_RNA (1)...(19): siRNA sense strand
cuacagagacagcagcuaa

SEQ ID NO: 113690 - RNA, 19 nt, Homo sapiens
  misc_RNA (1)...(19): siRNA sense strand
gaacgugagacaagccauu

SEQ ID NO: 113691 - RNA, 19 nt, Homo sapiens
  misc_RNA (1)...(19): siRNA sense strand
cuacaaagcauuccuuaag

SEQ ID NO: 113692 - RNA, 19 nt, Homo sapiens
  misc_RNA (1)...(19): siRNA sense strand
caaagcauuccuuaaguga

SEQ ID NO: 113693 - RNA, 19 nt, Homo sapiens
  misc_RNA (1)...(19): siRNA sense strand
ggcaagcagucuacagaga

SEQ ID NO: 113694 - RNA, 19 nt, Homo sapiens
  misc_RNA (1)...(19): siRNA sense strand
gaagugagaaugggcaguu

SEQ ID NO: 113695 - RNA, 19 nt, Homo sapiens
  misc_RNA (1)...(19): siRNA sense strand
acaaagcauuccuuaagug

SEQ ID NO: 113696 - RNA, 19 nt, Homo sapiens
  misc_RNA (1)...(19): siRNA sense strand
gccauucacugcugcucua

SEQ ID NO: 113697 - RNA, 19 nt, Homo sapiens
  misc_RNA (1)...(19): siRNA sense strand
acaagaagauccagaacag

SEQ ID NO: 113698 - RNA, 19 nt, Homo sapiens
  misc_RNA (1)...(19): siRNA sense strand
guaaacuugucagaagaaa

SEQ ID NO: 113699 - RNA, 19 nt, Homo sapiens
  misc_RNA (1)...(19): siRNA sense strand
ucacaugccacgcaacaaa

SEQ ID NO: 113700 - RNA, 19 nt, Homo sapiens
  misc_RNA (1)...(19): siRNA sense strand
gcagcaaagucucggucaa

SEQ ID NO: 113701 - RNA, 19 nt, Homo sapiens
  misc_RNA (1)...(19): siRNA sense strand
gaacuuuucuuacaaggau

SEQ ID NO: 113702 - RNA, 19 nt, Homo sapiens
  misc_RNA (1)...(19): siRNA sense strand
agaaacagcucagcagaag

SEQ ID NO: 113703 - RNA, 19 nt, Homo sapiens
  misc_RNA (1)...(19): siRNA sense strand
caacaggaacuggcacaaa

SEQ ID NO: 113704 - RNA, 19 nt, Homo sapiens
  misc_RNA (1)...(19): siRNA sense strand
aaugggcaguuguuaauga

SEQ ID NO: 113705 - RNA, 19 nt, Homo sapiens
  misc_RNA (1)...(19): siRNA sense strand
acaaggaugacgacagaua

SEQ ID NO: 113706 - RNA, 19 nt, Homo sapiens
  misc_RNA (1)...(19): siRNA sense strand
caaaggcuacagaaucuug

SEQ ID NO: 113707 - RNA, 19 nt, Homo sapiens
  misc_RNA (1)...(19): siRNA sense strand
auccagauguaguaaguua

SEQ ID NO: 113708 - RNA, 19 nt, Homo sapiens
  misc_RNA (1)...(19): siRNA sense strand
gcaccuggaacaccuauca

SEQ ID NO: 113709 - RNA, 19 nt, Homo sapiens
  misc_RNA (1)...(19): siRNA sense strand
agaagauccagaacaguua

SEQ ID NO: 113710 - RNA, 19 nt, Homo sapiens
  misc_RNA (1)...(19): siRNA sense strand
aaagagcucgugcagaauu

SEQ ID NO: 113711 - RNA, 19 nt, Homo sapiens
  misc_RNA (1)...(19): siRNA sense strand
aauagaagcagaagauuuc

SEQ ID NO: 113712 - RNA, 19 nt, Homo sapiens
  misc_RNA (1)...(19): siRNA sense strand
aacaggaacuggcacaaau

SEQ ID NO: 113713 - RNA, 19 nt, Homo sapiens
  misc_RNA (1)...(19): siRNA sense strand
gcaacaaaggcuacagaau

SEQ ID NO: 113714 - RNA, 19 nt, Homo sapiens
  misc_RNA (1)...(19): siRNA sense strand
ccacaccgcuggucaucca

SEQ ID NO: 113715 - RNA, 19 nt, Homo sapiens
  misc_RNA (1)...(19): siRNA sense strand
aguuaaggcugaaacagaa

SEQ ID NO: 113716 - RNA, 19 nt, Homo sapiens
  misc_RNA (1)...(19): siRNA sense strand
uacaaagcauuccuuaagu

SEQ ID NO: 113717 - RNA, 19 nt, Homo sapiens
  misc_RNA (1)...(19): siRNA sense strand
ggagaugcagcaacaggaa

SEQ ID NO: 113718 - RNA, 19 nt, Homo sapiens
  misc_RNA (1)...(19): siRNA sense strand
ugaaacagaaggcaaagga

SEQ ID NO: 113719 - RNA, 19 nt, Homo sapiens
  misc_RNA (1)...(19): siRNA sense strand
gccagucccuguggugaaa

SEQ ID NO: 113720 - RNA, 19 nt, Homo sapiens
  misc_RNA (1)...(19): siRNA sense strand
ucagggaccucauauuuug

SEQ ID NO: 113721 - RNA, 19 nt, Homo sapiens
  misc_RNA (1)...(19): siRNA sense strand
caaccucagggaccucaua

SEQ ID NO: 113722 - RNA, 19 nt, Homo sapiens
  misc_RNA (1)...(19): siRNA sense strand
aacaaaggcuacagaaucu

SEQ ID NO: 113723 - RNA, 19 nt, Homo sapiens
  misc_RNA (1)...(19): siRNA sense strand
gggacgaugaugacauuaa

SEQ ID NO: 113724 - RNA, 19 nt, Homo sapiens
  misc_RNA (1)...(19): siRNA sense strand
uaauaaaacuggcuucauc

SEQ ID NO: 113725 - RNA, 19 nt, Homo sapiens
  misc_RNA (1)...(19): siRNA sense strand
caaggaugacgacagauau

SEQ ID NO: 113726 - RNA, 19 nt, Homo sapiens
  misc_RNA (1)...(19): siRNA sense strand
caagaauauuagccacgaa

SEQ ID NO: 113727 - RNA, 19 nt, Homo sapiens
  misc_RNA (1)...(19): siRNA sense strand
gguuauaccgagaacuuaa

SEQ ID NO: 113728 - RNA, 19 nt, Homo sapiens
  misc_RNA (1)...(19): siRNA sense strand
uaauuaagcaagugucuca

SEQ ID NO: 113729 - RNA, 19 nt, Homo sapiens
  misc_RNA (1)...(19): siRNA sense strand
aagaagauccagaacaguu

SEQ ID NO: 113730 - RNA, 19 nt, Homo sapiens
  misc_RNA (1)...(19): siRNA sense strand
acagcgagguggacgagaa

SEQ ID NO: 113731 - RNA, 19 nt, Homo sapiens
  misc_RNA (1)...(19): siRNA sense strand
gaauuggugggcacgcuaa

SEQ ID NO: 113732 - RNA, 19 nt, Homo sapiens
  misc_RNA (1)...(19): siRNA sense strand
cagaagaaagugcaagaau

SEQ ID NO: 113733 - RNA, 19 nt, Homo sapiens
  misc_RNA (1)...(19): siRNA sense strand
ucgggacgaugaugacauu

SEQ ID NO: 113734 - RNA, 19 nt, Homo sapiens
  misc_RNA (1)...(19): siRNA sense strand
gaugagggcagcaaagucu

SEQ ID NO: 113735 - RNA, 19 nt, Homo sapiens
  misc_RNA (1)...(19): siRNA sense strand
acagaaucuuguagagaaa

SEQ ID NO: 113736 - RNA, 19 nt, Homo sapiens
  misc_RNA (1)...(19): siRNA sense strand
ccaagcgccuuugcagaga

SEQ ID NO: 113737 - RNA, 19 nt, Homo sapiens
  misc_RNA (1)...(19): siRNA sense strand
cuaacgcgguccuguaaag

SEQ ID NO: 113738 - RNA, 19 nt, Homo sapiens
  misc_RNA (1)...(19): siRNA sense strand
cagcucagcagaagaacuu

SEQ ID NO: 113739 - RNA, 19 nt, Homo sapiens
  misc_RNA (1)...(19): siRNA sense strand
cagcagcuaaugugaaaga

SEQ ID NO: 113740 - RNA, 19 nt, Homo sapiens
  misc_RNA (1)...(19): siRNA sense strand
agaaugggcaguuguuaau

SEQ ID NO: 113741 - RNA, 19 nt, Homo sapiens
  misc_RNA (1)...(19): siRNA sense strand
gacaagaagauccagaaca

SEQ ID NO: 113742 - RNA, 19 nt, Homo sapiens
  misc_RNA (1)...(19): siRNA sense strand
cagaaacagcucagcagaa

SEQ ID NO: 113743 - RNA, 19 nt, Homo sapiens
  misc_RNA (1)...(19): siRNA sense strand
caagcgccuuugcagagaa

SEQ ID NO: 113744 - RNA, 19 nt, Homo sapiens
  misc_RNA (1)...(19): siRNA sense strand
gagcgggagauccugauga

SEQ ID NO: 113745 - RNA, 19 nt, Homo sapiens
  misc_RNA (1)...(19): siRNA sense strand
ugaacagcuugaucaaauc

SEQ ID NO: 113746 - RNA, 19 nt, Homo sapiens
  misc_RNA (1)...(19): siRNA sense strand
ccagauguaguaaguuaug

SEQ ID NO: 113747 - RNA, 19 nt, Homo sapiens
  misc_RNA (1)...(19): siRNA sense strand
ccucagaacccgaccaaca

SEQ ID NO: 113748 - RNA, 19 nt, Homo sapiens
  misc_RNA (1)...(19): siRNA sense strand
gaaagagcucgugcagaau

SEQ ID NO: 113749 - RNA, 19 nt, Homo sapiens
  misc_RNA (1)...(19): siRNA sense strand
caggaacuggcacaaauga

SEQ ID NO: 113750 - RNA, 19 nt, Homo sapiens
  misc_RNA (1)...(19): siRNA sense strand
gaacaguuaaggcugaaac

SEQ ID NO: 113751 - RNA, 19 nt, Homo sapiens
  misc_RNA (1)...(19): siRNA sense strand
uggacgaggucuucuucaa

SEQ ID NO: 113752 - RNA, 19 nt, Homo sapiens
  misc_RNA (1)...(19): siRNA sense strand
aagagcucgugcagaauuu

SEQ ID NO: 113753 - RNA, 19 nt, Homo sapiens
  misc_RNA (1)...(19): siRNA sense strand
gcccagacggcuucacuug

SEQ ID NO: 113754 - RNA, 19 nt, Homo sapiens
  misc_RNA (1)...(19): siRNA sense strand
caguuaaggcugaaacaga

SEQ ID NO: 113755 - RNA, 19 nt, Homo sapiens
  misc_RNA (1)...(19): siRNA sense strand
gaacagcuugaucaaaucg

SEQ ID NO: 113756 - RNA, 19 nt, Homo sapiens
  misc_RNA (1)...(19): siRNA sense strand
ggacgaggucuucuucaac

SEQ ID NO: 113757 - RNA, 19 nt, Homo sapiens
  misc_RNA (1)...(19): siRNA sense strand
gaaacagcucagcagaaga

SEQ ID NO: 113758 - RNA, 19 nt, Homo sapiens
  misc_RNA (1)...(19): siRNA sense strand
ugagaaugggcaguuguua

SEQ ID NO: 113759 - RNA, 19 nt, Homo sapiens
  misc_RNA (1)...(19): siRNA sense strand
gagacagcagcuaauguga

SEQ ID NO: 113760 - RNA, 19 nt, Homo sapiens
  misc_RNA (1)...(19): siRNA sense strand
cagguuauaccgagaacuu

SEQ ID NO: 113761 - RNA, 19 nt, Homo sapiens
  misc_RNA (1)...(19): siRNA sense strand
gaucccaacugguuuauga

SEQ ID NO: 113762 - RNA, 19 nt, Homo sapiens
  misc_RNA (1)...(19): siRNA sense strand
caucaagacugacauguuc

SEQ ID NO: 113763 - RNA, 19 nt, Homo sapiens
  misc_RNA (1)...(19): siRNA sense strand
ggagaucccaacugguuua

SEQ ID NO: 113764 - RNA, 19 nt, Homo sapiens
  misc_RNA (1)...(19): siRNA sense strand
gcugaagaauggcgugauu

SEQ ID NO: 113765 - RNA, 19 nt, Homo sapiens
  misc_RNA (1)...(19): siRNA sense strand
ccaacugguuuaugaagaa

SEQ ID NO: 113766 - RNA, 19 nt, Homo sapiens
  misc_RNA (1)...(19): siRNA sense strand
agaaagcgcaggagcauaa

SEQ ID NO: 113767 - RNA, 19 nt, Homo sapiens
  misc_RNA (1)...(19): siRNA sense strand
ggagggaaagcaugucauu

SEQ ID NO: 113768 - RNA, 19 nt, Homo sapiens
  misc_RNA (1)...(19): siRNA sense strand
agaggacccugauggcuuu

SEQ ID NO: 113769 - RNA, 19 nt, Homo sapiens
  misc_RNA (1)...(19): siRNA sense strand
gaagaaagcgcaggagcau

SEQ ID NO: 113770 - RNA, 19 nt, Homo sapiens
  misc_RNA (1)...(19): siRNA sense strand
ccagacuguugaccucuuu

SEQ ID NO: 113771 - RNA, 19 nt, Homo sapiens
  misc_RNA (1)...(19): siRNA sense strand
caacugguuuaugaagaaa

SEQ ID NO: 113772 - RNA, 19 nt, Homo sapiens
  misc_RNA (1)...(19): siRNA sense strand
gaaggcggcugaggacucu

SEQ ID NO: 113773 - RNA, 19 nt, Homo sapiens
  misc_RNA (1)...(19): siRNA sense strand
gcagugaccaagaaugaug

SEQ ID NO: 113774 - RNA, 19 nt, Homo sapiens
  misc_RNA (1)...(19): siRNA sense strand
cucggcagaucaucaguua

SEQ ID NO: 113775 - RNA, 19 nt, Homo sapiens
  misc_RNA (1)...(19): siRNA sense strand
ugagcaagcuggugaacag

SEQ ID NO: 113776 - RNA, 19 nt, Homo sapiens
  misc_RNA (1)...(19): siRNA sense strand
guggagaucccaacugguu

SEQ ID NO: 113777 - RNA, 19 nt, Homo sapiens
  misc_RNA (1)...(19): siRNA sense strand
gagcauaagagggaauuca

SEQ ID NO: 113778 - RNA, 19 nt, Homo sapiens
  misc_RNA (1)...(19): siRNA sense strand
aaaucgagaagaaguauga

SEQ ID NO: 113779 - RNA, 19 nt, Homo sapiens
  misc_RNA (1)...(19): siRNA sense strand
aagagggaauucacagaga

SEQ ID NO: 113780 - RNA, 19 nt, Homo sapiens
  misc_RNA (1)...(19): siRNA sense strand
caagaaugaugggcacuac

SEQ ID NO: 113781 - RNA, 19 nt, Homo sapiens
  misc_RNA (1)...(19): siRNA sense strand
gcuccaagccggugaaggu

SEQ ID NO: 113782 - RNA, 19 nt, Homo sapiens
  misc_RNA (1)...(19): siRNA sense strand
ggacgaccucggcagauca

SEQ ID NO: 113783 - RNA, 19 nt, Homo sapiens
  misc_RNA (1)...(19): siRNA sense strand
cggugaaggugcccgagaa

SEQ ID NO: 113784 - RNA, 19 nt, Homo sapiens
  misc_RNA (1)...(19): siRNA sense strand
uggcagugaccaagaauga

SEQ ID NO: 113785 - RNA, 19 nt, Homo sapiens
  misc_RNA (1)...(19): siRNA sense strand
gaagugcaguccaaaaucg

SEQ ID NO: 113786 - RNA, 19 nt, Homo sapiens
  misc_RNA (1)...(19): siRNA sense strand
gcauaagagggaauucaca

SEQ ID NO: 113787 - RNA, 19 nt, Homo sapiens
  misc_RNA (1)...(19): siRNA sense strand
gacauguuccagacuguug

SEQ ID NO: 113788 - RNA, 19 nt, Homo sapiens
  misc_RNA (1)...(19): siRNA sense strand
ccaagaaugaugggcacua

SEQ ID NO: 113789 - RNA, 19 nt, Homo sapiens
  misc_RNA (1)...(19): siRNA sense strand
cccaacugguuuaugaaga

SEQ ID NO: 113790 - RNA, 19 nt, Homo sapiens
  misc_RNA (1)...(19): siRNA sense strand
ucagaugggcagcaacaga

SEQ ID NO: 113791 - RNA, 19 nt, Homo sapiens
  misc_RNA (1)...(19): siRNA sense strand
gagggaaagcaugucauug

SEQ ID NO: 113792 - RNA, 19 nt, Homo sapiens
  misc_RNA (1)...(19): siRNA sense strand
gcugguggaguggaucaua

SEQ ID NO: 113793 - RNA, 19 nt, Homo sapiens
  misc_RNA (1)...(19): siRNA sense strand
ucaucaagacugacauguu

SEQ ID NO: 113794 - RNA, 19 nt, Homo sapiens
  misc_RNA (1)...(19): siRNA sense strand
gcaguguggcccugaugug

SEQ ID NO: 113795 - RNA, 19 nt, Homo sapiens
  misc_RNA (1)...(19): siRNA sense strand
gguccuuccuauggcauga

SEQ ID NO: 113796 - RNA, 19 nt, Homo sapiens
  misc_RNA (1)...(19): siRNA sense strand
agguguggcugaagaaugg

SEQ ID NO: 113797 - RNA, 19 nt, Homo sapiens
  misc_RNA (1)...(19): siRNA sense strand
gccgcgaagugcaguccaa

SEQ ID NO: 113798 - RNA, 19 nt, Homo sapiens
  misc_RNA (1)...(19): siRNA sense strand
uugggcagcuuggcaguga

SEQ ID NO: 113799 - RNA, 19 nt, Homo sapiens
  misc_RNA (1)...(19): siRNA sense strand
ggacugaaauacauuaaug

SEQ ID NO: 113800 - RNA, 19 nt, Homo sapiens
  misc_RNA (1)...(19): siRNA sense strand
aaaccacacuaggcaaaga

SEQ ID NO: 113801 - RNA, 19 nt, Homo sapiens
  misc_RNA (1)...(19): siRNA sense strand
uaaugugggugauuuagcu

SEQ ID NO: 113802 - RNA, 19 nt, Homo sapiens
  misc_RNA (1)...(19): siRNA sense strand
caaagaacuugcgucaaaa

SEQ ID NO: 113803 - RNA, 19 nt, Homo sapiens
  misc_RNA (1)...(19): siRNA sense strand
cauuaaugugggugauuua

SEQ ID NO: 113804 - RNA, 19 nt, Homo sapiens
  misc_RNA (1)...(19): siRNA sense strand
gaacuugcgucaaaaucag

SEQ ID NO: 113805 - RNA, 19 nt, Homo sapiens
  misc_RNA (1)...(19): siRNA sense strand
acacuaggcaaagaacuug

SEQ ID NO: 113806 - RNA, 19 nt, Homo sapiens
  misc_RNA (1)...(19): siRNA sense strand
ggacauugcuucuacaaau

SEQ ID NO: 113807 - RNA, 19 nt, Homo sapiens
  misc_RNA (1)...(19): siRNA sense strand
gagugaaucuggacguuua

SEQ ID NO: 113808 - RNA, 19 nt, Homo sapiens
  misc_RNA (1)...(19): siRNA sense strand
ugacaugucugaaauagaa

SEQ ID NO: 113809 - RNA, 19 nt, Homo sapiens
  misc_RNA (1)...(19): siRNA sense strand
gaggaaagcguuuauugua

SEQ ID NO: 113810 - RNA, 19 nt, Homo sapiens
  misc_RNA (1)...(19): siRNA sense strand
ggaaagcguuuauuguaga

SEQ ID NO: 113811 - RNA, 19 nt, Homo sapiens
  misc_RNA (1)...(19): siRNA sense strand
gaaccauccuaauauugua

SEQ ID NO: 113812 - RNA, 19 nt, Homo sapiens
  misc_RNA (1)...(19): siRNA sense strand
agacacacaugaccaauaa

SEQ ID NO: 113813 - RNA, 19 nt, Homo sapiens
  misc_RNA (1)...(19): siRNA sense strand
gacauugcuucuacaaaua

SEQ ID NO: 113814 - RNA, 19 nt, Homo sapiens
  misc_RNA (1)...(19): siRNA sense strand
gcaaugaguugguguuuac

SEQ ID NO: 113815 - RNA, 19 nt, Homo sapiens
  misc_RNA (1)...(19): siRNA sense strand
ggaagagguuguuggaaga

SEQ ID NO: 113816 - RNA, 19 nt, Homo sapiens
  misc_RNA (1)...(19): siRNA sense strand
gaaaaggaccagcaaaaua

SEQ ID NO: 113817 - RNA, 19 nt, Homo sapiens
  misc_RNA (1)...(19): siRNA sense strand
gcaaguuccugccacaaau

SEQ ID NO: 113818 - RNA, 19 nt, Homo sapiens
  misc_RNA (1)...(19): siRNA sense strand
aaauacaucucgccuggua

SEQ ID NO: 113819 - RNA, 19 nt, Homo sapiens
  misc_RNA (1)...(19): siRNA sense strand
gaaccauugccauauuaua

SEQ ID NO: 113820 - RNA, 19 nt, Homo sapiens
  misc_RNA (1)...(19): siRNA sense strand
gaaacccuuugaugagauu

SEQ ID NO: 113821 - RNA, 19 nt, Homo sapiens
  misc_RNA (1)...(19): siRNA sense strand
ggaguuguuugcaaagcua

SEQ ID NO: 113822 - RNA, 19 nt, Homo sapiens
  misc_RNA (1)...(19): siRNA sense strand
cagaugagccauuacagua

SEQ ID NO: 113823 - RNA, 19 nt, Homo sapiens
  misc_RNA (1)...(19): siRNA sense strand
aauaaugacucacuugaug

SEQ ID NO: 113824 - RNA, 19 nt, Homo sapiens
  misc_RNA (1)...(19): siRNA sense strand
gcugaaccauugccauauu

SEQ ID NO: 113825 - RNA, 19 nt, Homo sapiens
  misc_RNA (1)...(19): siRNA sense strand
gagaggaaagcguuuauug

SEQ ID NO: 113826 - RNA, 19 nt, Homo sapiens
  misc_RNA (1)...(19): siRNA sense strand
gguaguaauuacagugaaa

SEQ ID NO: 113827 - RNA, 19 nt, Homo sapiens
  misc_RNA (1)...(19): siRNA sense strand
ccugaaaccaccaaacuua

SEQ ID NO: 113828 - RNA, 19 nt, Homo sapiens
  misc_RNA (1)...(19): siRNA sense strand
gaggaugagugcugacaug

SEQ ID NO: 113829 - RNA, 19 nt, Homo sapiens
  misc_RNA (1)...(19): siRNA sense strand
gaugagugcugacaugucu

SEQ ID NO: 113830 - RNA, 19 nt, Homo sapiens
  misc_RNA (1)...(19): siRNA sense strand
caugugggcuguucauaau

SEQ ID NO: 113831 - RNA, 19 nt, Homo sapiens
  misc_RNA (1)...(19): siRNA sense strand
guagauccauccaagacuu

SEQ ID NO: 113832 - RNA, 19 nt, Homo sapiens
  misc_RNA (1)...(19): siRNA sense strand
ggaaacccuuugaugagau

SEQ ID NO: 113833 - RNA, 19 nt, Homo sapiens
  misc_RNA (1)...(19): siRNA sense strand
uugaagagaucgacuacaa

SEQ ID NO: 113834 - RNA, 19 nt, Homo sapiens
  misc_RNA (1)...(19): siRNA sense strand
cugaaccauugccauauua

SEQ ID NO: 113835 - RNA, 19 nt, Homo sapiens
  misc_RNA (1)...(19): siRNA sense strand
ggaggaaauugugaaaaua

SEQ ID NO: 113836 - RNA, 19 nt, Homo sapiens
  misc_RNA (1)...(19): siRNA sense strand
gugcugacaugucugaaau

SEQ ID NO: 113837 - RNA, 19 nt, Homo sapiens
  misc_RNA (1)...(19): siRNA sense strand
gaugagccauuacaguauc

SEQ ID NO: 113838 - RNA, 19 nt, Homo sapiens
  misc_RNA (1)...(19): siRNA sense strand
cccaauggcuuaucuuaca

SEQ ID NO: 113839 - RNA, 19 nt, Homo sapiens
  misc_RNA (1)...(19): siRNA sense strand
acacuaauauggagcaagu

SEQ ID NO: 113840 - RNA, 19 nt, Homo sapiens
  misc_RNA (1)...(19): siRNA sense strand
ccugaugauuccacagaua

SEQ ID NO: 113841 - RNA, 19 nt, Homo sapiens
  misc_RNA (1)...(19): siRNA sense strand
gcaaagcaacagagugaau

SEQ ID NO: 113842 - RNA, 19 nt, Homo sapiens
  misc_RNA (1)...(19): siRNA sense strand
cgugugaaccauccuaaua

SEQ ID NO: 113843 - RNA, 19 nt, Homo sapiens
  misc_RNA (1)...(19): siRNA sense strand
gaaagcguuuauuguagag

SEQ ID NO: 113844 - RNA, 19 nt, Homo sapiens
  misc_RNA (1)...(19): siRNA sense strand
gcaguuaucccgugugaac

SEQ ID NO: 113845 - RNA, 19 nt, Homo sapiens
  misc_RNA (1)...(19): siRNA sense strand
gcugacaugucugaaauag

SEQ ID NO: 113846 - RNA, 19 nt, Homo sapiens
  misc_RNA (1)...(19): siRNA sense strand
gugcugaaccauugccaua

SEQ ID NO: 113847 - RNA, 19 nt, Homo sapiens
  misc_RNA (1)...(19): siRNA sense strand
ugugaaccauccuaauauu

SEQ ID NO: 113848 - RNA, 19 nt, Homo sapiens
  misc_RNA (1)...(19): siRNA sense strand
cggaaacccuuugaugaga

SEQ ID NO: 113849 - RNA, 19 nt, Homo sapiens
  misc_RNA (1)...(19): siRNA sense strand
aagaggagccuuuggaguu

SEQ ID NO: 113850 - RNA, 19 nt, Homo sapiens
  misc_RNA (1)...(19): siRNA sense strand
ggacagccaagacguagau

SEQ ID NO: 113851 - RNA, 19 nt, Homo sapiens
  misc_RNA (1)...(19): siRNA sense strand
aggagcagaugagccauua

SEQ ID NO: 113852 - RNA, 19 nt, Homo sapiens
  misc_RNA (1)...(19): siRNA sense strand
gaguugguguuuacagugu

SEQ ID NO: 113853 - RNA, 19 nt, Homo sapiens
  misc_RNA (1)...(19): siRNA sense strand
gaaacgacaaggcacuuca

SEQ ID NO: 113854 - RNA, 19 nt, Homo sapiens
  misc_RNA (1)...(19): siRNA sense strand
acaguauccuugucaguau

SEQ ID NO: 113855 - RNA, 19 nt, Homo sapiens
  misc_RNA (1)...(19): siRNA sense strand
cgcaaugaguugguguuua

SEQ ID NO: 113856 - RNA, 19 nt, Homo sapiens
  misc_RNA (1)...(19): siRNA sense strand
gcagaugagccauuacagu

SEQ ID NO: 113857 - RNA, 19 nt, Homo sapiens
  misc_RNA (1)...(19): siRNA sense strand
gagcagaugagccauuaca

SEQ ID NO: 113858 - RNA, 19 nt, Homo sapiens
  misc_RNA (1)...(19): siRNA sense strand
uacacuggaucaccaacua

SEQ ID NO: 113859 - RNA, 19 nt, Homo sapiens
  misc_RNA (1)...(19): siRNA sense strand
gaagucagcagcagaaacg

SEQ ID NO: 113860 - RNA, 19 nt, Homo sapiens
  misc_RNA (1)...(19): siRNA sense strand
caacuagaggucaucagaa

SEQ ID NO: 113861 - RNA, 19 nt, Homo sapiens
  misc_RNA (1)...(19): siRNA sense strand
aaagcuaaguggagagcaa

SEQ ID NO: 113862 - RNA, 19 nt, Homo sapiens
  misc_RNA (1)...(19): siRNA sense strand
ggagcaguguggagagcuu

SEQ ID NO: 113863 - RNA, 19 nt, Homo sapiens
  misc_RNA (1)...(19): siRNA sense strand
cagacacacaugaccaaua

SEQ ID NO: 113864 - RNA, 19 nt, Homo sapiens
  misc_RNA (1)...(19): siRNA sense strand
cuacaaauacgaguaacaa

SEQ ID NO: 113865 - RNA, 19 nt, Homo sapiens
  misc_RNA (1)...(19): siRNA sense strand
gcccuucaauggaggaaau

SEQ ID NO: 113866 - RNA, 19 nt, Homo sapiens
  misc_RNA (1)...(19): siRNA sense strand
aaauuuaccuaagcccauu

SEQ ID NO: 113867 - RNA, 19 nt, Homo sapiens
  misc_RNA (1)...(19): siRNA sense strand
cgaaucaugugggcuguuc

SEQ ID NO: 113868 - RNA, 19 nt, Homo sapiens
  misc_RNA (1)...(19): siRNA sense strand
uggcuuaucuucacagcau

SEQ ID NO: 113869 - RNA, 19 nt, Homo sapiens
  misc_RNA (1)...(19): siRNA sense strand
gauaccaauggaucagaua

SEQ ID NO: 113870 - RNA, 19 nt, Homo sapiens
  misc_RNA (1)...(19): siRNA sense strand
cccagugucagaaugauua

SEQ ID NO: 113871 - RNA, 19 nt, Homo sapiens
  misc_RNA (1)...(19): siRNA sense strand
ucaugugggcuguucauaa

SEQ ID NO: 113872 - RNA, 19 nt, Homo sapiens
  misc_RNA (1)...(19): siRNA sense strand
gaaaccaccaaacuuacug

SEQ ID NO: 113873 - RNA, 19 nt, Homo sapiens
  misc_RNA (1)...(19): siRNA sense strand
gaaaauaaugacucacuug

SEQ ID NO: 113874 - RNA, 19 nt, Homo sapiens
  misc_RNA (1)...(19): siRNA sense strand
ugccacaaaugauacuauu

SEQ ID NO: 113875 - RNA, 19 nt, Homo sapiens
  misc_RNA (1)...(19): siRNA sense strand
cggcaguuaucccguguga

SEQ ID NO: 113876 - RNA, 19 nt, Homo sapiens
  misc_RNA (1)...(19): siRNA sense strand
gccacaaaugauacuauua

SEQ ID NO: 113877 - RNA, 19 nt, Homo sapiens
  misc_RNA (1)...(19): siRNA sense strand
agaggagccuuuggaguug

SEQ ID NO: 113878 - RNA, 19 nt, Homo sapiens
  misc_RNA (1)...(19): siRNA sense strand
aggaaagcguuuauuguag

SEQ ID NO: 113879 - RNA, 19 nt, Homo sapiens
  misc_RNA (1)...(19): siRNA sense strand
ggaguggcuuaucuucaca

SEQ ID NO: 113880 - RNA, 19 nt, Homo sapiens
  misc_RNA (1)...(19): siRNA sense strand
ugaaccauccuaauauugu

SEQ ID NO: 113881 - RNA, 19 nt, Homo sapiens
  misc_RNA (1)...(19): siRNA sense strand
uauggagccugcuugaauc

SEQ ID NO: 113882 - RNA, 19 nt, Homo sapiens
  misc_RNA (1)...(19): siRNA sense strand
guuccugccacaaaugaua

SEQ ID NO: 113883 - RNA, 19 nt, Homo sapiens
  misc_RNA (1)...(19): siRNA sense strand
gguacucgaccaccacuga

SEQ ID NO: 113884 - RNA, 19 nt, Homo sapiens
  misc_RNA (1)...(19): siRNA sense strand
aauccagugugucuuguga

SEQ ID NO: 113885 - RNA, 19 nt, Homo sapiens
  misc_RNA (1)...(19): siRNA sense strand
ucauggacauugcuucuac

SEQ ID NO: 113886 - RNA, 19 nt, Homo sapiens
  misc_RNA (1)...(19): siRNA sense strand
uacaguauccuugucagua

SEQ ID NO: 113887 - RNA, 19 nt, Homo sapiens
  misc_RNA (1)...(19): siRNA sense strand
gucggaaacccuuugauga

SEQ ID NO: 113888 - RNA, 19 nt, Homo sapiens
  misc_RNA (1)...(19): siRNA sense strand
gacauucagacacacauga

SEQ ID NO: 113889 - RNA, 19 nt, Homo sapiens
  misc_RNA (1)...(19): siRNA sense strand
cagugugucuugugaugga

SEQ ID NO: 113890 - RNA, 19 nt, Homo sapiens
  misc_RNA (1)...(19): siRNA sense strand
ucagaagucagcagcagaa

SEQ ID NO: 113891 - RNA, 19 nt, Homo sapiens
  misc_RNA (1)...(19): siRNA sense strand
aggcaaagcaacagaguga

SEQ ID NO: 113892 - RNA, 19 nt, Homo sapiens
  misc_RNA (1)...(19): siRNA sense strand
gcgcuuagaaucaaaauug

SEQ ID NO: 113893 - RNA, 19 nt, Homo sapiens
  misc_RNA (1)...(19): siRNA sense strand
caacccaaagcgcuaauuc

SEQ ID NO: 113894 - RNA, 19 nt, Homo sapiens
  misc_RNA (1)...(19): siRNA sense strand
aaagugaaucugagaggaa

SEQ ID NO: 113895 - RNA, 19 nt, Homo sapiens
  misc_RNA (1)...(19): siRNA sense strand
uguagagcuucggcaguua

SEQ ID NO: 113896 - RNA, 19 nt, Homo sapiens
  misc_RNA (1)...(19): siRNA sense strand
gcucauucauggacauugc

SEQ ID NO: 113897 - RNA, 19 nt, Homo sapiens
  misc_RNA (1)...(19): siRNA sense strand
gugugaaccauccuaauau

SEQ ID NO: 113898 - RNA, 19 nt, Homo sapiens
  misc_RNA (1)...(19): siRNA sense strand
caguauccuugucaguauu

SEQ ID NO: 113899 - RNA, 19 nt, Homo sapiens
  misc_RNA (1)...(19): siRNA sense strand
ccaaggaguggcuuaucuu

SEQ ID NO: 113900 - RNA, 19 nt, Homo sapiens
  misc_RNA (1)...(19): siRNA sense strand
gugaaccauccuaauauug

SEQ ID NO: 113901 - RNA, 19 nt, Homo sapiens
  misc_RNA (1)...(19): siRNA sense strand
gaucgagguggaagagguu

SEQ ID NO: 113902 - RNA, 19 nt, Homo sapiens
  misc_RNA (1)...(19): siRNA sense strand
uuauggagccugcuugaau

SEQ ID NO: 113903 - RNA, 19 nt, Homo sapiens
  misc_RNA (1)...(19): siRNA sense strand
aagugaaucugagaggaaa

SEQ ID NO: 113904 - RNA, 19 nt, Homo sapiens
  misc_RNA (1)...(19): siRNA sense strand
acaacuagaggucaucaga

SEQ ID NO: 113905 - RNA, 19 nt, Homo sapiens
  misc_RNA (1)...(19): siRNA sense strand
caaagcaacagagugaauc

SEQ ID NO: 113906 - RNA, 19 nt, Homo sapiens
  misc_RNA (1)...(19): siRNA sense strand
ggacauugcuucuacaaau

SEQ ID NO: 113907 - RNA, 19 nt, Homo sapiens
  misc_RNA (1)...(19): siRNA sense strand
gagugaaucuggacguuua

SEQ ID NO: 113908 - RNA, 19 nt, Homo sapiens
  misc_RNA (1)...(19): siRNA sense strand
ugacaugucugaaauagaa

SEQ ID NO: 113909 - RNA, 19 nt, Homo sapiens
  misc_RNA (1)...(19): siRNA sense strand
gaggaaagcguuuauugua

SEQ ID NO: 113910 - RNA, 19 nt, Homo sapiens
  misc_RNA (1)...(19): siRNA sense strand
ggaaagcguuuauuguaga

SEQ ID NO: 113911 - RNA, 19 nt, Homo sapiens
  misc_RNA (1)...(19): siRNA sense strand
gaaccauccuaauauugua

SEQ ID NO: 113912 - RNA, 19 nt, Homo sapiens
  misc_RNA (1)...(19): siRNA sense strand
agacacacaugaccaauaa

SEQ ID NO: 113913 - RNA, 19 nt, Homo sapiens
  misc_RNA (1)...(19): siRNA sense strand
gacauugcuucuacaaaua

SEQ ID NO: 113914 - RNA, 19 nt, Homo sapiens
  misc_RNA (1)...(19): siRNA sense strand
gcaaugaguugguguuuac

SEQ ID NO: 113915 - RNA, 19 nt, Homo sapiens
  misc_RNA (1)...(19): siRNA sense strand
ggaagagguuguuggaaga

SEQ ID NO: 113916 - RNA, 19 nt, Homo sapiens
  misc_RNA (1)...(19): siRNA sense strand
gaaaaggaccagcaaaaua

SEQ ID NO: 113917 - RNA, 19 nt, Homo sapiens
  misc_RNA (1)...(19): siRNA sense strand
gcaaguuccugccacaaau

SEQ ID NO: 113918 - RNA, 19 nt, Homo sapiens
  misc_RNA (1)...(19): siRNA sense strand
aaauacaucucgccuggua

SEQ ID NO: 113919 - RNA, 19 nt, Homo sapiens
  misc_RNA (1)...(19): siRNA sense strand
gaaccauugccauauuaua

SEQ ID NO: 113920 - RNA, 19 nt, Homo sapiens
  misc_RNA (1)...(19): siRNA sense strand
gaaacccuuugaugagauu

SEQ ID NO: 113921 - RNA, 19 nt, Homo sapiens
  misc_RNA (1)...(19): siRNA sense strand
ggaguuguuugcaaagcua

SEQ ID NO: 113922 - RNA, 19 nt, Homo sapiens
  misc_RNA (1)...(19): siRNA sense strand
cagaugagccauuacagua

SEQ ID NO: 113923 - RNA, 19 nt, Homo sapiens
  misc_RNA (1)...(19): siRNA sense strand
aauaaugacucacuugaug

SEQ ID NO: 113924 - RNA, 19 nt, Homo sapiens
  misc_RNA (1)...(19): siRNA sense strand
gcugaaccauugccauauu

SEQ ID NO: 113925 - RNA, 19 nt, Homo sapiens
  misc_RNA (1)...(19): siRNA sense strand
gagaggaaagcguuuauug

SEQ ID NO: 113926 - RNA, 19 nt, Homo sapiens
  misc_RNA (1)...(19): siRNA sense strand
gguaguaauuacagugaaa

SEQ ID NO: 113927 - RNA, 19 nt, Homo sapiens
  misc_RNA (1)...(19): siRNA sense strand
ccugaaaccaccaaacuua

SEQ ID NO: 113928 - RNA, 19 nt, Homo sapiens
  misc_RNA (1)...(19): siRNA sense strand
gaggaugagugcugacaug

SEQ ID NO: 113929 - RNA, 19 nt, Homo sapiens
  misc_RNA (1)...(19): siRNA sense strand
gaugagugcugacaugucu

SEQ ID NO: 113930 - RNA, 19 nt, Homo sapiens
  misc_RNA (1)...(19): siRNA sense strand
caugugggcuguucauaau

SEQ ID NO: 113931 - RNA, 19 nt, Homo sapiens
  misc_RNA (1)...(19): siRNA sense strand
guagauccauccaagacuu

SEQ ID NO: 113932 - RNA, 19 nt, Homo sapiens
  misc_RNA (1)...(19): siRNA sense strand
ggaaacccuuugaugagau

SEQ ID NO: 113933 - RNA, 19 nt, Homo sapiens
  misc_RNA (1)...(19): siRNA sense strand
uugaagagaucgacuacaa

SEQ ID NO: 113934 - RNA, 19 nt, Homo sapiens
  misc_RNA (1)...(19): siRNA sense strand
cugaaccauugccauauua

SEQ ID NO: 113935 - RNA, 19 nt, Homo sapiens
  misc_RNA (1)...(19): siRNA sense strand
ggaggaaauugugaaaaua

SEQ ID NO: 113936 - RNA, 19 nt, Homo sapiens
  misc_RNA (1)...(19): siRNA sense strand
gugcugacaugucugaaau

SEQ ID NO: 113937 - RNA, 19 nt, Homo sapiens
  misc_RNA (1)...(19): siRNA sense strand
gaugagccauuacaguauc

SEQ ID NO: 113938 - RNA, 19 nt, Homo sapiens
  misc_RNA (1)...(19): siRNA sense strand
cccaauggcuuaucuuaca

SEQ ID NO: 113939 - RNA, 19 nt, Homo sapiens
  misc_RNA (1)...(19): siRNA sense strand
acacuaauauggagcaagu

SEQ ID NO: 113940 - RNA, 19 nt, Homo sapiens
  misc_RNA (1)...(19): siRNA sense strand
ccugaugauuccacagaua

SEQ ID NO: 113941 - RNA, 19 nt, Homo sapiens
  misc_RNA (1)...(19): siRNA sense strand
gcaaagcaacagagugaau

SEQ ID NO: 113942 - RNA, 19 nt, Homo sapiens
  misc_RNA (1)...(19): siRNA sense strand
cgugugaaccauccuaaua

SEQ ID NO: 113943 - RNA, 19 nt, Homo sapiens
  misc_RNA (1)...(19): siRNA sense strand
gaaagcguuuauuguagag

SEQ ID NO: 113944 - RNA, 19 nt, Homo sapiens
  misc_RNA (1)...(19): siRNA sense strand
gcaguuaucccgugugaac

SEQ ID NO: 113945 - RNA, 19 nt, Homo sapiens
  misc_RNA (1)...(19): siRNA sense strand
gcugacaugucugaaauag

SEQ ID NO: 113946 - RNA, 19 nt, Homo sapiens
  misc_RNA (1)...(19): siRNA sense strand
gugcugaaccauugccaua

SEQ ID NO: 113947 - RNA, 19 nt, Homo sapiens
  misc_RNA (1)...(19): siRNA sense strand
ugugaaccauccuaauauu

SEQ ID NO: 113948 - RNA, 19 nt, Homo sapiens
  misc_RNA (1)...(19): siRNA sense strand
cggaaacccuuugaugaga

SEQ ID NO: 113949 - RNA, 19 nt, Homo sapiens
  misc_RNA (1)...(19): siRNA sense strand
aagaggagccuuuggaguu

SEQ ID NO: 113950 - RNA, 19 nt, Homo sapiens
  misc_RNA (1)...(19): siRNA sense strand
ggacagccaagacguagau

SEQ ID NO: 113951 - RNA, 19 nt, Homo sapiens
  misc_RNA (1)...(19): siRNA sense strand
aggagcagaugagccauua

SEQ ID NO: 113952 - RNA, 19 nt, Homo sapiens
  misc_RNA (1)...(19): siRNA sense strand
gaguugguguuuacagugu

SEQ ID NO: 113953 - RNA, 19 nt, Homo sapiens
  misc_RNA (1)...(19): siRNA sense strand
gaaacgacaaggcacuuca

SEQ ID NO: 113954 - RNA, 19 nt, Homo sapiens
  misc_RNA (1)...(19): siRNA sense strand
acaguauccuugucaguau

SEQ ID NO: 113955 - RNA, 19 nt, Homo sapiens
  misc_RNA (1)...(19): siRNA sense strand
cgcaaugaguugguguuua

SEQ ID NO: 113956 - RNA, 19 nt, Homo sapiens
  misc_RNA (1)...(19): siRNA sense strand
gcagaugagccauuacagu

SEQ ID NO: 113957 - RNA, 19 nt, Homo sapiens
  misc_RNA (1)...(19): siRNA sense strand
gagcagaugagccauuaca

SEQ ID NO: 113958 - RNA, 19 nt, Homo sapiens
  misc_RNA (1)...(19): siRNA sense strand
uacacuggaucaccaacua

SEQ ID NO: 113959 - RNA, 19 nt, Homo sapiens
  misc_RNA (1)...(19): siRNA sense strand
gaagucagcagcagaaacg

SEQ ID NO: 113960 - RNA, 19 nt, Homo sapiens
  misc_RNA (1)...(19): siRNA sense strand
caacuagaggucaucagaa

SEQ ID NO: 113961 - RNA, 19 nt, Homo sapiens
  misc_RNA (1)...(19): siRNA sense strand
aaagcuaaguggagagcaa

SEQ ID NO: 113962 - RNA, 19 nt, Homo sapiens
  misc_RNA (1)...(19): siRNA sense strand
ggagcaguguggagagcuu

SEQ ID NO: 113963 - RNA, 19 nt, Homo sapiens
  misc_RNA (1)...(19): siRNA sense strand
cagacacacaugaccaaua

SEQ ID NO: 113964 - RNA, 19 nt, Homo sapiens
  misc_RNA (1)...(19): siRNA sense strand
cuacaaauacgaguaacaa

SEQ ID NO: 113965 - RNA, 19 nt, Homo sapiens
  misc_RNA (1)...(19): siRNA sense strand
gcccuucaauggaggaaau

SEQ ID NO: 113966 - RNA, 19 nt, Homo sapiens
  misc_RNA (1)...(19): siRNA sense strand
aaauuuaccuaagcccauu

SEQ ID NO: 113967 - RNA, 19 nt, Homo sapiens
  misc_RNA (1)...(19): siRNA sense strand
cgaaucaugugggcuguuc

SEQ ID NO: 113968 - RNA, 19 nt, Homo sapiens
  misc_RNA (1)...(19): siRNA sense strand
uggcuuaucuucacagcau

SEQ ID NO: 113969 - RNA, 19 nt, Homo sapiens
  misc_RNA (1)...(19): siRNA sense strand
gauaccaauggaucagaua

SEQ ID NO: 113970 - RNA, 19 nt, Homo sapiens
  misc_RNA (1)...(19): siRNA sense strand
cccagugucagaaugauua

SEQ ID NO: 113971 - RNA, 19 nt, Homo sapiens
  misc_RNA (1)...(19): siRNA sense strand
ucaugugggcuguucauaa

SEQ ID NO: 113972 - RNA, 19 nt, Homo sapiens
  misc_RNA (1)...(19): siRNA sense strand
gaaaccaccaaacuuacug

SEQ ID NO: 113973 - RNA, 19 nt, Homo sapiens
  misc_RNA (1)...(19): siRNA sense strand
gaaaauaaugacucacuug

SEQ ID NO: 113974 - RNA, 19 nt, Homo sapiens
  misc_RNA (1)...(19): siRNA sense strand
ugccacaaaugauacuauu

SEQ ID NO: 113975 - RNA, 19 nt, Homo sapiens
  misc_RNA (1)...(19): siRNA sense strand
cggcaguuaucccguguga

SEQ ID NO: 113976 - RNA, 19 nt, Homo sapiens
  misc_RNA (1)...(19): siRNA sense strand
gccacaaaugauacuauua

SEQ ID NO: 113977 - RNA, 19 nt, Homo sapiens
  misc_RNA (1)...(19): siRNA sense strand
agaggagccuuuggaguug

SEQ ID NO: 113978 - RNA, 19 nt, Homo sapiens
  misc_RNA (1)...(19): siRNA sense strand
aggaaagcguuuauuguag

SEQ ID NO: 113979 - RNA, 19 nt, Homo sapiens
  misc_RNA (1)...(19): siRNA sense strand
ggaguggcuuaucuucaca

SEQ ID NO: 113980 - RNA, 19 nt, Homo sapiens
  misc_RNA (1)...(19): siRNA sense strand
ugaaccauccuaauauugu

SEQ ID NO: 113981 - RNA, 19 nt, Homo sapiens
  misc_RNA (1)...(19): siRNA sense strand
uauggagccugcuugaauc

SEQ ID NO: 113982 - RNA, 19 nt, Homo sapiens
  misc_RNA (1)...(19): siRNA sense strand
guuccugccacaaaugaua

SEQ ID NO: 113983 - RNA, 19 nt, Homo sapiens
  misc_RNA (1)...(19): siRNA sense strand
gguacucgaccaccacuga

SEQ ID NO: 113984 - RNA, 19 nt, Homo sapiens
  misc_RNA (1)...(19): siRNA sense strand
aauccagugugucuuguga

SEQ ID NO: 113985 - RNA, 19 nt, Homo sapiens
  misc_RNA (1)...(19): siRNA sense strand
ucauggacauugcuucuac

SEQ ID NO: 113986 - RNA, 19 nt, Homo sapiens
  misc_RNA (1)...(19): siRNA sense strand
uacaguauccuugucagua

SEQ ID NO: 113987 - RNA, 19 nt, Homo sapiens
  misc_RNA (1)...(19): siRNA sense strand
gucggaaacccuuugauga

SEQ ID NO: 113988 - RNA, 19 nt, Homo sapiens
  misc_RNA (1)...(19): siRNA sense strand
gacauucagacacacauga

SEQ ID NO: 113989 - RNA, 19 nt, Homo sapiens
  misc_RNA (1)...(19): siRNA sense strand
cagugugucuugugaugga

SEQ ID NO: 113990 - RNA, 19 nt, Homo sapiens
  misc_RNA (1)...(19): siRNA sense strand
ucagaagucagcagcagaa

SEQ ID NO: 113991 - RNA, 19 nt, Homo sapiens
  misc_RNA (1)...(19): siRNA sense strand
aggcaaagcaacagaguga

SEQ ID NO: 113992 - RNA, 19 nt, Homo sapiens
  misc_RNA (1)...(19): siRNA sense strand
gcgcuuagaaucaaaauug

SEQ ID NO: 113993 - RNA, 19 nt, Homo sapiens
  misc_RNA (1)...(19): siRNA sense strand
caacccaaagcgcuaauuc

SEQ ID NO: 113994 - RNA, 19 nt, Homo sapiens
  misc_RNA (1)...(19): siRNA sense strand
aaagugaaucugagaggaa

SEQ ID NO: 113995 - RNA, 19 nt, Homo sapiens
  misc_RNA (1)...(19): siRNA sense strand
uguagagcuucggcaguua

SEQ ID NO: 113996 - RNA, 19 nt, Homo sapiens
  misc_RNA (1)...(19): siRNA sense strand
gcucauucauggacauugc

SEQ ID NO: 113997 - RNA, 19 nt, Homo sapiens
  misc_RNA (1)...(19): siRNA sense strand
gugugaaccauccuaauau

SEQ ID NO: 113998 - RNA, 19 nt, Homo sapiens
  misc_RNA (1)...(19): siRNA sense strand
caguauccuugucaguauu

SEQ ID NO: 113999 - RNA, 19 nt, Homo sapiens
  misc_RNA (1)...(19): siRNA sense strand
ccaaggaguggcuuaucuu

SEQ ID NO: 114000 - RNA, 19 nt, Homo sapiens
  misc_RNA (1)...(19): siRNA sense strand
gugaaccauccuaauauug

SEQ ID NO: 114001 - RNA, 19 nt, Homo sapiens
  misc_RNA (1)...(19): siRNA sense strand
gaucgagguggaagagguu

SEQ ID NO: 114002 - RNA, 19 nt, Homo sapiens
  misc_RNA (1)...(19): siRNA sense strand
uuauggagccugcuugaau

SEQ ID NO: 114003 - RNA, 19 nt, Homo sapiens
  misc_RNA (1)...(19): siRNA sense strand
aagugaaucugagaggaaa

SEQ ID NO: 114004 - RNA, 19 nt, Homo sapiens
  misc_RNA (1)...(19): siRNA sense strand
acaacuagaggucaucaga

SEQ ID NO: 114005 - RNA, 19 nt, Homo sapiens
  misc_RNA (1)...(19): siRNA sense strand
caaagcaacagagugaauc

SEQ ID NO: 114006 - RNA, 19 nt, Homo sapiens
  misc_RNA (1)...(19): siRNA sense strand
ggacauugcuucuacaaau

SEQ ID NO: 114007 - RNA, 19 nt, Homo sapiens
  misc_RNA (1)...(19): siRNA sense strand
gagugaaucuggacguuua

SEQ ID NO: 114008 - RNA, 19 nt, Homo sapiens
  misc_RNA (1)...(19): siRNA sense strand
ugacaugucugaaauagaa

SEQ ID NO: 114009 - RNA, 19 nt, Homo sapiens
  misc_RNA (1)...(19): siRNA sense strand
gaggaaagcguuuauugua

SEQ ID NO: 114010 - RNA, 19 nt, Homo sapiens
  misc_RNA (1)...(19): siRNA sense strand
ggaaagcguuuauuguaga

SEQ ID NO: 114011 - RNA, 19 nt, Homo sapiens
  misc_RNA (1)...(19): siRNA sense strand
gaaccauccuaauauugua

SEQ ID NO: 114012 - RNA, 19 nt, Homo sapiens
  misc_RNA (1)...(19): siRNA sense strand
agacacacaugaccaauaa

SEQ ID NO: 114013 - RNA, 19 nt, Homo sapiens
  misc_RNA (1)...(19): siRNA sense strand
gacauugcuucuacaaaua

SEQ ID NO: 114014 - RNA, 19 nt, Homo sapiens
  misc_RNA (1)...(19): siRNA sense strand
gcaaugaguugguguuuac

SEQ ID NO: 114015 - RNA, 19 nt, Homo sapiens
  misc_RNA (1)...(19): siRNA sense strand
ggaagagguuguuggaaga

SEQ ID NO: 114016 - RNA, 19 nt, Homo sapiens
  misc_RNA (1)...(19): siRNA sense strand
gcaaguuccugccacaaau

SEQ ID NO: 114017 - RNA, 19 nt, Homo sapiens
  misc_RNA (1)...(19): siRNA sense strand
gaaccauugccauauuaua

SEQ ID NO: 114018 - RNA, 19 nt, Homo sapiens
  misc_RNA (1)...(19): siRNA sense strand
gaaacccuuugaugagauu

SEQ ID NO: 114019 - RNA, 19 nt, Homo sapiens
  misc_RNA (1)...(19): siRNA sense strand
ggaguuguuugcaaagcua

SEQ ID NO: 114020 - RNA, 19 nt, Homo sapiens
  misc_RNA (1)...(19): siRNA sense strand
cagaugagccauuacagua

SEQ ID NO: 114021 - RNA, 19 nt, Homo sapiens
  misc_RNA (1)...(19): siRNA sense strand
aauaaugacucacuugaug

SEQ ID NO: 114022 - RNA, 19 nt, Homo sapiens
  misc_RNA (1)...(19): siRNA sense strand
gcugaaccauugccauauu

SEQ ID NO: 114023 - RNA, 19 nt, Homo sapiens
  misc_RNA (1)...(19): siRNA sense strand
gagaggaaagcguuuauug

SEQ ID NO: 114024 - RNA, 19 nt, Homo sapiens
  misc_RNA (1)...(19): siRNA sense strand
gguaguaauuacagugaaa

SEQ ID NO: 114025 - RNA, 19 nt, Homo sapiens
  misc_RNA (1)...(19): siRNA sense strand
ccugaaaccaccaaacuua

SEQ ID NO: 114026 - RNA, 19 nt, Homo sapiens
  misc_RNA (1)...(19): siRNA sense strand
gaggaugagugcugacaug

SEQ ID NO: 114027 - RNA, 19 nt, Homo sapiens
  misc_RNA (1)...(19): siRNA sense strand
gaugagugcugacaugucu

SEQ ID NO: 114028 - RNA, 19 nt, Homo sapiens
  misc_RNA (1)...(19): siRNA sense strand
caugugggcuguucauaau

SEQ ID NO: 114029 - RNA, 19 nt, Homo sapiens
  misc_RNA (1)...(19): siRNA sense strand
guagauccauccaagacuu

SEQ ID NO: 114030 - RNA, 19 nt, Homo sapiens
  misc_RNA (1)...(19): siRNA sense strand
ggaaacccuuugaugagau

SEQ ID NO: 114031 - RNA, 19 nt, Homo sapiens
  misc_RNA (1)...(19): siRNA sense strand
uugaagagaucgacuacaa

SEQ ID NO: 114032 - RNA, 19 nt, Homo sapiens
  misc_RNA (1)...(19): siRNA sense strand
cugaaccauugccauauua

SEQ ID NO: 114033 - RNA, 19 nt, Homo sapiens
  misc_RNA (1)...(19): siRNA sense strand
ggaggaaauugugaaaaua

SEQ ID NO: 114034 - RNA, 19 nt, Homo sapiens
  misc_RNA (1)...(19): siRNA sense strand
gugcugacaugucugaaau

SEQ ID NO: 114035 - RNA, 19 nt, Homo sapiens
  misc_RNA (1)...(19): siRNA sense strand
gaugagccauuacaguauc

SEQ ID NO: 114036 - RNA, 19 nt, Homo sapiens
  misc_RNA (1)...(19): siRNA sense strand
cccaauggcuuaucuuaca

SEQ ID NO: 114037 - RNA, 19 nt, Homo sapiens
  misc_RNA (1)...(19): siRNA sense strand
acacuaauauggagcaagu

SEQ ID NO: 114038 - RNA, 19 nt, Homo sapiens
  misc_RNA (1)...(19): siRNA sense strand
ccugaugauuccacagaua

SEQ ID NO: 114039 - RNA, 19 nt, Homo sapiens
  misc_RNA (1)...(19): siRNA sense strand
gcaaagcaacagagugaau

SEQ ID NO: 114040 - RNA, 19 nt, Homo sapiens
  misc_RNA (1)...(19): siRNA sense strand
cgugugaaccauccuaaua

SEQ ID NO: 114041 - RNA, 19 nt, Homo sapiens
  misc_RNA (1)...(19): siRNA sense strand
gaaagcguuuauuguagag

SEQ ID NO: 114042 - RNA, 19 nt, Homo sapiens
  misc_RNA (1)...(19): siRNA sense strand
gcaguuaucccgugugaac

SEQ ID NO: 114043 - RNA, 19 nt, Homo sapiens
  misc_RNA (1)...(19): siRNA sense strand
gcugacaugucugaaauag

SEQ ID NO: 114044 - RNA, 19 nt, Homo sapiens
  misc_RNA (1)...(19): siRNA sense strand
gugcugaaccauugccaua

SEQ ID NO: 114045 - RNA, 19 nt, Homo sapiens
  misc_RNA (1)...(19): siRNA sense strand
ugugaaccauccuaauauu

SEQ ID NO: 114046 - RNA, 19 nt, Homo sapiens
  misc_RNA (1)...(19): siRNA sense strand
cggaaacccuuugaugaga

SEQ ID NO: 114047 - RNA, 19 nt, Homo sapiens
  misc_RNA (1)...(19): siRNA sense strand
aagaggagccuuuggaguu

SEQ ID NO: 114048 - RNA, 19 nt, Homo sapiens
  misc_RNA (1)...(19): siRNA sense strand
ggacagccaagacguagau

SEQ ID NO: 114049 - RNA, 19 nt, Homo sapiens
  misc_RNA (1)...(19): siRNA sense strand
aggagcagaugagccauua

SEQ ID NO: 114050 - RNA, 19 nt, Homo sapiens
  misc_RNA (1)...(19): siRNA sense strand
gaguugguguuuacagugu

SEQ ID NO: 114051 - RNA, 19 nt, Homo sapiens
  misc_RNA (1)...(19): siRNA sense strand
acaguauccuugucaguau

SEQ ID NO: 114052 - RNA, 19 nt, Homo sapiens
  misc_RNA (1)...(19): siRNA sense strand
cgcaaugaguugguguuua

SEQ ID NO: 114053 - RNA, 19 nt, Homo sapiens
  misc_RNA (1)...(19): siRNA sense strand
gcagaugagccauuacagu

SEQ ID NO: 114054 - RNA, 19 nt, Homo sapiens
  misc_RNA (1)...(19): siRNA sense strand
gagcagaugagccauuaca

SEQ ID NO: 114055 - RNA, 19 nt, Homo sapiens
  misc_RNA (1)...(19): siRNA sense strand
uacacuggaucaccaacua

SEQ ID NO: 114056 - RNA, 19 nt, Homo sapiens
  misc_RNA (1)...(19): siRNA sense strand
aaagcuaaguggagagcaa

SEQ ID NO: 114057 - RNA, 19 nt, Homo sapiens
  misc_RNA (1)...(19): siRNA sense strand
ggagcaguguggagagcuu

SEQ ID NO: 114058 - RNA, 19 nt, Homo sapiens
  misc_RNA (1)...(19): siRNA sense strand
cagacacacaugaccaaua

SEQ ID NO: 114059 - RNA, 19 nt, Homo sapiens
  misc_RNA (1)...(19): siRNA sense strand
cuacaaauacgaguaacaa

SEQ ID NO: 114060 - RNA, 19 nt, Homo sapiens
  misc_RNA (1)...(19): siRNA sense strand
gcccuucaauggaggaaau

SEQ ID NO: 114061 - RNA, 19 nt, Homo sapiens
  misc_RNA (1)...(19): siRNA sense strand
aaauuuaccuaagcccauu

SEQ ID NO: 114062 - RNA, 19 nt, Homo sapiens
  misc_RNA (1)...(19): siRNA sense strand
cgaaucaugugggcuguuc

SEQ ID NO: 114063 - RNA, 19 nt, Homo sapiens
  misc_RNA (1)...(19): siRNA sense strand
uggcuuaucuucacagcau

SEQ ID NO: 114064 - RNA, 19 nt, Homo sapiens
  misc_RNA (1)...(19): siRNA sense strand
gauaccaauggaucagaua

SEQ ID NO: 114065 - RNA, 19 nt, Homo sapiens
  misc_RNA (1)...(19): siRNA sense strand
cccagugucagaaugauua

SEQ ID NO: 114066 - RNA, 19 nt, Homo sapiens
  misc_RNA (1)...(19): siRNA sense strand
ucaugugggcuguucauaa

SEQ ID NO: 114067 - RNA, 19 nt, Homo sapiens
  misc_RNA (1)...(19): siRNA sense strand
gaaaccaccaaacuuacug

SEQ ID NO: 114068 - RNA, 19 nt, Homo sapiens
  misc_RNA (1)...(19): siRNA sense strand
gaaaauaaugacucacuug

SEQ ID NO: 114069 - RNA, 19 nt, Homo sapiens
  misc_RNA (1)...(19): siRNA sense strand
ugccacaaaugauacuauu

SEQ ID NO: 114070 - RNA, 19 nt, Homo sapiens
  misc_RNA (1)...(19): siRNA sense strand
aggaaagcguuuauuguag

SEQ ID NO: 114071 - RNA, 19 nt, Homo sapiens
  misc_RNA (1)...(19): siRNA sense strand
agaggagccuuuggaguug

SEQ ID NO: 114072 - RNA, 19 nt, Homo sapiens
  misc_RNA (1)...(19): siRNA sense strand
gccacaaaugauacuauua

SEQ ID NO: 114073 - RNA, 19 nt, Homo sapiens
  misc_RNA (1)...(19): siRNA sense strand
ggaguggcuuaucuucaca

SEQ ID NO: 114074 - RNA, 19 nt, Homo sapiens
  misc_RNA (1)...(19): siRNA sense strand
ugaaccauccuaauauugu

SEQ ID NO: 114075 - RNA, 19 nt, Homo sapiens
  misc_RNA (1)...(19): siRNA sense strand
cggcaguuaucccguguga

SEQ ID NO: 114076 - RNA, 19 nt, Homo sapiens
  misc_RNA (1)...(19): siRNA sense strand
uauggagccugcuugaauc

SEQ ID NO: 114077 - RNA, 19 nt, Homo sapiens
  misc_RNA (1)...(19): siRNA sense strand
guuccugccacaaaugaua

SEQ ID NO: 114078 - RNA, 19 nt, Homo sapiens
  misc_RNA (1)...(19): siRNA sense strand
gguacucgaccaccacuga

SEQ ID NO: 114079 - RNA, 19 nt, Homo sapiens
  misc_RNA (1)...(19): siRNA sense strand
aauccagugugucuuguga

SEQ ID NO: 114080 - RNA, 19 nt, Homo sapiens
  misc_RNA (1)...(19): siRNA sense strand
ucauggacauugcuucuac

SEQ ID NO: 114081 - RNA, 19 nt, Homo sapiens
  misc_RNA (1)...(19): siRNA sense strand
uacaguauccuugucagua

SEQ ID NO: 114082 - RNA, 19 nt, Homo sapiens
  misc_RNA (1)...(19): siRNA sense strand
gucggaaacccuuugauga

SEQ ID NO: 114083 - RNA, 19 nt, Homo sapiens
  misc_RNA (1)...(19): siRNA sense strand
gacauucagacacacauga

SEQ ID NO: 114084 - RNA, 19 nt, Homo sapiens
  misc_RNA (1)...(19): siRNA sense strand
cagugugucuugugaugga

SEQ ID NO: 114085 - RNA, 19 nt, Homo sapiens
  misc_RNA (1)...(19): siRNA sense strand
aggcaaagcaacagaguga

SEQ ID NO: 114086 - RNA, 19 nt, Homo sapiens
  misc_RNA (1)...(19): siRNA sense strand
gcgcuuagaaucaaaauug

SEQ ID NO: 114087 - RNA, 19 nt, Homo sapiens
  misc_RNA (1)...(19): siRNA sense strand
caacccaaagcgcuaauuc

SEQ ID NO: 114088 - RNA, 19 nt, Homo sapiens
  misc_RNA (1)...(19): siRNA sense strand
gugugaaccauccuaauau

SEQ ID NO: 114089 - RNA, 19 nt, Homo sapiens
  misc_RNA (1)...(19): siRNA sense strand
gcucauucauggacauugc

SEQ ID NO: 114090 - RNA, 19 nt, Homo sapiens
  misc_RNA (1)...(19): siRNA sense strand
caguauccuugucaguauu

SEQ ID NO: 114091 - RNA, 19 nt, Homo sapiens
  misc_RNA (1)...(19): siRNA sense strand
aaagugaaucugagaggaa

SEQ ID NO: 114092 - RNA, 19 nt, Homo sapiens
  misc_RNA (1)...(19): siRNA sense strand
uguagagcuucggcaguua

SEQ ID NO: 114093 - RNA, 19 nt, Homo sapiens
  misc_RNA (1)...(19): siRNA sense strand
gugaaccauccuaauauug

SEQ ID NO: 114094 - RNA, 19 nt, Homo sapiens
  misc_RNA (1)...(19): siRNA sense strand
gaucgagguggaagagguu

SEQ ID NO: 114095 - RNA, 19 nt, Homo sapiens
  misc_RNA (1)...(19): siRNA sense strand
ccaaggaguggcuuaucuu

SEQ ID NO: 114096 - RNA, 19 nt, Homo sapiens
  misc_RNA (1)...(19): siRNA sense strand
uuauggagccugcuugaau

SEQ ID NO: 114097 - RNA, 19 nt, Homo sapiens
  misc_RNA (1)...(19): siRNA sense strand
caaggaguggcuuaucuuc

SEQ ID NO: 114098 - RNA, 19 nt, Homo sapiens
  misc_RNA (1)...(19): siRNA sense strand
caaagcaacagagugaauc

SEQ ID NO: 114099 - RNA, 19 nt, Homo sapiens
  misc_RNA (1)...(19): siRNA sense strand
acacaugaccaauaacaag

SEQ ID NO: 114100 - RNA, 19 nt, Homo sapiens
  misc_RNA (1)...(19): siRNA sense strand
aagugaaucugagaggaaa

SEQ ID NO: 114101 - RNA, 19 nt, Homo sapiens
  misc_RNA (1)...(19): siRNA sense strand
gaccugaaaccaccaaacu

SEQ ID NO: 114102 - RNA, 19 nt, Homo sapiens
  misc_RNA (1)...(19): siRNA sense strand
guagagcuucggcaguuau

SEQ ID NO: 114103 - RNA, 19 nt, Homo sapiens
  misc_RNA (1)...(19): siRNA sense strand
agaggaaagcguuuauugu

SEQ ID NO: 114104 - RNA, 19 nt, Homo sapiens
  misc_RNA (1)...(19): siRNA sense strand
gguggaagagguuguugga

SEQ ID NO: 114105 - RNA, 19 nt, Homo sapiens
  misc_RNA (1)...(19): siRNA sense strand
uggcccagcuuuccgaauc

SEQ ID NO: 114106 - RNA, 19 nt, Homo sapiens
  misc_RNA (1)...(19): siRNA sense strand
ggacauugcuucuacaaau

SEQ ID NO: 114107 - RNA, 19 nt, Homo sapiens
  misc_RNA (1)...(19): siRNA sense strand
gagugaaucuggacguuua

SEQ ID NO: 114108 - RNA, 19 nt, Homo sapiens
  misc_RNA (1)...(19): siRNA sense strand
ugacaugucugaaauagaa

SEQ ID NO: 114109 - RNA, 19 nt, Homo sapiens
  misc_RNA (1)...(19): siRNA sense strand
gaggaaagcguuuauugua

SEQ ID NO: 114110 - RNA, 19 nt, Homo sapiens
  misc_RNA (1)...(19): siRNA sense strand
ggaaagcguuuauuguaga

SEQ ID NO: 114111 - RNA, 19 nt, Homo sapiens
  misc_RNA (1)...(19): siRNA sense strand
gaaccauccuaauauugua

SEQ ID NO: 114112 - RNA, 19 nt, Homo sapiens
  misc_RNA (1)...(19): siRNA sense strand
agacacacaugaccaauaa

SEQ ID NO: 114113 - RNA, 19 nt, Homo sapiens
  misc_RNA (1)...(19): siRNA sense strand
gacauugcuucuacaaaua

SEQ ID NO: 114114 - RNA, 19 nt, Homo sapiens
  misc_RNA (1)...(19): siRNA sense strand
gcaaugaguugguguuuac

SEQ ID NO: 114115 - RNA, 19 nt, Homo sapiens
  misc_RNA (1)...(19): siRNA sense strand
ggaagagguuguuggaaga

SEQ ID NO: 114116 - RNA, 19 nt, Homo sapiens
  misc_RNA (1)...(19): siRNA sense strand
gcaaguuccugccacaaau

SEQ ID NO: 114117 - RNA, 19 nt, Homo sapiens
  misc_RNA (1)...(19): siRNA sense strand
gaaccauugccauauuaua

SEQ ID NO: 114118 - RNA, 19 nt, Homo sapiens
  misc_RNA (1)...(19): siRNA sense strand
gaaacccuuugaugagauu

SEQ ID NO: 114119 - RNA, 19 nt, Homo sapiens
  misc_RNA (1)...(19): siRNA sense strand
ggaguuguuugcaaagcua

SEQ ID NO: 114120 - RNA, 19 nt, Homo sapiens
  misc_RNA (1)...(19): siRNA sense strand
cagaugagccauuacagua

SEQ ID NO: 114121 - RNA, 19 nt, Homo sapiens
  misc_RNA (1)...(19): siRNA sense strand
aauaaugacucacuugaug

SEQ ID NO: 114122 - RNA, 19 nt, Homo sapiens
  misc_RNA (1)...(19): siRNA sense strand
gcugaaccauugccauauu

SEQ ID NO: 114123 - RNA, 19 nt, Homo sapiens
  misc_RNA (1)...(19): siRNA sense strand
gagaggaaagcguuuauug

SEQ ID NO: 114124 - RNA, 19 nt, Homo sapiens
  misc_RNA (1)...(19): siRNA sense strand
gguaguaauuacagugaaa

SEQ ID NO: 114125 - RNA, 19 nt, Homo sapiens
  misc_RNA (1)...(19): siRNA sense strand
ccugaaaccaccaaacuua

SEQ ID NO: 114126 - RNA, 19 nt, Homo sapiens
  misc_RNA (1)...(19): siRNA sense strand
gaggaugagugcugacaug

SEQ ID NO: 114127 - RNA, 19 nt, Homo sapiens
  misc_RNA (1)...(19): siRNA sense strand
gaugagugcugacaugucu

SEQ ID NO: 114128 - RNA, 19 nt, Homo sapiens
  misc_RNA (1)...(19): siRNA sense strand
caugugggcuguucauaau

SEQ ID NO: 114129 - RNA, 19 nt, Homo sapiens
  misc_RNA (1)...(19): siRNA sense strand
guagauccauccaagacuu

SEQ ID NO: 114130 - RNA, 19 nt, Homo sapiens
  misc_RNA (1)...(19): siRNA sense strand
ggaaacccuuugaugagau

SEQ ID NO: 114131 - RNA, 19 nt, Homo sapiens
  misc_RNA (1)...(19): siRNA sense strand
uugaagagaucgacuacaa

SEQ ID NO: 114132 - RNA, 19 nt, Homo sapiens
  misc_RNA (1)...(19): siRNA sense strand
cugaaccauugccauauua

SEQ ID NO: 114133 - RNA, 19 nt, Homo sapiens
  misc_RNA (1)...(19): siRNA sense strand
ggaggaaauugugaaaaua

SEQ ID NO: 114134 - RNA, 19 nt, Homo sapiens
  misc_RNA (1)...(19): siRNA sense strand
gugcugacaugucugaaau

SEQ ID NO: 114135 - RNA, 19 nt, Homo sapiens
  misc_RNA (1)...(19): siRNA sense strand
gaugagccauuacaguauc

SEQ ID NO: 114136 - RNA, 19 nt, Homo sapiens
  misc_RNA (1)...(19): siRNA sense strand
cccaauggcuuaucuuaca

SEQ ID NO: 114137 - RNA, 19 nt, Homo sapiens
  misc_RNA (1)...(19): siRNA sense strand
acacuaauauggagcaagu

SEQ ID NO: 114138 - RNA, 19 nt, Homo sapiens
  misc_RNA (1)...(19): siRNA sense strand
ccugaugauuccacagaua

SEQ ID NO: 114139 - RNA, 19 nt, Homo sapiens
  misc_RNA (1)...(19): siRNA sense strand
gcaaagcaacagagugaau

SEQ ID NO: 114140 - RNA, 19 nt, Homo sapiens
  misc_RNA (1)...(19): siRNA sense strand
cgugugaaccauccuaaua

SEQ ID NO: 114141 - RNA, 19 nt, Homo sapiens
  misc_RNA (1)...(19): siRNA sense strand
gaaagcguuuauuguagag

SEQ ID NO: 114142 - RNA, 19 nt, Homo sapiens
  misc_RNA (1)...(19): siRNA sense strand
gcaguuaucccgugugaac

SEQ ID NO: 114143 - RNA, 19 nt, Homo sapiens
  misc_RNA (1)...(19): siRNA sense strand
gcugacaugucugaaauag

SEQ ID NO: 114144 - RNA, 19 nt, Homo sapiens
  misc_RNA (1)...(19): siRNA sense strand
gugcugaaccauugccaua

SEQ ID NO: 114145 - RNA, 19 nt, Homo sapiens
  misc_RNA (1)...(19): siRNA sense strand
ugugaaccauccuaauauu

SEQ ID NO: 114146 - RNA, 19 nt, Homo sapiens
  misc_RNA (1)...(19): siRNA sense strand
cggaaacccuuugaugaga

SEQ ID NO: 114147 - RNA, 19 nt, Homo sapiens
  misc_RNA (1)...(19): siRNA sense strand
aagaggagccuuuggaguu

SEQ ID NO: 114148 - RNA, 19 nt, Homo sapiens
  misc_RNA (1)...(19): siRNA sense strand
ggacagccaagacguagau

SEQ ID NO: 114149 - RNA, 19 nt, Homo sapiens
  misc_RNA (1)...(19): siRNA sense strand
aggagcagaugagccauua

SEQ ID NO: 114150 - RNA, 19 nt, Homo sapiens
  misc_RNA (1)...(19): siRNA sense strand
gaguugguguuuacagugu

SEQ ID NO: 114151 - RNA, 19 nt, Homo sapiens
  misc_RNA (1)...(19): siRNA sense strand
acaguauccuugucaguau

SEQ ID NO: 114152 - RNA, 19 nt, Homo sapiens
  misc_RNA (1)...(19): siRNA sense strand
cgcaaugaguugguguuua

SEQ ID NO: 114153 - RNA, 19 nt, Homo sapiens
  misc_RNA (1)...(19): siRNA sense strand
gcagaugagccauuacagu

SEQ ID NO: 114154 - RNA, 19 nt, Homo sapiens
  misc_RNA (1)...(19): siRNA sense strand
gagcagaugagccauuaca

SEQ ID NO: 114155 - RNA, 19 nt, Homo sapiens
  misc_RNA (1)...(19): siRNA sense strand
uacacuggaucaccaacua

SEQ ID NO: 114156 - RNA, 19 nt, Homo sapiens
  misc_RNA (1)...(19): siRNA sense strand
aaagcuaaguggagagcaa

SEQ ID NO: 114157 - RNA, 19 nt, Homo sapiens
  misc_RNA (1)...(19): siRNA sense strand
ggagcaguguggagagcuu

SEQ ID NO: 114158 - RNA, 19 nt, Homo sapiens
  misc_RNA (1)...(19): siRNA sense strand
cagacacacaugaccaaua

SEQ ID NO: 114159 - RNA, 19 nt, Homo sapiens
  misc_RNA (1)...(19): siRNA sense strand
cuacaaauacgaguaacaa

SEQ ID NO: 114160 - RNA, 19 nt, Homo sapiens
  misc_RNA (1)...(19): siRNA sense strand
gcccuucaauggaggaaau

SEQ ID NO: 114161 - RNA, 19 nt, Homo sapiens
  misc_RNA (1)...(19): siRNA sense strand
aaauuuaccuaagcccauu

SEQ ID NO: 114162 - RNA, 19 nt, Homo sapiens
  misc_RNA (1)...(19): siRNA sense strand
cgaaucaugugggcuguuc

SEQ ID NO: 114163 - RNA, 19 nt, Homo sapiens
  misc_RNA (1)...(19): siRNA sense strand
uggcuuaucuucacagcau

SEQ ID NO: 114164 - RNA, 19 nt, Homo sapiens
  misc_RNA (1)...(19): siRNA sense strand
gauaccaauggaucagaua

SEQ ID NO: 114165 - RNA, 19 nt, Homo sapiens
  misc_RNA (1)...(19): siRNA sense strand
cccagugucagaaugauua

SEQ ID NO: 114166 - RNA, 19 nt, Homo sapiens
  misc_RNA (1)...(19): siRNA sense strand
ucaugugggcuguucauaa

SEQ ID NO: 114167 - RNA, 19 nt, Homo sapiens
  misc_RNA (1)...(19): siRNA sense strand
gaaaccaccaaacuuacug

SEQ ID NO: 114168 - RNA, 19 nt, Homo sapiens
  misc_RNA (1)...(19): siRNA sense strand
gaaaauaaugacucacuug

SEQ ID NO: 114169 - RNA, 19 nt, Homo sapiens
  misc_RNA (1)...(19): siRNA sense strand
ugccacaaaugauacuauu

SEQ ID NO: 114170 - RNA, 19 nt, Homo sapiens
  misc_RNA (1)...(19): siRNA sense strand
aggaaagcguuuauuguag

SEQ ID NO: 114171 - RNA, 19 nt, Homo sapiens
  misc_RNA (1)...(19): siRNA sense strand
agaggagccuuuggaguug

SEQ ID NO: 114172 - RNA, 19 nt, Homo sapiens
  misc_RNA (1)...(19): siRNA sense strand
gccacaaaugauacuauua

SEQ ID NO: 114173 - RNA, 19 nt, Homo sapiens
  misc_RNA (1)...(19): siRNA sense strand
ggaguggcuuaucuucaca

SEQ ID NO: 114174 - RNA, 19 nt, Homo sapiens
  misc_RNA (1)...(19): siRNA sense strand
ugaaccauccuaauauugu

SEQ ID NO: 114175 - RNA, 19 nt, Homo sapiens
  misc_RNA (1)...(19): siRNA sense strand
cggcaguuaucccguguga

SEQ ID NO: 114176 - RNA, 19 nt, Homo sapiens
  misc_RNA (1)...(19): siRNA sense strand
uauggagccugcuugaauc

SEQ ID NO: 114177 - RNA, 19 nt, Homo sapiens
  misc_RNA (1)...(19): siRNA sense strand
guuccugccacaaaugaua

SEQ ID NO: 114178 - RNA, 19 nt, Homo sapiens
  misc_RNA (1)...(19): siRNA sense strand
gguacucgaccaccacuga

SEQ ID NO: 114179 - RNA, 19 nt, Homo sapiens
  misc_RNA (1)...(19): siRNA sense strand
aauccagugugucuuguga

SEQ ID NO: 114180 - RNA, 19 nt, Homo sapiens
  misc_RNA (1)...(19): siRNA sense strand
ucauggacauugcuucuac

SEQ ID NO: 114181 - RNA, 19 nt, Homo sapiens
  misc_RNA (1)...(19): siRNA sense strand
uacaguauccuugucagua

SEQ ID NO: 114182 - RNA, 19 nt, Homo sapiens
  misc_RNA (1)...(19): siRNA sense strand
gucggaaacccuuugauga

SEQ ID NO: 114183 - RNA, 19 nt, Homo sapiens
  misc_RNA (1)...(19): siRNA sense strand
gacauucagacacacauga

SEQ ID NO: 114184 - RNA, 19 nt, Homo sapiens
  misc_RNA (1)...(19): siRNA sense strand
cagugugucuugugaugga

SEQ ID NO: 114185 - RNA, 19 nt, Homo sapiens
  misc_RNA (1)...(19): siRNA sense strand
aggcaaagcaacagaguga

SEQ ID NO: 114186 - RNA, 19 nt, Homo sapiens
  misc_RNA (1)...(19): siRNA sense strand
gcgcuuagaaucaaaauug

SEQ ID NO: 114187 - RNA, 19 nt, Homo sapiens
  misc_RNA (1)...(19): siRNA sense strand
caacccaaagcgcuaauuc

SEQ ID NO: 114188 - RNA, 19 nt, Homo sapiens
  misc_RNA (1)...(19): siRNA sense strand
gugugaaccauccuaauau

SEQ ID NO: 114189 - RNA, 19 nt, Homo sapiens
  misc_RNA (1)...(19): siRNA sense strand
gcucauucauggacauugc

SEQ ID NO: 114190 - RNA, 19 nt, Homo sapiens
  misc_RNA (1)...(19): siRNA sense strand
caguauccuugucaguauu

SEQ ID NO: 114191 - RNA, 19 nt, Homo sapiens
  misc_RNA (1)...(19): siRNA sense strand
aaagugaaucugagaggaa

SEQ ID NO: 114192 - RNA, 19 nt, Homo sapiens
  misc_RNA (1)...(19): siRNA sense strand
uguagagcuucggcaguua

SEQ ID NO: 114193 - RNA, 19 nt, Homo sapiens
  misc_RNA (1)...(19): siRNA sense strand
gugaaccauccuaauauug

SEQ ID NO: 114194 - RNA, 19 nt, Homo sapiens
  misc_RNA (1)...(19): siRNA sense strand
gaucgagguggaagagguu

SEQ ID NO: 114195 - RNA, 19 nt, Homo sapiens
  misc_RNA (1)...(19): siRNA sense strand
ccaaggaguggcuuaucuu

SEQ ID NO: 114196 - RNA, 19 nt, Homo sapiens
  misc_RNA (1)...(19): siRNA sense strand
uuauggagccugcuugaau

SEQ ID NO: 114197 - RNA, 19 nt, Homo sapiens
  misc_RNA (1)...(19): siRNA sense strand
caaggaguggcuuaucuuc

SEQ ID NO: 114198 - RNA, 19 nt, Homo sapiens
  misc_RNA (1)...(19): siRNA sense strand
caaagcaacagagugaauc

SEQ ID NO: 114199 - RNA, 19 nt, Homo sapiens
  misc_RNA (1)...(19): siRNA sense strand
acacaugaccaauaacaag

SEQ ID NO: 114200 - RNA, 19 nt, Homo sapiens
  misc_RNA (1)...(19): siRNA sense strand
aagugaaucugagaggaaa

SEQ ID NO: 114201 - RNA, 19 nt, Homo sapiens
  misc_RNA (1)...(19): siRNA sense strand
gaccugaaaccaccaaacu

SEQ ID NO: 114202 - RNA, 19 nt, Homo sapiens
  misc_RNA (1)...(19): siRNA sense strand
guagagcuucggcaguuau

SEQ ID NO: 114203 - RNA, 19 nt, Homo sapiens
  misc_RNA (1)...(19): siRNA sense strand
agaggaaagcguuuauugu

SEQ ID NO: 114204 - RNA, 19 nt, Homo sapiens
  misc_RNA (1)...(19): siRNA sense strand
gguggaagagguuguugga

SEQ ID NO: 114205 - RNA, 19 nt, Homo sapiens
  misc_RNA (1)...(19): siRNA sense strand
uggcccagcuuuccgaauc

SEQ ID NO: 114206 - RNA, 19 nt, Homo sapiens
  misc_RNA (1)...(19): siRNA sense strand
ggaacgauguugacgauuu

SEQ ID NO: 114207 - RNA, 19 nt, Homo sapiens
  misc_RNA (1)...(19): siRNA sense strand
cgagagcucugguuuagau

SEQ ID NO: 114208 - RNA, 19 nt, Homo sapiens
  misc_RNA (1)...(19): siRNA sense strand
gaaggagaacagccacuuu

SEQ ID NO: 114209 - RNA, 19 nt, Homo sapiens
  misc_RNA (1)...(19): siRNA sense strand
gaacgauguugacgauuuu

SEQ ID NO: 114210 - RNA, 19 nt, Homo sapiens
  misc_RNA (1)...(19): siRNA sense strand
caacagcuccgcauacaca

SEQ ID NO: 114211 - RNA, 19 nt, Homo sapiens
  misc_RNA (1)...(19): siRNA sense strand
guugaaaggcggaaacaaa

SEQ ID NO: 114212 - RNA, 19 nt, Homo sapiens
  misc_RNA (1)...(19): siRNA sense strand
gaacggcagcuggaaguug

SEQ ID NO: 114213 - RNA, 19 nt, Homo sapiens
  misc_RNA (1)...(19): siRNA sense strand
ucagagacgcgaacaagaa

SEQ ID NO: 114214 - RNA, 19 nt, Homo sapiens
  misc_RNA (1)...(19): siRNA sense strand
gaaacuaaucaacgacuca

SEQ ID NO: 114215 - RNA, 19 nt, Homo sapiens
  misc_RNA (1)...(19): siRNA sense strand
gcauacacaguacgaaaga

SEQ ID NO: 114216 - RNA, 19 nt, Homo sapiens
  misc_RNA (1)...(19): siRNA sense strand
gaaauauccagugggacua

SEQ ID NO: 114217 - RNA, 19 nt, Homo sapiens
  misc_RNA (1)...(19): siRNA sense strand
gccaacagcuccgcauaca

SEQ ID NO: 114218 - RNA, 19 nt, Homo sapiens
  misc_RNA (1)...(19): siRNA sense strand
gaagaggagcgaaauaucc

SEQ ID NO: 114219 - RNA, 19 nt, Homo sapiens
  misc_RNA (1)...(19): siRNA sense strand
gaaccaggagguagagaag

SEQ ID NO: 114220 - RNA, 19 nt, Homo sapiens
  misc_RNA (1)...(19): siRNA sense strand
cuaaucaacgacucaguuu

SEQ ID NO: 114221 - RNA, 19 nt, Homo sapiens
  misc_RNA (1)...(19): siRNA sense strand
ugaccgaacugagcaacug

SEQ ID NO: 114222 - RNA, 19 nt, Homo sapiens
  misc_RNA (1)...(19): siRNA sense strand
cagcuccgcauacacagua

SEQ ID NO: 114223 - RNA, 19 nt, Homo sapiens
  misc_RNA (1)...(19): siRNA sense strand
ggucagacuguauggaaau

SEQ ID NO: 114224 - RNA, 19 nt, Homo sapiens
  misc_RNA (1)...(19): siRNA sense strand
ggagaucgacaaggacuuc

SEQ ID NO: 114225 - RNA, 19 nt, Homo sapiens
  misc_RNA (1)...(19): siRNA sense strand
aacggcagcuggaaguuga

SEQ ID NO: 114226 - RNA, 19 nt, Homo sapiens
  misc_RNA (1)...(19): siRNA sense strand
ggagcuacccggagaucga

SEQ ID NO: 114227 - RNA, 19 nt, Homo sapiens
  misc_RNA (1)...(19): siRNA sense strand
ugcagaaacuaaucaacga

SEQ ID NO: 114228 - RNA, 19 nt, Homo sapiens
  misc_RNA (1)...(19): siRNA sense strand
ccagcugggucugcgguuu

SEQ ID NO: 114229 - RNA, 19 nt, Homo sapiens
  misc_RNA (1)...(19): siRNA sense strand
gagcucugguuuagauagg

SEQ ID NO: 114230 - RNA, 19 nt, Homo sapiens
  misc_RNA (1)...(19): siRNA sense strand
acccggagaucgacaagga

SEQ ID NO: 114231 - RNA, 19 nt, Homo sapiens
  misc_RNA (1)...(19): siRNA sense strand
cccggcaguugaaagcaua

SEQ ID NO: 114232 - RNA, 19 nt, Homo sapiens
  misc_RNA (1)...(19): siRNA sense strand
ccgcauacacaguacgaaa

SEQ ID NO: 114233 - RNA, 19 nt, Homo sapiens
  misc_RNA (1)...(19): siRNA sense strand
cccaacacccugcggcuaa

SEQ ID NO: 114234 - RNA, 19 nt, Homo sapiens
  misc_RNA (1)...(19): siRNA sense strand
gaaguugaaaggcggaaac

SEQ ID NO: 114235 - RNA, 19 nt, Homo sapiens
  misc_RNA (1)...(19): siRNA sense strand
ugaagaggagcgaaauauc

SEQ ID NO: 114236 - RNA, 19 nt, Homo sapiens
  misc_RNA (1)...(19): siRNA sense strand
ccaaacuggaguauucuuc

SEQ ID NO: 114237 - RNA, 19 nt, Homo sapiens
  misc_RNA (1)...(19): siRNA sense strand
gauauggccuccccaaacu

SEQ ID NO: 114238 - RNA, 19 nt, Homo sapiens
  misc_RNA (1)...(19): siRNA sense strand
cuggaacgauguugacgau

SEQ ID NO: 114239 - RNA, 19 nt, Homo sapiens
  misc_RNA (1)...(19): siRNA sense strand
gcaccagcgcgacguucuu

SEQ ID NO: 114240 - RNA, 19 nt, Homo sapiens
  misc_RNA (1)...(19): siRNA sense strand
cuucgagagcucugguuua

SEQ ID NO: 114241 - RNA, 19 nt, Homo sapiens
  misc_RNA (1)...(19): siRNA sense strand
ggauccaguucgccccuua

SEQ ID NO: 114242 - RNA, 19 nt, Homo sapiens
  misc_RNA (1)...(19): siRNA sense strand
ccugaagaggagcgaaaua

SEQ ID NO: 114243 - RNA, 19 nt, Homo sapiens
  misc_RNA (1)...(19): siRNA sense strand
ggcagaaccaggagguaga

SEQ ID NO: 114244 - RNA, 19 nt, Homo sapiens
  misc_RNA (1)...(19): siRNA sense strand
cugaagaggagcgaaauau

SEQ ID NO: 114245 - RNA, 19 nt, Homo sapiens
  misc_RNA (1)...(19): siRNA sense strand
caaccuggagucccaaguc

SEQ ID NO: 114246 - RNA, 19 nt, Homo sapiens
  misc_RNA (1)...(19): siRNA sense strand
gagagcucugguuuagaua

SEQ ID NO: 114247 - RNA, 19 nt, Homo sapiens
  misc_RNA (1)...(19): siRNA sense strand
cggucagacuguauggaaa

SEQ ID NO: 114248 - RNA, 19 nt, Homo sapiens
  misc_RNA (1)...(19): siRNA sense strand
uucgagagcucugguuuag

SEQ ID NO: 114249 - RNA, 19 nt, Homo sapiens
  misc_RNA (1)...(19): siRNA sense strand
accaggagguagagaagga

SEQ ID NO: 114250 - RNA, 19 nt, Homo sapiens
  misc_RNA (1)...(19): siRNA sense strand
gagcaacugcacggucaga

SEQ ID NO: 114251 - RNA, 19 nt, Homo sapiens
  misc_RNA (1)...(19): siRNA sense strand
gcagcuggaaguugaaagg

SEQ ID NO: 114252 - RNA, 19 nt, Homo sapiens
  misc_RNA (1)...(19): siRNA sense strand
gggcugcagaaacuaauca

SEQ ID NO: 114253 - RNA, 19 nt, Homo sapiens
  misc_RNA (1)...(19): siRNA sense strand
aaauauccagugggacuaa

SEQ ID NO: 114254 - RNA, 19 nt, Homo sapiens
  misc_RNA (1)...(19): siRNA sense strand
caccagcgcgacguucuuu

SEQ ID NO: 114255 - RNA, 19 nt, Homo sapiens
  misc_RNA (1)...(19): siRNA sense strand
acuaaucaacgacucaguu

SEQ ID NO: 114256 - RNA, 19 nt, Homo sapiens
  misc_RNA (1)...(19): siRNA sense strand
ucaaugagcuagagaaguu

SEQ ID NO: 114257 - RNA, 19 nt, Homo sapiens
  misc_RNA (1)...(19): siRNA sense strand
gcugaagcauguccuaaua

SEQ ID NO: 114258 - RNA, 19 nt, Homo sapiens
  misc_RNA (1)...(19): siRNA sense strand
ugaagacgcugaacaaaug

SEQ ID NO: 114259 - RNA, 19 nt, Homo sapiens
  misc_RNA (1)...(19): siRNA sense strand
gaaauauggugcaccugaa

SEQ ID NO: 114260 - RNA, 19 nt, Homo sapiens
  misc_RNA (1)...(19): siRNA sense strand
gaaacaggcugguggacau

SEQ ID NO: 114261 - RNA, 19 nt, Homo sapiens
  misc_RNA (1)...(19): siRNA sense strand
ggaacagacuuucuuacug

SEQ ID NO: 114262 - RNA, 19 nt, Homo sapiens
  misc_RNA (1)...(19): siRNA sense strand
uaagaaccgcuauguguua

SEQ ID NO: 114263 - RNA, 19 nt, Homo sapiens
  misc_RNA (1)...(19): siRNA sense strand
gaaccgcuauguguuagaa

SEQ ID NO: 114264 - RNA, 19 nt, Homo sapiens
  misc_RNA (1)...(19): siRNA sense strand
ggaauuucuucucuacauu

SEQ ID NO: 114265 - RNA, 19 nt, Homo sapiens
  misc_RNA (1)...(19): siRNA sense strand
gaucuuuccucuaaucaau

SEQ ID NO: 114266 - RNA, 19 nt, Homo sapiens
  misc_RNA (1)...(19): siRNA sense strand
gaccaaagaggacaaagaa

SEQ ID NO: 114267 - RNA, 19 nt, Homo sapiens
  misc_RNA (1)...(19): siRNA sense strand
cuacuaacacugaagauaa

SEQ ID NO: 114268 - RNA, 19 nt, Homo sapiens
  misc_RNA (1)...(19): siRNA sense strand
ggucgaagaguugaaguua

SEQ ID NO: 114269 - RNA, 19 nt, Homo sapiens
  misc_RNA (1)...(19): siRNA sense strand
aaagucagcugagcaaguu

SEQ ID NO: 114270 - RNA, 19 nt, Homo sapiens
  misc_RNA (1)...(19): siRNA sense strand
gaccuaaagucauuacagu

SEQ ID NO: 114271 - RNA, 19 nt, Homo sapiens
  misc_RNA (1)...(19): siRNA sense strand
uggagaacaugcaacagua

SEQ ID NO: 114272 - RNA, 19 nt, Homo sapiens
  misc_RNA (1)...(19): siRNA sense strand
ucacagcccaucccagaua

SEQ ID NO: 114273 - RNA, 19 nt, Homo sapiens
  misc_RNA (1)...(19): siRNA sense strand
uggaggaacucuaccuuga

SEQ ID NO: 114274 - RNA, 19 nt, Homo sapiens
  misc_RNA (1)...(19): siRNA sense strand
ucgaagaguugaaguuaau

SEQ ID NO: 114275 - RNA, 19 nt, Homo sapiens
  misc_RNA (1)...(19): siRNA sense strand
ggacauaaggauccggaaa

SEQ ID NO: 114276 - RNA, 19 nt, Homo sapiens
  misc_RNA (1)...(19): siRNA sense strand
gcugucacgucuucucaaa

SEQ ID NO: 114277 - RNA, 19 nt, Homo sapiens
  misc_RNA (1)...(19): siRNA sense strand
aaacgacaaucagauauca

SEQ ID NO: 114278 - RNA, 19 nt, Homo sapiens
  misc_RNA (1)...(19): siRNA sense strand
ccuaaagucauuacaguuu

SEQ ID NO: 114279 - RNA, 19 nt, Homo sapiens
  misc_RNA (1)...(19): siRNA sense strand
ucucaaaguuccuguguca

SEQ ID NO: 114280 - RNA, 19 nt, Homo sapiens
  misc_RNA (1)...(19): siRNA sense strand
agaaaguccuggagaaaca

SEQ ID NO: 114281 - RNA, 19 nt, Homo sapiens
  misc_RNA (1)...(19): siRNA sense strand
cuagagaaguuaccaaguc

SEQ ID NO: 114282 - RNA, 19 nt, Homo sapiens
  misc_RNA (1)...(19): siRNA sense strand
acaaucagauaucacaaug

SEQ ID NO: 114283 - RNA, 19 nt, Homo sapiens
  misc_RNA (1)...(19): siRNA sense strand
gaccagaggaagauagaaa

SEQ ID NO: 114284 - RNA, 19 nt, Homo sapiens
  misc_RNA (1)...(19): siRNA sense strand
ggauugcugucacgucuuc

SEQ ID NO: 114285 - RNA, 19 nt, Homo sapiens
  misc_RNA (1)...(19): siRNA sense strand
ucccuccgguucaguauua

SEQ ID NO: 114286 - RNA, 19 nt, Homo sapiens
  misc_RNA (1)...(19): siRNA sense strand
ucagaaagguagauuuguc

SEQ ID NO: 114287 - RNA, 19 nt, Homo sapiens
  misc_RNA (1)...(19): siRNA sense strand
gggaugaagugauacacau

SEQ ID NO: 114288 - RNA, 19 nt, Homo sapiens
  misc_RNA (1)...(19): siRNA sense strand
ccagacagucaaguuauua

SEQ ID NO: 114289 - RNA, 19 nt, Homo sapiens
  misc_RNA (1)...(19): siRNA sense strand
gaacaugcaacaguacguu

SEQ ID NO: 114290 - RNA, 19 nt, Homo sapiens
  misc_RNA (1)...(19): siRNA sense strand
ugaagcauguccuaauauc

SEQ ID NO: 114291 - RNA, 19 nt, Homo sapiens
  misc_RNA (1)...(19): siRNA sense strand
gcccagguuagaacaauua

SEQ ID NO: 114292 - RNA, 19 nt, Homo sapiens
  misc_RNA (1)...(19): siRNA sense strand
gaugaagugauacacauug

SEQ ID NO: 114293 - RNA, 19 nt, Homo sapiens
  misc_RNA (1)...(19): siRNA sense strand
caauuaauccucucugaca

SEQ ID NO: 114294 - RNA, 19 nt, Homo sapiens
  misc_RNA (1)...(19): siRNA sense strand
ggaacgcuuucuguacuga

SEQ ID NO: 114295 - RNA, 19 nt, Homo sapiens
  misc_RNA (1)...(19): siRNA sense strand
acgaagggacuguguauuu

SEQ ID NO: 114296 - RNA, 19 nt, Homo sapiens
  misc_RNA (1)...(19): siRNA sense strand
gcuacuaacacugaagaua

SEQ ID NO: 114297 - RNA, 19 nt, Homo sapiens
  misc_RNA (1)...(19): siRNA sense strand
ggaugucauuggucgaaga

SEQ ID NO: 114298 - RNA, 19 nt, Homo sapiens
  misc_RNA (1)...(19): siRNA sense strand
ggaaguccuuaaugucagu

SEQ ID NO: 114299 - RNA, 19 nt, Homo sapiens
  misc_RNA (1)...(19): siRNA sense strand
uaucagaaagguagauuug

SEQ ID NO: 114300 - RNA, 19 nt, Homo sapiens
  misc_RNA (1)...(19): siRNA sense strand
gucgaagaguugaaguuaa

SEQ ID NO: 114301 - RNA, 19 nt, Homo sapiens
  misc_RNA (1)...(19): siRNA sense strand
gaagggacuguguauuuua

SEQ ID NO: 114302 - RNA, 19 nt, Homo sapiens
  misc_RNA (1)...(19): siRNA sense strand
gaccuucuguuguccuaug

SEQ ID NO: 114303 - RNA, 19 nt, Homo sapiens
  misc_RNA (1)...(19): siRNA sense strand
guaguaaacgacaaucaga

SEQ ID NO: 114304 - RNA, 19 nt, Homo sapiens
  misc_RNA (1)...(19): siRNA sense strand
aaaucgagcuggaaaauga

SEQ ID NO: 114305 - RNA, 19 nt, Homo sapiens
  misc_RNA (1)...(19): siRNA sense strand
aaacacagcaaccacuuau

SEQ ID NO: 114306 - RNA, 19 nt, Homo sapiens
  misc_RNA (1)...(19): siRNA sense strand
aaucagauaucacaauggu

SEQ ID NO: 114307 - RNA, 19 nt, Homo sapiens
  misc_RNA (1)...(19): siRNA sense strand
guaaacgacaaucagauau

SEQ ID NO: 114308 - RNA, 19 nt, Homo sapiens
  misc_RNA (1)...(19): siRNA sense strand
ggaguagaaugggacaauc

SEQ ID NO: 114309 - RNA, 19 nt, Homo sapiens
  misc_RNA (1)...(19): siRNA sense strand
gaaaagagcaaauuguuac

SEQ ID NO: 114310 - RNA, 19 nt, Homo sapiens
  misc_RNA (1)...(19): siRNA sense strand
gaaaauggagauugucuau

SEQ ID NO: 114311 - RNA, 19 nt, Homo sapiens
  misc_RNA (1)...(19): siRNA sense strand
ucaaaguuccugugucaga

SEQ ID NO: 114312 - RNA, 19 nt, Homo sapiens
  misc_RNA (1)...(19): siRNA sense strand
aaacagacucagcgaagaa

SEQ ID NO: 114313 - RNA, 19 nt, Homo sapiens
  misc_RNA (1)...(19): siRNA sense strand
gcuuuguccugccuaagaa

SEQ ID NO: 114314 - RNA, 19 nt, Homo sapiens
  misc_RNA (1)...(19): siRNA sense strand
gaagcauguccuaauauca

SEQ ID NO: 114315 - RNA, 19 nt, Homo sapiens
  misc_RNA (1)...(19): siRNA sense strand
aaaauacccucaucaacuu

SEQ ID NO: 114316 - RNA, 19 nt, Homo sapiens
  misc_RNA (1)...(19): siRNA sense strand
guccgaacaagguaaauuu

SEQ ID NO: 114317 - RNA, 19 nt, Homo sapiens
  misc_RNA (1)...(19): siRNA sense strand
ugucacgucuucucaaagu

SEQ ID NO: 114318 - RNA, 19 nt, Homo sapiens
  misc_RNA (1)...(19): siRNA sense strand
caaagaggacaaagaagca

SEQ ID NO: 114319 - RNA, 19 nt, Homo sapiens
  misc_RNA (1)...(19): siRNA sense strand
aguaaacgacaaucagaua

SEQ ID NO: 114320 - RNA, 19 nt, Homo sapiens
  misc_RNA (1)...(19): siRNA sense strand
gguuuugacucuauuauga

SEQ ID NO: 114321 - RNA, 19 nt, Homo sapiens
  misc_RNA (1)...(19): siRNA sense strand
auaaaccuguggagacuau

SEQ ID NO: 114322 - RNA, 19 nt, Homo sapiens
  misc_RNA (1)...(19): siRNA sense strand
ugucauuggucgaagaguu

SEQ ID NO: 114323 - RNA, 19 nt, Homo sapiens
  misc_RNA (1)...(19): siRNA sense strand
gcaauuaagaaccgcuaug

SEQ ID NO: 114324 - RNA, 19 nt, Homo sapiens
  misc_RNA (1)...(19): siRNA sense strand
cgaagggacuguguauuuu

SEQ ID NO: 114325 - RNA, 19 nt, Homo sapiens
  misc_RNA (1)...(19): siRNA sense strand
gcaaccacuuaugcugaaa

SEQ ID NO: 114326 - RNA, 19 nt, Homo sapiens
  misc_RNA (1)...(19): siRNA sense strand
uaacuggaacgcuuucugu

SEQ ID NO: 114327 - RNA, 19 nt, Homo sapiens
  misc_RNA (1)...(19): siRNA sense strand
ggaugaagugauacacauu

SEQ ID NO: 114328 - RNA, 19 nt, Homo sapiens
  misc_RNA (1)...(19): siRNA sense strand
ccacgaagggacuguguau

SEQ ID NO: 114329 - RNA, 19 nt, Homo sapiens
  misc_RNA (1)...(19): siRNA sense strand
caagguaaauuuuggaaca

SEQ ID NO: 114330 - RNA, 19 nt, Homo sapiens
  misc_RNA (1)...(19): siRNA sense strand
gaaguuaauggagaacaug

SEQ ID NO: 114331 - RNA, 19 nt, Homo sapiens
  misc_RNA (1)...(19): siRNA sense strand
gcugaacaaaugugagauu

SEQ ID NO: 114332 - RNA, 19 nt, Homo sapiens
  misc_RNA (1)...(19): siRNA sense strand
acacuggaauuucuucucu

SEQ ID NO: 114333 - RNA, 19 nt, Homo sapiens
  misc_RNA (1)...(19): siRNA sense strand
cagguuagaacaauuaauc

SEQ ID NO: 114334 - RNA, 19 nt, Homo sapiens
  misc_RNA (1)...(19): siRNA sense strand
acagucaaguuauuagauc

SEQ ID NO: 114335 - RNA, 19 nt, Homo sapiens
  misc_RNA (1)...(19): siRNA sense strand
aacaauuaauccucucuga

SEQ ID NO: 114336 - RNA, 19 nt, Homo sapiens
  misc_RNA (1)...(19): siRNA sense strand
ucagaaaguccuggagaaa

SEQ ID NO: 114337 - RNA, 19 nt, Homo sapiens
  misc_RNA (1)...(19): siRNA sense strand
gacaaucagauaucacaau

SEQ ID NO: 114338 - RNA, 19 nt, Homo sapiens
  misc_RNA (1)...(19): siRNA sense strand
uggaauuucuucucuacau

SEQ ID NO: 114339 - RNA, 19 nt, Homo sapiens
  misc_RNA (1)...(19): siRNA sense strand
aaauaaaccuguggagacu

SEQ ID NO: 114340 - RNA, 19 nt, Homo sapiens
  misc_RNA (1)...(19): siRNA sense strand
ugaaguuaauggagaacau

SEQ ID NO: 114341 - RNA, 19 nt, Homo sapiens
  misc_RNA (1)...(19): siRNA sense strand
cagauguucuccagacagu

SEQ ID NO: 114342 - RNA, 19 nt, Homo sapiens
  misc_RNA (1)...(19): siRNA sense strand
caaagucagcugagcaagu

SEQ ID NO: 114343 - RNA, 19 nt, Homo sapiens
  misc_RNA (1)...(19): siRNA sense strand
gauguucuccagacaguca

SEQ ID NO: 114344 - RNA, 19 nt, Homo sapiens
  misc_RNA (1)...(19): siRNA sense strand
ccuugagucuaacaacauu

SEQ ID NO: 114345 - RNA, 19 nt, Homo sapiens
  misc_RNA (1)...(19): siRNA sense strand
uagagaaguuaccaagucu

SEQ ID NO: 114346 - RNA, 19 nt, Homo sapiens
  misc_RNA (1)...(19): siRNA sense strand
ggaauugggugcaaaacgu

SEQ ID NO: 114347 - RNA, 19 nt, Homo sapiens
  misc_RNA (1)...(19): siRNA sense strand
gagagaggaaagcaugaug

SEQ ID NO: 114348 - RNA, 19 nt, Homo sapiens
  misc_RNA (1)...(19): siRNA sense strand
gaaaguccuggagaaacaa

SEQ ID NO: 114349 - RNA, 19 nt, Homo sapiens
  misc_RNA (1)...(19): siRNA sense strand
gauaaaauacccucaucaa

SEQ ID NO: 114350 - RNA, 19 nt, Homo sapiens
  misc_RNA (1)...(19): siRNA sense strand
gaagaguugaaguuaaugg

SEQ ID NO: 114351 - RNA, 19 nt, Homo sapiens
  misc_RNA (1)...(19): siRNA sense strand
gauaucacaauggucguuu

SEQ ID NO: 114352 - RNA, 19 nt, Homo sapiens
  misc_RNA (1)...(19): siRNA sense strand
uccagacagucaaguuauu

SEQ ID NO: 114353 - RNA, 19 nt, Homo sapiens
  misc_RNA (1)...(19): siRNA sense strand
caauuaagaaccgcuaugu

SEQ ID NO: 114354 - RNA, 19 nt, Homo sapiens
  misc_RNA (1)...(19): siRNA sense strand
uuaagaaccgcuauguguu

SEQ ID NO: 114355 - RNA, 19 nt, Homo sapiens
  misc_RNA (1)...(19): siRNA sense strand
agagaaaucgagcuggaaa

SEQ ID NO: 114356 - RNA, 19 nt, Homo sapiens
  misc_RNA (1)...(19): siRNA sense strand
gaaauuagaugacgacaag

SEQ ID NO: 114357 - RNA, 19 nt, Homo sapiens
  misc_RNA (1)...(19): siRNA sense strand
ggacaugcauggaaucauu

SEQ ID NO: 114358 - RNA, 19 nt, Homo sapiens
  misc_RNA (1)...(19): siRNA sense strand
acaaagagcugagugauuu

SEQ ID NO: 114359 - RNA, 19 nt, Homo sapiens
  misc_RNA (1)...(19): siRNA sense strand
caacagacauucacucaug

SEQ ID NO: 114360 - RNA, 19 nt, Homo sapiens
  misc_RNA (1)...(19): siRNA sense strand
gggcaacucuucucauauu

SEQ ID NO: 114361 - RNA, 19 nt, Homo sapiens
  misc_RNA (1)...(19): siRNA sense strand
caagaaggauaucaaauca

SEQ ID NO: 114362 - RNA, 19 nt, Homo sapiens
  misc_RNA (1)...(19): siRNA sense strand
gcacuugcuucgaucuauu

SEQ ID NO: 114363 - RNA, 19 nt, Homo sapiens
  misc_RNA (1)...(19): siRNA sense strand
gacaaucucucuccaccuu

SEQ ID NO: 114364 - RNA, 19 nt, Homo sapiens
  misc_RNA (1)...(19): siRNA sense strand
ccucaucgucuccuaauua

SEQ ID NO: 114365 - RNA, 19 nt, Homo sapiens
  misc_RNA (1)...(19): siRNA sense strand
gcacagcuguuuggucuag

SEQ ID NO: 114366 - RNA, 19 nt, Homo sapiens
  misc_RNA (1)...(19): siRNA sense strand
caucgucuccuaauuauga

SEQ ID NO: 114367 - RNA, 19 nt, Homo sapiens
  misc_RNA (1)...(19): siRNA sense strand
caacgggacagacaguaua

SEQ ID NO: 114368 - RNA, 19 nt, Homo sapiens
  misc_RNA (1)...(19): siRNA sense strand
gaaagcugcgugucugaaa

SEQ ID NO: 114369 - RNA, 19 nt, Homo sapiens
  misc_RNA (1)...(19): siRNA sense strand
ggauuucagugcgauguuu

SEQ ID NO: 114370 - RNA, 19 nt, Homo sapiens
  misc_RNA (1)...(19): siRNA sense strand
gaugagaaccugcaagaca

SEQ ID NO: 114371 - RNA, 19 nt, Homo sapiens
  misc_RNA (1)...(19): siRNA sense strand
gccauucucuucugccaaa

SEQ ID NO: 114372 - RNA, 19 nt, Homo sapiens
  misc_RNA (1)...(19): siRNA sense strand
ggaggccucuucacaguag

SEQ ID NO: 114373 - RNA, 19 nt, Homo sapiens
  misc_RNA (1)...(19): siRNA sense strand
ugagugauuuacuggauuu

SEQ ID NO: 114374 - RNA, 19 nt, Homo sapiens
  misc_RNA (1)...(19): siRNA sense strand
gaagaucguuuagaaagac

SEQ ID NO: 114375 - RNA, 19 nt, Homo sapiens
  misc_RNA (1)...(19): siRNA sense strand
ccauggagguacagacaaa

SEQ ID NO: 114376 - RNA, 19 nt, Homo sapiens
  misc_RNA (1)...(19): siRNA sense strand
ugaagaucguuuagaaaga

SEQ ID NO: 114377 - RNA, 19 nt, Homo sapiens
  misc_RNA (1)...(19): siRNA sense strand
ugggagagaaucaaacuua

SEQ ID NO: 114378 - RNA, 19 nt, Homo sapiens
  misc_RNA (1)...(19): siRNA sense strand
gacaguauaauggcaaaua

SEQ ID NO: 114379 - RNA, 19 nt, Homo sapiens
  misc_RNA (1)...(19): siRNA sense strand
gcuguuuggucuagaaaug

SEQ ID NO: 114380 - RNA, 19 nt, Homo sapiens
  misc_RNA (1)...(19): siRNA sense strand
cauuggaccuucucauaau

SEQ ID NO: 114381 - RNA, 19 nt, Homo sapiens
  misc_RNA (1)...(19): siRNA sense strand
ggagacgcaucgaaucaca

SEQ ID NO: 114382 - RNA, 19 nt, Homo sapiens
  misc_RNA (1)...(19): siRNA sense strand
cgacaagaaggauaucaaa

SEQ ID NO: 114383 - RNA, 19 nt, Homo sapiens
  misc_RNA (1)...(19): siRNA sense strand
gacaaagagcugagugauu

SEQ ID NO: 114384 - RNA, 19 nt, Homo sapiens
  misc_RNA (1)...(19): siRNA sense strand
gaaaaguuccuccagguuu

SEQ ID NO: 114385 - RNA, 19 nt, Homo sapiens
  misc_RNA (1)...(19): siRNA sense strand
caaagagcugagugauuua

SEQ ID NO: 114386 - RNA, 19 nt, Homo sapiens
  misc_RNA (1)...(19): siRNA sense strand
ggagguacagacaaagaaa

SEQ ID NO: 114387 - RNA, 19 nt, Homo sapiens
  misc_RNA (1)...(19): siRNA sense strand
gagcagcaaguccgagaaa

SEQ ID NO: 114388 - RNA, 19 nt, Homo sapiens
  misc_RNA (1)...(19): siRNA sense strand
caucaacgaggcuuucaaa

SEQ ID NO: 114389 - RNA, 19 nt, Homo sapiens
  misc_RNA (1)...(19): siRNA sense strand
guacagacaaagaaaguuc

SEQ ID NO: 114390 - RNA, 19 nt, Homo sapiens
  misc_RNA (1)...(19): siRNA sense strand
gaaaggggcucauacucau

SEQ ID NO: 114391 - RNA, 19 nt, Homo sapiens
  misc_RNA (1)...(19): siRNA sense strand
gacaucaauuccagucuuc

SEQ ID NO: 114392 - RNA, 19 nt, Homo sapiens
  misc_RNA (1)...(19): siRNA sense strand
gcacugccgacuacaauag

SEQ ID NO: 114393 - RNA, 19 nt, Homo sapiens
  misc_RNA (1)...(19): siRNA sense strand
uggcagcucugagaucaaa

SEQ ID NO: 114394 - RNA, 19 nt, Homo sapiens
  misc_RNA (1)...(19): siRNA sense strand
ggucugggcucaggguaug

SEQ ID NO: 114395 - RNA, 19 nt, Homo sapiens
  misc_RNA (1)...(19): siRNA sense strand
ucauuggaccuucucauaa

SEQ ID NO: 114396 - RNA, 19 nt, Homo sapiens
  misc_RNA (1)...(19): siRNA sense strand
gcugagugauuuacuggau

SEQ ID NO: 114397 - RNA, 19 nt, Homo sapiens
  misc_RNA (1)...(19): siRNA sense strand
gcauccacaugaacguuug

SEQ ID NO: 114398 - RNA, 19 nt, Homo sapiens
  misc_RNA (1)...(19): siRNA sense strand
uugggcaacucuucucaua

SEQ ID NO: 114399 - RNA, 19 nt, Homo sapiens
  misc_RNA (1)...(19): siRNA sense strand
agacaaagaaaguucgaaa

SEQ ID NO: 114400 - RNA, 19 nt, Homo sapiens
  misc_RNA (1)...(19): siRNA sense strand
acaagaaggauaucaaauc

SEQ ID NO: 114401 - RNA, 19 nt, Homo sapiens
  misc_RNA (1)...(19): siRNA sense strand
gaaccugcaagacacgaaa

SEQ ID NO: 114402 - RNA, 19 nt, Homo sapiens
  misc_RNA (1)...(19): siRNA sense strand
ggagagaaucaaacuuaca

SEQ ID NO: 114403 - RNA, 19 nt, Homo sapiens
  misc_RNA (1)...(19): siRNA sense strand
gcaaagccgaauugaagau

SEQ ID NO: 114404 - RNA, 19 nt, Homo sapiens
  misc_RNA (1)...(19): siRNA sense strand
ggacaaagagcugagugau

SEQ ID NO: 114405 - RNA, 19 nt, Homo sapiens
  misc_RNA (1)...(19): siRNA sense strand
gggagagaaucaaacuuac

SEQ ID NO: 114406 - RNA, 19 nt, Homo sapiens
  misc_RNA (1)...(19): siRNA sense strand
gaagggaggaagagaaggu

SEQ ID NO: 114407 - RNA, 19 nt, Homo sapiens
  misc_RNA (1)...(19): siRNA sense strand
ccgaauugaagaucguuua

SEQ ID NO: 114408 - RNA, 19 nt, Homo sapiens
  misc_RNA (1)...(19): siRNA sense strand
gaugacgacaagaaggaua

SEQ ID NO: 114409 - RNA, 19 nt, Homo sapiens
  misc_RNA (1)...(19): siRNA sense strand
ugacgagggugaugagaac

SEQ ID NO: 114410 - RNA, 19 nt, Homo sapiens
  misc_RNA (1)...(19): siRNA sense strand
uauggaaccggccuucuuu

SEQ ID NO: 114411 - RNA, 19 nt, Homo sapiens
  misc_RNA (1)...(19): siRNA sense strand
gaauugaagaucguuuaga

SEQ ID NO: 114412 - RNA, 19 nt, Homo sapiens
  misc_RNA (1)...(19): siRNA sense strand
caacucuucucauauucca

SEQ ID NO: 114413 - RNA, 19 nt, Homo sapiens
  misc_RNA (1)...(19): siRNA sense strand
gaaggcagagcgugagaag

SEQ ID NO: 114414 - RNA, 19 nt, Homo sapiens
  misc_RNA (1)...(19): siRNA sense strand
gacaagaaggauaucaaau

SEQ ID NO: 114415 - RNA, 19 nt, Homo sapiens
  misc_RNA (1)...(19): siRNA sense strand
aagacuggaugaugcuauu

SEQ ID NO: 114416 - RNA, 19 nt, Homo sapiens
  misc_RNA (1)...(19): siRNA sense strand
cacaugaacguuugagcua

SEQ ID NO: 114417 - RNA, 19 nt, Homo sapiens
  misc_RNA (1)...(19): siRNA sense strand
aaagaagggaggaagagaa

SEQ ID NO: 114418 - RNA, 19 nt, Homo sapiens
  misc_RNA (1)...(19): siRNA sense strand
caaagaaaguucgaaaagu

SEQ ID NO: 114419 - RNA, 19 nt, Homo sapiens
  misc_RNA (1)...(19): siRNA sense strand
gaaagacuggaugaugcua

SEQ ID NO: 114420 - RNA, 19 nt, Homo sapiens
  misc_RNA (1)...(19): siRNA sense strand
acaguauaauggcaaauag

SEQ ID NO: 114421 - RNA, 19 nt, Homo sapiens
  misc_RNA (1)...(19): siRNA sense strand
caugaacguuugagcuauc

SEQ ID NO: 114422 - RNA, 19 nt, Homo sapiens
  misc_RNA (1)...(19): siRNA sense strand
guagugccauggagguaca

SEQ ID NO: 114423 - RNA, 19 nt, Homo sapiens
  misc_RNA (1)...(19): siRNA sense strand
gagaaaggaaucugaaucc

SEQ ID NO: 114424 - RNA, 19 nt, Homo sapiens
  misc_RNA (1)...(19): siRNA sense strand
gugaugagaaccugcaaga

SEQ ID NO: 114425 - RNA, 19 nt, Homo sapiens
  misc_RNA (1)...(19): siRNA sense strand
ccagaucacacuaacaaca

SEQ ID NO: 114426 - RNA, 19 nt, Homo sapiens
  misc_RNA (1)...(19): siRNA sense strand
gggcucauacucaucuuau

SEQ ID NO: 114427 - RNA, 19 nt, Homo sapiens
  misc_RNA (1)...(19): siRNA sense strand
cgagaaaggaaucugaauc

SEQ ID NO: 114428 - RNA, 19 nt, Homo sapiens
  misc_RNA (1)...(19): siRNA sense strand
gcaaguccgagaaaggaau

SEQ ID NO: 114429 - RNA, 19 nt, Homo sapiens
  misc_RNA (1)...(19): siRNA sense strand
ggacaagaaauuagaugac

SEQ ID NO: 114430 - RNA, 19 nt, Homo sapiens
  misc_RNA (1)...(19): siRNA sense strand
cuucggaggacaagaaauu

SEQ ID NO: 114431 - RNA, 19 nt, Homo sapiens
  misc_RNA (1)...(19): siRNA sense strand
guauggaaccggccuucuu

SEQ ID NO: 114432 - RNA, 19 nt, Homo sapiens
  misc_RNA (1)...(19): siRNA sense strand
cagacaguauaauggcaaa

SEQ ID NO: 114433 - RNA, 19 nt, Homo sapiens
  misc_RNA (1)...(19): siRNA sense strand
cagcaagcacugccgacua

SEQ ID NO: 114434 - RNA, 19 nt, Homo sapiens
  misc_RNA (1)...(19): siRNA sense strand
uuuacuggcucaaauguag

SEQ ID NO: 114435 - RNA, 19 nt, Homo sapiens
  misc_RNA (1)...(19): siRNA sense strand
gagagaaucaaacuuacag

SEQ ID NO: 114436 - RNA, 19 nt, Homo sapiens
  misc_RNA (1)...(19): siRNA sense strand
uugcaaagccgaauugaag

SEQ ID NO: 114437 - RNA, 19 nt, Homo sapiens
  misc_RNA (1)...(19): siRNA sense strand
cgaaucacaugggacagau

SEQ ID NO: 114438 - RNA, 19 nt, Homo sapiens
  misc_RNA (1)...(19): siRNA sense strand
aaggaggccucuucacagu

SEQ ID NO: 114439 - RNA, 19 nt, Homo sapiens
  misc_RNA (1)...(19): siRNA sense strand
gaaugggagacgcaucgaa

SEQ ID NO: 114440 - RNA, 19 nt, Homo sapiens
  misc_RNA (1)...(19): siRNA sense strand
aggcagagcgugagaagga

SEQ ID NO: 114441 - RNA, 19 nt, Homo sapiens
  misc_RNA (1)...(19): siRNA sense strand
uuagaaagacuggaugaug

SEQ ID NO: 114442 - RNA, 19 nt, Homo sapiens
  misc_RNA (1)...(19): siRNA sense strand
cagcaaguccgagaaagga

SEQ ID NO: 114443 - RNA, 19 nt, Homo sapiens
  misc_RNA (1)...(19): siRNA sense strand
gccaacagacauucacuca

SEQ ID NO: 114444 - RNA, 19 nt, Homo sapiens
  misc_RNA (1)...(19): siRNA sense strand
ggcaacucuucucauauuc

SEQ ID NO: 114445 - RNA, 19 nt, Homo sapiens
  misc_RNA (1)...(19): siRNA sense strand
gaggacaagaaauuagaug

SEQ ID NO: 114446 - RNA, 19 nt, Homo sapiens
  misc_RNA (1)...(19): siRNA sense strand
uagccugcauccacaugaa

SEQ ID NO: 114447 - RNA, 19 nt, Homo sapiens
  misc_RNA (1)...(19): siRNA sense strand
ggaggacaagaaauuagau

SEQ ID NO: 114448 - RNA, 19 nt, Homo sapiens
  misc_RNA (1)...(19): siRNA sense strand
gcagcaaguccgagaaagg

SEQ ID NO: 114449 - RNA, 19 nt, Homo sapiens
  misc_RNA (1)...(19): siRNA sense strand
gcacuuucccuagcuccuu

SEQ ID NO: 114450 - RNA, 19 nt, Homo sapiens
  misc_RNA (1)...(19): siRNA sense strand
agaccaagcuccugauccu

SEQ ID NO: 114451 - RNA, 19 nt, Homo sapiens
  misc_RNA (1)...(19): siRNA sense strand
gugcagcuccaccucaaga

SEQ ID NO: 114452 - RNA, 19 nt, Homo sapiens
  misc_RNA (1)...(19): siRNA sense strand
guagaagacagaaguagcu

SEQ ID NO: 114453 - RNA, 19 nt, Homo sapiens
  misc_RNA (1)...(19): siRNA sense strand
ccuguuggcucuccuccau

SEQ ID NO: 114454 - RNA, 19 nt, Homo sapiens
  misc_RNA (1)...(19): siRNA sense strand
gcccugagaggcagccauu

SEQ ID NO: 114455 - RNA, 19 nt, Homo sapiens
  misc_RNA (1)...(19): siRNA sense strand
caaucucucuccaccuuuu

SEQ ID NO: 114456 - RNA, 19 nt, Homo sapiens
  misc_RNA (1)...(19): siRNA sense strand
gauccuggcuaacgacaaa

SEQ ID NO: 114457 - RNA, 19 nt, Homo sapiens
  misc_RNA (1)...(19): siRNA sense strand
gcgagccgcuuauguggaa

SEQ ID NO: 114458 - RNA, 19 nt, Homo sapiens
  misc_RNA (1)...(19): siRNA sense strand
ugaggcagauccuggcuaa

SEQ ID NO: 114459 - RNA, 19 nt, Homo sapiens
  misc_RNA (1)...(19): siRNA sense strand
agagugaccugaaagaagu

SEQ ID NO: 114460 - RNA, 19 nt, Homo sapiens
  misc_RNA (1)...(19): siRNA sense strand
gaaaauggauucgaacaag

SEQ ID NO: 114461 - RNA, 19 nt, Homo sapiens
  misc_RNA (1)...(19): siRNA sense strand
aaccugacguggcccuuua

SEQ ID NO: 114462 - RNA, 19 nt, Homo sapiens
  misc_RNA (1)...(19): siRNA sense strand
gagagugaccugaaagaag

SEQ ID NO: 114463 - RNA, 19 nt, Homo sapiens
  misc_RNA (1)...(19): siRNA sense strand
ggaaugugacggguugaaa

SEQ ID NO: 114464 - RNA, 19 nt, Homo sapiens
  misc_RNA (1)...(19): siRNA sense strand
uucaagagguggagauguu

SEQ ID NO: 114465 - RNA, 19 nt, Homo sapiens
  misc_RNA (1)...(19): siRNA sense strand
gcaaggccuucuccagacu

SEQ ID NO: 114466 - RNA, 19 nt, Homo sapiens
  misc_RNA (1)...(19): siRNA sense strand
ccagcuacaucgcccacuu

SEQ ID NO: 114467 - RNA, 19 nt, Homo sapiens
  misc_RNA (1)...(19): siRNA sense strand
guggagauguuggaaugug

SEQ ID NO: 114468 - RNA, 19 nt, Homo sapiens
  misc_RNA (1)...(19): siRNA sense strand
uggagauguuggaauguga

SEQ ID NO: 114469 - RNA, 19 nt, Homo sapiens
  misc_RNA (1)...(19): siRNA sense strand
ugacguggcccuuuauggu

SEQ ID NO: 114470 - RNA, 19 nt, Homo sapiens
  misc_RNA (1)...(19): siRNA sense strand
ggcagauccuggcuaacga

SEQ ID NO: 114471 - RNA, 19 nt, Homo sapiens
  misc_RNA (1)...(19): siRNA sense strand
cgagagugaccugaaagaa

SEQ ID NO: 114472 - RNA, 19 nt, Homo sapiens
  misc_RNA (1)...(19): siRNA sense strand
agguggagauguuggaaug

SEQ ID NO: 114473 - RNA, 19 nt, Homo sapiens
  misc_RNA (1)...(19): siRNA sense strand
gaaugugacggguugaaaa

SEQ ID NO: 114474 - RNA, 19 nt, Homo sapiens
  misc_RNA (1)...(19): siRNA sense strand
caaccugacguggcccuuu

SEQ ID NO: 114475 - RNA, 19 nt, Homo sapiens
  misc_RNA (1)...(19): siRNA sense strand
gagcuccaacugcgagaau

SEQ ID NO: 114476 - RNA, 19 nt, Homo sapiens
  misc_RNA (1)...(19): siRNA sense strand
uacgagaacggguacauuc

SEQ ID NO: 114477 - RNA, 19 nt, Homo sapiens
  misc_RNA (1)...(19): siRNA sense strand
gguugaaaauggauucgaa

SEQ ID NO: 114478 - RNA, 19 nt, Homo sapiens
  misc_RNA (1)...(19): siRNA sense strand
aaauggauucgaacaagga

SEQ ID NO: 114479 - RNA, 19 nt, Homo sapiens
  misc_RNA (1)...(19): siRNA sense strand
gauccuggcuaacgacaaa

SEQ ID NO: 114480 - RNA, 19 nt, Homo sapiens
  misc_RNA (1)...(19): siRNA sense strand
gcgagccgcuuauguggaa

SEQ ID NO: 114481 - RNA, 19 nt, Homo sapiens
  misc_RNA (1)...(19): siRNA sense strand
ugaggcagauccuggcuaa

SEQ ID NO: 114482 - RNA, 19 nt, Homo sapiens
  misc_RNA (1)...(19): siRNA sense strand
agagugaccugaaagaagu

SEQ ID NO: 114483 - RNA, 19 nt, Homo sapiens
  misc_RNA (1)...(19): siRNA sense strand
gaaaauggauucgaacaag

SEQ ID NO: 114484 - RNA, 19 nt, Homo sapiens
  misc_RNA (1)...(19): siRNA sense strand
aaccugacguggcccuuua

SEQ ID NO: 114485 - RNA, 19 nt, Homo sapiens
  misc_RNA (1)...(19): siRNA sense strand
gagagugaccugaaagaag

SEQ ID NO: 114486 - RNA, 19 nt, Homo sapiens
  misc_RNA (1)...(19): siRNA sense strand
ggaaugugacggguugaaa

SEQ ID NO: 114487 - RNA, 19 nt, Homo sapiens
  misc_RNA (1)...(19): siRNA sense strand
uucaagagguggagauguu

SEQ ID NO: 114488 - RNA, 19 nt, Homo sapiens
  misc_RNA (1)...(19): siRNA sense strand
gcaaggccuucuccagacu

SEQ ID NO: 114489 - RNA, 19 nt, Homo sapiens
  misc_RNA (1)...(19): siRNA sense strand
ccagcuacaucgcccacuu

SEQ ID NO: 114490 - RNA, 19 nt, Homo sapiens
  misc_RNA (1)...(19): siRNA sense strand
guggagauguuggaaugug

SEQ ID NO: 114491 - RNA, 19 nt, Homo sapiens
  misc_RNA (1)...(19): siRNA sense strand
uggagauguuggaauguga

SEQ ID NO: 114492 - RNA, 19 nt, Homo sapiens
  misc_RNA (1)...(19): siRNA sense strand
ugacguggcccuuuauggu

SEQ ID NO: 114493 - RNA, 19 nt, Homo sapiens
  misc_RNA (1)...(19): siRNA sense strand
ggcagauccuggcuaacga

SEQ ID NO: 114494 - RNA, 19 nt, Homo sapiens
  misc_RNA (1)...(19): siRNA sense strand
cgagagugaccugaaagaa

SEQ ID NO: 114495 - RNA, 19 nt, Homo sapiens
  misc_RNA (1)...(19): siRNA sense strand
agguggagauguuggaaug

SEQ ID NO: 114496 - RNA, 19 nt, Homo sapiens
  misc_RNA (1)...(19): siRNA sense strand
gaaugugacggguugaaaa

SEQ ID NO: 114497 - RNA, 19 nt, Homo sapiens
  misc_RNA (1)...(19): siRNA sense strand
caaccugacguggcccuuu

SEQ ID NO: 114498 - RNA, 19 nt, Homo sapiens
  misc_RNA (1)...(19): siRNA sense strand
gagcuccaacugcgagaau

SEQ ID NO: 114499 - RNA, 19 nt, Homo sapiens
  misc_RNA (1)...(19): siRNA sense strand
uacgagaacggguacauuc

SEQ ID NO: 114500 - RNA, 19 nt, Homo sapiens
  misc_RNA (1)...(19): siRNA sense strand
gguugaaaauggauucgaa

SEQ ID NO: 114501 - RNA, 19 nt, Homo sapiens
  misc_RNA (1)...(19): siRNA sense strand
aaauggauucgaacaagga

SEQ ID NO: 114502 - RNA, 19 nt, Homo sapiens
  misc_RNA (1)...(19): siRNA sense strand
gaacaacagugcugccuua

SEQ ID NO: 114503 - RNA, 19 nt, Homo sapiens
  misc_RNA (1)...(19): siRNA sense strand
gauauaaguucgaagauga

SEQ ID NO: 114504 - RNA, 19 nt, Homo sapiens
  misc_RNA (1)...(19): siRNA sense strand
caacagugcugccuuaaga

SEQ ID NO: 114505 - RNA, 19 nt, Homo sapiens
  misc_RNA (1)...(19): siRNA sense strand
ggaaugacaugcuacuaaa

SEQ ID NO: 114506 - RNA, 19 nt, Homo sapiens
  misc_RNA (1)...(19): siRNA sense strand
cauaugaccuggacaacua

SEQ ID NO: 114507 - RNA, 19 nt, Homo sapiens
  misc_RNA (1)...(19): siRNA sense strand
gcacaagacugcuggagau

SEQ ID NO: 114508 - RNA, 19 nt, Homo sapiens
  misc_RNA (1)...(19): siRNA sense strand
acacggagcugucauguau

SEQ ID NO: 114509 - RNA, 19 nt, Homo sapiens
  misc_RNA (1)...(19): siRNA sense strand
caacaaauggcaugaaauu

SEQ ID NO: 114510 - RNA, 19 nt, Homo sapiens
  misc_RNA (1)...(19): siRNA sense strand
acacaugacucucaccaua

SEQ ID NO: 114511 - RNA, 19 nt, Homo sapiens
  misc_RNA (1)...(19): siRNA sense strand
cugcaaagcuacccagaua

SEQ ID NO: 114512 - RNA, 19 nt, Homo sapiens
  misc_RNA (1)...(19): siRNA sense strand
acagugaaguguucuuaua

SEQ ID NO: 114513 - RNA, 19 nt, Homo sapiens
  misc_RNA (1)...(19): siRNA sense strand
gauaaagucgucuaugaaa

SEQ ID NO: 114514 - RNA, 19 nt, Homo sapiens
  misc_RNA (1)...(19): siRNA sense strand
cuacuuagcuucacucaag

SEQ ID NO: 114515 - RNA, 19 nt, Homo sapiens
  misc_RNA (1)...(19): siRNA sense strand
gacagugaguucagaauga

SEQ ID NO: 114516 - RNA, 19 nt, Homo sapiens
  misc_RNA (1)...(19): siRNA sense strand
agaaggauuucaugucuuu

SEQ ID NO: 114517 - RNA, 19 nt, Homo sapiens
  misc_RNA (1)...(19): siRNA sense strand
uaucagagguuugacauga

SEQ ID NO: 114518 - RNA, 19 nt, Homo sapiens
  misc_RNA (1)...(19): siRNA sense strand
gaaugacagugaaguguuc

SEQ ID NO: 114519 - RNA, 19 nt, Homo sapiens
  misc_RNA (1)...(19): siRNA sense strand
gaagugagaguccuaaaca

SEQ ID NO: 114520 - RNA, 19 nt, Homo sapiens
  misc_RNA (1)...(19): siRNA sense strand
ucagggaacuccauagaug

SEQ ID NO: 114521 - RNA, 19 nt, Homo sapiens
  misc_RNA (1)...(19): siRNA sense strand
ccauagauguuucucaguu

SEQ ID NO: 114522 - RNA, 19 nt, Homo sapiens
  misc_RNA (1)...(19): siRNA sense strand
ggaaauaacaguggaguuc

SEQ ID NO: 114523 - RNA, 19 nt, Homo sapiens
  misc_RNA (1)...(19): siRNA sense strand
caagacugcuggagauguu

SEQ ID NO: 114524 - RNA, 19 nt, Homo sapiens
  misc_RNA (1)...(19): siRNA sense strand
gagaagaguaggagugaaa

SEQ ID NO: 114525 - RNA, 19 nt, Homo sapiens
  misc_RNA (1)...(19): siRNA sense strand
gcagugccuuaaucuguaa

SEQ ID NO: 114526 - RNA, 19 nt, Homo sapiens
  misc_RNA (1)...(19): siRNA sense strand
guucgaagaugauaaaguc

SEQ ID NO: 114527 - RNA, 19 nt, Homo sapiens
  misc_RNA (1)...(19): siRNA sense strand
cagaugggauggagcauug

SEQ ID NO: 114528 - RNA, 19 nt, Homo sapiens
  misc_RNA (1)...(19): siRNA sense strand
uaacagucaucucuacaug

SEQ ID NO: 114529 - RNA, 19 nt, Homo sapiens
  misc_RNA (1)...(19): siRNA sense strand
gcaaagcuacccagauaau

SEQ ID NO: 114530 - RNA, 19 nt, Homo sapiens
  misc_RNA (1)...(19): siRNA sense strand
caacaucaagcuggucuua

SEQ ID NO: 114531 - RNA, 19 nt, Homo sapiens
  misc_RNA (1)...(19): siRNA sense strand
cgaguacccucuagugaga

SEQ ID NO: 114532 - RNA, 19 nt, Homo sapiens
  misc_RNA (1)...(19): siRNA sense strand
ccagucggcuccucuguga

SEQ ID NO: 114533 - RNA, 19 nt, Homo sapiens
  misc_RNA (1)...(19): siRNA sense strand
ccagaaggauuucaugucu

SEQ ID NO: 114534 - RNA, 19 nt, Homo sapiens
  misc_RNA (1)...(19): siRNA sense strand
gaaaaggacugugucaaau

SEQ ID NO: 114535 - RNA, 19 nt, Homo sapiens
  misc_RNA (1)...(19): siRNA sense strand
gaucuucucuucacaagcu

SEQ ID NO: 114536 - RNA, 19 nt, Homo sapiens
  misc_RNA (1)...(19): siRNA sense strand
caaauggcaugaaauugca

SEQ ID NO: 114537 - RNA, 19 nt, Homo sapiens
  misc_RNA (1)...(19): siRNA sense strand
gguuugacaugaaggcuuu

SEQ ID NO: 114538 - RNA, 19 nt, Homo sapiens
  misc_RNA (1)...(19): siRNA sense strand
guugguaaauccugccuuu

SEQ ID NO: 114539 - RNA, 19 nt, Homo sapiens
  misc_RNA (1)...(19): siRNA sense strand
aaaggacugugucaaauca

SEQ ID NO: 114540 - RNA, 19 nt, Homo sapiens
  misc_RNA (1)...(19): siRNA sense strand
ucucugaagcuuacauuua

SEQ ID NO: 114541 - RNA, 19 nt, Homo sapiens
  misc_RNA (1)...(19): siRNA sense strand
ggauguggaacgagauaua

SEQ ID NO: 114542 - RNA, 19 nt, Homo sapiens
  misc_RNA (1)...(19): siRNA sense strand
gagcugucauguaucaguu

SEQ ID NO: 114543 - RNA, 19 nt, Homo sapiens
  misc_RNA (1)...(19): siRNA sense strand
caaaauaucuagagacagu

SEQ ID NO: 114544 - RNA, 19 nt, Homo sapiens
  misc_RNA (1)...(19): siRNA sense strand
gcaaaacucugcucaaaac

SEQ ID NO: 114545 - RNA, 19 nt, Homo sapiens
  misc_RNA (1)...(19): siRNA sense strand
gcuuaagucugugagcuuu

SEQ ID NO: 114546 - RNA, 19 nt, Homo sapiens
  misc_RNA (1)...(19): siRNA sense strand
ucacccguuucuauaguua

SEQ ID NO: 114547 - RNA, 19 nt, Homo sapiens
  misc_RNA (1)...(19): siRNA sense strand
ggugaucuauccugagugu

SEQ ID NO: 114548 - RNA, 19 nt, Homo sapiens
  misc_RNA (1)...(19): siRNA sense strand
acaucaagcuggucuuaga

SEQ ID NO: 114549 - RNA, 19 nt, Homo sapiens
  misc_RNA (1)...(19): siRNA sense strand
cauagauguuucucaguug

SEQ ID NO: 114550 - RNA, 19 nt, Homo sapiens
  misc_RNA (1)...(19): siRNA sense strand
ggaacuccauagauguuuc

SEQ ID NO: 114551 - RNA, 19 nt, Homo sapiens
  misc_RNA (1)...(19): siRNA sense strand
ucaagcuggucuuagauga

SEQ ID NO: 114552 - RNA, 19 nt, Homo sapiens
  misc_RNA (1)...(19): siRNA sense strand
gauaauuccuaccaacaac

SEQ ID NO: 114553 - RNA, 19 nt, Homo sapiens
  misc_RNA (1)...(19): siRNA sense strand
gaaguuggguccauuuacc

SEQ ID NO: 114554 - RNA, 19 nt, Homo sapiens
  misc_RNA (1)...(19): siRNA sense strand
augauaaagucgucuauga

SEQ ID NO: 114555 - RNA, 19 nt, Homo sapiens
  misc_RNA (1)...(19): siRNA sense strand
cugggaagcuuaagucugu

SEQ ID NO: 114556 - RNA, 19 nt, Homo sapiens
  misc_RNA (1)...(19): siRNA sense strand
ucuacuaccuguacgagaa

SEQ ID NO: 114557 - RNA, 19 nt, Homo sapiens
  misc_RNA (1)...(19): siRNA sense strand
gauguggaacgagauauaa

SEQ ID NO: 114558 - RNA, 19 nt, Homo sapiens
  misc_RNA (1)...(19): siRNA sense strand
ugagucacccguuucuaua

SEQ ID NO: 114559 - RNA, 19 nt, Homo sapiens
  misc_RNA (1)...(19): siRNA sense strand
gaucuagaagcaacaaaug

SEQ ID NO: 114560 - RNA, 19 nt, Homo sapiens
  misc_RNA (1)...(19): siRNA sense strand
aaacacaaccagcucuuga

SEQ ID NO: 114561 - RNA, 19 nt, Homo sapiens
  misc_RNA (1)...(19): siRNA sense strand
cgagauauaaguucgaaga

SEQ ID NO: 114562 - RNA, 19 nt, Homo sapiens
  misc_RNA (1)...(19): siRNA sense strand
ccaaccaauuuacauggaa

SEQ ID NO: 114563 - RNA, 19 nt, Homo sapiens
  misc_RNA (1)...(19): siRNA sense strand
guggauggcugugcauaug

SEQ ID NO: 114564 - RNA, 19 nt, Homo sapiens
  misc_RNA (1)...(19): siRNA sense strand
agaaauggcaugcaucugu

SEQ ID NO: 114565 - RNA, 19 nt, Homo sapiens
  misc_RNA (1)...(19): siRNA sense strand
gacccauccugaucacuau

SEQ ID NO: 114566 - RNA, 19 nt, Homo sapiens
  misc_RNA (1)...(19): siRNA sense strand
ccauggauccagacucuuu

SEQ ID NO: 114567 - RNA, 19 nt, Homo sapiens
  misc_RNA (1)...(19): siRNA sense strand
gcuucagccucuugauuga

SEQ ID NO: 114568 - RNA, 19 nt, Homo sapiens
  misc_RNA (1)...(19): siRNA sense strand
ugagccagcugcaugacaa

SEQ ID NO: 114569 - RNA, 19 nt, Homo sapiens
  misc_RNA (1)...(19): siRNA sense strand
ggugucggcucaucugauc

SEQ ID NO: 114570 - RNA, 19 nt, Homo sapiens
  misc_RNA (1)...(19): siRNA sense strand
ugacagugaaguguucuua

SEQ ID NO: 114571 - RNA, 19 nt, Homo sapiens
  misc_RNA (1)...(19): siRNA sense strand
gcugguacgguuccacaua

SEQ ID NO: 114572 - RNA, 19 nt, Homo sapiens
  misc_RNA (1)...(19): siRNA sense strand
caguauccauggugaucua

SEQ ID NO: 114573 - RNA, 19 nt, Homo sapiens
  misc_RNA (1)...(19): siRNA sense strand
caucaguucuacuuagcuu

SEQ ID NO: 114574 - RNA, 19 nt, Homo sapiens
  misc_RNA (1)...(19): siRNA sense strand
ucucuagccuggucuacuu

SEQ ID NO: 114575 - RNA, 19 nt, Homo sapiens
  misc_RNA (1)...(19): siRNA sense strand
ggagaagaguaggagugaa

SEQ ID NO: 114576 - RNA, 19 nt, Homo sapiens
  misc_RNA (1)...(19): siRNA sense strand
caagguaacagucaucucu

SEQ ID NO: 114577 - RNA, 19 nt, Homo sapiens
  misc_RNA (1)...(19): siRNA sense strand
cucugaagcuuacauuuau

SEQ ID NO: 114578 - RNA, 19 nt, Homo sapiens
  misc_RNA (1)...(19): siRNA sense strand
ugagggcuaccuaugauaa

SEQ ID NO: 114579 - RNA, 19 nt, Homo sapiens
  misc_RNA (1)...(19): siRNA sense strand
ugcagugccuuaaucugua

SEQ ID NO: 114580 - RNA, 19 nt, Homo sapiens
  misc_RNA (1)...(19): siRNA sense strand
ugauaaagucgucuaugaa

SEQ ID NO: 114581 - RNA, 19 nt, Homo sapiens
  misc_RNA (1)...(19): siRNA sense strand
caagaaauggcaugcaucu

SEQ ID NO: 114582 - RNA, 19 nt, Homo sapiens
  misc_RNA (1)...(19): siRNA sense strand
caccauggauccagacucu

SEQ ID NO: 114583 - RNA, 19 nt, Homo sapiens
  misc_RNA (1)...(19): siRNA sense strand
gccaaccaauuuacaugga

SEQ ID NO: 114584 - RNA, 19 nt, Homo sapiens
  misc_RNA (1)...(19): siRNA sense strand
caaagcuacccagauaauu

SEQ ID NO: 114585 - RNA, 19 nt, Homo sapiens
  misc_RNA (1)...(19): siRNA sense strand
agauauaaguucgaagaug

SEQ ID NO: 114586 - RNA, 19 nt, Homo sapiens
  misc_RNA (1)...(19): siRNA sense strand
gguaaauccugccuuucca

SEQ ID NO: 114587 - RNA, 19 nt, Homo sapiens
  misc_RNA (1)...(19): siRNA sense strand
cagaaggauuucaugucuu

SEQ ID NO: 114588 - RNA, 19 nt, Homo sapiens
  misc_RNA (1)...(19): siRNA sense strand
ggacugugucaaaucacua

SEQ ID NO: 114589 - RNA, 19 nt, Homo sapiens
  misc_RNA (1)...(19): siRNA sense strand
aaagcuacccagauaauuc

SEQ ID NO: 114590 - RNA, 19 nt, Homo sapiens
  misc_RNA (1)...(19): siRNA sense strand
gcaugcaucugugguggau

SEQ ID NO: 114591 - RNA, 19 nt, Homo sapiens
  misc_RNA (1)...(19): siRNA sense strand
gugaaguuggguccauuua

SEQ ID NO: 114592 - RNA, 19 nt, Homo sapiens
  misc_RNA (1)...(19): siRNA sense strand
gacaugcuacuaaacauca

SEQ ID NO: 114593 - RNA, 19 nt, Homo sapiens
  misc_RNA (1)...(19): siRNA sense strand
gcaacaaauggcaugaaau

SEQ ID NO: 114594 - RNA, 19 nt, Homo sapiens
  misc_RNA (1)...(19): siRNA sense strand
uuaagucugugagcuuuga

SEQ ID NO: 114595 - RNA, 19 nt, Homo sapiens
  misc_RNA (1)...(19): siRNA sense strand
agcaacaaauggcaugaaa

SEQ ID NO: 114596 - RNA, 19 nt, Homo sapiens
  misc_RNA (1)...(19): siRNA sense strand
gggagaagaguaggaguga

SEQ ID NO: 114597 - RNA, 19 nt, Homo sapiens
  misc_RNA (1)...(19): siRNA sense strand
aggaaugacaugcuacuaa

SEQ ID NO: 114598 - RNA, 19 nt, Homo sapiens
  misc_RNA (1)...(19): siRNA sense strand
gugaaguguucuuauagca

SEQ ID NO: 114599 - RNA, 19 nt, Homo sapiens
  misc_RNA (1)...(19): siRNA sense strand
caugcucucuggacggauu

SEQ ID NO: 114600 - RNA, 19 nt, Homo sapiens
  misc_RNA (1)...(19): siRNA sense strand
ucugugaccugcccugugu

SEQ ID NO: 114601 - RNA, 19 nt, Homo sapiens
  misc_RNA (1)...(19): siRNA sense strand
cggcucaucugaucuaaaa

SEQ ID NO: 114602 - RNA, 19 nt, Homo sapiens
  misc_RNA (1)...(19): siRNA sense strand
gagaaaggauggcaaagau

SEQ ID NO: 114603 - RNA, 19 nt, Homo sapiens
  misc_RNA (1)...(19): siRNA sense strand
gcaaagauccaaaucaguu

SEQ ID NO: 114604 - RNA, 19 nt, Homo sapiens
  misc_RNA (1)...(19): siRNA sense strand
caaacgggcugcagagaug

SEQ ID NO: 114605 - RNA, 19 nt, Homo sapiens
  misc_RNA (1)...(19): siRNA sense strand
agauggagcuucaggcaaa

SEQ ID NO: 114606 - RNA, 19 nt, Homo sapiens
  misc_RNA (1)...(19): siRNA sense strand
gacauucccuuggaccuuu

SEQ ID NO: 114607 - RNA, 19 nt, Homo sapiens
  misc_RNA (1)...(19): siRNA sense strand
gcauggacauucccuugga

SEQ ID NO: 114608 - RNA, 19 nt, Homo sapiens
  misc_RNA (1)...(19): siRNA sense strand
acagacaccucucucaugu

SEQ ID NO: 114609 - RNA, 19 nt, Homo sapiens
  misc_RNA (1)...(19): siRNA sense strand
aggcaaaacuuacagcuua

SEQ ID NO: 114610 - RNA, 19 nt, Homo sapiens
  misc_RNA (1)...(19): siRNA sense strand
ucagugaucugccauacca

SEQ ID NO: 114611 - RNA, 19 nt, Homo sapiens
  misc_RNA (1)...(19): siRNA sense strand
ggacuucaguggauuucag

SEQ ID NO: 114612 - RNA, 19 nt, Homo sapiens
  misc_RNA (1)...(19): siRNA sense strand
acacagauauacagcagau

SEQ ID NO: 114613 - RNA, 19 nt, Homo sapiens
  misc_RNA (1)...(19): siRNA sense strand
ugacugcauugaaagaugu

SEQ ID NO: 114614 - RNA, 19 nt, Homo sapiens
  misc_RNA (1)...(19): siRNA sense strand
cugcagagauggagcuuca

SEQ ID NO: 114615 - RNA, 19 nt, Homo sapiens
  misc_RNA (1)...(19): siRNA sense strand
agacaccucucucauguac

SEQ ID NO: 114616 - RNA, 19 nt, Homo sapiens
  misc_RNA (1)...(19): siRNA sense strand
cacugugacugcauugaaa

SEQ ID NO: 114617 - RNA, 19 nt, Homo sapiens
  misc_RNA (1)...(19): siRNA sense strand
ucccugacaugcugagaaa

SEQ ID NO: 114618 - RNA, 19 nt, Homo sapiens
  misc_RNA (1)...(19): siRNA sense strand
gucuguaacugguucauca

SEQ ID NO: 114619 - RNA, 19 nt, Homo sapiens
  misc_RNA (1)...(19): siRNA sense strand
uggcaaagauccaaaucag

SEQ ID NO: 114620 - RNA, 19 nt, Homo sapiens
  misc_RNA (1)...(19): siRNA sense strand
gcugagaaaggauggcaaa

SEQ ID NO: 114621 - RNA, 19 nt, Homo sapiens
  misc_RNA (1)...(19): siRNA sense strand
ugagaaaggauggcaaaga

SEQ ID NO: 114622 - RNA, 19 nt, Homo sapiens
  misc_RNA (1)...(19): siRNA sense strand
gaggacagcauggacauuc

SEQ ID NO: 114623 - RNA, 19 nt, Homo sapiens
  misc_RNA (1)...(19): siRNA sense strand
ggacauucccuuggaccuu

SEQ ID NO: 114624 - RNA, 19 nt, Homo sapiens
  misc_RNA (1)...(19): siRNA sense strand
gugacugcauugaaagaug

SEQ ID NO: 114625 - RNA, 19 nt, Homo sapiens
  misc_RNA (1)...(19): siRNA sense strand
uaugagcaccguuacaaug

SEQ ID NO: 114626 - RNA, 19 nt, Homo sapiens
  misc_RNA (1)...(19): siRNA sense strand
ccacugugacugcauugaa

SEQ ID NO: 114627 - RNA, 19 nt, Homo sapiens
  misc_RNA (1)...(19): siRNA sense strand
ccuuggaccuuucuucauc

SEQ ID NO: 114628 - RNA, 19 nt, Homo sapiens
  misc_RNA (1)...(19): siRNA sense strand
uuacaaugccuauccuuca

SEQ ID NO: 114629 - RNA, 19 nt, Homo sapiens
  misc_RNA (1)...(19): siRNA sense strand
gugcagauucuucgggauu

SEQ ID NO: 114630 - RNA, 19 nt, Homo sapiens
  misc_RNA (1)...(19): siRNA sense strand
aaccaggacuucaguggau

SEQ ID NO: 114631 - RNA, 19 nt, Homo sapiens
  misc_RNA (1)...(19): siRNA sense strand
cagcaaacacaccugucua

SEQ ID NO: 114632 - RNA, 19 nt, Homo sapiens
  misc_RNA (1)...(19): siRNA sense strand
caaagauccaaaucaguuc

SEQ ID NO: 114633 - RNA, 19 nt, Homo sapiens
  misc_RNA (1)...(19): siRNA sense strand
gagcuucaggcaaaacuua

SEQ ID NO: 114634 - RNA, 19 nt, Homo sapiens
  misc_RNA (1)...(19): siRNA sense strand
ggacaaaacacagauauac

SEQ ID NO: 114635 - RNA, 19 nt, Homo sapiens
  misc_RNA (1)...(19): siRNA sense strand
acagauauacagcagauag

SEQ ID NO: 114636 - RNA, 19 nt, Homo sapiens
  misc_RNA (1)...(19): siRNA sense strand
auaccacugugacugcauu

SEQ ID NO: 114637 - RNA, 19 nt, Homo sapiens
  misc_RNA (1)...(19): siRNA sense strand
ggcaaaacuuacagcuuaa

SEQ ID NO: 114638 - RNA, 19 nt, Homo sapiens
  misc_RNA (1)...(19): siRNA sense strand
cacagacaccucucucaug

SEQ ID NO: 114639 - RNA, 19 nt, Homo sapiens
  misc_RNA (1)...(19): siRNA sense strand
ucacagacaccucucucau

SEQ ID NO: 114640 - RNA, 19 nt, Homo sapiens
  misc_RNA (1)...(19): siRNA sense strand
ucaaacgggcugcagagau

SEQ ID NO: 114641 - RNA, 19 nt, Homo sapiens
  misc_RNA (1)...(19): siRNA sense strand
guaaaucuggaccaaguac

SEQ ID NO: 114642 - RNA, 19 nt, Homo sapiens
  misc_RNA (1)...(19): siRNA sense strand
gauccaaaucaguucacaa

SEQ ID NO: 114643 - RNA, 19 nt, Homo sapiens
  misc_RNA (1)...(19): siRNA sense strand
ccaggacuucaguggauuu

SEQ ID NO: 114644 - RNA, 19 nt, Homo sapiens
  misc_RNA (1)...(19): siRNA sense strand
gcagauucuucgggauugg

SEQ ID NO: 114645 - RNA, 19 nt, Homo sapiens
  misc_RNA (1)...(19): siRNA sense strand
gaugucccuuucucucucu

SEQ ID NO: 114646 - RNA, 19 nt, Homo sapiens
  misc_RNA (1)...(19): siRNA sense strand
ggaccucaaccaggacuuc

SEQ ID NO: 114647 - RNA, 19 nt, Homo sapiens
  misc_RNA (1)...(19): siRNA sense strand
ggcuguaugagcaccguua

SEQ ID NO: 114648 - RNA, 19 nt, Homo sapiens
  misc_RNA (1)...(19): siRNA sense strand
guaugagcaccguuacaau

SEQ ID NO: 114649 - RNA, 19 nt, Homo sapiens
  misc_RNA (1)...(19): siRNA sense strand
caguggauuucagcuucua

SEQ ID NO: 114650 - RNA, 19 nt, Homo sapiens
  misc_RNA (1)...(19): siRNA sense strand
gagaaaggauggcaaagau

SEQ ID NO: 114651 - RNA, 19 nt, Homo sapiens
  misc_RNA (1)...(19): siRNA sense strand
gcaaagauccaaaucaguu

SEQ ID NO: 114652 - RNA, 19 nt, Homo sapiens
  misc_RNA (1)...(19): siRNA sense strand
caaacgggcugcagagaug

SEQ ID NO: 114653 - RNA, 19 nt, Homo sapiens
  misc_RNA (1)...(19): siRNA sense strand
agauggagcuucaggcaaa

SEQ ID NO: 114654 - RNA, 19 nt, Homo sapiens
  misc_RNA (1)...(19): siRNA sense strand
gacauucccuuggaccuuu

SEQ ID NO: 114655 - RNA, 19 nt, Homo sapiens
  misc_RNA (1)...(19): siRNA sense strand
gcauggacauucccuugga

SEQ ID NO: 114656 - RNA, 19 nt, Homo sapiens
  misc_RNA (1)...(19): siRNA sense strand
acagacaccucucucaugu

SEQ ID NO: 114657 - RNA, 19 nt, Homo sapiens
  misc_RNA (1)...(19): siRNA sense strand
aggcaaaacuuacagcuua

SEQ ID NO: 114658 - RNA, 19 nt, Homo sapiens
  misc_RNA (1)...(19): siRNA sense strand
ucagugaucugccauacca

SEQ ID NO: 114659 - RNA, 19 nt, Homo sapiens
  misc_RNA (1)...(19): siRNA sense strand
ggacuucaguggauuucag

SEQ ID NO: 114660 - RNA, 19 nt, Homo sapiens
  misc_RNA (1)...(19): siRNA sense strand
acacagauauacagcagau

SEQ ID NO: 114661 - RNA, 19 nt, Homo sapiens
  misc_RNA (1)...(19): siRNA sense strand
ugacugcauugaaagaugu

SEQ ID NO: 114662 - RNA, 19 nt, Homo sapiens
  misc_RNA (1)...(19): siRNA sense strand
cugcagagauggagcuuca

SEQ ID NO: 114663 - RNA, 19 nt, Homo sapiens
  misc_RNA (1)...(19): siRNA sense strand
agacaccucucucauguac

SEQ ID NO: 114664 - RNA, 19 nt, Homo sapiens
  misc_RNA (1)...(19): siRNA sense strand
cacugugacugcauugaaa

SEQ ID NO: 114665 - RNA, 19 nt, Homo sapiens
  misc_RNA (1)...(19): siRNA sense strand
ucccugacaugcugagaaa

SEQ ID NO: 114666 - RNA, 19 nt, Homo sapiens
  misc_RNA (1)...(19): siRNA sense strand
gucuguaacugguucauca

SEQ ID NO: 114667 - RNA, 19 nt, Homo sapiens
  misc_RNA (1)...(19): siRNA sense strand
uggcaaagauccaaaucag

SEQ ID NO: 114668 - RNA, 19 nt, Homo sapiens
  misc_RNA (1)...(19): siRNA sense strand
gcugagaaaggauggcaaa

SEQ ID NO: 114669 - RNA, 19 nt, Homo sapiens
  misc_RNA (1)...(19): siRNA sense strand
ugagaaaggauggcaaaga

SEQ ID NO: 114670 - RNA, 19 nt, Homo sapiens
  misc_RNA (1)...(19): siRNA sense strand
gaggacagcauggacauuc

SEQ ID NO: 114671 - RNA, 19 nt, Homo sapiens
  misc_RNA (1)...(19): siRNA sense strand
ggacauucccuuggaccuu

SEQ ID NO: 114672 - RNA, 19 nt, Homo sapiens
  misc_RNA (1)...(19): siRNA sense strand
gugacugcauugaaagaug

SEQ ID NO: 114673 - RNA, 19 nt, Homo sapiens
  misc_RNA (1)...(19): siRNA sense strand
uaugagcaccguuacaaug

SEQ ID NO: 114674 - RNA, 19 nt, Homo sapiens
  misc_RNA (1)...(19): siRNA sense strand
ccacugugacugcauugaa

SEQ ID NO: 114675 - RNA, 19 nt, Homo sapiens
  misc_RNA (1)...(19): siRNA sense strand
ccuuggaccuuucuucauc

SEQ ID NO: 114676 - RNA, 19 nt, Homo sapiens
  misc_RNA (1)...(19): siRNA sense strand
uuacaaugccuauccuuca

SEQ ID NO: 114677 - RNA, 19 nt, Homo sapiens
  misc_RNA (1)...(19): siRNA sense strand
gugcagauucuucgggauu

SEQ ID NO: 114678 - RNA, 19 nt, Homo sapiens
  misc_RNA (1)...(19): siRNA sense strand
aaccaggacuucaguggau

SEQ ID NO: 114679 - RNA, 19 nt, Homo sapiens
  misc_RNA (1)...(19): siRNA sense strand
cagcaaacacaccugucua

SEQ ID NO: 114680 - RNA, 19 nt, Homo sapiens
  misc_RNA (1)...(19): siRNA sense strand
caaagauccaaaucaguuc

SEQ ID NO: 114681 - RNA, 19 nt, Homo sapiens
  misc_RNA (1)...(19): siRNA sense strand
gagcuucaggcaaaacuua

SEQ ID NO: 114682 - RNA, 19 nt, Homo sapiens
  misc_RNA (1)...(19): siRNA sense strand
ggacaaaacacagauauac

SEQ ID NO: 114683 - RNA, 19 nt, Homo sapiens
  misc_RNA (1)...(19): siRNA sense strand
acagauauacagcagauag

SEQ ID NO: 114684 - RNA, 19 nt, Homo sapiens
  misc_RNA (1)...(19): siRNA sense strand
auaccacugugacugcauu

SEQ ID NO: 114685 - RNA, 19 nt, Homo sapiens
  misc_RNA (1)...(19): siRNA sense strand
ggcaaaacuuacagcuuaa

SEQ ID NO: 114686 - RNA, 19 nt, Homo sapiens
  misc_RNA (1)...(19): siRNA sense strand
cacagacaccucucucaug

SEQ ID NO: 114687 - RNA, 19 nt, Homo sapiens
  misc_RNA (1)...(19): siRNA sense strand
ucacagacaccucucucau

SEQ ID NO: 114688 - RNA, 19 nt, Homo sapiens
  misc_RNA (1)...(19): siRNA sense strand
ucaaacgggcugcagagau

SEQ ID NO: 114689 - RNA, 19 nt, Homo sapiens
  misc_RNA (1)...(19): siRNA sense strand
guaaaucuggaccaaguac

SEQ ID NO: 114690 - RNA, 19 nt, Homo sapiens
  misc_RNA (1)...(19): siRNA sense strand
gauccaaaucaguucacaa

SEQ ID NO: 114691 - RNA, 19 nt, Homo sapiens
  misc_RNA (1)...(19): siRNA sense strand
ccaggacuucaguggauuu

SEQ ID NO: 114692 - RNA, 19 nt, Homo sapiens
  misc_RNA (1)...(19): siRNA sense strand
gcagauucuucgggauugg

SEQ ID NO: 114693 - RNA, 19 nt, Homo sapiens
  misc_RNA (1)...(19): siRNA sense strand
gaugucccuuucucucucu

SEQ ID NO: 114694 - RNA, 19 nt, Homo sapiens
  misc_RNA (1)...(19): siRNA sense strand
ggaccucaaccaggacuuc

SEQ ID NO: 114695 - RNA, 19 nt, Homo sapiens
  misc_RNA (1)...(19): siRNA sense strand
ggcuguaugagcaccguua

SEQ ID NO: 114696 - RNA, 19 nt, Homo sapiens
  misc_RNA (1)...(19): siRNA sense strand
guaugagcaccguuacaau

SEQ ID NO: 114697 - RNA, 19 nt, Homo sapiens
  misc_RNA (1)...(19): siRNA sense strand
caguggauuucagcuucua

SEQ ID NO: 114698 - RNA, 19 nt, Homo sapiens
  misc_RNA (1)...(19): siRNA sense strand
gagaaaggauggcaaagau

SEQ ID NO: 114699 - RNA, 19 nt, Homo sapiens
  misc_RNA (1)...(19): siRNA sense strand
gcaaagauccaaaucaguu

SEQ ID NO: 114700 - RNA, 19 nt, Homo sapiens
  misc_RNA (1)...(19): siRNA sense strand
caaacgggcugcagagaug

SEQ ID NO: 114701 - RNA, 19 nt, Homo sapiens
  misc_RNA (1)...(19): siRNA sense strand
agauggagcuucaggcaaa

SEQ ID NO: 114702 - RNA, 19 nt, Homo sapiens
  misc_RNA (1)...(19): siRNA sense strand
gacauucccuuggaccuuu

SEQ ID NO: 114703 - RNA, 19 nt, Homo sapiens
  misc_RNA (1)...(19): siRNA sense strand
gcauggacauucccuugga

SEQ ID NO: 114704 - RNA, 19 nt, Homo sapiens
  misc_RNA (1)...(19): siRNA sense strand
acagacaccucucucaugu

SEQ ID NO: 114705 - RNA, 19 nt, Homo sapiens
  misc_RNA (1)...(19): siRNA sense strand
aggcaaaacuuacagcuua

SEQ ID NO: 114706 - RNA, 19 nt, Homo sapiens
  misc_RNA (1)...(19): siRNA sense strand
ucagugaucugccauacca

SEQ ID NO: 114707 - RNA, 19 nt, Homo sapiens
  misc_RNA (1)...(19): siRNA sense strand
ggacuucaguggauuucag

SEQ ID NO: 114708 - RNA, 19 nt, Homo sapiens
  misc_RNA (1)...(19): siRNA sense strand
acacagauauacagcagau

SEQ ID NO: 114709 - RNA, 19 nt, Homo sapiens
  misc_RNA (1)...(19): siRNA sense strand
ugacugcauugaaagaugu

SEQ ID NO: 114710 - RNA, 19 nt, Homo sapiens
  misc_RNA (1)...(19): siRNA sense strand
cugcagagauggagcuuca

SEQ ID NO: 114711 - RNA, 19 nt, Homo sapiens
  misc_RNA (1)...(19): siRNA sense strand
agacaccucucucauguac

SEQ ID NO: 114712 - RNA, 19 nt, Homo sapiens
  misc_RNA (1)...(19): siRNA sense strand
cacugugacugcauugaaa

SEQ ID NO: 114713 - RNA, 19 nt, Homo sapiens
  misc_RNA (1)...(19): siRNA sense strand
ucccugacaugcugagaaa

SEQ ID NO: 114714 - RNA, 19 nt, Homo sapiens
  misc_RNA (1)...(19): siRNA sense strand
gucuguaacugguucauca

SEQ ID NO: 114715 - RNA, 19 nt, Homo sapiens
  misc_RNA (1)...(19): siRNA sense strand
uggcaaagauccaaaucag

SEQ ID NO: 114716 - RNA, 19 nt, Homo sapiens
  misc_RNA (1)...(19): siRNA sense strand
gcugagaaaggauggcaaa

SEQ ID NO: 114717 - RNA, 19 nt, Homo sapiens
  misc_RNA (1)...(19): siRNA sense strand
ugagaaaggauggcaaaga

SEQ ID NO: 114718 - RNA, 19 nt, Homo sapiens
  misc_RNA (1)...(19): siRNA sense strand
gaggacagcauggacauuc

SEQ ID NO: 114719 - RNA, 19 nt, Homo sapiens
  misc_RNA (1)...(19): siRNA sense strand
ggacauucccuuggaccuu

SEQ ID NO: 114720 - RNA, 19 nt, Homo sapiens
  misc_RNA (1)...(19): siRNA sense strand
gugacugcauugaaagaug

SEQ ID NO: 114721 - RNA, 19 nt, Homo sapiens
  misc_RNA (1)...(19): siRNA sense strand
uaugagcaccguuacaaug

SEQ ID NO: 114722 - RNA, 19 nt, Homo sapiens
  misc_RNA (1)...(19): siRNA sense strand
ccacugugacugcauugaa

SEQ ID NO: 114723 - RNA, 19 nt, Homo sapiens
  misc_RNA (1)...(19): siRNA sense strand
ccuuggaccuuucuucauc

SEQ ID NO: 114724 - RNA, 19 nt, Homo sapiens
  misc_RNA (1)...(19): siRNA sense strand
uuacaaugccuauccuuca

SEQ ID NO: 114725 - RNA, 19 nt, Homo sapiens
  misc_RNA (1)...(19): siRNA sense strand
gugcagauucuucgggauu

SEQ ID NO: 114726 - RNA, 19 nt, Homo sapiens
  misc_RNA (1)...(19): siRNA sense strand
aaccaggacuucaguggau

SEQ ID NO: 114727 - RNA, 19 nt, Homo sapiens
  misc_RNA (1)...(19): siRNA sense strand
cagcaaacacaccugucua

SEQ ID NO: 114728 - RNA, 19 nt, Homo sapiens
  misc_RNA (1)...(19): siRNA sense strand
caaagauccaaaucaguuc

SEQ ID NO: 114729 - RNA, 19 nt, Homo sapiens
  misc_RNA (1)...(19): siRNA sense strand
gagcuucaggcaaaacuua

SEQ ID NO: 114730 - RNA, 19 nt, Homo sapiens
  misc_RNA (1)...(19): siRNA sense strand
ggacaaaacacagauauac

SEQ ID NO: 114731 - RNA, 19 nt, Homo sapiens
  misc_RNA (1)...(19): siRNA sense strand
acagauauacagcagauag

SEQ ID NO: 114732 - RNA, 19 nt, Homo sapiens
  misc_RNA (1)...(19): siRNA sense strand
auaccacugugacugcauu

SEQ ID NO: 114733 - RNA, 19 nt, Homo sapiens
  misc_RNA (1)...(19): siRNA sense strand
ggcaaaacuuacagcuuaa

SEQ ID NO: 114734 - RNA, 19 nt, Homo sapiens
  misc_RNA (1)...(19): siRNA sense strand
cacagacaccucucucaug

SEQ ID NO: 114735 - RNA, 19 nt, Homo sapiens
  misc_RNA (1)...(19): siRNA sense strand
ucacagacaccucucucau

SEQ ID NO: 114736 - RNA, 19 nt, Homo sapiens
  misc_RNA (1)...(19): siRNA sense strand
ucaaacgggcugcagagau

SEQ ID NO: 114737 - RNA, 19 nt, Homo sapiens
  misc_RNA (1)...(19): siRNA sense strand
guaaaucuggaccaaguac

SEQ ID NO: 114738 - RNA, 19 nt, Homo sapiens
  misc_RNA (1)...(19): siRNA sense strand
gauccaaaucaguucacaa

SEQ ID NO: 114739 - RNA, 19 nt, Homo sapiens
  misc_RNA (1)...(19): siRNA sense strand
ccaggacuucaguggauuu

SEQ ID NO: 114740 - RNA, 19 nt, Homo sapiens
  misc_RNA (1)...(19): siRNA sense strand
gcagauucuucgggauugg

SEQ ID NO: 114741 - RNA, 19 nt, Homo sapiens
  misc_RNA (1)...(19): siRNA sense strand
gaugucccuuucucucucu

SEQ ID NO: 114742 - RNA, 19 nt, Homo sapiens
  misc_RNA (1)...(19): siRNA sense strand
ggaccucaaccaggacuuc

SEQ ID NO: 114743 - RNA, 19 nt, Homo sapiens
  misc_RNA (1)...(19): siRNA sense strand
ggcuguaugagcaccguua

SEQ ID NO: 114744 - RNA, 19 nt, Homo sapiens
  misc_RNA (1)...(19): siRNA sense strand
guaugagcaccguuacaau

SEQ ID NO: 114745 - RNA, 19 nt, Homo sapiens
  misc_RNA (1)...(19): siRNA sense strand
caguggauuucagcuucua

SEQ ID NO: 114746 - RNA, 19 nt, Homo sapiens
  misc_RNA (1)...(19): siRNA sense strand
gagaaaggauggcaaagau

SEQ ID NO: 114747 - RNA, 19 nt, Homo sapiens
  misc_RNA (1)...(19): siRNA sense strand
gcaaagauccaaaucaguu

SEQ ID NO: 114748 - RNA, 19 nt, Homo sapiens
  misc_RNA (1)...(19): siRNA sense strand
caaacgggcugcagagaug

SEQ ID NO: 114749 - RNA, 19 nt, Homo sapiens
  misc_RNA (1)...(19): siRNA sense strand
agauggagcuucaggcaaa

SEQ ID NO: 114750 - RNA, 19 nt, Homo sapiens
  misc_RNA (1)...(19): siRNA sense strand
gacauucccuuggaccuuu

SEQ ID NO: 114751 - RNA, 19 nt, Homo sapiens
  misc_RNA (1)...(19): siRNA sense strand
gcauggacauucccuugga

SEQ ID NO: 114752 - RNA, 19 nt, Homo sapiens
  misc_RNA (1)...(19): siRNA sense strand
acagacaccucucucaugu

SEQ ID NO: 114753 - RNA, 19 nt, Homo sapiens
  misc_RNA (1)...(19): siRNA sense strand
aggcaaaacuuacagcuua

SEQ ID NO: 114754 - RNA, 19 nt, Homo sapiens
  misc_RNA (1)...(19): siRNA sense strand
ucagugaucugccauacca

SEQ ID NO: 114755 - RNA, 19 nt, Homo sapiens
  misc_RNA (1)...(19): siRNA sense strand
ggacuucaguggauuucag

SEQ ID NO: 114756 - RNA, 19 nt, Homo sapiens
  misc_RNA (1)...(19): siRNA sense strand
acacagauauacagcagau

SEQ ID NO: 114757 - RNA, 19 nt, Homo sapiens
  misc_RNA (1)...(19): siRNA sense strand
ugacugcauugaaagaugu

SEQ ID NO: 114758 - RNA, 19 nt, Homo sapiens
  misc_RNA (1)...(19): siRNA sense strand
cugcagagauggagcuuca

SEQ ID NO: 114759 - RNA, 19 nt, Homo sapiens
  misc_RNA (1)...(19): siRNA sense strand
agacaccucucucauguac

SEQ ID NO: 114760 - RNA, 19 nt, Homo sapiens
  misc_RNA (1)...(19): siRNA sense strand
cacugugacugcauugaaa

SEQ ID NO: 114761 - RNA, 19 nt, Homo sapiens
  misc_RNA (1)...(19): siRNA sense strand
ucccugacaugcugagaaa

SEQ ID NO: 114762 - RNA, 19 nt, Homo sapiens
  misc_RNA (1)...(19): siRNA sense strand
gucuguaacugguucauca

SEQ ID NO: 114763 - RNA, 19 nt, Homo sapiens
  misc_RNA (1)...(19): siRNA sense strand
uggcaaagauccaaaucag

SEQ ID NO: 114764 - RNA, 19 nt, Homo sapiens
  misc_RNA (1)...(19): siRNA sense strand
gcugagaaaggauggcaaa

SEQ ID NO: 114765 - RNA, 19 nt, Homo sapiens
  misc_RNA (1)...(19): siRNA sense strand
ugagaaaggauggcaaaga

SEQ ID NO: 114766 - RNA, 19 nt, Homo sapiens
  misc_RNA (1)...(19): siRNA sense strand
gaggacagcauggacauuc

SEQ ID NO: 114767 - RNA, 19 nt, Homo sapiens
  misc_RNA (1)...(19): siRNA sense strand
ggacauucccuuggaccuu

SEQ ID NO: 114768 - RNA, 19 nt, Homo sapiens
  misc_RNA (1)...(19): siRNA sense strand
gugacugcauugaaagaug

SEQ ID NO: 114769 - RNA, 19 nt, Homo sapiens
  misc_RNA (1)...(19): siRNA sense strand
uaugagcaccguuacaaug

SEQ ID NO: 114770 - RNA, 19 nt, Homo sapiens
  misc_RNA (1)...(19): siRNA sense strand
ccacugugacugcauugaa

SEQ ID NO: 114771 - RNA, 19 nt, Homo sapiens
  misc_RNA (1)...(19): siRNA sense strand
ccuuggaccuuucuucauc

SEQ ID NO: 114772 - RNA, 19 nt, Homo sapiens
  misc_RNA (1)...(19): siRNA sense strand
uuacaaugccuauccuuca

SEQ ID NO: 114773 - RNA, 19 nt, Homo sapiens
  misc_RNA (1)...(19): siRNA sense strand
gugcagauucuucgggauu

SEQ ID NO: 114774 - RNA, 19 nt, Homo sapiens
  misc_RNA (1)...(19): siRNA sense strand
aaccaggacuucaguggau

SEQ ID NO: 114775 - RNA, 19 nt, Homo sapiens
  misc_RNA (1)...(19): siRNA sense strand
cagcaaacacaccugucua

SEQ ID NO: 114776 - RNA, 19 nt, Homo sapiens
  misc_RNA (1)...(19): siRNA sense strand
caaagauccaaaucaguuc

SEQ ID NO: 114777 - RNA, 19 nt, Homo sapiens
  misc_RNA (1)...(19): siRNA sense strand
gagcuucaggcaaaacuua

SEQ ID NO: 114778 - RNA, 19 nt, Homo sapiens
  misc_RNA (1)...(19): siRNA sense strand
ggacaaaacacagauauac

SEQ ID NO: 114779 - RNA, 19 nt, Homo sapiens
  misc_RNA (1)...(19): siRNA sense strand
acagauauacagcagauag

SEQ ID NO: 114780 - RNA, 19 nt, Homo sapiens
  misc_RNA (1)...(19): siRNA sense strand
auaccacugugacugcauu

SEQ ID NO: 114781 - RNA, 19 nt, Homo sapiens
  misc_RNA (1)...(19): siRNA sense strand
ggcaaaacuuacagcuuaa

SEQ ID NO: 114782 - RNA, 19 nt, Homo sapiens
  misc_RNA (1)...(19): siRNA sense strand
cacagacaccucucucaug

SEQ ID NO: 114783 - RNA, 19 nt, Homo sapiens
  misc_RNA (1)...(19): siRNA sense strand
ucacagacaccucucucau

SEQ ID NO: 114784 - RNA, 19 nt, Homo sapiens
  misc_RNA (1)...(19): siRNA sense strand
ucaaacgggcugcagagau

SEQ ID NO: 114785 - RNA, 19 nt, Homo sapiens
  misc_RNA (1)...(19): siRNA sense strand
guaaaucuggaccaaguac

SEQ ID NO: 114786 - RNA, 19 nt, Homo sapiens
  misc_RNA (1)...(19): siRNA sense strand
gauccaaaucaguucacaa

SEQ ID NO: 114787 - RNA, 19 nt, Homo sapiens
  misc_RNA (1)...(19): siRNA sense strand
ccaggacuucaguggauuu

SEQ ID NO: 114788 - RNA, 19 nt, Homo sapiens
  misc_RNA (1)...(19): siRNA sense strand
gcagauucuucgggauugg

SEQ ID NO: 114789 - RNA, 19 nt, Homo sapiens
  misc_RNA (1)...(19): siRNA sense strand
gaugucccuuucucucucu

SEQ ID NO: 114790 - RNA, 19 nt, Homo sapiens
  misc_RNA (1)...(19): siRNA sense strand
ggaccucaaccaggacuuc

SEQ ID NO: 114791 - RNA, 19 nt, Homo sapiens
  misc_RNA (1)...(19): siRNA sense strand
ggcuguaugagcaccguua

SEQ ID NO: 114792 - RNA, 19 nt, Homo sapiens
  misc_RNA (1)...(19): siRNA sense strand
guaugagcaccguuacaau

SEQ ID NO: 114793 - RNA, 19 nt, Homo sapiens
  misc_RNA (1)...(19): siRNA sense strand
caguggauuucagcuucua

SEQ ID NO: 114794 - RNA, 19 nt, Homo sapiens
  misc_RNA (1)...(19): siRNA sense strand
gagaaaggauggcaaagau

SEQ ID NO: 114795 - RNA, 19 nt, Homo sapiens
  misc_RNA (1)...(19): siRNA sense strand
gcaaagauccaaaucaguu

SEQ ID NO: 114796 - RNA, 19 nt, Homo sapiens
  misc_RNA (1)...(19): siRNA sense strand
caaacgggcugcagagaug

SEQ ID NO: 114797 - RNA, 19 nt, Homo sapiens
  misc_RNA (1)...(19): siRNA sense strand
agauggagcuucaggcaaa

SEQ ID NO: 114798 - RNA, 19 nt, Homo sapiens
  misc_RNA (1)...(19): siRNA sense strand
gacauucccuuggaccuuu

SEQ ID NO: 114799 - RNA, 19 nt, Homo sapiens
  misc_RNA (1)...(19): siRNA sense strand
acagacaccucucucaugu

SEQ ID NO: 114800 - RNA, 19 nt, Homo sapiens
  misc_RNA (1)...(19): siRNA sense strand
aggcaaaacuuacagcuua

SEQ ID NO: 114801 - RNA, 19 nt, Homo sapiens
  misc_RNA (1)...(19): siRNA sense strand
ucagugaucugccauacca

SEQ ID NO: 114802 - RNA, 19 nt, Homo sapiens
  misc_RNA (1)...(19): siRNA sense strand
ggacuucaguggauuucag

SEQ ID NO: 114803 - RNA, 19 nt, Homo sapiens
  misc_RNA (1)...(19): siRNA sense strand
acacagauauacagcagau

SEQ ID NO: 114804 - RNA, 19 nt, Homo sapiens
  misc_RNA (1)...(19): siRNA sense strand
ugacugcauugaaagaugu

SEQ ID NO: 114805 - RNA, 19 nt, Homo sapiens
  misc_RNA (1)...(19): siRNA sense strand
cugcagagauggagcuuca

SEQ ID NO: 114806 - RNA, 19 nt, Homo sapiens
  misc_RNA (1)...(19): siRNA sense strand
agacaccucucucauguac

SEQ ID NO: 114807 - RNA, 19 nt, Homo sapiens
  misc_RNA (1)...(19): siRNA sense strand
cacugugacugcauugaaa

SEQ ID NO: 114808 - RNA, 19 nt, Homo sapiens
  misc_RNA (1)...(19): siRNA sense strand
ucccugacaugcugagaaa

SEQ ID NO: 114809 - RNA, 19 nt, Homo sapiens
  misc_RNA (1)...(19): siRNA sense strand
gucuguaacugguucauca

SEQ ID NO: 114810 - RNA, 19 nt, Homo sapiens
  misc_RNA (1)...(19): siRNA sense strand
uggcaaagauccaaaucag

SEQ ID NO: 114811 - RNA, 19 nt, Homo sapiens
  misc_RNA (1)...(19): siRNA sense strand
gcugagaaaggauggcaaa

SEQ ID NO: 114812 - RNA, 19 nt, Homo sapiens
  misc_RNA (1)...(19): siRNA sense strand
ugagaaaggauggcaaaga

SEQ ID NO: 114813 - RNA, 19 nt, Homo sapiens
  misc_RNA (1)...(19): siRNA sense strand
ggacauucccuuggaccuu

SEQ ID NO: 114814 - RNA, 19 nt, Homo sapiens
  misc_RNA (1)...(19): siRNA sense strand
gugacugcauugaaagaug

SEQ ID NO: 114815 - RNA, 19 nt, Homo sapiens
  misc_RNA (1)...(19): siRNA sense strand
uaugagcaccguuacaaug

SEQ ID NO: 114816 - RNA, 19 nt, Homo sapiens
  misc_RNA (1)...(19): siRNA sense strand
ccuuggaccuuucuucauc

SEQ ID NO: 114817 - RNA, 19 nt, Homo sapiens
  misc_RNA (1)...(19): siRNA sense strand
ccacugugacugcauugaa

SEQ ID NO: 114818 - RNA, 19 nt, Homo sapiens
  misc_RNA (1)...(19): siRNA sense strand
uuacaaugccuauccuuca

SEQ ID NO: 114819 - RNA, 19 nt, Homo sapiens
  misc_RNA (1)...(19): siRNA sense strand
cagcaaacacaccugucua

SEQ ID NO: 114820 - RNA, 19 nt, Homo sapiens
  misc_RNA (1)...(19): siRNA sense strand
aaccaggacuucaguggau

SEQ ID NO: 114821 - RNA, 19 nt, Homo sapiens
  misc_RNA (1)...(19): siRNA sense strand
gugcagauucuucgggauu

SEQ ID NO: 114822 - RNA, 19 nt, Homo sapiens
  misc_RNA (1)...(19): siRNA sense strand
caaagauccaaaucaguuc

SEQ ID NO: 114823 - RNA, 19 nt, Homo sapiens
  misc_RNA (1)...(19): siRNA sense strand
gagcuucaggcaaaacuua

SEQ ID NO: 114824 - RNA, 19 nt, Homo sapiens
  misc_RNA (1)...(19): siRNA sense strand
ggacaaaacacagauauac

SEQ ID NO: 114825 - RNA, 19 nt, Homo sapiens
  misc_RNA (1)...(19): siRNA sense strand
acagauauacagcagauag

SEQ ID NO: 114826 - RNA, 19 nt, Homo sapiens
  misc_RNA (1)...(19): siRNA sense strand
auaccacugugacugcauu

SEQ ID NO: 114827 - RNA, 19 nt, Homo sapiens
  misc_RNA (1)...(19): siRNA sense strand
ggcaaaacuuacagcuuaa

SEQ ID NO: 114828 - RNA, 19 nt, Homo sapiens
  misc_RNA (1)...(19): siRNA sense strand
cacagacaccucucucaug

SEQ ID NO: 114829 - RNA, 19 nt, Homo sapiens
  misc_RNA (1)...(19): siRNA sense strand
ucacagacaccucucucau

SEQ ID NO: 114830 - RNA, 19 nt, Homo sapiens
  misc_RNA (1)...(19): siRNA sense strand
ucaaacgggcugcagagau

SEQ ID NO: 114831 - RNA, 19 nt, Homo sapiens
  misc_RNA (1)...(19): siRNA sense strand
guaaaucuggaccaaguac

SEQ ID NO: 114832 - RNA, 19 nt, Homo sapiens
  misc_RNA (1)...(19): siRNA sense strand
gauccaaaucaguucacaa

SEQ ID NO: 114833 - RNA, 19 nt, Homo sapiens
  misc_RNA (1)...(19): siRNA sense strand
gcagauucuucgggauugg

SEQ ID NO: 114834 - RNA, 19 nt, Homo sapiens
  misc_RNA (1)...(19): siRNA sense strand
ccaggacuucaguggauuu

SEQ ID NO: 114835 - RNA, 19 nt, Homo sapiens
  misc_RNA (1)...(19): siRNA sense strand
ggcuguaugagcaccguua

SEQ ID NO: 114836 - RNA, 19 nt, Homo sapiens
  misc_RNA (1)...(19): siRNA sense strand
ggaccucaaccaggacuuc

SEQ ID NO: 114837 - RNA, 19 nt, Homo sapiens
  misc_RNA (1)...(19): siRNA sense strand
guaugagcaccguuacaau

SEQ ID NO: 114838 - RNA, 19 nt, Homo sapiens
  misc_RNA (1)...(19): siRNA sense strand
gaugucccuuucucucucu

SEQ ID NO: 114839 - RNA, 19 nt, Homo sapiens
  misc_RNA (1)...(19): siRNA sense strand
caguggauuucagcuucua

SEQ ID NO: 114840 - RNA, 19 nt, Homo sapiens
  misc_RNA (1)...(19): siRNA sense strand
gagaaaggauggcaaagau

SEQ ID NO: 114841 - RNA, 19 nt, Homo sapiens
  misc_RNA (1)...(19): siRNA sense strand
gcaaagauccaaaucaguu

SEQ ID NO: 114842 - RNA, 19 nt, Homo sapiens
  misc_RNA (1)...(19): siRNA sense strand
caaacgggcugcagagaug

SEQ ID NO: 114843 - RNA, 19 nt, Homo sapiens
  misc_RNA (1)...(19): siRNA sense strand
agauggagcuucaggcaaa

SEQ ID NO: 114844 - RNA, 19 nt, Homo sapiens
  misc_RNA (1)...(19): siRNA sense strand
gacauucccuuggaccuuu

SEQ ID NO: 114845 - RNA, 19 nt, Homo sapiens
  misc_RNA (1)...(19): siRNA sense strand
acagacaccucucucaugu

SEQ ID NO: 114846 - RNA, 19 nt, Homo sapiens
  misc_RNA (1)...(19): siRNA sense strand
aggcaaaacuuacagcuua

SEQ ID NO: 114847 - RNA, 19 nt, Homo sapiens
  misc_RNA (1)...(19): siRNA sense strand
ucagugaucugccauacca

SEQ ID NO: 114848 - RNA, 19 nt, Homo sapiens
  misc_RNA (1)...(19): siRNA sense strand
ggacuucaguggauuucag

SEQ ID NO: 114849 - RNA, 19 nt, Homo sapiens
  misc_RNA (1)...(19): siRNA sense strand
acacagauauacagcagau

SEQ ID NO: 114850 - RNA, 19 nt, Homo sapiens
  misc_RNA (1)...(19): siRNA sense strand
ugacugcauugaaagaugu

SEQ ID NO: 114851 - RNA, 19 nt, Homo sapiens
  misc_RNA (1)...(19): siRNA sense strand
cugcagagauggagcuuca

SEQ ID NO: 114852 - RNA, 19 nt, Homo sapiens
  misc_RNA (1)...(19): siRNA sense strand
agacaccucucucauguac

SEQ ID NO: 114853 - RNA, 19 nt, Homo sapiens
  misc_RNA (1)...(19): siRNA sense strand
cacugugacugcauugaaa

SEQ ID NO: 114854 - RNA, 19 nt, Homo sapiens
  misc_RNA (1)...(19): siRNA sense strand
ucccugacaugcugagaaa

SEQ ID NO: 114855 - RNA, 19 nt, Homo sapiens
  misc_RNA (1)...(19): siRNA sense strand
gucuguaacugguucauca

SEQ ID NO: 114856 - RNA, 19 nt, Homo sapiens
  misc_RNA (1)...(19): siRNA sense strand
uggcaaagauccaaaucag

SEQ ID NO: 114857 - RNA, 19 nt, Homo sapiens
  misc_RNA (1)...(19): siRNA sense strand
gcugagaaaggauggcaaa

SEQ ID NO: 114858 - RNA, 19 nt, Homo sapiens
  misc_RNA (1)...(19): siRNA sense strand
ugagaaaggauggcaaaga

SEQ ID NO: 114859 - RNA, 19 nt, Homo sapiens
  misc_RNA (1)...(19): siRNA sense strand
ggacauucccuuggaccuu

SEQ ID NO: 114860 - RNA, 19 nt, Homo sapiens
  misc_RNA (1)...(19): siRNA sense strand
gugacugcauugaaagaug

SEQ ID NO: 114861 - RNA, 19 nt, Homo sapiens
  misc_RNA (1)...(19): siRNA sense strand
uaugagcaccguuacaaug

SEQ ID NO: 114862 - RNA, 19 nt, Homo sapiens
  misc_RNA (1)...(19): siRNA sense strand
ccuuggaccuuucuucauc

SEQ ID NO: 114863 - RNA, 19 nt, Homo sapiens
  misc_RNA (1)...(19): siRNA sense strand
ccacugugacugcauugaa

SEQ ID NO: 114864 - RNA, 19 nt, Homo sapiens
  misc_RNA (1)...(19): siRNA sense strand
uuacaaugccuauccuuca

SEQ ID NO: 114865 - RNA, 19 nt, Homo sapiens
  misc_RNA (1)...(19): siRNA sense strand
cagcaaacacaccugucua

SEQ ID NO: 114866 - RNA, 19 nt, Homo sapiens
  misc_RNA (1)...(19): siRNA sense strand
aaccaggacuucaguggau

SEQ ID NO: 114867 - RNA, 19 nt, Homo sapiens
  misc_RNA (1)...(19): siRNA sense strand
gugcagauucuucgggauu

SEQ ID NO: 114868 - RNA, 19 nt, Homo sapiens
  misc_RNA (1)...(19): siRNA sense strand
caaagauccaaaucaguuc

SEQ ID NO: 114869 - RNA, 19 nt, Homo sapiens
  misc_RNA (1)...(19): siRNA sense strand
gagcuucaggcaaaacuua

SEQ ID NO: 114870 - RNA, 19 nt, Homo sapiens
  misc_RNA (1)...(19): siRNA sense strand
ggacaaaacacagauauac

SEQ ID NO: 114871 - RNA, 19 nt, Homo sapiens
  misc_RNA (1)...(19): siRNA sense strand
acagauauacagcagauag

SEQ ID NO: 114872 - RNA, 19 nt, Homo sapiens
  misc_RNA (1)...(19): siRNA sense strand
auaccacugugacugcauu

SEQ ID NO: 114873 - RNA, 19 nt, Homo sapiens
  misc_RNA (1)...(19): siRNA sense strand
ggcaaaacuuacagcuuaa

SEQ ID NO: 114874 - RNA, 19 nt, Homo sapiens
  misc_RNA (1)...(19): siRNA sense strand
cacagacaccucucucaug

SEQ ID NO: 114875 - RNA, 19 nt, Homo sapiens
  misc_RNA (1)...(19): siRNA sense strand
ucacagacaccucucucau

SEQ ID NO: 114876 - RNA, 19 nt, Homo sapiens
  misc_RNA (1)...(19): siRNA sense strand
ucaaacgggcugcagagau

SEQ ID NO: 114877 - RNA, 19 nt, Homo sapiens
  misc_RNA (1)...(19): siRNA sense strand
guaaaucuggaccaaguac

SEQ ID NO: 114878 - RNA, 19 nt, Homo sapiens
  misc_RNA (1)...(19): siRNA sense strand
gauccaaaucaguucacaa

SEQ ID NO: 114879 - RNA, 19 nt, Homo sapiens
  misc_RNA (1)...(19): siRNA sense strand
gcagauucuucgggauugg

SEQ ID NO: 114880 - RNA, 19 nt, Homo sapiens
  misc_RNA (1)...(19): siRNA sense strand
ccaggacuucaguggauuu

SEQ ID NO: 114881 - RNA, 19 nt, Homo sapiens
  misc_RNA (1)...(19): siRNA sense strand
ggcuguaugagcaccguua

SEQ ID NO: 114882 - RNA, 19 nt, Homo sapiens
  misc_RNA (1)...(19): siRNA sense strand
ggaccucaaccaggacuuc

SEQ ID NO: 114883 - RNA, 19 nt, Homo sapiens
  misc_RNA (1)...(19): siRNA sense strand
guaugagcaccguuacaau

SEQ ID NO: 114884 - RNA, 19 nt, Homo sapiens
  misc_RNA (1)...(19): siRNA sense strand
gaugucccuuucucucucu

SEQ ID NO: 114885 - RNA, 19 nt, Homo sapiens
  misc_RNA (1)...(19): siRNA sense strand
caguggauuucagcuucua

SEQ ID NO: 114886 - RNA, 19 nt, Homo sapiens
  misc_RNA (1)...(19): siRNA sense strand
gagaaaggauggcaaagau

SEQ ID NO: 114887 - RNA, 19 nt, Homo sapiens
  misc_RNA (1)...(19): siRNA sense strand
gcaaagauccaaaucaguu

SEQ ID NO: 114888 - RNA, 19 nt, Homo sapiens
  misc_RNA (1)...(19): siRNA sense strand
caaacgggcugcagagaug

SEQ ID NO: 114889 - RNA, 19 nt, Homo sapiens
  misc_RNA (1)...(19): siRNA sense strand
agauggagcuucaggcaaa

SEQ ID NO: 114890 - RNA, 19 nt, Homo sapiens
  misc_RNA (1)...(19): siRNA sense strand
gacauucccuuggaccuuu

SEQ ID NO: 114891 - RNA, 19 nt, Homo sapiens
  misc_RNA (1)...(19): siRNA sense strand
acagacaccucucucaugu

SEQ ID NO: 114892 - RNA, 19 nt, Homo sapiens
  misc_RNA (1)...(19): siRNA sense strand
aggcaaaacuuacagcuua

SEQ ID NO: 114893 - RNA, 19 nt, Homo sapiens
  misc_RNA (1)...(19): siRNA sense strand
ucagugaucugccauacca

SEQ ID NO: 114894 - RNA, 19 nt, Homo sapiens
  misc_RNA (1)...(19): siRNA sense strand
ggacuucaguggauuucag

SEQ ID NO: 114895 - RNA, 19 nt, Homo sapiens
  misc_RNA (1)...(19): siRNA sense strand
acacagauauacagcagau

SEQ ID NO: 114896 - RNA, 19 nt, Homo sapiens
  misc_RNA (1)...(19): siRNA sense strand
ugacugcauugaaagaugu

SEQ ID NO: 114897 - RNA, 19 nt, Homo sapiens
  misc_RNA (1)...(19): siRNA sense strand
cugcagagauggagcuuca

SEQ ID NO: 114898 - RNA, 19 nt, Homo sapiens
  misc_RNA (1)...(19): siRNA sense strand
agacaccucucucauguac

SEQ ID NO: 114899 - RNA, 19 nt, Homo sapiens
  misc_RNA (1)...(19): siRNA sense strand
cacugugacugcauugaaa

SEQ ID NO: 114900 - RNA, 19 nt, Homo sapiens
  misc_RNA (1)...(19): siRNA sense strand
ucccugacaugcugagaaa

SEQ ID NO: 114901 - RNA, 19 nt, Homo sapiens
  misc_RNA (1)...(19): siRNA sense strand
gucuguaacugguucauca

SEQ ID NO: 114902 - RNA, 19 nt, Homo sapiens
  misc_RNA (1)...(19): siRNA sense strand
uggcaaagauccaaaucag

SEQ ID NO: 114903 - RNA, 19 nt, Homo sapiens
  misc_RNA (1)...(19): siRNA sense strand
gcugagaaaggauggcaaa

SEQ ID NO: 114904 - RNA, 19 nt, Homo sapiens
  misc_RNA (1)...(19): siRNA sense strand
ugagaaaggauggcaaaga

SEQ ID NO: 114905 - RNA, 19 nt, Homo sapiens
  misc_RNA (1)...(19): siRNA sense strand
ggacauucccuuggaccuu

SEQ ID NO: 114906 - RNA, 19 nt, Homo sapiens
  misc_RNA (1)...(19): siRNA sense strand
gugacugcauugaaagaug

SEQ ID NO: 114907 - RNA, 19 nt, Homo sapiens
  misc_RNA (1)...(19): siRNA sense strand
uaugagcaccguuacaaug

SEQ ID NO: 114908 - RNA, 19 nt, Homo sapiens
  misc_RNA (1)...(19): siRNA sense strand
ccuuggaccuuucuucauc

SEQ ID NO: 114909 - RNA, 19 nt, Homo sapiens
  misc_RNA (1)...(19): siRNA sense strand
ccacugugacugcauugaa

SEQ ID NO: 114910 - RNA, 19 nt, Homo sapiens
  misc_RNA (1)...(19): siRNA sense strand
uuacaaugccuauccuuca

SEQ ID NO: 114911 - RNA, 19 nt, Homo sapiens
  misc_RNA (1)...(19): siRNA sense strand
cagcaaacacaccugucua

SEQ ID NO: 114912 - RNA, 19 nt, Homo sapiens
  misc_RNA (1)...(19): siRNA sense strand
aaccaggacuucaguggau

SEQ ID NO: 114913 - RNA, 19 nt, Homo sapiens
  misc_RNA (1)...(19): siRNA sense strand
gugcagauucuucgggauu

SEQ ID NO: 114914 - RNA, 19 nt, Homo sapiens
  misc_RNA (1)...(19): siRNA sense strand
caaagauccaaaucaguuc

SEQ ID NO: 114915 - RNA, 19 nt, Homo sapiens
  misc_RNA (1)...(19): siRNA sense strand
gagcuucaggcaaaacuua

SEQ ID NO: 114916 - RNA, 19 nt, Homo sapiens
  misc_RNA (1)...(19): siRNA sense strand
ggacaaaacacagauauac

SEQ ID NO: 114917 - RNA, 19 nt, Homo sapiens
  misc_RNA (1)...(19): siRNA sense strand
acagauauacagcagauag

SEQ ID NO: 114918 - RNA, 19 nt, Homo sapiens
  misc_RNA (1)...(19): siRNA sense strand
auaccacugugacugcauu

SEQ ID NO: 114919 - RNA, 19 nt, Homo sapiens
  misc_RNA (1)...(19): siRNA sense strand
ggcaaaacuuacagcuuaa

SEQ ID NO: 114920 - RNA, 19 nt, Homo sapiens
  misc_RNA (1)...(19): siRNA sense strand
cacagacaccucucucaug

SEQ ID NO: 114921 - RNA, 19 nt, Homo sapiens
  misc_RNA (1)...(19): siRNA sense strand
ucacagacaccucucucau

SEQ ID NO: 114922 - RNA, 19 nt, Homo sapiens
  misc_RNA (1)...(19): siRNA sense strand
ucaaacgggcugcagagau

SEQ ID NO: 114923 - RNA, 19 nt, Homo sapiens
  misc_RNA (1)...(19): siRNA sense strand
guaaaucuggaccaaguac

SEQ ID NO: 114924 - RNA, 19 nt, Homo sapiens
  misc_RNA (1)...(19): siRNA sense strand
gauccaaaucaguucacaa

SEQ ID NO: 114925 - RNA, 19 nt, Homo sapiens
  misc_RNA (1)...(19): siRNA sense strand
gcagauucuucgggauugg

SEQ ID NO: 114926 - RNA, 19 nt, Homo sapiens
  misc_RNA (1)...(19): siRNA sense strand
ccaggacuucaguggauuu

SEQ ID NO: 114927 - RNA, 19 nt, Homo sapiens
  misc_RNA (1)...(19): siRNA sense strand
ggcuguaugagcaccguua

SEQ ID NO: 114928 - RNA, 19 nt, Homo sapiens
  misc_RNA (1)...(19): siRNA sense strand
ggaccucaaccaggacuuc

SEQ ID NO: 114929 - RNA, 19 nt, Homo sapiens
  misc_RNA (1)...(19): siRNA sense strand
guaugagcaccguuacaau

SEQ ID NO: 114930 - RNA, 19 nt, Homo sapiens
  misc_RNA (1)...(19): siRNA sense strand
gaugucccuuucucucucu

SEQ ID NO: 114931 - RNA, 19 nt, Homo sapiens
  misc_RNA (1)...(19): siRNA sense strand
caguggauuucagcuucua

SEQ ID NO: 114932 - RNA, 19 nt, Homo sapiens
  misc_RNA (1)...(19): siRNA sense strand
gagaaaggauggcaaagau

SEQ ID NO: 114933 - RNA, 19 nt, Homo sapiens
  misc_RNA (1)...(19): siRNA sense strand
gcaaagauccaaaucaguu

SEQ ID NO: 114934 - RNA, 19 nt, Homo sapiens
  misc_RNA (1)...(19): siRNA sense strand
caaacgggcugcagagaug

SEQ ID NO: 114935 - RNA, 19 nt, Homo sapiens
  misc_RNA (1)...(19): siRNA sense strand
agauggagcuucaggcaaa

SEQ ID NO: 114936 - RNA, 19 nt, Homo sapiens
  misc_RNA (1)...(19): siRNA sense strand
gacauucccuuggaccuuu

SEQ ID NO: 114937 - RNA, 19 nt, Homo sapiens
  misc_RNA (1)...(19): siRNA sense strand
acagacaccucucucaugu

SEQ ID NO: 114938 - RNA, 19 nt, Homo sapiens
  misc_RNA (1)...(19): siRNA sense strand
aggcaaaacuuacagcuua

SEQ ID NO: 114939 - RNA, 19 nt, Homo sapiens
  misc_RNA (1)...(19): siRNA sense strand
ucagugaucugccauacca

SEQ ID NO: 114940 - RNA, 19 nt, Homo sapiens
  misc_RNA (1)...(19): siRNA sense strand
ggacuucaguggauuucag

SEQ ID NO: 114941 - RNA, 19 nt, Homo sapiens
  misc_RNA (1)...(19): siRNA sense strand
acacagauauacagcagau

SEQ ID NO: 114942 - RNA, 19 nt, Homo sapiens
  misc_RNA (1)...(19): siRNA sense strand
ugacugcauugaaagaugu

SEQ ID NO: 114943 - RNA, 19 nt, Homo sapiens
  misc_RNA (1)...(19): siRNA sense strand
cugcagagauggagcuuca

SEQ ID NO: 114944 - RNA, 19 nt, Homo sapiens
  misc_RNA (1)...(19): siRNA sense strand
agacaccucucucauguac

SEQ ID NO: 114945 - RNA, 19 nt, Homo sapiens
  misc_RNA (1)...(19): siRNA sense strand
cacugugacugcauugaaa

SEQ ID NO: 114946 - RNA, 19 nt, Homo sapiens
  misc_RNA (1)...(19): siRNA sense strand
ucccugacaugcugagaaa

SEQ ID NO: 114947 - RNA, 19 nt, Homo sapiens
  misc_RNA (1)...(19): siRNA sense strand
gucuguaacugguucauca

SEQ ID NO: 114948 - RNA, 19 nt, Homo sapiens
  misc_RNA (1)...(19): siRNA sense strand
uggcaaagauccaaaucag

SEQ ID NO: 114949 - RNA, 19 nt, Homo sapiens
  misc_RNA (1)...(19): siRNA sense strand
gcugagaaaggauggcaaa

SEQ ID NO: 114950 - RNA, 19 nt, Homo sapiens
  misc_RNA (1)...(19): siRNA sense strand
ugagaaaggauggcaaaga

SEQ ID NO: 114951 - RNA, 19 nt, Homo sapiens
  misc_RNA (1)...(19): siRNA sense strand
ggacauucccuuggaccuu

SEQ ID NO: 114952 - RNA, 19 nt, Homo sapiens
  misc_RNA (1)...(19): siRNA sense strand
gugacugcauugaaagaug

SEQ ID NO: 114953 - RNA, 19 nt, Homo sapiens
  misc_RNA (1)...(19): siRNA sense strand
uaugagcaccguuacaaug

SEQ ID NO: 114954 - RNA, 19 nt, Homo sapiens
  misc_RNA (1)...(19): siRNA sense strand
ccuuggaccuuucuucauc

SEQ ID NO: 114955 - RNA, 19 nt, Homo sapiens
  misc_RNA (1)...(19): siRNA sense strand
ccacugugacugcauugaa

SEQ ID NO: 114956 - RNA, 19 nt, Homo sapiens
  misc_RNA (1)...(19): siRNA sense strand
uuacaaugccuauccuuca

SEQ ID NO: 114957 - RNA, 19 nt, Homo sapiens
  misc_RNA (1)...(19): siRNA sense strand
cagcaaacacaccugucua

SEQ ID NO: 114958 - RNA, 19 nt, Homo sapiens
  misc_RNA (1)...(19): siRNA sense strand
aaccaggacuucaguggau

SEQ ID NO: 114959 - RNA, 19 nt, Homo sapiens
  misc_RNA (1)...(19): siRNA sense strand
gugcagauucuucgggauu

SEQ ID NO: 114960 - RNA, 19 nt, Homo sapiens
  misc_RNA (1)...(19): siRNA sense strand
caaagauccaaaucaguuc

SEQ ID NO: 114961 - RNA, 19 nt, Homo sapiens
  misc_RNA (1)...(19): siRNA sense strand
gagcuucaggcaaaacuua

SEQ ID NO: 114962 - RNA, 19 nt, Homo sapiens
  misc_RNA (1)...(19): siRNA sense strand
ggacaaaacacagauauac

SEQ ID NO: 114963 - RNA, 19 nt, Homo sapiens
  misc_RNA (1)...(19): siRNA sense strand
acagauauacagcagauag

SEQ ID NO: 114964 - RNA, 19 nt, Homo sapiens
  misc_RNA (1)...(19): siRNA sense strand
auaccacugugacugcauu

SEQ ID NO: 114965 - RNA, 19 nt, Homo sapiens
  misc_RNA (1)...(19): siRNA sense strand
ggcaaaacuuacagcuuaa

SEQ ID NO: 114966 - RNA, 19 nt, Homo sapiens
  misc_RNA (1)...(19): siRNA sense strand
cacagacaccucucucaug

SEQ ID NO: 114967 - RNA, 19 nt, Homo sapiens
  misc_RNA (1)...(19): siRNA sense strand
ucacagacaccucucucau

SEQ ID NO: 114968 - RNA, 19 nt, Homo sapiens
  misc_RNA (1)...(19): siRNA sense strand
ucaaacgggcugcagagau

SEQ ID NO: 114969 - RNA, 19 nt, Homo sapiens
  misc_RNA (1)...(19): siRNA sense strand
guaaaucuggaccaaguac

SEQ ID NO: 114970 - RNA, 19 nt, Homo sapiens
  misc_RNA (1)...(19): siRNA sense strand
gauccaaaucaguucacaa

SEQ ID NO: 114971 - RNA, 19 nt, Homo sapiens
  misc_RNA (1)...(19): siRNA sense strand
gcagauucuucgggauugg

SEQ ID NO: 114972 - RNA, 19 nt, Homo sapiens
  misc_RNA (1)...(19): siRNA sense strand
ccaggacuucaguggauuu

SEQ ID NO: 114973 - RNA, 19 nt, Homo sapiens
  misc_RNA (1)...(19): siRNA sense strand
ggcuguaugagcaccguua

SEQ ID NO: 114974 - RNA, 19 nt, Homo sapiens
  misc_RNA (1)...(19): siRNA sense strand
ggaccucaaccaggacuuc

SEQ ID NO: 114975 - RNA, 19 nt, Homo sapiens
  misc_RNA (1)...(19): siRNA sense strand
guaugagcaccguuacaau

SEQ ID NO: 114976 - RNA, 19 nt, Homo sapiens
  misc_RNA (1)...(19): siRNA sense strand
gaugucccuuucucucucu

SEQ ID NO: 114977 - RNA, 19 nt, Homo sapiens
  misc_RNA (1)...(19): siRNA sense strand
caguggauuucagcuucua

SEQ ID NO: 114978 - RNA, 19 nt, Homo sapiens
  misc_RNA (1)...(19): siRNA sense strand
gaaaggaggucaaaguaaa

SEQ ID NO: 114979 - RNA, 19 nt, Homo sapiens
  misc_RNA (1)...(19): siRNA sense strand
gauaugguauggcaaguua

SEQ ID NO: 114980 - RNA, 19 nt, Homo sapiens
  misc_RNA (1)...(19): siRNA sense strand
uaaagaaucuccugauaug

SEQ ID NO: 114981 - RNA, 19 nt, Homo sapiens
  misc_RNA (1)...(19): siRNA sense strand
gguaaagaaucuccugaua

SEQ ID NO: 114982 - RNA, 19 nt, Homo sapiens
  misc_RNA (1)...(19): siRNA sense strand
gaaaagggcuauucauuug

SEQ ID NO: 114983 - RNA, 19 nt, Homo sapiens
  misc_RNA (1)...(19): siRNA sense strand
gcaaauggguggcaaguac

SEQ ID NO: 114984 - RNA, 19 nt, Homo sapiens
  misc_RNA (1)...(19): siRNA sense strand
ggaaaggaggucaaaguaa

SEQ ID NO: 114985 - RNA, 19 nt, Homo sapiens
  misc_RNA (1)...(19): siRNA sense strand
uaacagagcauacaagcaa

SEQ ID NO: 114986 - RNA, 19 nt, Homo sapiens
  misc_RNA (1)...(19): siRNA sense strand
caacaaggauuuggaguag

SEQ ID NO: 114987 - RNA, 19 nt, Homo sapiens
  misc_RNA (1)...(19): siRNA sense strand
ggaauugcgucuggguuaa

SEQ ID NO: 114988 - RNA, 19 nt, Homo sapiens
  misc_RNA (1)...(19): siRNA sense strand
caacagaagauaucaaauc

SEQ ID NO: 114989 - RNA, 19 nt, Homo sapiens
  misc_RNA (1)...(19): siRNA sense strand
guaaagaaucuccugauau

SEQ ID NO: 114990 - RNA, 19 nt, Homo sapiens
  misc_RNA (1)...(19): siRNA sense strand
guugagauuugaagaugua

SEQ ID NO: 114991 - RNA, 19 nt, Homo sapiens
  misc_RNA (1)...(19): siRNA sense strand
uaaaccaccugcaccuaaa

SEQ ID NO: 114992 - RNA, 19 nt, Homo sapiens
  misc_RNA (1)...(19): siRNA sense strand
gacaguauauggcaaaugg

SEQ ID NO: 114993 - RNA, 19 nt, Homo sapiens
  misc_RNA (1)...(19): siRNA sense strand
cagaucagcuuaugagaca

SEQ ID NO: 114994 - RNA, 19 nt, Homo sapiens
  misc_RNA (1)...(19): siRNA sense strand
gggaaaggaggucaaagua

SEQ ID NO: 114995 - RNA, 19 nt, Homo sapiens
  misc_RNA (1)...(19): siRNA sense strand
gcuauucauuugucagauu

SEQ ID NO: 114996 - RNA, 19 nt, Homo sapiens
  misc_RNA (1)...(19): siRNA sense strand
guaaaccaccugcaccuaa

SEQ ID NO: 114997 - RNA, 19 nt, Homo sapiens
  misc_RNA (1)...(19): siRNA sense strand
gacaugugguuaaaugcua

SEQ ID NO: 114998 - RNA, 19 nt, Homo sapiens
  misc_RNA (1)...(19): siRNA sense strand
guccagaaauuacaacaga

SEQ ID NO: 114999 - RNA, 19 nt, Homo sapiens
  misc_RNA (1)...(19): siRNA sense strand
ugaaggacaugugguuaaa

SEQ ID NO: 115000 - RNA, 19 nt, Homo sapiens
  misc_RNA (1)...(19): siRNA sense strand
gaacgguacuacgauugaa

SEQ ID NO: 115001 - RNA, 19 nt, Homo sapiens
  misc_RNA (1)...(19): siRNA sense strand
acacuaagcaguugagauu

SEQ ID NO: 115002 - RNA, 19 nt, Homo sapiens
  misc_RNA (1)...(19): siRNA sense strand
cgucaaauccgaaccaauu

SEQ ID NO: 115003 - RNA, 19 nt, Homo sapiens
  misc_RNA (1)...(19): siRNA sense strand
ccagagaugugacagaagu

SEQ ID NO: 115004 - RNA, 19 nt, Homo sapiens
  misc_RNA (1)...(19): siRNA sense strand
gcaaguaccgccuuaugga

SEQ ID NO: 115005 - RNA, 19 nt, Homo sapiens
  misc_RNA (1)...(19): siRNA sense strand
gagauuugaagauguagua

SEQ ID NO: 115006 - RNA, 19 nt, Homo sapiens
  misc_RNA (1)...(19): siRNA sense strand
guaaaccagucaaguccaa

SEQ ID NO: 115007 - RNA, 19 nt, Homo sapiens
  misc_RNA (1)...(19): siRNA sense strand
gaagauaucaaaucagcau

SEQ ID NO: 115008 - RNA, 19 nt, Homo sapiens
  misc_RNA (1)...(19): siRNA sense strand
ggagccaaguguauggaaa

SEQ ID NO: 115009 - RNA, 19 nt, Homo sapiens
  misc_RNA (1)...(19): siRNA sense strand
ugacagaaguccuuauacu

SEQ ID NO: 115010 - RNA, 19 nt, Homo sapiens
  misc_RNA (1)...(19): siRNA sense strand
cauauugcuuuguggaauu

SEQ ID NO: 115011 - RNA, 19 nt, Homo sapiens
  misc_RNA (1)...(19): siRNA sense strand
ggugaacgguacuacgauu

SEQ ID NO: 115012 - RNA, 19 nt, Homo sapiens
  misc_RNA (1)...(19): siRNA sense strand
ccaauugggccacucguaa

SEQ ID NO: 115013 - RNA, 19 nt, Homo sapiens
  misc_RNA (1)...(19): siRNA sense strand
guuaacagaucagcuuaug

SEQ ID NO: 115014 - RNA, 19 nt, Homo sapiens
  misc_RNA (1)...(19): siRNA sense strand
guagaucaaucaccuucug

SEQ ID NO: 115015 - RNA, 19 nt, Homo sapiens
  misc_RNA (1)...(19): siRNA sense strand
uaacagaucagcuuaugag

SEQ ID NO: 115016 - RNA, 19 nt, Homo sapiens
  misc_RNA (1)...(19): siRNA sense strand
ucaacaaggauuuggagua

SEQ ID NO: 115017 - RNA, 19 nt, Homo sapiens
  misc_RNA (1)...(19): siRNA sense strand
gguggcaaguaccgccuua

SEQ ID NO: 115018 - RNA, 19 nt, Homo sapiens
  misc_RNA (1)...(19): siRNA sense strand
agacagacauucucaccau

SEQ ID NO: 115019 - RNA, 19 nt, Homo sapiens
  misc_RNA (1)...(19): siRNA sense strand
uacaagcaaugacccauau

SEQ ID NO: 115020 - RNA, 19 nt, Homo sapiens
  misc_RNA (1)...(19): siRNA sense strand
acaaggauuuggaguagau

SEQ ID NO: 115021 - RNA, 19 nt, Homo sapiens
  misc_RNA (1)...(19): siRNA sense strand
uaacaaacuggaugcagaa

SEQ ID NO: 115022 - RNA, 19 nt, Homo sapiens
  misc_RNA (1)...(19): siRNA sense strand
acuaagcaguugagauuug

SEQ ID NO: 115023 - RNA, 19 nt, Homo sapiens
  misc_RNA (1)...(19): siRNA sense strand
aaggacaugugguuaaaug

SEQ ID NO: 115024 - RNA, 19 nt, Homo sapiens
  misc_RNA (1)...(19): siRNA sense strand
gacagacauucucaccauu

SEQ ID NO: 115025 - RNA, 19 nt, Homo sapiens
  misc_RNA (1)...(19): siRNA sense strand
cuaagcaguugagauuuga

SEQ ID NO: 115026 - RNA, 19 nt, Homo sapiens
  misc_RNA (1)...(19): siRNA sense strand
cagacauucucaccauuug

SEQ ID NO: 115027 - RNA, 19 nt, Homo sapiens
  misc_RNA (1)...(19): siRNA sense strand
ccaaucacuuccauguguu

SEQ ID NO: 115028 - RNA, 19 nt, Homo sapiens
  misc_RNA (1)...(19): siRNA sense strand
gguaaccuuuccagagaug

SEQ ID NO: 115029 - RNA, 19 nt, Homo sapiens
  misc_RNA (1)...(19): siRNA sense strand
acaacaguauggacaguau

SEQ ID NO: 115030 - RNA, 19 nt, Homo sapiens
  misc_RNA (1)...(19): siRNA sense strand
aaagauacuuccaaucacu

SEQ ID NO: 115031 - RNA, 19 nt, Homo sapiens
  misc_RNA (1)...(19): siRNA sense strand
caaacuggaugcagaaaau

SEQ ID NO: 115032 - RNA, 19 nt, Homo sapiens
  misc_RNA (1)...(19): siRNA sense strand
gggcaaccauggaaucaac

SEQ ID NO: 115033 - RNA, 19 nt, Homo sapiens
  misc_RNA (1)...(19): siRNA sense strand
uccaaucacuuccaugugu

SEQ ID NO: 115034 - RNA, 19 nt, Homo sapiens
  misc_RNA (1)...(19): siRNA sense strand
caacaguauggacaguaua

SEQ ID NO: 115035 - RNA, 19 nt, Homo sapiens
  misc_RNA (1)...(19): siRNA sense strand
ccaauggagccaaguguau

SEQ ID NO: 115036 - RNA, 19 nt, Homo sapiens
  misc_RNA (1)...(19): siRNA sense strand
guaguaaaccagucaaguc

SEQ ID NO: 115037 - RNA, 19 nt, Homo sapiens
  misc_RNA (1)...(19): siRNA sense strand
ucacuuccauguguuuguu

SEQ ID NO: 115038 - RNA, 19 nt, Homo sapiens
  misc_RNA (1)...(19): siRNA sense strand
ggaauuuuaugaacacaga

SEQ ID NO: 115039 - RNA, 19 nt, Homo sapiens
  misc_RNA (1)...(19): siRNA sense strand
uguaauaccuccuccuaac

SEQ ID NO: 115040 - RNA, 19 nt, Homo sapiens
  misc_RNA (1)...(19): siRNA sense strand
caguugagauuugaagaug

SEQ ID NO: 115041 - RNA, 19 nt, Homo sapiens
  misc_RNA (1)...(19): siRNA sense strand
aaaguaaacugggcaacca

SEQ ID NO: 115042 - RNA, 19 nt, Homo sapiens
  misc_RNA (1)...(19): siRNA sense strand
caauugggccacucguaaa

SEQ ID NO: 115043 - RNA, 19 nt, Homo sapiens
  misc_RNA (1)...(19): siRNA sense strand
gauugaaggacaugugguu

SEQ ID NO: 115044 - RNA, 19 nt, Homo sapiens
  misc_RNA (1)...(19): siRNA sense strand
gcaguugagauuugaagau

SEQ ID NO: 115045 - RNA, 19 nt, Homo sapiens
  misc_RNA (1)...(19): siRNA sense strand
gcuaugguuuuguaucuuu

SEQ ID NO: 115046 - RNA, 19 nt, Homo sapiens
  misc_RNA (1)...(19): siRNA sense strand
ccauauugcuuuguggaau

SEQ ID NO: 115047 - RNA, 19 nt, Homo sapiens
  misc_RNA (1)...(19): siRNA sense strand
gaucagcuuaugagacaga

SEQ ID NO: 115048 - RNA, 19 nt, Homo sapiens
  misc_RNA (1)...(19): siRNA sense strand
ugacccauauugcuuugug

SEQ ID NO: 115049 - RNA, 19 nt, Homo sapiens
  misc_RNA (1)...(19): siRNA sense strand
uauggcaaguuaccaaaca

SEQ ID NO: 115050 - RNA, 19 nt, Homo sapiens
  misc_RNA (1)...(19): siRNA sense strand
aaagggcuauucauuuguc

SEQ ID NO: 115051 - RNA, 19 nt, Homo sapiens
  misc_RNA (1)...(19): siRNA sense strand
acagacauucucaccauuu

SEQ ID NO: 115052 - RNA, 19 nt, Homo sapiens
  misc_RNA (1)...(19): siRNA sense strand
gcaaguuaccaaacacagu

SEQ ID NO: 115053 - RNA, 19 nt, Homo sapiens
  misc_RNA (1)...(19): siRNA sense strand
ugugacagaaguccuuaua

SEQ ID NO: 115054 - RNA, 19 nt, Homo sapiens
  misc_RNA (1)...(19): siRNA sense strand
gccaauggagccaagugua

SEQ ID NO: 115055 - RNA, 19 nt, Homo sapiens
  misc_RNA (1)...(19): siRNA sense strand
gaugugacagaaguccuua

SEQ ID NO: 115056 - RNA, 19 nt, Homo sapiens
  misc_RNA (1)...(19): siRNA sense strand
ggaaacccacaacaguaug

SEQ ID NO: 115057 - RNA, 19 nt, Homo sapiens
  misc_RNA (1)...(19): siRNA sense strand
agaaaagggcuauucauuu

SEQ ID NO: 115058 - RNA, 19 nt, Homo sapiens
  misc_RNA (1)...(19): siRNA sense strand
uguguacuguggaggaauu

SEQ ID NO: 115059 - RNA, 19 nt, Homo sapiens
  misc_RNA (1)...(19): siRNA sense strand
aggaauugcgucuggguua

SEQ ID NO: 115060 - RNA, 19 nt, Homo sapiens
  misc_RNA (1)...(19): siRNA sense strand
gacauucucaccauuugga

SEQ ID NO: 115061 - RNA, 19 nt, Homo sapiens
  misc_RNA (1)...(19): siRNA sense strand
aauaagaguuuucccagaa

SEQ ID NO: 115062 - RNA, 19 nt, Homo sapiens
  misc_RNA (1)...(19): siRNA sense strand
ccggguaguuaaagacaug

SEQ ID NO: 115063 - RNA, 19 nt, Homo sapiens
  misc_RNA (1)...(19): siRNA sense strand
ccacaacaguauggacagu

SEQ ID NO: 115064 - RNA, 19 nt, Homo sapiens
  misc_RNA (1)...(19): siRNA sense strand
ugaacgguacuacgauuga

SEQ ID NO: 115065 - RNA, 19 nt, Homo sapiens
  misc_RNA (1)...(19): siRNA sense strand
ggguuaacagaucagcuua

SEQ ID NO: 115066 - RNA, 19 nt, Homo sapiens
  misc_RNA (1)...(19): siRNA sense strand
auacaagcaaugacccaua

SEQ ID NO: 115067 - RNA, 19 nt, Homo sapiens
  misc_RNA (1)...(19): siRNA sense strand
gaaacccacaacaguaugg

SEQ ID NO: 115068 - RNA, 19 nt, Homo sapiens
  misc_RNA (1)...(19): siRNA sense strand
ggacaugugguuaaaugcu

SEQ ID NO: 115069 - RNA, 19 nt, Homo sapiens
  misc_RNA (1)...(19): siRNA sense strand
gaaggacaugugguuaaau

SEQ ID NO: 115070 - RNA, 19 nt, Homo sapiens
  misc_RNA (1)...(19): siRNA sense strand
aaagacauggcaacuggaa

SEQ ID NO: 115071 - RNA, 19 nt, Homo sapiens
  misc_RNA (1)...(19): siRNA sense strand
ggauaugguauggcaaguu

SEQ ID NO: 115072 - RNA, 19 nt, Homo sapiens
  misc_RNA (1)...(19): siRNA sense strand
uggaaacccacaacaguau

SEQ ID NO: 115073 - RNA, 19 nt, Homo sapiens
  misc_RNA (1)...(19): siRNA sense strand
gggcuauucauuugucaga

SEQ ID NO: 115074 - RNA, 19 nt, Homo sapiens
  misc_RNA (1)...(19): siRNA sense strand
cagaaaagggcuauucauu

SEQ ID NO: 115075 - RNA, 19 nt, Homo sapiens
  misc_RNA (1)...(19): siRNA sense strand
uuccagagaugugacagaa

SEQ ID NO: 115076 - RNA, 19 nt, Homo sapiens
  misc_RNA (1)...(19): siRNA sense strand
gcaaccauggaaucaacaa

SEQ ID NO: 115077 - RNA, 19 nt, Homo sapiens
  misc_RNA (1)...(19): siRNA sense strand
aguaccgccuuauggagua

SEQ ID NO: 115078 - RNA, 19 nt, Homo sapiens
  misc_RNA (1)...(19): siRNA sense strand
gaaaggaggucaaaguaaa

SEQ ID NO: 115079 - RNA, 19 nt, Homo sapiens
  misc_RNA (1)...(19): siRNA sense strand
uaaagaaucuccugauaug

SEQ ID NO: 115080 - RNA, 19 nt, Homo sapiens
  misc_RNA (1)...(19): siRNA sense strand
gguaaagaaucuccugaua

SEQ ID NO: 115081 - RNA, 19 nt, Homo sapiens
  misc_RNA (1)...(19): siRNA sense strand
gaaaagggcuauucauuug

SEQ ID NO: 115082 - RNA, 19 nt, Homo sapiens
  misc_RNA (1)...(19): siRNA sense strand
ggaaaggaggucaaaguaa

SEQ ID NO: 115083 - RNA, 19 nt, Homo sapiens
  misc_RNA (1)...(19): siRNA sense strand
uaacagagcauacaagcaa

SEQ ID NO: 115084 - RNA, 19 nt, Homo sapiens
  misc_RNA (1)...(19): siRNA sense strand
ggaauugcgucuggguuaa

SEQ ID NO: 115085 - RNA, 19 nt, Homo sapiens
  misc_RNA (1)...(19): siRNA sense strand
caacagaagauaucaaauc

SEQ ID NO: 115086 - RNA, 19 nt, Homo sapiens
  misc_RNA (1)...(19): siRNA sense strand
guaaagaaucuccugauau

SEQ ID NO: 115087 - RNA, 19 nt, Homo sapiens
  misc_RNA (1)...(19): siRNA sense strand
guugagauuugaagaugua

SEQ ID NO: 115088 - RNA, 19 nt, Homo sapiens
  misc_RNA (1)...(19): siRNA sense strand
uaaaccaccugcaccuaaa

SEQ ID NO: 115089 - RNA, 19 nt, Homo sapiens
  misc_RNA (1)...(19): siRNA sense strand
cagaucagcuuaugagaca

SEQ ID NO: 115090 - RNA, 19 nt, Homo sapiens
  misc_RNA (1)...(19): siRNA sense strand
gggaaaggaggucaaagua

SEQ ID NO: 115091 - RNA, 19 nt, Homo sapiens
  misc_RNA (1)...(19): siRNA sense strand
gcuauucauuugucagauu

SEQ ID NO: 115092 - RNA, 19 nt, Homo sapiens
  misc_RNA (1)...(19): siRNA sense strand
guaaaccaccugcaccuaa

SEQ ID NO: 115093 - RNA, 19 nt, Homo sapiens
  misc_RNA (1)...(19): siRNA sense strand
gacaugugguuaaaugcua

SEQ ID NO: 115094 - RNA, 19 nt, Homo sapiens
  misc_RNA (1)...(19): siRNA sense strand
guccagaaauuacaacaga

SEQ ID NO: 115095 - RNA, 19 nt, Homo sapiens
  misc_RNA (1)...(19): siRNA sense strand
ugaaggacaugugguuaaa

SEQ ID NO: 115096 - RNA, 19 nt, Homo sapiens
  misc_RNA (1)...(19): siRNA sense strand
gaacgguacuacgauugaa

SEQ ID NO: 115097 - RNA, 19 nt, Homo sapiens
  misc_RNA (1)...(19): siRNA sense strand
acacuaagcaguugagauu

SEQ ID NO: 115098 - RNA, 19 nt, Homo sapiens
  misc_RNA (1)...(19): siRNA sense strand
cgucaaauccgaaccaauu

SEQ ID NO: 115099 - RNA, 19 nt, Homo sapiens
  misc_RNA (1)...(19): siRNA sense strand
gagauuugaagauguagua

SEQ ID NO: 115100 - RNA, 19 nt, Homo sapiens
  misc_RNA (1)...(19): siRNA sense strand
guaaaccagucaaguccaa

SEQ ID NO: 115101 - RNA, 19 nt, Homo sapiens
  misc_RNA (1)...(19): siRNA sense strand
gaagauaucaaaucagcau

SEQ ID NO: 115102 - RNA, 19 nt, Homo sapiens
  misc_RNA (1)...(19): siRNA sense strand
ggugaacgguacuacgauu

SEQ ID NO: 115103 - RNA, 19 nt, Homo sapiens
  misc_RNA (1)...(19): siRNA sense strand
cauauugcuuuguggaauu

SEQ ID NO: 115104 - RNA, 19 nt, Homo sapiens
  misc_RNA (1)...(19): siRNA sense strand
ccaauugggccacucguaa

SEQ ID NO: 115105 - RNA, 19 nt, Homo sapiens
  misc_RNA (1)...(19): siRNA sense strand
guuaacagaucagcuuaug

SEQ ID NO: 115106 - RNA, 19 nt, Homo sapiens
  misc_RNA (1)...(19): siRNA sense strand
uaacagaucagcuuaugag

SEQ ID NO: 115107 - RNA, 19 nt, Homo sapiens
  misc_RNA (1)...(19): siRNA sense strand
agacagacauucucaccau

SEQ ID NO: 115108 - RNA, 19 nt, Homo sapiens
  misc_RNA (1)...(19): siRNA sense strand
uaacaaacuggaugcagaa

SEQ ID NO: 115109 - RNA, 19 nt, Homo sapiens
  misc_RNA (1)...(19): siRNA sense strand
uacaagcaaugacccauau

SEQ ID NO: 115110 - RNA, 19 nt, Homo sapiens
  misc_RNA (1)...(19): siRNA sense strand
acuaagcaguugagauuug

SEQ ID NO: 115111 - RNA, 19 nt, Homo sapiens
  misc_RNA (1)...(19): siRNA sense strand
aaggacaugugguuaaaug

SEQ ID NO: 115112 - RNA, 19 nt, Homo sapiens
  misc_RNA (1)...(19): siRNA sense strand
gacagacauucucaccauu

SEQ ID NO: 115113 - RNA, 19 nt, Homo sapiens
  misc_RNA (1)...(19): siRNA sense strand
cuaagcaguugagauuuga

SEQ ID NO: 115114 - RNA, 19 nt, Homo sapiens
  misc_RNA (1)...(19): siRNA sense strand
cagacauucucaccauuug

SEQ ID NO: 115115 - RNA, 19 nt, Homo sapiens
  misc_RNA (1)...(19): siRNA sense strand
ccaaucacuuccauguguu

SEQ ID NO: 115116 - RNA, 19 nt, Homo sapiens
  misc_RNA (1)...(19): siRNA sense strand
aaagauacuuccaaucacu

SEQ ID NO: 115117 - RNA, 19 nt, Homo sapiens
  misc_RNA (1)...(19): siRNA sense strand
caaacuggaugcagaaaau

SEQ ID NO: 115118 - RNA, 19 nt, Homo sapiens
  misc_RNA (1)...(19): siRNA sense strand
uccaaucacuuccaugugu

SEQ ID NO: 115119 - RNA, 19 nt, Homo sapiens
  misc_RNA (1)...(19): siRNA sense strand
guaguaaaccagucaaguc

SEQ ID NO: 115120 - RNA, 19 nt, Homo sapiens
  misc_RNA (1)...(19): siRNA sense strand
ucacuuccauguguuuguu

SEQ ID NO: 115121 - RNA, 19 nt, Homo sapiens
  misc_RNA (1)...(19): siRNA sense strand
ggaauuuuaugaacacaga

SEQ ID NO: 115122 - RNA, 19 nt, Homo sapiens
  misc_RNA (1)...(19): siRNA sense strand
caguugagauuugaagaug

SEQ ID NO: 115123 - RNA, 19 nt, Homo sapiens
  misc_RNA (1)...(19): siRNA sense strand
aaaguaaacugggcaacca

SEQ ID NO: 115124 - RNA, 19 nt, Homo sapiens
  misc_RNA (1)...(19): siRNA sense strand
caauugggccacucguaaa

SEQ ID NO: 115125 - RNA, 19 nt, Homo sapiens
  misc_RNA (1)...(19): siRNA sense strand
gauugaaggacaugugguu

SEQ ID NO: 115126 - RNA, 19 nt, Homo sapiens
  misc_RNA (1)...(19): siRNA sense strand
gcaguugagauuugaagau

SEQ ID NO: 115127 - RNA, 19 nt, Homo sapiens
  misc_RNA (1)...(19): siRNA sense strand
gcuaugguuuuguaucuuu

SEQ ID NO: 115128 - RNA, 19 nt, Homo sapiens
  misc_RNA (1)...(19): siRNA sense strand
ccauauugcuuuguggaau

SEQ ID NO: 115129 - RNA, 19 nt, Homo sapiens
  misc_RNA (1)...(19): siRNA sense strand
gaucagcuuaugagacaga

SEQ ID NO: 115130 - RNA, 19 nt, Homo sapiens
  misc_RNA (1)...(19): siRNA sense strand
ugacccauauugcuuugug

SEQ ID NO: 115131 - RNA, 19 nt, Homo sapiens
  misc_RNA (1)...(19): siRNA sense strand
aaagggcuauucauuuguc

SEQ ID NO: 115132 - RNA, 19 nt, Homo sapiens
  misc_RNA (1)...(19): siRNA sense strand
acagacauucucaccauuu

SEQ ID NO: 115133 - RNA, 19 nt, Homo sapiens
  misc_RNA (1)...(19): siRNA sense strand
agaaaagggcuauucauuu

SEQ ID NO: 115134 - RNA, 19 nt, Homo sapiens
  misc_RNA (1)...(19): siRNA sense strand
uguguacuguggaggaauu

SEQ ID NO: 115135 - RNA, 19 nt, Homo sapiens
  misc_RNA (1)...(19): siRNA sense strand
aggaauugcgucuggguua

SEQ ID NO: 115136 - RNA, 19 nt, Homo sapiens
  misc_RNA (1)...(19): siRNA sense strand
gacauucucaccauuugga

SEQ ID NO: 115137 - RNA, 19 nt, Homo sapiens
  misc_RNA (1)...(19): siRNA sense strand
aauaagaguuuucccagaa

SEQ ID NO: 115138 - RNA, 19 nt, Homo sapiens
  misc_RNA (1)...(19): siRNA sense strand
ccggguaguuaaagacaug

SEQ ID NO: 115139 - RNA, 19 nt, Homo sapiens
  misc_RNA (1)...(19): siRNA sense strand
ugaacgguacuacgauuga

SEQ ID NO: 115140 - RNA, 19 nt, Homo sapiens
  misc_RNA (1)...(19): siRNA sense strand
auacaagcaaugacccaua

SEQ ID NO: 115141 - RNA, 19 nt, Homo sapiens
  misc_RNA (1)...(19): siRNA sense strand
ggacaugugguuaaaugcu

SEQ ID NO: 115142 - RNA, 19 nt, Homo sapiens
  misc_RNA (1)...(19): siRNA sense strand
gaaggacaugugguuaaau

SEQ ID NO: 115143 - RNA, 19 nt, Homo sapiens
  misc_RNA (1)...(19): siRNA sense strand
ggguuaacagaucagcuua

SEQ ID NO: 115144 - RNA, 19 nt, Homo sapiens
  misc_RNA (1)...(19): siRNA sense strand
aaagacauggcaacuggaa

SEQ ID NO: 115145 - RNA, 19 nt, Homo sapiens
  misc_RNA (1)...(19): siRNA sense strand
gggcuauucauuugucaga

SEQ ID NO: 115146 - RNA, 19 nt, Homo sapiens
  misc_RNA (1)...(19): siRNA sense strand
cagaaaagggcuauucauu

SEQ ID NO: 115147 - RNA, 19 nt, Homo sapiens
  misc_RNA (1)...(19): siRNA sense strand
guuggguggucgucaaauc

SEQ ID NO: 115148 - RNA, 19 nt, Homo sapiens
  misc_RNA (1)...(19): siRNA sense strand
caaucacuuccauguguuu

SEQ ID NO: 115149 - RNA, 19 nt, Homo sapiens
  misc_RNA (1)...(19): siRNA sense strand
ccagaaauuacaacagaag

SEQ ID NO: 115150 - RNA, 19 nt, Homo sapiens
  misc_RNA (1)...(19): siRNA sense strand
gugguuggguggucgucaa

SEQ ID NO: 115151 - RNA, 19 nt, Homo sapiens
  misc_RNA (1)...(19): siRNA sense strand
uugaaggacaugugguuaa

SEQ ID NO: 115152 - RNA, 19 nt, Homo sapiens
  misc_RNA (1)...(19): siRNA sense strand
cagaaauuacaacagaaga

SEQ ID NO: 115153 - RNA, 19 nt, Homo sapiens
  misc_RNA (1)...(19): siRNA sense strand
gugcagcccaugccauugu

SEQ ID NO: 115154 - RNA, 19 nt, Homo sapiens
  misc_RNA (1)...(19): siRNA sense strand
cacaccaaguagccagaaa

SEQ ID NO: 115155 - RNA, 19 nt, Homo sapiens
  misc_RNA (1)...(19): siRNA sense strand
gggcaaccacaccaaguag

SEQ ID NO: 115156 - RNA, 19 nt, Homo sapiens
  misc_RNA (1)...(19): siRNA sense strand
uugaagauguaguaaacca

SEQ ID NO: 115157 - RNA, 19 nt, Homo sapiens
  misc_RNA (1)...(19): siRNA sense strand
uaaaugcuauugggguaaa

SEQ ID NO: 115158 - RNA, 19 nt, Homo sapiens
  misc_RNA (1)...(19): siRNA sense strand
uccagaaauuacaacagaa

SEQ ID NO: 115159 - RNA, 19 nt, Homo sapiens
  misc_RNA (1)...(19): siRNA sense strand
acaugugguuaaaugcuau

SEQ ID NO: 115160 - RNA, 19 nt, Homo sapiens
  misc_RNA (1)...(19): siRNA sense strand
ugggcaaccacaccaagua

SEQ ID NO: 115161 - RNA, 19 nt, Homo sapiens
  misc_RNA (1)...(19): siRNA sense strand
aaagaaucuccugauauga

SEQ ID NO: 115162 - RNA, 19 nt, Homo sapiens
  misc_RNA (1)...(19): siRNA sense strand
ggguaaagaaucuccugau

SEQ ID NO: 115163 - RNA, 19 nt, Homo sapiens
  misc_RNA (1)...(19): siRNA sense strand
cagagcauacaagcaauga

SEQ ID NO: 115164 - RNA, 19 nt, Homo sapiens
  misc_RNA (1)...(19): siRNA sense strand
ucaaggauguucaguauau

SEQ ID NO: 115165 - RNA, 19 nt, Homo sapiens
  misc_RNA (1)...(19): siRNA sense strand
aacgaaagcucuaugguua

SEQ ID NO: 115166 - RNA, 19 nt, Homo sapiens
  misc_RNA (1)...(19): siRNA sense strand
gggaaagucugaaucauca

SEQ ID NO: 115167 - RNA, 19 nt, Homo sapiens
  misc_RNA (1)...(19): siRNA sense strand
gaacgaaagcucuaugguu

SEQ ID NO: 115168 - RNA, 19 nt, Homo sapiens
  misc_RNA (1)...(19): siRNA sense strand
ggaaggaguuuguugacau

SEQ ID NO: 115169 - RNA, 19 nt, Homo sapiens
  misc_RNA (1)...(19): siRNA sense strand
gguaugaaaucaaacagau

SEQ ID NO: 115170 - RNA, 19 nt, Homo sapiens
  misc_RNA (1)...(19): siRNA sense strand
gaaggaguuuguugacauc

SEQ ID NO: 115171 - RNA, 19 nt, Homo sapiens
  misc_RNA (1)...(19): siRNA sense strand
aaucaucacuaccaucuga

SEQ ID NO: 115172 - RNA, 19 nt, Homo sapiens
  misc_RNA (1)...(19): siRNA sense strand
ggaguuuguugacaucguu

SEQ ID NO: 115173 - RNA, 19 nt, Homo sapiens
  misc_RNA (1)...(19): siRNA sense strand
gcuccgguaugaaaucaaa

SEQ ID NO: 115174 - RNA, 19 nt, Homo sapiens
  misc_RNA (1)...(19): siRNA sense strand
agauaaagauguucaaagg

SEQ ID NO: 115175 - RNA, 19 nt, Homo sapiens
  misc_RNA (1)...(19): siRNA sense strand
agucaaggauguucaguau

SEQ ID NO: 115176 - RNA, 19 nt, Homo sapiens
  misc_RNA (1)...(19): siRNA sense strand
cagaagcaguaucucuuga

SEQ ID NO: 115177 - RNA, 19 nt, Homo sapiens
  misc_RNA (1)...(19): siRNA sense strand
ggucagguccucagugaug

SEQ ID NO: 115178 - RNA, 19 nt, Homo sapiens
  misc_RNA (1)...(19): siRNA sense strand
guuaccaggcucagcauua

SEQ ID NO: 115179 - RNA, 19 nt, Homo sapiens
  misc_RNA (1)...(19): siRNA sense strand
gaagcaguaucucuugacu

SEQ ID NO: 115180 - RNA, 19 nt, Homo sapiens
  misc_RNA (1)...(19): siRNA sense strand
ccacucggcacuugugauu

SEQ ID NO: 115181 - RNA, 19 nt, Homo sapiens
  misc_RNA (1)...(19): siRNA sense strand
uuaccaggcucagcauuau

SEQ ID NO: 115182 - RNA, 19 nt, Homo sapiens
  misc_RNA (1)...(19): siRNA sense strand
ccaacagccagaagcagua

SEQ ID NO: 115183 - RNA, 19 nt, Homo sapiens
  misc_RNA (1)...(19): siRNA sense strand
ccagaagcaguaucucuug

SEQ ID NO: 115184 - RNA, 19 nt, Homo sapiens
  misc_RNA (1)...(19): siRNA sense strand
ucaggaaggaguuuguuga

SEQ ID NO: 115185 - RNA, 19 nt, Homo sapiens
  misc_RNA (1)...(19): siRNA sense strand
ucacuaccaucugaacugu

SEQ ID NO: 115186 - RNA, 19 nt, Homo sapiens
  misc_RNA (1)...(19): siRNA sense strand
gcucagcauuaugucugua

SEQ ID NO: 115187 - RNA, 19 nt, Homo sapiens
  misc_RNA (1)...(19): siRNA sense strand
gagggaaagucugaaucau

SEQ ID NO: 115188 - RNA, 19 nt, Homo sapiens
  misc_RNA (1)...(19): siRNA sense strand
caaaucaccaccugcuaca

SEQ ID NO: 115189 - RNA, 19 nt, Homo sapiens
  misc_RNA (1)...(19): siRNA sense strand
gagaaagucaaggauguuc

SEQ ID NO: 115190 - RNA, 19 nt, Homo sapiens
  misc_RNA (1)...(19): siRNA sense strand
ucauccaucugugcaacua

SEQ ID NO: 115191 - RNA, 19 nt, Homo sapiens
  misc_RNA (1)...(19): siRNA sense strand
gccagaagcaguaucucuu

SEQ ID NO: 115192 - RNA, 19 nt, Homo sapiens
  misc_RNA (1)...(19): siRNA sense strand
ccucuguggugugaaacua

SEQ ID NO: 115193 - RNA, 19 nt, Homo sapiens
  misc_RNA (1)...(19): siRNA sense strand
gaaagucaaggauguucag

SEQ ID NO: 115194 - RNA, 19 nt, Homo sapiens
  misc_RNA (1)...(19): siRNA sense strand
cuggucagguccucaguga

SEQ ID NO: 115195 - RNA, 19 nt, Homo sapiens
  misc_RNA (1)...(19): siRNA sense strand
gaaaagucuucauccaucu

SEQ ID NO: 115196 - RNA, 19 nt, Homo sapiens
  misc_RNA (1)...(19): siRNA sense strand
aaagauguucaaaggguuu

SEQ ID NO: 115197 - RNA, 19 nt, Homo sapiens
  misc_RNA (1)...(19): siRNA sense strand
caaggauguucaguauauc

SEQ ID NO: 115198 - RNA, 19 nt, Homo sapiens
  misc_RNA (1)...(19): siRNA sense strand
gggccaaaaucuccaguga

SEQ ID NO: 115199 - RNA, 19 nt, Homo sapiens
  misc_RNA (1)...(19): siRNA sense strand
gaaagucugaaucaucacu

SEQ ID NO: 115200 - RNA, 19 nt, Homo sapiens
  misc_RNA (1)...(19): siRNA sense strand
cagauaaagauguucaaag

SEQ ID NO: 115201 - RNA, 19 nt, Homo sapiens
  misc_RNA (1)...(19): siRNA sense strand
ggaacgaaagcucuauggu

SEQ ID NO: 115202 - RNA, 19 nt, Homo sapiens
  misc_RNA (1)...(19): siRNA sense strand
ggauguucaguauaucuau

SEQ ID NO: 115203 - RNA, 19 nt, Homo sapiens
  misc_RNA (1)...(19): siRNA sense strand
cagcauuaugucuguauga

SEQ ID NO: 115204 - RNA, 19 nt, Homo sapiens
  misc_RNA (1)...(19): siRNA sense strand
aaaaugcuccgguaugaaa

SEQ ID NO: 115205 - RNA, 19 nt, Homo sapiens
  misc_RNA (1)...(19): siRNA sense strand
ugaaucaucacuaccaucu

SEQ ID NO: 115206 - RNA, 19 nt, Homo sapiens
  misc_RNA (1)...(19): siRNA sense strand
agagggaaagucugaauca

SEQ ID NO: 115207 - RNA, 19 nt, Homo sapiens
  misc_RNA (1)...(19): siRNA sense strand
caacagccagaagcaguau

SEQ ID NO: 115208 - RNA, 19 nt, Homo sapiens
  misc_RNA (1)...(19): siRNA sense strand
caagcugggugcuguugcu

SEQ ID NO: 115209 - RNA, 19 nt, Homo sapiens
  misc_RNA (1)...(19): siRNA sense strand
caccaccugcuacacagua

SEQ ID NO: 115210 - RNA, 19 nt, Homo sapiens
  misc_RNA (1)...(19): siRNA sense strand
agacccugcugacacugaa

SEQ ID NO: 115211 - RNA, 19 nt, Homo sapiens
  misc_RNA (1)...(19): siRNA sense strand
gccaaaucaccaccugcua

SEQ ID NO: 115212 - RNA, 19 nt, Homo sapiens
  misc_RNA (1)...(19): siRNA sense strand
ugagaaagucaaggauguu

SEQ ID NO: 115213 - RNA, 19 nt, Homo sapiens
  misc_RNA (1)...(19): siRNA sense strand
ucuguggugugaaacuaga

SEQ ID NO: 115214 - RNA, 19 nt, Homo sapiens
  misc_RNA (1)...(19): siRNA sense strand
agcauuaugucuguaugaa

SEQ ID NO: 115215 - RNA, 19 nt, Homo sapiens
  misc_RNA (1)...(19): siRNA sense strand
gguccucagugauggaaaa

SEQ ID NO: 115216 - RNA, 19 nt, Homo sapiens
  misc_RNA (1)...(19): siRNA sense strand
gucaaggauguucaguaua

SEQ ID NO: 115217 - RNA, 19 nt, Homo sapiens
  misc_RNA (1)...(19): siRNA sense strand
gaaaugagguguauguaug

SEQ ID NO: 115218 - RNA, 19 nt, Homo sapiens
  misc_RNA (1)...(19): siRNA sense strand
guacacacaugaauacaaa

SEQ ID NO: 115219 - RNA, 19 nt, Homo sapiens
  misc_RNA (1)...(19): siRNA sense strand
caacaaaguccaccaauau

SEQ ID NO: 115220 - RNA, 19 nt, Homo sapiens
  misc_RNA (1)...(19): siRNA sense strand
ccaacaaaguccaccaaua

SEQ ID NO: 115221 - RNA, 19 nt, Homo sapiens
  misc_RNA (1)...(19): siRNA sense strand
gaaaugagaguagguguuu

SEQ ID NO: 115222 - RNA, 19 nt, Homo sapiens
  misc_RNA (1)...(19): siRNA sense strand
gagaguagguguuuauuac

SEQ ID NO: 115223 - RNA, 19 nt, Homo sapiens
  misc_RNA (1)...(19): siRNA sense strand
ggagaggaagcuuuauuua

SEQ ID NO: 115224 - RNA, 19 nt, Homo sapiens
  misc_RNA (1)...(19): siRNA sense strand
gggauuaauucuugugauu

SEQ ID NO: 115225 - RNA, 19 nt, Homo sapiens
  misc_RNA (1)...(19): siRNA sense strand
gaaaguaggaccaggaaau

SEQ ID NO: 115226 - RNA, 19 nt, Homo sapiens
  misc_RNA (1)...(19): siRNA sense strand
ugagaagucugaaaccaaa

SEQ ID NO: 115227 - RNA, 19 nt, Homo sapiens
  misc_RNA (1)...(19): siRNA sense strand
gagaaacaccuaaaucuuc

SEQ ID NO: 115228 - RNA, 19 nt, Homo sapiens
  misc_RNA (1)...(19): siRNA sense strand
agaggaagcuuuauuuaca

SEQ ID NO: 115229 - RNA, 19 nt, Homo sapiens
  misc_RNA (1)...(19): siRNA sense strand
ccaaguaucuucgauucaa

SEQ ID NO: 115230 - RNA, 19 nt, Homo sapiens
  misc_RNA (1)...(19): siRNA sense strand
gaggaagcuuuauuuacaa

SEQ ID NO: 115231 - RNA, 19 nt, Homo sapiens
  misc_RNA (1)...(19): siRNA sense strand
gcacaguaguggaaaugga

SEQ ID NO: 115232 - RNA, 19 nt, Homo sapiens
  misc_RNA (1)...(19): siRNA sense strand
ggaaaugagguguauguau

SEQ ID NO: 115233 - RNA, 19 nt, Homo sapiens
  misc_RNA (1)...(19): siRNA sense strand
ggagaaacaccuaaaucuu

SEQ ID NO: 115234 - RNA, 19 nt, Homo sapiens
  misc_RNA (1)...(19): siRNA sense strand
gaacgcaggagacacaaga

SEQ ID NO: 115235 - RNA, 19 nt, Homo sapiens
  misc_RNA (1)...(19): siRNA sense strand
agaaggcuguggccaagua

SEQ ID NO: 115236 - RNA, 19 nt, Homo sapiens
  misc_RNA (1)...(19): siRNA sense strand
aaacauuugucaugggauu

SEQ ID NO: 115237 - RNA, 19 nt, Homo sapiens
  misc_RNA (1)...(19): siRNA sense strand
uaaaggaugagaagacaaa

SEQ ID NO: 115238 - RNA, 19 nt, Homo sapiens
  misc_RNA (1)...(19): siRNA sense strand
ggauggaaaugagguguau

SEQ ID NO: 115239 - RNA, 19 nt, Homo sapiens
  misc_RNA (1)...(19): siRNA sense strand
gucaugggauuaauucuug

SEQ ID NO: 115240 - RNA, 19 nt, Homo sapiens
  misc_RNA (1)...(19): siRNA sense strand
gaugugggcuucauugacu

SEQ ID NO: 115241 - RNA, 19 nt, Homo sapiens
  misc_RNA (1)...(19): siRNA sense strand
aaagaaagaugagaagucu

SEQ ID NO: 115242 - RNA, 19 nt, Homo sapiens
  misc_RNA (1)...(19): siRNA sense strand
agaaacaccuaaaucuuca

SEQ ID NO: 115243 - RNA, 19 nt, Homo sapiens
  misc_RNA (1)...(19): siRNA sense strand
cgauucaacuguccaacaa

SEQ ID NO: 115244 - RNA, 19 nt, Homo sapiens
  misc_RNA (1)...(19): siRNA sense strand
ggccaaguaucuucgauuc

SEQ ID NO: 115245 - RNA, 19 nt, Homo sapiens
  misc_RNA (1)...(19): siRNA sense strand
ugacccaguucacuuuaaa

SEQ ID NO: 115246 - RNA, 19 nt, Homo sapiens
  misc_RNA (1)...(19): siRNA sense strand
ggaaaaugauggagaaaca

SEQ ID NO: 115247 - RNA, 19 nt, Homo sapiens
  misc_RNA (1)...(19): siRNA sense strand
ugagaguagguguuuauua

SEQ ID NO: 115248 - RNA, 19 nt, Homo sapiens
  misc_RNA (1)...(19): siRNA sense strand
acaccuaaaucuucacaug

SEQ ID NO: 115249 - RNA, 19 nt, Homo sapiens
  misc_RNA (1)...(19): siRNA sense strand
aagcagacuuaaagaaaga

SEQ ID NO: 115250 - RNA, 19 nt, Homo sapiens
  misc_RNA (1)...(19): siRNA sense strand
gagaggaagcuuuauuuac

SEQ ID NO: 115251 - RNA, 19 nt, Homo sapiens
  misc_RNA (1)...(19): siRNA sense strand
agaaagaugagaagucuga

SEQ ID NO: 115252 - RNA, 19 nt, Homo sapiens
  misc_RNA (1)...(19): siRNA sense strand
ggugaaccaucuaaagaag

SEQ ID NO: 115253 - RNA, 19 nt, Homo sapiens
  misc_RNA (1)...(19): siRNA sense strand
gggcaaaggccaagaaagg

SEQ ID NO: 115254 - RNA, 19 nt, Homo sapiens
  misc_RNA (1)...(19): siRNA sense strand
gaugagaagucugaaacca

SEQ ID NO: 115255 - RNA, 19 nt, Homo sapiens
  misc_RNA (1)...(19): siRNA sense strand
gucaccggguugauuauuu

SEQ ID NO: 115256 - RNA, 19 nt, Homo sapiens
  misc_RNA (1)...(19): siRNA sense strand
aaagcagacuuaaagaaag

SEQ ID NO: 115257 - RNA, 19 nt, Homo sapiens
  misc_RNA (1)...(19): siRNA sense strand
uauaaaggaugagaagaca

SEQ ID NO: 115258 - RNA, 19 nt, Homo sapiens
  misc_RNA (1)...(19): siRNA sense strand
gaagcuuuauuuacaacca

SEQ ID NO: 115259 - RNA, 19 nt, Homo sapiens
  misc_RNA (1)...(19): siRNA sense strand
acaaaguccaccaauauga

SEQ ID NO: 115260 - RNA, 19 nt, Homo sapiens
  misc_RNA (1)...(19): siRNA sense strand
gugaagaggaugaggaaga

SEQ ID NO: 115261 - RNA, 19 nt, Homo sapiens
  misc_RNA (1)...(19): siRNA sense strand
gauuaauucuugugauugc

SEQ ID NO: 115262 - RNA, 19 nt, Homo sapiens
  misc_RNA (1)...(19): siRNA sense strand
uaaagaaagaugagaaguc

SEQ ID NO: 115263 - RNA, 19 nt, Homo sapiens
  misc_RNA (1)...(19): siRNA sense strand
caaaguccaccaauaugau

SEQ ID NO: 115264 - RNA, 19 nt, Homo sapiens
  misc_RNA (1)...(19): siRNA sense strand
gcaaacagauggggauugu

SEQ ID NO: 115265 - RNA, 19 nt, Homo sapiens
  misc_RNA (1)...(19): siRNA sense strand
ggagaacggcauucagaca

SEQ ID NO: 115266 - RNA, 19 nt, Homo sapiens
  misc_RNA (1)...(19): siRNA sense strand
guugcucgaugcauucuau

SEQ ID NO: 115267 - RNA, 19 nt, Homo sapiens
  misc_RNA (1)...(19): siRNA sense strand
gaucgaucccagcacagua

SEQ ID NO: 115268 - RNA, 19 nt, Homo sapiens
  misc_RNA (1)...(19): siRNA sense strand
gaaguccgacagugaggaa

SEQ ID NO: 115269 - RNA, 19 nt, Homo sapiens
  misc_RNA (1)...(19): siRNA sense strand
ucucaucauuuggcucaua

SEQ ID NO: 115270 - RNA, 19 nt, Homo sapiens
  misc_RNA (1)...(19): siRNA sense strand
ucaccgagcccuaaaagua

SEQ ID NO: 115271 - RNA, 19 nt, Homo sapiens
  misc_RNA (1)...(19): siRNA sense strand
ggauuaauucuugugauug

SEQ ID NO: 115272 - RNA, 19 nt, Homo sapiens
  misc_RNA (1)...(19): siRNA sense strand
gaaaaggaagaauccaaaa

SEQ ID NO: 115273 - RNA, 19 nt, Homo sapiens
  misc_RNA (1)...(19): siRNA sense strand
ugaaccaucuaaagaagag

SEQ ID NO: 115274 - RNA, 19 nt, Homo sapiens
  misc_RNA (1)...(19): siRNA sense strand
ggaaaucauggaacagaag

SEQ ID NO: 115275 - RNA, 19 nt, Homo sapiens
  misc_RNA (1)...(19): siRNA sense strand
aaagucagacagugagaaa

SEQ ID NO: 115276 - RNA, 19 nt, Homo sapiens
  misc_RNA (1)...(19): siRNA sense strand
ucuugugauugcaguaaua

SEQ ID NO: 115277 - RNA, 19 nt, Homo sapiens
  misc_RNA (1)...(19): siRNA sense strand
aaacuugagccacaugaug

SEQ ID NO: 115278 - RNA, 19 nt, Homo sapiens
  misc_RNA (1)...(19): siRNA sense strand
gcucgaugcauucuauuuc

SEQ ID NO: 115279 - RNA, 19 nt, Homo sapiens
  misc_RNA (1)...(19): siRNA sense strand
aaaugagaguagguguuua

SEQ ID NO: 115280 - RNA, 19 nt, Homo sapiens
  misc_RNA (1)...(19): siRNA sense strand
ccagggagucugugguuga

SEQ ID NO: 115281 - RNA, 19 nt, Homo sapiens
  misc_RNA (1)...(19): siRNA sense strand
ugaagaggaugaggaagag

SEQ ID NO: 115282 - RNA, 19 nt, Homo sapiens
  misc_RNA (1)...(19): siRNA sense strand
ggaccaggaaaucauggaa

SEQ ID NO: 115283 - RNA, 19 nt, Homo sapiens
  misc_RNA (1)...(19): siRNA sense strand
gauggagaaacaccuaaau

SEQ ID NO: 115284 - RNA, 19 nt, Homo sapiens
  misc_RNA (1)...(19): siRNA sense strand
gaacuggaacagcaaacag

SEQ ID NO: 115285 - RNA, 19 nt, Homo sapiens
  misc_RNA (1)...(19): siRNA sense strand
caaaucugacugcugaugu

SEQ ID NO: 115286 - RNA, 19 nt, Homo sapiens
  misc_RNA (1)...(19): siRNA sense strand
caccuaaaucuucacauga

SEQ ID NO: 115287 - RNA, 19 nt, Homo sapiens
  misc_RNA (1)...(19): siRNA sense strand
gggaaaguaggaccaggaa

SEQ ID NO: 115288 - RNA, 19 nt, Homo sapiens
  misc_RNA (1)...(19): siRNA sense strand
aggagaggaagcuuuauuu

SEQ ID NO: 115289 - RNA, 19 nt, Homo sapiens
  misc_RNA (1)...(19): siRNA sense strand
ggaaaguaggaccaggaaa

SEQ ID NO: 115290 - RNA, 19 nt, Homo sapiens
  misc_RNA (1)...(19): siRNA sense strand
ucaggccucuguacacaca

SEQ ID NO: 115291 - RNA, 19 nt, Homo sapiens
  misc_RNA (1)...(19): siRNA sense strand
guguauguauggaucuaug

SEQ ID NO: 115292 - RNA, 19 nt, Homo sapiens
  misc_RNA (1)...(19): siRNA sense strand
aaaucugacugcugaugug

SEQ ID NO: 115293 - RNA, 19 nt, Homo sapiens
  misc_RNA (1)...(19): siRNA sense strand
guaguggaaauggaaauga

SEQ ID NO: 115294 - RNA, 19 nt, Homo sapiens
  misc_RNA (1)...(19): siRNA sense strand
caaaagcagacuuaaagaa

SEQ ID NO: 115295 - RNA, 19 nt, Homo sapiens
  misc_RNA (1)...(19): siRNA sense strand
gcugaugugggcuucauug

SEQ ID NO: 115296 - RNA, 19 nt, Homo sapiens
  misc_RNA (1)...(19): siRNA sense strand
agaagcggauccaggaagu

SEQ ID NO: 115297 - RNA, 19 nt, Homo sapiens
  misc_RNA (1)...(19): siRNA sense strand
uaguggaaauggaaaugau

SEQ ID NO: 115298 - RNA, 19 nt, Homo sapiens
  misc_RNA (1)...(19): siRNA sense strand
caggaaaucauggaacaga

SEQ ID NO: 115299 - RNA, 19 nt, Homo sapiens
  misc_RNA (1)...(19): siRNA sense strand
aaagaugagaagucugaaa

SEQ ID NO: 115300 - RNA, 19 nt, Homo sapiens
  misc_RNA (1)...(19): siRNA sense strand
ugcauucuauuucucauca

SEQ ID NO: 115301 - RNA, 19 nt, Homo sapiens
  misc_RNA (1)...(19): siRNA sense strand
aaaagauggugaaaaggaa

SEQ ID NO: 115302 - RNA, 19 nt, Homo sapiens
  misc_RNA (1)...(19): siRNA sense strand
ugggucaccggguugauua

SEQ ID NO: 115303 - RNA, 19 nt, Homo sapiens
  misc_RNA (1)...(19): siRNA sense strand
aggaaaucauggaacagaa

SEQ ID NO: 115304 - RNA, 19 nt, Homo sapiens
  misc_RNA (1)...(19): siRNA sense strand
cucaucauuuggcucauaa

SEQ ID NO: 115305 - RNA, 19 nt, Homo sapiens
  misc_RNA (1)...(19): siRNA sense strand
gcggaacgcaggagacaca

SEQ ID NO: 115306 - RNA, 19 nt, Homo sapiens
  misc_RNA (1)...(19): siRNA sense strand
ucaccggguugauuauuuu

SEQ ID NO: 115307 - RNA, 19 nt, Homo sapiens
  misc_RNA (1)...(19): siRNA sense strand
ccaguucacuuuaaaacau

SEQ ID NO: 115308 - RNA, 19 nt, Homo sapiens
  misc_RNA (1)...(19): siRNA sense strand
cuaugacccaguucacuuu

SEQ ID NO: 115309 - RNA, 19 nt, Homo sapiens
  misc_RNA (1)...(19): siRNA sense strand
ggaacuggaacagcaaaca

SEQ ID NO: 115310 - RNA, 19 nt, Homo sapiens
  misc_RNA (1)...(19): siRNA sense strand
gauccaggaaguuggugaa

SEQ ID NO: 115311 - RNA, 19 nt, Homo sapiens
  misc_RNA (1)...(19): siRNA sense strand
ggcaaaggccaagaaagga

SEQ ID NO: 115312 - RNA, 19 nt, Homo sapiens
  misc_RNA (1)...(19): siRNA sense strand
gaggaaggcaccacuuuug

SEQ ID NO: 115313 - RNA, 19 nt, Homo sapiens
  misc_RNA (1)...(19): siRNA sense strand
ggaggaaggcaccacuuuu

SEQ ID NO: 115314 - RNA, 19 nt, Homo sapiens
  misc_RNA (1)...(19): siRNA sense strand
aaugagaguagguguuuau

SEQ ID NO: 115315 - RNA, 19 nt, Homo sapiens
  misc_RNA (1)...(19): siRNA sense strand
guaggaccaggaaaucaug

SEQ ID NO: 115316 - RNA, 19 nt, Homo sapiens
  misc_RNA (1)...(19): siRNA sense strand
gaggaacuggaacagcaaa

SEQ ID NO: 115317 - RNA, 19 nt, Homo sapiens
  misc_RNA (1)...(19): siRNA sense strand
gaagcuauguuuggaauua

SEQ ID NO: 115318 - RNA, 19 nt, Homo sapiens
  misc_RNA (1)...(19): siRNA sense strand
caacauaaaugaugacaug

SEQ ID NO: 115319 - RNA, 19 nt, Homo sapiens
  misc_RNA (1)...(19): siRNA sense strand
gaucaucgauuuaggauug

SEQ ID NO: 115320 - RNA, 19 nt, Homo sapiens
  misc_RNA (1)...(19): siRNA sense strand
gaagaggaauguuuaaauc

SEQ ID NO: 115321 - RNA, 19 nt, Homo sapiens
  misc_RNA (1)...(19): siRNA sense strand
gaacuagaagcaauuguua

SEQ ID NO: 115322 - RNA, 19 nt, Homo sapiens
  misc_RNA (1)...(19): siRNA sense strand
ccagaaacuucccauguua

SEQ ID NO: 115323 - RNA, 19 nt, Homo sapiens
  misc_RNA (1)...(19): siRNA sense strand
caacauagccaacauaaau

SEQ ID NO: 115324 - RNA, 19 nt, Homo sapiens
  misc_RNA (1)...(19): siRNA sense strand
cauaauggcuugucaucua

SEQ ID NO: 115325 - RNA, 19 nt, Homo sapiens
  misc_RNA (1)...(19): siRNA sense strand
cagcaucugucuuuaauaa

SEQ ID NO: 115326 - RNA, 19 nt, Homo sapiens
  misc_RNA (1)...(19): siRNA sense strand
ggacuaaaguggacaaauc

SEQ ID NO: 115327 - RNA, 19 nt, Homo sapiens
  misc_RNA (1)...(19): siRNA sense strand
agaccaaucucucaaauuu

SEQ ID NO: 115328 - RNA, 19 nt, Homo sapiens
  misc_RNA (1)...(19): siRNA sense strand
cauuagaucugucucauaa

SEQ ID NO: 115329 - RNA, 19 nt, Homo sapiens
  misc_RNA (1)...(19): siRNA sense strand
uaacauccguugagaagaa

SEQ ID NO: 115330 - RNA, 19 nt, Homo sapiens
  misc_RNA (1)...(19): siRNA sense strand
ggacaaaucucacuaugcu

SEQ ID NO: 115331 - RNA, 19 nt, Homo sapiens
  misc_RNA (1)...(19): siRNA sense strand
gcagaagaauuuaaucaca

SEQ ID NO: 115332 - RNA, 19 nt, Homo sapiens
  misc_RNA (1)...(19): siRNA sense strand
gaagaccaaucucucaaau

SEQ ID NO: 115333 - RNA, 19 nt, Homo sapiens
  misc_RNA (1)...(19): siRNA sense strand
ucacgcaauuggaagauua

SEQ ID NO: 115334 - RNA, 19 nt, Homo sapiens
  misc_RNA (1)...(19): siRNA sense strand
agacagaacaguuugaaua

SEQ ID NO: 115335 - RNA, 19 nt, Homo sapiens
  misc_RNA (1)...(19): siRNA sense strand
gaacuaaagaucaucgauu

SEQ ID NO: 115336 - RNA, 19 nt, Homo sapiens
  misc_RNA (1)...(19): siRNA sense strand
caagguacaucaugcaguu

SEQ ID NO: 115337 - RNA, 19 nt, Homo sapiens
  misc_RNA (1)...(19): siRNA sense strand
uugaggagauuccagauua

SEQ ID NO: 115338 - RNA, 19 nt, Homo sapiens
  misc_RNA (1)...(19): siRNA sense strand
gagcuucuauuaucaaaca

SEQ ID NO: 115339 - RNA, 19 nt, Homo sapiens
  misc_RNA (1)...(19): siRNA sense strand
ugagguaccugaauuugaa

SEQ ID NO: 115340 - RNA, 19 nt, Homo sapiens
  misc_RNA (1)...(19): siRNA sense strand
uagcuuggauguaggauuu

SEQ ID NO: 115341 - RNA, 19 nt, Homo sapiens
  misc_RNA (1)...(19): siRNA sense strand
cauaaaugaugacauguug

SEQ ID NO: 115342 - RNA, 19 nt, Homo sapiens
  misc_RNA (1)...(19): siRNA sense strand
gcaauuggaagauuauuug

SEQ ID NO: 115343 - RNA, 19 nt, Homo sapiens
  misc_RNA (1)...(19): siRNA sense strand
agaagaaucucauaacauc

SEQ ID NO: 115344 - RNA, 19 nt, Homo sapiens
  misc_RNA (1)...(19): siRNA sense strand
aguauugccugguuuguua

SEQ ID NO: 115345 - RNA, 19 nt, Homo sapiens
  misc_RNA (1)...(19): siRNA sense strand
gagaagcuauguuuggaau

SEQ ID NO: 115346 - RNA, 19 nt, Homo sapiens
  misc_RNA (1)...(19): siRNA sense strand
caacaucccugagcuguca

SEQ ID NO: 115347 - RNA, 19 nt, Homo sapiens
  misc_RNA (1)...(19): siRNA sense strand
gaaccugacugaguuagau

SEQ ID NO: 115348 - RNA, 19 nt, Homo sapiens
  misc_RNA (1)...(19): siRNA sense strand
agacagacuuugccuugua

SEQ ID NO: 115349 - RNA, 19 nt, Homo sapiens
  misc_RNA (1)...(19): siRNA sense strand
gcaauauguucacaggauu

SEQ ID NO: 115350 - RNA, 19 nt, Homo sapiens
  misc_RNA (1)...(19): siRNA sense strand
gaucuacccacaaacauaa

SEQ ID NO: 115351 - RNA, 19 nt, Homo sapiens
  misc_RNA (1)...(19): siRNA sense strand
gccagaaacuucccauguu

SEQ ID NO: 115352 - RNA, 19 nt, Homo sapiens
  misc_RNA (1)...(19): siRNA sense strand
gaauggagaggucuagaaa

SEQ ID NO: 115353 - RNA, 19 nt, Homo sapiens
  misc_RNA (1)...(19): siRNA sense strand
gcaucugucuuuaauaauc

SEQ ID NO: 115354 - RNA, 19 nt, Homo sapiens
  misc_RNA (1)...(19): siRNA sense strand
gaauuugacugaacuccau

SEQ ID NO: 115355 - RNA, 19 nt, Homo sapiens
  misc_RNA (1)...(19): siRNA sense strand
uuacagagaagcuauguuu

SEQ ID NO: 115356 - RNA, 19 nt, Homo sapiens
  misc_RNA (1)...(19): siRNA sense strand
cgucauaaauugcaaguag

SEQ ID NO: 115357 - RNA, 19 nt, Homo sapiens
  misc_RNA (1)...(19): siRNA sense strand
gaccugggccuuaaugaaa

SEQ ID NO: 115358 - RNA, 19 nt, Homo sapiens
  misc_RNA (1)...(19): siRNA sense strand
ccaagagcuucuauuauca

SEQ ID NO: 115359 - RNA, 19 nt, Homo sapiens
  misc_RNA (1)...(19): siRNA sense strand
ucaaagaaauagacagaca

SEQ ID NO: 115360 - RNA, 19 nt, Homo sapiens
  misc_RNA (1)...(19): siRNA sense strand
caacaacauagccaacaua

SEQ ID NO: 115361 - RNA, 19 nt, Homo sapiens
  misc_RNA (1)...(19): siRNA sense strand
uccaagagcuucuauuauc

SEQ ID NO: 115362 - RNA, 19 nt, Homo sapiens
  misc_RNA (1)...(19): siRNA sense strand
gaggaauguuuaaaucuca

SEQ ID NO: 115363 - RNA, 19 nt, Homo sapiens
  misc_RNA (1)...(19): siRNA sense strand
ggagauuccagauuauaaa

SEQ ID NO: 115364 - RNA, 19 nt, Homo sapiens
  misc_RNA (1)...(19): siRNA sense strand
ggagaggucuagaaaauau

SEQ ID NO: 115365 - RNA, 19 nt, Homo sapiens
  misc_RNA (1)...(19): siRNA sense strand
cggaaucugucucugagua

SEQ ID NO: 115366 - RNA, 19 nt, Homo sapiens
  misc_RNA (1)...(19): siRNA sense strand
gcacgaauuugacugaacu

SEQ ID NO: 115367 - RNA, 19 nt, Homo sapiens
  misc_RNA (1)...(19): siRNA sense strand
gaaaguauugccugguuug

SEQ ID NO: 115368 - RNA, 19 nt, Homo sapiens
  misc_RNA (1)...(19): siRNA sense strand
ucagaagaaucucauaaca

SEQ ID NO: 115369 - RNA, 19 nt, Homo sapiens
  misc_RNA (1)...(19): siRNA sense strand
ccgaugaucuacccacaaa

SEQ ID NO: 115370 - RNA, 19 nt, Homo sapiens
  misc_RNA (1)...(19): siRNA sense strand
ggauaucuuugccaauuca

SEQ ID NO: 115371 - RNA, 19 nt, Homo sapiens
  misc_RNA (1)...(19): siRNA sense strand
uguugaaccuuacccauaa

SEQ ID NO: 115372 - RNA, 19 nt, Homo sapiens
  misc_RNA (1)...(19): siRNA sense strand
gggaacauuucucuucaau

SEQ ID NO: 115373 - RNA, 19 nt, Homo sapiens
  misc_RNA (1)...(19): siRNA sense strand
ucaggugucucuaaaguca

SEQ ID NO: 115374 - RNA, 19 nt, Homo sapiens
  misc_RNA (1)...(19): siRNA sense strand
ggucuucaaggauuuauuu

SEQ ID NO: 115375 - RNA, 19 nt, Homo sapiens
  misc_RNA (1)...(19): siRNA sense strand
uuagaucugucucauaaug

SEQ ID NO: 115376 - RNA, 19 nt, Homo sapiens
  misc_RNA (1)...(19): siRNA sense strand
ggaagaccaaucucucaaa

SEQ ID NO: 115377 - RNA, 19 nt, Homo sapiens
  misc_RNA (1)...(19): siRNA sense strand
guacaucgaguucuugguu

SEQ ID NO: 115378 - RNA, 19 nt, Homo sapiens
  misc_RNA (1)...(19): siRNA sense strand
gugaaaguauugccugguu

SEQ ID NO: 115379 - RNA, 19 nt, Homo sapiens
  misc_RNA (1)...(19): siRNA sense strand
guacuugaccugggccuua

SEQ ID NO: 115380 - RNA, 19 nt, Homo sapiens
  misc_RNA (1)...(19): siRNA sense strand
ucacuaugcucgaucuuuc

SEQ ID NO: 115381 - RNA, 19 nt, Homo sapiens
  misc_RNA (1)...(19): siRNA sense strand
ugacucagguacccgauga

SEQ ID NO: 115382 - RNA, 19 nt, Homo sapiens
  misc_RNA (1)...(19): siRNA sense strand
gacagaacaguuugaauau

SEQ ID NO: 115383 - RNA, 19 nt, Homo sapiens
  misc_RNA (1)...(19): siRNA sense strand
cuaacuagcuuggauguag

SEQ ID NO: 115384 - RNA, 19 nt, Homo sapiens
  misc_RNA (1)...(19): siRNA sense strand
gaggagauuccagauuaua

SEQ ID NO: 115385 - RNA, 19 nt, Homo sapiens
  misc_RNA (1)...(19): siRNA sense strand
gaucuaagcaacaacaaca

SEQ ID NO: 115386 - RNA, 19 nt, Homo sapiens
  misc_RNA (1)...(19): siRNA sense strand
cuucguaacuugaccauuc

SEQ ID NO: 115387 - RNA, 19 nt, Homo sapiens
  misc_RNA (1)...(19): siRNA sense strand
gauuuaacaccaucucaaa

SEQ ID NO: 115388 - RNA, 19 nt, Homo sapiens
  misc_RNA (1)...(19): siRNA sense strand
cagaacaguuugaauaugc

SEQ ID NO: 115389 - RNA, 19 nt, Homo sapiens
  misc_RNA (1)...(19): siRNA sense strand
auaaucaggugucucuaaa

SEQ ID NO: 115390 - RNA, 19 nt, Homo sapiens
  misc_RNA (1)...(19): siRNA sense strand
guuggagggucuugagaaa

SEQ ID NO: 115391 - RNA, 19 nt, Homo sapiens
  misc_RNA (1)...(19): siRNA sense strand
ggaauggagaggucuagaa

SEQ ID NO: 115392 - RNA, 19 nt, Homo sapiens
  misc_RNA (1)...(19): siRNA sense strand
ugacugaacuccaucucau

SEQ ID NO: 115393 - RNA, 19 nt, Homo sapiens
  misc_RNA (1)...(19): siRNA sense strand
gaaccaugcacucuguuug

SEQ ID NO: 115394 - RNA, 19 nt, Homo sapiens
  misc_RNA (1)...(19): siRNA sense strand
ugaaaguauugccugguuu

SEQ ID NO: 115395 - RNA, 19 nt, Homo sapiens
  misc_RNA (1)...(19): siRNA sense strand
gauugcacgugugaaagua

SEQ ID NO: 115396 - RNA, 19 nt, Homo sapiens
  misc_RNA (1)...(19): siRNA sense strand
ugaguuagauaugcgcuuu

SEQ ID NO: 115397 - RNA, 19 nt, Homo sapiens
  misc_RNA (1)...(19): siRNA sense strand
aaauagagagugaugcuuu

SEQ ID NO: 115398 - RNA, 19 nt, Homo sapiens
  misc_RNA (1)...(19): siRNA sense strand
cagagaagcuauguuugga

SEQ ID NO: 115399 - RNA, 19 nt, Homo sapiens
  misc_RNA (1)...(19): siRNA sense strand
ucuccaagagcuucuauua

SEQ ID NO: 115400 - RNA, 19 nt, Homo sapiens
  misc_RNA (1)...(19): siRNA sense strand
gaaccuuacccauaaucaa

SEQ ID NO: 115401 - RNA, 19 nt, Homo sapiens
  misc_RNA (1)...(19): siRNA sense strand
cgaagaggaauguuuaaau

SEQ ID NO: 115402 - RNA, 19 nt, Homo sapiens
  misc_RNA (1)...(19): siRNA sense strand
gacagacuuugccuuguau

SEQ ID NO: 115403 - RNA, 19 nt, Homo sapiens
  misc_RNA (1)...(19): siRNA sense strand
ggaaucugucucugaguaa

SEQ ID NO: 115404 - RNA, 19 nt, Homo sapiens
  misc_RNA (1)...(19): siRNA sense strand
gaaauugggcaagaacuca

SEQ ID NO: 115405 - RNA, 19 nt, Homo sapiens
  misc_RNA (1)...(19): siRNA sense strand
caaccuaaccaagaauaaa

SEQ ID NO: 115406 - RNA, 19 nt, Homo sapiens
  misc_RNA (1)...(19): siRNA sense strand
cuggauaucuuugccaauu

SEQ ID NO: 115407 - RNA, 19 nt, Homo sapiens
  misc_RNA (1)...(19): siRNA sense strand
ucagguacccgaugaucua

SEQ ID NO: 115408 - RNA, 19 nt, Homo sapiens
  misc_RNA (1)...(19): siRNA sense strand
gauugggucugggaacauu

SEQ ID NO: 115409 - RNA, 19 nt, Homo sapiens
  misc_RNA (1)...(19): siRNA sense strand
guacuucucauccacuuug

SEQ ID NO: 115410 - RNA, 19 nt, Homo sapiens
  misc_RNA (1)...(19): siRNA sense strand
uagccaacauaaaugauga

SEQ ID NO: 115411 - RNA, 19 nt, Homo sapiens
  misc_RNA (1)...(19): siRNA sense strand
aaugugagguaccugaauu

SEQ ID NO: 115412 - RNA, 19 nt, Homo sapiens
  misc_RNA (1)...(19): siRNA sense strand
caacggcuuugacgagauc

SEQ ID NO: 115413 - RNA, 19 nt, Homo sapiens
  misc_RNA (1)...(19): siRNA sense strand
uuacacauacucaaccuaa

SEQ ID NO: 115414 - RNA, 19 nt, Homo sapiens
  misc_RNA (1)...(19): siRNA sense strand
gauuccagauuauaaacug

SEQ ID NO: 115415 - RNA, 19 nt, Homo sapiens
  misc_RNA (1)...(19): siRNA sense strand
gcaacacuccaccucacua

SEQ ID NO: 115416 - RNA, 19 nt, Homo sapiens
  misc_RNA (1)...(19): siRNA sense strand
uuaaugaaauugggcaaga

SEQ ID NO: 115417 - RNA, 19 nt, Homo sapiens
  misc_RNA (1)...(19): siRNA sense strand
ucacagagcugagaaacuu

SEQ ID NO: 115418 - RNA, 19 nt, Homo sapiens
  misc_RNA (1)...(19): siRNA sense strand
ccaccucucuaccuuaaua

SEQ ID NO: 115419 - RNA, 19 nt, Homo sapiens
  misc_RNA (1)...(19): siRNA sense strand
gagcuucaaugguguuauu

SEQ ID NO: 115420 - RNA, 19 nt, Homo sapiens
  misc_RNA (1)...(19): siRNA sense strand
uagcaguucuggucuauaa

SEQ ID NO: 115421 - RNA, 19 nt, Homo sapiens
  misc_RNA (1)...(19): siRNA sense strand
ugacaaaucugcucuagag

SEQ ID NO: 115422 - RNA, 19 nt, Homo sapiens
  misc_RNA (1)...(19): siRNA sense strand
ccaugaagguuuccauaaa

SEQ ID NO: 115423 - RNA, 19 nt, Homo sapiens
  misc_RNA (1)...(19): siRNA sense strand
gcucagaccuggcaguuuc

SEQ ID NO: 115424 - RNA, 19 nt, Homo sapiens
  misc_RNA (1)...(19): siRNA sense strand
gcugguguaucuuugaaua

SEQ ID NO: 115425 - RNA, 19 nt, Homo sapiens
  misc_RNA (1)...(19): siRNA sense strand
gaaaauggcuggcaauucu

SEQ ID NO: 115426 - RNA, 19 nt, Homo sapiens
  misc_RNA (1)...(19): siRNA sense strand
gguaaggaaugagcuagua

SEQ ID NO: 115427 - RNA, 19 nt, Homo sapiens
  misc_RNA (1)...(19): siRNA sense strand
cagaaugacuuugcuugua

SEQ ID NO: 115428 - RNA, 19 nt, Homo sapiens
  misc_RNA (1)...(19): siRNA sense strand
ggaagcaacaucuaucuga

SEQ ID NO: 115429 - RNA, 19 nt, Homo sapiens
  misc_RNA (1)...(19): siRNA sense strand
ccaaccaggugcauuuaaa

SEQ ID NO: 115430 - RNA, 19 nt, Homo sapiens
  misc_RNA (1)...(19): siRNA sense strand
gaauaucaccugucagaug

SEQ ID NO: 115431 - RNA, 19 nt, Homo sapiens
  misc_RNA (1)...(19): siRNA sense strand
aaagguugcuguucucaaa

SEQ ID NO: 115432 - RNA, 19 nt, Homo sapiens
  misc_RNA (1)...(19): siRNA sense strand
gugcugaguuugaauauca

SEQ ID NO: 115433 - RNA, 19 nt, Homo sapiens
  misc_RNA (1)...(19): siRNA sense strand
ggagacaaaucuagcaucu

SEQ ID NO: 115434 - RNA, 19 nt, Homo sapiens
  misc_RNA (1)...(19): siRNA sense strand
gaugguaaaucauggaauc

SEQ ID NO: 115435 - RNA, 19 nt, Homo sapiens
  misc_RNA (1)...(19): siRNA sense strand
guagaaauggcuugaguuu

SEQ ID NO: 115436 - RNA, 19 nt, Homo sapiens
  misc_RNA (1)...(19): siRNA sense strand
ccaggugcauuuaaagaaa

SEQ ID NO: 115437 - RNA, 19 nt, Homo sapiens
  misc_RNA (1)...(19): siRNA sense strand
ucauuuaccuugacauuuc

SEQ ID NO: 115438 - RNA, 19 nt, Homo sapiens
  misc_RNA (1)...(19): siRNA sense strand
uggauacguuuccuuauaa

SEQ ID NO: 115439 - RNA, 19 nt, Homo sapiens
  misc_RNA (1)...(19): siRNA sense strand
gugcaacaccuucagauaa

SEQ ID NO: 115440 - RNA, 19 nt, Homo sapiens
  misc_RNA (1)...(19): siRNA sense strand
aauaucaccugucagauga

SEQ ID NO: 115441 - RNA, 19 nt, Homo sapiens
  misc_RNA (1)...(19): siRNA sense strand
uagcauacuuagacuacua

SEQ ID NO: 115442 - RNA, 19 nt, Homo sapiens
  misc_RNA (1)...(19): siRNA sense strand
gaaacucaaaucucucaaa

SEQ ID NO: 115443 - RNA, 19 nt, Homo sapiens
  misc_RNA (1)...(19): siRNA sense strand
agacaaaucuagcaucucu

SEQ ID NO: 115444 - RNA, 19 nt, Homo sapiens
  misc_RNA (1)...(19): siRNA sense strand
gaugaggacuggguaagga

SEQ ID NO: 115445 - RNA, 19 nt, Homo sapiens
  misc_RNA (1)...(19): siRNA sense strand
guuuagaaguccaucguuu

SEQ ID NO: 115446 - RNA, 19 nt, Homo sapiens
  misc_RNA (1)...(19): siRNA sense strand
gguggaaguugaacgaaug

SEQ ID NO: 115447 - RNA, 19 nt, Homo sapiens
  misc_RNA (1)...(19): siRNA sense strand
caaguagucuagcuuucuu

SEQ ID NO: 115448 - RNA, 19 nt, Homo sapiens
  misc_RNA (1)...(19): siRNA sense strand
uuggauacguuuccuuaua

SEQ ID NO: 115449 - RNA, 19 nt, Homo sapiens
  misc_RNA (1)...(19): siRNA sense strand
uagagggccugugcaauuu

SEQ ID NO: 115450 - RNA, 19 nt, Homo sapiens
  misc_RNA (1)...(19): siRNA sense strand
ggugugaaauccagacaau

SEQ ID NO: 115451 - RNA, 19 nt, Homo sapiens
  misc_RNA (1)...(19): siRNA sense strand
gaaaccucauuuaccuuga

SEQ ID NO: 115452 - RNA, 19 nt, Homo sapiens
  misc_RNA (1)...(19): siRNA sense strand
gggcuuagaacaacuagaa

SEQ ID NO: 115453 - RNA, 19 nt, Homo sapiens
  misc_RNA (1)...(19): siRNA sense strand
caccagaguugcuuucaau

SEQ ID NO: 115454 - RNA, 19 nt, Homo sapiens
  misc_RNA (1)...(19): siRNA sense strand
gcaugccugugcugaguuu

SEQ ID NO: 115455 - RNA, 19 nt, Homo sapiens
  misc_RNA (1)...(19): siRNA sense strand
ugacuuugcuuguacuugu

SEQ ID NO: 115456 - RNA, 19 nt, Homo sapiens
  misc_RNA (1)...(19): siRNA sense strand
aacaggaacuacagcauuu

SEQ ID NO: 115457 - RNA, 19 nt, Homo sapiens
  misc_RNA (1)...(19): siRNA sense strand
gaaaugaaggaaacuugga

SEQ ID NO: 115458 - RNA, 19 nt, Homo sapiens
  misc_RNA (1)...(19): siRNA sense strand
gccgaaaggugauuguugu

SEQ ID NO: 115459 - RNA, 19 nt, Homo sapiens
  misc_RNA (1)...(19): siRNA sense strand
ugaaacaaaugagugaguu

SEQ ID NO: 115460 - RNA, 19 nt, Homo sapiens
  misc_RNA (1)...(19): siRNA sense strand
cauugaagaauuccgauua

SEQ ID NO: 115461 - RNA, 19 nt, Homo sapiens
  misc_RNA (1)...(19): siRNA sense strand
ccuacucaaucucucuuua

SEQ ID NO: 115462 - RNA, 19 nt, Homo sapiens
  misc_RNA (1)...(19): siRNA sense strand
caacaaaggugggaaugcu

SEQ ID NO: 115463 - RNA, 19 nt, Homo sapiens
  misc_RNA (1)...(19): siRNA sense strand
gauggcaacauuuagaauu

SEQ ID NO: 115464 - RNA, 19 nt, Homo sapiens
  misc_RNA (1)...(19): siRNA sense strand
ucagaaaccucauuuaccu

SEQ ID NO: 115465 - RNA, 19 nt, Homo sapiens
  misc_RNA (1)...(19): siRNA sense strand
uguaguaucuguuguagca

SEQ ID NO: 115466 - RNA, 19 nt, Homo sapiens
  misc_RNA (1)...(19): siRNA sense strand
caacagcauuuaacucacu

SEQ ID NO: 115467 - RNA, 19 nt, Homo sapiens
  misc_RNA (1)...(19): siRNA sense strand
gaaaacuuccuuccagaua

SEQ ID NO: 115468 - RNA, 19 nt, Homo sapiens
  misc_RNA (1)...(19): siRNA sense strand
cuagagcacuuggaccuuu

SEQ ID NO: 115469 - RNA, 19 nt, Homo sapiens
  misc_RNA (1)...(19): siRNA sense strand
gaacgaauggaaugugcaa

SEQ ID NO: 115470 - RNA, 19 nt, Homo sapiens
  misc_RNA (1)...(19): siRNA sense strand
ucaauggcaucuucaaugg

SEQ ID NO: 115471 - RNA, 19 nt, Homo sapiens
  misc_RNA (1)...(19): siRNA sense strand
cuagagggccugugcaauu

SEQ ID NO: 115472 - RNA, 19 nt, Homo sapiens
  misc_RNA (1)...(19): siRNA sense strand
cuucauaagcugacuuuaa

SEQ ID NO: 115473 - RNA, 19 nt, Homo sapiens
  misc_RNA (1)...(19): siRNA sense strand
gcugguaucaucuucauug

SEQ ID NO: 115474 - RNA, 19 nt, Homo sapiens
  misc_RNA (1)...(19): siRNA sense strand
ucaccugucagaugaauaa

SEQ ID NO: 115475 - RNA, 19 nt, Homo sapiens
  misc_RNA (1)...(19): siRNA sense strand
gaaguugaacgaauggaau

SEQ ID NO: 115476 - RNA, 19 nt, Homo sapiens
  misc_RNA (1)...(19): siRNA sense strand
ucaaucacauaaugacuuc

SEQ ID NO: 115477 - RNA, 19 nt, Homo sapiens
  misc_RNA (1)...(19): siRNA sense strand
gaagaauuccgauuagcau

SEQ ID NO: 115478 - RNA, 19 nt, Homo sapiens
  misc_RNA (1)...(19): siRNA sense strand
gagggccugugcaauuuga

SEQ ID NO: 115479 - RNA, 19 nt, Homo sapiens
  misc_RNA (1)...(19): siRNA sense strand
gguguaucuuugaauauga

SEQ ID NO: 115480 - RNA, 19 nt, Homo sapiens
  misc_RNA (1)...(19): siRNA sense strand
ugaccaaucuagagcacuu

SEQ ID NO: 115481 - RNA, 19 nt, Homo sapiens
  misc_RNA (1)...(19): siRNA sense strand
ggccauugcugccaacauc

SEQ ID NO: 115482 - RNA, 19 nt, Homo sapiens
  misc_RNA (1)...(19): siRNA sense strand
aaacaggaacuacagcauu

SEQ ID NO: 115483 - RNA, 19 nt, Homo sapiens
  misc_RNA (1)...(19): siRNA sense strand
ggacaguuucccacauuga

SEQ ID NO: 115484 - RNA, 19 nt, Homo sapiens
  misc_RNA (1)...(19): siRNA sense strand
agaaguccaucguuugguu

SEQ ID NO: 115485 - RNA, 19 nt, Homo sapiens
  misc_RNA (1)...(19): siRNA sense strand
uagaacaacuagaacaucu

SEQ ID NO: 115486 - RNA, 19 nt, Homo sapiens
  misc_RNA (1)...(19): siRNA sense strand
ugaauaagaccaucauugg

SEQ ID NO: 115487 - RNA, 19 nt, Homo sapiens
  misc_RNA (1)...(19): siRNA sense strand
uuucuaaucugaccaaucu

SEQ ID NO: 115488 - RNA, 19 nt, Homo sapiens
  misc_RNA (1)...(19): siRNA sense strand
cagagccgcugguguaucu

SEQ ID NO: 115489 - RNA, 19 nt, Homo sapiens
  misc_RNA (1)...(19): siRNA sense strand
guaaggaaugagcuaguaa

SEQ ID NO: 115490 - RNA, 19 nt, Homo sapiens
  misc_RNA (1)...(19): siRNA sense strand
ggaaguugaacgaauggaa

SEQ ID NO: 115491 - RNA, 19 nt, Homo sapiens
  misc_RNA (1)...(19): siRNA sense strand
caccagaguuuccugcaau

SEQ ID NO: 115492 - RNA, 19 nt, Homo sapiens
  misc_RNA (1)...(19): siRNA sense strand
cauuggauacguuuccuua

SEQ ID NO: 115493 - RNA, 19 nt, Homo sapiens
  misc_RNA (1)...(19): siRNA sense strand
uuucuggacuaucaaguuu

SEQ ID NO: 115494 - RNA, 19 nt, Homo sapiens
  misc_RNA (1)...(19): siRNA sense strand
uaagccaccucucuaccuu

SEQ ID NO: 115495 - RNA, 19 nt, Homo sapiens
  misc_RNA (1)...(19): siRNA sense strand
cauaagcugacuuuaagaa

SEQ ID NO: 115496 - RNA, 19 nt, Homo sapiens
  misc_RNA (1)...(19): siRNA sense strand
ggaccucucucagugucaa

SEQ ID NO: 115497 - RNA, 19 nt, Homo sapiens
  misc_RNA (1)...(19): siRNA sense strand
ugugaaauccagacaauug

SEQ ID NO: 115498 - RNA, 19 nt, Homo sapiens
  misc_RNA (1)...(19): siRNA sense strand
gcacagacuugcggguucu

SEQ ID NO: 115499 - RNA, 19 nt, Homo sapiens
  misc_RNA (1)...(19): siRNA sense strand
gcuucuugcuggcugcaua

SEQ ID NO: 115500 - RNA, 19 nt, Homo sapiens
  misc_RNA (1)...(19): siRNA sense strand
caacuagaacaucuggauu

SEQ ID NO: 115501 - RNA, 19 nt, Homo sapiens
  misc_RNA (1)...(19): siRNA sense strand
ccugaacccuaugaacuuu

SEQ ID NO: 115502 - RNA, 19 nt, Homo sapiens
  misc_RNA (1)...(19): siRNA sense strand
ugaacccuaugaacuuuau

SEQ ID NO: 115503 - RNA, 19 nt, Homo sapiens
  misc_RNA (1)...(19): siRNA sense strand
agaaugacuuugcuuguac

SEQ ID NO: 115504 - RNA, 19 nt, Homo sapiens
  misc_RNA (1)...(19): siRNA sense strand
aaacuuccuuccagauauc

SEQ ID NO: 115505 - RNA, 19 nt, Homo sapiens
  misc_RNA (1)...(19): siRNA sense strand
cuagaucucaguagaaaug

SEQ ID NO: 115506 - RNA, 19 nt, Homo sapiens
  misc_RNA (1)...(19): siRNA sense strand
caguagaaauggcuugagu

SEQ ID NO: 115507 - RNA, 19 nt, Homo sapiens
  misc_RNA (1)...(19): siRNA sense strand
uaugaugccuuuguuaucu

SEQ ID NO: 115508 - RNA, 19 nt, Homo sapiens
  misc_RNA (1)...(19): siRNA sense strand
guuugaauaucaccuguca

SEQ ID NO: 115509 - RNA, 19 nt, Homo sapiens
  misc_RNA (1)...(19): siRNA sense strand
gggcaugccugugcugagu

SEQ ID NO: 115510 - RNA, 19 nt, Homo sapiens
  misc_RNA (1)...(19): siRNA sense strand
cuucagguacuaaauauga

SEQ ID NO: 115511 - RNA, 19 nt, Homo sapiens
  misc_RNA (1)...(19): siRNA sense strand
ucacucagaaaccucauuu

SEQ ID NO: 115512 - RNA, 19 nt, Homo sapiens
  misc_RNA (1)...(19): siRNA sense strand
uaccuugacauuucucaua

SEQ ID NO: 115513 - RNA, 19 nt, Homo sapiens
  misc_RNA (1)...(19): siRNA sense strand
ggacuaucaaguuuacaga

SEQ ID NO: 115514 - RNA, 19 nt, Homo sapiens
  misc_RNA (1)...(19): siRNA sense strand
caugaagguuuccauaaaa

SEQ ID NO: 115515 - RNA, 19 nt, Homo sapiens
  misc_RNA (1)...(19): siRNA sense strand
ucagugugcuuguaguauc

SEQ ID NO: 115516 - RNA, 19 nt, Homo sapiens
  misc_RNA (1)...(19): siRNA sense strand
gagccacaacaacuucuuu

SEQ ID NO: 115517 - RNA, 19 nt, Homo sapiens
  misc_RNA (1)...(19): siRNA sense strand
ucacagagcugagaaacuu

SEQ ID NO: 115518 - RNA, 19 nt, Homo sapiens
  misc_RNA (1)...(19): siRNA sense strand
ccaccucucuaccuuaaua

SEQ ID NO: 115519 - RNA, 19 nt, Homo sapiens
  misc_RNA (1)...(19): siRNA sense strand
gagcuucaaugguguuauu

SEQ ID NO: 115520 - RNA, 19 nt, Homo sapiens
  misc_RNA (1)...(19): siRNA sense strand
uagcaguucuggucuauaa

SEQ ID NO: 115521 - RNA, 19 nt, Homo sapiens
  misc_RNA (1)...(19): siRNA sense strand
ugacaaaucugcucuagag

SEQ ID NO: 115522 - RNA, 19 nt, Homo sapiens
  misc_RNA (1)...(19): siRNA sense strand
ccaugaagguuuccauaaa

SEQ ID NO: 115523 - RNA, 19 nt, Homo sapiens
  misc_RNA (1)...(19): siRNA sense strand
gcucagaccuggcaguuuc

SEQ ID NO: 115524 - RNA, 19 nt, Homo sapiens
  misc_RNA (1)...(19): siRNA sense strand
gcugguguaucuuugaaua

SEQ ID NO: 115525 - RNA, 19 nt, Homo sapiens
  misc_RNA (1)...(19): siRNA sense strand
gaaaauggcuggcaauucu

SEQ ID NO: 115526 - RNA, 19 nt, Homo sapiens
  misc_RNA (1)...(19): siRNA sense strand
gguaaggaaugagcuagua

SEQ ID NO: 115527 - RNA, 19 nt, Homo sapiens
  misc_RNA (1)...(19): siRNA sense strand
cagaaugacuuugcuugua

SEQ ID NO: 115528 - RNA, 19 nt, Homo sapiens
  misc_RNA (1)...(19): siRNA sense strand
ggaagcaacaucuaucuga

SEQ ID NO: 115529 - RNA, 19 nt, Homo sapiens
  misc_RNA (1)...(19): siRNA sense strand
ccaaccaggugcauuuaaa

SEQ ID NO: 115530 - RNA, 19 nt, Homo sapiens
  misc_RNA (1)...(19): siRNA sense strand
gaauaucaccugucagaug

SEQ ID NO: 115531 - RNA, 19 nt, Homo sapiens
  misc_RNA (1)...(19): siRNA sense strand
aaagguugcuguucucaaa

SEQ ID NO: 115532 - RNA, 19 nt, Homo sapiens
  misc_RNA (1)...(19): siRNA sense strand
gugcugaguuugaauauca

SEQ ID NO: 115533 - RNA, 19 nt, Homo sapiens
  misc_RNA (1)...(19): siRNA sense strand
ggagacaaaucuagcaucu

SEQ ID NO: 115534 - RNA, 19 nt, Homo sapiens
  misc_RNA (1)...(19): siRNA sense strand
gaugguaaaucauggaauc

SEQ ID NO: 115535 - RNA, 19 nt, Homo sapiens
  misc_RNA (1)...(19): siRNA sense strand
guagaaauggcuugaguuu

SEQ ID NO: 115536 - RNA, 19 nt, Homo sapiens
  misc_RNA (1)...(19): siRNA sense strand
ccaggugcauuuaaagaaa

SEQ ID NO: 115537 - RNA, 19 nt, Homo sapiens
  misc_RNA (1)...(19): siRNA sense strand
ucauuuaccuugacauuuc

SEQ ID NO: 115538 - RNA, 19 nt, Homo sapiens
  misc_RNA (1)...(19): siRNA sense strand
uggauacguuuccuuauaa

SEQ ID NO: 115539 - RNA, 19 nt, Homo sapiens
  misc_RNA (1)...(19): siRNA sense strand
gugcaacaccuucagauaa

SEQ ID NO: 115540 - RNA, 19 nt, Homo sapiens
  misc_RNA (1)...(19): siRNA sense strand
aauaucaccugucagauga

SEQ ID NO: 115541 - RNA, 19 nt, Homo sapiens
  misc_RNA (1)...(19): siRNA sense strand
uagcauacuuagacuacua

SEQ ID NO: 115542 - RNA, 19 nt, Homo sapiens
  misc_RNA (1)...(19): siRNA sense strand
gaaacucaaaucucucaaa

SEQ ID NO: 115543 - RNA, 19 nt, Homo sapiens
  misc_RNA (1)...(19): siRNA sense strand
agacaaaucuagcaucucu

SEQ ID NO: 115544 - RNA, 19 nt, Homo sapiens
  misc_RNA (1)...(19): siRNA sense strand
gaugaggacuggguaagga

SEQ ID NO: 115545 - RNA, 19 nt, Homo sapiens
  misc_RNA (1)...(19): siRNA sense strand
guuuagaaguccaucguuu

SEQ ID NO: 115546 - RNA, 19 nt, Homo sapiens
  misc_RNA (1)...(19): siRNA sense strand
gguggaaguugaacgaaug

SEQ ID NO: 115547 - RNA, 19 nt, Homo sapiens
  misc_RNA (1)...(19): siRNA sense strand
caaguagucuagcuuucuu

SEQ ID NO: 115548 - RNA, 19 nt, Homo sapiens
  misc_RNA (1)...(19): siRNA sense strand
uuggauacguuuccuuaua

SEQ ID NO: 115549 - RNA, 19 nt, Homo sapiens
  misc_RNA (1)...(19): siRNA sense strand
uagagggccugugcaauuu

SEQ ID NO: 115550 - RNA, 19 nt, Homo sapiens
  misc_RNA (1)...(19): siRNA sense strand
gggcuuagaacaacuagaa

SEQ ID NO: 115551 - RNA, 19 nt, Homo sapiens
  misc_RNA (1)...(19): siRNA sense strand
ggugugaaauccagacaau

SEQ ID NO: 115552 - RNA, 19 nt, Homo sapiens
  misc_RNA (1)...(19): siRNA sense strand
gaaaccucauuuaccuuga

SEQ ID NO: 115553 - RNA, 19 nt, Homo sapiens
  misc_RNA (1)...(19): siRNA sense strand
caccagaguugcuuucaau

SEQ ID NO: 115554 - RNA, 19 nt, Homo sapiens
  misc_RNA (1)...(19): siRNA sense strand
gcaugccugugcugaguuu

SEQ ID NO: 115555 - RNA, 19 nt, Homo sapiens
  misc_RNA (1)...(19): siRNA sense strand
ugacuuugcuuguacuugu

SEQ ID NO: 115556 - RNA, 19 nt, Homo sapiens
  misc_RNA (1)...(19): siRNA sense strand
aacaggaacuacagcauuu

SEQ ID NO: 115557 - RNA, 19 nt, Homo sapiens
  misc_RNA (1)...(19): siRNA sense strand
gaaaugaaggaaacuugga

SEQ ID NO: 115558 - RNA, 19 nt, Homo sapiens
  misc_RNA (1)...(19): siRNA sense strand
gccgaaaggugauuguugu

SEQ ID NO: 115559 - RNA, 19 nt, Homo sapiens
  misc_RNA (1)...(19): siRNA sense strand
ugaaacaaaugagugaguu

SEQ ID NO: 115560 - RNA, 19 nt, Homo sapiens
  misc_RNA (1)...(19): siRNA sense strand
cauugaagaauuccgauua

SEQ ID NO: 115561 - RNA, 19 nt, Homo sapiens
  misc_RNA (1)...(19): siRNA sense strand
ccuacucaaucucucuuua

SEQ ID NO: 115562 - RNA, 19 nt, Homo sapiens
  misc_RNA (1)...(19): siRNA sense strand
caacaaaggugggaaugcu

SEQ ID NO: 115563 - RNA, 19 nt, Homo sapiens
  misc_RNA (1)...(19): siRNA sense strand
gauggcaacauuuagaauu

SEQ ID NO: 115564 - RNA, 19 nt, Homo sapiens
  misc_RNA (1)...(19): siRNA sense strand
ucagaaaccucauuuaccu

SEQ ID NO: 115565 - RNA, 19 nt, Homo sapiens
  misc_RNA (1)...(19): siRNA sense strand
uguaguaucuguuguagca

SEQ ID NO: 115566 - RNA, 19 nt, Homo sapiens
  misc_RNA (1)...(19): siRNA sense strand
caacagcauuuaacucacu

SEQ ID NO: 115567 - RNA, 19 nt, Homo sapiens
  misc_RNA (1)...(19): siRNA sense strand
gaaaacuuccuuccagaua

SEQ ID NO: 115568 - RNA, 19 nt, Homo sapiens
  misc_RNA (1)...(19): siRNA sense strand
cuagagcacuuggaccuuu

SEQ ID NO: 115569 - RNA, 19 nt, Homo sapiens
  misc_RNA (1)...(19): siRNA sense strand
gaacgaauggaaugugcaa

SEQ ID NO: 115570 - RNA, 19 nt, Homo sapiens
  misc_RNA (1)...(19): siRNA sense strand
ucaauggcaucuucaaugg

SEQ ID NO: 115571 - RNA, 19 nt, Homo sapiens
  misc_RNA (1)...(19): siRNA sense strand
cuagagggccugugcaauu

SEQ ID NO: 115572 - RNA, 19 nt, Homo sapiens
  misc_RNA (1)...(19): siRNA sense strand
cuucauaagcugacuuuaa

SEQ ID NO: 115573 - RNA, 19 nt, Homo sapiens
  misc_RNA (1)...(19): siRNA sense strand
gcugguaucaucuucauug

SEQ ID NO: 115574 - RNA, 19 nt, Homo sapiens
  misc_RNA (1)...(19): siRNA sense strand
ucaccugucagaugaauaa

SEQ ID NO: 115575 - RNA, 19 nt, Homo sapiens
  misc_RNA (1)...(19): siRNA sense strand
gaaguugaacgaauggaau

SEQ ID NO: 115576 - RNA, 19 nt, Homo sapiens
  misc_RNA (1)...(19): siRNA sense strand
ucaaucacauaaugacuuc

SEQ ID NO: 115577 - RNA, 19 nt, Homo sapiens
  misc_RNA (1)...(19): siRNA sense strand
gaagaauuccgauuagcau

SEQ ID NO: 115578 - RNA, 19 nt, Homo sapiens
  misc_RNA (1)...(19): siRNA sense strand
gagggccugugcaauuuga

SEQ ID NO: 115579 - RNA, 19 nt, Homo sapiens
  misc_RNA (1)...(19): siRNA sense strand
gguguaucuuugaauauga

SEQ ID NO: 115580 - RNA, 19 nt, Homo sapiens
  misc_RNA (1)...(19): siRNA sense strand
ugaccaaucuagagcacuu

SEQ ID NO: 115581 - RNA, 19 nt, Homo sapiens
  misc_RNA (1)...(19): siRNA sense strand
ggccauugcugccaacauc

SEQ ID NO: 115582 - RNA, 19 nt, Homo sapiens
  misc_RNA (1)...(19): siRNA sense strand
aaacaggaacuacagcauu

SEQ ID NO: 115583 - RNA, 19 nt, Homo sapiens
  misc_RNA (1)...(19): siRNA sense strand
ggacaguuucccacauuga

SEQ ID NO: 115584 - RNA, 19 nt, Homo sapiens
  misc_RNA (1)...(19): siRNA sense strand
agaaguccaucguuugguu

SEQ ID NO: 115585 - RNA, 19 nt, Homo sapiens
  misc_RNA (1)...(19): siRNA sense strand
uagaacaacuagaacaucu

SEQ ID NO: 115586 - RNA, 19 nt, Homo sapiens
  misc_RNA (1)...(19): siRNA sense strand
ugaauaagaccaucauugg

SEQ ID NO: 115587 - RNA, 19 nt, Homo sapiens
  misc_RNA (1)...(19): siRNA sense strand
uuucuaaucugaccaaucu

SEQ ID NO: 115588 - RNA, 19 nt, Homo sapiens
  misc_RNA (1)...(19): siRNA sense strand
cagagccgcugguguaucu

SEQ ID NO: 115589 - RNA, 19 nt, Homo sapiens
  misc_RNA (1)...(19): siRNA sense strand
guaaggaaugagcuaguaa

SEQ ID NO: 115590 - RNA, 19 nt, Homo sapiens
  misc_RNA (1)...(19): siRNA sense strand
ggaaguugaacgaauggaa

SEQ ID NO: 115591 - RNA, 19 nt, Homo sapiens
  misc_RNA (1)...(19): siRNA sense strand
caccagaguuuccugcaau

SEQ ID NO: 115592 - RNA, 19 nt, Homo sapiens
  misc_RNA (1)...(19): siRNA sense strand
uaagccaccucucuaccuu

SEQ ID NO: 115593 - RNA, 19 nt, Homo sapiens
  misc_RNA (1)...(19): siRNA sense strand
uuucuggacuaucaaguuu

SEQ ID NO: 115594 - RNA, 19 nt, Homo sapiens
  misc_RNA (1)...(19): siRNA sense strand
cauuggauacguuuccuua

SEQ ID NO: 115595 - RNA, 19 nt, Homo sapiens
  misc_RNA (1)...(19): siRNA sense strand
cauaagcugacuuuaagaa

SEQ ID NO: 115596 - RNA, 19 nt, Homo sapiens
  misc_RNA (1)...(19): siRNA sense strand
ugugaaauccagacaauug

SEQ ID NO: 115597 - RNA, 19 nt, Homo sapiens
  misc_RNA (1)...(19): siRNA sense strand
ggaccucucucagugucaa

SEQ ID NO: 115598 - RNA, 19 nt, Homo sapiens
  misc_RNA (1)...(19): siRNA sense strand
gcacagacuugcggguucu

SEQ ID NO: 115599 - RNA, 19 nt, Homo sapiens
  misc_RNA (1)...(19): siRNA sense strand
gcuucuugcuggcugcaua

SEQ ID NO: 115600 - RNA, 19 nt, Homo sapiens
  misc_RNA (1)...(19): siRNA sense strand
caacuagaacaucuggauu

SEQ ID NO: 115601 - RNA, 19 nt, Homo sapiens
  misc_RNA (1)...(19): siRNA sense strand
ccugaacccuaugaacuuu

SEQ ID NO: 115602 - RNA, 19 nt, Homo sapiens
  misc_RNA (1)...(19): siRNA sense strand
ugaacccuaugaacuuuau

SEQ ID NO: 115603 - RNA, 19 nt, Homo sapiens
  misc_RNA (1)...(19): siRNA sense strand
agaaugacuuugcuuguac

SEQ ID NO: 115604 - RNA, 19 nt, Homo sapiens
  misc_RNA (1)...(19): siRNA sense strand
aaacuuccuuccagauauc

SEQ ID NO: 115605 - RNA, 19 nt, Homo sapiens
  misc_RNA (1)...(19): siRNA sense strand
cuagaucucaguagaaaug

SEQ ID NO: 115606 - RNA, 19 nt, Homo sapiens
  misc_RNA (1)...(19): siRNA sense strand
caguagaaauggcuugagu

SEQ ID NO: 115607 - RNA, 19 nt, Homo sapiens
  misc_RNA (1)...(19): siRNA sense strand
uaugaugccuuuguuaucu

SEQ ID NO: 115608 - RNA, 19 nt, Homo sapiens
  misc_RNA (1)...(19): siRNA sense strand
guuugaauaucaccuguca

SEQ ID NO: 115609 - RNA, 19 nt, Homo sapiens
  misc_RNA (1)...(19): siRNA sense strand
gggcaugccugugcugagu

SEQ ID NO: 115610 - RNA, 19 nt, Homo sapiens
  misc_RNA (1)...(19): siRNA sense strand
cuucagguacuaaauauga

SEQ ID NO: 115611 - RNA, 19 nt, Homo sapiens
  misc_RNA (1)...(19): siRNA sense strand
ucacucagaaaccucauuu

SEQ ID NO: 115612 - RNA, 19 nt, Homo sapiens
  misc_RNA (1)...(19): siRNA sense strand
gcauuccaauuugaaacaa

SEQ ID NO: 115613 - RNA, 19 nt, Homo sapiens
  misc_RNA (1)...(19): siRNA sense strand
caugaagguuuccauaaaa

SEQ ID NO: 115614 - RNA, 19 nt, Homo sapiens
  misc_RNA (1)...(19): siRNA sense strand
ucagugugcuuguaguauc

SEQ ID NO: 115615 - RNA, 19 nt, Homo sapiens
  misc_RNA (1)...(19): siRNA sense strand
gagccacaacaacuucuuu

SEQ ID NO: 115616 - RNA, 19 nt, Homo sapiens
  misc_RNA (1)...(19): siRNA sense strand
uaccuugacauuucucaua

SEQ ID NO: 115617 - RNA, 19 nt, Homo sapiens
  misc_RNA (1)...(19): siRNA sense strand
ucacagagcugagaaacuu

SEQ ID NO: 115618 - RNA, 19 nt, Homo sapiens
  misc_RNA (1)...(19): siRNA sense strand
ccaccucucuaccuuaaua

SEQ ID NO: 115619 - RNA, 19 nt, Homo sapiens
  misc_RNA (1)...(19): siRNA sense strand
gagcuucaaugguguuauu

SEQ ID NO: 115620 - RNA, 19 nt, Homo sapiens
  misc_RNA (1)...(19): siRNA sense strand
uagcaguucuggucuauaa

SEQ ID NO: 115621 - RNA, 19 nt, Homo sapiens
  misc_RNA (1)...(19): siRNA sense strand
ugacaaaucugcucuagag

SEQ ID NO: 115622 - RNA, 19 nt, Homo sapiens
  misc_RNA (1)...(19): siRNA sense strand
ccaugaagguuuccauaaa

SEQ ID NO: 115623 - RNA, 19 nt, Homo sapiens
  misc_RNA (1)...(19): siRNA sense strand
gcucagaccuggcaguuuc

SEQ ID NO: 115624 - RNA, 19 nt, Homo sapiens
  misc_RNA (1)...(19): siRNA sense strand
gcugguguaucuuugaaua

SEQ ID NO: 115625 - RNA, 19 nt, Homo sapiens
  misc_RNA (1)...(19): siRNA sense strand
gaaaauggcuggcaauucu

SEQ ID NO: 115626 - RNA, 19 nt, Homo sapiens
  misc_RNA (1)...(19): siRNA sense strand
gguaaggaaugagcuagua

SEQ ID NO: 115627 - RNA, 19 nt, Homo sapiens
  misc_RNA (1)...(19): siRNA sense strand
cagaaugacuuugcuugua

SEQ ID NO: 115628 - RNA, 19 nt, Homo sapiens
  misc_RNA (1)...(19): siRNA sense strand
ggaagcaacaucuaucuga

SEQ ID NO: 115629 - RNA, 19 nt, Homo sapiens
  misc_RNA (1)...(19): siRNA sense strand
ccaaccaggugcauuuaaa

SEQ ID NO: 115630 - RNA, 19 nt, Homo sapiens
  misc_RNA (1)...(19): siRNA sense strand
gaauaucaccugucagaug

SEQ ID NO: 115631 - RNA, 19 nt, Homo sapiens
  misc_RNA (1)...(19): siRNA sense strand
aaagguugcuguucucaaa

SEQ ID NO: 115632 - RNA, 19 nt, Homo sapiens
  misc_RNA (1)...(19): siRNA sense strand
gugcugaguuugaauauca

SEQ ID NO: 115633 - RNA, 19 nt, Homo sapiens
  misc_RNA (1)...(19): siRNA sense strand
ggagacaaaucuagcaucu

SEQ ID NO: 115634 - RNA, 19 nt, Homo sapiens
  misc_RNA (1)...(19): siRNA sense strand
gaugguaaaucauggaauc

SEQ ID NO: 115635 - RNA, 19 nt, Homo sapiens
  misc_RNA (1)...(19): siRNA sense strand
guagaaauggcuugaguuu

SEQ ID NO: 115636 - RNA, 19 nt, Homo sapiens
  misc_RNA (1)...(19): siRNA sense strand
ccaggugcauuuaaagaaa

SEQ ID NO: 115637 - RNA, 19 nt, Homo sapiens
  misc_RNA (1)...(19): siRNA sense strand
ucauuuaccuugacauuuc

SEQ ID NO: 115638 - RNA, 19 nt, Homo sapiens
  misc_RNA (1)...(19): siRNA sense strand
uggauacguuuccuuauaa

SEQ ID NO: 115639 - RNA, 19 nt, Homo sapiens
  misc_RNA (1)...(19): siRNA sense strand
gugcaacaccuucagauaa

SEQ ID NO: 115640 - RNA, 19 nt, Homo sapiens
  misc_RNA (1)...(19): siRNA sense strand
aauaucaccugucagauga

SEQ ID NO: 115641 - RNA, 19 nt, Homo sapiens
  misc_RNA (1)...(19): siRNA sense strand
uagcauacuuagacuacua

SEQ ID NO: 115642 - RNA, 19 nt, Homo sapiens
  misc_RNA (1)...(19): siRNA sense strand
gaaacucaaaucucucaaa

SEQ ID NO: 115643 - RNA, 19 nt, Homo sapiens
  misc_RNA (1)...(19): siRNA sense strand
agacaaaucuagcaucucu

SEQ ID NO: 115644 - RNA, 19 nt, Homo sapiens
  misc_RNA (1)...(19): siRNA sense strand
gaugaggacuggguaagga

SEQ ID NO: 115645 - RNA, 19 nt, Homo sapiens
  misc_RNA (1)...(19): siRNA sense strand
guuuagaaguccaucguuu

SEQ ID NO: 115646 - RNA, 19 nt, Homo sapiens
  misc_RNA (1)...(19): siRNA sense strand
gguggaaguugaacgaaug

SEQ ID NO: 115647 - RNA, 19 nt, Homo sapiens
  misc_RNA (1)...(19): siRNA sense strand
caaguagucuagcuuucuu

SEQ ID NO: 115648 - RNA, 19 nt, Homo sapiens
  misc_RNA (1)...(19): siRNA sense strand
uuggauacguuuccuuaua

SEQ ID NO: 115649 - RNA, 19 nt, Homo sapiens
  misc_RNA (1)...(19): siRNA sense strand
uagagggccugugcaauuu

SEQ ID NO: 115650 - RNA, 19 nt, Homo sapiens
  misc_RNA (1)...(19): siRNA sense strand
ggugugaaauccagacaau

SEQ ID NO: 115651 - RNA, 19 nt, Homo sapiens
  misc_RNA (1)...(19): siRNA sense strand
gaaaccucauuuaccuuga

SEQ ID NO: 115652 - RNA, 19 nt, Homo sapiens
  misc_RNA (1)...(19): siRNA sense strand
gggcuuagaacaacuagaa

SEQ ID NO: 115653 - RNA, 19 nt, Homo sapiens
  misc_RNA (1)...(19): siRNA sense strand
caccagaguugcuuucaau

SEQ ID NO: 115654 - RNA, 19 nt, Homo sapiens
  misc_RNA (1)...(19): siRNA sense strand
gcaugccugugcugaguuu

SEQ ID NO: 115655 - RNA, 19 nt, Homo sapiens
  misc_RNA (1)...(19): siRNA sense strand
ugacuuugcuuguacuugu

SEQ ID NO: 115656 - RNA, 19 nt, Homo sapiens
  misc_RNA (1)...(19): siRNA sense strand
aacaggaacuacagcauuu

SEQ ID NO: 115657 - RNA, 19 nt, Homo sapiens
  misc_RNA (1)...(19): siRNA sense strand
gaaaugaaggaaacuugga

SEQ ID NO: 115658 - RNA, 19 nt, Homo sapiens
  misc_RNA (1)...(19): siRNA sense strand
gccgaaaggugauuguugu

SEQ ID NO: 115659 - RNA, 19 nt, Homo sapiens
  misc_RNA (1)...(19): siRNA sense strand
ugaaacaaaugagugaguu

SEQ ID NO: 115660 - RNA, 19 nt, Homo sapiens
  misc_RNA (1)...(19): siRNA sense strand
cauugaagaauuccgauua

SEQ ID NO: 115661 - RNA, 19 nt, Homo sapiens
  misc_RNA (1)...(19): siRNA sense strand
ccuacucaaucucucuuua

SEQ ID NO: 115662 - RNA, 19 nt, Homo sapiens
  misc_RNA (1)...(19): siRNA sense strand
caacaaaggugggaaugcu

SEQ ID NO: 115663 - RNA, 19 nt, Homo sapiens
  misc_RNA (1)...(19): siRNA sense strand
gauggcaacauuuagaauu

SEQ ID NO: 115664 - RNA, 19 nt, Homo sapiens
  misc_RNA (1)...(19): siRNA sense strand
ucagaaaccucauuuaccu

SEQ ID NO: 115665 - RNA, 19 nt, Homo sapiens
  misc_RNA (1)...(19): siRNA sense strand
uguaguaucuguuguagca

SEQ ID NO: 115666 - RNA, 19 nt, Homo sapiens
  misc_RNA (1)...(19): siRNA sense strand
caacagcauuuaacucacu

SEQ ID NO: 115667 - RNA, 19 nt, Homo sapiens
  misc_RNA (1)...(19): siRNA sense strand
gaaaacuuccuuccagaua

SEQ ID NO: 115668 - RNA, 19 nt, Homo sapiens
  misc_RNA (1)...(19): siRNA sense strand
cuagagcacuuggaccuuu

SEQ ID NO: 115669 - RNA, 19 nt, Homo sapiens
  misc_RNA (1)...(19): siRNA sense strand
gaacgaauggaaugugcaa

SEQ ID NO: 115670 - RNA, 19 nt, Homo sapiens
  misc_RNA (1)...(19): siRNA sense strand
ucaauggcaucuucaaugg

SEQ ID NO: 115671 - RNA, 19 nt, Homo sapiens
  misc_RNA (1)...(19): siRNA sense strand
cuagagggccugugcaauu

SEQ ID NO: 115672 - RNA, 19 nt, Homo sapiens
  misc_RNA (1)...(19): siRNA sense strand
cuucauaagcugacuuuaa

SEQ ID NO: 115673 - RNA, 19 nt, Homo sapiens
  misc_RNA (1)...(19): siRNA sense strand
gcugguaucaucuucauug

SEQ ID NO: 115674 - RNA, 19 nt, Homo sapiens
  misc_RNA (1)...(19): siRNA sense strand
ucaccugucagaugaauaa

SEQ ID NO: 115675 - RNA, 19 nt, Homo sapiens
  misc_RNA (1)...(19): siRNA sense strand
gaaguugaacgaauggaau

SEQ ID NO: 115676 - RNA, 19 nt, Homo sapiens
  misc_RNA (1)...(19): siRNA sense strand
ucaaucacauaaugacuuc

SEQ ID NO: 115677 - RNA, 19 nt, Homo sapiens
  misc_RNA (1)...(19): siRNA sense strand
gaagaauuccgauuagcau

SEQ ID NO: 115678 - RNA, 19 nt, Homo sapiens
  misc_RNA (1)...(19): siRNA sense strand
gagggccugugcaauuuga

SEQ ID NO: 115679 - RNA, 19 nt, Homo sapiens
  misc_RNA (1)...(19): siRNA sense strand
gguguaucuuugaauauga

SEQ ID NO: 115680 - RNA, 19 nt, Homo sapiens
  misc_RNA (1)...(19): siRNA sense strand
ugaccaaucuagagcacuu

SEQ ID NO: 115681 - RNA, 19 nt, Homo sapiens
  misc_RNA (1)...(19): siRNA sense strand
ggccauugcugccaacauc

SEQ ID NO: 115682 - RNA, 19 nt, Homo sapiens
  misc_RNA (1)...(19): siRNA sense strand
aaacaggaacuacagcauu

SEQ ID NO: 115683 - RNA, 19 nt, Homo sapiens
  misc_RNA (1)...(19): siRNA sense strand
ggacaguuucccacauuga

SEQ ID NO: 115684 - RNA, 19 nt, Homo sapiens
  misc_RNA (1)...(19): siRNA sense strand
agaaguccaucguuugguu

SEQ ID NO: 115685 - RNA, 19 nt, Homo sapiens
  misc_RNA (1)...(19): siRNA sense strand
uagaacaacuagaacaucu

SEQ ID NO: 115686 - RNA, 19 nt, Homo sapiens
  misc_RNA (1)...(19): siRNA sense strand
ugaauaagaccaucauugg

SEQ ID NO: 115687 - RNA, 19 nt, Homo sapiens
  misc_RNA (1)...(19): siRNA sense strand
uuucuaaucugaccaaucu

SEQ ID NO: 115688 - RNA, 19 nt, Homo sapiens
  misc_RNA (1)...(19): siRNA sense strand
cagagccgcugguguaucu

SEQ ID NO: 115689 - RNA, 19 nt, Homo sapiens
  misc_RNA (1)...(19): siRNA sense strand
guaaggaaugagcuaguaa

SEQ ID NO: 115690 - RNA, 19 nt, Homo sapiens
  misc_RNA (1)...(19): siRNA sense strand
ggaaguugaacgaauggaa

SEQ ID NO: 115691 - RNA, 19 nt, Homo sapiens
  misc_RNA (1)...(19): siRNA sense strand
caccagaguuuccugcaau

SEQ ID NO: 115692 - RNA, 19 nt, Homo sapiens
  misc_RNA (1)...(19): siRNA sense strand
cauuggauacguuuccuua

SEQ ID NO: 115693 - RNA, 19 nt, Homo sapiens
  misc_RNA (1)...(19): siRNA sense strand
uuucuggacuaucaaguuu

SEQ ID NO: 115694 - RNA, 19 nt, Homo sapiens
  misc_RNA (1)...(19): siRNA sense strand
uaagccaccucucuaccuu

SEQ ID NO: 115695 - RNA, 19 nt, Homo sapiens
  misc_RNA (1)...(19): siRNA sense strand
cauaagcugacuuuaagaa

SEQ ID NO: 115696 - RNA, 19 nt, Homo sapiens
  misc_RNA (1)...(19): siRNA sense strand
ggaccucucucagugucaa

SEQ ID NO: 115697 - RNA, 19 nt, Homo sapiens
  misc_RNA (1)...(19): siRNA sense strand
ugugaaauccagacaauug

SEQ ID NO: 115698 - RNA, 19 nt, Homo sapiens
  misc_RNA (1)...(19): siRNA sense strand
gcacagacuugcggguucu

SEQ ID NO: 115699 - RNA, 19 nt, Homo sapiens
  misc_RNA (1)...(19): siRNA sense strand
gcuucuugcuggcugcaua

SEQ ID NO: 115700 - RNA, 19 nt, Homo sapiens
  misc_RNA (1)...(19): siRNA sense strand
caacuagaacaucuggauu

SEQ ID NO: 115701 - RNA, 19 nt, Homo sapiens
  misc_RNA (1)...(19): siRNA sense strand
ccugaacccuaugaacuuu

SEQ ID NO: 115702 - RNA, 19 nt, Homo sapiens
  misc_RNA (1)...(19): siRNA sense strand
ugaacccuaugaacuuuau

SEQ ID NO: 115703 - RNA, 19 nt, Homo sapiens
  misc_RNA (1)...(19): siRNA sense strand
agaaugacuuugcuuguac

SEQ ID NO: 115704 - RNA, 19 nt, Homo sapiens
  misc_RNA (1)...(19): siRNA sense strand
aaacuuccuuccagauauc

SEQ ID NO: 115705 - RNA, 19 nt, Homo sapiens
  misc_RNA (1)...(19): siRNA sense strand
cuagaucucaguagaaaug

SEQ ID NO: 115706 - RNA, 19 nt, Homo sapiens
  misc_RNA (1)...(19): siRNA sense strand
caguagaaauggcuugagu

SEQ ID NO: 115707 - RNA, 19 nt, Homo sapiens
  misc_RNA (1)...(19): siRNA sense strand
uaugaugccuuuguuaucu

SEQ ID NO: 115708 - RNA, 19 nt, Homo sapiens
  misc_RNA (1)...(19): siRNA sense strand
guuugaauaucaccuguca

SEQ ID NO: 115709 - RNA, 19 nt, Homo sapiens
  misc_RNA (1)...(19): siRNA sense strand
gggcaugccugugcugagu

SEQ ID NO: 115710 - RNA, 19 nt, Homo sapiens
  misc_RNA (1)...(19): siRNA sense strand
cuucagguacuaaauauga

SEQ ID NO: 115711 - RNA, 19 nt, Homo sapiens
  misc_RNA (1)...(19): siRNA sense strand
ucacucagaaaccucauuu

SEQ ID NO: 115712 - RNA, 19 nt, Homo sapiens
  misc_RNA (1)...(19): siRNA sense strand
uaccuugacauuucucaua

SEQ ID NO: 115713 - RNA, 19 nt, Homo sapiens
  misc_RNA (1)...(19): siRNA sense strand
ggacuaucaaguuuacaga

SEQ ID NO: 115714 - RNA, 19 nt, Homo sapiens
  misc_RNA (1)...(19): siRNA sense strand
caugaagguuuccauaaaa

SEQ ID NO: 115715 - RNA, 19 nt, Homo sapiens
  misc_RNA (1)...(19): siRNA sense strand
ucagugugcuuguaguauc

SEQ ID NO: 115716 - RNA, 19 nt, Homo sapiens
  misc_RNA (1)...(19): siRNA sense strand
gagccacaacaacuucuuu

SEQ ID NO: 115717 - RNA, 19 nt, Homo sapiens
  misc_RNA (1)...(19): siRNA sense strand
ucacagagcugagaaacuu

SEQ ID NO: 115718 - RNA, 19 nt, Homo sapiens
  misc_RNA (1)...(19): siRNA sense strand
gagcuucaaugguguuauu

SEQ ID NO: 115719 - RNA, 19 nt, Homo sapiens
  misc_RNA (1)...(19): siRNA sense strand
uagcaguucuggucuauaa

SEQ ID NO: 115720 - RNA, 19 nt, Homo sapiens
  misc_RNA (1)...(19): siRNA sense strand
ugacaaaucugcucuagag

SEQ ID NO: 115721 - RNA, 19 nt, Homo sapiens
  misc_RNA (1)...(19): siRNA sense strand
ccaugaagguuuccauaaa

SEQ ID NO: 115722 - RNA, 19 nt, Homo sapiens
  misc_RNA (1)...(19): siRNA sense strand
gcucagaccuggcaguuuc

SEQ ID NO: 115723 - RNA, 19 nt, Homo sapiens
  misc_RNA (1)...(19): siRNA sense strand
gcugguguaucuuugaaua

SEQ ID NO: 115724 - RNA, 19 nt, Homo sapiens
  misc_RNA (1)...(19): siRNA sense strand
gaaaauggcuggcaauucu

SEQ ID NO: 115725 - RNA, 19 nt, Homo sapiens
  misc_RNA (1)...(19): siRNA sense strand
gguaaggaaugagcuagua

SEQ ID NO: 115726 - RNA, 19 nt, Homo sapiens
  misc_RNA (1)...(19): siRNA sense strand
cagaaugacuuugcuugua

SEQ ID NO: 115727 - RNA, 19 nt, Homo sapiens
  misc_RNA (1)...(19): siRNA sense strand
ggaagcaacaucuaucuga

SEQ ID NO: 115728 - RNA, 19 nt, Homo sapiens
  misc_RNA (1)...(19): siRNA sense strand
ccaaccaggugcauuuaaa

SEQ ID NO: 115729 - RNA, 19 nt, Homo sapiens
  misc_RNA (1)...(19): siRNA sense strand
gaauaucaccugucagaug

SEQ ID NO: 115730 - RNA, 19 nt, Homo sapiens
  misc_RNA (1)...(19): siRNA sense strand
aaagguugcuguucucaaa

SEQ ID NO: 115731 - RNA, 19 nt, Homo sapiens
  misc_RNA (1)...(19): siRNA sense strand
gugcugaguuugaauauca

SEQ ID NO: 115732 - RNA, 19 nt, Homo sapiens
  misc_RNA (1)...(19): siRNA sense strand
guagaaauggcuugaguuu

SEQ ID NO: 115733 - RNA, 19 nt, Homo sapiens
  misc_RNA (1)...(19): siRNA sense strand
gaugguaaaucauggaauc

SEQ ID NO: 115734 - RNA, 19 nt, Homo sapiens
  misc_RNA (1)...(19): siRNA sense strand
ccaggugcauuuaaagaaa

SEQ ID NO: 115735 - RNA, 19 nt, Homo sapiens
  misc_RNA (1)...(19): siRNA sense strand
ucauuuaccuugacauuuc

SEQ ID NO: 115736 - RNA, 19 nt, Homo sapiens
  misc_RNA (1)...(19): siRNA sense strand
uggauacguuuccuuauaa

SEQ ID NO: 115737 - RNA, 19 nt, Homo sapiens
  misc_RNA (1)...(19): siRNA sense strand
gugcaacaccuucagauaa

SEQ ID NO: 115738 - RNA, 19 nt, Homo sapiens
  misc_RNA (1)...(19): siRNA sense strand
aauaucaccugucagauga

SEQ ID NO: 115739 - RNA, 19 nt, Homo sapiens
  misc_RNA (1)...(19): siRNA sense strand
uagcauacuuagacuacua

SEQ ID NO: 115740 - RNA, 19 nt, Homo sapiens
  misc_RNA (1)...(19): siRNA sense strand
gaaacucaaaucucucaaa

SEQ ID NO: 115741 - RNA, 19 nt, Homo sapiens
  misc_RNA (1)...(19): siRNA sense strand
gaugaggacuggguaagga

SEQ ID NO: 115742 - RNA, 19 nt, Homo sapiens
  misc_RNA (1)...(19): siRNA sense strand
guuuagaaguccaucguuu

SEQ ID NO: 115743 - RNA, 19 nt, Homo sapiens
  misc_RNA (1)...(19): siRNA sense strand
gguggaaguugaacgaaug

SEQ ID NO: 115744 - RNA, 19 nt, Homo sapiens
  misc_RNA (1)...(19): siRNA sense strand
caaguagucuagcuuucuu

SEQ ID NO: 115745 - RNA, 19 nt, Homo sapiens
  misc_RNA (1)...(19): siRNA sense strand
uuggauacguuuccuuaua

SEQ ID NO: 115746 - RNA, 19 nt, Homo sapiens
  misc_RNA (1)...(19): siRNA sense strand
uagagggccugugcaauuu

SEQ ID NO: 115747 - RNA, 19 nt, Homo sapiens
  misc_RNA (1)...(19): siRNA sense strand
gggcuuagaacaacuagaa

SEQ ID NO: 115748 - RNA, 19 nt, Homo sapiens
  misc_RNA (1)...(19): siRNA sense strand
gaaaccucauuuaccuuga

SEQ ID NO: 115749 - RNA, 19 nt, Homo sapiens
  misc_RNA (1)...(19): siRNA sense strand
caccagaguugcuuucaau

SEQ ID NO: 115750 - RNA, 19 nt, Homo sapiens
  misc_RNA (1)...(19): siRNA sense strand
gcaugccugugcugaguuu

SEQ ID NO: 115751 - RNA, 19 nt, Homo sapiens
  misc_RNA (1)...(19): siRNA sense strand
ugacuuugcuuguacuugu

SEQ ID NO: 115752 - RNA, 19 nt, Homo sapiens
  misc_RNA (1)...(19): siRNA sense strand
aacaggaacuacagcauuu

SEQ ID NO: 115753 - RNA, 19 nt, Homo sapiens
  misc_RNA (1)...(19): siRNA sense strand
gaaaugaaggaaacuugga

SEQ ID NO: 115754 - RNA, 19 nt, Homo sapiens
  misc_RNA (1)...(19): siRNA sense strand
gccgaaaggugauuguugu

SEQ ID NO: 115755 - RNA, 19 nt, Homo sapiens
  misc_RNA (1)...(19): siRNA sense strand
ugaaacaaaugagugaguu

SEQ ID NO: 115756 - RNA, 19 nt, Homo sapiens
  misc_RNA (1)...(19): siRNA sense strand
cauugaagaauuccgauua

SEQ ID NO: 115757 - RNA, 19 nt, Homo sapiens
  misc_RNA (1)...(19): siRNA sense strand
ccuacucaaucucucuuua

SEQ ID NO: 115758 - RNA, 19 nt, Homo sapiens
  misc_RNA (1)...(19): siRNA sense strand
caacaaaggugggaaugcu

SEQ ID NO: 115759 - RNA, 19 nt, Homo sapiens
  misc_RNA (1)...(19): siRNA sense strand
gauggcaacauuuagaauu

SEQ ID NO: 115760 - RNA, 19 nt, Homo sapiens
  misc_RNA (1)...(19): siRNA sense strand
ucagaaaccucauuuaccu

SEQ ID NO: 115761 - RNA, 19 nt, Homo sapiens
  misc_RNA (1)...(19): siRNA sense strand
uguaguaucuguuguagca

SEQ ID NO: 115762 - RNA, 19 nt, Homo sapiens
  misc_RNA (1)...(19): siRNA sense strand
caacagcauuuaacucacu

SEQ ID NO: 115763 - RNA, 19 nt, Homo sapiens
  misc_RNA (1)...(19): siRNA sense strand
gaaaacuuccuuccagaua

SEQ ID NO: 115764 - RNA, 19 nt, Homo sapiens
  misc_RNA (1)...(19): siRNA sense strand
cuagagggccugugcaauu

SEQ ID NO: 115765 - RNA, 19 nt, Homo sapiens
  misc_RNA (1)...(19): siRNA sense strand
gaacgaauggaaugugcaa

SEQ ID NO: 115766 - RNA, 19 nt, Homo sapiens
  misc_RNA (1)...(19): siRNA sense strand
ucaauggcaucuucaaugg

SEQ ID NO: 115767 - RNA, 19 nt, Homo sapiens
  misc_RNA (1)...(19): siRNA sense strand
gaagaauuccgauuagcau

SEQ ID NO: 115768 - RNA, 19 nt, Homo sapiens
  misc_RNA (1)...(19): siRNA sense strand
gcugguaucaucuucauug

SEQ ID NO: 115769 - RNA, 19 nt, Homo sapiens
  misc_RNA (1)...(19): siRNA sense strand
ucaccugucagaugaauaa

SEQ ID NO: 115770 - RNA, 19 nt, Homo sapiens
  misc_RNA (1)...(19): siRNA sense strand
gaaguugaacgaauggaau

SEQ ID NO: 115771 - RNA, 19 nt, Homo sapiens
  misc_RNA (1)...(19): siRNA sense strand
ucaaucacauaaugacuuc

SEQ ID NO: 115772 - RNA, 19 nt, Homo sapiens
  misc_RNA (1)...(19): siRNA sense strand
cuucauaagcugacuuuaa

SEQ ID NO: 115773 - RNA, 19 nt, Homo sapiens
  misc_RNA (1)...(19): siRNA sense strand
gagggccugugcaauuuga

SEQ ID NO: 115774 - RNA, 19 nt, Homo sapiens
  misc_RNA (1)...(19): siRNA sense strand
gguguaucuuugaauauga

SEQ ID NO: 115775 - RNA, 19 nt, Homo sapiens
  misc_RNA (1)...(19): siRNA sense strand
agaaguccaucguuugguu

SEQ ID NO: 115776 - RNA, 19 nt, Homo sapiens
  misc_RNA (1)...(19): siRNA sense strand
ggccauugcugccaacauc

SEQ ID NO: 115777 - RNA, 19 nt, Homo sapiens
  misc_RNA (1)...(19): siRNA sense strand
aaacaggaacuacagcauu

SEQ ID NO: 115778 - RNA, 19 nt, Homo sapiens
  misc_RNA (1)...(19): siRNA sense strand
ggacaguuucccacauuga

SEQ ID NO: 115779 - RNA, 19 nt, Homo sapiens
  misc_RNA (1)...(19): siRNA sense strand
uagaacaacuagaacaucu

SEQ ID NO: 115780 - RNA, 19 nt, Homo sapiens
  misc_RNA (1)...(19): siRNA sense strand
ugaauaagaccaucauugg

SEQ ID NO: 115781 - RNA, 19 nt, Homo sapiens
  misc_RNA (1)...(19): siRNA sense strand
caccagaguuuccugcaau

SEQ ID NO: 115782 - RNA, 19 nt, Homo sapiens
  misc_RNA (1)...(19): siRNA sense strand
cagagccgcugguguaucu

SEQ ID NO: 115783 - RNA, 19 nt, Homo sapiens
  misc_RNA (1)...(19): siRNA sense strand
guaaggaaugagcuaguaa

SEQ ID NO: 115784 - RNA, 19 nt, Homo sapiens
  misc_RNA (1)...(19): siRNA sense strand
ggaaguugaacgaauggaa

SEQ ID NO: 115785 - RNA, 19 nt, Homo sapiens
  misc_RNA (1)...(19): siRNA sense strand
cauuggauacguuuccuua

SEQ ID NO: 115786 - RNA, 19 nt, Homo sapiens
  misc_RNA (1)...(19): siRNA sense strand
cauaagcugacuuuaagaa

SEQ ID NO: 115787 - RNA, 19 nt, Homo sapiens
  misc_RNA (1)...(19): siRNA sense strand
ggaccucucucagugucaa

SEQ ID NO: 115788 - RNA, 19 nt, Homo sapiens
  misc_RNA (1)...(19): siRNA sense strand
ccugaacccuaugaacuuu

SEQ ID NO: 115789 - RNA, 19 nt, Homo sapiens
  misc_RNA (1)...(19): siRNA sense strand
gcuucuugcuggcugcaua

SEQ ID NO: 115790 - RNA, 19 nt, Homo sapiens
  misc_RNA (1)...(19): siRNA sense strand
caacuagaacaucuggauu

SEQ ID NO: 115791 - RNA, 19 nt, Homo sapiens
  misc_RNA (1)...(19): siRNA sense strand
cuagaucucaguagaaaug

SEQ ID NO: 115792 - RNA, 19 nt, Homo sapiens
  misc_RNA (1)...(19): siRNA sense strand
agaaugacuuugcuuguac

SEQ ID NO: 115793 - RNA, 19 nt, Homo sapiens
  misc_RNA (1)...(19): siRNA sense strand
ugaacccuaugaacuuuau

SEQ ID NO: 115794 - RNA, 19 nt, Homo sapiens
  misc_RNA (1)...(19): siRNA sense strand
aaacuuccuuccagauauc

SEQ ID NO: 115795 - RNA, 19 nt, Homo sapiens
  misc_RNA (1)...(19): siRNA sense strand
caguagaaauggcuugagu

SEQ ID NO: 115796 - RNA, 19 nt, Homo sapiens
  misc_RNA (1)...(19): siRNA sense strand
uaugaugccuuuguuaucu

SEQ ID NO: 115797 - RNA, 19 nt, Homo sapiens
  misc_RNA (1)...(19): siRNA sense strand
guuugaauaucaccuguca

SEQ ID NO: 115798 - RNA, 19 nt, Homo sapiens
  misc_RNA (1)...(19): siRNA sense strand
gggcaugccugugcugagu

SEQ ID NO: 115799 - RNA, 19 nt, Homo sapiens
  misc_RNA (1)...(19): siRNA sense strand
cuucagguacuaaauauga

SEQ ID NO: 115800 - RNA, 19 nt, Homo sapiens
  misc_RNA (1)...(19): siRNA sense strand
ucacucagaaaccucauuu

SEQ ID NO: 115801 - RNA, 19 nt, Homo sapiens
  misc_RNA (1)...(19): siRNA sense strand
uacuuucacuuccaacaaa

SEQ ID NO: 115802 - RNA, 19 nt, Homo sapiens
  misc_RNA (1)...(19): siRNA sense strand
uucauaagcugacuuuaag

SEQ ID NO: 115803 - RNA, 19 nt, Homo sapiens
  misc_RNA (1)...(19): siRNA sense strand
caugaagguuuccauaaaa

SEQ ID NO: 115804 - RNA, 19 nt, Homo sapiens
  misc_RNA (1)...(19): siRNA sense strand
ucagugugcuuguaguauc

SEQ ID NO: 115805 - RNA, 19 nt, Homo sapiens
  misc_RNA (1)...(19): siRNA sense strand
uauccaaccaggugcauuu

SEQ ID NO: 115806 - RNA, 19 nt, Homo sapiens
  misc_RNA (1)...(19): siRNA sense strand
gagccacaacaacuucuuu

SEQ ID NO: 115807 - RNA, 19 nt, Homo sapiens
  misc_RNA (1)...(19): siRNA sense strand
uaccuugacauuucucaua

SEQ ID NO: 115808 - RNA, 19 nt, Homo sapiens
  misc_RNA (1)...(19): siRNA sense strand
gcauuccaauuugaaacaa

SEQ ID NO: 115809 - RNA, 19 nt, Homo sapiens
  misc_RNA (1)...(19): siRNA sense strand
gagugugacuauugaaagg

SEQ ID NO: 115810 - RNA, 19 nt, Homo sapiens
  misc_RNA (1)...(19): siRNA sense strand
cuacagcauuuuccaagua

SEQ ID NO: 115811 - RNA, 19 nt, Homo sapiens
  misc_RNA (1)...(19): siRNA sense strand
ggauacguuuccuuauaag

SEQ ID NO: 115812 - RNA, 19 nt, Homo sapiens
  misc_RNA (1)...(19): siRNA sense strand
guuauuaccaugaguucaa

SEQ ID NO: 115813 - RNA, 19 nt, Homo sapiens
  misc_RNA (1)...(19): siRNA sense strand
uucaaggucuggcugguuu

SEQ ID NO: 115814 - RNA, 19 nt, Homo sapiens
  misc_RNA (1)...(19): siRNA sense strand
gguccucagugugcuugua

SEQ ID NO: 115815 - RNA, 19 nt, Homo sapiens
  misc_RNA (1)...(19): siRNA sense strand
uaaauaugagccacaacaa

SEQ ID NO: 115816 - RNA, 19 nt, Homo sapiens
  misc_RNA (1)...(19): siRNA sense strand
ucacuacagagacuuuauu

SEQ ID NO: 115817 - RNA, 19 nt, Homo sapiens
  misc_RNA (1)...(19): siRNA sense strand
gcuguaaacuugaagauug

SEQ ID NO: 115818 - RNA, 19 nt, Homo sapiens
  misc_RNA (1)...(19): siRNA sense strand
acagagagaugcagacaaa

SEQ ID NO: 115819 - RNA, 19 nt, Homo sapiens
  misc_RNA (1)...(19): siRNA sense strand
uaaaggugaugaccauuau

SEQ ID NO: 115820 - RNA, 19 nt, Homo sapiens
  misc_RNA (1)...(19): siRNA sense strand
gagauuggacagauacuaa

SEQ ID NO: 115821 - RNA, 19 nt, Homo sapiens
  misc_RNA (1)...(19): siRNA sense strand
gagagaugcagacaaagua

SEQ ID NO: 115822 - RNA, 19 nt, Homo sapiens
  misc_RNA (1)...(19): siRNA sense strand
caaaauacguugcauuguu

SEQ ID NO: 115823 - RNA, 19 nt, Homo sapiens
  misc_RNA (1)...(19): siRNA sense strand
gacaugagauuaagaacag

SEQ ID NO: 115824 - RNA, 19 nt, Homo sapiens
  misc_RNA (1)...(19): siRNA sense strand
cagacaaaguaaacaauga

SEQ ID NO: 115825 - RNA, 19 nt, Homo sapiens
  misc_RNA (1)...(19): siRNA sense strand
gagauuaagaacagcuuua

SEQ ID NO: 115826 - RNA, 19 nt, Homo sapiens
  misc_RNA (1)...(19): siRNA sense strand
uauagagauuggacagaua

SEQ ID NO: 115827 - RNA, 19 nt, Homo sapiens
  misc_RNA (1)...(19): siRNA sense strand
caaauaaccaguaugagau

SEQ ID NO: 115828 - RNA, 19 nt, Homo sapiens
  misc_RNA (1)...(19): siRNA sense strand
gggagucguugcaggaauu

SEQ ID NO: 115829 - RNA, 19 nt, Homo sapiens
  misc_RNA (1)...(19): siRNA sense strand
cuaaaccagucauuacuug

SEQ ID NO: 115830 - RNA, 19 nt, Homo sapiens
  misc_RNA (1)...(19): siRNA sense strand
acaaauaaccaguaugaga

SEQ ID NO: 115831 - RNA, 19 nt, Homo sapiens
  misc_RNA (1)...(19): siRNA sense strand
gcagacaaaguaaacaaug

SEQ ID NO: 115832 - RNA, 19 nt, Homo sapiens
  misc_RNA (1)...(19): siRNA sense strand
caagagcguucugcuaauc

SEQ ID NO: 115833 - RNA, 19 nt, Homo sapiens
  misc_RNA (1)...(19): siRNA sense strand
aggugagccuggagaauua

SEQ ID NO: 115834 - RNA, 19 nt, Homo sapiens
  misc_RNA (1)...(19): siRNA sense strand
ccuaagaguugcuguaaac

SEQ ID NO: 115835 - RNA, 19 nt, Homo sapiens
  misc_RNA (1)...(19): siRNA sense strand
guauaacucuacaggagau

SEQ ID NO: 115836 - RNA, 19 nt, Homo sapiens
  misc_RNA (1)...(19): siRNA sense strand
uaaaugagaaggccaccaa

SEQ ID NO: 115837 - RNA, 19 nt, Homo sapiens
  misc_RNA (1)...(19): siRNA sense strand
auaaaggugaugaccauua

SEQ ID NO: 115838 - RNA, 19 nt, Homo sapiens
  misc_RNA (1)...(19): siRNA sense strand
caaaguaaacaaugaaggu

SEQ ID NO: 115839 - RNA, 19 nt, Homo sapiens
  misc_RNA (1)...(19): siRNA sense strand
gaagauuguacuccacaga

SEQ ID NO: 115840 - RNA, 19 nt, Homo sapiens
  misc_RNA (1)...(19): siRNA sense strand
ucucgugccauaacaaaua

SEQ ID NO: 115841 - RNA, 19 nt, Homo sapiens
  misc_RNA (1)...(19): siRNA sense strand
gaaucuuucucgccuacug

SEQ ID NO: 115842 - RNA, 19 nt, Homo sapiens
  misc_RNA (1)...(19): siRNA sense strand
acuggucgcugccaucgua

SEQ ID NO: 115843 - RNA, 19 nt, Homo sapiens
  misc_RNA (1)...(19): siRNA sense strand
gaagcaguauaacucuaca

SEQ ID NO: 115844 - RNA, 19 nt, Homo sapiens
  misc_RNA (1)...(19): siRNA sense strand
ucaagagcguucugcuaau

SEQ ID NO: 115845 - RNA, 19 nt, Homo sapiens
  misc_RNA (1)...(19): siRNA sense strand
aaccagucauuacuuguuu

SEQ ID NO: 115846 - RNA, 19 nt, Homo sapiens
  misc_RNA (1)...(19): siRNA sense strand
gcaguagacaagauccaaa

SEQ ID NO: 115847 - RNA, 19 nt, Homo sapiens
  misc_RNA (1)...(19): siRNA sense strand
cugcuaaucuacacuuuua

SEQ ID NO: 115848 - RNA, 19 nt, Homo sapiens
  misc_RNA (1)...(19): siRNA sense strand
gagccuggagaauuacuuu

SEQ ID NO: 115849 - RNA, 19 nt, Homo sapiens
  misc_RNA (1)...(19): siRNA sense strand
uaaccaguaugagauagug

SEQ ID NO: 115850 - RNA, 19 nt, Homo sapiens
  misc_RNA (1)...(19): siRNA sense strand
uuauaaaggugaugaccau

SEQ ID NO: 115851 - RNA, 19 nt, Homo sapiens
  misc_RNA (1)...(19): siRNA sense strand
gagaugcagacaaaguaaa

SEQ ID NO: 115852 - RNA, 19 nt, Homo sapiens
  misc_RNA (1)...(19): siRNA sense strand
ccauaacaaauaaccagua

SEQ ID NO: 115853 - RNA, 19 nt, Homo sapiens
  misc_RNA (1)...(19): siRNA sense strand
ucagacaugagauuaagaa

SEQ ID NO: 115854 - RNA, 19 nt, Homo sapiens
  misc_RNA (1)...(19): siRNA sense strand
gauuggacagauacuaauu

SEQ ID NO: 115855 - RNA, 19 nt, Homo sapiens
  misc_RNA (1)...(19): siRNA sense strand
aaaauacguugcauuguug

SEQ ID NO: 115856 - RNA, 19 nt, Homo sapiens
  misc_RNA (1)...(19): siRNA sense strand
gcaaggugagccuggagaa

SEQ ID NO: 115857 - RNA, 19 nt, Homo sapiens
  misc_RNA (1)...(19): siRNA sense strand
uuauagaagccaugcagua

SEQ ID NO: 115858 - RNA, 19 nt, Homo sapiens
  misc_RNA (1)...(19): siRNA sense strand
gguaccgucauuauucuuu

SEQ ID NO: 115859 - RNA, 19 nt, Homo sapiens
  misc_RNA (1)...(19): siRNA sense strand
guagacaagauccaaaaua

SEQ ID NO: 115860 - RNA, 19 nt, Homo sapiens
  misc_RNA (1)...(19): siRNA sense strand
ugucaccgauuauagagau

SEQ ID NO: 115861 - RNA, 19 nt, Homo sapiens
  misc_RNA (1)...(19): siRNA sense strand
cugccucucucgugccaua

SEQ ID NO: 115862 - RNA, 19 nt, Homo sapiens
  misc_RNA (1)...(19): siRNA sense strand
uucaagagcguucugcuaa

SEQ ID NO: 115863 - RNA, 19 nt, Homo sapiens
  misc_RNA (1)...(19): siRNA sense strand
uuauagagauuggacagau

SEQ ID NO: 115864 - RNA, 19 nt, Homo sapiens
  misc_RNA (1)...(19): siRNA sense strand
aaaccagucauuacuuguu

SEQ ID NO: 115865 - RNA, 19 nt, Homo sapiens
  misc_RNA (1)...(19): siRNA sense strand
cuacugguaccgucauuau

SEQ ID NO: 115866 - RNA, 19 nt, Homo sapiens
  misc_RNA (1)...(19): siRNA sense strand
gugaugaccauuauagagu

SEQ ID NO: 115867 - RNA, 19 nt, Homo sapiens
  misc_RNA (1)...(19): siRNA sense strand
cucggagacugcagacuaa

SEQ ID NO: 115868 - RNA, 19 nt, Homo sapiens
  misc_RNA (1)...(19): siRNA sense strand
uagaagccaugcaguagac

SEQ ID NO: 115869 - RNA, 19 nt, Homo sapiens
  misc_RNA (1)...(19): siRNA sense strand
agagcguucugcuaaucua

SEQ ID NO: 115870 - RNA, 19 nt, Homo sapiens
  misc_RNA (1)...(19): siRNA sense strand
gaucacuggcguuauccuu

SEQ ID NO: 115871 - RNA, 19 nt, Homo sapiens
  misc_RNA (1)...(19): siRNA sense strand
ucacuggcguuauccuucu

SEQ ID NO: 115872 - RNA, 19 nt, Homo sapiens
  misc_RNA (1)...(19): siRNA sense strand
uaacucuacaggagauuau

SEQ ID NO: 115873 - RNA, 19 nt, Homo sapiens
  misc_RNA (1)...(19): siRNA sense strand
gccaugcaguagacaagau

SEQ ID NO: 115874 - RNA, 19 nt, Homo sapiens
  misc_RNA (1)...(19): siRNA sense strand
ucgcugccaucguaggauu

SEQ ID NO: 115875 - RNA, 19 nt, Homo sapiens
  misc_RNA (1)...(19): siRNA sense strand
ccaguaugagauaguguaa

SEQ ID NO: 115876 - RNA, 19 nt, Homo sapiens
  misc_RNA (1)...(19): siRNA sense strand
ggugaugaccauuauagag

SEQ ID NO: 115877 - RNA, 19 nt, Homo sapiens
  misc_RNA (1)...(19): siRNA sense strand
gaagguuguuuuauaaagg

SEQ ID NO: 115878 - RNA, 19 nt, Homo sapiens
  misc_RNA (1)...(19): siRNA sense strand
agauuguacuccacagaga

SEQ ID NO: 115879 - RNA, 19 nt, Homo sapiens
  misc_RNA (1)...(19): siRNA sense strand
aaggugagccuggagaauu

SEQ ID NO: 115880 - RNA, 19 nt, Homo sapiens
  misc_RNA (1)...(19): siRNA sense strand
cuggaucacuggcguuauc

SEQ ID NO: 115881 - RNA, 19 nt, Homo sapiens
  misc_RNA (1)...(19): siRNA sense strand
uauagaagccaugcaguag

SEQ ID NO: 115882 - RNA, 19 nt, Homo sapiens
  misc_RNA (1)...(19): siRNA sense strand
agagaugcagacaaaguaa

SEQ ID NO: 115883 - RNA, 19 nt, Homo sapiens
  misc_RNA (1)...(19): siRNA sense strand
gaagccaugcaguagacaa

SEQ ID NO: 115884 - RNA, 19 nt, Homo sapiens
  misc_RNA (1)...(19): siRNA sense strand
gcuacugguaccgucauua

SEQ ID NO: 115885 - RNA, 19 nt, Homo sapiens
  misc_RNA (1)...(19): siRNA sense strand
cucgugccauaacaaauaa

SEQ ID NO: 115886 - RNA, 19 nt, Homo sapiens
  misc_RNA (1)...(19): siRNA sense strand
agacaugagauuaagaaca

SEQ ID NO: 115887 - RNA, 19 nt, Homo sapiens
  misc_RNA (1)...(19): siRNA sense strand
uugaagcaguauaacucua

SEQ ID NO: 115888 - RNA, 19 nt, Homo sapiens
  misc_RNA (1)...(19): siRNA sense strand
guaccgucauuauucuuuu

SEQ ID NO: 115889 - RNA, 19 nt, Homo sapiens
  misc_RNA (1)...(19): siRNA sense strand
ugagaaggccaccaauguc

SEQ ID NO: 115890 - RNA, 19 nt, Homo sapiens
  misc_RNA (1)...(19): siRNA sense strand
agagagaugcagacaaagu

SEQ ID NO: 115891 - RNA, 19 nt, Homo sapiens
  misc_RNA (1)...(19): siRNA sense strand
cuguaaacuugaagauugu

SEQ ID NO: 115892 - RNA, 19 nt, Homo sapiens
  misc_RNA (1)...(19): siRNA sense strand
uagacaagauccaaaauac

SEQ ID NO: 115893 - RNA, 19 nt, Homo sapiens
  misc_RNA (1)...(19): siRNA sense strand
gccaucguaggauuuguuu

SEQ ID NO: 115894 - RNA, 19 nt, Homo sapiens
  misc_RNA (1)...(19): siRNA sense strand
ggagucguugcaggaauuu

SEQ ID NO: 115895 - RNA, 19 nt, Homo sapiens
  misc_RNA (1)...(19): siRNA sense strand
aaaggugaugaccauuaua

SEQ ID NO: 115896 - RNA, 19 nt, Homo sapiens
  misc_RNA (1)...(19): siRNA sense strand
cguuauccuucuugcaguu

SEQ ID NO: 115897 - RNA, 19 nt, Homo sapiens
  misc_RNA (1)...(19): siRNA sense strand
uuucagacaugagauuaag

SEQ ID NO: 115898 - RNA, 19 nt, Homo sapiens
  misc_RNA (1)...(19): siRNA sense strand
cuacaggagauuauagaag

SEQ ID NO: 115899 - RNA, 19 nt, Homo sapiens
  misc_RNA (1)...(19): siRNA sense strand
ccacagagagaugcagaca

SEQ ID NO: 115900 - RNA, 19 nt, Homo sapiens
  misc_RNA (1)...(19): siRNA sense strand
ggauuuguuuucagacaug

SEQ ID NO: 115901 - RNA, 19 nt, Homo sapiens
  misc_RNA (1)...(19): siRNA sense strand
gacaaaguaaacaaugaag

SEQ ID NO: 115902 - RNA, 19 nt, Homo sapiens
  misc_RNA (1)...(19): siRNA sense strand
acugguaccgucauuauuc

SEQ ID NO: 115903 - RNA, 19 nt, Homo sapiens
  misc_RNA (1)...(19): siRNA sense strand
gcaagcaggcgaaucguaa

SEQ ID NO: 115904 - RNA, 19 nt, Homo sapiens
  misc_RNA (1)...(19): siRNA sense strand
uggcugagaucgagaaauu

SEQ ID NO: 115905 - RNA, 19 nt, Homo sapiens
  misc_RNA (1)...(19): siRNA sense strand
ccacugccuuccaaagaaa

SEQ ID NO: 115906 - RNA, 19 nt, Homo sapiens
  misc_RNA (1)...(19): siRNA sense strand
ccaaagaaacgauugaaca

SEQ ID NO: 115907 - RNA, 19 nt, Homo sapiens
  misc_RNA (1)...(19): siRNA sense strand
agacagagacgcaagagaa

SEQ ID NO: 115908 - RNA, 19 nt, Homo sapiens
  misc_RNA (1)...(19): siRNA sense strand
gaagcaagcaggcgaaucg

SEQ ID NO: 115909 - RNA, 19 nt, Homo sapiens
  misc_RNA (1)...(19): siRNA sense strand
gacagagacgcaagagaaa

SEQ ID NO: 115910 - RNA, 19 nt, Homo sapiens
  misc_RNA (1)...(19): siRNA sense strand
caaagaaacgauugaacag

SEQ ID NO: 115911 - RNA, 19 nt, Homo sapiens
  misc_RNA (1)...(19): siRNA sense strand
agucgaaacugaagaagac

SEQ ID NO: 115912 - RNA, 19 nt, Homo sapiens
  misc_RNA (1)...(19): siRNA sense strand
aaacugaagaagacagaga

SEQ ID NO: 115913 - RNA, 19 nt, Homo sapiens
  misc_RNA (1)...(19): siRNA sense strand
uccacugccuuccaaagaa

SEQ ID NO: 115914 - RNA, 19 nt, Homo sapiens
  misc_RNA (1)...(19): siRNA sense strand
cgaaacugaagaagacaga

SEQ ID NO: 115915 - RNA, 19 nt, Homo sapiens
  misc_RNA (1)...(19): siRNA sense strand
gauaagucgaaacugaaga

SEQ ID NO: 115916 - RNA, 19 nt, Homo sapiens
  misc_RNA (1)...(19): siRNA sense strand
gaagacagagacgcaagag

SEQ ID NO: 115917 - RNA, 19 nt, Homo sapiens
  misc_RNA (1)...(19): siRNA sense strand
cgauugaacaggagaagca

SEQ ID NO: 115918 - RNA, 19 nt, Homo sapiens
  misc_RNA (1)...(19): siRNA sense strand
caagaagaacuacgucuga

SEQ ID NO: 115919 - RNA, 19 nt, Homo sapiens
  misc_RNA (1)...(19): siRNA sense strand
gaggcgugcucuaccuguu

SEQ ID NO: 115920 - RNA, 19 nt, Homo sapiens
  misc_RNA (1)...(19): siRNA sense strand
gcgacuacgacaagaagaa

SEQ ID NO: 115921 - RNA, 19 nt, Homo sapiens
  misc_RNA (1)...(19): siRNA sense strand
ggaaggggcuguggauguc

SEQ ID NO: 115922 - RNA, 19 nt, Homo sapiens
  misc_RNA (1)...(19): siRNA sense strand
gauaagguguuuaaggaua

SEQ ID NO: 115923 - RNA, 19 nt, Homo sapiens
  misc_RNA (1)...(19): siRNA sense strand
ggaaaugcuucgaaauaau

SEQ ID NO: 115924 - RNA, 19 nt, Homo sapiens
  misc_RNA (1)...(19): siRNA sense strand
gagagcaucguuaaagaua

SEQ ID NO: 115925 - RNA, 19 nt, Homo sapiens
  misc_RNA (1)...(19): siRNA sense strand
acaaggagguuacaaggaa

SEQ ID NO: 115926 - RNA, 19 nt, Homo sapiens
  misc_RNA (1)...(19): siRNA sense strand
caucaugcguggagaauau

SEQ ID NO: 115927 - RNA, 19 nt, Homo sapiens
  misc_RNA (1)...(19): siRNA sense strand
gaaaugcuucgaaauaaug

SEQ ID NO: 115928 - RNA, 19 nt, Homo sapiens
  misc_RNA (1)...(19): siRNA sense strand
ggacaaaccagcagaucaa

SEQ ID NO: 115929 - RNA, 19 nt, Homo sapiens
  misc_RNA (1)...(19): siRNA sense strand
gcaaguggcucggaacaca

SEQ ID NO: 115930 - RNA, 19 nt, Homo sapiens
  misc_RNA (1)...(19): siRNA sense strand
aagauaagguguuuaagga

SEQ ID NO: 115931 - RNA, 19 nt, Homo sapiens
  misc_RNA (1)...(19): siRNA sense strand
gacaucugcuggugcauuu

SEQ ID NO: 115932 - RNA, 19 nt, Homo sapiens
  misc_RNA (1)...(19): siRNA sense strand
gaaaaggucuugaggaaag

SEQ ID NO: 115933 - RNA, 19 nt, Homo sapiens
  misc_RNA (1)...(19): siRNA sense strand
ggcccaaacuguucuagaa

SEQ ID NO: 115934 - RNA, 19 nt, Homo sapiens
  misc_RNA (1)...(19): siRNA sense strand
ggagaaggcguguaaauac

SEQ ID NO: 115935 - RNA, 19 nt, Homo sapiens
  misc_RNA (1)...(19): siRNA sense strand
aaucagauauguagcuuug

SEQ ID NO: 115936 - RNA, 19 nt, Homo sapiens
  misc_RNA (1)...(19): siRNA sense strand
gcaacucgcucgaaaagaa

SEQ ID NO: 115937 - RNA, 19 nt, Homo sapiens
  misc_RNA (1)...(19): siRNA sense strand
ucagauauguagcuuugaa

SEQ ID NO: 115938 - RNA, 19 nt, Homo sapiens
  misc_RNA (1)...(19): siRNA sense strand
aaggaaaugcuucgaaaua

SEQ ID NO: 115939 - RNA, 19 nt, Homo sapiens
  misc_RNA (1)...(19): siRNA sense strand
gaagcccacuggagagaug

SEQ ID NO: 115940 - RNA, 19 nt, Homo sapiens
  misc_RNA (1)...(19): siRNA sense strand
aggaaaugcuucgaaauaa

SEQ ID NO: 115941 - RNA, 19 nt, Homo sapiens
  misc_RNA (1)...(19): siRNA sense strand
acaagagcauacaaaguuu

SEQ ID NO: 115942 - RNA, 19 nt, Homo sapiens
  misc_RNA (1)...(19): siRNA sense strand
gagcaucguuaaagauaag

SEQ ID NO: 115943 - RNA, 19 nt, Homo sapiens
  misc_RNA (1)...(19): siRNA sense strand
cgcuaaagcugcacacuga

SEQ ID NO: 115944 - RNA, 19 nt, Homo sapiens
  misc_RNA (1)...(19): siRNA sense strand
uuucuacacugguuacuuu

SEQ ID NO: 115945 - RNA, 19 nt, Homo sapiens
  misc_RNA (1)...(19): siRNA sense strand
caagagagcaucguuaaag

SEQ ID NO: 115946 - RNA, 19 nt, Homo sapiens
  misc_RNA (1)...(19): siRNA sense strand
caaggagguuacaaggaaa

SEQ ID NO: 115947 - RNA, 19 nt, Homo sapiens
  misc_RNA (1)...(19): siRNA sense strand
ggacgcacuugucgcuguu

SEQ ID NO: 115948 - RNA, 19 nt, Homo sapiens
  misc_RNA (1)...(19): siRNA sense strand
aacaagagcauacaaaguu

SEQ ID NO: 115949 - RNA, 19 nt, Homo sapiens
  misc_RNA (1)...(19): siRNA sense strand
cugcugagcucuucaaguc

SEQ ID NO: 115950 - RNA, 19 nt, Homo sapiens
  misc_RNA (1)...(19): siRNA sense strand
aagagagcaucguuaaaga

SEQ ID NO: 115951 - RNA, 19 nt, Homo sapiens
  misc_RNA (1)...(19): siRNA sense strand
cguccugacugcaaagaaa

SEQ ID NO: 115952 - RNA, 19 nt, Homo sapiens
  misc_RNA (1)...(19): siRNA sense strand
cguuaaagauaagguguuu

SEQ ID NO: 115953 - RNA, 19 nt, Homo sapiens
  misc_RNA (1)...(19): siRNA sense strand
gaagcagacagcaugaaga

SEQ ID NO: 115954 - RNA, 19 nt, Homo sapiens
  misc_RNA (1)...(19): siRNA sense strand
ucagaucuauugucggaau

SEQ ID NO: 115955 - RNA, 19 nt, Homo sapiens
  misc_RNA (1)...(19): siRNA sense strand
gaugaucgcgcugcagaaa

SEQ ID NO: 115956 - RNA, 19 nt, Homo sapiens
  misc_RNA (1)...(19): siRNA sense strand
ggagugcucaucuggaaga

SEQ ID NO: 115957 - RNA, 19 nt, Homo sapiens
  misc_RNA (1)...(19): siRNA sense strand
ggacaucugcuggugcauu

SEQ ID NO: 115958 - RNA, 19 nt, Homo sapiens
  misc_RNA (1)...(19): siRNA sense strand
ggaagauucgcgacuacaa

SEQ ID NO: 115959 - RNA, 19 nt, Homo sapiens
  misc_RNA (1)...(19): siRNA sense strand
gcagaaugaaaguguagaa

SEQ ID NO: 115960 - RNA, 19 nt, Homo sapiens
  misc_RNA (1)...(19): siRNA sense strand
uggagaaggcguguaaaua

SEQ ID NO: 115961 - RNA, 19 nt, Homo sapiens
  misc_RNA (1)...(19): siRNA sense strand
gucaagagagcaucguuaa

SEQ ID NO: 115962 - RNA, 19 nt, Homo sapiens
  misc_RNA (1)...(19): siRNA sense strand
ggagaccgccagcuacaau

SEQ ID NO: 115963 - RNA, 19 nt, Homo sapiens
  misc_RNA (1)...(19): siRNA sense strand
gagccggcaugaccagaug

SEQ ID NO: 115964 - RNA, 19 nt, Homo sapiens
  misc_RNA (1)...(19): siRNA sense strand
gaucuauugucggaaugaa

SEQ ID NO: 115965 - RNA, 19 nt, Homo sapiens
  misc_RNA (1)...(19): siRNA sense strand
aaaaggaaaugcuucgaaa

SEQ ID NO: 115966 - RNA, 19 nt, Homo sapiens
  misc_RNA (1)...(19): siRNA sense strand
ugaagaccguggaggacaa

SEQ ID NO: 115967 - RNA, 19 nt, Homo sapiens
  misc_RNA (1)...(19): siRNA sense strand
ccacuggagagaugaauau

SEQ ID NO: 115968 - RNA, 19 nt, Homo sapiens
  misc_RNA (1)...(19): siRNA sense strand
ggaagcagacagcaugaag

SEQ ID NO: 115969 - RNA, 19 nt, Homo sapiens
  misc_RNA (1)...(19): siRNA sense strand
gaagauucgcgacuacaag

SEQ ID NO: 115970 - RNA, 19 nt, Homo sapiens
  misc_RNA (1)...(19): siRNA sense strand
ucauuuacagcgagugaua

SEQ ID NO: 115971 - RNA, 19 nt, Homo sapiens
  misc_RNA (1)...(19): siRNA sense strand
agagcaucguuaaagauaa

SEQ ID NO: 115972 - RNA, 19 nt, Homo sapiens
  misc_RNA (1)...(19): siRNA sense strand
agaauaugaugcccugcuu

SEQ ID NO: 115973 - RNA, 19 nt, Homo sapiens
  misc_RNA (1)...(19): siRNA sense strand
ugaucgcgcugcagaaaca

SEQ ID NO: 115974 - RNA, 19 nt, Homo sapiens
  misc_RNA (1)...(19): siRNA sense strand
gagaaggcguguaaauacc

SEQ ID NO: 115975 - RNA, 19 nt, Homo sapiens
  misc_RNA (1)...(19): siRNA sense strand
gaaugaaagcagagguugu

SEQ ID NO: 115976 - RNA, 19 nt, Homo sapiens
  misc_RNA (1)...(19): siRNA sense strand
gcccaaacuguucuagaaa

SEQ ID NO: 115977 - RNA, 19 nt, Homo sapiens
  misc_RNA (1)...(19): siRNA sense strand
aaacaagagcauacaaagu

SEQ ID NO: 115978 - RNA, 19 nt, Homo sapiens
  misc_RNA (1)...(19): siRNA sense strand
caucugcuggugcauuuaa

SEQ ID NO: 115979 - RNA, 19 nt, Homo sapiens
  misc_RNA (1)...(19): siRNA sense strand
guugcagaaugaaagugua

SEQ ID NO: 115980 - RNA, 19 nt, Homo sapiens
  misc_RNA (1)...(19): siRNA sense strand
gaagcaggaggccgucaug

SEQ ID NO: 115981 - RNA, 19 nt, Homo sapiens
  misc_RNA (1)...(19): siRNA sense strand
aaagauaagguguuuaagg

SEQ ID NO: 115982 - RNA, 19 nt, Homo sapiens
  misc_RNA (1)...(19): siRNA sense strand
ggaggacaaguacaagugu

SEQ ID NO: 115983 - RNA, 19 nt, Homo sapiens
  misc_RNA (1)...(19): siRNA sense strand
agagucagguuccgaugau

SEQ ID NO: 115984 - RNA, 19 nt, Homo sapiens
  misc_RNA (1)...(19): siRNA sense strand
ugucaagagagcaucguua

SEQ ID NO: 115985 - RNA, 19 nt, Homo sapiens
  misc_RNA (1)...(19): siRNA sense strand
cugcuuccuuggccguuua

SEQ ID NO: 115986 - RNA, 19 nt, Homo sapiens
  misc_RNA (1)...(19): siRNA sense strand
cugguuacuuuggcuauaa

SEQ ID NO: 115987 - RNA, 19 nt, Homo sapiens
  misc_RNA (1)...(19): siRNA sense strand
ucuggaagauucgcgacua

SEQ ID NO: 115988 - RNA, 19 nt, Homo sapiens
  misc_RNA (1)...(19): siRNA sense strand
ucaagagagcaucguuaaa

SEQ ID NO: 115989 - RNA, 19 nt, Homo sapiens
  misc_RNA (1)...(19): siRNA sense strand
gggacaaaccagcagauca

SEQ ID NO: 115990 - RNA, 19 nt, Homo sapiens
  misc_RNA (1)...(19): siRNA sense strand
acaaucagauauguagcuu

SEQ ID NO: 115991 - RNA, 19 nt, Homo sapiens
  misc_RNA (1)...(19): siRNA sense strand
caacagcagcagcuucaag

SEQ ID NO: 115992 - RNA, 19 nt, Homo sapiens
  misc_RNA (1)...(19): siRNA sense strand
cgacgucauuugggagaug

SEQ ID NO: 115993 - RNA, 19 nt, Homo sapiens
  misc_RNA (1)...(19): siRNA sense strand
agacagccaagcagagaaa

SEQ ID NO: 115994 - RNA, 19 nt, Homo sapiens
  misc_RNA (1)...(19): siRNA sense strand
gaggaagcagacagcauga

SEQ ID NO: 115995 - RNA, 19 nt, Homo sapiens
  misc_RNA (1)...(19): siRNA sense strand
ugacacucaugcugaugga

SEQ ID NO: 115996 - RNA, 19 nt, Homo sapiens
  misc_RNA (1)...(19): siRNA sense strand
acaauggagugcucaucug

SEQ ID NO: 115997 - RNA, 19 nt, Homo sapiens
  misc_RNA (1)...(19): siRNA sense strand
cagaaugaaaguguagaaa

SEQ ID NO: 115998 - RNA, 19 nt, Homo sapiens
  misc_RNA (1)...(19): siRNA sense strand
guggagaaggcguguaaau

SEQ ID NO: 115999 - RNA, 19 nt, Homo sapiens
  misc_RNA (1)...(19): siRNA sense strand
uacuuuggcuauaagaugu

SEQ ID NO: 116000 - RNA, 19 nt, Homo sapiens
  misc_RNA (1)...(19): siRNA sense strand
acacgaagacaccgacugu

SEQ ID NO: 116001 - RNA, 19 nt, Homo sapiens
  misc_RNA (1)...(19): siRNA sense strand
aagcagagaaacugaagga

SEQ ID NO: 116002 - RNA, 19 nt, Homo sapiens
  misc_RNA (1)...(19): siRNA sense strand
cagccagccuuucuacacu

SEQ ID NO: 116003 - RNA, 19 nt, Homo sapiens
  misc_RNA (1)...(19): siRNA sense strand
uuacuuuggcuauaagaug

SEQ ID NO: 116004 - RNA, 19 nt, Homo sapiens
  misc_RNA (1)...(19): siRNA sense strand
cagccuuucuacacugguu

SEQ ID NO: 116005 - RNA, 19 nt, Homo sapiens
  misc_RNA (1)...(19): siRNA sense strand
gacaaguacaagugugaga

SEQ ID NO: 116006 - RNA, 19 nt, Homo sapiens
  misc_RNA (1)...(19): siRNA sense strand
uuugggagaugcauucaag

SEQ ID NO: 116007 - RNA, 19 nt, Homo sapiens
  misc_RNA (1)...(19): siRNA sense strand
uaugaugcccugcuuccuu

SEQ ID NO: 116008 - RNA, 19 nt, Homo sapiens
  misc_RNA (1)...(19): siRNA sense strand
uuacagcgagugauagaca

SEQ ID NO: 116009 - RNA, 19 nt, Homo sapiens
  misc_RNA (1)...(19): siRNA sense strand
uuaaagucauaguggauac

SEQ ID NO: 116010 - RNA, 19 nt, Homo sapiens
  misc_RNA (1)...(19): siRNA sense strand
ccaaacuguucuagaaaau

SEQ ID NO: 116011 - RNA, 19 nt, Homo sapiens
  misc_RNA (1)...(19): siRNA sense strand
auggagugcucaucuggaa

SEQ ID NO: 116012 - RNA, 19 nt, Homo sapiens
  misc_RNA (1)...(19): siRNA sense strand
ugaacaaggagguuacaag

SEQ ID NO: 116013 - RNA, 19 nt, Homo sapiens
  misc_RNA (1)...(19): siRNA sense strand
uguacagcgugucaagaga

SEQ ID NO: 116014 - RNA, 19 nt, Homo sapiens
  misc_RNA (1)...(19): siRNA sense strand
aaaggaaaugcuucgaaau

SEQ ID NO: 116015 - RNA, 19 nt, Homo sapiens
  misc_RNA (1)...(19): siRNA sense strand
cagauauguagcuuugaaa

SEQ ID NO: 116016 - RNA, 19 nt, Homo sapiens
  misc_RNA (1)...(19): siRNA sense strand
aaaguuugcacaaucagau

SEQ ID NO: 116017 - RNA, 19 nt, Homo sapiens
  misc_RNA (1)...(19): siRNA sense strand
gcacgucaaccugcugaag

SEQ ID NO: 116018 - RNA, 19 nt, Homo sapiens
  misc_RNA (1)...(19): siRNA sense strand
caaguacaagugugagaag

SEQ ID NO: 116019 - RNA, 19 nt, Homo sapiens
  misc_RNA (1)...(19): siRNA sense strand
gagguugugcagagcaguu

SEQ ID NO: 116020 - RNA, 19 nt, Homo sapiens
  misc_RNA (1)...(19): siRNA sense strand
caaaaggaaaugcuucgaa

SEQ ID NO: 116021 - RNA, 19 nt, Homo sapiens
  misc_RNA (1)...(19): siRNA sense strand
gauaagguguuuaaggaua

SEQ ID NO: 116022 - RNA, 19 nt, Homo sapiens
  misc_RNA (1)...(19): siRNA sense strand
ggaaaugcuucgaaauaau

SEQ ID NO: 116023 - RNA, 19 nt, Homo sapiens
  misc_RNA (1)...(19): siRNA sense strand
gagagcaucguuaaagaua

SEQ ID NO: 116024 - RNA, 19 nt, Homo sapiens
  misc_RNA (1)...(19): siRNA sense strand
acaaggagguuacaaggaa

SEQ ID NO: 116025 - RNA, 19 nt, Homo sapiens
  misc_RNA (1)...(19): siRNA sense strand
caucaugcguggagaauau

SEQ ID NO: 116026 - RNA, 19 nt, Homo sapiens
  misc_RNA (1)...(19): siRNA sense strand
gaaaugcuucgaaauaaug

SEQ ID NO: 116027 - RNA, 19 nt, Homo sapiens
  misc_RNA (1)...(19): siRNA sense strand
ggacaaaccagcagaucaa

SEQ ID NO: 116028 - RNA, 19 nt, Homo sapiens
  misc_RNA (1)...(19): siRNA sense strand
gcaaguggcucggaacaca

SEQ ID NO: 116029 - RNA, 19 nt, Homo sapiens
  misc_RNA (1)...(19): siRNA sense strand
aagauaagguguuuaagga

SEQ ID NO: 116030 - RNA, 19 nt, Homo sapiens
  misc_RNA (1)...(19): siRNA sense strand
gacaucugcuggugcauuu

SEQ ID NO: 116031 - RNA, 19 nt, Homo sapiens
  misc_RNA (1)...(19): siRNA sense strand
gaaaaggucuugaggaaag

SEQ ID NO: 116032 - RNA, 19 nt, Homo sapiens
  misc_RNA (1)...(19): siRNA sense strand
ggcccaaacuguucuagaa

SEQ ID NO: 116033 - RNA, 19 nt, Homo sapiens
  misc_RNA (1)...(19): siRNA sense strand
ggagaaggcguguaaauac

SEQ ID NO: 116034 - RNA, 19 nt, Homo sapiens
  misc_RNA (1)...(19): siRNA sense strand
aaucagauauguagcuuug

SEQ ID NO: 116035 - RNA, 19 nt, Homo sapiens
  misc_RNA (1)...(19): siRNA sense strand
gcaacucgcucgaaaagaa

SEQ ID NO: 116036 - RNA, 19 nt, Homo sapiens
  misc_RNA (1)...(19): siRNA sense strand
ucagauauguagcuuugaa

SEQ ID NO: 116037 - RNA, 19 nt, Homo sapiens
  misc_RNA (1)...(19): siRNA sense strand
aaggaaaugcuucgaaaua

SEQ ID NO: 116038 - RNA, 19 nt, Homo sapiens
  misc_RNA (1)...(19): siRNA sense strand
gaagcccacuggagagaug

SEQ ID NO: 116039 - RNA, 19 nt, Homo sapiens
  misc_RNA (1)...(19): siRNA sense strand
aggaaaugcuucgaaauaa

SEQ ID NO: 116040 - RNA, 19 nt, Homo sapiens
  misc_RNA (1)...(19): siRNA sense strand
acaagagcauacaaaguuu

SEQ ID NO: 116041 - RNA, 19 nt, Homo sapiens
  misc_RNA (1)...(19): siRNA sense strand
gagcaucguuaaagauaag

SEQ ID NO: 116042 - RNA, 19 nt, Homo sapiens
  misc_RNA (1)...(19): siRNA sense strand
cgcuaaagcugcacacuga

SEQ ID NO: 116043 - RNA, 19 nt, Homo sapiens
  misc_RNA (1)...(19): siRNA sense strand
uuucuacacugguuacuuu

SEQ ID NO: 116044 - RNA, 19 nt, Homo sapiens
  misc_RNA (1)...(19): siRNA sense strand
caagagagcaucguuaaag

SEQ ID NO: 116045 - RNA, 19 nt, Homo sapiens
  misc_RNA (1)...(19): siRNA sense strand
caaggagguuacaaggaaa

SEQ ID NO: 116046 - RNA, 19 nt, Homo sapiens
  misc_RNA (1)...(19): siRNA sense strand
ggacgcacuugucgcuguu

SEQ ID NO: 116047 - RNA, 19 nt, Homo sapiens
  misc_RNA (1)...(19): siRNA sense strand
aacaagagcauacaaaguu

SEQ ID NO: 116048 - RNA, 19 nt, Homo sapiens
  misc_RNA (1)...(19): siRNA sense strand
cugcugagcucuucaaguc

SEQ ID NO: 116049 - RNA, 19 nt, Homo sapiens
  misc_RNA (1)...(19): siRNA sense strand
aagagagcaucguuaaaga

SEQ ID NO: 116050 - RNA, 19 nt, Homo sapiens
  misc_RNA (1)...(19): siRNA sense strand
cguccugacugcaaagaaa

SEQ ID NO: 116051 - RNA, 19 nt, Homo sapiens
  misc_RNA (1)...(19): siRNA sense strand
cguuaaagauaagguguuu

SEQ ID NO: 116052 - RNA, 19 nt, Homo sapiens
  misc_RNA (1)...(19): siRNA sense strand
gaagcagacagcaugaaga

SEQ ID NO: 116053 - RNA, 19 nt, Homo sapiens
  misc_RNA (1)...(19): siRNA sense strand
ucagaucuauugucggaau

SEQ ID NO: 116054 - RNA, 19 nt, Homo sapiens
  misc_RNA (1)...(19): siRNA sense strand
gaugaucgcgcugcagaaa

SEQ ID NO: 116055 - RNA, 19 nt, Homo sapiens
  misc_RNA (1)...(19): siRNA sense strand
ggagugcucaucuggaaga

SEQ ID NO: 116056 - RNA, 19 nt, Homo sapiens
  misc_RNA (1)...(19): siRNA sense strand
ggacaucugcuggugcauu

SEQ ID NO: 116057 - RNA, 19 nt, Homo sapiens
  misc_RNA (1)...(19): siRNA sense strand
ggaagauucgcgacuacaa

SEQ ID NO: 116058 - RNA, 19 nt, Homo sapiens
  misc_RNA (1)...(19): siRNA sense strand
gcagaaugaaaguguagaa

SEQ ID NO: 116059 - RNA, 19 nt, Homo sapiens
  misc_RNA (1)...(19): siRNA sense strand
uggagaaggcguguaaaua

SEQ ID NO: 116060 - RNA, 19 nt, Homo sapiens
  misc_RNA (1)...(19): siRNA sense strand
gucaagagagcaucguuaa

SEQ ID NO: 116061 - RNA, 19 nt, Homo sapiens
  misc_RNA (1)...(19): siRNA sense strand
ggagaccgccagcuacaau

SEQ ID NO: 116062 - RNA, 19 nt, Homo sapiens
  misc_RNA (1)...(19): siRNA sense strand
gagccggcaugaccagaug

SEQ ID NO: 116063 - RNA, 19 nt, Homo sapiens
  misc_RNA (1)...(19): siRNA sense strand
gaucuauugucggaaugaa

SEQ ID NO: 116064 - RNA, 19 nt, Homo sapiens
  misc_RNA (1)...(19): siRNA sense strand
aaaaggaaaugcuucgaaa

SEQ ID NO: 116065 - RNA, 19 nt, Homo sapiens
  misc_RNA (1)...(19): siRNA sense strand
ugaagaccguggaggacaa

SEQ ID NO: 116066 - RNA, 19 nt, Homo sapiens
  misc_RNA (1)...(19): siRNA sense strand
ccacuggagagaugaauau

SEQ ID NO: 116067 - RNA, 19 nt, Homo sapiens
  misc_RNA (1)...(19): siRNA sense strand
ggaagcagacagcaugaag

SEQ ID NO: 116068 - RNA, 19 nt, Homo sapiens
  misc_RNA (1)...(19): siRNA sense strand
gaagauucgcgacuacaag

SEQ ID NO: 116069 - RNA, 19 nt, Homo sapiens
  misc_RNA (1)...(19): siRNA sense strand
ucauuuacagcgagugaua

SEQ ID NO: 116070 - RNA, 19 nt, Homo sapiens
  misc_RNA (1)...(19): siRNA sense strand
agagcaucguuaaagauaa

SEQ ID NO: 116071 - RNA, 19 nt, Homo sapiens
  misc_RNA (1)...(19): siRNA sense strand
agaauaugaugcccugcuu

SEQ ID NO: 116072 - RNA, 19 nt, Homo sapiens
  misc_RNA (1)...(19): siRNA sense strand
ugaucgcgcugcagaaaca

SEQ ID NO: 116073 - RNA, 19 nt, Homo sapiens
  misc_RNA (1)...(19): siRNA sense strand
gagaaggcguguaaauacc

SEQ ID NO: 116074 - RNA, 19 nt, Homo sapiens
  misc_RNA (1)...(19): siRNA sense strand
gaaugaaagcagagguugu

SEQ ID NO: 116075 - RNA, 19 nt, Homo sapiens
  misc_RNA (1)...(19): siRNA sense strand
gcccaaacuguucuagaaa

SEQ ID NO: 116076 - RNA, 19 nt, Homo sapiens
  misc_RNA (1)...(19): siRNA sense strand
aaacaagagcauacaaagu

SEQ ID NO: 116077 - RNA, 19 nt, Homo sapiens
  misc_RNA (1)...(19): siRNA sense strand
caucugcuggugcauuuaa

SEQ ID NO: 116078 - RNA, 19 nt, Homo sapiens
  misc_RNA (1)...(19): siRNA sense strand
guugcagaaugaaagugua

SEQ ID NO: 116079 - RNA, 19 nt, Homo sapiens
  misc_RNA (1)...(19): siRNA sense strand
gaagcaggaggccgucaug

SEQ ID NO: 116080 - RNA, 19 nt, Homo sapiens
  misc_RNA (1)...(19): siRNA sense strand
aaagauaagguguuuaagg

SEQ ID NO: 116081 - RNA, 19 nt, Homo sapiens
  misc_RNA (1)...(19): siRNA sense strand
ggaggacaaguacaagugu

SEQ ID NO: 116082 - RNA, 19 nt, Homo sapiens
  misc_RNA (1)...(19): siRNA sense strand
agagucagguuccgaugau

SEQ ID NO: 116083 - RNA, 19 nt, Homo sapiens
  misc_RNA (1)...(19): siRNA sense strand
ugucaagagagcaucguua

SEQ ID NO: 116084 - RNA, 19 nt, Homo sapiens
  misc_RNA (1)...(19): siRNA sense strand
cugcuuccuuggccguuua

SEQ ID NO: 116085 - RNA, 19 nt, Homo sapiens
  misc_RNA (1)...(19): siRNA sense strand
cugguuacuuuggcuauaa

SEQ ID NO: 116086 - RNA, 19 nt, Homo sapiens
  misc_RNA (1)...(19): siRNA sense strand
ucuggaagauucgcgacua

SEQ ID NO: 116087 - RNA, 19 nt, Homo sapiens
  misc_RNA (1)...(19): siRNA sense strand
ucaagagagcaucguuaaa

SEQ ID NO: 116088 - RNA, 19 nt, Homo sapiens
  misc_RNA (1)...(19): siRNA sense strand
gggacaaaccagcagauca

SEQ ID NO: 116089 - RNA, 19 nt, Homo sapiens
  misc_RNA (1)...(19): siRNA sense strand
acaaucagauauguagcuu

SEQ ID NO: 116090 - RNA, 19 nt, Homo sapiens
  misc_RNA (1)...(19): siRNA sense strand
caacagcagcagcuucaag

SEQ ID NO: 116091 - RNA, 19 nt, Homo sapiens
  misc_RNA (1)...(19): siRNA sense strand
cgacgucauuugggagaug

SEQ ID NO: 116092 - RNA, 19 nt, Homo sapiens
  misc_RNA (1)...(19): siRNA sense strand
agacagccaagcagagaaa

SEQ ID NO: 116093 - RNA, 19 nt, Homo sapiens
  misc_RNA (1)...(19): siRNA sense strand
gaggaagcagacagcauga

SEQ ID NO: 116094 - RNA, 19 nt, Homo sapiens
  misc_RNA (1)...(19): siRNA sense strand
ugacacucaugcugaugga

SEQ ID NO: 116095 - RNA, 19 nt, Homo sapiens
  misc_RNA (1)...(19): siRNA sense strand
acaauggagugcucaucug

SEQ ID NO: 116096 - RNA, 19 nt, Homo sapiens
  misc_RNA (1)...(19): siRNA sense strand
cagaaugaaaguguagaaa

SEQ ID NO: 116097 - RNA, 19 nt, Homo sapiens
  misc_RNA (1)...(19): siRNA sense strand
guggagaaggcguguaaau

SEQ ID NO: 116098 - RNA, 19 nt, Homo sapiens
  misc_RNA (1)...(19): siRNA sense strand
uacuuuggcuauaagaugu

SEQ ID NO: 116099 - RNA, 19 nt, Homo sapiens
  misc_RNA (1)...(19): siRNA sense strand
acacgaagacaccgacugu

SEQ ID NO: 116100 - RNA, 19 nt, Homo sapiens
  misc_RNA (1)...(19): siRNA sense strand
aagcagagaaacugaagga

SEQ ID NO: 116101 - RNA, 19 nt, Homo sapiens
  misc_RNA (1)...(19): siRNA sense strand
cagccagccuuucuacacu

SEQ ID NO: 116102 - RNA, 19 nt, Homo sapiens
  misc_RNA (1)...(19): siRNA sense strand
uuacuuuggcuauaagaug

SEQ ID NO: 116103 - RNA, 19 nt, Homo sapiens
  misc_RNA (1)...(19): siRNA sense strand
cagccuuucuacacugguu

SEQ ID NO: 116104 - RNA, 19 nt, Homo sapiens
  misc_RNA (1)...(19): siRNA sense strand
gacaaguacaagugugaga

SEQ ID NO: 116105 - RNA, 19 nt, Homo sapiens
  misc_RNA (1)...(19): siRNA sense strand
uuugggagaugcauucaag

SEQ ID NO: 116106 - RNA, 19 nt, Homo sapiens
  misc_RNA (1)...(19): siRNA sense strand
uaugaugcccugcuuccuu

SEQ ID NO: 116107 - RNA, 19 nt, Homo sapiens
  misc_RNA (1)...(19): siRNA sense strand
uuacagcgagugauagaca

SEQ ID NO: 116108 - RNA, 19 nt, Homo sapiens
  misc_RNA (1)...(19): siRNA sense strand
uuaaagucauaguggauac

SEQ ID NO: 116109 - RNA, 19 nt, Homo sapiens
  misc_RNA (1)...(19): siRNA sense strand
ccaaacuguucuagaaaau

SEQ ID NO: 116110 - RNA, 19 nt, Homo sapiens
  misc_RNA (1)...(19): siRNA sense strand
auggagugcucaucuggaa

SEQ ID NO: 116111 - RNA, 19 nt, Homo sapiens
  misc_RNA (1)...(19): siRNA sense strand
ugaacaaggagguuacaag

SEQ ID NO: 116112 - RNA, 19 nt, Homo sapiens
  misc_RNA (1)...(19): siRNA sense strand
uguacagcgugucaagaga

SEQ ID NO: 116113 - RNA, 19 nt, Homo sapiens
  misc_RNA (1)...(19): siRNA sense strand
aaaggaaaugcuucgaaau

SEQ ID NO: 116114 - RNA, 19 nt, Homo sapiens
  misc_RNA (1)...(19): siRNA sense strand
cagauauguagcuuugaaa

SEQ ID NO: 116115 - RNA, 19 nt, Homo sapiens
  misc_RNA (1)...(19): siRNA sense strand
aaaguuugcacaaucagau

SEQ ID NO: 116116 - RNA, 19 nt, Homo sapiens
  misc_RNA (1)...(19): siRNA sense strand
gcacgucaaccugcugaag

SEQ ID NO: 116117 - RNA, 19 nt, Homo sapiens
  misc_RNA (1)...(19): siRNA sense strand
caaguacaagugugagaag

SEQ ID NO: 116118 - RNA, 19 nt, Homo sapiens
  misc_RNA (1)...(19): siRNA sense strand
gagguugugcagagcaguu

SEQ ID NO: 116119 - RNA, 19 nt, Homo sapiens
  misc_RNA (1)...(19): siRNA sense strand
caaaaggaaaugcuucgaa

SEQ ID NO: 116120 - RNA, 19 nt, Homo sapiens
  misc_RNA (1)...(19): siRNA sense strand
gauaagguguuuaaggaua

SEQ ID NO: 116121 - RNA, 19 nt, Homo sapiens
  misc_RNA (1)...(19): siRNA sense strand
ggaaaugcuucgaaauaau

SEQ ID NO: 116122 - RNA, 19 nt, Homo sapiens
  misc_RNA (1)...(19): siRNA sense strand
gagagcaucguuaaagaua

SEQ ID NO: 116123 - RNA, 19 nt, Homo sapiens
  misc_RNA (1)...(19): siRNA sense strand
acaaggagguuacaaggaa

SEQ ID NO: 116124 - RNA, 19 nt, Homo sapiens
  misc_RNA (1)...(19): siRNA sense strand
caucaugcguggagaauau

SEQ ID NO: 116125 - RNA, 19 nt, Homo sapiens
  misc_RNA (1)...(19): siRNA sense strand
gaaaugcuucgaaauaaug

SEQ ID NO: 116126 - RNA, 19 nt, Homo sapiens
  misc_RNA (1)...(19): siRNA sense strand
ggacaaaccagcagaucaa

SEQ ID NO: 116127 - RNA, 19 nt, Homo sapiens
  misc_RNA (1)...(19): siRNA sense strand
gcaaguggcucggaacaca

SEQ ID NO: 116128 - RNA, 19 nt, Homo sapiens
  misc_RNA (1)...(19): siRNA sense strand
aagauaagguguuuaagga

SEQ ID NO: 116129 - RNA, 19 nt, Homo sapiens
  misc_RNA (1)...(19): siRNA sense strand
gacaucugcuggugcauuu

SEQ ID NO: 116130 - RNA, 19 nt, Homo sapiens
  misc_RNA (1)...(19): siRNA sense strand
gaaaaggucuugaggaaag

SEQ ID NO: 116131 - RNA, 19 nt, Homo sapiens
  misc_RNA (1)...(19): siRNA sense strand
ggcccaaacuguucuagaa

SEQ ID NO: 116132 - RNA, 19 nt, Homo sapiens
  misc_RNA (1)...(19): siRNA sense strand
ggagaaggcguguaaauac

SEQ ID NO: 116133 - RNA, 19 nt, Homo sapiens
  misc_RNA (1)...(19): siRNA sense strand
aaucagauauguagcuuug

SEQ ID NO: 116134 - RNA, 19 nt, Homo sapiens
  misc_RNA (1)...(19): siRNA sense strand
gcaacucgcucgaaaagaa

SEQ ID NO: 116135 - RNA, 19 nt, Homo sapiens
  misc_RNA (1)...(19): siRNA sense strand
ucagauauguagcuuugaa

SEQ ID NO: 116136 - RNA, 19 nt, Homo sapiens
  misc_RNA (1)...(19): siRNA sense strand
aaggaaaugcuucgaaaua

SEQ ID NO: 116137 - RNA, 19 nt, Homo sapiens
  misc_RNA (1)...(19): siRNA sense strand
gaagcccacuggagagaug

SEQ ID NO: 116138 - RNA, 19 nt, Homo sapiens
  misc_RNA (1)...(19): siRNA sense strand
aggaaaugcuucgaaauaa

SEQ ID NO: 116139 - RNA, 19 nt, Homo sapiens
  misc_RNA (1)...(19): siRNA sense strand
acaagagcauacaaaguuu

SEQ ID NO: 116140 - RNA, 19 nt, Homo sapiens
  misc_RNA (1)...(19): siRNA sense strand
gagcaucguuaaagauaag

SEQ ID NO: 116141 - RNA, 19 nt, Homo sapiens
  misc_RNA (1)...(19): siRNA sense strand
cgcuaaagcugcacacuga

SEQ ID NO: 116142 - RNA, 19 nt, Homo sapiens
  misc_RNA (1)...(19): siRNA sense strand
uuucuacacugguuacuuu

SEQ ID NO: 116143 - RNA, 19 nt, Homo sapiens
  misc_RNA (1)...(19): siRNA sense strand
caagagagcaucguuaaag

SEQ ID NO: 116144 - RNA, 19 nt, Homo sapiens
  misc_RNA (1)...(19): siRNA sense strand
caaggagguuacaaggaaa

SEQ ID NO: 116145 - RNA, 19 nt, Homo sapiens
  misc_RNA (1)...(19): siRNA sense strand
ggacgcacuugucgcuguu

SEQ ID NO: 116146 - RNA, 19 nt, Homo sapiens
  misc_RNA (1)...(19): siRNA sense strand
aacaagagcauacaaaguu

SEQ ID NO: 116147 - RNA, 19 nt, Homo sapiens
  misc_RNA (1)...(19): siRNA sense strand
cugcugagcucuucaaguc

SEQ ID NO: 116148 - RNA, 19 nt, Homo sapiens
  misc_RNA (1)...(19): siRNA sense strand
aagagagcaucguuaaaga

SEQ ID NO: 116149 - RNA, 19 nt, Homo sapiens
  misc_RNA (1)...(19): siRNA sense strand
cguccugacugcaaagaaa

SEQ ID NO: 116150 - RNA, 19 nt, Homo sapiens
  misc_RNA (1)...(19): siRNA sense strand
cguuaaagauaagguguuu

SEQ ID NO: 116151 - RNA, 19 nt, Homo sapiens
  misc_RNA (1)...(19): siRNA sense strand
gaagcagacagcaugaaga

SEQ ID NO: 116152 - RNA, 19 nt, Homo sapiens
  misc_RNA (1)...(19): siRNA sense strand
ucagaucuauugucggaau

SEQ ID NO: 116153 - RNA, 19 nt, Homo sapiens
  misc_RNA (1)...(19): siRNA sense strand
gaugaucgcgcugcagaaa

SEQ ID NO: 116154 - RNA, 19 nt, Homo sapiens
  misc_RNA (1)...(19): siRNA sense strand
ggagugcucaucuggaaga

SEQ ID NO: 116155 - RNA, 19 nt, Homo sapiens
  misc_RNA (1)...(19): siRNA sense strand
ggacaucugcuggugcauu

SEQ ID NO: 116156 - RNA, 19 nt, Homo sapiens
  misc_RNA (1)...(19): siRNA sense strand
ggaagauucgcgacuacaa

SEQ ID NO: 116157 - RNA, 19 nt, Homo sapiens
  misc_RNA (1)...(19): siRNA sense strand
gcagaaugaaaguguagaa

SEQ ID NO: 116158 - RNA, 19 nt, Homo sapiens
  misc_RNA (1)...(19): siRNA sense strand
uggagaaggcguguaaaua

SEQ ID NO: 116159 - RNA, 19 nt, Homo sapiens
  misc_RNA (1)...(19): siRNA sense strand
gucaagagagcaucguuaa

SEQ ID NO: 116160 - RNA, 19 nt, Homo sapiens
  misc_RNA (1)...(19): siRNA sense strand
ggagaccgccagcuacaau

SEQ ID NO: 116161 - RNA, 19 nt, Homo sapiens
  misc_RNA (1)...(19): siRNA sense strand
gagccggcaugaccagaug

SEQ ID NO: 116162 - RNA, 19 nt, Homo sapiens
  misc_RNA (1)...(19): siRNA sense strand
gaucuauugucggaaugaa

SEQ ID NO: 116163 - RNA, 19 nt, Homo sapiens
  misc_RNA (1)...(19): siRNA sense strand
aaaaggaaaugcuucgaaa

SEQ ID NO: 116164 - RNA, 19 nt, Homo sapiens
  misc_RNA (1)...(19): siRNA sense strand
ugaagaccguggaggacaa

SEQ ID NO: 116165 - RNA, 19 nt, Homo sapiens
  misc_RNA (1)...(19): siRNA sense strand
ccacuggagagaugaauau

SEQ ID NO: 116166 - RNA, 19 nt, Homo sapiens
  misc_RNA (1)...(19): siRNA sense strand
ggaagcagacagcaugaag

SEQ ID NO: 116167 - RNA, 19 nt, Homo sapiens
  misc_RNA (1)...(19): siRNA sense strand
gaagauucgcgacuacaag

SEQ ID NO: 116168 - RNA, 19 nt, Homo sapiens
  misc_RNA (1)...(19): siRNA sense strand
ucauuuacagcgagugaua

SEQ ID NO: 116169 - RNA, 19 nt, Homo sapiens
  misc_RNA (1)...(19): siRNA sense strand
agagcaucguuaaagauaa

SEQ ID NO: 116170 - RNA, 19 nt, Homo sapiens
  misc_RNA (1)...(19): siRNA sense strand
agaauaugaugcccugcuu

SEQ ID NO: 116171 - RNA, 19 nt, Homo sapiens
  misc_RNA (1)...(19): siRNA sense strand
ugaucgcgcugcagaaaca

SEQ ID NO: 116172 - RNA, 19 nt, Homo sapiens
  misc_RNA (1)...(19): siRNA sense strand
gagaaggcguguaaauacc

SEQ ID NO: 116173 - RNA, 19 nt, Homo sapiens
  misc_RNA (1)...(19): siRNA sense strand
gaaugaaagcagagguugu

SEQ ID NO: 116174 - RNA, 19 nt, Homo sapiens
  misc_RNA (1)...(19): siRNA sense strand
gcccaaacuguucuagaaa

SEQ ID NO: 116175 - RNA, 19 nt, Homo sapiens
  misc_RNA (1)...(19): siRNA sense strand
aaacaagagcauacaaagu

SEQ ID NO: 116176 - RNA, 19 nt, Homo sapiens
  misc_RNA (1)...(19): siRNA sense strand
caucugcuggugcauuuaa

SEQ ID NO: 116177 - RNA, 19 nt, Homo sapiens
  misc_RNA (1)...(19): siRNA sense strand
guugcagaaugaaagugua

SEQ ID NO: 116178 - RNA, 19 nt, Homo sapiens
  misc_RNA (1)...(19): siRNA sense strand
gaagcaggaggccgucaug

SEQ ID NO: 116179 - RNA, 19 nt, Homo sapiens
  misc_RNA (1)...(19): siRNA sense strand
aaagauaagguguuuaagg

SEQ ID NO: 116180 - RNA, 19 nt, Homo sapiens
  misc_RNA (1)...(19): siRNA sense strand
ggaggacaaguacaagugu

SEQ ID NO: 116181 - RNA, 19 nt, Homo sapiens
  misc_RNA (1)...(19): siRNA sense strand
agagucagguuccgaugau

SEQ ID NO: 116182 - RNA, 19 nt, Homo sapiens
  misc_RNA (1)...(19): siRNA sense strand
ugucaagagagcaucguua

SEQ ID NO: 116183 - RNA, 19 nt, Homo sapiens
  misc_RNA (1)...(19): siRNA sense strand
cugcuuccuuggccguuua

SEQ ID NO: 116184 - RNA, 19 nt, Homo sapiens
  misc_RNA (1)...(19): siRNA sense strand
cugguuacuuuggcuauaa

SEQ ID NO: 116185 - RNA, 19 nt, Homo sapiens
  misc_RNA (1)...(19): siRNA sense strand
ucuggaagauucgcgacua

SEQ ID NO: 116186 - RNA, 19 nt, Homo sapiens
  misc_RNA (1)...(19): siRNA sense strand
ucaagagagcaucguuaaa

SEQ ID NO: 116187 - RNA, 19 nt, Homo sapiens
  misc_RNA (1)...(19): siRNA sense strand
gggacaaaccagcagauca

SEQ ID NO: 116188 - RNA, 19 nt, Homo sapiens
  misc_RNA (1)...(19): siRNA sense strand
acaaucagauauguagcuu

SEQ ID NO: 116189 - RNA, 19 nt, Homo sapiens
  misc_RNA (1)...(19): siRNA sense strand
caacagcagcagcuucaag

SEQ ID NO: 116190 - RNA, 19 nt, Homo sapiens
  misc_RNA (1)...(19): siRNA sense strand
cgacgucauuugggagaug

SEQ ID NO: 116191 - RNA, 19 nt, Homo sapiens
  misc_RNA (1)...(19): siRNA sense strand
agacagccaagcagagaaa

SEQ ID NO: 116192 - RNA, 19 nt, Homo sapiens
  misc_RNA (1)...(19): siRNA sense strand
gaggaagcagacagcauga

SEQ ID NO: 116193 - RNA, 19 nt, Homo sapiens
  misc_RNA (1)...(19): siRNA sense strand
ugacacucaugcugaugga

SEQ ID NO: 116194 - RNA, 19 nt, Homo sapiens
  misc_RNA (1)...(19): siRNA sense strand
acaauggagugcucaucug

SEQ ID NO: 116195 - RNA, 19 nt, Homo sapiens
  misc_RNA (1)...(19): siRNA sense strand
cagaaugaaaguguagaaa

SEQ ID NO: 116196 - RNA, 19 nt, Homo sapiens
  misc_RNA (1)...(19): siRNA sense strand
guggagaaggcguguaaau

SEQ ID NO: 116197 - RNA, 19 nt, Homo sapiens
  misc_RNA (1)...(19): siRNA sense strand
uacuuuggcuauaagaugu

SEQ ID NO: 116198 - RNA, 19 nt, Homo sapiens
  misc_RNA (1)...(19): siRNA sense strand
acacgaagacaccgacugu

SEQ ID NO: 116199 - RNA, 19 nt, Homo sapiens
  misc_RNA (1)...(19): siRNA sense strand
aagcagagaaacugaagga

SEQ ID NO: 116200 - RNA, 19 nt, Homo sapiens
  misc_RNA (1)...(19): siRNA sense strand
cagccagccuuucuacacu

SEQ ID NO: 116201 - RNA, 19 nt, Homo sapiens
  misc_RNA (1)...(19): siRNA sense strand
uuacuuuggcuauaagaug

SEQ ID NO: 116202 - RNA, 19 nt, Homo sapiens
  misc_RNA (1)...(19): siRNA sense strand
cagccuuucuacacugguu

SEQ ID NO: 116203 - RNA, 19 nt, Homo sapiens
  misc_RNA (1)...(19): siRNA sense strand
gacaaguacaagugugaga

SEQ ID NO: 116204 - RNA, 19 nt, Homo sapiens
  misc_RNA (1)...(19): siRNA sense strand
uuugggagaugcauucaag

SEQ ID NO: 116205 - RNA, 19 nt, Homo sapiens
  misc_RNA (1)...(19): siRNA sense strand
uaugaugcccugcuuccuu

SEQ ID NO: 116206 - RNA, 19 nt, Homo sapiens
  misc_RNA (1)...(19): siRNA sense strand
uuacagcgagugauagaca

SEQ ID NO: 116207 - RNA, 19 nt, Homo sapiens
  misc_RNA (1)...(19): siRNA sense strand
uuaaagucauaguggauac

SEQ ID NO: 116208 - RNA, 19 nt, Homo sapiens
  misc_RNA (1)...(19): siRNA sense strand
ccaaacuguucuagaaaau

SEQ ID NO: 116209 - RNA, 19 nt, Homo sapiens
  misc_RNA (1)...(19): siRNA sense strand
auggagugcucaucuggaa

SEQ ID NO: 116210 - RNA, 19 nt, Homo sapiens
  misc_RNA (1)...(19): siRNA sense strand
ugaacaaggagguuacaag

SEQ ID NO: 116211 - RNA, 19 nt, Homo sapiens
  misc_RNA (1)...(19): siRNA sense strand
uguacagcgugucaagaga

SEQ ID NO: 116212 - RNA, 19 nt, Homo sapiens
  misc_RNA (1)...(19): siRNA sense strand
aaaggaaaugcuucgaaau

SEQ ID NO: 116213 - RNA, 19 nt, Homo sapiens
  misc_RNA (1)...(19): siRNA sense strand
cagauauguagcuuugaaa

SEQ ID NO: 116214 - RNA, 19 nt, Homo sapiens
  misc_RNA (1)...(19): siRNA sense strand
aaaguuugcacaaucagau

SEQ ID NO: 116215 - RNA, 19 nt, Homo sapiens
  misc_RNA (1)...(19): siRNA sense strand
gcacgucaaccugcugaag

SEQ ID NO: 116216 - RNA, 19 nt, Homo sapiens
  misc_RNA (1)...(19): siRNA sense strand
caaguacaagugugagaag

SEQ ID NO: 116217 - RNA, 19 nt, Homo sapiens
  misc_RNA (1)...(19): siRNA sense strand
gagguugugcagagcaguu

SEQ ID NO: 116218 - RNA, 19 nt, Homo sapiens
  misc_RNA (1)...(19): siRNA sense strand
caaaaggaaaugcuucgaa

SEQ ID NO: 116219 - RNA, 19 nt, Homo sapiens
  misc_RNA (1)...(19): siRNA sense strand
ggugaaaucuggcauauua

SEQ ID NO: 116220 - RNA, 19 nt, Homo sapiens
  misc_RNA (1)...(19): siRNA sense strand
ggacgcagucucuuaaaua

SEQ ID NO: 116221 - RNA, 19 nt, Homo sapiens
  misc_RNA (1)...(19): siRNA sense strand
gacgcagucucuuaaauau

SEQ ID NO: 116222 - RNA, 19 nt, Homo sapiens
  misc_RNA (1)...(19): siRNA sense strand
gaagggaagggacaacuga

SEQ ID NO: 116223 - RNA, 19 nt, Homo sapiens
  misc_RNA (1)...(19): siRNA sense strand
cgcagucucuuaaauauga

SEQ ID NO: 116224 - RNA, 19 nt, Homo sapiens
  misc_RNA (1)...(19): siRNA sense strand
ggaggaugccgaaggaauu

SEQ ID NO: 116225 - RNA, 19 nt, Homo sapiens
  misc_RNA (1)...(19): siRNA sense strand
gcagagucauccuuuccaa

SEQ ID NO: 116226 - RNA, 19 nt, Homo sapiens
  misc_RNA (1)...(19): siRNA sense strand
gcacgaggacagcgucuau

SEQ ID NO: 116227 - RNA, 19 nt, Homo sapiens
  misc_RNA (1)...(19): siRNA sense strand
ugcgggaccuugacuuuaa

SEQ ID NO: 116228 - RNA, 19 nt, Homo sapiens
  misc_RNA (1)...(19): siRNA sense strand
gaaguaccacauccugcua

SEQ ID NO: 116229 - RNA, 19 nt, Homo sapiens
  misc_RNA (1)...(19): siRNA sense strand
gggacgcagucucuuaaau

SEQ ID NO: 116230 - RNA, 19 nt, Homo sapiens
  misc_RNA (1)...(19): siRNA sense strand
ggaccaccguucugaagag

SEQ ID NO: 116231 - RNA, 19 nt, Homo sapiens
  misc_RNA (1)...(19): siRNA sense strand
ucagauccauaucauagau

SEQ ID NO: 116232 - RNA, 19 nt, Homo sapiens
  misc_RNA (1)...(19): siRNA sense strand
gcuacaaccacucucauga

SEQ ID NO: 116233 - RNA, 19 nt, Homo sapiens
  misc_RNA (1)...(19): siRNA sense strand
ucauuuccuuggcugauaa

SEQ ID NO: 116234 - RNA, 19 nt, Homo sapiens
  misc_RNA (1)...(19): siRNA sense strand
aaugggagaugggaagaaa

SEQ ID NO: 116235 - RNA, 19 nt, Homo sapiens
  misc_RNA (1)...(19): siRNA sense strand
gacagcagagucauccuuu

SEQ ID NO: 116236 - RNA, 19 nt, Homo sapiens
  misc_RNA (1)...(19): siRNA sense strand
aaucagauccauaucauag

SEQ ID NO: 116237 - RNA, 19 nt, Homo sapiens
  misc_RNA (1)...(19): siRNA sense strand
ggacgaugcaccagugauc

SEQ ID NO: 116238 - RNA, 19 nt, Homo sapiens
  misc_RNA (1)...(19): siRNA sense strand
guugggacgcagucucuua

SEQ ID NO: 116239 - RNA, 19 nt, Homo sapiens
  misc_RNA (1)...(19): siRNA sense strand
acagcaaaguccugacaug

SEQ ID NO: 116240 - RNA, 19 nt, Homo sapiens
  misc_RNA (1)...(19): siRNA sense strand
gcccuucggccacuuggua

SEQ ID NO: 116241 - RNA, 19 nt, Homo sapiens
  misc_RNA (1)...(19): siRNA sense strand
ugacuuuaaucccaauaag

SEQ ID NO: 116242 - RNA, 19 nt, Homo sapiens
  misc_RNA (1)...(19): siRNA sense strand
gagccagaucuacugcaua

SEQ ID NO: 116243 - RNA, 19 nt, Homo sapiens
  misc_RNA (1)...(19): siRNA sense strand
gcugacccguggcuguuug

SEQ ID NO: 116244 - RNA, 19 nt, Homo sapiens
  misc_RNA (1)...(19): siRNA sense strand
gugcgggaccuugacuuua

SEQ ID NO: 116245 - RNA, 19 nt, Homo sapiens
  misc_RNA (1)...(19): siRNA sense strand
gaccaccguucugaagaga

SEQ ID NO: 116246 - RNA, 19 nt, Homo sapiens
  misc_RNA (1)...(19): siRNA sense strand
ggugcgggaccuugacuuu

SEQ ID NO: 116247 - RNA, 19 nt, Homo sapiens
  misc_RNA (1)...(19): siRNA sense strand
ggaggaccaccguucugaa

SEQ ID NO: 116248 - RNA, 19 nt, Homo sapiens
  misc_RNA (1)...(19): siRNA sense strand
gaggaugccgaaggaauug

SEQ ID NO: 116249 - RNA, 19 nt, Homo sapiens
  misc_RNA (1)...(19): siRNA sense strand
acaacgugaucgccaccua

SEQ ID NO: 116250 - RNA, 19 nt, Homo sapiens
  misc_RNA (1)...(19): siRNA sense strand
gcgggaccuugacuuuaau

SEQ ID NO: 116251 - RNA, 19 nt, Homo sapiens
  misc_RNA (1)...(19): siRNA sense strand
agccagaucuacugcauag

SEQ ID NO: 116252 - RNA, 19 nt, Homo sapiens
  misc_RNA (1)...(19): siRNA sense strand
ggaagggaagggacaacug

SEQ ID NO: 116253 - RNA, 19 nt, Homo sapiens
  misc_RNA (1)...(19): siRNA sense strand
cagcucagcgucccuggaa

SEQ ID NO: 116254 - RNA, 19 nt, Homo sapiens
  misc_RNA (1)...(19): siRNA sense strand
gcagaaacagaugccauuc

SEQ ID NO: 116255 - RNA, 19 nt, Homo sapiens
  misc_RNA (1)...(19): siRNA sense strand
cgggugaaaucuggcauau

SEQ ID NO: 116256 - RNA, 19 nt, Homo sapiens
  misc_RNA (1)...(19): siRNA sense strand
cagcaaaguccugacaugu

SEQ ID NO: 116257 - RNA, 19 nt, Homo sapiens
  misc_RNA (1)...(19): siRNA sense strand
gggaagggacaacugaagu

SEQ ID NO: 116258 - RNA, 19 nt, Homo sapiens
  misc_RNA (1)...(19): siRNA sense strand
ccaucaagcgggugaaauc

SEQ ID NO: 116259 - RNA, 19 nt, Homo sapiens
  misc_RNA (1)...(19): siRNA sense strand
gaggaccaccguucugaag

SEQ ID NO: 116260 - RNA, 19 nt, Homo sapiens
  misc_RNA (1)...(19): siRNA sense strand
agucauccuuuccaacaug

SEQ ID NO: 116261 - RNA, 19 nt, Homo sapiens
  misc_RNA (1)...(19): siRNA sense strand
uguggaggaugccgaagga

SEQ ID NO: 116262 - RNA, 19 nt, Homo sapiens
  misc_RNA (1)...(19): siRNA sense strand
cugacgaccugcuacaaca

SEQ ID NO: 116263 - RNA, 19 nt, Homo sapiens
  misc_RNA (1)...(19): siRNA sense strand
gcaugagccagaucuacug

SEQ ID NO: 116264 - RNA, 19 nt, Homo sapiens
  misc_RNA (1)...(19): siRNA sense strand
gcgggugaaaucuggcaua

SEQ ID NO: 116265 - RNA, 19 nt, Homo sapiens
  misc_RNA (1)...(19): siRNA sense strand
acuguaaggugaaguucug

SEQ ID NO: 116266 - RNA, 19 nt, Homo sapiens
  misc_RNA (1)...(19): siRNA sense strand
gagucauccuuuccaacau

SEQ ID NO: 116267 - RNA, 19 nt, Homo sapiens
  misc_RNA (1)...(19): siRNA sense strand
acgggaggcucgugaucaa

SEQ ID NO: 116268 - RNA, 19 nt, Homo sapiens
  misc_RNA (1)...(19): siRNA sense strand
ggagcaugagccagaucua

SEQ ID NO: 116269 - RNA, 19 nt, Homo sapiens
  misc_RNA (1)...(19): siRNA sense strand
gggaggcucgugaucaaca

SEQ ID NO: 116270 - RNA, 19 nt, Homo sapiens
  misc_RNA (1)...(19): siRNA sense strand
gaucuacgggcuggaguuc

SEQ ID NO: 116271 - RNA, 19 nt, Homo sapiens
  misc_RNA (1)...(19): siRNA sense strand
ucaaacugcagaaacagau

SEQ ID NO: 116272 - RNA, 19 nt, Homo sapiens
  misc_RNA (1)...(19): siRNA sense strand
ugagccagaucuacugcau

SEQ ID NO: 116273 - RNA, 19 nt, Homo sapiens
  misc_RNA (1)...(19): siRNA sense strand
gagcaugagccagaucuac

SEQ ID NO: 116274 - RNA, 19 nt, Homo sapiens
  misc_RNA (1)...(19): siRNA sense strand
ugggacacccggagcauga

SEQ ID NO: 116275 - RNA, 19 nt, Homo sapiens
  misc_RNA (1)...(19): siRNA sense strand
guaccacauccugcuauga

SEQ ID NO: 116276 - RNA, 19 nt, Homo sapiens
  misc_RNA (1)...(19): siRNA sense strand
aaaauguccuccuccauca

SEQ ID NO: 116277 - RNA, 19 nt, Homo sapiens
  misc_RNA (1)...(19): siRNA sense strand
agagucauccuuuccaaca

SEQ ID NO: 116278 - RNA, 19 nt, Homo sapiens
  misc_RNA (1)...(19): siRNA sense strand
gacgaccugcuacaacaga

SEQ ID NO: 116279 - RNA, 19 nt, Homo sapiens
  misc_RNA (1)...(19): siRNA sense strand
caaacugcagaaacagaug

SEQ ID NO: 116280 - RNA, 19 nt, Homo sapiens
  misc_RNA (1)...(19): siRNA sense strand
uuaaucccaauaagcagua

SEQ ID NO: 116281 - RNA, 19 nt, Homo sapiens
  misc_RNA (1)...(19): siRNA sense strand
gcagucucuuaaauaugau

SEQ ID NO: 116282 - RNA, 19 nt, Homo sapiens
  misc_RNA (1)...(19): siRNA sense strand
ggagaugggaagaaaauca

SEQ ID NO: 116283 - RNA, 19 nt, Homo sapiens
  misc_RNA (1)...(19): siRNA sense strand
gcuacaacagaacuucaga

SEQ ID NO: 116284 - RNA, 19 nt, Homo sapiens
  misc_RNA (1)...(19): siRNA sense strand
gcucaucgauuuccagaac

SEQ ID NO: 116285 - RNA, 19 nt, Homo sapiens
  misc_RNA (1)...(19): siRNA sense strand
gacagccucuuccagcuau

SEQ ID NO: 116286 - RNA, 19 nt, Homo sapiens
  misc_RNA (1)...(19): siRNA sense strand
ccaaggagcugcgcuucca

SEQ ID NO: 116287 - RNA, 19 nt, Homo sapiens
  misc_RNA (1)...(19): siRNA sense strand
cgcuggcgcucaucgauuu

SEQ ID NO: 116288 - RNA, 19 nt, Homo sapiens
  misc_RNA (1)...(19): siRNA sense strand
cgacagccucuuccagcua

SEQ ID NO: 116289 - RNA, 19 nt, Homo sapiens
  misc_RNA (1)...(19): siRNA sense strand
ccacaaggagaucgacuuc

SEQ ID NO: 116290 - RNA, 19 nt, Homo sapiens
  misc_RNA (1)...(19): siRNA sense strand
ccaccgaccacaaggagau

SEQ ID NO: 116291 - RNA, 19 nt, Homo sapiens
  misc_RNA (1)...(19): siRNA sense strand
gaagucaccuuugauacaa

SEQ ID NO: 116292 - RNA, 19 nt, Homo sapiens
  misc_RNA (1)...(19): siRNA sense strand
gcaaagccauccagaaggu

SEQ ID NO: 116293 - RNA, 19 nt, Homo sapiens
  misc_RNA (1)...(19): siRNA sense strand
ggaccuaccugcccgacuu

SEQ ID NO: 116294 - RNA, 19 nt, Homo sapiens
  misc_RNA (1)...(19): siRNA sense strand
ggagaggacuggguguuug

SEQ ID NO: 116295 - RNA, 19 nt, Homo sapiens
  misc_RNA (1)...(19): siRNA sense strand
ggaagucaccuuugauaca

SEQ ID NO: 116296 - RNA, 19 nt, Homo sapiens
  misc_RNA (1)...(19): siRNA sense strand
gaugggcaguuuaagaaga

SEQ ID NO: 116297 - RNA, 19 nt, Homo sapiens
  misc_RNA (1)...(19): siRNA sense strand
caagacgaccuacccgaua

SEQ ID NO: 116298 - RNA, 19 nt, Homo sapiens
  misc_RNA (1)...(19): siRNA sense strand
cgaccuacccgauagauga

SEQ ID NO: 116299 - RNA, 19 nt, Homo sapiens
  misc_RNA (1)...(19): siRNA sense strand
caagucggaugggcaguuu

SEQ ID NO: 116300 - RNA, 19 nt, Homo sapiens
  misc_RNA (1)...(19): siRNA sense strand
ccacacacgucauccaucu

SEQ ID NO: 116301 - RNA, 19 nt, Homo sapiens
  misc_RNA (1)...(19): siRNA sense strand
ggaggcaguucauauacuc

SEQ ID NO: 116302 - RNA, 19 nt, Homo sapiens
  misc_RNA (1)...(19): siRNA sense strand
uuaagaagacagccaguaa

SEQ ID NO: 116303 - RNA, 19 nt, Homo sapiens
  misc_RNA (1)...(19): siRNA sense strand
gcagaacagggccuacuuc

SEQ ID NO: 116304 - RNA, 19 nt, Homo sapiens
  misc_RNA (1)...(19): siRNA sense strand
ggguguuugucuccucuaa

SEQ ID NO: 116305 - RNA, 19 nt, Homo sapiens
  misc_RNA (1)...(19): siRNA sense strand
cggaugggcaguuuaagaa

SEQ ID NO: 116306 - RNA, 19 nt, Homo sapiens
  misc_RNA (1)...(19): siRNA sense strand
gugcuugguucacugacaa

SEQ ID NO: 116307 - RNA, 19 nt, Homo sapiens
  misc_RNA (1)...(19): siRNA sense strand
guguuugucuccucuaaag

SEQ ID NO: 116308 - RNA, 19 nt, Homo sapiens
  misc_RNA (1)...(19): siRNA sense strand
gaaggugguagcagaugga

SEQ ID NO: 116309 - RNA, 19 nt, Homo sapiens
  misc_RNA (1)...(19): siRNA sense strand
ucaagcaggcggugaagga

SEQ ID NO: 116310 - RNA, 19 nt, Homo sapiens
  misc_RNA (1)...(19): siRNA sense strand
gcagauggagcuggacuuc

SEQ ID NO: 116311 - RNA, 19 nt, Homo sapiens
  misc_RNA (1)...(19): siRNA sense strand
uccggaauaucaaauacaa

SEQ ID NO: 116312 - RNA, 19 nt, Homo sapiens
  misc_RNA (1)...(19): siRNA sense strand
caguacggcugcaccuuca

SEQ ID NO: 116313 - RNA, 19 nt, Homo sapiens
  misc_RNA (1)...(19): siRNA sense strand
acacacgucauccaucuug

SEQ ID NO: 116314 - RNA, 19 nt, Homo sapiens
  misc_RNA (1)...(19): siRNA sense strand
ggaauccgcggaggcaguu

SEQ ID NO: 116315 - RNA, 19 nt, Homo sapiens
  misc_RNA (1)...(19): siRNA sense strand
ccacgacaacuucaacauc

SEQ ID NO: 116316 - RNA, 19 nt, Homo sapiens
  misc_RNA (1)...(19): siRNA sense strand
aagacgaccuacccgauag

SEQ ID NO: 116317 - RNA, 19 nt, Homo sapiens
  misc_RNA (1)...(19): siRNA sense strand
gagaggacuggguguuugu

SEQ ID NO: 116318 - RNA, 19 nt, Homo sapiens
  misc_RNA (1)...(19): siRNA sense strand
caacuucaacaucgaggau

SEQ ID NO: 116319 - RNA, 19 nt, Homo sapiens
  misc_RNA (1)...(19): siRNA sense strand
ggccuguuccggaauauca

SEQ ID NO: 116320 - RNA, 19 nt, Homo sapiens
  misc_RNA (1)...(19): siRNA sense strand
aagaagacagccaguaaca

SEQ ID NO: 116321 - RNA, 19 nt, Homo sapiens
  misc_RNA (1)...(19): siRNA sense strand
cgcggaggcaguucauaua

SEQ ID NO: 116322 - RNA, 19 nt, Homo sapiens
  misc_RNA (1)...(19): siRNA sense strand
ccgcggaggcaguucauau

SEQ ID NO: 116323 - RNA, 19 nt, Homo sapiens
  misc_RNA (1)...(19): siRNA sense strand
guuccggaauaucaaauac

SEQ ID NO: 116324 - RNA, 19 nt, Homo sapiens
  misc_RNA (1)...(19): siRNA sense strand
uggcccagcucuuuaucug

SEQ ID NO: 116325 - RNA, 19 nt, Homo sapiens
  misc_RNA (1)...(19): siRNA sense strand
gagaccaugauccacaaug

SEQ ID NO: 116326 - RNA, 19 nt, Homo sapiens
  misc_RNA (1)...(19): siRNA sense strand
gaccugugcuugguucacu

SEQ ID NO: 116327 - RNA, 19 nt, Homo sapiens
  misc_RNA (1)...(19): siRNA sense strand
ggggaagucaccuuugaua

SEQ ID NO: 116328 - RNA, 19 nt, Homo sapiens
  misc_RNA (1)...(19): siRNA sense strand
aggcaaagccauccagaag

SEQ ID NO: 116329 - RNA, 19 nt, Homo sapiens
  misc_RNA (1)...(19): siRNA sense strand
agucggaugggcaguuuaa

SEQ ID NO: 116330 - RNA, 19 nt, Homo sapiens
  misc_RNA (1)...(19): siRNA sense strand
ugaaguggagcccaucauc

SEQ ID NO: 116331 - RNA, 19 nt, Homo sapiens
  misc_RNA (1)...(19): siRNA sense strand
cgauagaugagaccaugau

SEQ ID NO: 116332 - RNA, 19 nt, Homo sapiens
  misc_RNA (1)...(19): siRNA sense strand
acgccgaucucacggauac

SEQ ID NO: 116333 - RNA, 19 nt, Homo sapiens
  misc_RNA (1)...(19): siRNA sense strand
aaggagaccugugcuuggu

SEQ ID NO: 116334 - RNA, 19 nt, Homo sapiens
  misc_RNA (1)...(19): siRNA sense strand
gggaagucaccuuugauac

SEQ ID NO: 116335 - RNA, 19 nt, Homo sapiens
  misc_RNA (1)...(19): siRNA sense strand
ugccuggccucauccacaa

SEQ ID NO: 116336 - RNA, 19 nt, Homo sapiens
  misc_RNA (1)...(19): siRNA sense strand
uagaugagaccaugaucca

SEQ ID NO: 116337 - RNA, 19 nt, Homo sapiens
  misc_RNA (1)...(19): siRNA sense strand
gcacagaggcuaaggaaga

SEQ ID NO: 116338 - RNA, 19 nt, Homo sapiens
  misc_RNA (1)...(19): siRNA sense strand
ggagcaagacagccaauua

SEQ ID NO: 116339 - RNA, 19 nt, Homo sapiens
  misc_RNA (1)...(19): siRNA sense strand
agaaagcccugaagaagaa

SEQ ID NO: 116340 - RNA, 19 nt, Homo sapiens
  misc_RNA (1)...(19): siRNA sense strand
gucaagaacuuccagauug

SEQ ID NO: 116341 - RNA, 19 nt, Homo sapiens
  misc_RNA (1)...(19): siRNA sense strand
gaagaaaggcacucccaaa

SEQ ID NO: 116342 - RNA, 19 nt, Homo sapiens
  misc_RNA (1)...(19): siRNA sense strand
ggaggcagcuacggugaua

SEQ ID NO: 116343 - RNA, 19 nt, Homo sapiens
  misc_RNA (1)...(19): siRNA sense strand
ucauagaacugcacaacaa

SEQ ID NO: 116344 - RNA, 19 nt, Homo sapiens
  misc_RNA (1)...(19): siRNA sense strand
cagcuacggugauaaagaa

SEQ ID NO: 116345 - RNA, 19 nt, Homo sapiens
  misc_RNA (1)...(19): siRNA sense strand
ccaauuaccucaucuccau

SEQ ID NO: 116346 - RNA, 19 nt, Homo sapiens
  misc_RNA (1)...(19): siRNA sense strand
ugagaaagaccaagaagaa

SEQ ID NO: 116347 - RNA, 19 nt, Homo sapiens
  misc_RNA (1)...(19): siRNA sense strand
ggaaggcaguccugacaag

SEQ ID NO: 116348 - RNA, 19 nt, Homo sapiens
  misc_RNA (1)...(19): siRNA sense strand
gcauguaucccuccuacuu

SEQ ID NO: 116349 - RNA, 19 nt, Homo sapiens
  misc_RNA (1)...(19): siRNA sense strand
ccucuuggcuggcaggaaa

SEQ ID NO: 116350 - RNA, 19 nt, Homo sapiens
  misc_RNA (1)...(19): siRNA sense strand
uggcagcugugaucuauga

SEQ ID NO: 116351 - RNA, 19 nt, Homo sapiens
  misc_RNA (1)...(19): siRNA sense strand
ucaagaacuuccagauugu

SEQ ID NO: 116352 - RNA, 19 nt, Homo sapiens
  misc_RNA (1)...(19): siRNA sense strand
caagaaagcccugaagaag

SEQ ID NO: 116353 - RNA, 19 nt, Homo sapiens
  misc_RNA (1)...(19): siRNA sense strand
gagaaagaccaagaagaaa

SEQ ID NO: 116354 - RNA, 19 nt, Homo sapiens
  misc_RNA (1)...(19): siRNA sense strand
gagcccagcagccauguuu

SEQ ID NO: 116355 - RNA, 19 nt, Homo sapiens
  misc_RNA (1)...(19): siRNA sense strand
ggaccaagaugagaaagac

SEQ ID NO: 116356 - RNA, 19 nt, Homo sapiens
  misc_RNA (1)...(19): siRNA sense strand
ggaagaggaggcagaggaa

SEQ ID NO: 116357 - RNA, 19 nt, Homo sapiens
  misc_RNA (1)...(19): siRNA sense strand
ccaucgcccucuccaguuu

SEQ ID NO: 116358 - RNA, 19 nt, Homo sapiens
  misc_RNA (1)...(19): siRNA sense strand
ggacgaggaggacgaggaa

SEQ ID NO: 116359 - RNA, 19 nt, Homo sapiens
  misc_RNA (1)...(19): siRNA sense strand
gaaagaccaagaagaaagg

SEQ ID NO: 116360 - RNA, 19 nt, Homo sapiens
  misc_RNA (1)...(19): siRNA sense strand
acaagaaagcccugaagaa

SEQ ID NO: 116361 - RNA, 19 nt, Homo sapiens
  misc_RNA (1)...(19): siRNA sense strand
gacaagaaagcccugaaga

SEQ ID NO: 116362 - RNA, 19 nt, Homo sapiens
  misc_RNA (1)...(19): siRNA sense strand
cagcguggguacagcacua

SEQ ID NO: 116363 - RNA, 19 nt, Homo sapiens
  misc_RNA (1)...(19): siRNA sense strand
gcagcuacggugauaaaga

SEQ ID NO: 116364 - RNA, 19 nt, Homo sapiens
  misc_RNA (1)...(19): siRNA sense strand
gauaaagaacagcaaucaa

SEQ ID NO: 116365 - RNA, 19 nt, Homo sapiens
  misc_RNA (1)...(19): siRNA sense strand
gagcaagacagccaauuac

SEQ ID NO: 116366 - RNA, 19 nt, Homo sapiens
  misc_RNA (1)...(19): siRNA sense strand
ccgaaaccucugcguguua

SEQ ID NO: 116367 - RNA, 19 nt, Homo sapiens
  misc_RNA (1)...(19): siRNA sense strand
gggcaaagccaaaggaaaa

SEQ ID NO: 116368 - RNA, 19 nt, Homo sapiens
  misc_RNA (1)...(19): siRNA sense strand
aggcaguccugacaagaaa

SEQ ID NO: 116369 - RNA, 19 nt, Homo sapiens
  misc_RNA (1)...(19): siRNA sense strand
cacagaggcuaaggaagaa

SEQ ID NO: 116370 - RNA, 19 nt, Homo sapiens
  misc_RNA (1)...(19): siRNA sense strand
cgaaaccucugcguguuag

SEQ ID NO: 116371 - RNA, 19 nt, Homo sapiens
  misc_RNA (1)...(19): siRNA sense strand
aagaaagcccugaagaaga

SEQ ID NO: 116372 - RNA, 19 nt, Homo sapiens
  misc_RNA (1)...(19): siRNA sense strand
cgaggaaggaggaagaaga

SEQ ID NO: 116373 - RNA, 19 nt, Homo sapiens
  misc_RNA (1)...(19): siRNA sense strand
gaaggcaguccugacaaga

SEQ ID NO: 116374 - RNA, 19 nt, Homo sapiens
  misc_RNA (1)...(19): siRNA sense strand
gaagaggaggcagaggaaa

SEQ ID NO: 116375 - RNA, 19 nt, Homo sapiens
  misc_RNA (1)...(19): siRNA sense strand
cagugggcaugaagaagaa

SEQ ID NO: 116376 - RNA, 19 nt, Homo sapiens
  misc_RNA (1)...(19): siRNA sense strand
gcagcugugaucuaugaaa

SEQ ID NO: 116377 - RNA, 19 nt, Homo sapiens
  misc_RNA (1)...(19): siRNA sense strand
gacagccaauuaccucauc

SEQ ID NO: 116378 - RNA, 19 nt, Homo sapiens
  misc_RNA (1)...(19): siRNA sense strand
ugacagugggcaugaagaa

SEQ ID NO: 116379 - RNA, 19 nt, Homo sapiens
  misc_RNA (1)...(19): siRNA sense strand
ccaagaagccccugagaga

SEQ ID NO: 116380 - RNA, 19 nt, Homo sapiens
  misc_RNA (1)...(19): siRNA sense strand
ggacgaggaggaggaggaa

SEQ ID NO: 116381 - RNA, 19 nt, Homo sapiens
  misc_RNA (1)...(19): siRNA sense strand
agaaagaccaagaagaaag

SEQ ID NO: 116382 - RNA, 19 nt, Homo sapiens
  misc_RNA (1)...(19): siRNA sense strand
gcuccuacacccucaacuu

SEQ ID NO: 116383 - RNA, 19 nt, Homo sapiens
  misc_RNA (1)...(19): siRNA sense strand
gcuggagagccucauagaa

SEQ ID NO: 116384 - RNA, 19 nt, Homo sapiens
  misc_RNA (1)...(19): siRNA sense strand
gcugugaucuaugaaacca

SEQ ID NO: 116385 - RNA, 19 nt, Homo sapiens
  misc_RNA (1)...(19): siRNA sense strand
caucgacccuaccaaucug

SEQ ID NO: 116386 - RNA, 19 nt, Homo sapiens
  misc_RNA (1)...(19): siRNA sense strand
gaggaaggaggaagaagag

SEQ ID NO: 116387 - RNA, 19 nt, Homo sapiens
  misc_RNA (1)...(19): siRNA sense strand
cagcugugaucuaugaaac

SEQ ID NO: 116388 - RNA, 19 nt, Homo sapiens
  misc_RNA (1)...(19): siRNA sense strand
ccucugcguguuaggaaua

SEQ ID NO: 116389 - RNA, 19 nt, Homo sapiens
  misc_RNA (1)...(19): siRNA sense strand
gcuucacggucuuugacaa

SEQ ID NO: 116390 - RNA, 19 nt, Homo sapiens
  misc_RNA (1)...(19): siRNA sense strand
acagugggcaugaagaaga

SEQ ID NO: 116391 - RNA, 19 nt, Homo sapiens
  misc_RNA (1)...(19): siRNA sense strand
gaugagaaagaccaagaag

SEQ ID NO: 116392 - RNA, 19 nt, Homo sapiens
  misc_RNA (1)...(19): siRNA sense strand
ucgggaagcugagguccaa

SEQ ID NO: 116393 - RNA, 19 nt, Homo sapiens
  misc_RNA (1)...(19): siRNA sense strand
ggugugggccucugacagu

SEQ ID NO: 116394 - RNA, 19 nt, Homo sapiens
  misc_RNA (1)...(19): siRNA sense strand
gcgcgaggaaggaggaaga

SEQ ID NO: 116395 - RNA, 19 nt, Homo sapiens
  misc_RNA (1)...(19): siRNA sense strand
agucaagaacuuccagauu

SEQ ID NO: 116396 - RNA, 19 nt, Homo sapiens
  misc_RNA (1)...(19): siRNA sense strand
gcaagacagccaauuaccu

SEQ ID NO: 116397 - RNA, 19 nt, Homo sapiens
  misc_RNA (1)...(19): siRNA sense strand
gagcuccgcagaccugaag

SEQ ID NO: 116398 - RNA, 19 nt, Homo sapiens
  misc_RNA (1)...(19): siRNA sense strand
aagaaaggcacucccaaag

SEQ ID NO: 116399 - RNA, 19 nt, Homo sapiens
  misc_RNA (1)...(19): siRNA sense strand
cggcacagaggcuaaggaa

SEQ ID NO: 116400 - RNA, 19 nt, Homo sapiens
  misc_RNA (1)...(19): siRNA sense strand
acaagccaccugucuggaa

SEQ ID NO: 116401 - RNA, 19 nt, Homo sapiens
  misc_RNA (1)...(19): siRNA sense strand
ggagagccucauagaacug

SEQ ID NO: 116402 - RNA, 19 nt, Homo sapiens
  misc_RNA (1)...(19): siRNA sense strand
uggagagccucauagaacu

SEQ ID NO: 116403 - RNA, 19 nt, Homo sapiens
  misc_RNA (1)...(19): siRNA sense strand
ccaaaggcgcgaggaagga

SEQ ID NO: 116404 - RNA, 19 nt, Homo sapiens
  misc_RNA (1)...(19): siRNA sense strand
gggaccaagaugagaaaga

SEQ ID NO: 116405 - RNA, 19 nt, Homo sapiens
  misc_RNA (1)...(19): siRNA sense strand
cuggugcgcuggcagaaca

SEQ ID NO: 116406 - RNA, 19 nt, Homo sapiens
  misc_RNA (1)...(19): siRNA sense strand
gcaugagugcggagaacga

SEQ ID NO: 116407 - RNA, 19 nt, Homo sapiens
  misc_RNA (1)...(19): siRNA sense strand
ggugauaaagaacagcaau

SEQ ID NO: 116408 - RNA, 19 nt, Homo sapiens
  misc_RNA (1)...(19): siRNA sense strand
gggaaggcaguccugacaa

SEQ ID NO: 116409 - RNA, 19 nt, Homo sapiens
  misc_RNA (1)...(19): siRNA sense strand
ggaggcagaggaaaagaaa

SEQ ID NO: 116410 - RNA, 19 nt, Homo sapiens
  misc_RNA (1)...(19): siRNA sense strand
aagaugagaaagaccaaga

SEQ ID NO: 116411 - RNA, 19 nt, Homo sapiens
  misc_RNA (1)...(19): siRNA sense strand
ccaucgacccuaccaaucu

SEQ ID NO: 116412 - RNA, 19 nt, Homo sapiens
  misc_RNA (1)...(19): siRNA sense strand
aggcagcuacggugauaaa

SEQ ID NO: 116413 - RNA, 19 nt, Homo sapiens
  misc_RNA (1)...(19): siRNA sense strand
gaaaagaaagagaaaaucc

SEQ ID NO: 116414 - RNA, 19 nt, Homo sapiens
  misc_RNA (1)...(19): siRNA sense strand
guggguacagcacuaaugu

SEQ ID NO: 116415 - RNA, 19 nt, Homo sapiens
  misc_RNA (1)...(19): siRNA sense strand
gcacacaagucacccaaua

SEQ ID NO: 116416 - RNA, 19 nt, Homo sapiens
  misc_RNA (1)...(19): siRNA sense strand
gaacaggagucgcuacuga

SEQ ID NO: 116417 - RNA, 19 nt, Homo sapiens
  misc_RNA (1)...(19): siRNA sense strand
ggacuucugcuuuccauuu

SEQ ID NO: 116418 - RNA, 19 nt, Homo sapiens
  misc_RNA (1)...(19): siRNA sense strand
ggcaugagcucgcugcuau

SEQ ID NO: 116419 - RNA, 19 nt, Homo sapiens
  misc_RNA (1)...(19): siRNA sense strand
gcaccaaguucaccaucuu

SEQ ID NO: 116420 - RNA, 19 nt, Homo sapiens
  misc_RNA (1)...(19): siRNA sense strand
gacuucugcuuuccauuua

SEQ ID NO: 116421 - RNA, 19 nt, Homo sapiens
  misc_RNA (1)...(19): siRNA sense strand
gaagaagacuuggaaaaga

SEQ ID NO: 116422 - RNA, 19 nt, Homo sapiens
  misc_RNA (1)...(19): siRNA sense strand
gagcaaaacuucuaauuac

SEQ ID NO: 116423 - RNA, 19 nt, Homo sapiens
  misc_RNA (1)...(19): siRNA sense strand
cagaagcaguguucaggaa

SEQ ID NO: 116424 - RNA, 19 nt, Homo sapiens
  misc_RNA (1)...(19): siRNA sense strand
gaagcaguguucaggaauc

SEQ ID NO: 116425 - RNA, 19 nt, Homo sapiens
  misc_RNA (1)...(19): siRNA sense strand
ggagcaaaacuucuaauua

SEQ ID NO: 116426 - RNA, 19 nt, Homo sapiens
  misc_RNA (1)...(19): siRNA sense strand
gauggugacuguguauaug

SEQ ID NO: 116427 - RNA, 19 nt, Homo sapiens
  misc_RNA (1)...(19): siRNA sense strand
gagcauuuaaccaggaaua

SEQ ID NO: 116428 - RNA, 19 nt, Homo sapiens
  misc_RNA (1)...(19): siRNA sense strand
gcacggacagcgaccauau

SEQ ID NO: 116429 - RNA, 19 nt, Homo sapiens
  misc_RNA (1)...(19): siRNA sense strand
gcaucugcuuguccaguuu

SEQ ID NO: 116430 - RNA, 19 nt, Homo sapiens
  misc_RNA (1)...(19): siRNA sense strand
aaagucagauccaaugucu

SEQ ID NO: 116431 - RNA, 19 nt, Homo sapiens
  misc_RNA (1)...(19): siRNA sense strand
uggaauggauggugacugu

SEQ ID NO: 116432 - RNA, 19 nt, Homo sapiens
  misc_RNA (1)...(19): siRNA sense strand
gugcagagggugagaguga

SEQ ID NO: 116433 - RNA, 19 nt, Homo sapiens
  misc_RNA (1)...(19): siRNA sense strand
gcuuguccaguuucaauua

SEQ ID NO: 116434 - RNA, 19 nt, Homo sapiens
  misc_RNA (1)...(19): siRNA sense strand
ggauggugacuguguauau

SEQ ID NO: 116435 - RNA, 19 nt, Homo sapiens
  misc_RNA (1)...(19): siRNA sense strand
gacaaacaaggguugcuuu

SEQ ID NO: 116436 - RNA, 19 nt, Homo sapiens
  misc_RNA (1)...(19): siRNA sense strand
gaauggauggugacugugu

SEQ ID NO: 116437 - RNA, 19 nt, Homo sapiens
  misc_RNA (1)...(19): siRNA sense strand
caccauggacuucugcuuu

SEQ ID NO: 116438 - RNA, 19 nt, Homo sapiens
  misc_RNA (1)...(19): siRNA sense strand
aaaggaagaagacuuggaa

SEQ ID NO: 116439 - RNA, 19 nt, Homo sapiens
  misc_RNA (1)...(19): siRNA sense strand
uaugggagaugcacacaag

SEQ ID NO: 116440 - RNA, 19 nt, Homo sapiens
  misc_RNA (1)...(19): siRNA sense strand
ggacaaacaaggguugcuu

SEQ ID NO: 116441 - RNA, 19 nt, Homo sapiens
  misc_RNA (1)...(19): siRNA sense strand
ggaccaaacccuggaaugg

SEQ ID NO: 116442 - RNA, 19 nt, Homo sapiens
  misc_RNA (1)...(19): siRNA sense strand
guuaugagcccaacgucuu

SEQ ID NO: 116443 - RNA, 19 nt, Homo sapiens
  misc_RNA (1)...(19): siRNA sense strand
gaaaagaagcagcgacaga

SEQ ID NO: 116444 - RNA, 19 nt, Homo sapiens
  misc_RNA (1)...(19): siRNA sense strand
gaaaaugacugugauucuc

SEQ ID NO: 116445 - RNA, 19 nt, Homo sapiens
  misc_RNA (1)...(19): siRNA sense strand
gaccaaacccuggaaugga

SEQ ID NO: 116446 - RNA, 19 nt, Homo sapiens
  misc_RNA (1)...(19): siRNA sense strand
ccaaaucguggaucccaaa

SEQ ID NO: 116447 - RNA, 19 nt, Homo sapiens
  misc_RNA (1)...(19): siRNA sense strand
gcuacugagucguuaccaa

SEQ ID NO: 116448 - RNA, 19 nt, Homo sapiens
  misc_RNA (1)...(19): siRNA sense strand
acacaagucacccaauaug

SEQ ID NO: 116449 - RNA, 19 nt, Homo sapiens
  misc_RNA (1)...(19): siRNA sense strand
gcaaagucagauccaaugu

SEQ ID NO: 116450 - RNA, 19 nt, Homo sapiens
  misc_RNA (1)...(19): siRNA sense strand
agacaauuccgaugcagaa

SEQ ID NO: 116451 - RNA, 19 nt, Homo sapiens
  misc_RNA (1)...(19): siRNA sense strand
gggagcauuuaaccaggaa

SEQ ID NO: 116452 - RNA, 19 nt, Homo sapiens
  misc_RNA (1)...(19): siRNA sense strand
ccaaguucaccaucuuuga

SEQ ID NO: 116453 - RNA, 19 nt, Homo sapiens
  misc_RNA (1)...(19): siRNA sense strand
cagcagcacacaacgaaga

SEQ ID NO: 116454 - RNA, 19 nt, Homo sapiens
  misc_RNA (1)...(19): siRNA sense strand
ggcaaagucagauccaaug

SEQ ID NO: 116455 - RNA, 19 nt, Homo sapiens
  misc_RNA (1)...(19): siRNA sense strand
gaaccaacagccagaacca

SEQ ID NO: 116456 - RNA, 19 nt, Homo sapiens
  misc_RNA (1)...(19): siRNA sense strand
ggacagaagcaguguucag

SEQ ID NO: 116457 - RNA, 19 nt, Homo sapiens
  misc_RNA (1)...(19): siRNA sense strand
gggcgaaagagaagaagga

SEQ ID NO: 116458 - RNA, 19 nt, Homo sapiens
  misc_RNA (1)...(19): siRNA sense strand
gggcaaagucagauccaau

SEQ ID NO: 116459 - RNA, 19 nt, Homo sapiens
  misc_RNA (1)...(19): siRNA sense strand
gaauacugcccggaucaga

SEQ ID NO: 116460 - RNA, 19 nt, Homo sapiens
  misc_RNA (1)...(19): siRNA sense strand
gaaagugucagaggcacau

SEQ ID NO: 116461 - RNA, 19 nt, Homo sapiens
  misc_RNA (1)...(19): siRNA sense strand
gggagaugcacacaaguca

SEQ ID NO: 116462 - RNA, 19 nt, Homo sapiens
  misc_RNA (1)...(19): siRNA sense strand
uuaugagcccaacgucuua

SEQ ID NO: 116463 - RNA, 19 nt, Homo sapiens
  misc_RNA (1)...(19): siRNA sense strand
aauggauggugacugugua

SEQ ID NO: 116464 - RNA, 19 nt, Homo sapiens
  misc_RNA (1)...(19): siRNA sense strand
gcggacagaagcaguguuc

SEQ ID NO: 116465 - RNA, 19 nt, Homo sapiens
  misc_RNA (1)...(19): siRNA sense strand
ccaaacaccaagaacaucu

SEQ ID NO: 116466 - RNA, 19 nt, Homo sapiens
  misc_RNA (1)...(19): siRNA sense strand
agucagauccaaugucuuc

SEQ ID NO: 116467 - RNA, 19 nt, Homo sapiens
  misc_RNA (1)...(19): siRNA sense strand
aagaagacuuggaaaagaa

SEQ ID NO: 116468 - RNA, 19 nt, Homo sapiens
  misc_RNA (1)...(19): siRNA sense strand
caugagcucgcugcuauga

SEQ ID NO: 116469 - RNA, 19 nt, Homo sapiens
  misc_RNA (1)...(19): siRNA sense strand
ggaagaagacuuggaaaag

SEQ ID NO: 116470 - RNA, 19 nt, Homo sapiens
  misc_RNA (1)...(19): siRNA sense strand
agcccaacgucuuaggaua

SEQ ID NO: 116471 - RNA, 19 nt, Homo sapiens
  misc_RNA (1)...(19): siRNA sense strand
ggacaauuucgugggcaaa

SEQ ID NO: 116472 - RNA, 19 nt, Homo sapiens
  misc_RNA (1)...(19): siRNA sense strand
cagcacacaacgaagaguu

SEQ ID NO: 116473 - RNA, 19 nt, Homo sapiens
  misc_RNA (1)...(19): siRNA sense strand
ccaaaaggaagaagacuug

SEQ ID NO: 116474 - RNA, 19 nt, Homo sapiens
  misc_RNA (1)...(19): siRNA sense strand
gagugggcccagacacauu

SEQ ID NO: 116475 - RNA, 19 nt, Homo sapiens
  misc_RNA (1)...(19): siRNA sense strand
cagaaccagcgaaucaaug

SEQ ID NO: 116476 - RNA, 19 nt, Homo sapiens
  misc_RNA (1)...(19): siRNA sense strand
ccagaaccagcgaaucaau

SEQ ID NO: 116477 - RNA, 19 nt, Homo sapiens
  misc_RNA (1)...(19): siRNA sense strand
caaagucagauccaauguc

SEQ ID NO: 116478 - RNA, 19 nt, Homo sapiens
  misc_RNA (1)...(19): siRNA sense strand
gaaagagaagaaggagcaa

SEQ ID NO: 116479 - RNA, 19 nt, Homo sapiens
  misc_RNA (1)...(19): siRNA sense strand
cuaugaggcugcagaagcu

SEQ ID NO: 116480 - RNA, 19 nt, Homo sapiens
  misc_RNA (1)...(19): siRNA sense strand
accaaacccuggaauggau

SEQ ID NO: 116481 - RNA, 19 nt, Homo sapiens
  misc_RNA (1)...(19): siRNA sense strand
caaggagaacggugucuac

SEQ ID NO: 116482 - RNA, 19 nt, Homo sapiens
  misc_RNA (1)...(19): siRNA sense strand
caauguccagccacuaaau

SEQ ID NO: 116483 - RNA, 19 nt, Homo sapiens
  misc_RNA (1)...(19): siRNA sense strand
gggcaugagcucgcugcua

SEQ ID NO: 116484 - RNA, 19 nt, Homo sapiens
  misc_RNA (1)...(19): siRNA sense strand
ucaauguccagccacuaaa

SEQ ID NO: 116485 - RNA, 19 nt, Homo sapiens
  misc_RNA (1)...(19): siRNA sense strand
acacauugaugagagacau

SEQ ID NO: 116486 - RNA, 19 nt, Homo sapiens
  misc_RNA (1)...(19): siRNA sense strand
gcuggaggaggacauggaa

SEQ ID NO: 116487 - RNA, 19 nt, Homo sapiens
  misc_RNA (1)...(19): siRNA sense strand
ucuacacgcucaauuucca

SEQ ID NO: 116488 - RNA, 19 nt, Homo sapiens
  misc_RNA (1)...(19): siRNA sense strand
agaaccagcgaaucaaugu

SEQ ID NO: 116489 - RNA, 19 nt, Homo sapiens
  misc_RNA (1)...(19): siRNA sense strand
gagcccaacgucuuaggau

SEQ ID NO: 116490 - RNA, 19 nt, Homo sapiens
  misc_RNA (1)...(19): siRNA sense strand
caccaaguucaccaucuuu

SEQ ID NO: 116491 - RNA, 19 nt, Homo sapiens
  misc_RNA (1)...(19): siRNA sense strand
cagacacauucaccaugga

SEQ ID NO: 116492 - RNA, 19 nt, Homo sapiens
  misc_RNA (1)...(19): siRNA sense strand
gcugggcgaaagagaagaa

SEQ ID NO: 116493 - RNA, 19 nt, Homo sapiens
  misc_RNA (1)...(19): siRNA sense strand
ggaaaaugacugugauucu

SEQ ID NO: 116494 - RNA, 19 nt, Homo sapiens
  misc_RNA (1)...(19): siRNA sense strand
cauuuaaccaggaauacug

SEQ ID NO: 116495 - RNA, 19 nt, Homo sapiens
  misc_RNA (1)...(19): siRNA sense strand
gaacguacuuggauuuaaa

SEQ ID NO: 116496 - RNA, 19 nt, Homo sapiens
  misc_RNA (1)...(19): siRNA sense strand
ggaccaaguuuacaguuua

SEQ ID NO: 116497 - RNA, 19 nt, Homo sapiens
  misc_RNA (1)...(19): siRNA sense strand
ccacagcaaugucaucuua

SEQ ID NO: 116498 - RNA, 19 nt, Homo sapiens
  misc_RNA (1)...(19): siRNA sense strand
ucaguaagcuccucuguug

SEQ ID NO: 116499 - RNA, 19 nt, Homo sapiens
  misc_RNA (1)...(19): siRNA sense strand
acaguaagaugucggauaa

SEQ ID NO: 116500 - RNA, 19 nt, Homo sapiens
  misc_RNA (1)...(19): siRNA sense strand
ugaggagacugauggaaua

SEQ ID NO: 116501 - RNA, 19 nt, Homo sapiens
  misc_RNA (1)...(19): siRNA sense strand
gauuacaacuacccacuuu

SEQ ID NO: 116502 - RNA, 19 nt, Homo sapiens
  misc_RNA (1)...(19): siRNA sense strand
acaguaagcuggcguguga

SEQ ID NO: 116503 - RNA, 19 nt, Homo sapiens
  misc_RNA (1)...(19): siRNA sense strand
gaacagaacuauggaaaau

SEQ ID NO: 116504 - RNA, 19 nt, Homo sapiens
  misc_RNA (1)...(19): siRNA sense strand
aggcuaagcuggauuauca

SEQ ID NO: 116505 - RNA, 19 nt, Homo sapiens
  misc_RNA (1)...(19): siRNA sense strand
caugauaucucugaaagug

SEQ ID NO: 116506 - RNA, 19 nt, Homo sapiens
  misc_RNA (1)...(19): siRNA sense strand
gggaccaaguuuacaguuu

SEQ ID NO: 116507 - RNA, 19 nt, Homo sapiens
  misc_RNA (1)...(19): siRNA sense strand
ugauuuaucucgugaagga

SEQ ID NO: 116508 - RNA, 19 nt, Homo sapiens
  misc_RNA (1)...(19): siRNA sense strand
uaucagaggcuacuacuug

SEQ ID NO: 116509 - RNA, 19 nt, Homo sapiens
  misc_RNA (1)...(19): siRNA sense strand
aaacgaacguacuuggauu

SEQ ID NO: 116510 - RNA, 19 nt, Homo sapiens
  misc_RNA (1)...(19): siRNA sense strand
gaaacgaacguacuuggau

SEQ ID NO: 116511 - RNA, 19 nt, Homo sapiens
  misc_RNA (1)...(19): siRNA sense strand
gaacuucgaugaggagacu

SEQ ID NO: 116512 - RNA, 19 nt, Homo sapiens
  misc_RNA (1)...(19): siRNA sense strand
caucuuacaugguauugau

SEQ ID NO: 116513 - RNA, 19 nt, Homo sapiens
  misc_RNA (1)...(19): siRNA sense strand
ccaacuaccuuaucuccau

SEQ ID NO: 116514 - RNA, 19 nt, Homo sapiens
  misc_RNA (1)...(19): siRNA sense strand
gcugccaucuccuaugaaa

SEQ ID NO: 116515 - RNA, 19 nt, Homo sapiens
  misc_RNA (1)...(19): siRNA sense strand
ggaagaagaugcugaaaac

SEQ ID NO: 116516 - RNA, 19 nt, Homo sapiens
  misc_RNA (1)...(19): siRNA sense strand
caacuaccuuaucuccauu

SEQ ID NO: 116517 - RNA, 19 nt, Homo sapiens
  misc_RNA (1)...(19): siRNA sense strand
gaccaaguuuacaguuuau

SEQ ID NO: 116518 - RNA, 19 nt, Homo sapiens
  misc_RNA (1)...(19): siRNA sense strand
ccagucagcauguuuagaa

SEQ ID NO: 116519 - RNA, 19 nt, Homo sapiens
  misc_RNA (1)...(19): siRNA sense strand
cgaacguacuuggauuuaa

SEQ ID NO: 116520 - RNA, 19 nt, Homo sapiens
  misc_RNA (1)...(19): siRNA sense strand
uaccuuaucuccauugauc

SEQ ID NO: 116521 - RNA, 19 nt, Homo sapiens
  misc_RNA (1)...(19): siRNA sense strand
ccauugauccaguugauuu

SEQ ID NO: 116522 - RNA, 19 nt, Homo sapiens
  misc_RNA (1)...(19): siRNA sense strand
gacaggcuaagcuggauua

SEQ ID NO: 116523 - RNA, 19 nt, Homo sapiens
  misc_RNA (1)...(19): siRNA sense strand
gcaucggucuuucuagcuu

SEQ ID NO: 116524 - RNA, 19 nt, Homo sapiens
  misc_RNA (1)...(19): siRNA sense strand
uaagcuggcgugugaauga

SEQ ID NO: 116525 - RNA, 19 nt, Homo sapiens
  misc_RNA (1)...(19): siRNA sense strand
gucagcauguuuagaaaga

SEQ ID NO: 116526 - RNA, 19 nt, Homo sapiens
  misc_RNA (1)...(19): siRNA sense strand
gaaaccagacgaaguucau

SEQ ID NO: 116527 - RNA, 19 nt, Homo sapiens
  misc_RNA (1)...(19): siRNA sense strand
cgaaguucaugcuccauca

SEQ ID NO: 116528 - RNA, 19 nt, Homo sapiens
  misc_RNA (1)...(19): siRNA sense strand
cagaacagaacuauggaaa

SEQ ID NO: 116529 - RNA, 19 nt, Homo sapiens
  misc_RNA (1)...(19): siRNA sense strand
gcuccucuguuguggaaga

SEQ ID NO: 116530 - RNA, 19 nt, Homo sapiens
  misc_RNA (1)...(19): siRNA sense strand
gcaucaagccagaauucaa

SEQ ID NO: 116531 - RNA, 19 nt, Homo sapiens
  misc_RNA (1)...(19): siRNA sense strand
ggauuuaaagguccuagga

SEQ ID NO: 116532 - RNA, 19 nt, Homo sapiens
  misc_RNA (1)...(19): siRNA sense strand
uagacgaccuggaggacuu

SEQ ID NO: 116533 - RNA, 19 nt, Homo sapiens
  misc_RNA (1)...(19): siRNA sense strand
guucaugcuccaucaguaa

SEQ ID NO: 116534 - RNA, 19 nt, Homo sapiens
  misc_RNA (1)...(19): siRNA sense strand
gagaagaggcaaaggaaaa

SEQ ID NO: 116535 - RNA, 19 nt, Homo sapiens
  misc_RNA (1)...(19): siRNA sense strand
ggagacugauggaauaucc

SEQ ID NO: 116536 - RNA, 19 nt, Homo sapiens
  misc_RNA (1)...(19): siRNA sense strand
gaaagacccaauucugcau

SEQ ID NO: 116537 - RNA, 19 nt, Homo sapiens
  misc_RNA (1)...(19): siRNA sense strand
ccaaguuuacaguuuauga

SEQ ID NO: 116538 - RNA, 19 nt, Homo sapiens
  misc_RNA (1)...(19): siRNA sense strand
ccuacuauauguacuugga

SEQ ID NO: 116539 - RNA, 19 nt, Homo sapiens
  misc_RNA (1)...(19): siRNA sense strand
uggaggacuuuguguauag

SEQ ID NO: 116540 - RNA, 19 nt, Homo sapiens
  misc_RNA (1)...(19): siRNA sense strand
agccagaauucaaccgaua

SEQ ID NO: 116541 - RNA, 19 nt, Homo sapiens
  misc_RNA (1)...(19): siRNA sense strand
ccugaaaccagacgaaguu

SEQ ID NO: 116542 - RNA, 19 nt, Homo sapiens
  misc_RNA (1)...(19): siRNA sense strand
cuacccacuuugugcagua

SEQ ID NO: 116543 - RNA, 19 nt, Homo sapiens
  misc_RNA (1)...(19): siRNA sense strand
gcagaacagaacuauggaa

SEQ ID NO: 116544 - RNA, 19 nt, Homo sapiens
  misc_RNA (1)...(19): siRNA sense strand
cuggaggacuuuguguaua

SEQ ID NO: 116545 - RNA, 19 nt, Homo sapiens
  misc_RNA (1)...(19): siRNA sense strand
caugacaguuugcucucaa

SEQ ID NO: 116546 - RNA, 19 nt, Homo sapiens
  misc_RNA (1)...(19): siRNA sense strand
aagcuccucuguuguggaa

SEQ ID NO: 116547 - RNA, 19 nt, Homo sapiens
  misc_RNA (1)...(19): siRNA sense strand
caucggucuuucuagcuuu

SEQ ID NO: 116548 - RNA, 19 nt, Homo sapiens
  misc_RNA (1)...(19): siRNA sense strand
gcuuagauccaaccucaug

SEQ ID NO: 116549 - RNA, 19 nt, Homo sapiens
  misc_RNA (1)...(19): siRNA sense strand
aguaagaugucggauaauc

SEQ ID NO: 116550 - RNA, 19 nt, Homo sapiens
  misc_RNA (1)...(19): siRNA sense strand
uuucuagcuuugacaguaa

SEQ ID NO: 116551 - RNA, 19 nt, Homo sapiens
  misc_RNA (1)...(19): siRNA sense strand
ccucaaggugucacaguaa

SEQ ID NO: 116552 - RNA, 19 nt, Homo sapiens
  misc_RNA (1)...(19): siRNA sense strand
auuuaaagguccuaggaaa

SEQ ID NO: 116553 - RNA, 19 nt, Homo sapiens
  misc_RNA (1)...(19): siRNA sense strand
gauuuaaagguccuaggaa

SEQ ID NO: 116554 - RNA, 19 nt, Homo sapiens
  misc_RNA (1)...(19): siRNA sense strand
aaacagccaacuaccuuau

SEQ ID NO: 116555 - RNA, 19 nt, Homo sapiens
  misc_RNA (1)...(19): siRNA sense strand
acagcaaugucaucuuaca

SEQ ID NO: 116556 - RNA, 19 nt, Homo sapiens
  misc_RNA (1)...(19): siRNA sense strand
cuuucuagcuuugacagua

SEQ ID NO: 116557 - RNA, 19 nt, Homo sapiens
  misc_RNA (1)...(19): siRNA sense strand
ucacacuggauuacaacua

SEQ ID NO: 116558 - RNA, 19 nt, Homo sapiens
  misc_RNA (1)...(19): siRNA sense strand
cacaguaagaugucggaua

SEQ ID NO: 116559 - RNA, 19 nt, Homo sapiens
  misc_RNA (1)...(19): siRNA sense strand
ggaggacuuuguguauagu

SEQ ID NO: 116560 - RNA, 19 nt, Homo sapiens
  misc_RNA (1)...(19): siRNA sense strand
cagucagcauguuuagaaa

SEQ ID NO: 116561 - RNA, 19 nt, Homo sapiens
  misc_RNA (1)...(19): siRNA sense strand
uauauagucaugcaguuug

SEQ ID NO: 116562 - RNA, 19 nt, Homo sapiens
  misc_RNA (1)...(19): siRNA sense strand
cauugauccaguugauuua

SEQ ID NO: 116563 - RNA, 19 nt, Homo sapiens
  misc_RNA (1)...(19): siRNA sense strand
ggauuacaacuacccacuu

SEQ ID NO: 116564 - RNA, 19 nt, Homo sapiens
  misc_RNA (1)...(19): siRNA sense strand
caaaacagccaacuaccuu

SEQ ID NO: 116565 - RNA, 19 nt, Homo sapiens
  misc_RNA (1)...(19): siRNA sense strand
caaagccaagggccaguga

SEQ ID NO: 116566 - RNA, 19 nt, Homo sapiens
  misc_RNA (1)...(19): siRNA sense strand
uguggcagaugacguguuc

SEQ ID NO: 116567 - RNA, 19 nt, Homo sapiens
  misc_RNA (1)...(19): siRNA sense strand
uggcagaacagaacuaugg

SEQ ID NO: 116568 - RNA, 19 nt, Homo sapiens
  misc_RNA (1)...(19): siRNA sense strand
caugaagaaaugaugaaga

SEQ ID NO: 116569 - RNA, 19 nt, Homo sapiens
  misc_RNA (1)...(19): siRNA sense strand
cacacuggauuacaacuac

SEQ ID NO: 116570 - RNA, 19 nt, Homo sapiens
  misc_RNA (1)...(19): siRNA sense strand
caagguggcagaacagaac

SEQ ID NO: 116571 - RNA, 19 nt, Homo sapiens
  misc_RNA (1)...(19): siRNA sense strand
cagaggcuacuacuugaga

SEQ ID NO: 116572 - RNA, 19 nt, Homo sapiens
  misc_RNA (1)...(19): siRNA sense strand
ugaagaugcgacaggcuaa

SEQ ID NO: 116573 - RNA, 19 nt, Homo sapiens
  misc_RNA (1)...(19): siRNA sense strand
gcuaagcuggauuaucaga

SEQ ID NO: 116574 - RNA, 19 nt, Homo sapiens
  misc_RNA (1)...(19): siRNA sense strand
ccaaaagcaugauaucucu

SEQ ID NO: 116575 - RNA, 19 nt, Homo sapiens
  misc_RNA (1)...(19): siRNA sense strand
ccucuguuguggaagaaga

SEQ ID NO: 116576 - RNA, 19 nt, Homo sapiens
  misc_RNA (1)...(19): siRNA sense strand
gacccugauuauauaguca

SEQ ID NO: 116577 - RNA, 19 nt, Homo sapiens
  misc_RNA (1)...(19): siRNA sense strand
aguccuauguccucaacuu

SEQ ID NO: 116578 - RNA, 19 nt, Homo sapiens
  misc_RNA (1)...(19): siRNA sense strand
cccucaaggugucacagua

SEQ ID NO: 116579 - RNA, 19 nt, Homo sapiens
  misc_RNA (1)...(19): siRNA sense strand
uaucuccauugauccaguu

SEQ ID NO: 116580 - RNA, 19 nt, Homo sapiens
  misc_RNA (1)...(19): siRNA sense strand
ugagaagaggcaaaggaaa

SEQ ID NO: 116581 - RNA, 19 nt, Homo sapiens
  misc_RNA (1)...(19): siRNA sense strand
guugauuuaucucgugaag

SEQ ID NO: 116582 - RNA, 19 nt, Homo sapiens
  misc_RNA (1)...(19): siRNA sense strand
caccuacuauauguacuug

SEQ ID NO: 116583 - RNA, 19 nt, Homo sapiens
  misc_RNA (1)...(19): siRNA sense strand
ugacccugauuauauaguc

SEQ ID NO: 116584 - RNA, 19 nt, Homo sapiens
  misc_RNA (1)...(19): siRNA sense strand
ugaaacgaacguacuugga

SEQ ID NO: 116585 - RNA, 19 nt, Homo sapiens
  misc_RNA (1)...(19): siRNA sense strand
ggaauaucccagucagcau

SEQ ID NO: 116586 - RNA, 19 nt, Homo sapiens
  misc_RNA (1)...(19): siRNA sense strand
aggcgucugugaagaacuu

SEQ ID NO: 116587 - RNA, 19 nt, Homo sapiens
  misc_RNA (1)...(19): siRNA sense strand
ugauccaguugauuuaucu

SEQ ID NO: 116588 - RNA, 19 nt, Homo sapiens
  misc_RNA (1)...(19): siRNA sense strand
ccaccuacuauauguacuu

SEQ ID NO: 116589 - RNA, 19 nt, Homo sapiens
  misc_RNA (1)...(19): siRNA sense strand
caaggugucacaguaagau

SEQ ID NO: 116590 - RNA, 19 nt, Homo sapiens
  misc_RNA (1)...(19): siRNA sense strand
acagccaacuaccuuaucu

SEQ ID NO: 116591 - RNA, 19 nt, Homo sapiens
  misc_RNA (1)...(19): siRNA sense strand
ccaugacaguuugcucuca

SEQ ID NO: 116592 - RNA, 19 nt, Homo sapiens
  misc_RNA (1)...(19): siRNA sense strand
ucggcaagcuuagauccaa

SEQ ID NO: 116593 - RNA, 19 nt, Homo sapiens
  misc_RNA (1)...(19): siRNA sense strand
aaaguuaugucggcaagcu

SEQ ID NO: 116594 - RNA, 19 nt, Homo sapiens
  misc_RNA (1)...(19): siRNA sense strand
gcgacaggcuaagcuggau

SEQ ID NO: 116595 - RNA, 19 nt, Homo sapiens
  misc_RNA (1)...(19): siRNA sense strand
gaacaacucagucaucauc

SEQ ID NO: 116596 - RNA, 19 nt, Homo sapiens
  misc_RNA (1)...(19): siRNA sense strand
ugaauucuguguccuuuga

SEQ ID NO: 116597 - RNA, 19 nt, Homo sapiens
  misc_RNA (1)...(19): siRNA sense strand
ucacaucgguauccucgaa

SEQ ID NO: 116598 - RNA, 19 nt, Homo sapiens
  misc_RNA (1)...(19): siRNA sense strand
ggaagagaaugugggaaau

SEQ ID NO: 116599 - RNA, 19 nt, Homo sapiens
  misc_RNA (1)...(19): siRNA sense strand
gcugguggccucuguaauu

SEQ ID NO: 116600 - RNA, 19 nt, Homo sapiens
  misc_RNA (1)...(19): siRNA sense strand
gcacuucucugcucuucag

SEQ ID NO: 116601 - RNA, 19 nt, Homo sapiens
  misc_RNA (1)...(19): siRNA sense strand
ucaugaaggugcagaacaa

SEQ ID NO: 116602 - RNA, 19 nt, Homo sapiens
  misc_RNA (1)...(19): siRNA sense strand
cagaacaacucagucauca

SEQ ID NO: 116603 - RNA, 19 nt, Homo sapiens
  misc_RNA (1)...(19): siRNA sense strand
ugaagaaggucaggucugu

SEQ ID NO: 116604 - RNA, 19 nt, Homo sapiens
  misc_RNA (1)...(19): siRNA sense strand
gaagagaaugugggaaaug

SEQ ID NO: 116605 - RNA, 19 nt, Homo sapiens
  misc_RNA (1)...(19): siRNA sense strand
ggugaauucuguguccuuu

SEQ ID NO: 116606 - RNA, 19 nt, Homo sapiens
  misc_RNA (1)...(19): siRNA sense strand
gaauggcggagaacugauu

SEQ ID NO: 116607 - RNA, 19 nt, Homo sapiens
  misc_RNA (1)...(19): siRNA sense strand
gcagaacaacucagucauc

SEQ ID NO: 116608 - RNA, 19 nt, Homo sapiens
  misc_RNA (1)...(19): siRNA sense strand
gaaugugaccacugacaau

SEQ ID NO: 116609 - RNA, 19 nt, Homo sapiens
  misc_RNA (1)...(19): siRNA sense strand
ggccaagauucgagaggaa

SEQ ID NO: 116610 - RNA, 19 nt, Homo sapiens
  misc_RNA (1)...(19): siRNA sense strand
auaagaaggagaaagguuu

SEQ ID NO: 116611 - RNA, 19 nt, Homo sapiens
  misc_RNA (1)...(19): siRNA sense strand
ucaaaauccuggugaauuc

SEQ ID NO: 116612 - RNA, 19 nt, Homo sapiens
  misc_RNA (1)...(19): siRNA sense strand
cuucucugcucuucaggua

SEQ ID NO: 116613 - RNA, 19 nt, Homo sapiens
  misc_RNA (1)...(19): siRNA sense strand
caacauuagccuucauuac

SEQ ID NO: 116614 - RNA, 19 nt, Homo sapiens
  misc_RNA (1)...(19): siRNA sense strand
uauccucgaauucaaagua

SEQ ID NO: 116615 - RNA, 19 nt, Homo sapiens
  misc_RNA (1)...(19): siRNA sense strand
ccgaauauaagaaggagaa

SEQ ID NO: 116616 - RNA, 19 nt, Homo sapiens
  misc_RNA (1)...(19): siRNA sense strand
uggaagagaaugugggaaa

SEQ ID NO: 116617 - RNA, 19 nt, Homo sapiens
  misc_RNA (1)...(19): siRNA sense strand
gugaauggcggagaacuga

SEQ ID NO: 116618 - RNA, 19 nt, Homo sapiens
  misc_RNA (1)...(19): siRNA sense strand
ucaggucugucaacuccuu

SEQ ID NO: 116619 - RNA, 19 nt, Homo sapiens
  misc_RNA (1)...(19): siRNA sense strand
cccaggaagucaacauuag

SEQ ID NO: 116620 - RNA, 19 nt, Homo sapiens
  misc_RNA (1)...(19): siRNA sense strand
ucagguaucacaucgguau

SEQ ID NO: 116621 - RNA, 19 nt, Homo sapiens
  misc_RNA (1)...(19): siRNA sense strand
gaaggugcagaacaacuca

SEQ ID NO: 116622 - RNA, 19 nt, Homo sapiens
  misc_RNA (1)...(19): siRNA sense strand
ucaacauuagccuucauua

SEQ ID NO: 116623 - RNA, 19 nt, Homo sapiens
  misc_RNA (1)...(19): siRNA sense strand
gugcagaacaacucaguca

SEQ ID NO: 116624 - RNA, 19 nt, Homo sapiens
  misc_RNA (1)...(19): siRNA sense strand
uggccucucugacuuacaa

SEQ ID NO: 116625 - RNA, 19 nt, Homo sapiens
  misc_RNA (1)...(19): siRNA sense strand
acaacucagucaucaucaa

SEQ ID NO: 116626 - RNA, 19 nt, Homo sapiens
  misc_RNA (1)...(19): siRNA sense strand
uauaagaaggagaaagguu

SEQ ID NO: 116627 - RNA, 19 nt, Homo sapiens
  misc_RNA (1)...(19): siRNA sense strand
gaugguggccucucugacu

SEQ ID NO: 116628 - RNA, 19 nt, Homo sapiens
  misc_RNA (1)...(19): siRNA sense strand
ucccaggaagucaacauua

SEQ ID NO: 116629 - RNA, 19 nt, Homo sapiens
  misc_RNA (1)...(19): siRNA sense strand
gggcugcuccugugcuuca

SEQ ID NO: 116630 - RNA, 19 nt, Homo sapiens
  misc_RNA (1)...(19): siRNA sense strand
acuugaaugugaccacuga

SEQ ID NO: 116631 - RNA, 19 nt, Homo sapiens
  misc_RNA (1)...(19): siRNA sense strand
ucucugcucuucagguauc

SEQ ID NO: 116632 - RNA, 19 nt, Homo sapiens
  misc_RNA (1)...(19): siRNA sense strand
gagaggaacaagcuauugc

SEQ ID NO: 116633 - RNA, 19 nt, Homo sapiens
  misc_RNA (1)...(19): siRNA sense strand
ugacaauaccucccuggau

SEQ ID NO: 116634 - RNA, 19 nt, Homo sapiens
  misc_RNA (1)...(19): siRNA sense strand
aaugugaccacugacaaua

SEQ ID NO: 116635 - RNA, 19 nt, Homo sapiens
  misc_RNA (1)...(19): siRNA sense strand
acauuagccuucauuacca

SEQ ID NO: 116636 - RNA, 19 nt, Homo sapiens
  misc_RNA (1)...(19): siRNA sense strand
cgaauucaaaguaucaaag

SEQ ID NO: 116637 - RNA, 19 nt, Homo sapiens
  misc_RNA (1)...(19): siRNA sense strand
gaauauaagaaggagaaag

SEQ ID NO: 116638 - RNA, 19 nt, Homo sapiens
  misc_RNA (1)...(19): siRNA sense strand
auaccucccuggaugacuu

SEQ ID NO: 116639 - RNA, 19 nt, Homo sapiens
  misc_RNA (1)...(19): siRNA sense strand
cgagaggaacaagcuauug

SEQ ID NO: 116640 - RNA, 19 nt, Homo sapiens
  misc_RNA (1)...(19): siRNA sense strand
caacugugauggguuuuau

SEQ ID NO: 116641 - RNA, 19 nt, Homo sapiens
  misc_RNA (1)...(19): siRNA sense strand
acaucgguauccucgaauu

SEQ ID NO: 116642 - RNA, 19 nt, Homo sapiens
  misc_RNA (1)...(19): siRNA sense strand
ggaugacuuccaugugaau

SEQ ID NO: 116643 - RNA, 19 nt, Homo sapiens
  misc_RNA (1)...(19): siRNA sense strand
ugaaugugaccacugacaa

SEQ ID NO: 116644 - RNA, 19 nt, Homo sapiens
  misc_RNA (1)...(19): siRNA sense strand
gaaggucaggucugucaac

SEQ ID NO: 116645 - RNA, 19 nt, Homo sapiens
  misc_RNA (1)...(19): siRNA sense strand
gagccccucuuccaacuga

SEQ ID NO: 116646 - RNA, 19 nt, Homo sapiens
  misc_RNA (1)...(19): siRNA sense strand
aauauaagaaggagaaagg

SEQ ID NO: 116647 - RNA, 19 nt, Homo sapiens
  misc_RNA (1)...(19): siRNA sense strand
acaauaccucccuggauga

SEQ ID NO: 116648 - RNA, 19 nt, Homo sapiens
  misc_RNA (1)...(19): siRNA sense strand
aagaaggucaggucuguca

SEQ ID NO: 116649 - RNA, 19 nt, Homo sapiens
  misc_RNA (1)...(19): siRNA sense strand
aagagaaugugggaaaugc

SEQ ID NO: 116650 - RNA, 19 nt, Homo sapiens
  misc_RNA (1)...(19): siRNA sense strand
ccucgaauucaaaguauca

SEQ ID NO: 116651 - RNA, 19 nt, Homo sapiens
  misc_RNA (1)...(19): siRNA sense strand
caacucagucaucaucaac

SEQ ID NO: 116652 - RNA, 19 nt, Homo sapiens
  misc_RNA (1)...(19): siRNA sense strand
gggcuacuucucccaggaa

SEQ ID NO: 116653 - RNA, 19 nt, Homo sapiens
  misc_RNA (1)...(19): siRNA sense strand
ucucugacuuacaaagaca

SEQ ID NO: 116654 - RNA, 19 nt, Homo sapiens
  misc_RNA (1)...(19): siRNA sense strand
gagaugauauguuccauug

SEQ ID NO: 116655 - RNA, 19 nt, Homo sapiens
  misc_RNA (1)...(19): siRNA sense strand
ggaauggacucagaaguau

SEQ ID NO: 116656 - RNA, 19 nt, Homo sapiens
  misc_RNA (1)...(19): siRNA sense strand
caauccagaugauccuuua

SEQ ID NO: 116657 - RNA, 19 nt, Homo sapiens
  misc_RNA (1)...(19): siRNA sense strand
gggaauggacucagaagua

SEQ ID NO: 116658 - RNA, 19 nt, Homo sapiens
  misc_RNA (1)...(19): siRNA sense strand
cagaauagcucgggaaugg

SEQ ID NO: 116659 - RNA, 19 nt, Homo sapiens
  misc_RNA (1)...(19): siRNA sense strand
gcauuugucuugauauucu

SEQ ID NO: 116660 - RNA, 19 nt, Homo sapiens
  misc_RNA (1)...(19): siRNA sense strand
cagcauuugucuugauauu

SEQ ID NO: 116661 - RNA, 19 nt, Homo sapiens
  misc_RNA (1)...(19): siRNA sense strand
caaaugacagucccuauca

SEQ ID NO: 116662 - RNA, 19 nt, Homo sapiens
  misc_RNA (1)...(19): siRNA sense strand
ucagaaguaugcgauguaa

SEQ ID NO: 116663 - RNA, 19 nt, Homo sapiens
  misc_RNA (1)...(19): siRNA sense strand
ggcagcauuugucuugaua

SEQ ID NO: 116664 - RNA, 19 nt, Homo sapiens
  misc_RNA (1)...(19): siRNA sense strand
cuaucaggguggaguauuu

SEQ ID NO: 116665 - RNA, 19 nt, Homo sapiens
  misc_RNA (1)...(19): siRNA sense strand
gcucgggaauggacucaga

SEQ ID NO: 116666 - RNA, 19 nt, Homo sapiens
  misc_RNA (1)...(19): siRNA sense strand
aaaguacucuuguccaucu

SEQ ID NO: 116667 - RNA, 19 nt, Homo sapiens
  misc_RNA (1)...(19): siRNA sense strand
guccaucuguucucuguug

SEQ ID NO: 116668 - RNA, 19 nt, Homo sapiens
  misc_RNA (1)...(19): siRNA sense strand
caaaacagauagagaaaag

SEQ ID NO: 116669 - RNA, 19 nt, Homo sapiens
  misc_RNA (1)...(19): siRNA sense strand
gacaauucauuucccaaca

SEQ ID NO: 116670 - RNA, 19 nt, Homo sapiens
  misc_RNA (1)...(19): siRNA sense strand
ucuguucucuguuguguga

SEQ ID NO: 116671 - RNA, 19 nt, Homo sapiens
  misc_RNA (1)...(19): siRNA sense strand
caauucauuucccaacaga

SEQ ID NO: 116672 - RNA, 19 nt, Homo sapiens
  misc_RNA (1)...(19): siRNA sense strand
ggagaugauauguuccauu

SEQ ID NO: 116673 - RNA, 19 nt, Homo sapiens
  misc_RNA (1)...(19): siRNA sense strand
uguuggagaugauauguuc

SEQ ID NO: 116674 - RNA, 19 nt, Homo sapiens
  misc_RNA (1)...(19): siRNA sense strand
gauauucuacgaucacagu

SEQ ID NO: 116675 - RNA, 19 nt, Homo sapiens
  misc_RNA (1)...(19): siRNA sense strand
uuggcaagcuacaauaaug

SEQ ID NO: 116676 - RNA, 19 nt, Homo sapiens
  misc_RNA (1)...(19): siRNA sense strand
guacucuuguccaucuguu

SEQ ID NO: 116677 - RNA, 19 nt, Homo sapiens
  misc_RNA (1)...(19): siRNA sense strand
ccaaaugacagucccuauc

SEQ ID NO: 116678 - RNA, 19 nt, Homo sapiens
  misc_RNA (1)...(19): siRNA sense strand
caucuguucucuguugugu

SEQ ID NO: 116679 - RNA, 19 nt, Homo sapiens
  misc_RNA (1)...(19): siRNA sense strand
caaaaguacucuuguccau

SEQ ID NO: 116680 - RNA, 19 nt, Homo sapiens
  misc_RNA (1)...(19): siRNA sense strand
gaaaaguacaacagaauag

SEQ ID NO: 116681 - RNA, 19 nt, Homo sapiens
  misc_RNA (1)...(19): siRNA sense strand
cagcacuaacuauuucaaa

SEQ ID NO: 116682 - RNA, 19 nt, Homo sapiens
  misc_RNA (1)...(19): siRNA sense strand
gaauggacucagaaguaug

SEQ ID NO: 116683 - RNA, 19 nt, Homo sapiens
  misc_RNA (1)...(19): siRNA sense strand
cuccagcacuaacuauuuc

SEQ ID NO: 116684 - RNA, 19 nt, Homo sapiens
  misc_RNA (1)...(19): siRNA sense strand
ccaauccagaugauccuuu

SEQ ID NO: 116685 - RNA, 19 nt, Homo sapiens
  misc_RNA (1)...(19): siRNA sense strand
ucuccagcacuaacuauuu

SEQ ID NO: 116686 - RNA, 19 nt, Homo sapiens
  misc_RNA (1)...(19): siRNA sense strand
cuacaaaacagauagagaa

SEQ ID NO: 116687 - RNA, 19 nt, Homo sapiens
  misc_RNA (1)...(19): siRNA sense strand
gagaaaaguacaacagaau

SEQ ID NO: 116688 - RNA, 19 nt, Homo sapiens
  misc_RNA (1)...(19): siRNA sense strand
acaauucauuucccaacag

SEQ ID NO: 116689 - RNA, 19 nt, Homo sapiens
  misc_RNA (1)...(19): siRNA sense strand
agagaaaaguacaacagaa

SEQ ID NO: 116690 - RNA, 19 nt, Homo sapiens
  misc_RNA (1)...(19): siRNA sense strand
uggcagcauuugucuugau

SEQ ID NO: 116691 - RNA, 19 nt, Homo sapiens
  misc_RNA (1)...(19): siRNA sense strand
uccagaugauccuuuagug

SEQ ID NO: 116692 - RNA, 19 nt, Homo sapiens
  misc_RNA (1)...(19): siRNA sense strand
ggaauggacucagaaguau

SEQ ID NO: 116693 - RNA, 19 nt, Homo sapiens
  misc_RNA (1)...(19): siRNA sense strand
caauccagaugauccuuua

SEQ ID NO: 116694 - RNA, 19 nt, Homo sapiens
  misc_RNA (1)...(19): siRNA sense strand
gggaauggacucagaagua

SEQ ID NO: 116695 - RNA, 19 nt, Homo sapiens
  misc_RNA (1)...(19): siRNA sense strand
cagaauagcucgggaaugg

SEQ ID NO: 116696 - RNA, 19 nt, Homo sapiens
  misc_RNA (1)...(19): siRNA sense strand
gcauuugucuugauauucu

SEQ ID NO: 116697 - RNA, 19 nt, Homo sapiens
  misc_RNA (1)...(19): siRNA sense strand
cagcauuugucuugauauu

SEQ ID NO: 116698 - RNA, 19 nt, Homo sapiens
  misc_RNA (1)...(19): siRNA sense strand
caaaugacagucccuauca

SEQ ID NO: 116699 - RNA, 19 nt, Homo sapiens
  misc_RNA (1)...(19): siRNA sense strand
ucagaaguaugcgauguaa

SEQ ID NO: 116700 - RNA, 19 nt, Homo sapiens
  misc_RNA (1)...(19): siRNA sense strand
ggcagcauuugucuugaua

SEQ ID NO: 116701 - RNA, 19 nt, Homo sapiens
  misc_RNA (1)...(19): siRNA sense strand
cuaucaggguggaguauuu

SEQ ID NO: 116702 - RNA, 19 nt, Homo sapiens
  misc_RNA (1)...(19): siRNA sense strand
gcucgggaauggacucaga

SEQ ID NO: 116703 - RNA, 19 nt, Homo sapiens
  misc_RNA (1)...(19): siRNA sense strand
aaaguacucuuguccaucu

SEQ ID NO: 116704 - RNA, 19 nt, Homo sapiens
  misc_RNA (1)...(19): siRNA sense strand
guccaucuguucucuguug

SEQ ID NO: 116705 - RNA, 19 nt, Homo sapiens
  misc_RNA (1)...(19): siRNA sense strand
caaaacagauagagaaaag

SEQ ID NO: 116706 - RNA, 19 nt, Homo sapiens
  misc_RNA (1)...(19): siRNA sense strand
gacaauucauuucccaaca

SEQ ID NO: 116707 - RNA, 19 nt, Homo sapiens
  misc_RNA (1)...(19): siRNA sense strand
ucuguucucuguuguguga

SEQ ID NO: 116708 - RNA, 19 nt, Homo sapiens
  misc_RNA (1)...(19): siRNA sense strand
caauucauuucccaacaga

SEQ ID NO: 116709 - RNA, 19 nt, Homo sapiens
  misc_RNA (1)...(19): siRNA sense strand
gauauucuacgaucacagu

SEQ ID NO: 116710 - RNA, 19 nt, Homo sapiens
  misc_RNA (1)...(19): siRNA sense strand
guacucuuguccaucuguu

SEQ ID NO: 116711 - RNA, 19 nt, Homo sapiens
  misc_RNA (1)...(19): siRNA sense strand
uuggcaagcuacaauaaug

SEQ ID NO: 116712 - RNA, 19 nt, Homo sapiens
  misc_RNA (1)...(19): siRNA sense strand
ccaaaugacagucccuauc

SEQ ID NO: 116713 - RNA, 19 nt, Homo sapiens
  misc_RNA (1)...(19): siRNA sense strand
caucuguucucuguugugu

SEQ ID NO: 116714 - RNA, 19 nt, Homo sapiens
  misc_RNA (1)...(19): siRNA sense strand
caaaaguacucuuguccau

SEQ ID NO: 116715 - RNA, 19 nt, Homo sapiens
  misc_RNA (1)...(19): siRNA sense strand
gaaaaguacaacagaauag

SEQ ID NO: 116716 - RNA, 19 nt, Homo sapiens
  misc_RNA (1)...(19): siRNA sense strand
cagcacuaacuauuucaaa

SEQ ID NO: 116717 - RNA, 19 nt, Homo sapiens
  misc_RNA (1)...(19): siRNA sense strand
gaauggacucagaaguaug

SEQ ID NO: 116718 - RNA, 19 nt, Homo sapiens
  misc_RNA (1)...(19): siRNA sense strand
cuccagcacuaacuauuuc

SEQ ID NO: 116719 - RNA, 19 nt, Homo sapiens
  misc_RNA (1)...(19): siRNA sense strand
ccaauccagaugauccuuu

SEQ ID NO: 116720 - RNA, 19 nt, Homo sapiens
  misc_RNA (1)...(19): siRNA sense strand
ucuccagcacuaacuauuu

SEQ ID NO: 116721 - RNA, 19 nt, Homo sapiens
  misc_RNA (1)...(19): siRNA sense strand
cuacaaaacagauagagaa

SEQ ID NO: 116722 - RNA, 19 nt, Homo sapiens
  misc_RNA (1)...(19): siRNA sense strand
gagaaaaguacaacagaau

SEQ ID NO: 116723 - RNA, 19 nt, Homo sapiens
  misc_RNA (1)...(19): siRNA sense strand
acaauucauuucccaacag

SEQ ID NO: 116724 - RNA, 19 nt, Homo sapiens
  misc_RNA (1)...(19): siRNA sense strand
agagaaaaguacaacagaa

SEQ ID NO: 116725 - RNA, 19 nt, Homo sapiens
  misc_RNA (1)...(19): siRNA sense strand
uggcagcauuugucuugau

SEQ ID NO: 116726 - RNA, 19 nt, Homo sapiens
  misc_RNA (1)...(19): siRNA sense strand
uccagaugauccuuuagug

SEQ ID NO: 116727 - RNA, 19 nt, Homo sapiens
  misc_RNA (1)...(19): siRNA sense strand
ggaccuaccugauaaauac

SEQ ID NO: 116728 - RNA, 19 nt, Homo sapiens
  misc_RNA (1)...(19): siRNA sense strand
aagaguacauccagaaaua

SEQ ID NO: 116729 - RNA, 19 nt, Homo sapiens
  misc_RNA (1)...(19): siRNA sense strand
gggaggacuuaaugaauuu

SEQ ID NO: 116730 - RNA, 19 nt, Homo sapiens
  misc_RNA (1)...(19): siRNA sense strand
gaguggaccuaccugauaa

SEQ ID NO: 116731 - RNA, 19 nt, Homo sapiens
  misc_RNA (1)...(19): siRNA sense strand
gaagaugaggcccaggaua

SEQ ID NO: 116732 - RNA, 19 nt, Homo sapiens
  misc_RNA (1)...(19): siRNA sense strand
ggcggaguauggaaaguua

SEQ ID NO: 116733 - RNA, 19 nt, Homo sapiens
  misc_RNA (1)...(19): siRNA sense strand
ugggaggacuuaaugaauu

SEQ ID NO: 116734 - RNA, 19 nt, Homo sapiens
  misc_RNA (1)...(19): siRNA sense strand
gagaguaaacaugagguua

SEQ ID NO: 116735 - RNA, 19 nt, Homo sapiens
  misc_RNA (1)...(19): siRNA sense strand
cccaggauauggaguugua

SEQ ID NO: 116736 - RNA, 19 nt, Homo sapiens
  misc_RNA (1)...(19): siRNA sense strand
ucaagcucaucgagaguaa

SEQ ID NO: 116737 - RNA, 19 nt, Homo sapiens
  misc_RNA (1)...(19): siRNA sense strand
uaaagaguacauccagaaa

SEQ ID NO: 116738 - RNA, 19 nt, Homo sapiens
  misc_RNA (1)...(19): siRNA sense strand
agaguggaccuaccugaua

SEQ ID NO: 116739 - RNA, 19 nt, Homo sapiens
  misc_RNA (1)...(19): siRNA sense strand
ccacaaggaacaccauaug

SEQ ID NO: 116740 - RNA, 19 nt, Homo sapiens
  misc_RNA (1)...(19): siRNA sense strand
ggaggaggcgcugaaagaa

SEQ ID NO: 116741 - RNA, 19 nt, Homo sapiens
  misc_RNA (1)...(19): siRNA sense strand
acaaggaacaccauaugaa

SEQ ID NO: 116742 - RNA, 19 nt, Homo sapiens
  misc_RNA (1)...(19): siRNA sense strand
ccugauaaauacccuuuca

SEQ ID NO: 116743 - RNA, 19 nt, Homo sapiens
  misc_RNA (1)...(19): siRNA sense strand
ggacuuaaugaauuuguag

SEQ ID NO: 116744 - RNA, 19 nt, Homo sapiens
  misc_RNA (1)...(19): siRNA sense strand
caaggaacaccauaugaag

SEQ ID NO: 116745 - RNA, 19 nt, Homo sapiens
  misc_RNA (1)...(19): siRNA sense strand
uuaaagaguacauccagaa

SEQ ID NO: 116746 - RNA, 19 nt, Homo sapiens
  misc_RNA (1)...(19): siRNA sense strand
ccaauauauuugaguccuu

SEQ ID NO: 116747 - RNA, 19 nt, Homo sapiens
  misc_RNA (1)...(19): siRNA sense strand
cggaggaggcgcugaaaga

SEQ ID NO: 116748 - RNA, 19 nt, Homo sapiens
  misc_RNA (1)...(19): siRNA sense strand
aagaugaggcccaggauau

SEQ ID NO: 116749 - RNA, 19 nt, Homo sapiens
  misc_RNA (1)...(19): siRNA sense strand
cagaagaauacaagcagaa

SEQ ID NO: 116750 - RNA, 19 nt, Homo sapiens
  misc_RNA (1)...(19): siRNA sense strand
aggaggcgcugaaagaaca

SEQ ID NO: 116751 - RNA, 19 nt, Homo sapiens
  misc_RNA (1)...(19): siRNA sense strand
gaccacaaggaacaccaua

SEQ ID NO: 116752 - RNA, 19 nt, Homo sapiens
  misc_RNA (1)...(19): siRNA sense strand
cacaaggaacaccauauga

SEQ ID NO: 116753 - RNA, 19 nt, Homo sapiens
  misc_RNA (1)...(19): siRNA sense strand
ccaccgaccagaagaauac

SEQ ID NO: 116754 - RNA, 19 nt, Homo sapiens
  misc_RNA (1)...(19): siRNA sense strand
gaaaguuagaguggaccua

SEQ ID NO: 116755 - RNA, 19 nt, Homo sapiens
  misc_RNA (1)...(19): siRNA sense strand
ugaaggcggaguauggaaa

SEQ ID NO: 116756 - RNA, 19 nt, Homo sapiens
  misc_RNA (1)...(19): siRNA sense strand
gcagaaaauuaaagaguac

SEQ ID NO: 116757 - RNA, 19 nt, Homo sapiens
  misc_RNA (1)...(19): siRNA sense strand
cauagauccucucaauggu

SEQ ID NO: 116758 - RNA, 19 nt, Homo sapiens
  misc_RNA (1)...(19): siRNA sense strand
gaaggcggaguauggaaag

SEQ ID NO: 116759 - RNA, 19 nt, Homo sapiens
  misc_RNA (1)...(19): siRNA sense strand
ccuuucaaaucuccaucua

SEQ ID NO: 116760 - RNA, 19 nt, Homo sapiens
  misc_RNA (1)...(19): siRNA sense strand
gaaguuuuauggaccacaa

SEQ ID NO: 116761 - RNA, 19 nt, Homo sapiens
  misc_RNA (1)...(19): siRNA sense strand
aaagaguacauccagaaau

SEQ ID NO: 116762 - RNA, 19 nt, Homo sapiens
  misc_RNA (1)...(19): siRNA sense strand
guaccuccaccgaccagaa

SEQ ID NO: 116763 - RNA, 19 nt, Homo sapiens
  misc_RNA (1)...(19): siRNA sense strand
gaagaauacaagcagaaaa

SEQ ID NO: 116764 - RNA, 19 nt, Homo sapiens
  misc_RNA (1)...(19): siRNA sense strand
agaagaauacaagcagaaa

SEQ ID NO: 116765 - RNA, 19 nt, Homo sapiens
  misc_RNA (1)...(19): siRNA sense strand
gaccagaagaauacaagca

SEQ ID NO: 116766 - RNA, 19 nt, Homo sapiens
  misc_RNA (1)...(19): siRNA sense strand
gcucaucgagaguaaacau

SEQ ID NO: 116767 - RNA, 19 nt, Homo sapiens
  misc_RNA (1)...(19): siRNA sense strand
caucgagaguaaacaugag

SEQ ID NO: 116768 - RNA, 19 nt, Homo sapiens
  misc_RNA (1)...(19): siRNA sense strand
ccccauagauccucucaau

SEQ ID NO: 116769 - RNA, 19 nt, Homo sapiens
  misc_RNA (1)...(19): siRNA sense strand
agagcucuaugucugacuu

SEQ ID NO: 116770 - RNA, 19 nt, Homo sapiens
  misc_RNA (1)...(19): siRNA sense strand
caucggagagcucuauguc

SEQ ID NO: 116771 - RNA, 19 nt, Homo sapiens
  misc_RNA (1)...(19): siRNA sense strand
ccugggaggacuuaaugaa

SEQ ID NO: 116772 - RNA, 19 nt, Homo sapiens
  misc_RNA (1)...(19): siRNA sense strand
gucaagcucaucgagagua

SEQ ID NO: 116773 - RNA, 19 nt, Homo sapiens
  misc_RNA (1)...(19): siRNA sense strand
gaugaggcccaggauaugg

SEQ ID NO: 116774 - RNA, 19 nt, Homo sapiens
  misc_RNA (1)...(19): siRNA sense strand
gcugaaagaacaggaagag

SEQ ID NO: 116775 - RNA, 19 nt, Homo sapiens
  misc_RNA (1)...(19): siRNA sense strand
uggaccuaccugauaaaua

SEQ ID NO: 116776 - RNA, 19 nt, Homo sapiens
  misc_RNA (1)...(19): siRNA sense strand
ggaccuaccugauaaauac

SEQ ID NO: 116777 - RNA, 19 nt, Homo sapiens
  misc_RNA (1)...(19): siRNA sense strand
aagaguacauccagaaaua

SEQ ID NO: 116778 - RNA, 19 nt, Homo sapiens
  misc_RNA (1)...(19): siRNA sense strand
gggaggacuuaaugaauuu

SEQ ID NO: 116779 - RNA, 19 nt, Homo sapiens
  misc_RNA (1)...(19): siRNA sense strand
gaguggaccuaccugauaa

SEQ ID NO: 116780 - RNA, 19 nt, Homo sapiens
  misc_RNA (1)...(19): siRNA sense strand
gaagaugaggcccaggaua

SEQ ID NO: 116781 - RNA, 19 nt, Homo sapiens
  misc_RNA (1)...(19): siRNA sense strand
ggcggaguauggaaaguua

SEQ ID NO: 116782 - RNA, 19 nt, Homo sapiens
  misc_RNA (1)...(19): siRNA sense strand
ugggaggacuuaaugaauu

SEQ ID NO: 116783 - RNA, 19 nt, Homo sapiens
  misc_RNA (1)...(19): siRNA sense strand
gagaguaaacaugagguua

SEQ ID NO: 116784 - RNA, 19 nt, Homo sapiens
  misc_RNA (1)...(19): siRNA sense strand
cccaggauauggaguugua

SEQ ID NO: 116785 - RNA, 19 nt, Homo sapiens
  misc_RNA (1)...(19): siRNA sense strand
ucaagcucaucgagaguaa

SEQ ID NO: 116786 - RNA, 19 nt, Homo sapiens
  misc_RNA (1)...(19): siRNA sense strand
uaaagaguacauccagaaa

SEQ ID NO: 116787 - RNA, 19 nt, Homo sapiens
  misc_RNA (1)...(19): siRNA sense strand
agaguggaccuaccugaua

SEQ ID NO: 116788 - RNA, 19 nt, Homo sapiens
  misc_RNA (1)...(19): siRNA sense strand
ccacaaggaacaccauaug

SEQ ID NO: 116789 - RNA, 19 nt, Homo sapiens
  misc_RNA (1)...(19): siRNA sense strand
ggaggaggcgcugaaagaa

SEQ ID NO: 116790 - RNA, 19 nt, Homo sapiens
  misc_RNA (1)...(19): siRNA sense strand
acaaggaacaccauaugaa

SEQ ID NO: 116791 - RNA, 19 nt, Homo sapiens
  misc_RNA (1)...(19): siRNA sense strand
ccugauaaauacccuuuca

SEQ ID NO: 116792 - RNA, 19 nt, Homo sapiens
  misc_RNA (1)...(19): siRNA sense strand
ggacuuaaugaauuuguag

SEQ ID NO: 116793 - RNA, 19 nt, Homo sapiens
  misc_RNA (1)...(19): siRNA sense strand
caaggaacaccauaugaag

SEQ ID NO: 116794 - RNA, 19 nt, Homo sapiens
  misc_RNA (1)...(19): siRNA sense strand
uuaaagaguacauccagaa

SEQ ID NO: 116795 - RNA, 19 nt, Homo sapiens
  misc_RNA (1)...(19): siRNA sense strand
ccaauauauuugaguccuu

SEQ ID NO: 116796 - RNA, 19 nt, Homo sapiens
  misc_RNA (1)...(19): siRNA sense strand
cggaggaggcgcugaaaga

SEQ ID NO: 116797 - RNA, 19 nt, Homo sapiens
  misc_RNA (1)...(19): siRNA sense strand
aagaugaggcccaggauau

SEQ ID NO: 116798 - RNA, 19 nt, Homo sapiens
  misc_RNA (1)...(19): siRNA sense strand
cagaagaauacaagcagaa

SEQ ID NO: 116799 - RNA, 19 nt, Homo sapiens
  misc_RNA (1)...(19): siRNA sense strand
aggaggcgcugaaagaaca

SEQ ID NO: 116800 - RNA, 19 nt, Homo sapiens
  misc_RNA (1)...(19): siRNA sense strand
gaccacaaggaacaccaua

SEQ ID NO: 116801 - RNA, 19 nt, Homo sapiens
  misc_RNA (1)...(19): siRNA sense strand
cacaaggaacaccauauga

SEQ ID NO: 116802 - RNA, 19 nt, Homo sapiens
  misc_RNA (1)...(19): siRNA sense strand
ccaccgaccagaagaauac

SEQ ID NO: 116803 - RNA, 19 nt, Homo sapiens
  misc_RNA (1)...(19): siRNA sense strand
gaaaguuagaguggaccua

SEQ ID NO: 116804 - RNA, 19 nt, Homo sapiens
  misc_RNA (1)...(19): siRNA sense strand
ugaaggcggaguauggaaa

SEQ ID NO: 116805 - RNA, 19 nt, Homo sapiens
  misc_RNA (1)...(19): siRNA sense strand
gcagaaaauuaaagaguac

SEQ ID NO: 116806 - RNA, 19 nt, Homo sapiens
  misc_RNA (1)...(19): siRNA sense strand
cauagauccucucaauggu

SEQ ID NO: 116807 - RNA, 19 nt, Homo sapiens
  misc_RNA (1)...(19): siRNA sense strand
gaaggcggaguauggaaag

SEQ ID NO: 116808 - RNA, 19 nt, Homo sapiens
  misc_RNA (1)...(19): siRNA sense strand
ccuuucaaaucuccaucua

SEQ ID NO: 116809 - RNA, 19 nt, Homo sapiens
  misc_RNA (1)...(19): siRNA sense strand
gaaguuuuauggaccacaa

SEQ ID NO: 116810 - RNA, 19 nt, Homo sapiens
  misc_RNA (1)...(19): siRNA sense strand
cuuccugccucaguuauug

SEQ ID NO: 116811 - RNA, 19 nt, Homo sapiens
  misc_RNA (1)...(19): siRNA sense strand
aaagaguacauccagaaau

SEQ ID NO: 116812 - RNA, 19 nt, Homo sapiens
  misc_RNA (1)...(19): siRNA sense strand
guaccuccaccgaccagaa

SEQ ID NO: 116813 - RNA, 19 nt, Homo sapiens
  misc_RNA (1)...(19): siRNA sense strand
gaagaauacaagcagaaaa

SEQ ID NO: 116814 - RNA, 19 nt, Homo sapiens
  misc_RNA (1)...(19): siRNA sense strand
agaagaauacaagcagaaa

SEQ ID NO: 116815 - RNA, 19 nt, Homo sapiens
  misc_RNA (1)...(19): siRNA sense strand
gaccagaagaauacaagca

SEQ ID NO: 116816 - RNA, 19 nt, Homo sapiens
  misc_RNA (1)...(19): siRNA sense strand
gcucaucgagaguaaacau

SEQ ID NO: 116817 - RNA, 19 nt, Homo sapiens
  misc_RNA (1)...(19): siRNA sense strand
caucgagaguaaacaugag

SEQ ID NO: 116818 - RNA, 19 nt, Homo sapiens
  misc_RNA (1)...(19): siRNA sense strand
ccccauagauccucucaau

SEQ ID NO: 116819 - RNA, 19 nt, Homo sapiens
  misc_RNA (1)...(19): siRNA sense strand
agagcucuaugucugacuu

SEQ ID NO: 116820 - RNA, 19 nt, Homo sapiens
  misc_RNA (1)...(19): siRNA sense strand
caucggagagcucuauguc

SEQ ID NO: 116821 - RNA, 19 nt, Homo sapiens
  misc_RNA (1)...(19): siRNA sense strand
ccugggaggacuuaaugaa

SEQ ID NO: 116822 - RNA, 19 nt, Homo sapiens
  misc_RNA (1)...(19): siRNA sense strand
uggaccuaccugauaaaua

SEQ ID NO: 116823 - RNA, 19 nt, Homo sapiens
  misc_RNA (1)...(19): siRNA sense strand
gaugaggcccaggauaugg

SEQ ID NO: 116824 - RNA, 19 nt, Homo sapiens
  misc_RNA (1)...(19): siRNA sense strand
gcugaaagaacaggaagag

SEQ ID NO: 116825 - RNA, 19 nt, Homo sapiens
  misc_RNA (1)...(19): siRNA sense strand
gucaagcucaucgagagua

SEQ ID NO: 116826 - RNA, 19 nt, Homo sapiens
  misc_RNA (1)...(19): siRNA sense strand
ggacaguguuacagcaauu

SEQ ID NO: 116827 - RNA, 19 nt, Homo sapiens
  misc_RNA (1)...(19): siRNA sense strand
caucaaaguuguccugcaa

SEQ ID NO: 116828 - RNA, 19 nt, Homo sapiens
  misc_RNA (1)...(19): siRNA sense strand
caaaauggcagaauucaua

SEQ ID NO: 116829 - RNA, 19 nt, Homo sapiens
  misc_RNA (1)...(19): siRNA sense strand
ucauauagcaucaaaguug

SEQ ID NO: 116830 - RNA, 19 nt, Homo sapiens
  misc_RNA (1)...(19): siRNA sense strand
aauagaauguggaccuaaa

SEQ ID NO: 116831 - RNA, 19 nt, Homo sapiens
  misc_RNA (1)...(19): siRNA sense strand
ggaccuaaauacccagaag

SEQ ID NO: 116832 - RNA, 19 nt, Homo sapiens
  misc_RNA (1)...(19): siRNA sense strand
ggaguaaauaguucuaaug

SEQ ID NO: 116833 - RNA, 19 nt, Homo sapiens
  misc_RNA (1)...(19): siRNA sense strand
ccauaucagugcuagcaaa

SEQ ID NO: 116834 - RNA, 19 nt, Homo sapiens
  misc_RNA (1)...(19): siRNA sense strand
ucaaaguuguccugcaaga

SEQ ID NO: 116835 - RNA, 19 nt, Homo sapiens
  misc_RNA (1)...(19): siRNA sense strand
ugaauggaguaaauaguuc

SEQ ID NO: 116836 - RNA, 19 nt, Homo sapiens
  misc_RNA (1)...(19): siRNA sense strand
cauauagcaucaaaguugu

SEQ ID NO: 116837 - RNA, 19 nt, Homo sapiens
  misc_RNA (1)...(19): siRNA sense strand
gccuaaugaugucuaaaga

SEQ ID NO: 116838 - RNA, 19 nt, Homo sapiens
  misc_RNA (1)...(19): siRNA sense strand
uagaauguggaccuaaaua

SEQ ID NO: 116839 - RNA, 19 nt, Homo sapiens
  misc_RNA (1)...(19): siRNA sense strand
gaguaaauaguucuaaugg

SEQ ID NO: 116840 - RNA, 19 nt, Homo sapiens
  misc_RNA (1)...(19): siRNA sense strand
cagaauucauauagcauca

SEQ ID NO: 116841 - RNA, 19 nt, Homo sapiens
  misc_RNA (1)...(19): siRNA sense strand
ccgaauauacagccuuaaa

SEQ ID NO: 116842 - RNA, 19 nt, Homo sapiens
  misc_RNA (1)...(19): siRNA sense strand
uggcagaauucauauagca

SEQ ID NO: 116843 - RNA, 19 nt, Homo sapiens
  misc_RNA (1)...(19): siRNA sense strand
gacaguguuacagcaauua

SEQ ID NO: 116844 - RNA, 19 nt, Homo sapiens
  misc_RNA (1)...(19): siRNA sense strand
ggacccaagagccauauca

SEQ ID NO: 116845 - RNA, 19 nt, Homo sapiens
  misc_RNA (1)...(19): siRNA sense strand
uaucagugcuagcaaaaug

SEQ ID NO: 116846 - RNA, 19 nt, Homo sapiens
  misc_RNA (1)...(19): siRNA sense strand
ccuaaugaugucuaaagaa

SEQ ID NO: 116847 - RNA, 19 nt, Homo sapiens
  misc_RNA (1)...(19): siRNA sense strand
gguggacccaagagccaua

SEQ ID NO: 116848 - RNA, 19 nt, Homo sapiens
  misc_RNA (1)...(19): siRNA sense strand
gaauggaguaaauaguucu

SEQ ID NO: 116849 - RNA, 19 nt, Homo sapiens
  misc_RNA (1)...(19): siRNA sense strand
gaauguggaccuaaauacc

SEQ ID NO: 116850 - RNA, 19 nt, Homo sapiens
  misc_RNA (1)...(19): siRNA sense strand
aaaauagaauguggaccua

SEQ ID NO: 116851 - RNA, 19 nt, Homo sapiens
  misc_RNA (1)...(19): siRNA sense strand
ggacaguguuacagcaauu

SEQ ID NO: 116852 - RNA, 19 nt, Homo sapiens
  misc_RNA (1)...(19): siRNA sense strand
caucaaaguuguccugcaa

SEQ ID NO: 116853 - RNA, 19 nt, Homo sapiens
  misc_RNA (1)...(19): siRNA sense strand
caaaauggcagaauucaua

SEQ ID NO: 116854 - RNA, 19 nt, Homo sapiens
  misc_RNA (1)...(19): siRNA sense strand
ucauauagcaucaaaguug

SEQ ID NO: 116855 - RNA, 19 nt, Homo sapiens
  misc_RNA (1)...(19): siRNA sense strand
aauagaauguggaccuaaa

SEQ ID NO: 116856 - RNA, 19 nt, Homo sapiens
  misc_RNA (1)...(19): siRNA sense strand
ggaccuaaauacccagaag

SEQ ID NO: 116857 - RNA, 19 nt, Homo sapiens
  misc_RNA (1)...(19): siRNA sense strand
ggaguaaauaguucuaaug

SEQ ID NO: 116858 - RNA, 19 nt, Homo sapiens
  misc_RNA (1)...(19): siRNA sense strand
ccauaucagugcuagcaaa

SEQ ID NO: 116859 - RNA, 19 nt, Homo sapiens
  misc_RNA (1)...(19): siRNA sense strand
ucaaaguuguccugcaaga

SEQ ID NO: 116860 - RNA, 19 nt, Homo sapiens
  misc_RNA (1)...(19): siRNA sense strand
ugaauggaguaaauaguuc

SEQ ID NO: 116861 - RNA, 19 nt, Homo sapiens
  misc_RNA (1)...(19): siRNA sense strand
cauauagcaucaaaguugu

SEQ ID NO: 116862 - RNA, 19 nt, Homo sapiens
  misc_RNA (1)...(19): siRNA sense strand
gccuaaugaugucuaaaga

SEQ ID NO: 116863 - RNA, 19 nt, Homo sapiens
  misc_RNA (1)...(19): siRNA sense strand
uagaauguggaccuaaaua

SEQ ID NO: 116864 - RNA, 19 nt, Homo sapiens
  misc_RNA (1)...(19): siRNA sense strand
gaguaaauaguucuaaugg

SEQ ID NO: 116865 - RNA, 19 nt, Homo sapiens
  misc_RNA (1)...(19): siRNA sense strand
cagaauucauauagcauca

SEQ ID NO: 116866 - RNA, 19 nt, Homo sapiens
  misc_RNA (1)...(19): siRNA sense strand
ccgaauauacagccuuaaa

SEQ ID NO: 116867 - RNA, 19 nt, Homo sapiens
  misc_RNA (1)...(19): siRNA sense strand
uggcagaauucauauagca

SEQ ID NO: 116868 - RNA, 19 nt, Homo sapiens
  misc_RNA (1)...(19): siRNA sense strand
gacaguguuacagcaauua

SEQ ID NO: 116869 - RNA, 19 nt, Homo sapiens
  misc_RNA (1)...(19): siRNA sense strand
ggacccaagagccauauca

SEQ ID NO: 116870 - RNA, 19 nt, Homo sapiens
  misc_RNA (1)...(19): siRNA sense strand
uaucagugcuagcaaaaug

SEQ ID NO: 116871 - RNA, 19 nt, Homo sapiens
  misc_RNA (1)...(19): siRNA sense strand
ccuaaugaugucuaaagaa

SEQ ID NO: 116872 - RNA, 19 nt, Homo sapiens
  misc_RNA (1)...(19): siRNA sense strand
gguggacccaagagccaua

SEQ ID NO: 116873 - RNA, 19 nt, Homo sapiens
  misc_RNA (1)...(19): siRNA sense strand
gaauggaguaaauaguucu

SEQ ID NO: 116874 - RNA, 19 nt, Homo sapiens
  misc_RNA (1)...(19): siRNA sense strand
gaauguggaccuaaauacc

SEQ ID NO: 116875 - RNA, 19 nt, Homo sapiens
  misc_RNA (1)...(19): siRNA sense strand
aaaauagaauguggaccua

SEQ ID NO: 116876 - RNA, 19 nt, Homo sapiens
  misc_RNA (1)...(19): siRNA sense strand
ggacaguguuacagcaauu

SEQ ID NO: 116877 - RNA, 19 nt, Homo sapiens
  misc_RNA (1)...(19): siRNA sense strand
caucaaaguuguccugcaa

SEQ ID NO: 116878 - RNA, 19 nt, Homo sapiens
  misc_RNA (1)...(19): siRNA sense strand
caaaauggcagaauucaua

SEQ ID NO: 116879 - RNA, 19 nt, Homo sapiens
  misc_RNA (1)...(19): siRNA sense strand
ucauauagcaucaaaguug

SEQ ID NO: 116880 - RNA, 19 nt, Homo sapiens
  misc_RNA (1)...(19): siRNA sense strand
aauagaauguggaccuaaa

SEQ ID NO: 116881 - RNA, 19 nt, Homo sapiens
  misc_RNA (1)...(19): siRNA sense strand
ggaccuaaauacccagaag

SEQ ID NO: 116882 - RNA, 19 nt, Homo sapiens
  misc_RNA (1)...(19): siRNA sense strand
ggaguaaauaguucuaaug

SEQ ID NO: 116883 - RNA, 19 nt, Homo sapiens
  misc_RNA (1)...(19): siRNA sense strand
ccauaucagugcuagcaaa

SEQ ID NO: 116884 - RNA, 19 nt, Homo sapiens
  misc_RNA (1)...(19): siRNA sense strand
ucaaaguuguccugcaaga

SEQ ID NO: 116885 - RNA, 19 nt, Homo sapiens
  misc_RNA (1)...(19): siRNA sense strand
ugaauggaguaaauaguuc

SEQ ID NO: 116886 - RNA, 19 nt, Homo sapiens
  misc_RNA (1)...(19): siRNA sense strand
aaccgaauauacagccuua

SEQ ID NO: 116887 - RNA, 19 nt, Homo sapiens
  misc_RNA (1)...(19): siRNA sense strand
cauauagcaucaaaguugu

SEQ ID NO: 116888 - RNA, 19 nt, Homo sapiens
  misc_RNA (1)...(19): siRNA sense strand
gccuaaugaugucuaaaga

SEQ ID NO: 116889 - RNA, 19 nt, Homo sapiens
  misc_RNA (1)...(19): siRNA sense strand
uagaauguggaccuaaaua

SEQ ID NO: 116890 - RNA, 19 nt, Homo sapiens
  misc_RNA (1)...(19): siRNA sense strand
gaguaaauaguucuaaugg

SEQ ID NO: 116891 - RNA, 19 nt, Homo sapiens
  misc_RNA (1)...(19): siRNA sense strand
cagaauucauauagcauca

SEQ ID NO: 116892 - RNA, 19 nt, Homo sapiens
  misc_RNA (1)...(19): siRNA sense strand
ccgaauauacagccuuaaa

SEQ ID NO: 116893 - RNA, 19 nt, Homo sapiens
  misc_RNA (1)...(19): siRNA sense strand
uggcagaauucauauagca

SEQ ID NO: 116894 - RNA, 19 nt, Homo sapiens
  misc_RNA (1)...(19): siRNA sense strand
gacaguguuacagcaauua

SEQ ID NO: 116895 - RNA, 19 nt, Homo sapiens
  misc_RNA (1)...(19): siRNA sense strand
ggacccaagagccauauca

SEQ ID NO: 116896 - RNA, 19 nt, Homo sapiens
  misc_RNA (1)...(19): siRNA sense strand
uaucagugcuagcaaaaug

SEQ ID NO: 116897 - RNA, 19 nt, Homo sapiens
  misc_RNA (1)...(19): siRNA sense strand
ccuaaugaugucuaaagaa

SEQ ID NO: 116898 - RNA, 19 nt, Homo sapiens
  misc_RNA (1)...(19): siRNA sense strand
gaauggaguaaauaguucu

SEQ ID NO: 116899 - RNA, 19 nt, Homo sapiens
  misc_RNA (1)...(19): siRNA sense strand
gguggacccaagagccaua

SEQ ID NO: 116900 - RNA, 19 nt, Homo sapiens
  misc_RNA (1)...(19): siRNA sense strand
gaauguggaccuaaauacc

SEQ ID NO: 116901 - RNA, 19 nt, Homo sapiens
  misc_RNA (1)...(19): siRNA sense strand
aaaauagaauguggaccua

SEQ ID NO: 116902 - RNA, 19 nt, Homo sapiens
  misc_RNA (1)...(19): siRNA sense strand
ggacaaacauacaacaauu

SEQ ID NO: 116903 - RNA, 19 nt, Homo sapiens
  misc_RNA (1)...(19): siRNA sense strand
gagcuaagacgucuaauga

SEQ ID NO: 116904 - RNA, 19 nt, Homo sapiens
  misc_RNA (1)...(19): siRNA sense strand
ggaagaacuugaagaagga

SEQ ID NO: 116905 - RNA, 19 nt, Homo sapiens
  misc_RNA (1)...(19): siRNA sense strand
gcuaagacgucuaaugaug

SEQ ID NO: 116906 - RNA, 19 nt, Homo sapiens
  misc_RNA (1)...(19): siRNA sense strand
cuaaugauguccaaagaaa

SEQ ID NO: 116907 - RNA, 19 nt, Homo sapiens
  misc_RNA (1)...(19): siRNA sense strand
cagaauauauagccugaaa

SEQ ID NO: 116908 - RNA, 19 nt, Homo sapiens
  misc_RNA (1)...(19): siRNA sense strand
ggacaggcaugauuauugg

SEQ ID NO: 116909 - RNA, 19 nt, Homo sapiens
  misc_RNA (1)...(19): siRNA sense strand
gaguuaaaguuccucguaa

SEQ ID NO: 116910 - RNA, 19 nt, Homo sapiens
  misc_RNA (1)...(19): siRNA sense strand
ggaguuaaaguuccucgua

SEQ ID NO: 116911 - RNA, 19 nt, Homo sapiens
  misc_RNA (1)...(19): siRNA sense strand
gaauauauagccugaaagu

SEQ ID NO: 116912 - RNA, 19 nt, Homo sapiens
  misc_RNA (1)...(19): siRNA sense strand
gcauaccaguguuagcaaa

SEQ ID NO: 116913 - RNA, 19 nt, Homo sapiens
  misc_RNA (1)...(19): siRNA sense strand
gaagcuccuccgucaguua

SEQ ID NO: 116914 - RNA, 19 nt, Homo sapiens
  misc_RNA (1)...(19): siRNA sense strand
uauauagccugaaaguaga

SEQ ID NO: 116915 - RNA, 19 nt, Homo sapiens
  misc_RNA (1)...(19): siRNA sense strand
caagagcuaagacgucuaa

SEQ ID NO: 116916 - RNA, 19 nt, Homo sapiens
  misc_RNA (1)...(19): siRNA sense strand
ggaccuaaauacccagaag

SEQ ID NO: 116917 - RNA, 19 nt, Homo sapiens
  misc_RNA (1)...(19): siRNA sense strand
guaggcgacgguacaguua

SEQ ID NO: 116918 - RNA, 19 nt, Homo sapiens
  misc_RNA (1)...(19): siRNA sense strand
ggccaccaaggacaaauua

SEQ ID NO: 116919 - RNA, 19 nt, Homo sapiens
  misc_RNA (1)...(19): siRNA sense strand
ccaaggacaaauuaugaaa

SEQ ID NO: 116920 - RNA, 19 nt, Homo sapiens
  misc_RNA (1)...(19): siRNA sense strand
caccaaggacaaauuauga

SEQ ID NO: 116921 - RNA, 19 nt, Homo sapiens
  misc_RNA (1)...(19): siRNA sense strand
guuaaaguuccucguaauu

SEQ ID NO: 116922 - RNA, 19 nt, Homo sapiens
  misc_RNA (1)...(19): siRNA sense strand
uagaauguggaccuaaaua

SEQ ID NO: 116923 - RNA, 19 nt, Homo sapiens
  misc_RNA (1)...(19): siRNA sense strand
gaacuugaagaaggacaaa

SEQ ID NO: 116924 - RNA, 19 nt, Homo sapiens
  misc_RNA (1)...(19): siRNA sense strand
gaaggacaaacauacaaca

SEQ ID NO: 116925 - RNA, 19 nt, Homo sapiens
  misc_RNA (1)...(19): siRNA sense strand
aguagaauguggaccuaaa

SEQ ID NO: 116926 - RNA, 19 nt, Homo sapiens
  misc_RNA (1)...(19): siRNA sense strand
gagcauaccaguguuagca

SEQ ID NO: 116927 - RNA, 19 nt, Homo sapiens
  misc_RNA (1)...(19): siRNA sense strand
uaagacgucuaaugauguc

SEQ ID NO: 116928 - RNA, 19 nt, Homo sapiens
  misc_RNA (1)...(19): siRNA sense strand
ccaccaaggacaaauuaug

SEQ ID NO: 116929 - RNA, 19 nt, Homo sapiens
  misc_RNA (1)...(19): siRNA sense strand
aaaguagaauguggaccua

SEQ ID NO: 116930 - RNA, 19 nt, Homo sapiens
  misc_RNA (1)...(19): siRNA sense strand
auauauagccugaaaguag

SEQ ID NO: 116931 - RNA, 19 nt, Homo sapiens
  misc_RNA (1)...(19): siRNA sense strand
guuggaagaacuugaagaa

SEQ ID NO: 116932 - RNA, 19 nt, Homo sapiens
  misc_RNA (1)...(19): siRNA sense strand
caccagaaggacaaacaua

SEQ ID NO: 116933 - RNA, 19 nt, Homo sapiens
  misc_RNA (1)...(19): siRNA sense strand
gcccggagcauaccagugu

SEQ ID NO: 116934 - RNA, 19 nt, Homo sapiens
  misc_RNA (1)...(19): siRNA sense strand
cagaaggacaaacauacaa

SEQ ID NO: 116935 - RNA, 19 nt, Homo sapiens
  misc_RNA (1)...(19): siRNA sense strand
gucuaaugauguccaaaga

SEQ ID NO: 116936 - RNA, 19 nt, Homo sapiens
  misc_RNA (1)...(19): siRNA sense strand
cagaagcuccuccgucagu

SEQ ID NO: 116937 - RNA, 19 nt, Homo sapiens
  misc_RNA (1)...(19): siRNA sense strand
ccagaaggacaaacauaca

SEQ ID NO: 116938 - RNA, 19 nt, Homo sapiens
  misc_RNA (1)...(19): siRNA sense strand
uggacaggcaugauuauug

SEQ ID NO: 116939 - RNA, 19 nt, Homo sapiens
  misc_RNA (1)...(19): siRNA sense strand
cuaagacgucuaaugaugu

SEQ ID NO: 116940 - RNA, 19 nt, Homo sapiens
  misc_RNA (1)...(19): siRNA sense strand
guagaauguggaccuaaau

SEQ ID NO: 116941 - RNA, 19 nt, Homo sapiens
  misc_RNA (1)...(19): siRNA sense strand
gcuggggccuugaagauga

SEQ ID NO: 116942 - RNA, 19 nt, Homo sapiens
  misc_RNA (1)...(19): siRNA sense strand
gggccaccaaggacaaauu

SEQ ID NO: 116943 - RNA, 19 nt, Homo sapiens
  misc_RNA (1)...(19): siRNA sense strand
aguuaaaguuccucguaau

SEQ ID NO: 116944 - RNA, 19 nt, Homo sapiens
  misc_RNA (1)...(19): siRNA sense strand
gcuccuccgucaguuagau

SEQ ID NO: 116945 - RNA, 19 nt, Homo sapiens
  misc_RNA (1)...(19): siRNA sense strand
ccggagcauaccaguguua

SEQ ID NO: 116946 - RNA, 19 nt, Homo sapiens
  misc_RNA (1)...(19): siRNA sense strand
gaauguggaccuaaauacc

SEQ ID NO: 116947 - RNA, 19 nt, Homo sapiens
  misc_RNA (1)...(19): siRNA sense strand
gguggacaggcaugauuau

SEQ ID NO: 116948 - RNA, 19 nt, Homo sapiens
  misc_RNA (1)...(19): siRNA sense strand
gagcagaaccgcaucauau

SEQ ID NO: 116949 - RNA, 19 nt, Homo sapiens
  misc_RNA (1)...(19): siRNA sense strand
ccauugaccucaccuuuca

SEQ ID NO: 116950 - RNA, 19 nt, Homo sapiens
  misc_RNA (1)...(19): siRNA sense strand
gcagaaccgcaucauauuc

SEQ ID NO: 116951 - RNA, 19 nt, Homo sapiens
  misc_RNA (1)...(19): siRNA sense strand
acccuucucuguccauuga

SEQ ID NO: 116952 - RNA, 19 nt, Homo sapiens
  misc_RNA (1)...(19): siRNA sense strand
cgagcagaaccgcaucaua

SEQ ID NO: 116953 - RNA, 19 nt, Homo sapiens
  misc_RNA (1)...(19): siRNA sense strand
caacccuucucuguccauu

SEQ ID NO: 116954 - RNA, 19 nt, Homo sapiens
  misc_RNA (1)...(19): siRNA sense strand
guccauugaccucaccuuu

SEQ ID NO: 116955 - RNA, 19 nt, Homo sapiens
  misc_RNA (1)...(19): siRNA sense strand
cgggacaacccuucucugu

SEQ ID NO: 116956 - RNA, 19 nt, Homo sapiens
  misc_RNA (1)...(19): siRNA sense strand
guacagagcuaguaacaua

SEQ ID NO: 116957 - RNA, 19 nt, Homo sapiens
  misc_RNA (1)...(19): siRNA sense strand
gaagugucaucaucaauug

SEQ ID NO: 116958 - RNA, 19 nt, Homo sapiens
  misc_RNA (1)...(19): siRNA sense strand
ccacagaggucgugaaagu

SEQ ID NO: 116959 - RNA, 19 nt, Homo sapiens
  misc_RNA (1)...(19): siRNA sense strand
cauaugaucuaaugaagga

SEQ ID NO: 116960 - RNA, 19 nt, Homo sapiens
  misc_RNA (1)...(19): siRNA sense strand
guugguaccuuccuucuug

SEQ ID NO: 116961 - RNA, 19 nt, Homo sapiens
  misc_RNA (1)...(19): siRNA sense strand
gaaagaaacagcaccuagu

SEQ ID NO: 116962 - RNA, 19 nt, Homo sapiens
  misc_RNA (1)...(19): siRNA sense strand
gcccaacugugcaaugaaa

SEQ ID NO: 116963 - RNA, 19 nt, Homo sapiens
  misc_RNA (1)...(19): siRNA sense strand
gcuaguaacauaugaucua

SEQ ID NO: 116964 - RNA, 19 nt, Homo sapiens
  misc_RNA (1)...(19): siRNA sense strand
gcucuucucagcuggaaua

SEQ ID NO: 116965 - RNA, 19 nt, Homo sapiens
  misc_RNA (1)...(19): siRNA sense strand
ggaacgucauuauguuugu

SEQ ID NO: 116966 - RNA, 19 nt, Homo sapiens
  misc_RNA (1)...(19): siRNA sense strand
ugagaagugucaucaucaa

SEQ ID NO: 116967 - RNA, 19 nt, Homo sapiens
  misc_RNA (1)...(19): siRNA sense strand
aaagaaacagcaccuaguu

SEQ ID NO: 116968 - RNA, 19 nt, Homo sapiens
  misc_RNA (1)...(19): siRNA sense strand
cgagaacugucaaagucaa

SEQ ID NO: 116969 - RNA, 19 nt, Homo sapiens
  misc_RNA (1)...(19): siRNA sense strand
ggacuacucccaaucugau

SEQ ID NO: 116970 - RNA, 19 nt, Homo sapiens
  misc_RNA (1)...(19): siRNA sense strand
gaacgucauuauguuugug

SEQ ID NO: 116971 - RNA, 19 nt, Homo sapiens
  misc_RNA (1)...(19): siRNA sense strand
ggaguggcaguauucauug

SEQ ID NO: 116972 - RNA, 19 nt, Homo sapiens
  misc_RNA (1)...(19): siRNA sense strand
cguccaguguuauuaggua

SEQ ID NO: 116973 - RNA, 19 nt, Homo sapiens
  misc_RNA (1)...(19): siRNA sense strand
ccuggaacgucauuauguu

SEQ ID NO: 116974 - RNA, 19 nt, Homo sapiens
  misc_RNA (1)...(19): siRNA sense strand
gaccaacggcuuucuucaa

SEQ ID NO: 116975 - RNA, 19 nt, Homo sapiens
  misc_RNA (1)...(19): siRNA sense strand
caucaauuguacagagcua

SEQ ID NO: 116976 - RNA, 19 nt, Homo sapiens
  misc_RNA (1)...(19): siRNA sense strand
agaagugucaucaucaauu

SEQ ID NO: 116977 - RNA, 19 nt, Homo sapiens
  misc_RNA (1)...(19): siRNA sense strand
caacugaaacgagaacugu

SEQ ID NO: 116978 - RNA, 19 nt, Homo sapiens
  misc_RNA (1)...(19): siRNA sense strand
gugcccaacugugcaauga

SEQ ID NO: 116979 - RNA, 19 nt, Homo sapiens
  misc_RNA (1)...(19): siRNA sense strand
aacgagaacugucaaaguc

SEQ ID NO: 116980 - RNA, 19 nt, Homo sapiens
  misc_RNA (1)...(19): siRNA sense strand
ggacuuauaaugcguacag

SEQ ID NO: 116981 - RNA, 19 nt, Homo sapiens
  misc_RNA (1)...(19): siRNA sense strand
gaaacgagaacugucaaag

SEQ ID NO: 116982 - RNA, 19 nt, Homo sapiens
  misc_RNA (1)...(19): siRNA sense strand
ugcccgacguccaguguua

SEQ ID NO: 116983 - RNA, 19 nt, Homo sapiens
  misc_RNA (1)...(19): siRNA sense strand
gaagggcggaugaaacucu

SEQ ID NO: 116984 - RNA, 19 nt, Homo sapiens
  misc_RNA (1)...(19): siRNA sense strand
gauccuggaacgucauuau

SEQ ID NO: 116985 - RNA, 19 nt, Homo sapiens
  misc_RNA (1)...(19): siRNA sense strand
ggaaucaaaccucgcuaca

SEQ ID NO: 116986 - RNA, 19 nt, Homo sapiens
  misc_RNA (1)...(19): siRNA sense strand
gaacaacugaaacgagaac

SEQ ID NO: 116987 - RNA, 19 nt, Homo sapiens
  misc_RNA (1)...(19): siRNA sense strand
aacaaucaccgcuguggua

SEQ ID NO: 116988 - RNA, 19 nt, Homo sapiens
  misc_RNA (1)...(19): siRNA sense strand
aaacgagaacugucaaagu

SEQ ID NO: 116989 - RNA, 19 nt, Homo sapiens
  misc_RNA (1)...(19): siRNA sense strand
cagagcuaguaacauauga

SEQ ID NO: 116990 - RNA, 19 nt, Homo sapiens
  misc_RNA (1)...(19): siRNA sense strand
gggcuucagcggcaaauca

SEQ ID NO: 116991 - RNA, 19 nt, Homo sapiens
  misc_RNA (1)...(19): siRNA sense strand
ggaccaacggcuuucuuca

SEQ ID NO: 116992 - RNA, 19 nt, Homo sapiens
  misc_RNA (1)...(19): siRNA sense strand
guacagaauaauagcaaca

SEQ ID NO: 116993 - RNA, 19 nt, Homo sapiens
  misc_RNA (1)...(19): siRNA sense strand
gagcuaguaacauaugauc

SEQ ID NO: 116994 - RNA, 19 nt, Homo sapiens
  misc_RNA (1)...(19): siRNA sense strand
cagaagggcggaugaaacu

SEQ ID NO: 116995 - RNA, 19 nt, Homo sapiens
  misc_RNA (1)...(19): siRNA sense strand
gagaagugucaucaucaau

SEQ ID NO: 116996 - RNA, 19 nt, Homo sapiens
  misc_RNA (1)...(19): siRNA sense strand
gcaacaaccgaaggcuuga

SEQ ID NO: 116997 - RNA, 19 nt, Homo sapiens
  misc_RNA (1)...(19): siRNA sense strand
cauuauguuugugugcuuu

SEQ ID NO: 116998 - RNA, 19 nt, Homo sapiens
  misc_RNA (1)...(19): siRNA sense strand
ccaaucugaugagaagugu

SEQ ID NO: 116999 - RNA, 19 nt, Homo sapiens
  misc_RNA (1)...(19): siRNA sense strand
aaacagaagggcggaugaa

SEQ ID NO: 117000 - RNA, 19 nt, Homo sapiens
  misc_RNA (1)...(19): siRNA sense strand
uggcggacgugaucaccuu

SEQ ID NO: 117001 - RNA, 19 nt, Homo sapiens
  misc_RNA (1)...(19): siRNA sense strand
cuugacgggucuuuggaaa

SEQ ID NO: 117002 - RNA, 19 nt, Homo sapiens
  misc_RNA (1)...(19): siRNA sense strand
caacauauuagcagaugac

SEQ ID NO: 117003 - RNA, 19 nt, Homo sapiens
  misc_RNA (1)...(19): siRNA sense strand
ccugacagccucggacgua

SEQ ID NO: 117004 - RNA, 19 nt, Homo sapiens
  misc_RNA (1)...(19): siRNA sense strand
aggaguggcaguauucauu

SEQ ID NO: 117005 - RNA, 19 nt, Homo sapiens
  misc_RNA (1)...(19): siRNA sense strand
aacaacauauuagcagaug

SEQ ID NO: 117006 - RNA, 19 nt, Homo sapiens
  misc_RNA (1)...(19): siRNA sense strand
caauuguacagagcuagua

SEQ ID NO: 117007 - RNA, 19 nt, Homo sapiens
  misc_RNA (1)...(19): siRNA sense strand
acagaggucgugaaaguca

SEQ ID NO: 117008 - RNA, 19 nt, Homo sapiens
  misc_RNA (1)...(19): siRNA sense strand
cgacguccaguguuauuag

SEQ ID NO: 117009 - RNA, 19 nt, Homo sapiens
  misc_RNA (1)...(19): siRNA sense strand
cacuuggugucggcucuua

SEQ ID NO: 117010 - RNA, 19 nt, Homo sapiens
  misc_RNA (1)...(19): siRNA sense strand
gcguacagaauaauagcaa

SEQ ID NO: 117011 - RNA, 19 nt, Homo sapiens
  misc_RNA (1)...(19): siRNA sense strand
gugcuuugaacaacugaaa

SEQ ID NO: 117012 - RNA, 19 nt, Homo sapiens
  misc_RNA (1)...(19): siRNA sense strand
gggaaagaaacagcaccua

SEQ ID NO: 117013 - RNA, 19 nt, Homo sapiens
  misc_RNA (1)...(19): siRNA sense strand
aaucaccgcugugguaaaa

SEQ ID NO: 117014 - RNA, 19 nt, Homo sapiens
  misc_RNA (1)...(19): siRNA sense strand
accaacggcuuucuucaag

SEQ ID NO: 117015 - RNA, 19 nt, Homo sapiens
  misc_RNA (1)...(19): siRNA sense strand
caacugugcaaugaaagug

SEQ ID NO: 117016 - RNA, 19 nt, Homo sapiens
  misc_RNA (1)...(19): siRNA sense strand
cuuauaaugcguacagaau

SEQ ID NO: 117017 - RNA, 19 nt, Homo sapiens
  misc_RNA (1)...(19): siRNA sense strand
agagccaucuccacggaau

SEQ ID NO: 117018 - RNA, 19 nt, Homo sapiens
  misc_RNA (1)...(19): siRNA sense strand
gaguggcaguauucauugg

SEQ ID NO: 117019 - RNA, 19 nt, Homo sapiens
  misc_RNA (1)...(19): siRNA sense strand
cuggaggaguggcaguauu

SEQ ID NO: 117020 - RNA, 19 nt, Homo sapiens
  misc_RNA (1)...(19): siRNA sense strand
ugaaacgagaacugucaaa

SEQ ID NO: 117021 - RNA, 19 nt, Homo sapiens
  misc_RNA (1)...(19): siRNA sense strand
guccaguguuauuagguau

SEQ ID NO: 117022 - RNA, 19 nt, Homo sapiens
  misc_RNA (1)...(19): siRNA sense strand
ucauuauguuugugugcuu

SEQ ID NO: 117023 - RNA, 19 nt, Homo sapiens
  misc_RNA (1)...(19): siRNA sense strand
acaaucaccgcugugguaa

SEQ ID NO: 117024 - RNA, 19 nt, Homo sapiens
  misc_RNA (1)...(19): siRNA sense strand
aagggcggaugaaacucua

SEQ ID NO: 117025 - RNA, 19 nt, Homo sapiens
  misc_RNA (1)...(19): siRNA sense strand
aaagguguccugggaacaa

SEQ ID NO: 117026 - RNA, 19 nt, Homo sapiens
  misc_RNA (1)...(19): siRNA sense strand
acagagcuaguaacauaug

SEQ ID NO: 117027 - RNA, 19 nt, Homo sapiens
  misc_RNA (1)...(19): siRNA sense strand
aaucugaugagaaguguca

SEQ ID NO: 117028 - RNA, 19 nt, Homo sapiens
  misc_RNA (1)...(19): siRNA sense strand
gauaugaaguugcaaagua

SEQ ID NO: 117029 - RNA, 19 nt, Homo sapiens
  misc_RNA (1)...(19): siRNA sense strand
gaacuucacauccaagaua

SEQ ID NO: 117030 - RNA, 19 nt, Homo sapiens
  misc_RNA (1)...(19): siRNA sense strand
caauguaacugguuucaaa

SEQ ID NO: 117031 - RNA, 19 nt, Homo sapiens
  misc_RNA (1)...(19): siRNA sense strand
gcgaauccaugacaauaua

SEQ ID NO: 117032 - RNA, 19 nt, Homo sapiens
  misc_RNA (1)...(19): siRNA sense strand
ggaccaaacuacgaauuaa

SEQ ID NO: 117033 - RNA, 19 nt, Homo sapiens
  misc_RNA (1)...(19): siRNA sense strand
gauuacaccucaacaagaa

SEQ ID NO: 117034 - RNA, 19 nt, Homo sapiens
  misc_RNA (1)...(19): siRNA sense strand
gaugcuagauuguuuauag

SEQ ID NO: 117035 - RNA, 19 nt, Homo sapiens
  misc_RNA (1)...(19): siRNA sense strand
gauccuaacuuaaucaaca

SEQ ID NO: 117036 - RNA, 19 nt, Homo sapiens
  misc_RNA (1)...(19): siRNA sense strand
ggaaugucuuguuuaauga

SEQ ID NO: 117037 - RNA, 19 nt, Homo sapiens
  misc_RNA (1)...(19): siRNA sense strand
gggcuuugcugccaccuua

SEQ ID NO: 117038 - RNA, 19 nt, Homo sapiens
  misc_RNA (1)...(19): siRNA sense strand
gaucuuauauggauuugug

SEQ ID NO: 117039 - RNA, 19 nt, Homo sapiens
  misc_RNA (1)...(19): siRNA sense strand
ucaacaaccuggaaacauu

SEQ ID NO: 117040 - RNA, 19 nt, Homo sapiens
  misc_RNA (1)...(19): siRNA sense strand
gaaaagauguguuggauca

SEQ ID NO: 117041 - RNA, 19 nt, Homo sapiens
  misc_RNA (1)...(19): siRNA sense strand
gaugggauauuaugguauu

SEQ ID NO: 117042 - RNA, 19 nt, Homo sapiens
  misc_RNA (1)...(19): siRNA sense strand
ggaaauccuagauguauaa

SEQ ID NO: 117043 - RNA, 19 nt, Homo sapiens
  misc_RNA (1)...(19): siRNA sense strand
gaacuggucgcuacagauu

SEQ ID NO: 117044 - RNA, 19 nt, Homo sapiens
  misc_RNA (1)...(19): siRNA sense strand
acaggaaugucuuguuuaa

SEQ ID NO: 117045 - RNA, 19 nt, Homo sapiens
  misc_RNA (1)...(19): siRNA sense strand
caggaggacuuauagcuuu

SEQ ID NO: 117046 - RNA, 19 nt, Homo sapiens
  misc_RNA (1)...(19): siRNA sense strand
gcaaaacucuggcucauau

SEQ ID NO: 117047 - RNA, 19 nt, Homo sapiens
  misc_RNA (1)...(19): siRNA sense strand
gaaggcaacugacaaacag

SEQ ID NO: 117048 - RNA, 19 nt, Homo sapiens
  misc_RNA (1)...(19): siRNA sense strand
gauaguggaauaagaguaa

SEQ ID NO: 117049 - RNA, 19 nt, Homo sapiens
  misc_RNA (1)...(19): siRNA sense strand
ccaggugucucucuucuga

SEQ ID NO: 117050 - RNA, 19 nt, Homo sapiens
  misc_RNA (1)...(19): siRNA sense strand
cuauaucucugccaaugua

SEQ ID NO: 117051 - RNA, 19 nt, Homo sapiens
  misc_RNA (1)...(19): siRNA sense strand
cagaugggauauuauggua

SEQ ID NO: 117052 - RNA, 19 nt, Homo sapiens
  misc_RNA (1)...(19): siRNA sense strand
uuacugacauggugaauca

SEQ ID NO: 117053 - RNA, 19 nt, Homo sapiens
  misc_RNA (1)...(19): siRNA sense strand
aggaaugucuuguuuaaug

SEQ ID NO: 117054 - RNA, 19 nt, Homo sapiens
  misc_RNA (1)...(19): siRNA sense strand
caacugacaaacagccuua

SEQ ID NO: 117055 - RNA, 19 nt, Homo sapiens
  misc_RNA (1)...(19): siRNA sense strand
caagaaggcaacugacaaa

SEQ ID NO: 117056 - RNA, 19 nt, Homo sapiens
  misc_RNA (1)...(19): siRNA sense strand
gauuugugauaguggaaua

SEQ ID NO: 117057 - RNA, 19 nt, Homo sapiens
  misc_RNA (1)...(19): siRNA sense strand
ccuuagagcagguauauuu

SEQ ID NO: 117058 - RNA, 19 nt, Homo sapiens
  misc_RNA (1)...(19): siRNA sense strand
uggcaugguuuauauuuga

SEQ ID NO: 117059 - RNA, 19 nt, Homo sapiens
  misc_RNA (1)...(19): siRNA sense strand
guguucagaugggauauua

SEQ ID NO: 117060 - RNA, 19 nt, Homo sapiens
  misc_RNA (1)...(19): siRNA sense strand
uaacugguuucaaaugugu

SEQ ID NO: 117061 - RNA, 19 nt, Homo sapiens
  misc_RNA (1)...(19): siRNA sense strand
gagaacuggucgcuacaga

SEQ ID NO: 117062 - RNA, 19 nt, Homo sapiens
  misc_RNA (1)...(19): siRNA sense strand
gaagugcuccuuuguguac

SEQ ID NO: 117063 - RNA, 19 nt, Homo sapiens
  misc_RNA (1)...(19): siRNA sense strand
ucaaaugugugacaggaau

SEQ ID NO: 117064 - RNA, 19 nt, Homo sapiens
  misc_RNA (1)...(19): siRNA sense strand
acaaacagccuuauagcaa

SEQ ID NO: 117065 - RNA, 19 nt, Homo sapiens
  misc_RNA (1)...(19): siRNA sense strand
gaucaagcaggaggacuua

SEQ ID NO: 117066 - RNA, 19 nt, Homo sapiens
  misc_RNA (1)...(19): siRNA sense strand
cagauacgcuuacugacau

SEQ ID NO: 117067 - RNA, 19 nt, Homo sapiens
  misc_RNA (1)...(19): siRNA sense strand
acuauaagcuggagaacug

SEQ ID NO: 117068 - RNA, 19 nt, Homo sapiens
  misc_RNA (1)...(19): siRNA sense strand
aauaugaagugcuccuuug

SEQ ID NO: 117069 - RNA, 19 nt, Homo sapiens
  misc_RNA (1)...(19): siRNA sense strand
gcaauguccacucaaguug

SEQ ID NO: 117070 - RNA, 19 nt, Homo sapiens
  misc_RNA (1)...(19): siRNA sense strand
guacauugccgaagauuac

SEQ ID NO: 117071 - RNA, 19 nt, Homo sapiens
  misc_RNA (1)...(19): siRNA sense strand
ucaagcaggaggacuuaua

SEQ ID NO: 117072 - RNA, 19 nt, Homo sapiens
  misc_RNA (1)...(19): siRNA sense strand
guaacugguuucaaaugug

SEQ ID NO: 117073 - RNA, 19 nt, Homo sapiens
  misc_RNA (1)...(19): siRNA sense strand
aaaguuggcauuaauccua

SEQ ID NO: 117074 - RNA, 19 nt, Homo sapiens
  misc_RNA (1)...(19): siRNA sense strand
caguuucaauccagaauga

SEQ ID NO: 117075 - RNA, 19 nt, Homo sapiens
  misc_RNA (1)...(19): siRNA sense strand
ugaccgagguuggagguuu

SEQ ID NO: 117076 - RNA, 19 nt, Homo sapiens
  misc_RNA (1)...(19): siRNA sense strand
uaucaucuacacccgauua

SEQ ID NO: 117077 - RNA, 19 nt, Homo sapiens
  misc_RNA (1)...(19): siRNA sense strand
ucacauccaagauacuaua

SEQ ID NO: 117078 - RNA, 19 nt, Homo sapiens
  misc_RNA (1)...(19): siRNA sense strand
gguagauccuaacuuaauc

SEQ ID NO: 117079 - RNA, 19 nt, Homo sapiens
  misc_RNA (1)...(19): siRNA sense strand
caugcuuccugcuacaaua

SEQ ID NO: 117080 - RNA, 19 nt, Homo sapiens
  misc_RNA (1)...(19): siRNA sense strand
guaauuccagauacgcuua

SEQ ID NO: 117081 - RNA, 19 nt, Homo sapiens
  misc_RNA (1)...(19): siRNA sense strand
ggguagauccuaacuuaau

SEQ ID NO: 117082 - RNA, 19 nt, Homo sapiens
  misc_RNA (1)...(19): siRNA sense strand
guugccaguuuaauuauug

SEQ ID NO: 117083 - RNA, 19 nt, Homo sapiens
  misc_RNA (1)...(19): siRNA sense strand
gcaggaggacuuauagcuu

SEQ ID NO: 117084 - RNA, 19 nt, Homo sapiens
  misc_RNA (1)...(19): siRNA sense strand
aaauguugaugcuagauug

SEQ ID NO: 117085 - RNA, 19 nt, Homo sapiens
  misc_RNA (1)...(19): siRNA sense strand
ugccgaagauuacuuuaug

SEQ ID NO: 117086 - RNA, 19 nt, Homo sapiens
  misc_RNA (1)...(19): siRNA sense strand
gaccgagguuggagguuug

SEQ ID NO: 117087 - RNA, 19 nt, Homo sapiens
  misc_RNA (1)...(19): siRNA sense strand
caaccuggaaacauucuuu

SEQ ID NO: 117088 - RNA, 19 nt, Homo sapiens
  misc_RNA (1)...(19): siRNA sense strand
uaacaugcuuccugcuaca

SEQ ID NO: 117089 - RNA, 19 nt, Homo sapiens
  misc_RNA (1)...(19): siRNA sense strand
uaagaguaauuccagauac

SEQ ID NO: 117090 - RNA, 19 nt, Homo sapiens
  misc_RNA (1)...(19): siRNA sense strand
guugcaaaguaugaucuua

SEQ ID NO: 117091 - RNA, 19 nt, Homo sapiens
  misc_RNA (1)...(19): siRNA sense strand
gguuggagguuugcaaugu

SEQ ID NO: 117092 - RNA, 19 nt, Homo sapiens
  misc_RNA (1)...(19): siRNA sense strand
gaucagguggaccaaacua

SEQ ID NO: 117093 - RNA, 19 nt, Homo sapiens
  misc_RNA (1)...(19): siRNA sense strand
ucaacaagaaggcaacuga

SEQ ID NO: 117094 - RNA, 19 nt, Homo sapiens
  misc_RNA (1)...(19): siRNA sense strand
gcucauauucaauuucuca

SEQ ID NO: 117095 - RNA, 19 nt, Homo sapiens
  misc_RNA (1)...(19): siRNA sense strand
ccauugauguauguaagaa

SEQ ID NO: 117096 - RNA, 19 nt, Homo sapiens
  misc_RNA (1)...(19): siRNA sense strand
gagaaaagauguguuggau

SEQ ID NO: 117097 - RNA, 19 nt, Homo sapiens
  misc_RNA (1)...(19): siRNA sense strand
caacaaccuggaaacauuc

SEQ ID NO: 117098 - RNA, 19 nt, Homo sapiens
  misc_RNA (1)...(19): siRNA sense strand
ccagauacgcuuacugaca

SEQ ID NO: 117099 - RNA, 19 nt, Homo sapiens
  misc_RNA (1)...(19): siRNA sense strand
caaauguugaugcuagauu

SEQ ID NO: 117100 - RNA, 19 nt, Homo sapiens
  misc_RNA (1)...(19): siRNA sense strand
gccaggauaugaaguugca

SEQ ID NO: 117101 - RNA, 19 nt, Homo sapiens
  misc_RNA (1)...(19): siRNA sense strand
guucagaugggauauuaug

SEQ ID NO: 117102 - RNA, 19 nt, Homo sapiens
  misc_RNA (1)...(19): siRNA sense strand
uggaccaaacuacgaauua

SEQ ID NO: 117103 - RNA, 19 nt, Homo sapiens
  misc_RNA (1)...(19): siRNA sense strand
uguaacugguuucaaaugu

SEQ ID NO: 117104 - RNA, 19 nt, Homo sapiens
  misc_RNA (1)...(19): siRNA sense strand
gugaaucaaaugacagaaa

SEQ ID NO: 117105 - RNA, 19 nt, Homo sapiens
  misc_RNA (1)...(19): siRNA sense strand
ugaaagggguagauccuaa

SEQ ID NO: 117106 - RNA, 19 nt, Homo sapiens
  misc_RNA (1)...(19): siRNA sense strand
cauggugaaucaaaugaca

SEQ ID NO: 117107 - RNA, 19 nt, Homo sapiens
  misc_RNA (1)...(19): siRNA sense strand
ugcuguggcugaugcauuu

SEQ ID NO: 117108 - RNA, 19 nt, Homo sapiens
  misc_RNA (1)...(19): siRNA sense strand
gagcagguauauuuuggaa

SEQ ID NO: 117109 - RNA, 19 nt, Homo sapiens
  misc_RNA (1)...(19): siRNA sense strand
gacaaacagccuuauagca

SEQ ID NO: 117110 - RNA, 19 nt, Homo sapiens
  misc_RNA (1)...(19): siRNA sense strand
gccaauuucagaaugcuuu

SEQ ID NO: 117111 - RNA, 19 nt, Homo sapiens
  misc_RNA (1)...(19): siRNA sense strand
gugagccaauuucagaaug

SEQ ID NO: 117112 - RNA, 19 nt, Homo sapiens
  misc_RNA (1)...(19): siRNA sense strand
caaacuacgaauuaacaug

SEQ ID NO: 117113 - RNA, 19 nt, Homo sapiens
  misc_RNA (1)...(19): siRNA sense strand
ggaucaagcaggaggacuu

SEQ ID NO: 117114 - RNA, 19 nt, Homo sapiens
  misc_RNA (1)...(19): siRNA sense strand
gaugauccagccauugaug

SEQ ID NO: 117115 - RNA, 19 nt, Homo sapiens
  misc_RNA (1)...(19): siRNA sense strand
uuucauggcuaucaucuac

SEQ ID NO: 117116 - RNA, 19 nt, Homo sapiens
  misc_RNA (1)...(19): siRNA sense strand
gguuugcaauguccacuca

SEQ ID NO: 117117 - RNA, 19 nt, Homo sapiens
  misc_RNA (1)...(19): siRNA sense strand
cgauuacaccucaacaaga

SEQ ID NO: 117118 - RNA, 19 nt, Homo sapiens
  misc_RNA (1)...(19): siRNA sense strand
uguugaugcuagauuguuu

SEQ ID NO: 117119 - RNA, 19 nt, Homo sapiens
  misc_RNA (1)...(19): siRNA sense strand
ccgcgaauccaugacaaua

SEQ ID NO: 117120 - RNA, 19 nt, Homo sapiens
  misc_RNA (1)...(19): siRNA sense strand
agggguagauccuaacuua

SEQ ID NO: 117121 - RNA, 19 nt, Homo sapiens
  misc_RNA (1)...(19): siRNA sense strand
aaagauguguuggaucaag

SEQ ID NO: 117122 - RNA, 19 nt, Homo sapiens
  misc_RNA (1)...(19): siRNA sense strand
gacauggugaaucaaauga

SEQ ID NO: 117123 - RNA, 19 nt, Homo sapiens
  misc_RNA (1)...(19): siRNA sense strand
gaaguugcaaaguaugauc

SEQ ID NO: 117124 - RNA, 19 nt, Homo sapiens
  misc_RNA (1)...(19): siRNA sense strand
ccaacuauaagcuggagaa

SEQ ID NO: 117125 - RNA, 19 nt, Homo sapiens
  misc_RNA (1)...(19): siRNA sense strand
uacuauaucucugccaaug

SEQ ID NO: 117126 - RNA, 19 nt, Homo sapiens
  misc_RNA (1)...(19): siRNA sense strand
gcucccaggugucucucuu

SEQ ID NO: 117127 - RNA, 19 nt, Homo sapiens
  misc_RNA (1)...(19): siRNA sense strand
ugacauggugaaucaaaug

SEQ ID NO: 117128 - RNA, 19 nt, Homo sapiens
  misc_RNA (1)...(19): siRNA sense strand
uaaagaagcuggaugaaca

SEQ ID NO: 117129 - RNA, 19 nt, Homo sapiens
  misc_RNA (1)...(19): siRNA sense strand
ggaggaagaccuugacuuu

SEQ ID NO: 117130 - RNA, 19 nt, Homo sapiens
  misc_RNA (1)...(19): siRNA sense strand
gaacaguaccagaaguaua

SEQ ID NO: 117131 - RNA, 19 nt, Homo sapiens
  misc_RNA (1)...(19): siRNA sense strand
gaacucaaccuugcucaaa

SEQ ID NO: 117132 - RNA, 19 nt, Homo sapiens
  misc_RNA (1)...(19): siRNA sense strand
gaaugagacugcagauaca

SEQ ID NO: 117133 - RNA, 19 nt, Homo sapiens
  misc_RNA (1)...(19): siRNA sense strand
ggacaguuguggcaaagga

SEQ ID NO: 117134 - RNA, 19 nt, Homo sapiens
  misc_RNA (1)...(19): siRNA sense strand
gcucaggcauuguuggaaa

SEQ ID NO: 117135 - RNA, 19 nt, Homo sapiens
  misc_RNA (1)...(19): siRNA sense strand
ggaaugagacugcagauac

SEQ ID NO: 117136 - RNA, 19 nt, Homo sapiens
  misc_RNA (1)...(19): siRNA sense strand
aaacagacuuuggaaauuc

SEQ ID NO: 117137 - RNA, 19 nt, Homo sapiens
  misc_RNA (1)...(19): siRNA sense strand
gaagcuggaugaacaguac

SEQ ID NO: 117138 - RNA, 19 nt, Homo sapiens
  misc_RNA (1)...(19): siRNA sense strand
gaaauuaaacagacuuugg

SEQ ID NO: 117139 - RNA, 19 nt, Homo sapiens
  misc_RNA (1)...(19): siRNA sense strand
gauguagauuccuucauga

SEQ ID NO: 117140 - RNA, 19 nt, Homo sapiens
  misc_RNA (1)...(19): siRNA sense strand
gauucuugcuggcagauaa

SEQ ID NO: 117141 - RNA, 19 nt, Homo sapiens
  misc_RNA (1)...(19): siRNA sense strand
ugaaacagccugggaauga

SEQ ID NO: 117142 - RNA, 19 nt, Homo sapiens
  misc_RNA (1)...(19): siRNA sense strand
gggcuaauguaaugcuuga

SEQ ID NO: 117143 - RNA, 19 nt, Homo sapiens
  misc_RNA (1)...(19): siRNA sense strand
ugaugaagcucaggcauug

SEQ ID NO: 117144 - RNA, 19 nt, Homo sapiens
  misc_RNA (1)...(19): siRNA sense strand
uaaggacaguuguggcaaa

SEQ ID NO: 117145 - RNA, 19 nt, Homo sapiens
  misc_RNA (1)...(19): siRNA sense strand
gaaacaaggaugacucuac

SEQ ID NO: 117146 - RNA, 19 nt, Homo sapiens
  misc_RNA (1)...(19): siRNA sense strand
agauguagauuccuucaug

SEQ ID NO: 117147 - RNA, 19 nt, Homo sapiens
  misc_RNA (1)...(19): siRNA sense strand
guagauuccuucaugaaac

SEQ ID NO: 117148 - RNA, 19 nt, Homo sapiens
  misc_RNA (1)...(19): siRNA sense strand
aaggaugacucuaccaaga

SEQ ID NO: 117149 - RNA, 19 nt, Homo sapiens
  misc_RNA (1)...(19): siRNA sense strand
ucaauuuacuaccacagaa

SEQ ID NO: 117150 - RNA, 19 nt, Homo sapiens
  misc_RNA (1)...(19): siRNA sense strand
cgagaucaauuuacuacca

SEQ ID NO: 117151 - RNA, 19 nt, Homo sapiens
  misc_RNA (1)...(19): siRNA sense strand
gaaacagccugggaaugag

SEQ ID NO: 117152 - RNA, 19 nt, Homo sapiens
  misc_RNA (1)...(19): siRNA sense strand
uggccaggguuuauaauug

SEQ ID NO: 117153 - RNA, 19 nt, Homo sapiens
  misc_RNA (1)...(19): siRNA sense strand
gaaauggccacagggaaug

SEQ ID NO: 117154 - RNA, 19 nt, Homo sapiens
  misc_RNA (1)...(19): siRNA sense strand
caaccuugcucaaaagaaa

SEQ ID NO: 117155 - RNA, 19 nt, Homo sapiens
  misc_RNA (1)...(19): siRNA sense strand
guaccagaaguauaaguuu

SEQ ID NO: 117156 - RNA, 19 nt, Homo sapiens
  misc_RNA (1)...(19): siRNA sense strand
aacaguaccagaaguauaa

SEQ ID NO: 117157 - RNA, 19 nt, Homo sapiens
  misc_RNA (1)...(19): siRNA sense strand
gaugaacaguaccagaagu

SEQ ID NO: 117158 - RNA, 19 nt, Homo sapiens
  misc_RNA (1)...(19): siRNA sense strand
aggaagaccuugacuuucu

SEQ ID NO: 117159 - RNA, 19 nt, Homo sapiens
  misc_RNA (1)...(19): siRNA sense strand
cuaccaagaacaaagcaua

SEQ ID NO: 117160 - RNA, 19 nt, Homo sapiens
  misc_RNA (1)...(19): siRNA sense strand
caaaagaaaagaaggcuaa

SEQ ID NO: 117161 - RNA, 19 nt, Homo sapiens
  misc_RNA (1)...(19): siRNA sense strand
ggccaggguuuauaauugg

SEQ ID NO: 117162 - RNA, 19 nt, Homo sapiens
  misc_RNA (1)...(19): siRNA sense strand
aaagaagaaacaaggauga

SEQ ID NO: 117163 - RNA, 19 nt, Homo sapiens
  misc_RNA (1)...(19): siRNA sense strand
gcuaauguaaugcuugaau

SEQ ID NO: 117164 - RNA, 19 nt, Homo sapiens
  misc_RNA (1)...(19): siRNA sense strand
uagauuccuucaugaaaca

SEQ ID NO: 117165 - RNA, 19 nt, Homo sapiens
  misc_RNA (1)...(19): siRNA sense strand
ggaugacucuaccaagaac

SEQ ID NO: 117166 - RNA, 19 nt, Homo sapiens
  misc_RNA (1)...(19): siRNA sense strand
uauuaaagaagcuggauga

SEQ ID NO: 117167 - RNA, 19 nt, Homo sapiens
  misc_RNA (1)...(19): siRNA sense strand
gggaaugagacugcagaua

SEQ ID NO: 117168 - RNA, 19 nt, Homo sapiens
  misc_RNA (1)...(19): siRNA sense strand
caauauggccaggguuuau

SEQ ID NO: 117169 - RNA, 19 nt, Homo sapiens
  misc_RNA (1)...(19): siRNA sense strand
gaaaagaaggcuaaaaggu

SEQ ID NO: 117170 - RNA, 19 nt, Homo sapiens
  misc_RNA (1)...(19): siRNA sense strand
ucaauauggccaggguuua

SEQ ID NO: 117171 - RNA, 19 nt, Homo sapiens
  misc_RNA (1)...(19): siRNA sense strand
gaggaagaccuugacuuuc

SEQ ID NO: 117172 - RNA, 19 nt, Homo sapiens
  misc_RNA (1)...(19): siRNA sense strand
agaaauggccacagggaau

SEQ ID NO: 117173 - RNA, 19 nt, Homo sapiens
  misc_RNA (1)...(19): siRNA sense strand
uaccaagaacaaagcauaa

SEQ ID NO: 117174 - RNA, 19 nt, Homo sapiens
  misc_RNA (1)...(19): siRNA sense strand
uaucgacugccacaaagaa

SEQ ID NO: 117175 - RNA, 19 nt, Homo sapiens
  misc_RNA (1)...(19): siRNA sense strand
gucaauauggccaggguuu

SEQ ID NO: 117176 - RNA, 19 nt, Homo sapiens
  misc_RNA (1)...(19): siRNA sense strand
ggaacucaaccuugcucaa

SEQ ID NO: 117177 - RNA, 19 nt, Homo sapiens
  misc_RNA (1)...(19): siRNA sense strand
uggaugaacaguaccagaa

SEQ ID NO: 117178 - RNA, 19 nt, Homo sapiens
  misc_RNA (1)...(19): siRNA sense strand
gguuuauaauugggaugua

SEQ ID NO: 117179 - RNA, 19 nt, Homo sapiens
  misc_RNA (1)...(19): siRNA sense strand
uugcaaagcuucaguuccu

SEQ ID NO: 117180 - RNA, 19 nt, Homo sapiens
  misc_RNA (1)...(19): siRNA sense strand
caauggagaccagauucuu

SEQ ID NO: 117181 - RNA, 19 nt, Homo sapiens
  misc_RNA (1)...(19): siRNA sense strand
uguagauuccuucaugaaa

SEQ ID NO: 117182 - RNA, 19 nt, Homo sapiens
  misc_RNA (1)...(19): siRNA sense strand
ugacuuucuucgagaucaa

SEQ ID NO: 117183 - RNA, 19 nt, Homo sapiens
  misc_RNA (1)...(19): siRNA sense strand
ggaugaacaguaccagaag

SEQ ID NO: 117184 - RNA, 19 nt, Homo sapiens
  misc_RNA (1)...(19): siRNA sense strand
ucaguuccuccuaccgaua

SEQ ID NO: 117185 - RNA, 19 nt, Homo sapiens
  misc_RNA (1)...(19): siRNA sense strand
aauauggccaggguuuaua

SEQ ID NO: 117186 - RNA, 19 nt, Homo sapiens
  misc_RNA (1)...(19): siRNA sense strand
aaacagccugggaaugaga

SEQ ID NO: 117187 - RNA, 19 nt, Homo sapiens
  misc_RNA (1)...(19): siRNA sense strand
caguuccuccuaccgauaa

SEQ ID NO: 117188 - RNA, 19 nt, Homo sapiens
  misc_RNA (1)...(19): siRNA sense strand
uaccacagaagucaauaug

SEQ ID NO: 117189 - RNA, 19 nt, Homo sapiens
  misc_RNA (1)...(19): siRNA sense strand
acaaggaugacucuaccaa

SEQ ID NO: 117190 - RNA, 19 nt, Homo sapiens
  misc_RNA (1)...(19): siRNA sense strand
cgacugccacaaagaaucu

SEQ ID NO: 117191 - RNA, 19 nt, Homo sapiens
  misc_RNA (1)...(19): siRNA sense strand
guauugcaaagcuucaguu

SEQ ID NO: 117192 - RNA, 19 nt, Homo sapiens
  misc_RNA (1)...(19): siRNA sense strand
gaagaugccacaauuaaga

SEQ ID NO: 117193 - RNA, 19 nt, Homo sapiens
  misc_RNA (1)...(19): siRNA sense strand
caaguuccgucaugucuuu

SEQ ID NO: 117194 - RNA, 19 nt, Homo sapiens
  misc_RNA (1)...(19): siRNA sense strand
gagcccaucuccaugauug

SEQ ID NO: 117195 - RNA, 19 nt, Homo sapiens
  misc_RNA (1)...(19): siRNA sense strand
ugagcuaccugacugagua

SEQ ID NO: 117196 - RNA, 19 nt, Homo sapiens
  misc_RNA (1)...(19): siRNA sense strand
gcagagagaccuaucuuca

SEQ ID NO: 117197 - RNA, 19 nt, Homo sapiens
  misc_RNA (1)...(19): siRNA sense strand
ggacauauacccuccaaca

SEQ ID NO: 117198 - RNA, 19 nt, Homo sapiens
  misc_RNA (1)...(19): siRNA sense strand
aaaccuggcugacaaaugg

SEQ ID NO: 117199 - RNA, 19 nt, Homo sapiens
  misc_RNA (1)...(19): siRNA sense strand
agagagaccuaucuucaau

SEQ ID NO: 117200 - RNA, 19 nt, Homo sapiens
  misc_RNA (1)...(19): siRNA sense strand
ucuggaaccuggauacaaa

SEQ ID NO: 117201 - RNA, 19 nt, Homo sapiens
  misc_RNA (1)...(19): siRNA sense strand
gcaagauucggguuauuga

SEQ ID NO: 117202 - RNA, 19 nt, Homo sapiens
  misc_RNA (1)...(19): siRNA sense strand
gaugugauccucuccaugu

SEQ ID NO: 117203 - RNA, 19 nt, Homo sapiens
  misc_RNA (1)...(19): siRNA sense strand
gcaaagaccgcaagauucg

SEQ ID NO: 117204 - RNA, 19 nt, Homo sapiens
  misc_RNA (1)...(19): siRNA sense strand
caccaaagacagagaauga

SEQ ID NO: 117205 - RNA, 19 nt, Homo sapiens
  misc_RNA (1)...(19): siRNA sense strand
gauuagcugucaccaagau

SEQ ID NO: 117206 - RNA, 19 nt, Homo sapiens
  misc_RNA (1)...(19): siRNA sense strand
aaaggagucugucaucaca

SEQ ID NO: 117207 - RNA, 19 nt, Homo sapiens
  misc_RNA (1)...(19): siRNA sense strand
aaagcuggcugcagaagau

SEQ ID NO: 117208 - RNA, 19 nt, Homo sapiens
  misc_RNA (1)...(19): siRNA sense strand
agaaugaguugcugcagau

SEQ ID NO: 117209 - RNA, 19 nt, Homo sapiens
  misc_RNA (1)...(19): siRNA sense strand
cugaagaugccacaauuaa

SEQ ID NO: 117210 - RNA, 19 nt, Homo sapiens
  misc_RNA (1)...(19): siRNA sense strand
agagaccuaucuucaauuc

SEQ ID NO: 117211 - RNA, 19 nt, Homo sapiens
  misc_RNA (1)...(19): siRNA sense strand
ggaccaggauaaccucucu

SEQ ID NO: 117212 - RNA, 19 nt, Homo sapiens
  misc_RNA (1)...(19): siRNA sense strand
gggcacagaggcaacguuu

SEQ ID NO: 117213 - RNA, 19 nt, Homo sapiens
  misc_RNA (1)...(19): siRNA sense strand
acaaggugaugaucuggaa

SEQ ID NO: 117214 - RNA, 19 nt, Homo sapiens
  misc_RNA (1)...(19): siRNA sense strand
gcucuugaaucagacagaa

SEQ ID NO: 117215 - RNA, 19 nt, Homo sapiens
  misc_RNA (1)...(19): siRNA sense strand
gcacagaggcaacguuuug

SEQ ID NO: 117216 - RNA, 19 nt, Homo sapiens
  misc_RNA (1)...(19): siRNA sense strand
caaagacagagaaugaguu

SEQ ID NO: 117217 - RNA, 19 nt, Homo sapiens
  misc_RNA (1)...(19): siRNA sense strand
gagaucgccuccuguucug

SEQ ID NO: 117218 - RNA, 19 nt, Homo sapiens
  misc_RNA (1)...(19): siRNA sense strand
cugcaaagaccgcaagauu

SEQ ID NO: 117219 - RNA, 19 nt, Homo sapiens
  misc_RNA (1)...(19): siRNA sense strand
ggaucggugucaugccaaa

SEQ ID NO: 117220 - RNA, 19 nt, Homo sapiens
  misc_RNA (1)...(19): siRNA sense strand
cugaguaccgcuccuauaa

SEQ ID NO: 117221 - RNA, 19 nt, Homo sapiens
  misc_RNA (1)...(19): siRNA sense strand
ccacuucauugcaguugug

SEQ ID NO: 117222 - RNA, 19 nt, Homo sapiens
  misc_RNA (1)...(19): siRNA sense strand
ccaggaggccagcuacaaa

SEQ ID NO: 117223 - RNA, 19 nt, Homo sapiens
  misc_RNA (1)...(19): siRNA sense strand
caauuaagaucuggagcau

SEQ ID NO: 117224 - RNA, 19 nt, Homo sapiens
  misc_RNA (1)...(19): siRNA sense strand
acaaaggagucugucauca

SEQ ID NO: 117225 - RNA, 19 nt, Homo sapiens
  misc_RNA (1)...(19): siRNA sense strand
gcaaggagaacugcuacga

SEQ ID NO: 117226 - RNA, 19 nt, Homo sapiens
  misc_RNA (1)...(19): siRNA sense strand
ugaguacgauuagcuguca

SEQ ID NO: 117227 - RNA, 19 nt, Homo sapiens
  misc_RNA (1)...(19): siRNA sense strand
agaccuaucuucaauucca

SEQ ID NO: 117228 - RNA, 19 nt, Homo sapiens
  misc_RNA (1)...(19): siRNA sense strand
gaccgcaagauucggguua

SEQ ID NO: 117229 - RNA, 19 nt, Homo sapiens
  misc_RNA (1)...(19): siRNA sense strand
ucuacaagcugaucacaac

SEQ ID NO: 117230 - RNA, 19 nt, Homo sapiens
  misc_RNA (1)...(19): siRNA sense strand
gagagaccuaucuucaauu

SEQ ID NO: 117231 - RNA, 19 nt, Homo sapiens
  misc_RNA (1)...(19): siRNA sense strand
aaagacagagaaugaguug

SEQ ID NO: 117232 - RNA, 19 nt, Homo sapiens
  misc_RNA (1)...(19): siRNA sense strand
gguccaggccaaacaguug

SEQ ID NO: 117233 - RNA, 19 nt, Homo sapiens
  misc_RNA (1)...(19): siRNA sense strand
gaucgccuccuguucugaa

SEQ ID NO: 117234 - RNA, 19 nt, Homo sapiens
  misc_RNA (1)...(19): siRNA sense strand
cagagagaccuaucuucaa

SEQ ID NO: 117235 - RNA, 19 nt, Homo sapiens
  misc_RNA (1)...(19): siRNA sense strand
ccaauccuggugucccuua

SEQ ID NO: 117236 - RNA, 19 nt, Homo sapiens
  misc_RNA (1)...(19): siRNA sense strand
ccacuucugugccgugaac

SEQ ID NO: 117237 - RNA, 19 nt, Homo sapiens
  misc_RNA (1)...(19): siRNA sense strand
gcuccaaguuccgucaugu

SEQ ID NO: 117238 - RNA, 19 nt, Homo sapiens
  misc_RNA (1)...(19): siRNA sense strand
ccucuucagugcuggcuau

SEQ ID NO: 117239 - RNA, 19 nt, Homo sapiens
  misc_RNA (1)...(19): siRNA sense strand
gaucuuccgcuucuacaag

SEQ ID NO: 117240 - RNA, 19 nt, Homo sapiens
  misc_RNA (1)...(19): siRNA sense strand
gaguaccgcuccuauaacc

SEQ ID NO: 117241 - RNA, 19 nt, Homo sapiens
  misc_RNA (1)...(19): siRNA sense strand
ggaacccuuuugaugauuu

SEQ ID NO: 117242 - RNA, 19 nt, Homo sapiens
  misc_RNA (1)...(19): siRNA sense strand
aacacaggcuggaggagaa

SEQ ID NO: 117243 - RNA, 19 nt, Homo sapiens
  misc_RNA (1)...(19): siRNA sense strand
gcaaaccagccagcaagga

SEQ ID NO: 117244 - RNA, 19 nt, Homo sapiens
  misc_RNA (1)...(19): siRNA sense strand
ucugaagaugccacaauua

SEQ ID NO: 117245 - RNA, 19 nt, Homo sapiens
  misc_RNA (1)...(19): siRNA sense strand
gcaccagacagggaaguug

SEQ ID NO: 117246 - RNA, 19 nt, Homo sapiens
  misc_RNA (1)...(19): siRNA sense strand
gaggagaagaugccaaggu

SEQ ID NO: 117247 - RNA, 19 nt, Homo sapiens
  misc_RNA (1)...(19): siRNA sense strand
ccaaagacagagaaugagu

SEQ ID NO: 117248 - RNA, 19 nt, Homo sapiens
  misc_RNA (1)...(19): siRNA sense strand
gaacccuuuugaugauuuu

SEQ ID NO: 117249 - RNA, 19 nt, Homo sapiens
  misc_RNA (1)...(19): siRNA sense strand
aagaaaaccuggcugacaa

SEQ ID NO: 117250 - RNA, 19 nt, Homo sapiens
  misc_RNA (1)...(19): siRNA sense strand
gaagaaaaccuggcugaca

SEQ ID NO: 117251 - RNA, 19 nt, Homo sapiens
  misc_RNA (1)...(19): siRNA sense strand
ugagaucgccuccuguucu

SEQ ID NO: 117252 - RNA, 19 nt, Homo sapiens
  misc_RNA (1)...(19): siRNA sense strand
ccgcaagauucggguuauu

SEQ ID NO: 117253 - RNA, 19 nt, Homo sapiens
  misc_RNA (1)...(19): siRNA sense strand
ucacgacaaccacuucugu

SEQ ID NO: 117254 - RNA, 19 nt, Homo sapiens
  misc_RNA (1)...(19): siRNA sense strand
ggaugaaucgagacccaau

SEQ ID NO: 117255 - RNA, 19 nt, Homo sapiens
  misc_RNA (1)...(19): siRNA sense strand
acaagcugaucacaaccaa

SEQ ID NO: 117256 - RNA, 19 nt, Homo sapiens
  misc_RNA (1)...(19): siRNA sense strand
gauacaaaggagucuguca

SEQ ID NO: 117257 - RNA, 19 nt, Homo sapiens
  misc_RNA (1)...(19): siRNA sense strand
cuaccaagaggacauauac

SEQ ID NO: 117258 - RNA, 19 nt, Homo sapiens
  misc_RNA (1)...(19): siRNA sense strand
gcuccuauaacccacagaa

SEQ ID NO: 117259 - RNA, 19 nt, Homo sapiens
  misc_RNA (1)...(19): siRNA sense strand
guaccggagcuccaaguuc

SEQ ID NO: 117260 - RNA, 19 nt, Homo sapiens
  misc_RNA (1)...(19): siRNA sense strand
caaaggagucugucaucac

SEQ ID NO: 117261 - RNA, 19 nt, Homo sapiens
  misc_RNA (1)...(19): siRNA sense strand
gagagguccaggccaaaca

SEQ ID NO: 117262 - RNA, 19 nt, Homo sapiens
  misc_RNA (1)...(19): siRNA sense strand
augaguugcugcagauguu

SEQ ID NO: 117263 - RNA, 19 nt, Homo sapiens
  misc_RNA (1)...(19): siRNA sense strand
gucagaauccuaccaagag

SEQ ID NO: 117264 - RNA, 19 nt, Homo sapiens
  misc_RNA (1)...(19): siRNA sense strand
gcaacauccgcuacuacga

SEQ ID NO: 117265 - RNA, 19 nt, Homo sapiens
  misc_RNA (1)...(19): siRNA sense strand
guucugaagaugccacaau

SEQ ID NO: 117266 - RNA, 19 nt, Homo sapiens
  misc_RNA (1)...(19): siRNA sense strand
ccauguccuucaacaccaa

SEQ ID NO: 117267 - RNA, 19 nt, Homo sapiens
  misc_RNA (1)...(19): siRNA sense strand
acuacaaggugaugaucug

SEQ ID NO: 117268 - RNA, 19 nt, Homo sapiens
  misc_RNA (1)...(19): siRNA sense strand
ugaagaugccacaauuaag

SEQ ID NO: 117269 - RNA, 19 nt, Homo sapiens
  misc_RNA (1)...(19): siRNA sense strand
uucugaagaugccacaauu

SEQ ID NO: 117270 - RNA, 19 nt, Homo sapiens
  misc_RNA (1)...(19): siRNA sense strand
caaggugggcagcagaaca

SEQ ID NO: 117271 - RNA, 19 nt, Homo sapiens
  misc_RNA (1)...(19): siRNA sense strand
ggaaccuggauacaaagga

SEQ ID NO: 117272 - RNA, 19 nt, Homo sapiens
  misc_RNA (1)...(19): siRNA sense strand
ugcaaagaccgcaagauuc

SEQ ID NO: 117273 - RNA, 19 nt, Homo sapiens
  misc_RNA (1)...(19): siRNA sense strand
ccgcagcguucacgacaac

SEQ ID NO: 117274 - RNA, 19 nt, Homo sapiens
  misc_RNA (1)...(19): siRNA sense strand
gaggcaacguuuuggaugu

SEQ ID NO: 117275 - RNA, 19 nt, Homo sapiens
  misc_RNA (1)...(19): siRNA sense strand
ugcgagaucuuccgcuucu

SEQ ID NO: 117276 - RNA, 19 nt, Homo sapiens
  misc_RNA (1)...(19): siRNA sense strand
gaagaugccacaauuaaga

SEQ ID NO: 117277 - RNA, 19 nt, Homo sapiens
  misc_RNA (1)...(19): siRNA sense strand
caaguuccgucaugucuuu

SEQ ID NO: 117278 - RNA, 19 nt, Homo sapiens
  misc_RNA (1)...(19): siRNA sense strand
gagcccaucuccaugauug

SEQ ID NO: 117279 - RNA, 19 nt, Homo sapiens
  misc_RNA (1)...(19): siRNA sense strand
ugagcuaccugacugagua

SEQ ID NO: 117280 - RNA, 19 nt, Homo sapiens
  misc_RNA (1)...(19): siRNA sense strand
gcagagagaccuaucuuca

SEQ ID NO: 117281 - RNA, 19 nt, Homo sapiens
  misc_RNA (1)...(19): siRNA sense strand
ggacauauacccuccaaca

SEQ ID NO: 117282 - RNA, 19 nt, Homo sapiens
  misc_RNA (1)...(19): siRNA sense strand
aaaccuggcugacaaaugg

SEQ ID NO: 117283 - RNA, 19 nt, Homo sapiens
  misc_RNA (1)...(19): siRNA sense strand
agagagaccuaucuucaau

SEQ ID NO: 117284 - RNA, 19 nt, Homo sapiens
  misc_RNA (1)...(19): siRNA sense strand
ucuggaaccuggauacaaa

SEQ ID NO: 117285 - RNA, 19 nt, Homo sapiens
  misc_RNA (1)...(19): siRNA sense strand
gcaagauucggguuauuga

SEQ ID NO: 117286 - RNA, 19 nt, Homo sapiens
  misc_RNA (1)...(19): siRNA sense strand
gaugugauccucuccaugu

SEQ ID NO: 117287 - RNA, 19 nt, Homo sapiens
  misc_RNA (1)...(19): siRNA sense strand
gcaaagaccgcaagauucg

SEQ ID NO: 117288 - RNA, 19 nt, Homo sapiens
  misc_RNA (1)...(19): siRNA sense strand
caccaaagacagagaauga

SEQ ID NO: 117289 - RNA, 19 nt, Homo sapiens
  misc_RNA (1)...(19): siRNA sense strand
gauuagcugucaccaagau

SEQ ID NO: 117290 - RNA, 19 nt, Homo sapiens
  misc_RNA (1)...(19): siRNA sense strand
aaaggagucugucaucaca

SEQ ID NO: 117291 - RNA, 19 nt, Homo sapiens
  misc_RNA (1)...(19): siRNA sense strand
aaagcuggcugcagaagau

SEQ ID NO: 117292 - RNA, 19 nt, Homo sapiens
  misc_RNA (1)...(19): siRNA sense strand
agaaugaguugcugcagau

SEQ ID NO: 117293 - RNA, 19 nt, Homo sapiens
  misc_RNA (1)...(19): siRNA sense strand
cugaagaugccacaauuaa

SEQ ID NO: 117294 - RNA, 19 nt, Homo sapiens
  misc_RNA (1)...(19): siRNA sense strand
agagaccuaucuucaauuc

SEQ ID NO: 117295 - RNA, 19 nt, Homo sapiens
  misc_RNA (1)...(19): siRNA sense strand
ggaccaggauaaccucucu

SEQ ID NO: 117296 - RNA, 19 nt, Homo sapiens
  misc_RNA (1)...(19): siRNA sense strand
gggcacagaggcaacguuu

SEQ ID NO: 117297 - RNA, 19 nt, Homo sapiens
  misc_RNA (1)...(19): siRNA sense strand
acaaggugaugaucuggaa

SEQ ID NO: 117298 - RNA, 19 nt, Homo sapiens
  misc_RNA (1)...(19): siRNA sense strand
gcucuugaaucagacagaa

SEQ ID NO: 117299 - RNA, 19 nt, Homo sapiens
  misc_RNA (1)...(19): siRNA sense strand
gcacagaggcaacguuuug

SEQ ID NO: 117300 - RNA, 19 nt, Homo sapiens
  misc_RNA (1)...(19): siRNA sense strand
caaagacagagaaugaguu

SEQ ID NO: 117301 - RNA, 19 nt, Homo sapiens
  misc_RNA (1)...(19): siRNA sense strand
gagaucgccuccuguucug

SEQ ID NO: 117302 - RNA, 19 nt, Homo sapiens
  misc_RNA (1)...(19): siRNA sense strand
cugcaaagaccgcaagauu

SEQ ID NO: 117303 - RNA, 19 nt, Homo sapiens
  misc_RNA (1)...(19): siRNA sense strand
ggaucggugucaugccaaa

SEQ ID NO: 117304 - RNA, 19 nt, Homo sapiens
  misc_RNA (1)...(19): siRNA sense strand
cugaguaccgcuccuauaa

SEQ ID NO: 117305 - RNA, 19 nt, Homo sapiens
  misc_RNA (1)...(19): siRNA sense strand
ccacuucauugcaguugug

SEQ ID NO: 117306 - RNA, 19 nt, Homo sapiens
  misc_RNA (1)...(19): siRNA sense strand
ccaggaggccagcuacaaa

SEQ ID NO: 117307 - RNA, 19 nt, Homo sapiens
  misc_RNA (1)...(19): siRNA sense strand
caauuaagaucuggagcau

SEQ ID NO: 117308 - RNA, 19 nt, Homo sapiens
  misc_RNA (1)...(19): siRNA sense strand
acaaaggagucugucauca

SEQ ID NO: 117309 - RNA, 19 nt, Homo sapiens
  misc_RNA (1)...(19): siRNA sense strand
gcaaggagaacugcuacga

SEQ ID NO: 117310 - RNA, 19 nt, Homo sapiens
  misc_RNA (1)...(19): siRNA sense strand
ugaguacgauuagcuguca

SEQ ID NO: 117311 - RNA, 19 nt, Homo sapiens
  misc_RNA (1)...(19): siRNA sense strand
agaccuaucuucaauucca

SEQ ID NO: 117312 - RNA, 19 nt, Homo sapiens
  misc_RNA (1)...(19): siRNA sense strand
gaccgcaagauucggguua

SEQ ID NO: 117313 - RNA, 19 nt, Homo sapiens
  misc_RNA (1)...(19): siRNA sense strand
ucuacaagcugaucacaac

SEQ ID NO: 117314 - RNA, 19 nt, Homo sapiens
  misc_RNA (1)...(19): siRNA sense strand
gagagaccuaucuucaauu

SEQ ID NO: 117315 - RNA, 19 nt, Homo sapiens
  misc_RNA (1)...(19): siRNA sense strand
aaagacagagaaugaguug

SEQ ID NO: 117316 - RNA, 19 nt, Homo sapiens
  misc_RNA (1)...(19): siRNA sense strand
gguccaggccaaacaguug

SEQ ID NO: 117317 - RNA, 19 nt, Homo sapiens
  misc_RNA (1)...(19): siRNA sense strand
gaucgccuccuguucugaa

SEQ ID NO: 117318 - RNA, 19 nt, Homo sapiens
  misc_RNA (1)...(19): siRNA sense strand
cagagagaccuaucuucaa

SEQ ID NO: 117319 - RNA, 19 nt, Homo sapiens
  misc_RNA (1)...(19): siRNA sense strand
ccaauccuggugucccuua

SEQ ID NO: 117320 - RNA, 19 nt, Homo sapiens
  misc_RNA (1)...(19): siRNA sense strand
ccacuucugugccgugaac

SEQ ID NO: 117321 - RNA, 19 nt, Homo sapiens
  misc_RNA (1)...(19): siRNA sense strand
gcuccaaguuccgucaugu

SEQ ID NO: 117322 - RNA, 19 nt, Homo sapiens
  misc_RNA (1)...(19): siRNA sense strand
ccucuucagugcuggcuau

SEQ ID NO: 117323 - RNA, 19 nt, Homo sapiens
  misc_RNA (1)...(19): siRNA sense strand
gaucuuccgcuucuacaag

SEQ ID NO: 117324 - RNA, 19 nt, Homo sapiens
  misc_RNA (1)...(19): siRNA sense strand
gaguaccgcuccuauaacc

SEQ ID NO: 117325 - RNA, 19 nt, Homo sapiens
  misc_RNA (1)...(19): siRNA sense strand
ggaacccuuuugaugauuu

SEQ ID NO: 117326 - RNA, 19 nt, Homo sapiens
  misc_RNA (1)...(19): siRNA sense strand
aacacaggcuggaggagaa

SEQ ID NO: 117327 - RNA, 19 nt, Homo sapiens
  misc_RNA (1)...(19): siRNA sense strand
gcaaaccagccagcaagga

SEQ ID NO: 117328 - RNA, 19 nt, Homo sapiens
  misc_RNA (1)...(19): siRNA sense strand
ucugaagaugccacaauua

SEQ ID NO: 117329 - RNA, 19 nt, Homo sapiens
  misc_RNA (1)...(19): siRNA sense strand
gcaccagacagggaaguug

SEQ ID NO: 117330 - RNA, 19 nt, Homo sapiens
  misc_RNA (1)...(19): siRNA sense strand
gaggagaagaugccaaggu

SEQ ID NO: 117331 - RNA, 19 nt, Homo sapiens
  misc_RNA (1)...(19): siRNA sense strand
ccaaagacagagaaugagu

SEQ ID NO: 117332 - RNA, 19 nt, Homo sapiens
  misc_RNA (1)...(19): siRNA sense strand
gaacccuuuugaugauuuu

SEQ ID NO: 117333 - RNA, 19 nt, Homo sapiens
  misc_RNA (1)...(19): siRNA sense strand
aagaaaaccuggcugacaa

SEQ ID NO: 117334 - RNA, 19 nt, Homo sapiens
  misc_RNA (1)...(19): siRNA sense strand
gaagaaaaccuggcugaca

SEQ ID NO: 117335 - RNA, 19 nt, Homo sapiens
  misc_RNA (1)...(19): siRNA sense strand
ugagaucgccuccuguucu

SEQ ID NO: 117336 - RNA, 19 nt, Homo sapiens
  misc_RNA (1)...(19): siRNA sense strand
ccgcaagauucggguuauu

SEQ ID NO: 117337 - RNA, 19 nt, Homo sapiens
  misc_RNA (1)...(19): siRNA sense strand
ucacgacaaccacuucugu

SEQ ID NO: 117338 - RNA, 19 nt, Homo sapiens
  misc_RNA (1)...(19): siRNA sense strand
ggaugaaucgagacccaau

SEQ ID NO: 117339 - RNA, 19 nt, Homo sapiens
  misc_RNA (1)...(19): siRNA sense strand
acaagcugaucacaaccaa

SEQ ID NO: 117340 - RNA, 19 nt, Homo sapiens
  misc_RNA (1)...(19): siRNA sense strand
gauacaaaggagucuguca

SEQ ID NO: 117341 - RNA, 19 nt, Homo sapiens
  misc_RNA (1)...(19): siRNA sense strand
cuaccaagaggacauauac

SEQ ID NO: 117342 - RNA, 19 nt, Homo sapiens
  misc_RNA (1)...(19): siRNA sense strand
gcuccuauaacccacagaa

SEQ ID NO: 117343 - RNA, 19 nt, Homo sapiens
  misc_RNA (1)...(19): siRNA sense strand
guaccggagcuccaaguuc

SEQ ID NO: 117344 - RNA, 19 nt, Homo sapiens
  misc_RNA (1)...(19): siRNA sense strand
caaaggagucugucaucac

SEQ ID NO: 117345 - RNA, 19 nt, Homo sapiens
  misc_RNA (1)...(19): siRNA sense strand
gagagguccaggccaaaca

SEQ ID NO: 117346 - RNA, 19 nt, Homo sapiens
  misc_RNA (1)...(19): siRNA sense strand
augaguugcugcagauguu

SEQ ID NO: 117347 - RNA, 19 nt, Homo sapiens
  misc_RNA (1)...(19): siRNA sense strand
gucagaauccuaccaagag

SEQ ID NO: 117348 - RNA, 19 nt, Homo sapiens
  misc_RNA (1)...(19): siRNA sense strand
gcaacauccgcuacuacga

SEQ ID NO: 117349 - RNA, 19 nt, Homo sapiens
  misc_RNA (1)...(19): siRNA sense strand
guucugaagaugccacaau

SEQ ID NO: 117350 - RNA, 19 nt, Homo sapiens
  misc_RNA (1)...(19): siRNA sense strand
ccauguccuucaacaccaa

SEQ ID NO: 117351 - RNA, 19 nt, Homo sapiens
  misc_RNA (1)...(19): siRNA sense strand
acuacaaggugaugaucug

SEQ ID NO: 117352 - RNA, 19 nt, Homo sapiens
  misc_RNA (1)...(19): siRNA sense strand
ugaagaugccacaauuaag

SEQ ID NO: 117353 - RNA, 19 nt, Homo sapiens
  misc_RNA (1)...(19): siRNA sense strand
uucugaagaugccacaauu

SEQ ID NO: 117354 - RNA, 19 nt, Homo sapiens
  misc_RNA (1)...(19): siRNA sense strand
caaggugggcagcagaaca

SEQ ID NO: 117355 - RNA, 19 nt, Homo sapiens
  misc_RNA (1)...(19): siRNA sense strand
ggaaccuggauacaaagga

SEQ ID NO: 117356 - RNA, 19 nt, Homo sapiens
  misc_RNA (1)...(19): siRNA sense strand
ugcaaagaccgcaagauuc

SEQ ID NO: 117357 - RNA, 19 nt, Homo sapiens
  misc_RNA (1)...(19): siRNA sense strand
ccgcagcguucacgacaac

SEQ ID NO: 117358 - RNA, 19 nt, Homo sapiens
  misc_RNA (1)...(19): siRNA sense strand
gaggcaacguuuuggaugu

SEQ ID NO: 117359 - RNA, 19 nt, Homo sapiens
  misc_RNA (1)...(19): siRNA sense strand
ugcgagaucuuccgcuucu

SEQ ID NO: 117360 - RNA, 19 nt, Homo sapiens
  misc_RNA (1)...(19): siRNA sense strand
gcuggucggugaacaauuu

SEQ ID NO: 117361 - RNA, 19 nt, Homo sapiens
  misc_RNA (1)...(19): siRNA sense strand
ccaaaggcuuaccugauuu

SEQ ID NO: 117362 - RNA, 19 nt, Homo sapiens
  misc_RNA (1)...(19): siRNA sense strand
gagaggcgauuuccaagca

SEQ ID NO: 117363 - RNA, 19 nt, Homo sapiens
  misc_RNA (1)...(19): siRNA sense strand
ccaugaaccugcacaacaa

SEQ ID NO: 117364 - RNA, 19 nt, Homo sapiens
  misc_RNA (1)...(19): siRNA sense strand
uccaaaggcuuaccugauu

SEQ ID NO: 117365 - RNA, 19 nt, Homo sapiens
  misc_RNA (1)...(19): siRNA sense strand
gaaugcaaguaucaguuug

SEQ ID NO: 117366 - RNA, 19 nt, Homo sapiens
  misc_RNA (1)...(19): siRNA sense strand
ggugaacaauuuccugaug

SEQ ID NO: 117367 - RNA, 19 nt, Homo sapiens
  misc_RNA (1)...(19): siRNA sense strand
gcgcgcaccugaaggagaa

SEQ ID NO: 117368 - RNA, 19 nt, Homo sapiens
  misc_RNA (1)...(19): siRNA sense strand
caaaggcuuaccugauuua

SEQ ID NO: 117369 - RNA, 19 nt, Homo sapiens
  misc_RNA (1)...(19): siRNA sense strand
gugaacaauuuccugauga

SEQ ID NO: 117370 - RNA, 19 nt, Homo sapiens
  misc_RNA (1)...(19): siRNA sense strand
ccagagugguauugaagaa

SEQ ID NO: 117371 - RNA, 19 nt, Homo sapiens
  misc_RNA (1)...(19): siRNA sense strand
gccggagggucaccaagua

SEQ ID NO: 117372 - RNA, 19 nt, Homo sapiens
  misc_RNA (1)...(19): siRNA sense strand
gcaccacgcagaccuguug

SEQ ID NO: 117373 - RNA, 19 nt, Homo sapiens
  misc_RNA (1)...(19): siRNA sense strand
uuucaaagccuucugugua

SEQ ID NO: 117374 - RNA, 19 nt, Homo sapiens
  misc_RNA (1)...(19): siRNA sense strand
ugacugguccaaaggcuua

SEQ ID NO: 117375 - RNA, 19 nt, Homo sapiens
  misc_RNA (1)...(19): siRNA sense strand
ggagacagcauuugugcau

SEQ ID NO: 117376 - RNA, 19 nt, Homo sapiens
  misc_RNA (1)...(19): siRNA sense strand
ccaugaaacgcacguguaa

SEQ ID NO: 117377 - RNA, 19 nt, Homo sapiens
  misc_RNA (1)...(19): siRNA sense strand
gaagaaugcaaguaucagu

SEQ ID NO: 117378 - RNA, 19 nt, Homo sapiens
  misc_RNA (1)...(19): siRNA sense strand
uguacacccugacuagaaa

SEQ ID NO: 117379 - RNA, 19 nt, Homo sapiens
  misc_RNA (1)...(19): siRNA sense strand
agagugguauugaagaaug

SEQ ID NO: 117380 - RNA, 19 nt, Homo sapiens
  misc_RNA (1)...(19): siRNA sense strand
gcacaaacccgggagaaaa

SEQ ID NO: 117381 - RNA, 19 nt, Homo sapiens
  misc_RNA (1)...(19): siRNA sense strand
agaaugcaaguaucaguuu

SEQ ID NO: 117382 - RNA, 19 nt, Homo sapiens
  misc_RNA (1)...(19): siRNA sense strand
ccugaugacugguccaaag

SEQ ID NO: 117383 - RNA, 19 nt, Homo sapiens
  misc_RNA (1)...(19): siRNA sense strand
aggcuuaccugauuuacuc

SEQ ID NO: 117384 - RNA, 19 nt, Homo sapiens
  misc_RNA (1)...(19): siRNA sense strand
cgccaucgccgacaccuuu

SEQ ID NO: 117385 - RNA, 19 nt, Homo sapiens
  misc_RNA (1)...(19): siRNA sense strand
gccaugaaccugcacaaca

SEQ ID NO: 117386 - RNA, 19 nt, Homo sapiens
  misc_RNA (1)...(19): siRNA sense strand
uaagugccauggcgugucu

SEQ ID NO: 117387 - RNA, 19 nt, Homo sapiens
  misc_RNA (1)...(19): siRNA sense strand
guuugucgaugcccuggaa

SEQ ID NO: 117388 - RNA, 19 nt, Homo sapiens
  misc_RNA (1)...(19): siRNA sense strand
ggaaacaggacaggaugca

SEQ ID NO: 117389 - RNA, 19 nt, Homo sapiens
  misc_RNA (1)...(19): siRNA sense strand
ggagggucaccaaguacuu

SEQ ID NO: 117390 - RNA, 19 nt, Homo sapiens
  misc_RNA (1)...(19): siRNA sense strand
guauugaagaaugcaagua

SEQ ID NO: 117391 - RNA, 19 nt, Homo sapiens
  misc_RNA (1)...(19): siRNA sense strand
acuacugccuggagaacaa

SEQ ID NO: 117392 - RNA, 19 nt, Homo sapiens
  misc_RNA (1)...(19): siRNA sense strand
guaccacgcagcacucaag

SEQ ID NO: 117393 - RNA, 19 nt, Homo sapiens
  misc_RNA (1)...(19): siRNA sense strand
ugauaacuguggcugugau

SEQ ID NO: 117394 - RNA, 19 nt, Homo sapiens
  misc_RNA (1)...(19): siRNA sense strand
ccaaucgggagacagcauu

SEQ ID NO: 117395 - RNA, 19 nt, Homo sapiens
  misc_RNA (1)...(19): siRNA sense strand
guccaaaggcuuaccugau

SEQ ID NO: 117396 - RNA, 19 nt, Homo sapiens
  misc_RNA (1)...(19): siRNA sense strand
caguucugcuggagucaug

SEQ ID NO: 117397 - RNA, 19 nt, Homo sapiens
  misc_RNA (1)...(19): siRNA sense strand
cgcuggaacugcccugaga

SEQ ID NO: 117398 - RNA, 19 nt, Homo sapiens
  misc_RNA (1)...(19): siRNA sense strand
uucaaagccuucuguguac

SEQ ID NO: 117399 - RNA, 19 nt, Homo sapiens
  misc_RNA (1)...(19): siRNA sense strand
gugaagggcaccaugaaac

SEQ ID NO: 117400 - RNA, 19 nt, Homo sapiens
  misc_RNA (1)...(19): siRNA sense strand
ucaaagccuucuguguaca

SEQ ID NO: 117401 - RNA, 19 nt, Homo sapiens
  misc_RNA (1)...(19): siRNA sense strand
ucggagaggcgauuuccaa

SEQ ID NO: 117402 - RNA, 19 nt, Homo sapiens
  misc_RNA (1)...(19): siRNA sense strand
ugaacaauuuccugaugac

SEQ ID NO: 117403 - RNA, 19 nt, Homo sapiens
  misc_RNA (1)...(19): siRNA sense strand
aaacugcagccuuggagau

SEQ ID NO: 117404 - RNA, 19 nt, Homo sapiens
  misc_RNA (1)...(19): siRNA sense strand
aagaaugcaaguaucaguu

SEQ ID NO: 117405 - RNA, 19 nt, Homo sapiens
  misc_RNA (1)...(19): siRNA sense strand
gcccagagugguauugaag

SEQ ID NO: 117406 - RNA, 19 nt, Homo sapiens
  misc_RNA (1)...(19): siRNA sense strand
ucaccaaguacuucuguag

SEQ ID NO: 117407 - RNA, 19 nt, Homo sapiens
  misc_RNA (1)...(19): siRNA sense strand
ggucaccaaguacuucugu

SEQ ID NO: 117408 - RNA, 19 nt, Homo sapiens
  misc_RNA (1)...(19): siRNA sense strand
caaucgggagacagcauuu

SEQ ID NO: 117409 - RNA, 19 nt, Homo sapiens
  misc_RNA (1)...(19): siRNA sense strand
gaacaauuuccugaugacu

SEQ ID NO: 117410 - RNA, 19 nt, Homo sapiens
  misc_RNA (1)...(19): siRNA sense strand
gcgcacaaacccgggagaa

SEQ ID NO: 117411 - RNA, 19 nt, Homo sapiens
  misc_RNA (1)...(19): siRNA sense strand
gauaacuguggcugugaug

SEQ ID NO: 117412 - RNA, 19 nt, Homo sapiens
  misc_RNA (1)...(19): siRNA sense strand
caggagagcuggucuacuu

SEQ ID NO: 117413 - RNA, 19 nt, Homo sapiens
  misc_RNA (1)...(19): siRNA sense strand
gaaguucucucgggauuuc

SEQ ID NO: 117414 - RNA, 19 nt, Homo sapiens
  misc_RNA (1)...(19): siRNA sense strand
gagcuggucuacuuugaga

SEQ ID NO: 117415 - RNA, 19 nt, Homo sapiens
  misc_RNA (1)...(19): siRNA sense strand
gagagcuggucuacuuuga

SEQ ID NO: 117416 - RNA, 19 nt, Homo sapiens
  misc_RNA (1)...(19): siRNA sense strand
gcuaugugcugugugauga

SEQ ID NO: 117417 - RNA, 19 nt, Homo sapiens
  misc_RNA (1)...(19): siRNA sense strand
gaaugcgaauccacaacaa

SEQ ID NO: 117418 - RNA, 19 nt, Homo sapiens
  misc_RNA (1)...(19): siRNA sense strand
ugugaugagugcaagguua

SEQ ID NO: 117419 - RNA, 19 nt, Homo sapiens
  misc_RNA (1)...(19): siRNA sense strand
caagcgcgguuuccgagaa

SEQ ID NO: 117420 - RNA, 19 nt, Homo sapiens
  misc_RNA (1)...(19): siRNA sense strand
gcugcuaugugcuguguga

SEQ ID NO: 117421 - RNA, 19 nt, Homo sapiens
  misc_RNA (1)...(19): siRNA sense strand
gacauggacuuuggagaga

SEQ ID NO: 117422 - RNA, 19 nt, Homo sapiens
  misc_RNA (1)...(19): siRNA sense strand
cgggccaucuucauugaua

SEQ ID NO: 117423 - RNA, 19 nt, Homo sapiens
  misc_RNA (1)...(19): siRNA sense strand
ggacauccaggcacgaaug

SEQ ID NO: 117424 - RNA, 19 nt, Homo sapiens
  misc_RNA (1)...(19): siRNA sense strand
caagugucauggcacauca

SEQ ID NO: 117425 - RNA, 19 nt, Homo sapiens
  misc_RNA (1)...(19): siRNA sense strand
ggagagcuggucuacuuug

SEQ ID NO: 117426 - RNA, 19 nt, Homo sapiens
  misc_RNA (1)...(19): siRNA sense strand
ccacagcgccauccucaag

SEQ ID NO: 117427 - RNA, 19 nt, Homo sapiens
  misc_RNA (1)...(19): siRNA sense strand
uuacagagugggugaaugu

SEQ ID NO: 117428 - RNA, 19 nt, Homo sapiens
  misc_RNA (1)...(19): siRNA sense strand
gcucuaagcaaugagauuc

SEQ ID NO: 117429 - RNA, 19 nt, Homo sapiens
  misc_RNA (1)...(19): siRNA sense strand
ggcgccaggugguaacuga

SEQ ID NO: 117430 - RNA, 19 nt, Homo sapiens
  misc_RNA (1)...(19): siRNA sense strand
gaguugagcgcugccauug

SEQ ID NO: 117431 - RNA, 19 nt, Homo sapiens
  misc_RNA (1)...(19): siRNA sense strand
caagaccagccgccuguug

SEQ ID NO: 117432 - RNA, 19 nt, Homo sapiens
  misc_RNA (1)...(19): siRNA sense strand
gcugccaguucaagacaug

SEQ ID NO: 117433 - RNA, 19 nt, Homo sapiens
  misc_RNA (1)...(19): siRNA sense strand
gaacugcuccgcgcuugag

SEQ ID NO: 117434 - RNA, 19 nt, Homo sapiens
  misc_RNA (1)...(19): siRNA sense strand
gggugaauguguguaagug

SEQ ID NO: 117435 - RNA, 19 nt, Homo sapiens
  misc_RNA (1)...(19): siRNA sense strand
gcagucgggcucuaagcaa

SEQ ID NO: 117436 - RNA, 19 nt, Homo sapiens
  misc_RNA (1)...(19): siRNA sense strand
gaagcggaaaugcaagugu

SEQ ID NO: 117437 - RNA, 19 nt, Homo sapiens
  misc_RNA (1)...(19): siRNA sense strand
gcaagugucauggcacauc

SEQ ID NO: 117438 - RNA, 19 nt, Homo sapiens
  misc_RNA (1)...(19): siRNA sense strand
gcacugucccgaggcaaga

SEQ ID NO: 117439 - RNA, 19 nt, Homo sapiens
  misc_RNA (1)...(19): siRNA sense strand
cgaaugcgaauccacaaca

SEQ ID NO: 117440 - RNA, 19 nt, Homo sapiens
  misc_RNA (1)...(19): siRNA sense strand
gggcaguggugagcaggau

SEQ ID NO: 117441 - RNA, 19 nt, Homo sapiens
  misc_RNA (1)...(19): siRNA sense strand
ggugaauguguguaaguga

SEQ ID NO: 117442 - RNA, 19 nt, Homo sapiens
  misc_RNA (1)...(19): siRNA sense strand
ucucgggauuucuuggauu

SEQ ID NO: 117443 - RNA, 19 nt, Homo sapiens
  misc_RNA (1)...(19): siRNA sense strand
ggaacugcuccgcgcuuga

SEQ ID NO: 117444 - RNA, 19 nt, Homo sapiens
  misc_RNA (1)...(19): siRNA sense strand
cagucgggcucuaagcaau

SEQ ID NO: 117445 - RNA, 19 nt, Homo sapiens
  misc_RNA (1)...(19): siRNA sense strand
ccacuggugcugcuaugug

SEQ ID NO: 117446 - RNA, 19 nt, Homo sapiens
  misc_RNA (1)...(19): siRNA sense strand
cgaguugagcgcugccauu

SEQ ID NO: 117447 - RNA, 19 nt, Homo sapiens
  misc_RNA (1)...(19): siRNA sense strand
gucgggcucuaagcaauga

SEQ ID NO: 117448 - RNA, 19 nt, Homo sapiens
  misc_RNA (1)...(19): siRNA sense strand
gugcugcuaugugcugugu

SEQ ID NO: 117449 - RNA, 19 nt, Homo sapiens
  misc_RNA (1)...(19): siRNA sense strand
gagauucugggccugaagu

SEQ ID NO: 117450 - RNA, 19 nt, Homo sapiens
  misc_RNA (1)...(19): siRNA sense strand
ggaaugggguggcuguaac

SEQ ID NO: 117451 - RNA, 19 nt, Homo sapiens
  misc_RNA (1)...(19): siRNA sense strand
gauacccacaaccgcaauu

SEQ ID NO: 117452 - RNA, 19 nt, Homo sapiens
  misc_RNA (1)...(19): siRNA sense strand
gcaagcaucugaagcacaa

SEQ ID NO: 117453 - RNA, 19 nt, Homo sapiens
  misc_RNA (1)...(19): siRNA sense strand
gcaaguucgucaaggaauu

SEQ ID NO: 117454 - RNA, 19 nt, Homo sapiens
  misc_RNA (1)...(19): siRNA sense strand
gcagcaaguucgucaagga

SEQ ID NO: 117455 - RNA, 19 nt, Homo sapiens
  misc_RNA (1)...(19): siRNA sense strand
gagacaaccuuaaguacag

SEQ ID NO: 117456 - RNA, 19 nt, Homo sapiens
  misc_RNA (1)...(19): siRNA sense strand
gagacugccuuccucuaug

SEQ ID NO: 117457 - RNA, 19 nt, Homo sapiens
  misc_RNA (1)...(19): siRNA sense strand
gcggagacaaccuuaagua

SEQ ID NO: 117458 - RNA, 19 nt, Homo sapiens
  misc_RNA (1)...(19): siRNA sense strand
ggagacaaccuuaaguaca

SEQ ID NO: 117459 - RNA, 19 nt, Homo sapiens
  misc_RNA (1)...(19): siRNA sense strand
ggagacugccuuccucuau

SEQ ID NO: 117460 - RNA, 19 nt, Homo sapiens
  misc_RNA (1)...(19): siRNA sense strand
gaggugggcaagcaucuga

SEQ ID NO: 117461 - RNA, 19 nt, Homo sapiens
  misc_RNA (1)...(19): siRNA sense strand
gggcagcaccaccaaugaa

SEQ ID NO: 117462 - RNA, 19 nt, Homo sapiens
  misc_RNA (1)...(19): siRNA sense strand
gcaguuggcgccuuuccau

SEQ ID NO: 117463 - RNA, 19 nt, Homo sapiens
  misc_RNA (1)...(19): siRNA sense strand
cagcaaguucgucaaggaa

SEQ ID NO: 117464 - RNA, 19 nt, Homo sapiens
  misc_RNA (1)...(19): siRNA sense strand
gugcguuggugcugcuaug

SEQ ID NO: 117465 - RNA, 19 nt, Homo sapiens
  misc_RNA (1)...(19): siRNA sense strand
guggaggccgugagcauga

SEQ ID NO: 117466 - RNA, 19 nt, Homo sapiens
  misc_RNA (1)...(19): siRNA sense strand
ccaguuccaguuccgcuuu

SEQ ID NO: 117467 - RNA, 19 nt, Homo sapiens
  misc_RNA (1)...(19): siRNA sense strand
uaaguacagcagcaaguuc

SEQ ID NO: 117468 - RNA, 19 nt, Homo sapiens
  misc_RNA (1)...(19): siRNA sense strand
caucugaagcacaaguaug

SEQ ID NO: 117469 - RNA, 19 nt, Homo sapiens
  misc_RNA (1)...(19): siRNA sense strand
caaguucgucaaggaauuc

SEQ ID NO: 117470 - RNA, 19 nt, Homo sapiens
  misc_RNA (1)...(19): siRNA sense strand
gcaucugaagcacaaguau

SEQ ID NO: 117471 - RNA, 19 nt, Homo sapiens
  misc_RNA (1)...(19): siRNA sense strand
agacugccuuccucuaugc

SEQ ID NO: 117472 - RNA, 19 nt, Homo sapiens
  misc_RNA (1)...(19): siRNA sense strand
caugagcgcuggaacugua

SEQ ID NO: 117473 - RNA, 19 nt, Homo sapiens
  misc_RNA (1)...(19): siRNA sense strand
gcaccaaguuucugagcaa

SEQ ID NO: 117474 - RNA, 19 nt, Homo sapiens
  misc_RNA (1)...(19): siRNA sense strand
aagagaggcuucaaagaga

SEQ ID NO: 117475 - RNA, 19 nt, Homo sapiens
  misc_RNA (1)...(19): siRNA sense strand
caagagaggcuucaaagag

SEQ ID NO: 117476 - RNA, 19 nt, Homo sapiens
  misc_RNA (1)...(19): siRNA sense strand
uaagugccauggcguauca

SEQ ID NO: 117477 - RNA, 19 nt, Homo sapiens
  misc_RNA (1)...(19): siRNA sense strand
caucaaggcugugaagagu

SEQ ID NO: 117478 - RNA, 19 nt, Homo sapiens
  misc_RNA (1)...(19): siRNA sense strand
ggaugggccugcucaagag

SEQ ID NO: 117479 - RNA, 19 nt, Homo sapiens
  misc_RNA (1)...(19): siRNA sense strand
caaguacagcaccaaguuu

SEQ ID NO: 117480 - RNA, 19 nt, Homo sapiens
  misc_RNA (1)...(19): siRNA sense strand
gcggugacaaccucaagua

SEQ ID NO: 117481 - RNA, 19 nt, Homo sapiens
  misc_RNA (1)...(19): siRNA sense strand
ucaaguacagcaccaaguu

SEQ ID NO: 117482 - RNA, 19 nt, Homo sapiens
  misc_RNA (1)...(19): siRNA sense strand
gcucaagagaggcuucaaa

SEQ ID NO: 117483 - RNA, 19 nt, Homo sapiens
  misc_RNA (1)...(19): siRNA sense strand
gugacaaccucaaguacag

SEQ ID NO: 117484 - RNA, 19 nt, Homo sapiens
  misc_RNA (1)...(19): siRNA sense strand
gcagggcagccucaccaaa

SEQ ID NO: 117485 - RNA, 19 nt, Homo sapiens
  misc_RNA (1)...(19): siRNA sense strand
ucaagagaggcuucaaaga

SEQ ID NO: 117486 - RNA, 19 nt, Homo sapiens
  misc_RNA (1)...(19): siRNA sense strand
ggugacaaccucaaguaca

SEQ ID NO: 117487 - RNA, 19 nt, Homo sapiens
  misc_RNA (1)...(19): siRNA sense strand
gcaucaaggcugugaagag

SEQ ID NO: 117488 - RNA, 19 nt, Homo sapiens
  misc_RNA (1)...(19): siRNA sense strand
gcaggaggagcuuguguac

SEQ ID NO: 117489 - RNA, 19 nt, Homo sapiens
  misc_RNA (1)...(19): siRNA sense strand
aggaggagcuuguguacac

SEQ ID NO: 117490 - RNA, 19 nt, Homo sapiens
  misc_RNA (1)...(19): siRNA sense strand
ugacgcccuucccaggauu

SEQ ID NO: 117491 - RNA, 19 nt, Homo sapiens
  misc_RNA (1)...(19): siRNA sense strand
ugcugaaacugcgcuauga

SEQ ID NO: 117492 - RNA, 19 nt, Homo sapiens
  misc_RNA (1)...(19): siRNA sense strand
gugcugaaacugcgcuaug

SEQ ID NO: 117493 - RNA, 19 nt, Homo sapiens
  misc_RNA (1)...(19): siRNA sense strand
gagcgcugcaccugugaug

SEQ ID NO: 117494 - RNA, 19 nt, Homo sapiens
  misc_RNA (1)...(19): siRNA sense strand
guacagcaccaaguuucug

SEQ ID NO: 117495 - RNA, 19 nt, Homo sapiens
  misc_RNA (1)...(19): siRNA sense strand
aggaugggccugcucaaga

SEQ ID NO: 117496 - RNA, 19 nt, Homo sapiens
  misc_RNA (1)...(19): siRNA sense strand
ccaagagaggaaacaagga

SEQ ID NO: 117497 - RNA, 19 nt, Homo sapiens
  misc_RNA (1)...(19): siRNA sense strand
cagggcagccucaccaaag

SEQ ID NO: 117498 - RNA, 19 nt, Homo sapiens
  misc_RNA (1)...(19): siRNA sense strand
gaacugcaguggugacuau

SEQ ID NO: 117499 - RNA, 19 nt, Homo sapiens
  misc_RNA (1)...(19): siRNA sense strand
ggagcuaccugaccuuuga

SEQ ID NO: 117500 - RNA, 19 nt, Homo sapiens
  misc_RNA (1)...(19): siRNA sense strand
gggagaaacucgugacaga

SEQ ID NO: 117501 - RNA, 19 nt, Homo sapiens
  misc_RNA (1)...(19): siRNA sense strand
cuauaaggauggagaauuu

SEQ ID NO: 117502 - RNA, 19 nt, Homo sapiens
  misc_RNA (1)...(19): siRNA sense strand
gcaaacaagagucgcuuua

SEQ ID NO: 117503 - RNA, 19 nt, Homo sapiens
  misc_RNA (1)...(19): siRNA sense strand
gcacagaugcucacaugaa

SEQ ID NO: 117504 - RNA, 19 nt, Homo sapiens
  misc_RNA (1)...(19): siRNA sense strand
gggcagagaucguggacaa

SEQ ID NO: 117505 - RNA, 19 nt, Homo sapiens
  misc_RNA (1)...(19): siRNA sense strand
gaaaccaucucugcuagug

SEQ ID NO: 117506 - RNA, 19 nt, Homo sapiens
  misc_RNA (1)...(19): siRNA sense strand
gaaguuggcaccacuccua

SEQ ID NO: 117507 - RNA, 19 nt, Homo sapiens
  misc_RNA (1)...(19): siRNA sense strand
gcaaauggacuguaauugg

SEQ ID NO: 117508 - RNA, 19 nt, Homo sapiens
  misc_RNA (1)...(19): siRNA sense strand
gaagccagaugcagaagca

SEQ ID NO: 117509 - RNA, 19 nt, Homo sapiens
  misc_RNA (1)...(19): siRNA sense strand
guaauugggagcuccauaa

SEQ ID NO: 117510 - RNA, 19 nt, Homo sapiens
  misc_RNA (1)...(19): siRNA sense strand
ugggaucuaugaaaugaua

SEQ ID NO: 117511 - RNA, 19 nt, Homo sapiens
  misc_RNA (1)...(19): siRNA sense strand
gggaugcuggucucaauua

SEQ ID NO: 117512 - RNA, 19 nt, Homo sapiens
  misc_RNA (1)...(19): siRNA sense strand
cucacagacucuucuauua

SEQ ID NO: 117513 - RNA, 19 nt, Homo sapiens
  misc_RNA (1)...(19): siRNA sense strand
ccacagacaucaccagaac

SEQ ID NO: 117514 - RNA, 19 nt, Homo sapiens
  misc_RNA (1)...(19): siRNA sense strand
gcucacagacucuucuauu

SEQ ID NO: 117515 - RNA, 19 nt, Homo sapiens
  misc_RNA (1)...(19): siRNA sense strand
agauguggcucucguggua

SEQ ID NO: 117516 - RNA, 19 nt, Homo sapiens
  misc_RNA (1)...(19): siRNA sense strand
ccaagggcauguucacuuc

SEQ ID NO: 117517 - RNA, 19 nt, Homo sapiens
  misc_RNA (1)...(19): siRNA sense strand
ucuauuagguuguuugcaa

SEQ ID NO: 117518 - RNA, 19 nt, Homo sapiens
  misc_RNA (1)...(19): siRNA sense strand
gagaggcgugcguggauua

SEQ ID NO: 117519 - RNA, 19 nt, Homo sapiens
  misc_RNA (1)...(19): siRNA sense strand
ggcaggaugugagaaauug

SEQ ID NO: 117520 - RNA, 19 nt, Homo sapiens
  misc_RNA (1)...(19): siRNA sense strand
gaugugaggaucuggauug

SEQ ID NO: 117521 - RNA, 19 nt, Homo sapiens
  misc_RNA (1)...(19): siRNA sense strand
uaugggaucuaugaaauga

SEQ ID NO: 117522 - RNA, 19 nt, Homo sapiens
  misc_RNA (1)...(19): siRNA sense strand
gagaagaacgugcccaaag

SEQ ID NO: 117523 - RNA, 19 nt, Homo sapiens
  misc_RNA (1)...(19): siRNA sense strand
ggccaccgguuccaaauca

SEQ ID NO: 117524 - RNA, 19 nt, Homo sapiens
  misc_RNA (1)...(19): siRNA sense strand
ggacaaguuccgaggagaa

SEQ ID NO: 117525 - RNA, 19 nt, Homo sapiens
  misc_RNA (1)...(19): siRNA sense strand
ccagugacauccccuauaa

SEQ ID NO: 117526 - RNA, 19 nt, Homo sapiens
  misc_RNA (1)...(19): siRNA sense strand
gggaccagcuauaccaugu

SEQ ID NO: 117527 - RNA, 19 nt, Homo sapiens
  misc_RNA (1)...(19): siRNA sense strand
gagacggccuggcucuuca

SEQ ID NO: 117528 - RNA, 19 nt, Homo sapiens
  misc_RNA (1)...(19): siRNA sense strand
ggaugcuggucucaauuau

SEQ ID NO: 117529 - RNA, 19 nt, Homo sapiens
  misc_RNA (1)...(19): siRNA sense strand
gagaaacucgugacagaca

SEQ ID NO: 117530 - RNA, 19 nt, Homo sapiens
  misc_RNA (1)...(19): siRNA sense strand
uguaugggaucuaugaaau

SEQ ID NO: 117531 - RNA, 19 nt, Homo sapiens
  misc_RNA (1)...(19): siRNA sense strand
gugcugauaggaaauauug

SEQ ID NO: 117532 - RNA, 19 nt, Homo sapiens
  misc_RNA (1)...(19): siRNA sense strand
ccuacacgcugcucacaga

SEQ ID NO: 117533 - RNA, 19 nt, Homo sapiens
  misc_RNA (1)...(19): siRNA sense strand
uagaagcaaagaccaagua

SEQ ID NO: 117534 - RNA, 19 nt, Homo sapiens
  misc_RNA (1)...(19): siRNA sense strand
ccuuugaagugguaucauu

SEQ ID NO: 117535 - RNA, 19 nt, Homo sapiens
  misc_RNA (1)...(19): siRNA sense strand
ucacagacucuucuauuag

SEQ ID NO: 117536 - RNA, 19 nt, Homo sapiens
  misc_RNA (1)...(19): siRNA sense strand
ccacggcauuggcaacuuc

SEQ ID NO: 117537 - RNA, 19 nt, Homo sapiens
  misc_RNA (1)...(19): siRNA sense strand
cauccaggccuacucauug

SEQ ID NO: 117538 - RNA, 19 nt, Homo sapiens
  misc_RNA (1)...(19): siRNA sense strand
agaagaacgugcccaaagg

SEQ ID NO: 117539 - RNA, 19 nt, Homo sapiens
  misc_RNA (1)...(19): siRNA sense strand
guaccugaaucgcuacuac

SEQ ID NO: 117540 - RNA, 19 nt, Homo sapiens
  misc_RNA (1)...(19): siRNA sense strand
cagagaucguggacaaguu

SEQ ID NO: 117541 - RNA, 19 nt, Homo sapiens
  misc_RNA (1)...(19): siRNA sense strand
ccaaaggcacaguggauga

SEQ ID NO: 117542 - RNA, 19 nt, Homo sapiens
  misc_RNA (1)...(19): siRNA sense strand
aggcacagaugcucacaug

SEQ ID NO: 117543 - RNA, 19 nt, Homo sapiens
  misc_RNA (1)...(19): siRNA sense strand
gcagaggcgccagcuacua

SEQ ID NO: 117544 - RNA, 19 nt, Homo sapiens
  misc_RNA (1)...(19): siRNA sense strand
aaacaagagucgcuuuagc

SEQ ID NO: 117545 - RNA, 19 nt, Homo sapiens
  misc_RNA (1)...(19): siRNA sense strand
ggauccgucucgaagaugu

SEQ ID NO: 117546 - RNA, 19 nt, Homo sapiens
  misc_RNA (1)...(19): siRNA sense strand
gagggcaggaugugagaaa

SEQ ID NO: 117547 - RNA, 19 nt, Homo sapiens
  misc_RNA (1)...(19): siRNA sense strand
gcagagaucguggacaagu

SEQ ID NO: 117548 - RNA, 19 nt, Homo sapiens
  misc_RNA (1)...(19): siRNA sense strand
auugggagcuccauaagga

SEQ ID NO: 117549 - RNA, 19 nt, Homo sapiens
  misc_RNA (1)...(19): siRNA sense strand
gggcaggaugugagaaauu

SEQ ID NO: 117550 - RNA, 19 nt, Homo sapiens
  misc_RNA (1)...(19): siRNA sense strand
ggacgggaccacagacauc

SEQ ID NO: 117551 - RNA, 19 nt, Homo sapiens
  misc_RNA (1)...(19): siRNA sense strand
cuauuagguuguuugcaaa

SEQ ID NO: 117552 - RNA, 19 nt, Homo sapiens
  misc_RNA (1)...(19): siRNA sense strand
cagcugguguccaucacaa

SEQ ID NO: 117553 - RNA, 19 nt, Homo sapiens
  misc_RNA (1)...(19): siRNA sense strand
gcaguggugacuaugaaga

SEQ ID NO: 117554 - RNA, 19 nt, Homo sapiens
  misc_RNA (1)...(19): siRNA sense strand
cuccugggccucuguguua

SEQ ID NO: 117555 - RNA, 19 nt, Homo sapiens
  misc_RNA (1)...(19): siRNA sense strand
cagaaucucucagccuaca

SEQ ID NO: 117556 - RNA, 19 nt, Homo sapiens
  misc_RNA (1)...(19): siRNA sense strand
ggagaagaacgugcccaaa

SEQ ID NO: 117557 - RNA, 19 nt, Homo sapiens
  misc_RNA (1)...(19): siRNA sense strand
ccaaggcagugaagaacag

SEQ ID NO: 117558 - RNA, 19 nt, Homo sapiens
  misc_RNA (1)...(19): siRNA sense strand
ugaccaaggcagugaagaa

SEQ ID NO: 117559 - RNA, 19 nt, Homo sapiens
  misc_RNA (1)...(19): siRNA sense strand
gcauccaggccuacucauu

SEQ ID NO: 117560 - RNA, 19 nt, Homo sapiens
  misc_RNA (1)...(19): siRNA sense strand
ggagcuccauaaggaaguu

SEQ ID NO: 117561 - RNA, 19 nt, Homo sapiens
  misc_RNA (1)...(19): siRNA sense strand
ggauuccaguccaacaaca

SEQ ID NO: 117562 - RNA, 19 nt, Homo sapiens
  misc_RNA (1)...(19): siRNA sense strand
gugggaugcuggucucaau

SEQ ID NO: 117563 - RNA, 19 nt, Homo sapiens
  misc_RNA (1)...(19): siRNA sense strand
gcaagcuguccucagauga

SEQ ID NO: 117564 - RNA, 19 nt, Homo sapiens
  misc_RNA (1)...(19): siRNA sense strand
caaguuccgaggagaagaa

SEQ ID NO: 117565 - RNA, 19 nt, Homo sapiens
  misc_RNA (1)...(19): siRNA sense strand
cggcaaauggacuguaauu

SEQ ID NO: 117566 - RNA, 19 nt, Homo sapiens
  misc_RNA (1)...(19): siRNA sense strand
caucucugcuagugguuug

SEQ ID NO: 117567 - RNA, 19 nt, Homo sapiens
  misc_RNA (1)...(19): siRNA sense strand
ggaccagcuauaccaugua

SEQ ID NO: 117568 - RNA, 19 nt, Homo sapiens
  misc_RNA (1)...(19): siRNA sense strand
ggucaauaccacaauguca

SEQ ID NO: 117569 - RNA, 19 nt, Homo sapiens
  misc_RNA (1)...(19): siRNA sense strand
gccaagggcauguucacuu

SEQ ID NO: 117570 - RNA, 19 nt, Homo sapiens
  misc_RNA (1)...(19): siRNA sense strand
cgagaggcgugcguggauu

SEQ ID NO: 117571 - RNA, 19 nt, Homo sapiens
  misc_RNA (1)...(19): siRNA sense strand
cacagacucuucuauuagg

SEQ ID NO: 117572 - RNA, 19 nt, Homo sapiens
  misc_RNA (1)...(19): siRNA sense strand
cugcaguggugacuaugaa

SEQ ID NO: 117573 - RNA, 19 nt, Homo sapiens
  misc_RNA (1)...(19): siRNA sense strand
ccaaguacccagggagcua

SEQ ID NO: 117574 - RNA, 19 nt, Homo sapiens
  misc_RNA (1)...(19): siRNA sense strand
gcauguucacuuccauuga

SEQ ID NO: 117575 - RNA, 19 nt, Homo sapiens
  misc_RNA (1)...(19): siRNA sense strand
gaguacaucggccaacaug

SEQ ID NO: 117576 - RNA, 19 nt, Homo sapiens
  misc_RNA (1)...(19): siRNA sense strand
gaggauuacagccaaguuc

SEQ ID NO: 117577 - RNA, 19 nt, Homo sapiens
  misc_RNA (1)...(19): siRNA sense strand
caaacaagagucgcuuuag

SEQ ID NO: 117578 - RNA, 19 nt, Homo sapiens
  misc_RNA (1)...(19): siRNA sense strand
guacaucggccaacaugac

SEQ ID NO: 117579 - RNA, 19 nt, Homo sapiens
  misc_RNA (1)...(19): siRNA sense strand
gaaaccuugagcuaucuga

SEQ ID NO: 117580 - RNA, 19 nt, Homo sapiens
  misc_RNA (1)...(19): siRNA sense strand
gguaucauuugugcccuau

SEQ ID NO: 117581 - RNA, 19 nt, Homo sapiens
  misc_RNA (1)...(19): siRNA sense strand
ccugaccuuugaaguggua

SEQ ID NO: 117582 - RNA, 19 nt, Homo sapiens
  misc_RNA (1)...(19): siRNA sense strand
cgcaagcuguccucagaug

SEQ ID NO: 117583 - RNA, 19 nt, Homo sapiens
  misc_RNA (1)...(19): siRNA sense strand
uccgaaaccuugagcuauc

SEQ ID NO: 117584 - RNA, 19 nt, Homo sapiens
  misc_RNA (1)...(19): siRNA sense strand
augcucacaugaacgagua

SEQ ID NO: 117585 - RNA, 19 nt, Homo sapiens
  misc_RNA (1)...(19): siRNA sense strand
guuggcaccacuccuauug

SEQ ID NO: 117586 - RNA, 19 nt, Homo sapiens
  misc_RNA (1)...(19): siRNA sense strand
cuaccugaccuuugaagug

SEQ ID NO: 117587 - RNA, 19 nt, Homo sapiens
  misc_RNA (1)...(19): siRNA sense strand
uggucuggcuggagaagaa

SEQ ID NO: 117588 - RNA, 19 nt, Homo sapiens
  misc_RNA (1)...(19): siRNA sense strand
gcagaugcagacccagaau

SEQ ID NO: 117589 - RNA, 19 nt, Homo sapiens
  misc_RNA (1)...(19): siRNA sense strand
gaaucucucagccuacauc

SEQ ID NO: 117590 - RNA, 19 nt, Homo sapiens
  misc_RNA (1)...(19): siRNA sense strand
cacagaugcucacaugaac

SEQ ID NO: 117591 - RNA, 19 nt, Homo sapiens
  misc_RNA (1)...(19): siRNA sense strand
ccuccaaggcucuaacaga

SEQ ID NO: 117592 - RNA, 19 nt, Homo sapiens
  misc_RNA (1)...(19): siRNA sense strand
gaugcuggucucaauuaug

SEQ ID NO: 117593 - RNA, 19 nt, Homo sapiens
  misc_RNA (1)...(19): siRNA sense strand
cccgugugcugauaggaaa

SEQ ID NO: 117594 - RNA, 19 nt, Homo sapiens
  misc_RNA (1)...(19): siRNA sense strand
guaugggaucuaugaaaug

SEQ ID NO: 117595 - RNA, 19 nt, Homo sapiens
  misc_RNA (1)...(19): siRNA sense strand
uauaaccccuucuucuauu

SEQ ID NO: 117596 - RNA, 19 nt, Homo sapiens
  misc_RNA (1)...(19): siRNA sense strand
augcuggucucaauuaugg

SEQ ID NO: 117597 - RNA, 19 nt, Homo sapiens
  misc_RNA (1)...(19): siRNA sense strand
cagaggcgccagcuacuag

SEQ ID NO: 117598 - RNA, 19 nt, Homo sapiens
  misc_RNA (1)...(19): siRNA sense strand
gaaguucacagauauggua

SEQ ID NO: 117599 - RNA, 19 nt, Homo sapiens
  misc_RNA (1)...(19): siRNA sense strand
acucagaaguucacagaua

SEQ ID NO: 117600 - RNA, 19 nt, Homo sapiens
  misc_RNA (1)...(19): siRNA sense strand
caacaaccgucagaccuuu

SEQ ID NO: 117601 - RNA, 19 nt, Homo sapiens
  misc_RNA (1)...(19): siRNA sense strand
gagggaugcuggccuacua

SEQ ID NO: 117602 - RNA, 19 nt, Homo sapiens
  misc_RNA (1)...(19): siRNA sense strand
guacaggacuuggccaaug

SEQ ID NO: 117603 - RNA, 19 nt, Homo sapiens
  misc_RNA (1)...(19): siRNA sense strand
ucaauggccugaagaagau

SEQ ID NO: 117604 - RNA, 19 nt, Homo sapiens
  misc_RNA (1)...(19): siRNA sense strand
aaacuggucugcuacuuca

SEQ ID NO: 117605 - RNA, 19 nt, Homo sapiens
  misc_RNA (1)...(19): siRNA sense strand
gcacucagaaguucacaga

SEQ ID NO: 117606 - RNA, 19 nt, Homo sapiens
  misc_RNA (1)...(19): siRNA sense strand
gaacugagucuuccauacu

SEQ ID NO: 117607 - RNA, 19 nt, Homo sapiens
  misc_RNA (1)...(19): siRNA sense strand
ucagguuucugcgcaaaua

SEQ ID NO: 117608 - RNA, 19 nt, Homo sapiens
  misc_RNA (1)...(19): siRNA sense strand
gagaaggucacgggacaua

SEQ ID NO: 117609 - RNA, 19 nt, Homo sapiens
  misc_RNA (1)...(19): siRNA sense strand
caacucggccaucagguuu

SEQ ID NO: 117610 - RNA, 19 nt, Homo sapiens
  misc_RNA (1)...(19): siRNA sense strand
gcacuggacuuagaugacu

SEQ ID NO: 117611 - RNA, 19 nt, Homo sapiens
  misc_RNA (1)...(19): siRNA sense strand
ggucugggcacuggacuua

SEQ ID NO: 117612 - RNA, 19 nt, Homo sapiens
  misc_RNA (1)...(19): siRNA sense strand
gauacgagguggacaaaau

SEQ ID NO: 117613 - RNA, 19 nt, Homo sapiens
  misc_RNA (1)...(19): siRNA sense strand
gaugcuggccuacuaugaa

SEQ ID NO: 117614 - RNA, 19 nt, Homo sapiens
  misc_RNA (1)...(19): siRNA sense strand
aaaccaaggucagcuaucu

SEQ ID NO: 117615 - RNA, 19 nt, Homo sapiens
  misc_RNA (1)...(19): siRNA sense strand
cgacaggccugguguucag

SEQ ID NO: 117616 - RNA, 19 nt, Homo sapiens
  misc_RNA (1)...(19): siRNA sense strand
gcaaaugcugcaccuggaa

SEQ ID NO: 117617 - RNA, 19 nt, Homo sapiens
  misc_RNA (1)...(19): siRNA sense strand
caaagcugaugggcucuau

SEQ ID NO: 117618 - RNA, 19 nt, Homo sapiens
  misc_RNA (1)...(19): siRNA sense strand
ggaacgccuucuucugagu

SEQ ID NO: 117619 - RNA, 19 nt, Homo sapiens
  misc_RNA (1)...(19): siRNA sense strand
cucagaaguucacagauau

SEQ ID NO: 117620 - RNA, 19 nt, Homo sapiens
  misc_RNA (1)...(19): siRNA sense strand
cagcugggcagaccuaugu

SEQ ID NO: 117621 - RNA, 19 nt, Homo sapiens
  misc_RNA (1)...(19): siRNA sense strand
cgucagaccuuugucaacu

SEQ ID NO: 117622 - RNA, 19 nt, Homo sapiens
  misc_RNA (1)...(19): siRNA sense strand
gaucagaaggugcccuaca

SEQ ID NO: 117623 - RNA, 19 nt, Homo sapiens
  misc_RNA (1)...(19): siRNA sense strand
gaaggucacgggacauaac

SEQ ID NO: 117624 - RNA, 19 nt, Homo sapiens
  misc_RNA (1)...(19): siRNA sense strand
gaaccuggauuuugucaac

SEQ ID NO: 117625 - RNA, 19 nt, Homo sapiens
  misc_RNA (1)...(19): siRNA sense strand
caagcugaagacccuguua

SEQ ID NO: 117626 - RNA, 19 nt, Homo sapiens
  misc_RNA (1)...(19): siRNA sense strand
cagcaacuccugcaaaugc

SEQ ID NO: 117627 - RNA, 19 nt, Homo sapiens
  misc_RNA (1)...(19): siRNA sense strand
ggaauuucggcacucagaa

SEQ ID NO: 117628 - RNA, 19 nt, Homo sapiens
  misc_RNA (1)...(19): siRNA sense strand
caucagguuucugcgcaaa

SEQ ID NO: 117629 - RNA, 19 nt, Homo sapiens
  misc_RNA (1)...(19): siRNA sense strand
guucagcaacuccugcaaa

SEQ ID NO: 117630 - RNA, 19 nt, Homo sapiens
  misc_RNA (1)...(19): siRNA sense strand
gaacgguccagcuucuaca

SEQ ID NO: 117631 - RNA, 19 nt, Homo sapiens
  misc_RNA (1)...(19): siRNA sense strand
cagcugagcaccacugagu

SEQ ID NO: 117632 - RNA, 19 nt, Homo sapiens
  misc_RNA (1)...(19): siRNA sense strand
ggaugcuggccuacuauga

SEQ ID NO: 117633 - RNA, 19 nt, Homo sapiens
  misc_RNA (1)...(19): siRNA sense strand
gaauuucggcacucagaag

SEQ ID NO: 117634 - RNA, 19 nt, Homo sapiens
  misc_RNA (1)...(19): siRNA sense strand
gcaaagcugaugggcucua

SEQ ID NO: 117635 - RNA, 19 nt, Homo sapiens
  misc_RNA (1)...(19): siRNA sense strand
ucugggcacuggacuuaga

SEQ ID NO: 117636 - RNA, 19 nt, Homo sapiens
  misc_RNA (1)...(19): siRNA sense strand
gcgcuucacaacccuggua

SEQ ID NO: 117637 - RNA, 19 nt, Homo sapiens
  misc_RNA (1)...(19): siRNA sense strand
gacaaggagcgcuucacaa

SEQ ID NO: 117638 - RNA, 19 nt, Homo sapiens
  misc_RNA (1)...(19): siRNA sense strand
ccaacaaccgucagaccuu

SEQ ID NO: 117639 - RNA, 19 nt, Homo sapiens
  misc_RNA (1)...(19): siRNA sense strand
cugcaaaacuggucugcua

SEQ ID NO: 117640 - RNA, 19 nt, Homo sapiens
  misc_RNA (1)...(19): siRNA sense strand
caucggaggcuggaauuuc

SEQ ID NO: 117641 - RNA, 19 nt, Homo sapiens
  misc_RNA (1)...(19): siRNA sense strand
gcuggaauuucggcacuca

SEQ ID NO: 117642 - RNA, 19 nt, Homo sapiens
  misc_RNA (1)...(19): siRNA sense strand
guggagagcuucaaaacca

SEQ ID NO: 117643 - RNA, 19 nt, Homo sapiens
  misc_RNA (1)...(19): siRNA sense strand
ggaacgguccagcuucuac

SEQ ID NO: 117644 - RNA, 19 nt, Homo sapiens
  misc_RNA (1)...(19): siRNA sense strand
ucaacucggccaucagguu

SEQ ID NO: 117645 - RNA, 19 nt, Homo sapiens
  misc_RNA (1)...(19): siRNA sense strand
uugaugauguggagagcuu

SEQ ID NO: 117646 - RNA, 19 nt, Homo sapiens
  misc_RNA (1)...(19): siRNA sense strand
ggugggcuuugaugaugug

SEQ ID NO: 117647 - RNA, 19 nt, Homo sapiens
  misc_RNA (1)...(19): siRNA sense strand
ugggugggcuuugaugaug

SEQ ID NO: 117648 - RNA, 19 nt, Homo sapiens
  misc_RNA (1)...(19): siRNA sense strand
cguggaugcugcugugcaa

SEQ ID NO: 117649 - RNA, 19 nt, Homo sapiens
  misc_RNA (1)...(19): siRNA sense strand
caagaggcaagaagagagu

SEQ ID NO: 117650 - RNA, 19 nt, Homo sapiens
  misc_RNA (1)...(19): siRNA sense strand
ccuuauggccuacgacuuc

SEQ ID NO: 117651 - RNA, 19 nt, Homo sapiens
  misc_RNA (1)...(19): siRNA sense strand
cuauguggaugcuggauac

SEQ ID NO: 117652 - RNA, 19 nt, Homo sapiens
  misc_RNA (1)...(19): siRNA sense strand
acaaggagcgcuucacaac

SEQ ID NO: 117653 - RNA, 19 nt, Homo sapiens
  misc_RNA (1)...(19): siRNA sense strand
gcccugccguagacaagga

SEQ ID NO: 117654 - RNA, 19 nt, Homo sapiens
  misc_RNA (1)...(19): siRNA sense strand
caaaugcugcaccuggaau

SEQ ID NO: 117655 - RNA, 19 nt, Homo sapiens
  misc_RNA (1)...(19): siRNA sense strand
gggcacuggacuuagauga

SEQ ID NO: 117656 - RNA, 19 nt, Homo sapiens
  misc_RNA (1)...(19): siRNA sense strand
acacuggccuccucaucag

SEQ ID NO: 117657 - RNA, 19 nt, Homo sapiens
  misc_RNA (1)...(19): siRNA sense strand
agaugaaucccaagcugaa

SEQ ID NO: 117658 - RNA, 19 nt, Homo sapiens
  misc_RNA (1)...(19): siRNA sense strand
agaaggugcccuacaucuu

SEQ ID NO: 117659 - RNA, 19 nt, Homo sapiens
  misc_RNA (1)...(19): siRNA sense strand
agacaaggagcgcuucaca

SEQ ID NO: 117660 - RNA, 19 nt, Homo sapiens
  misc_RNA (1)...(19): siRNA sense strand
ugaguggaaugacgagacu

SEQ ID NO: 117661 - RNA, 19 nt, Homo sapiens
  misc_RNA (1)...(19): siRNA sense strand
cuacggacgcuccuucaca

SEQ ID NO: 117662 - RNA, 19 nt, Homo sapiens
  misc_RNA (1)...(19): siRNA sense strand
cggcaggaacugagucuuc

SEQ ID NO: 117663 - RNA, 19 nt, Homo sapiens
  misc_RNA (1)...(19): siRNA sense strand
aacugagucuuccauacuu

SEQ ID NO: 117664 - RNA, 19 nt, Homo sapiens
  misc_RNA (1)...(19): siRNA sense strand
cacacuggccuccucauca

SEQ ID NO: 117665 - RNA, 19 nt, Homo sapiens
  misc_RNA (1)...(19): siRNA sense strand
uucagcaacuccugcaaau

SEQ ID NO: 117666 - RNA, 19 nt, Homo sapiens
  misc_RNA (1)...(19): siRNA sense strand
gggugggcuuugaugaugu

SEQ ID NO: 117667 - RNA, 19 nt, Homo sapiens
  misc_RNA (1)...(19): siRNA sense strand
cagaaggugcccuacaucu

SEQ ID NO: 117668 - RNA, 19 nt, Homo sapiens
  misc_RNA (1)...(19): siRNA sense strand
cgacaaggaucaagaauua

SEQ ID NO: 117669 - RNA, 19 nt, Homo sapiens
  misc_RNA (1)...(19): siRNA sense strand
gaagaagacuggaugagaa

SEQ ID NO: 117670 - RNA, 19 nt, Homo sapiens
  misc_RNA (1)...(19): siRNA sense strand
gaagagaauuccagggaua

SEQ ID NO: 117671 - RNA, 19 nt, Homo sapiens
  misc_RNA (1)...(19): siRNA sense strand
gaugaugucuccaaaguaa

SEQ ID NO: 117672 - RNA, 19 nt, Homo sapiens
  misc_RNA (1)...(19): siRNA sense strand
gaaaccagcugcuucagaa

SEQ ID NO: 117673 - RNA, 19 nt, Homo sapiens
  misc_RNA (1)...(19): siRNA sense strand
gcaauucccuccuauguau

SEQ ID NO: 117674 - RNA, 19 nt, Homo sapiens
  misc_RNA (1)...(19): siRNA sense strand
gaagaaagcagcccagauu

SEQ ID NO: 117675 - RNA, 19 nt, Homo sapiens
  misc_RNA (1)...(19): siRNA sense strand
ggacaugagugaugauuau

SEQ ID NO: 117676 - RNA, 19 nt, Homo sapiens
  misc_RNA (1)...(19): siRNA sense strand
gaaagcagcccagauuaua

SEQ ID NO: 117677 - RNA, 19 nt, Homo sapiens
  misc_RNA (1)...(19): siRNA sense strand
gaauaauacucgaagcuuu

SEQ ID NO: 117678 - RNA, 19 nt, Homo sapiens
  misc_RNA (1)...(19): siRNA sense strand
gcaaagagaauauaggaaa

SEQ ID NO: 117679 - RNA, 19 nt, Homo sapiens
  misc_RNA (1)...(19): siRNA sense strand
ccaaaguaauugccuauuu

SEQ ID NO: 117680 - RNA, 19 nt, Homo sapiens
  misc_RNA (1)...(19): siRNA sense strand
gaagaucuguuaaugaaag

SEQ ID NO: 117681 - RNA, 19 nt, Homo sapiens
  misc_RNA (1)...(19): siRNA sense strand
ccaggaugcuaguuaaaua

SEQ ID NO: 117682 - RNA, 19 nt, Homo sapiens
  misc_RNA (1)...(19): siRNA sense strand
uaaugaaagugcuggaaua

SEQ ID NO: 117683 - RNA, 19 nt, Homo sapiens
  misc_RNA (1)...(19): siRNA sense strand
ccagaagacuuaauugaga

SEQ ID NO: 117684 - RNA, 19 nt, Homo sapiens
  misc_RNA (1)...(19): siRNA sense strand
aaagaaagcuuaagcacau

SEQ ID NO: 117685 - RNA, 19 nt, Homo sapiens
  misc_RNA (1)...(19): siRNA sense strand
gagcagcccugucucuuau

SEQ ID NO: 117686 - RNA, 19 nt, Homo sapiens
  misc_RNA (1)...(19): siRNA sense strand
acaacaagcucauaaggaa

SEQ ID NO: 117687 - RNA, 19 nt, Homo sapiens
  misc_RNA (1)...(19): siRNA sense strand
ggaugaagaucuguuaaug

SEQ ID NO: 117688 - RNA, 19 nt, Homo sapiens
  misc_RNA (1)...(19): siRNA sense strand
gcaggaagaggaacaaauu

SEQ ID NO: 117689 - RNA, 19 nt, Homo sapiens
  misc_RNA (1)...(19): siRNA sense strand
gaaagagaguaaagaccaa

SEQ ID NO: 117690 - RNA, 19 nt, Homo sapiens
  misc_RNA (1)...(19): siRNA sense strand
uaaauacccugagaucauu

SEQ ID NO: 117691 - RNA, 19 nt, Homo sapiens
  misc_RNA (1)...(19): siRNA sense strand
acagacagauggcauauga

SEQ ID NO: 117692 - RNA, 19 nt, Homo sapiens
  misc_RNA (1)...(19): siRNA sense strand
ggucaaggcucaucugaag

SEQ ID NO: 117693 - RNA, 19 nt, Homo sapiens
  misc_RNA (1)...(19): siRNA sense strand
uggaauaccucaaucaaga

SEQ ID NO: 117694 - RNA, 19 nt, Homo sapiens
  misc_RNA (1)...(19): siRNA sense strand
gaagacuggaugagaauaa

SEQ ID NO: 117695 - RNA, 19 nt, Homo sapiens
  misc_RNA (1)...(19): siRNA sense strand
ggagcagcccugucucuua

SEQ ID NO: 117696 - RNA, 19 nt, Homo sapiens
  misc_RNA (1)...(19): siRNA sense strand
gaacaaaucaacgaugaga

SEQ ID NO: 117697 - RNA, 19 nt, Homo sapiens
  misc_RNA (1)...(19): siRNA sense strand
gaucagggcuuuggaguac

SEQ ID NO: 117698 - RNA, 19 nt, Homo sapiens
  misc_RNA (1)...(19): siRNA sense strand
gaacgacaaggaucaagaa

SEQ ID NO: 117699 - RNA, 19 nt, Homo sapiens
  misc_RNA (1)...(19): siRNA sense strand
agaauuaggugaguacuug

SEQ ID NO: 117700 - RNA, 19 nt, Homo sapiens
  misc_RNA (1)...(19): siRNA sense strand
uaacauugccuaugaagau

SEQ ID NO: 117701 - RNA, 19 nt, Homo sapiens
  misc_RNA (1)...(19): siRNA sense strand
ucaaagccuugcuacauug

SEQ ID NO: 117702 - RNA, 19 nt, Homo sapiens
  misc_RNA (1)...(19): siRNA sense strand
gagcuugaccuuccuguug

SEQ ID NO: 117703 - RNA, 19 nt, Homo sapiens
  misc_RNA (1)...(19): siRNA sense strand
gcuaagagagcaauggaaa

SEQ ID NO: 117704 - RNA, 19 nt, Homo sapiens
  misc_RNA (1)...(19): siRNA sense strand
gaccaacucucagaugaug

SEQ ID NO: 117705 - RNA, 19 nt, Homo sapiens
  misc_RNA (1)...(19): siRNA sense strand
gaugaagaucuguuaauga

SEQ ID NO: 117706 - RNA, 19 nt, Homo sapiens
  misc_RNA (1)...(19): siRNA sense strand
ucccaaagcugccuggauu

SEQ ID NO: 117707 - RNA, 19 nt, Homo sapiens
  misc_RNA (1)...(19): siRNA sense strand
acacagcaguggccagaaa

SEQ ID NO: 117708 - RNA, 19 nt, Homo sapiens
  misc_RNA (1)...(19): siRNA sense strand
guacugggaugaagaucug

SEQ ID NO: 117709 - RNA, 19 nt, Homo sapiens
  misc_RNA (1)...(19): siRNA sense strand
aagaugaccugcaggaaga

SEQ ID NO: 117710 - RNA, 19 nt, Homo sapiens
  misc_RNA (1)...(19): siRNA sense strand
gaagcgaguuccuggucaa

SEQ ID NO: 117711 - RNA, 19 nt, Homo sapiens
  misc_RNA (1)...(19): siRNA sense strand
cagaugaugucuccaaagu

SEQ ID NO: 117712 - RNA, 19 nt, Homo sapiens
  misc_RNA (1)...(19): siRNA sense strand
guaaagaccaacucucaga

SEQ ID NO: 117713 - RNA, 19 nt, Homo sapiens
  misc_RNA (1)...(19): siRNA sense strand
ggaacaauauacuccucaa

SEQ ID NO: 117714 - RNA, 19 nt, Homo sapiens
  misc_RNA (1)...(19): siRNA sense strand
gaagugggagguuacagaa

SEQ ID NO: 117715 - RNA, 19 nt, Homo sapiens
  misc_RNA (1)...(19): siRNA sense strand
gaacaauauacuccucaaa

SEQ ID NO: 117716 - RNA, 19 nt, Homo sapiens
  misc_RNA (1)...(19): siRNA sense strand
caauggacaugagugauga

SEQ ID NO: 117717 - RNA, 19 nt, Homo sapiens
  misc_RNA (1)...(19): siRNA sense strand
cgagagggauucacugagu

SEQ ID NO: 117718 - RNA, 19 nt, Homo sapiens
  misc_RNA (1)...(19): siRNA sense strand
aaucaacgaugagaugaaa

SEQ ID NO: 117719 - RNA, 19 nt, Homo sapiens
  misc_RNA (1)...(19): siRNA sense strand
cucaaggaauuuacagaua

SEQ ID NO: 117720 - RNA, 19 nt, Homo sapiens
  misc_RNA (1)...(19): siRNA sense strand
gaucaagaauuaggugagu

SEQ ID NO: 117721 - RNA, 19 nt, Homo sapiens
  misc_RNA (1)...(19): siRNA sense strand
ggaagugggagguuacaga

SEQ ID NO: 117722 - RNA, 19 nt, Homo sapiens
  misc_RNA (1)...(19): siRNA sense strand
ucaaggaauuuacagauac

SEQ ID NO: 117723 - RNA, 19 nt, Homo sapiens
  misc_RNA (1)...(19): siRNA sense strand
gauggagagugcagcaaau

SEQ ID NO: 117724 - RNA, 19 nt, Homo sapiens
  misc_RNA (1)...(19): siRNA sense strand
gaaaugaucagggcuuugg

SEQ ID NO: 117725 - RNA, 19 nt, Homo sapiens
  misc_RNA (1)...(19): siRNA sense strand
gaauaccucaaucaagaaa

SEQ ID NO: 117726 - RNA, 19 nt, Homo sapiens
  misc_RNA (1)...(19): siRNA sense strand
gaggauggaugaggagcaa

SEQ ID NO: 117727 - RNA, 19 nt, Homo sapiens
  misc_RNA (1)...(19): siRNA sense strand
agacagauggcauaugaaa

SEQ ID NO: 117728 - RNA, 19 nt, Homo sapiens
  misc_RNA (1)...(19): siRNA sense strand
acccugagaucauuaauuc

SEQ ID NO: 117729 - RNA, 19 nt, Homo sapiens
  misc_RNA (1)...(19): siRNA sense strand
ggaauaccucaaucaagaa

SEQ ID NO: 117730 - RNA, 19 nt, Homo sapiens
  misc_RNA (1)...(19): siRNA sense strand
cucaaagccuugcuacauu

SEQ ID NO: 117731 - RNA, 19 nt, Homo sapiens
  misc_RNA (1)...(19): siRNA sense strand
gcagcuucauuucagagaa

SEQ ID NO: 117732 - RNA, 19 nt, Homo sapiens
  misc_RNA (1)...(19): siRNA sense strand
aagaccaacucucagauga

SEQ ID NO: 117733 - RNA, 19 nt, Homo sapiens
  misc_RNA (1)...(19): siRNA sense strand
gacaacaagcucauaagga

SEQ ID NO: 117734 - RNA, 19 nt, Homo sapiens
  misc_RNA (1)...(19): siRNA sense strand
cuaguuaaauacccugaga

SEQ ID NO: 117735 - RNA, 19 nt, Homo sapiens
  misc_RNA (1)...(19): siRNA sense strand
cagaagacuuaauugagau

SEQ ID NO: 117736 - RNA, 19 nt, Homo sapiens
  misc_RNA (1)...(19): siRNA sense strand
cagcaaagagaauauagga

SEQ ID NO: 117737 - RNA, 19 nt, Homo sapiens
  misc_RNA (1)...(19): siRNA sense strand
ggauggagagugcagcaaa

SEQ ID NO: 117738 - RNA, 19 nt, Homo sapiens
  misc_RNA (1)...(19): siRNA sense strand
ugaccuuccuguugaccua

SEQ ID NO: 117739 - RNA, 19 nt, Homo sapiens
  misc_RNA (1)...(19): siRNA sense strand
ugaaagugcuggaauaccu

SEQ ID NO: 117740 - RNA, 19 nt, Homo sapiens
  misc_RNA (1)...(19): siRNA sense strand
caagaguggcuacccuaaa

SEQ ID NO: 117741 - RNA, 19 nt, Homo sapiens
  misc_RNA (1)...(19): siRNA sense strand
ccagaccuguuccaaaaua

SEQ ID NO: 117742 - RNA, 19 nt, Homo sapiens
  misc_RNA (1)...(19): siRNA sense strand
aagaaagcagcccagauua

SEQ ID NO: 117743 - RNA, 19 nt, Homo sapiens
  misc_RNA (1)...(19): siRNA sense strand
cauauaaccaggagaaagu

SEQ ID NO: 117744 - RNA, 19 nt, Homo sapiens
  misc_RNA (1)...(19): siRNA sense strand
ggagaagccgaauggauca

SEQ ID NO: 117745 - RNA, 19 nt, Homo sapiens
  misc_RNA (1)...(19): siRNA sense strand
aaagcagcccagauuauaa

SEQ ID NO: 117746 - RNA, 19 nt, Homo sapiens
  misc_RNA (1)...(19): siRNA sense strand
aaaagaaaauggcgaugaa

SEQ ID NO: 117747 - RNA, 19 nt, Homo sapiens
  misc_RNA (1)...(19): siRNA sense strand
ggaaaauguccaaaaguuu

SEQ ID NO: 117748 - RNA, 19 nt, Homo sapiens
  misc_RNA (1)...(19): siRNA sense strand
cacaugcaauucccuccua

SEQ ID NO: 117749 - RNA, 19 nt, Homo sapiens
  misc_RNA (1)...(19): siRNA sense strand
ugaagaagacuggaugaga

SEQ ID NO: 117750 - RNA, 19 nt, Homo sapiens
  misc_RNA (1)...(19): siRNA sense strand
uuaaauacccugagaucau

SEQ ID NO: 117751 - RNA, 19 nt, Homo sapiens
  misc_RNA (1)...(19): siRNA sense strand
ggaagaaagcagcccagau

SEQ ID NO: 117752 - RNA, 19 nt, Homo sapiens
  misc_RNA (1)...(19): siRNA sense strand
augaacaaaucaacgauga

SEQ ID NO: 117753 - RNA, 19 nt, Homo sapiens
  misc_RNA (1)...(19): siRNA sense strand
ggaacccaguagaggagaa

SEQ ID NO: 117754 - RNA, 19 nt, Homo sapiens
  misc_RNA (1)...(19): siRNA sense strand
acgcacaaaugaaauagug

SEQ ID NO: 117755 - RNA, 19 nt, Homo sapiens
  misc_RNA (1)...(19): siRNA sense strand
ccaauggacaugagugaug

SEQ ID NO: 117756 - RNA, 19 nt, Homo sapiens
  misc_RNA (1)...(19): siRNA sense strand
gagugaugauuaugagaca

SEQ ID NO: 117757 - RNA, 19 nt, Homo sapiens
  misc_RNA (1)...(19): siRNA sense strand
ggaagaggaacaaauugag

SEQ ID NO: 117758 - RNA, 19 nt, Homo sapiens
  misc_RNA (1)...(19): siRNA sense strand
guacuuggccaggaugcua

SEQ ID NO: 117759 - RNA, 19 nt, Homo sapiens
  misc_RNA (1)...(19): siRNA sense strand
gcuuuggaguacauagaaa

SEQ ID NO: 117760 - RNA, 19 nt, Homo sapiens
  misc_RNA (1)...(19): siRNA sense strand
caaaucaacgaugagauga

SEQ ID NO: 117761 - RNA, 19 nt, Homo sapiens
  misc_RNA (1)...(19): siRNA sense strand
acaaaucaacgaugagaug

SEQ ID NO: 117762 - RNA, 19 nt, Homo sapiens
  misc_RNA (1)...(19): siRNA sense strand
agaaagcagcccagauuau

SEQ ID NO: 117763 - RNA, 19 nt, Homo sapiens
  misc_RNA (1)...(19): siRNA sense strand
uggccaggaugcuaguuaa

SEQ ID NO: 117764 - RNA, 19 nt, Homo sapiens
  misc_RNA (1)...(19): siRNA sense strand
aaauaguggaggaacaaua

SEQ ID NO: 117765 - RNA, 19 nt, Homo sapiens
  misc_RNA (1)...(19): siRNA sense strand
gggaugaagaucuguuaau

SEQ ID NO: 117766 - RNA, 19 nt, Homo sapiens
  misc_RNA (1)...(19): siRNA sense strand
agugggagguuacagaaug

SEQ ID NO: 117767 - RNA, 19 nt, Homo sapiens
  misc_RNA (1)...(19): siRNA sense strand
ugagagacagcaaagagaa

SEQ ID NO: 117768 - RNA, 19 nt, Homo sapiens
  misc_RNA (1)...(19): siRNA sense strand
gaacgaagauccgauguau

SEQ ID NO: 117769 - RNA, 19 nt, Homo sapiens
  misc_RNA (1)...(19): siRNA sense strand
gaagaagacgguacaauuu

SEQ ID NO: 117770 - RNA, 19 nt, Homo sapiens
  misc_RNA (1)...(19): siRNA sense strand
ccacaaagauccucacguu

SEQ ID NO: 117771 - RNA, 19 nt, Homo sapiens
  misc_RNA (1)...(19): siRNA sense strand
gaaccagccuuuauugaug

SEQ ID NO: 117772 - RNA, 19 nt, Homo sapiens
  misc_RNA (1)...(19): siRNA sense strand
caaccacccuuuccacuuu

SEQ ID NO: 117773 - RNA, 19 nt, Homo sapiens
  misc_RNA (1)...(19): siRNA sense strand
ucagaacucucagaacuua

SEQ ID NO: 117774 - RNA, 19 nt, Homo sapiens
  misc_RNA (1)...(19): siRNA sense strand
uaaaggcucuuaugguuga

SEQ ID NO: 117775 - RNA, 19 nt, Homo sapiens
  misc_RNA (1)...(19): siRNA sense strand
gaaguauguucaagagauu

SEQ ID NO: 117776 - RNA, 19 nt, Homo sapiens
  misc_RNA (1)...(19): siRNA sense strand
ggaguuacguucccagcua

SEQ ID NO: 117777 - RNA, 19 nt, Homo sapiens
  misc_RNA (1)...(19): siRNA sense strand
gaaguaagcaacguauuaa

SEQ ID NO: 117778 - RNA, 19 nt, Homo sapiens
  misc_RNA (1)...(19): siRNA sense strand
caaauacaauggucaguuc

SEQ ID NO: 117779 - RNA, 19 nt, Homo sapiens
  misc_RNA (1)...(19): siRNA sense strand
ugaaguaagcaacguauua

SEQ ID NO: 117780 - RNA, 19 nt, Homo sapiens
  misc_RNA (1)...(19): siRNA sense strand
gauggaggcccuuuccuua

SEQ ID NO: 117781 - RNA, 19 nt, Homo sapiens
  misc_RNA (1)...(19): siRNA sense strand
gcacuggaccuaaggauug

SEQ ID NO: 117782 - RNA, 19 nt, Homo sapiens
  misc_RNA (1)...(19): siRNA sense strand
cauccagucucuuaacuaa

SEQ ID NO: 117783 - RNA, 19 nt, Homo sapiens
  misc_RNA (1)...(19): siRNA sense strand
ggacagaugaauuuaagaa

SEQ ID NO: 117784 - RNA, 19 nt, Homo sapiens
  misc_RNA (1)...(19): siRNA sense strand
uaaauaagggucauccuaa

SEQ ID NO: 117785 - RNA, 19 nt, Homo sapiens
  misc_RNA (1)...(19): siRNA sense strand
gagcagcugucuucucuca

SEQ ID NO: 117786 - RNA, 19 nt, Homo sapiens
  misc_RNA (1)...(19): siRNA sense strand
gaacaaaggcagcagucaa

SEQ ID NO: 117787 - RNA, 19 nt, Homo sapiens
  misc_RNA (1)...(19): siRNA sense strand
cuacagaugcugcaaagua

SEQ ID NO: 117788 - RNA, 19 nt, Homo sapiens
  misc_RNA (1)...(19): siRNA sense strand
uaacuaaccaccaacauga

SEQ ID NO: 117789 - RNA, 19 nt, Homo sapiens
  misc_RNA (1)...(19): siRNA sense strand
gaugggaccucucauugau

SEQ ID NO: 117790 - RNA, 19 nt, Homo sapiens
  misc_RNA (1)...(19): siRNA sense strand
ucucagaacuuaaugugaa

SEQ ID NO: 117791 - RNA, 19 nt, Homo sapiens
  misc_RNA (1)...(19): siRNA sense strand
gauccuaacugguggaaag

SEQ ID NO: 117792 - RNA, 19 nt, Homo sapiens
  misc_RNA (1)...(19): siRNA sense strand
gcaaccagcgagaugaaua

SEQ ID NO: 117793 - RNA, 19 nt, Homo sapiens
  misc_RNA (1)...(19): siRNA sense strand
gcagucaucugguguuucu

SEQ ID NO: 117794 - RNA, 19 nt, Homo sapiens
  misc_RNA (1)...(19): siRNA sense strand
uacagaaucagccauauua

SEQ ID NO: 117795 - RNA, 19 nt, Homo sapiens
  misc_RNA (1)...(19): siRNA sense strand
ugaaacccaucaaggcaua

SEQ ID NO: 117796 - RNA, 19 nt, Homo sapiens
  misc_RNA (1)...(19): siRNA sense strand
ugucuucggucuauuauga

SEQ ID NO: 117797 - RNA, 19 nt, Homo sapiens
  misc_RNA (1)...(19): siRNA sense strand
cagaaucagccauauuaua

SEQ ID NO: 117798 - RNA, 19 nt, Homo sapiens
  misc_RNA (1)...(19): siRNA sense strand
gcuggaagauauugauaga

SEQ ID NO: 117799 - RNA, 19 nt, Homo sapiens
  misc_RNA (1)...(19): siRNA sense strand
ugaauggacagaugaauuu

SEQ ID NO: 117800 - RNA, 19 nt, Homo sapiens
  misc_RNA (1)...(19): siRNA sense strand
uaagggucauccuaaagua

SEQ ID NO: 117801 - RNA, 19 nt, Homo sapiens
  misc_RNA (1)...(19): siRNA sense strand
aaauaagggucauccuaaa

SEQ ID NO: 117802 - RNA, 19 nt, Homo sapiens
  misc_RNA (1)...(19): siRNA sense strand
gugccaaacuauaacuuaa

SEQ ID NO: 117803 - RNA, 19 nt, Homo sapiens
  misc_RNA (1)...(19): siRNA sense strand
gaagagugaaccacaaaga

SEQ ID NO: 117804 - RNA, 19 nt, Homo sapiens
  misc_RNA (1)...(19): siRNA sense strand
uggaggcccuuuccuuaua

SEQ ID NO: 117805 - RNA, 19 nt, Homo sapiens
  misc_RNA (1)...(19): siRNA sense strand
gaaagcaaccagcgagaug

SEQ ID NO: 117806 - RNA, 19 nt, Homo sapiens
  misc_RNA (1)...(19): siRNA sense strand
aagaagacgguacaauuua

SEQ ID NO: 117807 - RNA, 19 nt, Homo sapiens
  misc_RNA (1)...(19): siRNA sense strand
gcagggaacgcgcagauga

SEQ ID NO: 117808 - RNA, 19 nt, Homo sapiens
  misc_RNA (1)...(19): siRNA sense strand
gagcauguguaucaaacug

SEQ ID NO: 117809 - RNA, 19 nt, Homo sapiens
  misc_RNA (1)...(19): siRNA sense strand
uaccagagcugcuucaucu

SEQ ID NO: 117810 - RNA, 19 nt, Homo sapiens
  misc_RNA (1)...(19): siRNA sense strand
agaagaagacgguacaauu

SEQ ID NO: 117811 - RNA, 19 nt, Homo sapiens
  misc_RNA (1)...(19): siRNA sense strand
gaaaaguucgugcuauaua

SEQ ID NO: 117812 - RNA, 19 nt, Homo sapiens
  misc_RNA (1)...(19): siRNA sense strand
ggaaccagccuuuauugau

SEQ ID NO: 117813 - RNA, 19 nt, Homo sapiens
  misc_RNA (1)...(19): siRNA sense strand
uaagaaugauccacagcuu

SEQ ID NO: 117814 - RNA, 19 nt, Homo sapiens
  misc_RNA (1)...(19): siRNA sense strand
cagaaugcaggaccuaaua

SEQ ID NO: 117815 - RNA, 19 nt, Homo sapiens
  misc_RNA (1)...(19): siRNA sense strand
ggaggcccuuuccuuauau

SEQ ID NO: 117816 - RNA, 19 nt, Homo sapiens
  misc_RNA (1)...(19): siRNA sense strand
ggagaaauuauuacaguuc

SEQ ID NO: 117817 - RNA, 19 nt, Homo sapiens
  misc_RNA (1)...(19): siRNA sense strand
gagaagagugaaccacaaa

SEQ ID NO: 117818 - RNA, 19 nt, Homo sapiens
  misc_RNA (1)...(19): siRNA sense strand
gaauggacagaugaauuua

SEQ ID NO: 117819 - RNA, 19 nt, Homo sapiens
  misc_RNA (1)...(19): siRNA sense strand
agaaguauguucaagagau

SEQ ID NO: 117820 - RNA, 19 nt, Homo sapiens
  misc_RNA (1)...(19): siRNA sense strand
auuaaaggcucuuaugguu

SEQ ID NO: 117821 - RNA, 19 nt, Homo sapiens
  misc_RNA (1)...(19): siRNA sense strand
uuccauguaugcaaaguua

SEQ ID NO: 117822 - RNA, 19 nt, Homo sapiens
  misc_RNA (1)...(19): siRNA sense strand
gauccgauguauuccaugu

SEQ ID NO: 117823 - RNA, 19 nt, Homo sapiens
  misc_RNA (1)...(19): siRNA sense strand
ccaaguuaaugaacgaaga

SEQ ID NO: 117824 - RNA, 19 nt, Homo sapiens
  misc_RNA (1)...(19): siRNA sense strand
gauugucuucggucuauua

SEQ ID NO: 117825 - RNA, 19 nt, Homo sapiens
  misc_RNA (1)...(19): siRNA sense strand
aagcacauccagucucuua

SEQ ID NO: 117826 - RNA, 19 nt, Homo sapiens
  misc_RNA (1)...(19): siRNA sense strand
caagagauuuugcuaguga

SEQ ID NO: 117827 - RNA, 19 nt, Homo sapiens
  misc_RNA (1)...(19): siRNA sense strand
gugaugauguucagguaga

SEQ ID NO: 117828 - RNA, 19 nt, Homo sapiens
  misc_RNA (1)...(19): siRNA sense strand
ggcauaggguuauuuccuu

SEQ ID NO: 117829 - RNA, 19 nt, Homo sapiens
  misc_RNA (1)...(19): siRNA sense strand
cagcaaccauauucucaga

SEQ ID NO: 117830 - RNA, 19 nt, Homo sapiens
  misc_RNA (1)...(19): siRNA sense strand
gccaaacuauaacuuaaca

SEQ ID NO: 117831 - RNA, 19 nt, Homo sapiens
  misc_RNA (1)...(19): siRNA sense strand
cgaucaggauguugagaaa

SEQ ID NO: 117832 - RNA, 19 nt, Homo sapiens
  misc_RNA (1)...(19): siRNA sense strand
ugagaagagugaaccacaa

SEQ ID NO: 117833 - RNA, 19 nt, Homo sapiens
  misc_RNA (1)...(19): siRNA sense strand
ggugccaaacuauaacuua

SEQ ID NO: 117834 - RNA, 19 nt, Homo sapiens
  misc_RNA (1)...(19): siRNA sense strand
gcugaaccagaaaugauua

SEQ ID NO: 117835 - RNA, 19 nt, Homo sapiens
  misc_RNA (1)...(19): siRNA sense strand
ugaagcugcugaagacaau

SEQ ID NO: 117836 - RNA, 19 nt, Homo sapiens
  misc_RNA (1)...(19): siRNA sense strand
gaagaagaagauuuagcaa

SEQ ID NO: 117837 - RNA, 19 nt, Homo sapiens
  misc_RNA (1)...(19): siRNA sense strand
cagagcugcuucaucuuga

SEQ ID NO: 117838 - RNA, 19 nt, Homo sapiens
  misc_RNA (1)...(19): siRNA sense strand
agucuaauaucagcaauga

SEQ ID NO: 117839 - RNA, 19 nt, Homo sapiens
  misc_RNA (1)...(19): siRNA sense strand
gaaugcaggaccuaauaug

SEQ ID NO: 117840 - RNA, 19 nt, Homo sapiens
  misc_RNA (1)...(19): siRNA sense strand
ucaggccgcuuacccaaau

SEQ ID NO: 117841 - RNA, 19 nt, Homo sapiens
  misc_RNA (1)...(19): siRNA sense strand
acgaagauccgauguauuc

SEQ ID NO: 117842 - RNA, 19 nt, Homo sapiens
  misc_RNA (1)...(19): siRNA sense strand
ccaccaaucccuucgauca

SEQ ID NO: 117843 - RNA, 19 nt, Homo sapiens
  misc_RNA (1)...(19): siRNA sense strand
agaagacgguacaauuuag

SEQ ID NO: 117844 - RNA, 19 nt, Homo sapiens
  misc_RNA (1)...(19): siRNA sense strand
gaggcccuuuccuuauaua

SEQ ID NO: 117845 - RNA, 19 nt, Homo sapiens
  misc_RNA (1)...(19): siRNA sense strand
ugauaaaguuggucagucu

SEQ ID NO: 117846 - RNA, 19 nt, Homo sapiens
  misc_RNA (1)...(19): siRNA sense strand
uuaaauaagggucauccua

SEQ ID NO: 117847 - RNA, 19 nt, Homo sapiens
  misc_RNA (1)...(19): siRNA sense strand
cuccagagcuacagucuuc

SEQ ID NO: 117848 - RNA, 19 nt, Homo sapiens
  misc_RNA (1)...(19): siRNA sense strand
gcugaagacaaugaacuua

SEQ ID NO: 117849 - RNA, 19 nt, Homo sapiens
  misc_RNA (1)...(19): siRNA sense strand
ucucuuaacuaaccaccaa

SEQ ID NO: 117850 - RNA, 19 nt, Homo sapiens
  misc_RNA (1)...(19): siRNA sense strand
ucuaggagcauguguauca

SEQ ID NO: 117851 - RNA, 19 nt, Homo sapiens
  misc_RNA (1)...(19): siRNA sense strand
uguauuccauguaugcaaa

SEQ ID NO: 117852 - RNA, 19 nt, Homo sapiens
  misc_RNA (1)...(19): siRNA sense strand
ccagagcugcuucaucuug

SEQ ID NO: 117853 - RNA, 19 nt, Homo sapiens
  misc_RNA (1)...(19): siRNA sense strand
gaagacaaugaacuuacuu

SEQ ID NO: 117854 - RNA, 19 nt, Homo sapiens
  misc_RNA (1)...(19): siRNA sense strand
ccaagcacauccagucucu

SEQ ID NO: 117855 - RNA, 19 nt, Homo sapiens
  misc_RNA (1)...(19): siRNA sense strand
gaguuacguucccagcuau

SEQ ID NO: 117856 - RNA, 19 nt, Homo sapiens
  misc_RNA (1)...(19): siRNA sense strand
gcaaacccagcccuuccua

SEQ ID NO: 117857 - RNA, 19 nt, Homo sapiens
  misc_RNA (1)...(19): siRNA sense strand
cggagcagcugucuucucu

SEQ ID NO: 117858 - RNA, 19 nt, Homo sapiens
  misc_RNA (1)...(19): siRNA sense strand
ugagccaccuccagagcua

SEQ ID NO: 117859 - RNA, 19 nt, Homo sapiens
  misc_RNA (1)...(19): siRNA sense strand
cagaugggaccucucauug

SEQ ID NO: 117860 - RNA, 19 nt, Homo sapiens
  misc_RNA (1)...(19): siRNA sense strand
ccagaugggaccucucauu

SEQ ID NO: 117861 - RNA, 19 nt, Homo sapiens
  misc_RNA (1)...(19): siRNA sense strand
ggaaaggugaaacccauca

SEQ ID NO: 117862 - RNA, 19 nt, Homo sapiens
  misc_RNA (1)...(19): siRNA sense strand
ggucaguuccguucaagga

SEQ ID NO: 117863 - RNA, 19 nt, Homo sapiens
  misc_RNA (1)...(19): siRNA sense strand
ccaaggauccugguacugu

SEQ ID NO: 117864 - RNA, 19 nt, Homo sapiens
  misc_RNA (1)...(19): siRNA sense strand
ccaaauacaauggucaguu

SEQ ID NO: 117865 - RNA, 19 nt, Homo sapiens
  misc_RNA (1)...(19): siRNA sense strand
ucucacugcugaaccagaa

SEQ ID NO: 117866 - RNA, 19 nt, Homo sapiens
  misc_RNA (1)...(19): siRNA sense strand
ugaagacaaugaacuuacu

SEQ ID NO: 117867 - RNA, 19 nt, Homo sapiens
  misc_RNA (1)...(19): siRNA sense strand
ggcuuugacucuucuagga

SEQ ID NO: 117868 - RNA, 19 nt, Homo sapiens
  misc_RNA (1)...(19): siRNA sense strand
gcaaagaacugaucauaaa

SEQ ID NO: 117869 - RNA, 19 nt, Homo sapiens
  misc_RNA (1)...(19): siRNA sense strand
ggaaugacauggacaaaug

SEQ ID NO: 117870 - RNA, 19 nt, Homo sapiens
  misc_RNA (1)...(19): siRNA sense strand
gaugagagaugcuaaaugu

SEQ ID NO: 117871 - RNA, 19 nt, Homo sapiens
  misc_RNA (1)...(19): siRNA sense strand
gaacagauuuguggaagaa

SEQ ID NO: 117872 - RNA, 19 nt, Homo sapiens
  misc_RNA (1)...(19): siRNA sense strand
gaucauaaaucuggaaaga

SEQ ID NO: 117873 - RNA, 19 nt, Homo sapiens
  misc_RNA (1)...(19): siRNA sense strand
gaaaggaggcugcaucaug

SEQ ID NO: 117874 - RNA, 19 nt, Homo sapiens
  misc_RNA (1)...(19): siRNA sense strand
ugaaagcuaugucuuagaa

SEQ ID NO: 117875 - RNA, 19 nt, Homo sapiens
  misc_RNA (1)...(19): siRNA sense strand
aggaagagcugaugaaguu

SEQ ID NO: 117876 - RNA, 19 nt, Homo sapiens
  misc_RNA (1)...(19): siRNA sense strand
aaaggaggcugcaucauga

SEQ ID NO: 117877 - RNA, 19 nt, Homo sapiens
  misc_RNA (1)...(19): siRNA sense strand
ggacaaaugcucuguaagu

SEQ ID NO: 117878 - RNA, 19 nt, Homo sapiens
  misc_RNA (1)...(19): siRNA sense strand
caccaaaccucgcugcaaa

SEQ ID NO: 117879 - RNA, 19 nt, Homo sapiens
  misc_RNA (1)...(19): siRNA sense strand
ggcaaagucucgaagaguu

SEQ ID NO: 117880 - RNA, 19 nt, Homo sapiens
  misc_RNA (1)...(19): siRNA sense strand
ggacuuauuguguuugaaa

SEQ ID NO: 117881 - RNA, 19 nt, Homo sapiens
  misc_RNA (1)...(19): siRNA sense strand
aaaccucgcugcaaagaau

SEQ ID NO: 117882 - RNA, 19 nt, Homo sapiens
  misc_RNA (1)...(19): siRNA sense strand
caacagauacaaacucuuc

SEQ ID NO: 117883 - RNA, 19 nt, Homo sapiens
  misc_RNA (1)...(19): siRNA sense strand
gcaccucccuucugugaca

SEQ ID NO: 117884 - RNA, 19 nt, Homo sapiens
  misc_RNA (1)...(19): siRNA sense strand
aagcagcgauuaauagaga

SEQ ID NO: 117885 - RNA, 19 nt, Homo sapiens
  misc_RNA (1)...(19): siRNA sense strand
cuaaucacguugacaaguu

SEQ ID NO: 117886 - RNA, 19 nt, Homo sapiens
  misc_RNA (1)...(19): siRNA sense strand
ucaccagccuccaugaauu

SEQ ID NO: 117887 - RNA, 19 nt, Homo sapiens
  misc_RNA (1)...(19): siRNA sense strand
ccaaugccguuuccauaga

SEQ ID NO: 117888 - RNA, 19 nt, Homo sapiens
  misc_RNA (1)...(19): siRNA sense strand
ggaacagauuuguggaaga

SEQ ID NO: 117889 - RNA, 19 nt, Homo sapiens
  misc_RNA (1)...(19): siRNA sense strand
caagaaucauccagaagug

SEQ ID NO: 117890 - RNA, 19 nt, Homo sapiens
  misc_RNA (1)...(19): siRNA sense strand
gcaagacgguacugauguc

SEQ ID NO: 117891 - RNA, 19 nt, Homo sapiens
  misc_RNA (1)...(19): siRNA sense strand
gcaaaucccaugacaaugc

SEQ ID NO: 117892 - RNA, 19 nt, Homo sapiens
  misc_RNA (1)...(19): siRNA sense strand
ccagaggaauguaugaauc

SEQ ID NO: 117893 - RNA, 19 nt, Homo sapiens
  misc_RNA (1)...(19): siRNA sense strand
uaaucacguugacaaguuu

SEQ ID NO: 117894 - RNA, 19 nt, Homo sapiens
  misc_RNA (1)...(19): siRNA sense strand
gcugaagccugcaggaaca

SEQ ID NO: 117895 - RNA, 19 nt, Homo sapiens
  misc_RNA (1)...(19): siRNA sense strand
gacaaaugcucuguaaguc

SEQ ID NO: 117896 - RNA, 19 nt, Homo sapiens
  misc_RNA (1)...(19): siRNA sense strand
ccugggaucugcuuugaga

SEQ ID NO: 117897 - RNA, 19 nt, Homo sapiens
  misc_RNA (1)...(19): siRNA sense strand
ggcuguagcugucaaaugg

SEQ ID NO: 117898 - RNA, 19 nt, Homo sapiens
  misc_RNA (1)...(19): siRNA sense strand
caaggaggccggauucugu

SEQ ID NO: 117899 - RNA, 19 nt, Homo sapiens
  misc_RNA (1)...(19): siRNA sense strand
ggaaagcaaagaacugauc

SEQ ID NO: 117900 - RNA, 19 nt, Homo sapiens
  misc_RNA (1)...(19): siRNA sense strand
guacuugggcgaugacaug

SEQ ID NO: 117901 - RNA, 19 nt, Homo sapiens
  misc_RNA (1)...(19): siRNA sense strand
gagcuucgacuccaagaau

SEQ ID NO: 117902 - RNA, 19 nt, Homo sapiens
  misc_RNA (1)...(19): siRNA sense strand
gcacucaugucaggaugug

SEQ ID NO: 117903 - RNA, 19 nt, Homo sapiens
  misc_RNA (1)...(19): siRNA sense strand
gaagugugggaacagauuu

SEQ ID NO: 117904 - RNA, 19 nt, Homo sapiens
  misc_RNA (1)...(19): siRNA sense strand
gagaaaggaggcugcauca

SEQ ID NO: 117905 - RNA, 19 nt, Homo sapiens
  misc_RNA (1)...(19): siRNA sense strand
aaagugcaaccaacagaua

SEQ ID NO: 117906 - RNA, 19 nt, Homo sapiens
  misc_RNA (1)...(19): siRNA sense strand
gaaagcaaagaacugauca

SEQ ID NO: 117907 - RNA, 19 nt, Homo sapiens
  misc_RNA (1)...(19): siRNA sense strand
cagaagugcugaauauucg

SEQ ID NO: 117908 - RNA, 19 nt, Homo sapiens
  misc_RNA (1)...(19): siRNA sense strand
caaugccguuuccauagaa

SEQ ID NO: 117909 - RNA, 19 nt, Homo sapiens
  misc_RNA (1)...(19): siRNA sense strand
ccagaagugcugaauauuc

SEQ ID NO: 117910 - RNA, 19 nt, Homo sapiens
  misc_RNA (1)...(19): siRNA sense strand
ccugugaccucccagaguu

SEQ ID NO: 117911 - RNA, 19 nt, Homo sapiens
  misc_RNA (1)...(19): siRNA sense strand
ugacaaguuuggcuuugga

SEQ ID NO: 117912 - RNA, 19 nt, Homo sapiens
  misc_RNA (1)...(19): siRNA sense strand
ggacggcuacugcuacaau

SEQ ID NO: 117913 - RNA, 19 nt, Homo sapiens
  misc_RNA (1)...(19): siRNA sense strand
aagcaaagaacugaucaua

SEQ ID NO: 117914 - RNA, 19 nt, Homo sapiens
  misc_RNA (1)...(19): siRNA sense strand
gaagagcugaugaaguugu

SEQ ID NO: 117915 - RNA, 19 nt, Homo sapiens
  misc_RNA (1)...(19): siRNA sense strand
ggaaacccacuaucugcaa

SEQ ID NO: 117916 - RNA, 19 nt, Homo sapiens
  misc_RNA (1)...(19): siRNA sense strand
ucucagacaugggcaagaa

SEQ ID NO: 117917 - RNA, 19 nt, Homo sapiens
  misc_RNA (1)...(19): siRNA sense strand
gggcaccucccuucuguga

SEQ ID NO: 117918 - RNA, 19 nt, Homo sapiens
  misc_RNA (1)...(19): siRNA sense strand
ccaagaaucauccagaagu

SEQ ID NO: 117919 - RNA, 19 nt, Homo sapiens
  misc_RNA (1)...(19): siRNA sense strand
augaaucgcugcugcaaug

SEQ ID NO: 117920 - RNA, 19 nt, Homo sapiens
  misc_RNA (1)...(19): siRNA sense strand
ggaagaaggagaggagugu

SEQ ID NO: 117921 - RNA, 19 nt, Homo sapiens
  misc_RNA (1)...(19): siRNA sense strand
gcguggaaguguggaauga

SEQ ID NO: 117922 - RNA, 19 nt, Homo sapiens
  misc_RNA (1)...(19): siRNA sense strand
ucgcaaaucccaugacaau

SEQ ID NO: 117923 - RNA, 19 nt, Homo sapiens
  misc_RNA (1)...(19): siRNA sense strand
uaccaaugccguuuccaua

SEQ ID NO: 117924 - RNA, 19 nt, Homo sapiens
  misc_RNA (1)...(19): siRNA sense strand
ccagaagugugggaacaga

SEQ ID NO: 117925 - RNA, 19 nt, Homo sapiens
  misc_RNA (1)...(19): siRNA sense strand
cacaugagcugggccacaa

SEQ ID NO: 117926 - RNA, 19 nt, Homo sapiens
  misc_RNA (1)...(19): siRNA sense strand
ucaaggcaacuaaguaugu

SEQ ID NO: 117927 - RNA, 19 nt, Homo sapiens
  misc_RNA (1)...(19): siRNA sense strand
caaagugugcagauggaaa

SEQ ID NO: 117928 - RNA, 19 nt, Homo sapiens
  misc_RNA (1)...(19): siRNA sense strand
gcaaagucucgaagaguuc

SEQ ID NO: 117929 - RNA, 19 nt, Homo sapiens
  misc_RNA (1)...(19): siRNA sense strand
gcagacaaccgagaguuuc

SEQ ID NO: 117930 - RNA, 19 nt, Homo sapiens
  misc_RNA (1)...(19): siRNA sense strand
caaggcaacuaaguaugug

SEQ ID NO: 117931 - RNA, 19 nt, Homo sapiens
  misc_RNA (1)...(19): siRNA sense strand
guacggggauauucugauu

SEQ ID NO: 117932 - RNA, 19 nt, Homo sapiens
  misc_RNA (1)...(19): siRNA sense strand
gcugaauauucgacuacaa

SEQ ID NO: 117933 - RNA, 19 nt, Homo sapiens
  misc_RNA (1)...(19): siRNA sense strand
ugucuuagaaccaaugaaa

SEQ ID NO: 117934 - RNA, 19 nt, Homo sapiens
  misc_RNA (1)...(19): siRNA sense strand
aaugaaagcuaugucuuag

SEQ ID NO: 117935 - RNA, 19 nt, Homo sapiens
  misc_RNA (1)...(19): siRNA sense strand
uuacagaccacugaacauu

SEQ ID NO: 117936 - RNA, 19 nt, Homo sapiens
  misc_RNA (1)...(19): siRNA sense strand
ucccuucugugacaaguuu

SEQ ID NO: 117937 - RNA, 19 nt, Homo sapiens
  misc_RNA (1)...(19): siRNA sense strand
gcaacaacaggaagaacug

SEQ ID NO: 117938 - RNA, 19 nt, Homo sapiens
  misc_RNA (1)...(19): siRNA sense strand
auccagaagugcugaauau

SEQ ID NO: 117939 - RNA, 19 nt, Homo sapiens
  misc_RNA (1)...(19): siRNA sense strand
gagaugagagaugcuaaau

SEQ ID NO: 117940 - RNA, 19 nt, Homo sapiens
  misc_RNA (1)...(19): siRNA sense strand
ccaaaugcgagaugagaga

SEQ ID NO: 117941 - RNA, 19 nt, Homo sapiens
  misc_RNA (1)...(19): siRNA sense strand
gcaaugccaccaccuguac

SEQ ID NO: 117942 - RNA, 19 nt, Homo sapiens
  misc_RNA (1)...(19): siRNA sense strand
caccagccuccaugaauuu

SEQ ID NO: 117943 - RNA, 19 nt, Homo sapiens
  misc_RNA (1)...(19): siRNA sense strand
gcagcaaggaggccggauu

SEQ ID NO: 117944 - RNA, 19 nt, Homo sapiens
  misc_RNA (1)...(19): siRNA sense strand
ccaccacccucucagacau

SEQ ID NO: 117945 - RNA, 19 nt, Homo sapiens
  misc_RNA (1)...(19): siRNA sense strand
gaaagaaaugaaggucuca

SEQ ID NO: 117946 - RNA, 19 nt, Homo sapiens
  misc_RNA (1)...(19): siRNA sense strand
gcaaggaggccggauucug

SEQ ID NO: 117947 - RNA, 19 nt, Homo sapiens
  misc_RNA (1)...(19): siRNA sense strand
ucacggaaacccacuaucu

SEQ ID NO: 117948 - RNA, 19 nt, Homo sapiens
  misc_RNA (1)...(19): siRNA sense strand
auggacaaaugcucuguaa

SEQ ID NO: 117949 - RNA, 19 nt, Homo sapiens
  misc_RNA (1)...(19): siRNA sense strand
ggaaguguggaaugacaug

SEQ ID NO: 117950 - RNA, 19 nt, Homo sapiens
  misc_RNA (1)...(19): siRNA sense strand
guggaaguguggaaugaca

SEQ ID NO: 117951 - RNA, 19 nt, Homo sapiens
  misc_RNA (1)...(19): siRNA sense strand
ggcagacaaccgagaguuu

SEQ ID NO: 117952 - RNA, 19 nt, Homo sapiens
  misc_RNA (1)...(19): siRNA sense strand
ccucaaggcaacuaaguau

SEQ ID NO: 117953 - RNA, 19 nt, Homo sapiens
  misc_RNA (1)...(19): siRNA sense strand
caagaaggcauaaaagaga

SEQ ID NO: 117954 - RNA, 19 nt, Homo sapiens
  misc_RNA (1)...(19): siRNA sense strand
ggccagaagugugggaaca

SEQ ID NO: 117955 - RNA, 19 nt, Homo sapiens
  misc_RNA (1)...(19): siRNA sense strand
ggccacaauuucgggauga

SEQ ID NO: 117956 - RNA, 19 nt, Homo sapiens
  misc_RNA (1)...(19): siRNA sense strand
uuucuggacuggaggaaga

SEQ ID NO: 117957 - RNA, 19 nt, Homo sapiens
  misc_RNA (1)...(19): siRNA sense strand
gcacgaugggcacucaugu

SEQ ID NO: 117958 - RNA, 19 nt, Homo sapiens
  misc_RNA (1)...(19): siRNA sense strand
aaauggcgguugagaaagg

SEQ ID NO: 117959 - RNA, 19 nt, Homo sapiens
  misc_RNA (1)...(19): siRNA sense strand
gaaaagugcaaccaacaga

SEQ ID NO: 117960 - RNA, 19 nt, Homo sapiens
  misc_RNA (1)...(19): siRNA sense strand
cgagaugagagaugcuaaa

SEQ ID NO: 117961 - RNA, 19 nt, Homo sapiens
  misc_RNA (1)...(19): siRNA sense strand
gcaaccaacagauacaaac

SEQ ID NO: 117962 - RNA, 19 nt, Homo sapiens
  misc_RNA (1)...(19): siRNA sense strand
gcagaggggugugcaacaa

SEQ ID NO: 117963 - RNA, 19 nt, Homo sapiens
  misc_RNA (1)...(19): siRNA sense strand
ccgugacccuggcacauga

SEQ ID NO: 117964 - RNA, 19 nt, Homo sapiens
  misc_RNA (1)...(19): siRNA sense strand
uaauucugggucacuguua

SEQ ID NO: 117965 - RNA, 19 nt, Homo sapiens
  misc_RNA (1)...(19): siRNA sense strand
cauccagaagugcugaaua

SEQ ID NO: 117966 - RNA, 19 nt, Homo sapiens
  misc_RNA (1)...(19): siRNA sense strand
uggcaacuguggcaaaguc

SEQ ID NO: 117967 - RNA, 19 nt, Homo sapiens
  misc_RNA (1)...(19): siRNA sense strand
guaauucugggucacuguu

SEQ ID NO: 117968 - RNA, 19 nt, Homo sapiens
  misc_RNA (1)...(19): siRNA sense strand
gcaaagaacugaucauaaa

SEQ ID NO: 117969 - RNA, 19 nt, Homo sapiens
  misc_RNA (1)...(19): siRNA sense strand
ggaaugacauggacaaaug

SEQ ID NO: 117970 - RNA, 19 nt, Homo sapiens
  misc_RNA (1)...(19): siRNA sense strand
gaugagagaugcuaaaugu

SEQ ID NO: 117971 - RNA, 19 nt, Homo sapiens
  misc_RNA (1)...(19): siRNA sense strand
gaacagauuuguggaagaa

SEQ ID NO: 117972 - RNA, 19 nt, Homo sapiens
  misc_RNA (1)...(19): siRNA sense strand
gaucauaaaucuggaaaga

SEQ ID NO: 117973 - RNA, 19 nt, Homo sapiens
  misc_RNA (1)...(19): siRNA sense strand
gaaaggaggcugcaucaug

SEQ ID NO: 117974 - RNA, 19 nt, Homo sapiens
  misc_RNA (1)...(19): siRNA sense strand
ugaaagcuaugucuuagaa

SEQ ID NO: 117975 - RNA, 19 nt, Homo sapiens
  misc_RNA (1)...(19): siRNA sense strand
aggaagagcugaugaaguu

SEQ ID NO: 117976 - RNA, 19 nt, Homo sapiens
  misc_RNA (1)...(19): siRNA sense strand
aaaggaggcugcaucauga

SEQ ID NO: 117977 - RNA, 19 nt, Homo sapiens
  misc_RNA (1)...(19): siRNA sense strand
ggacaaaugcucuguaagu

SEQ ID NO: 117978 - RNA, 19 nt, Homo sapiens
  misc_RNA (1)...(19): siRNA sense strand
caccaaaccucgcugcaaa

SEQ ID NO: 117979 - RNA, 19 nt, Homo sapiens
  misc_RNA (1)...(19): siRNA sense strand
ggcaaagucucgaagaguu

SEQ ID NO: 117980 - RNA, 19 nt, Homo sapiens
  misc_RNA (1)...(19): siRNA sense strand
ggacuuauuguguuugaaa

SEQ ID NO: 117981 - RNA, 19 nt, Homo sapiens
  misc_RNA (1)...(19): siRNA sense strand
aaaccucgcugcaaagaau

SEQ ID NO: 117982 - RNA, 19 nt, Homo sapiens
  misc_RNA (1)...(19): siRNA sense strand
caacagauacaaacucuuc

SEQ ID NO: 117983 - RNA, 19 nt, Homo sapiens
  misc_RNA (1)...(19): siRNA sense strand
gcaccucccuucugugaca

SEQ ID NO: 117984 - RNA, 19 nt, Homo sapiens
  misc_RNA (1)...(19): siRNA sense strand
aagcagcgauuaauagaga

SEQ ID NO: 117985 - RNA, 19 nt, Homo sapiens
  misc_RNA (1)...(19): siRNA sense strand
cuaaucacguugacaaguu

SEQ ID NO: 117986 - RNA, 19 nt, Homo sapiens
  misc_RNA (1)...(19): siRNA sense strand
ucaccagccuccaugaauu

SEQ ID NO: 117987 - RNA, 19 nt, Homo sapiens
  misc_RNA (1)...(19): siRNA sense strand
ccaaugccguuuccauaga

SEQ ID NO: 117988 - RNA, 19 nt, Homo sapiens
  misc_RNA (1)...(19): siRNA sense strand
ggaacagauuuguggaaga

SEQ ID NO: 117989 - RNA, 19 nt, Homo sapiens
  misc_RNA (1)...(19): siRNA sense strand
caagaaucauccagaagug

SEQ ID NO: 117990 - RNA, 19 nt, Homo sapiens
  misc_RNA (1)...(19): siRNA sense strand
gcaagacgguacugauguc

SEQ ID NO: 117991 - RNA, 19 nt, Homo sapiens
  misc_RNA (1)...(19): siRNA sense strand
gcaaaucccaugacaaugc

SEQ ID NO: 117992 - RNA, 19 nt, Homo sapiens
  misc_RNA (1)...(19): siRNA sense strand
ccagaggaauguaugaauc

SEQ ID NO: 117993 - RNA, 19 nt, Homo sapiens
  misc_RNA (1)...(19): siRNA sense strand
uaaucacguugacaaguuu

SEQ ID NO: 117994 - RNA, 19 nt, Homo sapiens
  misc_RNA (1)...(19): siRNA sense strand
gcugaagccugcaggaaca

SEQ ID NO: 117995 - RNA, 19 nt, Homo sapiens
  misc_RNA (1)...(19): siRNA sense strand
gacaaaugcucuguaaguc

SEQ ID NO: 117996 - RNA, 19 nt, Homo sapiens
  misc_RNA (1)...(19): siRNA sense strand
ccugggaucugcuuugaga

SEQ ID NO: 117997 - RNA, 19 nt, Homo sapiens
  misc_RNA (1)...(19): siRNA sense strand
ggcuguagcugucaaaugg

SEQ ID NO: 117998 - RNA, 19 nt, Homo sapiens
  misc_RNA (1)...(19): siRNA sense strand
caaggaggccggauucugu

SEQ ID NO: 117999 - RNA, 19 nt, Homo sapiens
  misc_RNA (1)...(19): siRNA sense strand
ggaaagcaaagaacugauc

SEQ ID NO: 118000 - RNA, 19 nt, Homo sapiens
  misc_RNA (1)...(19): siRNA sense strand
guacuugggcgaugacaug

SEQ ID NO: 118001 - RNA, 19 nt, Homo sapiens
  misc_RNA (1)...(19): siRNA sense strand
gagcuucgacuccaagaau

SEQ ID NO: 118002 - RNA, 19 nt, Homo sapiens
  misc_RNA (1)...(19): siRNA sense strand
gcacucaugucaggaugug

SEQ ID NO: 118003 - RNA, 19 nt, Homo sapiens
  misc_RNA (1)...(19): siRNA sense strand
gaagugugggaacagauuu

SEQ ID NO: 118004 - RNA, 19 nt, Homo sapiens
  misc_RNA (1)...(19): siRNA sense strand
gagaaaggaggcugcauca

SEQ ID NO: 118005 - RNA, 19 nt, Homo sapiens
  misc_RNA (1)...(19): siRNA sense strand
aaagugcaaccaacagaua

SEQ ID NO: 118006 - RNA, 19 nt, Homo sapiens
  misc_RNA (1)...(19): siRNA sense strand
gaaagcaaagaacugauca

SEQ ID NO: 118007 - RNA, 19 nt, Homo sapiens
  misc_RNA (1)...(19): siRNA sense strand
cagaagugcugaauauucg

SEQ ID NO: 118008 - RNA, 19 nt, Homo sapiens
  misc_RNA (1)...(19): siRNA sense strand
caaugccguuuccauagaa

SEQ ID NO: 118009 - RNA, 19 nt, Homo sapiens
  misc_RNA (1)...(19): siRNA sense strand
ccagaagugcugaauauuc

SEQ ID NO: 118010 - RNA, 19 nt, Homo sapiens
  misc_RNA (1)...(19): siRNA sense strand
ccugugaccucccagaguu

SEQ ID NO: 118011 - RNA, 19 nt, Homo sapiens
  misc_RNA (1)...(19): siRNA sense strand
ugacaaguuuggcuuugga

SEQ ID NO: 118012 - RNA, 19 nt, Homo sapiens
  misc_RNA (1)...(19): siRNA sense strand
ggacggcuacugcuacaau

SEQ ID NO: 118013 - RNA, 19 nt, Homo sapiens
  misc_RNA (1)...(19): siRNA sense strand
aagcaaagaacugaucaua

SEQ ID NO: 118014 - RNA, 19 nt, Homo sapiens
  misc_RNA (1)...(19): siRNA sense strand
gaagagcugaugaaguugu

SEQ ID NO: 118015 - RNA, 19 nt, Homo sapiens
  misc_RNA (1)...(19): siRNA sense strand
ggaaacccacuaucugcaa

SEQ ID NO: 118016 - RNA, 19 nt, Homo sapiens
  misc_RNA (1)...(19): siRNA sense strand
ucucagacaugggcaagaa

SEQ ID NO: 118017 - RNA, 19 nt, Homo sapiens
  misc_RNA (1)...(19): siRNA sense strand
gggcaccucccuucuguga

SEQ ID NO: 118018 - RNA, 19 nt, Homo sapiens
  misc_RNA (1)...(19): siRNA sense strand
ccaagaaucauccagaagu

SEQ ID NO: 118019 - RNA, 19 nt, Homo sapiens
  misc_RNA (1)...(19): siRNA sense strand
augaaucgcugcugcaaug

SEQ ID NO: 118020 - RNA, 19 nt, Homo sapiens
  misc_RNA (1)...(19): siRNA sense strand
ggaagaaggagaggagugu

SEQ ID NO: 118021 - RNA, 19 nt, Homo sapiens
  misc_RNA (1)...(19): siRNA sense strand
gcguggaaguguggaauga

SEQ ID NO: 118022 - RNA, 19 nt, Homo sapiens
  misc_RNA (1)...(19): siRNA sense strand
ucgcaaaucccaugacaau

SEQ ID NO: 118023 - RNA, 19 nt, Homo sapiens
  misc_RNA (1)...(19): siRNA sense strand
uaccaaugccguuuccaua

SEQ ID NO: 118024 - RNA, 19 nt, Homo sapiens
  misc_RNA (1)...(19): siRNA sense strand
ccagaagugugggaacaga

SEQ ID NO: 118025 - RNA, 19 nt, Homo sapiens
  misc_RNA (1)...(19): siRNA sense strand
cacaugagcugggccacaa

SEQ ID NO: 118026 - RNA, 19 nt, Homo sapiens
  misc_RNA (1)...(19): siRNA sense strand
ucaaggcaacuaaguaugu

SEQ ID NO: 118027 - RNA, 19 nt, Homo sapiens
  misc_RNA (1)...(19): siRNA sense strand
caaagugugcagauggaaa

SEQ ID NO: 118028 - RNA, 19 nt, Homo sapiens
  misc_RNA (1)...(19): siRNA sense strand
gcaaagucucgaagaguuc

SEQ ID NO: 118029 - RNA, 19 nt, Homo sapiens
  misc_RNA (1)...(19): siRNA sense strand
gcagacaaccgagaguuuc

SEQ ID NO: 118030 - RNA, 19 nt, Homo sapiens
  misc_RNA (1)...(19): siRNA sense strand
caaggcaacuaaguaugug

SEQ ID NO: 118031 - RNA, 19 nt, Homo sapiens
  misc_RNA (1)...(19): siRNA sense strand
guacggggauauucugauu

SEQ ID NO: 118032 - RNA, 19 nt, Homo sapiens
  misc_RNA (1)...(19): siRNA sense strand
gcugaauauucgacuacaa

SEQ ID NO: 118033 - RNA, 19 nt, Homo sapiens
  misc_RNA (1)...(19): siRNA sense strand
ugucuuagaaccaaugaaa

SEQ ID NO: 118034 - RNA, 19 nt, Homo sapiens
  misc_RNA (1)...(19): siRNA sense strand
aaugaaagcuaugucuuag

SEQ ID NO: 118035 - RNA, 19 nt, Homo sapiens
  misc_RNA (1)...(19): siRNA sense strand
uuacagaccacugaacauu

SEQ ID NO: 118036 - RNA, 19 nt, Homo sapiens
  misc_RNA (1)...(19): siRNA sense strand
ucccuucugugacaaguuu

SEQ ID NO: 118037 - RNA, 19 nt, Homo sapiens
  misc_RNA (1)...(19): siRNA sense strand
gcaacaacaggaagaacug

SEQ ID NO: 118038 - RNA, 19 nt, Homo sapiens
  misc_RNA (1)...(19): siRNA sense strand
auccagaagugcugaauau

SEQ ID NO: 118039 - RNA, 19 nt, Homo sapiens
  misc_RNA (1)...(19): siRNA sense strand
gagaugagagaugcuaaau

SEQ ID NO: 118040 - RNA, 19 nt, Homo sapiens
  misc_RNA (1)...(19): siRNA sense strand
ccaaaugcgagaugagaga

SEQ ID NO: 118041 - RNA, 19 nt, Homo sapiens
  misc_RNA (1)...(19): siRNA sense strand
gcaaugccaccaccuguac

SEQ ID NO: 118042 - RNA, 19 nt, Homo sapiens
  misc_RNA (1)...(19): siRNA sense strand
caccagccuccaugaauuu

SEQ ID NO: 118043 - RNA, 19 nt, Homo sapiens
  misc_RNA (1)...(19): siRNA sense strand
gcagcaaggaggccggauu

SEQ ID NO: 118044 - RNA, 19 nt, Homo sapiens
  misc_RNA (1)...(19): siRNA sense strand
ccaccacccucucagacau

SEQ ID NO: 118045 - RNA, 19 nt, Homo sapiens
  misc_RNA (1)...(19): siRNA sense strand
gaaagaaaugaaggucuca

SEQ ID NO: 118046 - RNA, 19 nt, Homo sapiens
  misc_RNA (1)...(19): siRNA sense strand
gcaaggaggccggauucug

SEQ ID NO: 118047 - RNA, 19 nt, Homo sapiens
  misc_RNA (1)...(19): siRNA sense strand
ucacggaaacccacuaucu

SEQ ID NO: 118048 - RNA, 19 nt, Homo sapiens
  misc_RNA (1)...(19): siRNA sense strand
auggacaaaugcucuguaa

SEQ ID NO: 118049 - RNA, 19 nt, Homo sapiens
  misc_RNA (1)...(19): siRNA sense strand
ggaaguguggaaugacaug

SEQ ID NO: 118050 - RNA, 19 nt, Homo sapiens
  misc_RNA (1)...(19): siRNA sense strand
guggaaguguggaaugaca

SEQ ID NO: 118051 - RNA, 19 nt, Homo sapiens
  misc_RNA (1)...(19): siRNA sense strand
ggcagacaaccgagaguuu

SEQ ID NO: 118052 - RNA, 19 nt, Homo sapiens
  misc_RNA (1)...(19): siRNA sense strand
ccucaaggcaacuaaguau

SEQ ID NO: 118053 - RNA, 19 nt, Homo sapiens
  misc_RNA (1)...(19): siRNA sense strand
caagaaggcauaaaagaga

SEQ ID NO: 118054 - RNA, 19 nt, Homo sapiens
  misc_RNA (1)...(19): siRNA sense strand
ggccagaagugugggaaca

SEQ ID NO: 118055 - RNA, 19 nt, Homo sapiens
  misc_RNA (1)...(19): siRNA sense strand
ggccacaauuucgggauga

SEQ ID NO: 118056 - RNA, 19 nt, Homo sapiens
  misc_RNA (1)...(19): siRNA sense strand
uuucuggacuggaggaaga

SEQ ID NO: 118057 - RNA, 19 nt, Homo sapiens
  misc_RNA (1)...(19): siRNA sense strand
gcacgaugggcacucaugu

SEQ ID NO: 118058 - RNA, 19 nt, Homo sapiens
  misc_RNA (1)...(19): siRNA sense strand
aaauggcgguugagaaagg

SEQ ID NO: 118059 - RNA, 19 nt, Homo sapiens
  misc_RNA (1)...(19): siRNA sense strand
gaaaagugcaaccaacaga

SEQ ID NO: 118060 - RNA, 19 nt, Homo sapiens
  misc_RNA (1)...(19): siRNA sense strand
cgagaugagagaugcuaaa

SEQ ID NO: 118061 - RNA, 19 nt, Homo sapiens
  misc_RNA (1)...(19): siRNA sense strand
gcaaccaacagauacaaac

SEQ ID NO: 118062 - RNA, 19 nt, Homo sapiens
  misc_RNA (1)...(19): siRNA sense strand
gcagaggggugugcaacaa

SEQ ID NO: 118063 - RNA, 19 nt, Homo sapiens
  misc_RNA (1)...(19): siRNA sense strand
ccgugacccuggcacauga

SEQ ID NO: 118064 - RNA, 19 nt, Homo sapiens
  misc_RNA (1)...(19): siRNA sense strand
uaauucugggucacuguua

SEQ ID NO: 118065 - RNA, 19 nt, Homo sapiens
  misc_RNA (1)...(19): siRNA sense strand
cauccagaagugcugaaua

SEQ ID NO: 118066 - RNA, 19 nt, Homo sapiens
  misc_RNA (1)...(19): siRNA sense strand
uggcaacuguggcaaaguc

SEQ ID NO: 118067 - RNA, 19 nt, Homo sapiens
  misc_RNA (1)...(19): siRNA sense strand
guaauucugggucacuguu

SEQ ID NO: 118068 - RNA, 19 nt, Homo sapiens
  misc_RNA (1)...(19): siRNA sense strand
gaagaaauccagugcaaug

SEQ ID NO: 118069 - RNA, 19 nt, Homo sapiens
  misc_RNA (1)...(19): siRNA sense strand
cagcaacccuuccaaauuc

SEQ ID NO: 118070 - RNA, 19 nt, Homo sapiens
  misc_RNA (1)...(19): siRNA sense strand
cagaagaaauccagugcaa

SEQ ID NO: 118071 - RNA, 19 nt, Homo sapiens
  misc_RNA (1)...(19): siRNA sense strand
ccagcaacccuuccaaauu

SEQ ID NO: 118072 - RNA, 19 nt, Homo sapiens
  misc_RNA (1)...(19): siRNA sense strand
ccaaagggaucggguaugg

SEQ ID NO: 118073 - RNA, 19 nt, Homo sapiens
  misc_RNA (1)...(19): siRNA sense strand
cgucuaccaugcagaagaa

SEQ ID NO: 118074 - RNA, 19 nt, Homo sapiens
  misc_RNA (1)...(19): siRNA sense strand
gagaagugcccucgaugug

SEQ ID NO: 118075 - RNA, 19 nt, Homo sapiens
  misc_RNA (1)...(19): siRNA sense strand
gaaggaguuuccacaagac

SEQ ID NO: 118076 - RNA, 19 nt, Homo sapiens
  misc_RNA (1)...(19): siRNA sense strand
agucggagaucuacugcaa

SEQ ID NO: 118077 - RNA, 19 nt, Homo sapiens
  misc_RNA (1)...(19): siRNA sense strand
gcgcagauauggccccaaa

SEQ ID NO: 118078 - RNA, 19 nt, Homo sapiens
  misc_RNA (1)...(19): siRNA sense strand
ugacaaagauggggaacuu

SEQ ID NO: 118079 - RNA, 19 nt, Homo sapiens
  misc_RNA (1)...(19): siRNA sense strand
gcucaugagucggagaucu

SEQ ID NO: 118080 - RNA, 19 nt, Homo sapiens
  misc_RNA (1)...(19): siRNA sense strand
gaccgucuaccaugcagaa

SEQ ID NO: 118081 - RNA, 19 nt, Homo sapiens
  misc_RNA (1)...(19): siRNA sense strand
ggccugcaguuccaacagu

SEQ ID NO: 118082 - RNA, 19 nt, Homo sapiens
  misc_RNA (1)...(19): siRNA sense strand
cacaacaaguggaaaagaa

SEQ ID NO: 118083 - RNA, 19 nt, Homo sapiens
  misc_RNA (1)...(19): siRNA sense strand
ccacggguauuggguuugg

SEQ ID NO: 118084 - RNA, 19 nt, Homo sapiens
  misc_RNA (1)...(19): siRNA sense strand
aaauguggagccugugaaa

SEQ ID NO: 118085 - RNA, 19 nt, Homo sapiens
  misc_RNA (1)...(19): siRNA sense strand
gcuaugggcgcagauaugg

SEQ ID NO: 118086 - RNA, 19 nt, Homo sapiens
  misc_RNA (1)...(19): siRNA sense strand
uuggaggccuuacacaaca

SEQ ID NO: 118087 - RNA, 19 nt, Homo sapiens
  misc_RNA (1)...(19): siRNA sense strand
agucuaugcugcugagaag

SEQ ID NO: 118088 - RNA, 19 nt, Homo sapiens
  misc_RNA (1)...(19): siRNA sense strand
caccagcaacccuuccaaa

SEQ ID NO: 118089 - RNA, 19 nt, Homo sapiens
  misc_RNA (1)...(19): siRNA sense strand
aagccggcacgcucaguua

SEQ ID NO: 118090 - RNA, 19 nt, Homo sapiens
  misc_RNA (1)...(19): siRNA sense strand
gauguggcaagucagucua

SEQ ID NO: 118091 - RNA, 19 nt, Homo sapiens
  misc_RNA (1)...(19): siRNA sense strand
gcucaguuaccaccagcaa

SEQ ID NO: 118092 - RNA, 19 nt, Homo sapiens
  misc_RNA (1)...(19): siRNA sense strand
gcacaaggcucuacucugu

SEQ ID NO: 118093 - RNA, 19 nt, Homo sapiens
  misc_RNA (1)...(19): siRNA sense strand
gcucucgucuugucuguaa

SEQ ID NO: 118094 - RNA, 19 nt, Homo sapiens
  misc_RNA (1)...(19): siRNA sense strand
acaaugcauucaucaguua

SEQ ID NO: 118095 - RNA, 19 nt, Homo sapiens
  misc_RNA (1)...(19): siRNA sense strand
caucaccucugacuggaua

SEQ ID NO: 118096 - RNA, 19 nt, Homo sapiens
  misc_RNA (1)...(19): siRNA sense strand
gcagagugcugggaugaga

SEQ ID NO: 118097 - RNA, 19 nt, Homo sapiens
  misc_RNA (1)...(19): siRNA sense strand
ccagaaacauucacagaag

SEQ ID NO: 118098 - RNA, 19 nt, Homo sapiens
  misc_RNA (1)...(19): siRNA sense strand
gugcugggaugagaaauuu

SEQ ID NO: 118099 - RNA, 19 nt, Homo sapiens
  misc_RNA (1)...(19): siRNA sense strand
guauguacaucgucaacaa

SEQ ID NO: 118100 - RNA, 19 nt, Homo sapiens
  misc_RNA (1)...(19): siRNA sense strand
gaucugcucucgucuuguc

SEQ ID NO: 118101 - RNA, 19 nt, Homo sapiens
  misc_RNA (1)...(19): siRNA sense strand
guaaggaacacgaagcuau

SEQ ID NO: 118102 - RNA, 19 nt, Homo sapiens
  misc_RNA (1)...(19): siRNA sense strand
cagaaacauucacagaaga

SEQ ID NO: 118103 - RNA, 19 nt, Homo sapiens
  misc_RNA (1)...(19): siRNA sense strand
ggaacacgaagcuaugaaa

SEQ ID NO: 118104 - RNA, 19 nt, Homo sapiens
  misc_RNA (1)...(19): siRNA sense strand
guuaaacaaugcauucauc

SEQ ID NO: 118105 - RNA, 19 nt, Homo sapiens
  misc_RNA (1)...(19): siRNA sense strand
ugaaugaucccgcuacaga

SEQ ID NO: 118106 - RNA, 19 nt, Homo sapiens
  misc_RNA (1)...(19): siRNA sense strand
acacgaagcuaugaaagau

SEQ ID NO: 118107 - RNA, 19 nt, Homo sapiens
  misc_RNA (1)...(19): siRNA sense strand
gaugagcuuugccgucaga

SEQ ID NO: 118108 - RNA, 19 nt, Homo sapiens
  misc_RNA (1)...(19): siRNA sense strand
ucaagcgacuccagaaaca

SEQ ID NO: 118109 - RNA, 19 nt, Homo sapiens
  misc_RNA (1)...(19): siRNA sense strand
ccaaggugcugcuguuucu

SEQ ID NO: 118110 - RNA, 19 nt, Homo sapiens
  misc_RNA (1)...(19): siRNA sense strand
gacccaaggugcugcuguu

SEQ ID NO: 118111 - RNA, 19 nt, Homo sapiens
  misc_RNA (1)...(19): siRNA sense strand
acgaagcuaugaaagauga

SEQ ID NO: 118112 - RNA, 19 nt, Homo sapiens
  misc_RNA (1)...(19): siRNA sense strand
auccuaaucuggugaauga

SEQ ID NO: 118113 - RNA, 19 nt, Homo sapiens
  misc_RNA (1)...(19): siRNA sense strand
gaacacgaagcuaugaaag

SEQ ID NO: 118114 - RNA, 19 nt, Homo sapiens
  misc_RNA (1)...(19): siRNA sense strand
aacaaugcauucaucaguu

SEQ ID NO: 118115 - RNA, 19 nt, Homo sapiens
  misc_RNA (1)...(19): siRNA sense strand
caguuaugcuucaccaguu

SEQ ID NO: 118116 - RNA, 19 nt, Homo sapiens
  misc_RNA (1)...(19): siRNA sense strand
gaggagacgaugugacuca

SEQ ID NO: 118117 - RNA, 19 nt, Homo sapiens
  misc_RNA (1)...(19): siRNA sense strand
aaacaaugcauucaucagu

SEQ ID NO: 118118 - RNA, 19 nt, Homo sapiens
  misc_RNA (1)...(19): siRNA sense strand
uaaggaacacgaagcuaug

SEQ ID NO: 118119 - RNA, 19 nt, Homo sapiens
  misc_RNA (1)...(19): siRNA sense strand
gagacuccgucgcuccaau

SEQ ID NO: 118120 - RNA, 19 nt, Homo sapiens
  misc_RNA (1)...(19): siRNA sense strand
ugacuuggccucccucagu

SEQ ID NO: 118121 - RNA, 19 nt, Homo sapiens
  misc_RNA (1)...(19): siRNA sense strand
ggugaaugaucccgcuaca

SEQ ID NO: 118122 - RNA, 19 nt, Homo sapiens
  misc_RNA (1)...(19): siRNA sense strand
cgacuuccucccugugaaa

SEQ ID NO: 118123 - RNA, 19 nt, Homo sapiens
  misc_RNA (1)...(19): siRNA sense strand
gaaugaucccgcuacagau

SEQ ID NO: 118124 - RNA, 19 nt, Homo sapiens
  misc_RNA (1)...(19): siRNA sense strand
uccaauuacuuccgacuuc

SEQ ID NO: 118125 - RNA, 19 nt, Homo sapiens
  misc_RNA (1)...(19): siRNA sense strand
cgcuacagaugaaacaguu

SEQ ID NO: 118126 - RNA, 19 nt, Homo sapiens
  misc_RNA (1)...(19): siRNA sense strand
guuaugcuucaccaguuua

SEQ ID NO: 118127 - RNA, 19 nt, Homo sapiens
  misc_RNA (1)...(19): siRNA sense strand
caacgaggagacgauguga

SEQ ID NO: 118128 - RNA, 19 nt, Homo sapiens
  misc_RNA (1)...(19): siRNA sense strand
gaaacauucacagaagauc

SEQ ID NO: 118129 - RNA, 19 nt, Homo sapiens
  misc_RNA (1)...(19): siRNA sense strand
aguuaugcuucaccaguuu

SEQ ID NO: 118130 - RNA, 19 nt, Homo sapiens
  misc_RNA (1)...(19): siRNA sense strand
uauugcaccuuccacagau

SEQ ID NO: 118131 - RNA, 19 nt, Homo sapiens
  misc_RNA (1)...(19): siRNA sense strand
aagcgacuccagaaacauu

SEQ ID NO: 118132 - RNA, 19 nt, Homo sapiens
  misc_RNA (1)...(19): siRNA sense strand
gacuccgucgcuccaauua

SEQ ID NO: 118133 - RNA, 19 nt, Homo sapiens
  misc_RNA (1)...(19): siRNA sense strand
auucaucaguuaugcuuca

SEQ ID NO: 118134 - RNA, 19 nt, Homo sapiens
  misc_RNA (1)...(19): siRNA sense strand
gauccuaaucuggugaaug

SEQ ID NO: 118135 - RNA, 19 nt, Homo sapiens
  misc_RNA (1)...(19): siRNA sense strand
ugaucccgcuacagaugaa

SEQ ID NO: 118136 - RNA, 19 nt, Homo sapiens
  misc_RNA (1)...(19): siRNA sense strand
uccagaaacauucacagaa

SEQ ID NO: 118137 - RNA, 19 nt, Homo sapiens
  misc_RNA (1)...(19): siRNA sense strand
ucaacgaggagacgaugug

SEQ ID NO: 118138 - RNA, 19 nt, Homo sapiens
  misc_RNA (1)...(19): siRNA sense strand
gagaaauuuaccugcacaa

SEQ ID NO: 118139 - RNA, 19 nt, Homo sapiens
  misc_RNA (1)...(19): siRNA sense strand
gaacuuugcucgaaggaau

SEQ ID NO: 118140 - RNA, 19 nt, Homo sapiens
  misc_RNA (1)...(19): siRNA sense strand
uagaagaccugaauucaug

SEQ ID NO: 118141 - RNA, 19 nt, Homo sapiens
  misc_RNA (1)...(19): siRNA sense strand
gaagaaacgacuacagaaa

SEQ ID NO: 118142 - RNA, 19 nt, Homo sapiens
  misc_RNA (1)...(19): siRNA sense strand
gcaaaguuauucuaccuau

SEQ ID NO: 118143 - RNA, 19 nt, Homo sapiens
  misc_RNA (1)...(19): siRNA sense strand
gaugagcagucaaauuaug

SEQ ID NO: 118144 - RNA, 19 nt, Homo sapiens
  misc_RNA (1)...(19): siRNA sense strand
cagaacagaugcugauuca

SEQ ID NO: 118145 - RNA, 19 nt, Homo sapiens
  misc_RNA (1)...(19): siRNA sense strand
gcaacagugucauuugaug

SEQ ID NO: 118146 - RNA, 19 nt, Homo sapiens
  misc_RNA (1)...(19): siRNA sense strand
caaauaagaagaccggaaa

SEQ ID NO: 118147 - RNA, 19 nt, Homo sapiens
  misc_RNA (1)...(19): siRNA sense strand
gauaacaacacaaucuuug

SEQ ID NO: 118148 - RNA, 19 nt, Homo sapiens
  misc_RNA (1)...(19): siRNA sense strand
ggacaagcaucacaaagcu

SEQ ID NO: 118149 - RNA, 19 nt, Homo sapiens
  misc_RNA (1)...(19): siRNA sense strand
gauggaagagguccuauga

SEQ ID NO: 118150 - RNA, 19 nt, Homo sapiens
  misc_RNA (1)...(19): siRNA sense strand
ggaagaaacgacuacagaa

SEQ ID NO: 118151 - RNA, 19 nt, Homo sapiens
  misc_RNA (1)...(19): siRNA sense strand
ggacagaggaggcggcuau

SEQ ID NO: 118152 - RNA, 19 nt, Homo sapiens
  misc_RNA (1)...(19): siRNA sense strand
augaugagcagucaaauua

SEQ ID NO: 118153 - RNA, 19 nt, Homo sapiens
  misc_RNA (1)...(19): siRNA sense strand
acaaagcuauucuggcuau

SEQ ID NO: 118154 - RNA, 19 nt, Homo sapiens
  misc_RNA (1)...(19): siRNA sense strand
agaaacgacuacagaaaug

SEQ ID NO: 118155 - RNA, 19 nt, Homo sapiens
  misc_RNA (1)...(19): siRNA sense strand
gccauugacugguuugaug

SEQ ID NO: 118156 - RNA, 19 nt, Homo sapiens
  misc_RNA (1)...(19): siRNA sense strand
aaacgacugauuccucuua

SEQ ID NO: 118157 - RNA, 19 nt, Homo sapiens
  misc_RNA (1)...(19): siRNA sense strand
gggauuggguuugcccuaa

SEQ ID NO: 118158 - RNA, 19 nt, Homo sapiens
  misc_RNA (1)...(19): siRNA sense strand
caagaugaccgucgugaug

SEQ ID NO: 118159 - RNA, 19 nt, Homo sapiens
  misc_RNA (1)...(19): siRNA sense strand
gccagcaaccauauaauaa

SEQ ID NO: 118160 - RNA, 19 nt, Homo sapiens
  misc_RNA (1)...(19): siRNA sense strand
caugauuccuauagucaaa

SEQ ID NO: 118161 - RNA, 19 nt, Homo sapiens
  misc_RNA (1)...(19): siRNA sense strand
gagcagcaaaguuauucua

SEQ ID NO: 118162 - RNA, 19 nt, Homo sapiens
  misc_RNA (1)...(19): siRNA sense strand
aauaugaacuuugcucgaa

SEQ ID NO: 118163 - RNA, 19 nt, Homo sapiens
  misc_RNA (1)...(19): siRNA sense strand
uggaagagguccuaugaca

SEQ ID NO: 118164 - RNA, 19 nt, Homo sapiens
  misc_RNA (1)...(19): siRNA sense strand
gcaguccuaucauucacaa

SEQ ID NO: 118165 - RNA, 19 nt, Homo sapiens
  misc_RNA (1)...(19): siRNA sense strand
ugaccgcgguggcuucaaa

SEQ ID NO: 118166 - RNA, 19 nt, Homo sapiens
  misc_RNA (1)...(19): siRNA sense strand
gcggaaauaugaacuuugc

SEQ ID NO: 118167 - RNA, 19 nt, Homo sapiens
  misc_RNA (1)...(19): siRNA sense strand
gggagggugugucuacaga

SEQ ID NO: 118168 - RNA, 19 nt, Homo sapiens
  misc_RNA (1)...(19): siRNA sense strand
gaaacgacuacagaaauga

SEQ ID NO: 118169 - RNA, 19 nt, Homo sapiens
  misc_RNA (1)...(19): siRNA sense strand
caacaucaaggcucauaug

SEQ ID NO: 118170 - RNA, 19 nt, Homo sapiens
  misc_RNA (1)...(19): siRNA sense strand
gcgaggccguggaggauau

SEQ ID NO: 118171 - RNA, 19 nt, Homo sapiens
  misc_RNA (1)...(19): siRNA sense strand
gcagucaggcuaugaucaa

SEQ ID NO: 118172 - RNA, 19 nt, Homo sapiens
  misc_RNA (1)...(19): siRNA sense strand
gaggagaucgaggagguua

SEQ ID NO: 118173 - RNA, 19 nt, Homo sapiens
  misc_RNA (1)...(19): siRNA sense strand
gaggagaucgaggagguua

SEQ ID NO: 118174 - RNA, 19 nt, Homo sapiens
  misc_RNA (1)...(19): siRNA sense strand
gagcucauauagccagcaa

SEQ ID NO: 118175 - RNA, 19 nt, Homo sapiens
  misc_RNA (1)...(19): siRNA sense strand
caaaguuauucuaccuaug

SEQ ID NO: 118176 - RNA, 19 nt, Homo sapiens
  misc_RNA (1)...(19): siRNA sense strand
ggaggcaacagugucauuu

SEQ ID NO: 118177 - RNA, 19 nt, Homo sapiens
  misc_RNA (1)...(19): siRNA sense strand
gcagucaaauuaugaucag

SEQ ID NO: 118178 - RNA, 19 nt, Homo sapiens
  misc_RNA (1)...(19): siRNA sense strand
ccaaggcuauggacaagca

SEQ ID NO: 118179 - RNA, 19 nt, Homo sapiens
  misc_RNA (1)...(19): siRNA sense strand
cauauagccagcaaccaua

SEQ ID NO: 118180 - RNA, 19 nt, Homo sapiens
  misc_RNA (1)...(19): siRNA sense strand
agaccgagguggaggcuau

SEQ ID NO: 118181 - RNA, 19 nt, Homo sapiens
  misc_RNA (1)...(19): siRNA sense strand
aggcaacagugucauuuga

SEQ ID NO: 118182 - RNA, 19 nt, Homo sapiens
  misc_RNA (1)...(19): siRNA sense strand
gagggugugucuacagauc

SEQ ID NO: 118183 - RNA, 19 nt, Homo sapiens
  misc_RNA (1)...(19): siRNA sense strand
ucaacaagauucauaugac

SEQ ID NO: 118184 - RNA, 19 nt, Homo sapiens
  misc_RNA (1)...(19): siRNA sense strand
gccagacuauggucaacaa

SEQ ID NO: 118185 - RNA, 19 nt, Homo sapiens
  misc_RNA (1)...(19): siRNA sense strand
agacuauggucaacaagau

SEQ ID NO: 118186 - RNA, 19 nt, Homo sapiens
  misc_RNA (1)...(19): siRNA sense strand
ccgaggagguggcuaugga

SEQ ID NO: 118187 - RNA, 19 nt, Homo sapiens
  misc_RNA (1)...(19): siRNA sense strand
ggauuggguuugcccuaau

SEQ ID NO: 118188 - RNA, 19 nt, Homo sapiens
  misc_RNA (1)...(19): siRNA sense strand
gcagcaugauuccuauagu

SEQ ID NO: 118189 - RNA, 19 nt, Homo sapiens
  misc_RNA (1)...(19): siRNA sense strand
cauaugaugagcagucaaa

SEQ ID NO: 118190 - RNA, 19 nt, Homo sapiens
  misc_RNA (1)...(19): siRNA sense strand
cagcaugauuccuauaguc

SEQ ID NO: 118191 - RNA, 19 nt, Homo sapiens
  misc_RNA (1)...(19): siRNA sense strand
gcuaugggcaaacgacuga

SEQ ID NO: 118192 - RNA, 19 nt, Homo sapiens
  misc_RNA (1)...(19): siRNA sense strand
agaccgagguggcuaugga

SEQ ID NO: 118193 - RNA, 19 nt, Homo sapiens
  misc_RNA (1)...(19): siRNA sense strand
cagcuaaggcagccauuga

SEQ ID NO: 118194 - RNA, 19 nt, Homo sapiens
  misc_RNA (1)...(19): siRNA sense strand
aaccagcaguccuaucauu

SEQ ID NO: 118195 - RNA, 19 nt, Homo sapiens
  misc_RNA (1)...(19): siRNA sense strand
agaauuccauggcaacauc

SEQ ID NO: 118196 - RNA, 19 nt, Homo sapiens
  misc_RNA (1)...(19): siRNA sense strand
ggggugagcagcaaaguua

SEQ ID NO: 118197 - RNA, 19 nt, Homo sapiens
  misc_RNA (1)...(19): siRNA sense strand
gggaguucuuuaaacaaau

SEQ ID NO: 118198 - RNA, 19 nt, Homo sapiens
  misc_RNA (1)...(19): siRNA sense strand
agaccgaaguggaggcuau

SEQ ID NO: 118199 - RNA, 19 nt, Homo sapiens
  misc_RNA (1)...(19): siRNA sense strand
ggcaacaucauuaaagugu

SEQ ID NO: 118200 - RNA, 19 nt, Homo sapiens
  misc_RNA (1)...(19): siRNA sense strand
caaaagcagagcucauaua

SEQ ID NO: 118201 - RNA, 19 nt, Homo sapiens
  misc_RNA (1)...(19): siRNA sense strand
aagaaacgacuacagaaau

SEQ ID NO: 118202 - RNA, 19 nt, Homo sapiens
  misc_RNA (1)...(19): siRNA sense strand
gucaacaagauucauauga

SEQ ID NO: 118203 - RNA, 19 nt, Homo sapiens
  misc_RNA (1)...(19): siRNA sense strand
gcgcaaccgaccauacuga

SEQ ID NO: 118204 - RNA, 19 nt, Homo sapiens
  misc_RNA (1)...(19): siRNA sense strand
ggagaucgaggagguuaug

SEQ ID NO: 118205 - RNA, 19 nt, Homo sapiens
  misc_RNA (1)...(19): siRNA sense strand
ggggaguucuuuaaacaaa

SEQ ID NO: 118206 - RNA, 19 nt, Homo sapiens
  misc_RNA (1)...(19): siRNA sense strand
cgacugauuccucuuaugg

SEQ ID NO: 118207 - RNA, 19 nt, Homo sapiens
  misc_RNA (1)...(19): siRNA sense strand
cagcaaaguuauucuaccu

SEQ ID NO: 118208 - RNA, 19 nt, Homo sapiens
  misc_RNA (1)...(19): siRNA sense strand
agccagcaaccauauaaua

SEQ ID NO: 118209 - RNA, 19 nt, Homo sapiens
  misc_RNA (1)...(19): siRNA sense strand
guuauucuaccuauggaaa

SEQ ID NO: 118210 - RNA, 19 nt, Homo sapiens
  misc_RNA (1)...(19): siRNA sense strand
ucacaguccuauggugguu

SEQ ID NO: 118211 - RNA, 19 nt, Homo sapiens
  misc_RNA (1)...(19): siRNA sense strand
gaggcaacagugucauuug

SEQ ID NO: 118212 - RNA, 19 nt, Homo sapiens
  misc_RNA (1)...(19): siRNA sense strand
ggugagcagcaaaguuauu

SEQ ID NO: 118213 - RNA, 19 nt, Homo sapiens
  misc_RNA (1)...(19): siRNA sense strand
gaccagcagucaggcuaug

SEQ ID NO: 118214 - RNA, 19 nt, Homo sapiens
  misc_RNA (1)...(19): siRNA sense strand
ccuaugaccagccagacua

SEQ ID NO: 118215 - RNA, 19 nt, Homo sapiens
  misc_RNA (1)...(19): siRNA sense strand
uaugaugagcagucaaauu

SEQ ID NO: 118216 - RNA, 19 nt, Homo sapiens
  misc_RNA (1)...(19): siRNA sense strand
caggagugguggcggcuau

SEQ ID NO: 118217 - RNA, 19 nt, Homo sapiens
  misc_RNA (1)...(19): siRNA sense strand
cagaggaggcggcuaugga

SEQ ID NO: 118218 - RNA, 19 nt, Homo sapiens
  misc_RNA (1)...(19): siRNA sense strand
uagaggucguggaggcuuu

SEQ ID NO: 118219 - RNA, 19 nt, Homo sapiens
  misc_RNA (1)...(19): siRNA sense strand
aaaguuauucuaccuaugg

SEQ ID NO: 118220 - RNA, 19 nt, Homo sapiens
  misc_RNA (1)...(19): siRNA sense strand
gucgugaugugaguaggua

SEQ ID NO: 118221 - RNA, 19 nt, Homo sapiens
  misc_RNA (1)...(19): siRNA sense strand
ucagcagcaugauuccuau

SEQ ID NO: 118222 - RNA, 19 nt, Homo sapiens
  misc_RNA (1)...(19): siRNA sense strand
aacauggaaucaucaggaa

SEQ ID NO: 118223 - RNA, 19 nt, Homo sapiens
  misc_RNA (1)...(19): siRNA sense strand
cggcuaugguggagacaga

SEQ ID NO: 118224 - RNA, 19 nt, Homo sapiens
  misc_RNA (1)...(19): siRNA sense strand
cggcuaugguggagacaga

SEQ ID NO: 118225 - RNA, 19 nt, Homo sapiens
  misc_RNA (1)...(19): siRNA sense strand
uuccauggcaacaucauua

SEQ ID NO: 118226 - RNA, 19 nt, Homo sapiens
  misc_RNA (1)...(19): siRNA sense strand
aggcagccauugacugguu

SEQ ID NO: 118227 - RNA, 19 nt, Homo sapiens
  misc_RNA (1)...(19): siRNA sense strand
ggucaacaagauucauaug

SEQ ID NO: 118228 - RNA, 19 nt, Homo sapiens
  misc_RNA (1)...(19): siRNA sense strand
acaagcaucacaaagcuau

SEQ ID NO: 118229 - RNA, 19 nt, Homo sapiens
  misc_RNA (1)...(19): siRNA sense strand
ggaaaaccaaugauaaauc

SEQ ID NO: 118230 - RNA, 19 nt, Homo sapiens
  misc_RNA (1)...(19): siRNA sense strand
gggugugucuacagaucaa

SEQ ID NO: 118231 - RNA, 19 nt, Homo sapiens
  misc_RNA (1)...(19): siRNA sense strand
ccagcaguccuaucauuca

SEQ ID NO: 118232 - RNA, 19 nt, Homo sapiens
  misc_RNA (1)...(19): siRNA sense strand
gaucagcgcaaccgaccau

SEQ ID NO: 118233 - RNA, 19 nt, Homo sapiens
  misc_RNA (1)...(19): siRNA sense strand
aggaagaaacgacuacaga

SEQ ID NO: 118234 - RNA, 19 nt, Homo sapiens
  misc_RNA (1)...(19): siRNA sense strand
gacagaacuacagcgguua

SEQ ID NO: 118235 - RNA, 19 nt, Homo sapiens
  misc_RNA (1)...(19): siRNA sense strand
ccacuagaagaccugaauu

SEQ ID NO: 118236 - RNA, 19 nt, Homo sapiens
  misc_RNA (1)...(19): siRNA sense strand
ggcagccauugacugguuu

SEQ ID NO: 118237 - RNA, 19 nt, Homo sapiens
  misc_RNA (1)...(19): siRNA sense strand
cagacaaggacacaggaaa

SEQ ID NO: 118238 - RNA, 19 nt, Homo sapiens
  misc_RNA (1)...(19): siRNA sense strand
ccagaacagaugcugauuc

SEQ ID NO: 118239 - RNA, 19 nt, Homo sapiens
  misc_RNA (1)...(19): siRNA sense strand
gaacuuugcucgaaggaau

SEQ ID NO: 118240 - RNA, 19 nt, Homo sapiens
  misc_RNA (1)...(19): siRNA sense strand
uagaagaccugaauucaug

SEQ ID NO: 118241 - RNA, 19 nt, Homo sapiens
  misc_RNA (1)...(19): siRNA sense strand
gaagaaacgacuacagaaa

SEQ ID NO: 118242 - RNA, 19 nt, Homo sapiens
  misc_RNA (1)...(19): siRNA sense strand
gcaaaguuauucuaccuau

SEQ ID NO: 118243 - RNA, 19 nt, Homo sapiens
  misc_RNA (1)...(19): siRNA sense strand
gaugagcagucaaauuaug

SEQ ID NO: 118244 - RNA, 19 nt, Homo sapiens
  misc_RNA (1)...(19): siRNA sense strand
cagaacagaugcugauuca

SEQ ID NO: 118245 - RNA, 19 nt, Homo sapiens
  misc_RNA (1)...(19): siRNA sense strand
gcaacagugucauuugaug

SEQ ID NO: 118246 - RNA, 19 nt, Homo sapiens
  misc_RNA (1)...(19): siRNA sense strand
caaauaagaagaccggaaa

SEQ ID NO: 118247 - RNA, 19 nt, Homo sapiens
  misc_RNA (1)...(19): siRNA sense strand
gauaacaacacaaucuuug

SEQ ID NO: 118248 - RNA, 19 nt, Homo sapiens
  misc_RNA (1)...(19): siRNA sense strand
ggacaagcaucacaaagcu

SEQ ID NO: 118249 - RNA, 19 nt, Homo sapiens
  misc_RNA (1)...(19): siRNA sense strand
gauggaagagguccuauga

SEQ ID NO: 118250 - RNA, 19 nt, Homo sapiens
  misc_RNA (1)...(19): siRNA sense strand
ggaagaaacgacuacagaa

SEQ ID NO: 118251 - RNA, 19 nt, Homo sapiens
  misc_RNA (1)...(19): siRNA sense strand
ggacagaggaggcggcuau

SEQ ID NO: 118252 - RNA, 19 nt, Homo sapiens
  misc_RNA (1)...(19): siRNA sense strand
augaugagcagucaaauua

SEQ ID NO: 118253 - RNA, 19 nt, Homo sapiens
  misc_RNA (1)...(19): siRNA sense strand
acaaagcuauucuggcuau

SEQ ID NO: 118254 - RNA, 19 nt, Homo sapiens
  misc_RNA (1)...(19): siRNA sense strand
agaaacgacuacagaaaug

SEQ ID NO: 118255 - RNA, 19 nt, Homo sapiens
  misc_RNA (1)...(19): siRNA sense strand
gccauugacugguuugaug

SEQ ID NO: 118256 - RNA, 19 nt, Homo sapiens
  misc_RNA (1)...(19): siRNA sense strand
aaacgacugauuccucuua

SEQ ID NO: 118257 - RNA, 19 nt, Homo sapiens
  misc_RNA (1)...(19): siRNA sense strand
gggauuggguuugcccuaa

SEQ ID NO: 118258 - RNA, 19 nt, Homo sapiens
  misc_RNA (1)...(19): siRNA sense strand
caagaugaccgucgugaug

SEQ ID NO: 118259 - RNA, 19 nt, Homo sapiens
  misc_RNA (1)...(19): siRNA sense strand
gccagcaaccauauaauaa

SEQ ID NO: 118260 - RNA, 19 nt, Homo sapiens
  misc_RNA (1)...(19): siRNA sense strand
caugauuccuauagucaaa

SEQ ID NO: 118261 - RNA, 19 nt, Homo sapiens
  misc_RNA (1)...(19): siRNA sense strand
gagcagcaaaguuauucua

SEQ ID NO: 118262 - RNA, 19 nt, Homo sapiens
  misc_RNA (1)...(19): siRNA sense strand
aauaugaacuuugcucgaa

SEQ ID NO: 118263 - RNA, 19 nt, Homo sapiens
  misc_RNA (1)...(19): siRNA sense strand
uggaagagguccuaugaca

SEQ ID NO: 118264 - RNA, 19 nt, Homo sapiens
  misc_RNA (1)...(19): siRNA sense strand
gcaguccuaucauucacaa

SEQ ID NO: 118265 - RNA, 19 nt, Homo sapiens
  misc_RNA (1)...(19): siRNA sense strand
ugaccgcgguggcuucaaa

SEQ ID NO: 118266 - RNA, 19 nt, Homo sapiens
  misc_RNA (1)...(19): siRNA sense strand
gcggaaauaugaacuuugc

SEQ ID NO: 118267 - RNA, 19 nt, Homo sapiens
  misc_RNA (1)...(19): siRNA sense strand
gggagggugugucuacaga

SEQ ID NO: 118268 - RNA, 19 nt, Homo sapiens
  misc_RNA (1)...(19): siRNA sense strand
gaaacgacuacagaaauga

SEQ ID NO: 118269 - RNA, 19 nt, Homo sapiens
  misc_RNA (1)...(19): siRNA sense strand
caacaucaaggcucauaug

SEQ ID NO: 118270 - RNA, 19 nt, Homo sapiens
  misc_RNA (1)...(19): siRNA sense strand
gcgaggccguggaggauau

SEQ ID NO: 118271 - RNA, 19 nt, Homo sapiens
  misc_RNA (1)...(19): siRNA sense strand
gcagucaggcuaugaucaa

SEQ ID NO: 118272 - RNA, 19 nt, Homo sapiens
  misc_RNA (1)...(19): siRNA sense strand
gaggagaucgaggagguua

SEQ ID NO: 118273 - RNA, 19 nt, Homo sapiens
  misc_RNA (1)...(19): siRNA sense strand
gaggagaucgaggagguua

SEQ ID NO: 118274 - RNA, 19 nt, Homo sapiens
  misc_RNA (1)...(19): siRNA sense strand
gagcucauauagccagcaa

SEQ ID NO: 118275 - RNA, 19 nt, Homo sapiens
  misc_RNA (1)...(19): siRNA sense strand
caaaguuauucuaccuaug

SEQ ID NO: 118276 - RNA, 19 nt, Homo sapiens
  misc_RNA (1)...(19): siRNA sense strand
ggaggcaacagugucauuu

SEQ ID NO: 118277 - RNA, 19 nt, Homo sapiens
  misc_RNA (1)...(19): siRNA sense strand
gcagucaaauuaugaucag

SEQ ID NO: 118278 - RNA, 19 nt, Homo sapiens
  misc_RNA (1)...(19): siRNA sense strand
ccaaggcuauggacaagca

SEQ ID NO: 118279 - RNA, 19 nt, Homo sapiens
  misc_RNA (1)...(19): siRNA sense strand
cauauagccagcaaccaua

SEQ ID NO: 118280 - RNA, 19 nt, Homo sapiens
  misc_RNA (1)...(19): siRNA sense strand
agaccgagguggaggcuau

SEQ ID NO: 118281 - RNA, 19 nt, Homo sapiens
  misc_RNA (1)...(19): siRNA sense strand
aggcaacagugucauuuga

SEQ ID NO: 118282 - RNA, 19 nt, Homo sapiens
  misc_RNA (1)...(19): siRNA sense strand
gagggugugucuacagauc

SEQ ID NO: 118283 - RNA, 19 nt, Homo sapiens
  misc_RNA (1)...(19): siRNA sense strand
ucaacaagauucauaugac

SEQ ID NO: 118284 - RNA, 19 nt, Homo sapiens
  misc_RNA (1)...(19): siRNA sense strand
gccagacuauggucaacaa

SEQ ID NO: 118285 - RNA, 19 nt, Homo sapiens
  misc_RNA (1)...(19): siRNA sense strand
agacuauggucaacaagau

SEQ ID NO: 118286 - RNA, 19 nt, Homo sapiens
  misc_RNA (1)...(19): siRNA sense strand
ccgaggagguggcuaugga

SEQ ID NO: 118287 - RNA, 19 nt, Homo sapiens
  misc_RNA (1)...(19): siRNA sense strand
ggauuggguuugcccuaau

SEQ ID NO: 118288 - RNA, 19 nt, Homo sapiens
  misc_RNA (1)...(19): siRNA sense strand
gcagcaugauuccuauagu

SEQ ID NO: 118289 - RNA, 19 nt, Homo sapiens
  misc_RNA (1)...(19): siRNA sense strand
cauaugaugagcagucaaa

SEQ ID NO: 118290 - RNA, 19 nt, Homo sapiens
  misc_RNA (1)...(19): siRNA sense strand
cagcaugauuccuauaguc

SEQ ID NO: 118291 - RNA, 19 nt, Homo sapiens
  misc_RNA (1)...(19): siRNA sense strand
gcuaugggcaaacgacuga

SEQ ID NO: 118292 - RNA, 19 nt, Homo sapiens
  misc_RNA (1)...(19): siRNA sense strand
agaccgagguggcuaugga

SEQ ID NO: 118293 - RNA, 19 nt, Homo sapiens
  misc_RNA (1)...(19): siRNA sense strand
cagcuaaggcagccauuga

SEQ ID NO: 118294 - RNA, 19 nt, Homo sapiens
  misc_RNA (1)...(19): siRNA sense strand
aaccagcaguccuaucauu

SEQ ID NO: 118295 - RNA, 19 nt, Homo sapiens
  misc_RNA (1)...(19): siRNA sense strand
agaauuccauggcaacauc

SEQ ID NO: 118296 - RNA, 19 nt, Homo sapiens
  misc_RNA (1)...(19): siRNA sense strand
ggggugagcagcaaaguua

SEQ ID NO: 118297 - RNA, 19 nt, Homo sapiens
  misc_RNA (1)...(19): siRNA sense strand
gggaguucuuuaaacaaau

SEQ ID NO: 118298 - RNA, 19 nt, Homo sapiens
  misc_RNA (1)...(19): siRNA sense strand
agaccgaaguggaggcuau

SEQ ID NO: 118299 - RNA, 19 nt, Homo sapiens
  misc_RNA (1)...(19): siRNA sense strand
ggcaacaucauuaaagugu

SEQ ID NO: 118300 - RNA, 19 nt, Homo sapiens
  misc_RNA (1)...(19): siRNA sense strand
caaaagcagagcucauaua

SEQ ID NO: 118301 - RNA, 19 nt, Homo sapiens
  misc_RNA (1)...(19): siRNA sense strand
aagaaacgacuacagaaau

SEQ ID NO: 118302 - RNA, 19 nt, Homo sapiens
  misc_RNA (1)...(19): siRNA sense strand
gucaacaagauucauauga

SEQ ID NO: 118303 - RNA, 19 nt, Homo sapiens
  misc_RNA (1)...(19): siRNA sense strand
gcgcaaccgaccauacuga

SEQ ID NO: 118304 - RNA, 19 nt, Homo sapiens
  misc_RNA (1)...(19): siRNA sense strand
ggagaucgaggagguuaug

SEQ ID NO: 118305 - RNA, 19 nt, Homo sapiens
  misc_RNA (1)...(19): siRNA sense strand
ggggaguucuuuaaacaaa

SEQ ID NO: 118306 - RNA, 19 nt, Homo sapiens
  misc_RNA (1)...(19): siRNA sense strand
cgacugauuccucuuaugg

SEQ ID NO: 118307 - RNA, 19 nt, Homo sapiens
  misc_RNA (1)...(19): siRNA sense strand
cagcaaaguuauucuaccu

SEQ ID NO: 118308 - RNA, 19 nt, Homo sapiens
  misc_RNA (1)...(19): siRNA sense strand
agccagcaaccauauaaua

SEQ ID NO: 118309 - RNA, 19 nt, Homo sapiens
  misc_RNA (1)...(19): siRNA sense strand
guuauucuaccuauggaaa

SEQ ID NO: 118310 - RNA, 19 nt, Homo sapiens
  misc_RNA (1)...(19): siRNA sense strand
ucacaguccuauggugguu

SEQ ID NO: 118311 - RNA, 19 nt, Homo sapiens
  misc_RNA (1)...(19): siRNA sense strand
gaggcaacagugucauuug

SEQ ID NO: 118312 - RNA, 19 nt, Homo sapiens
  misc_RNA (1)...(19): siRNA sense strand
ggugagcagcaaaguuauu

SEQ ID NO: 118313 - RNA, 19 nt, Homo sapiens
  misc_RNA (1)...(19): siRNA sense strand
gaccagcagucaggcuaug

SEQ ID NO: 118314 - RNA, 19 nt, Homo sapiens
  misc_RNA (1)...(19): siRNA sense strand
ccuaugaccagccagacua

SEQ ID NO: 118315 - RNA, 19 nt, Homo sapiens
  misc_RNA (1)...(19): siRNA sense strand
uaugaugagcagucaaauu

SEQ ID NO: 118316 - RNA, 19 nt, Homo sapiens
  misc_RNA (1)...(19): siRNA sense strand
caggagugguggcggcuau

SEQ ID NO: 118317 - RNA, 19 nt, Homo sapiens
  misc_RNA (1)...(19): siRNA sense strand
cagaggaggcggcuaugga

SEQ ID NO: 118318 - RNA, 19 nt, Homo sapiens
  misc_RNA (1)...(19): siRNA sense strand
uagaggucguggaggcuuu

SEQ ID NO: 118319 - RNA, 19 nt, Homo sapiens
  misc_RNA (1)...(19): siRNA sense strand
aaaguuauucuaccuaugg

SEQ ID NO: 118320 - RNA, 19 nt, Homo sapiens
  misc_RNA (1)...(19): siRNA sense strand
gucgugaugugaguaggua

SEQ ID NO: 118321 - RNA, 19 nt, Homo sapiens
  misc_RNA (1)...(19): siRNA sense strand
ucagcagcaugauuccuau

SEQ ID NO: 118322 - RNA, 19 nt, Homo sapiens
  misc_RNA (1)...(19): siRNA sense strand
aacauggaaucaucaggaa

SEQ ID NO: 118323 - RNA, 19 nt, Homo sapiens
  misc_RNA (1)...(19): siRNA sense strand
cggcuaugguggagacaga

SEQ ID NO: 118324 - RNA, 19 nt, Homo sapiens
  misc_RNA (1)...(19): siRNA sense strand
cggcuaugguggagacaga

SEQ ID NO: 118325 - RNA, 19 nt, Homo sapiens
  misc_RNA (1)...(19): siRNA sense strand
uuccauggcaacaucauua

SEQ ID NO: 118326 - RNA, 19 nt, Homo sapiens
  misc_RNA (1)...(19): siRNA sense strand
aggcagccauugacugguu

SEQ ID NO: 118327 - RNA, 19 nt, Homo sapiens
  misc_RNA (1)...(19): siRNA sense strand
ggucaacaagauucauaug

SEQ ID NO: 118328 - RNA, 19 nt, Homo sapiens
  misc_RNA (1)...(19): siRNA sense strand
acaagcaucacaaagcuau

SEQ ID NO: 118329 - RNA, 19 nt, Homo sapiens
  misc_RNA (1)...(19): siRNA sense strand
ggaaaaccaaugauaaauc

SEQ ID NO: 118330 - RNA, 19 nt, Homo sapiens
  misc_RNA (1)...(19): siRNA sense strand
gggugugucuacagaucaa

SEQ ID NO: 118331 - RNA, 19 nt, Homo sapiens
  misc_RNA (1)...(19): siRNA sense strand
ccagcaguccuaucauuca

SEQ ID NO: 118332 - RNA, 19 nt, Homo sapiens
  misc_RNA (1)...(19): siRNA sense strand
gaucagcgcaaccgaccau

SEQ ID NO: 118333 - RNA, 19 nt, Homo sapiens
  misc_RNA (1)...(19): siRNA sense strand
aggaagaaacgacuacaga

SEQ ID NO: 118334 - RNA, 19 nt, Homo sapiens
  misc_RNA (1)...(19): siRNA sense strand
gacagaacuacagcgguua

SEQ ID NO: 118335 - RNA, 19 nt, Homo sapiens
  misc_RNA (1)...(19): siRNA sense strand
ccacuagaagaccugaauu

SEQ ID NO: 118336 - RNA, 19 nt, Homo sapiens
  misc_RNA (1)...(19): siRNA sense strand
ggcagccauugacugguuu

SEQ ID NO: 118337 - RNA, 19 nt, Homo sapiens
  misc_RNA (1)...(19): siRNA sense strand
cagacaaggacacaggaaa

SEQ ID NO: 118338 - RNA, 19 nt, Homo sapiens
  misc_RNA (1)...(19): siRNA sense strand
ccagaacagaugcugauuc

SEQ ID NO: 118339 - RNA, 19 nt, Homo sapiens
  misc_RNA (1)...(19): siRNA sense strand
gcagagaaguugccaagua

SEQ ID NO: 118340 - RNA, 19 nt, Homo sapiens
  misc_RNA (1)...(19): siRNA sense strand
gaggagagcuuggauagaa

SEQ ID NO: 118341 - RNA, 19 nt, Homo sapiens
  misc_RNA (1)...(19): siRNA sense strand
gaggagagcuuggauagaa

SEQ ID NO: 118342 - RNA, 19 nt, Homo sapiens
  misc_RNA (1)...(19): siRNA sense strand
gagcugaaccucaccaaua

SEQ ID NO: 118343 - RNA, 19 nt, Homo sapiens
  misc_RNA (1)...(19): siRNA sense strand
acacagagcuggcaaagga

SEQ ID NO: 118344 - RNA, 19 nt, Homo sapiens
  misc_RNA (1)...(19): siRNA sense strand
ggaaauaacggucaucugu

SEQ ID NO: 118345 - RNA, 19 nt, Homo sapiens
  misc_RNA (1)...(19): siRNA sense strand
gaggagggcuuggauagaa

SEQ ID NO: 118346 - RNA, 19 nt, Homo sapiens
  misc_RNA (1)...(19): siRNA sense strand
gaggagggcuuggauagaa

SEQ ID NO: 118347 - RNA, 19 nt, Homo sapiens
  misc_RNA (1)...(19): siRNA sense strand
gaggagggcuuggauagaa

SEQ ID NO: 118348 - RNA, 19 nt, Homo sapiens
  misc_RNA (1)...(19): siRNA sense strand
ccaaaucgauuccucuaga

SEQ ID NO: 118349 - RNA, 19 nt, Homo sapiens
  misc_RNA (1)...(19): siRNA sense strand
ggauagaaaugaggagauu

SEQ ID NO: 118350 - RNA, 19 nt, Homo sapiens
  misc_RNA (1)...(19): siRNA sense strand
gaagacgucugucccaaag

SEQ ID NO: 118351 - RNA, 19 nt, Homo sapiens
  misc_RNA (1)...(19): siRNA sense strand
caaaucagcugaggugugu

SEQ ID NO: 118352 - RNA, 19 nt, Homo sapiens
  misc_RNA (1)...(19): siRNA sense strand
acaaagcgcugaacuugau

SEQ ID NO: 118353 - RNA, 19 nt, Homo sapiens
  misc_RNA (1)...(19): siRNA sense strand
gagaugaagugguguugau

SEQ ID NO: 118354 - RNA, 19 nt, Homo sapiens
  misc_RNA (1)...(19): siRNA sense strand
ccaggacacugcucagauu

SEQ ID NO: 118355 - RNA, 19 nt, Homo sapiens
  misc_RNA (1)...(19): siRNA sense strand
guacuauucuccagcaaau

SEQ ID NO: 118356 - RNA, 19 nt, Homo sapiens
  misc_RNA (1)...(19): siRNA sense strand
gccaagaucuacauuucaa

SEQ ID NO: 118357 - RNA, 19 nt, Homo sapiens
  misc_RNA (1)...(19): siRNA sense strand
agacgucugucccaaagua

SEQ ID NO: 118358 - RNA, 19 nt, Homo sapiens
  misc_RNA (1)...(19): siRNA sense strand
caagugaucucagaagcaa

SEQ ID NO: 118359 - RNA, 19 nt, Homo sapiens
  misc_RNA (1)...(19): siRNA sense strand
gggagcaugucuuggaauu

SEQ ID NO: 118360 - RNA, 19 nt, Homo sapiens
  misc_RNA (1)...(19): siRNA sense strand
gaagaugccaccuguguca

SEQ ID NO: 118361 - RNA, 19 nt, Homo sapiens
  misc_RNA (1)...(19): siRNA sense strand
caacuggucuuccucugau

SEQ ID NO: 118362 - RNA, 19 nt, Homo sapiens
  misc_RNA (1)...(19): siRNA sense strand
gauaaucucccaagugauc

SEQ ID NO: 118363 - RNA, 19 nt, Homo sapiens
  misc_RNA (1)...(19): siRNA sense strand
ugaagaagcucuguugucu

SEQ ID NO: 118364 - RNA, 19 nt, Homo sapiens
  misc_RNA (1)...(19): siRNA sense strand
uugcucaggugacaaguua

SEQ ID NO: 118365 - RNA, 19 nt, Homo sapiens
  misc_RNA (1)...(19): siRNA sense strand
gagcaugucuuggaauugg

SEQ ID NO: 118366 - RNA, 19 nt, Homo sapiens
  misc_RNA (1)...(19): siRNA sense strand
ggacacugcucagauucuu

SEQ ID NO: 118367 - RNA, 19 nt, Homo sapiens
  misc_RNA (1)...(19): siRNA sense strand
gauauaagagggugaaagu

SEQ ID NO: 118368 - RNA, 19 nt, Homo sapiens
  misc_RNA (1)...(19): siRNA sense strand
guccagaucugccacauag

SEQ ID NO: 118369 - RNA, 19 nt, Homo sapiens
  misc_RNA (1)...(19): siRNA sense strand
gaugaagugguguugauaa

SEQ ID NO: 118370 - RNA, 19 nt, Homo sapiens
  misc_RNA (1)...(19): siRNA sense strand
cagagaaguugccaaguag

SEQ ID NO: 118371 - RNA, 19 nt, Homo sapiens
  misc_RNA (1)...(19): siRNA sense strand
gugccaagaucuacauuuc

SEQ ID NO: 118372 - RNA, 19 nt, Homo sapiens
  misc_RNA (1)...(19): siRNA sense strand
cccaaaggguguacuauuc

SEQ ID NO: 118373 - RNA, 19 nt, Homo sapiens
  misc_RNA (1)...(19): siRNA sense strand
ggagugugguuggagauga

SEQ ID NO: 118374 - RNA, 19 nt, Homo sapiens
  misc_RNA (1)...(19): siRNA sense strand
gggaaaaggugcuugaaga

SEQ ID NO: 118375 - RNA, 19 nt, Homo sapiens
  misc_RNA (1)...(19): siRNA sense strand
gaaaugaggagagcuugga

SEQ ID NO: 118376 - RNA, 19 nt, Homo sapiens
  misc_RNA (1)...(19): siRNA sense strand
cagcauggauuccguggau

SEQ ID NO: 118377 - RNA, 19 nt, Homo sapiens
  misc_RNA (1)...(19): siRNA sense strand
ggaagacgucugucccaaa

SEQ ID NO: 118378 - RNA, 19 nt, Homo sapiens
  misc_RNA (1)...(19): siRNA sense strand
uacgugagcugccugaaga

SEQ ID NO: 118379 - RNA, 19 nt, Homo sapiens
  misc_RNA (1)...(19): siRNA sense strand
gaacuugauugggaagaag

SEQ ID NO: 118380 - RNA, 19 nt, Homo sapiens
  misc_RNA (1)...(19): siRNA sense strand
auagaaggcucucaacauc

SEQ ID NO: 118381 - RNA, 19 nt, Homo sapiens
  misc_RNA (1)...(19): siRNA sense strand
gaagugguguugauaaacc

SEQ ID NO: 118382 - RNA, 19 nt, Homo sapiens
  misc_RNA (1)...(19): siRNA sense strand
ggaggaagaguauguagca

SEQ ID NO: 118383 - RNA, 19 nt, Homo sapiens
  misc_RNA (1)...(19): siRNA sense strand
ggacuacggcggauauaag

SEQ ID NO: 118384 - RNA, 19 nt, Homo sapiens
  misc_RNA (1)...(19): siRNA sense strand
agacaaagcgcugaacuug

SEQ ID NO: 118385 - RNA, 19 nt, Homo sapiens
  misc_RNA (1)...(19): siRNA sense strand
gaaaugaggagggcuugga

SEQ ID NO: 118386 - RNA, 19 nt, Homo sapiens
  misc_RNA (1)...(19): siRNA sense strand
gaaaugaggagggcuugga

SEQ ID NO: 118387 - RNA, 19 nt, Homo sapiens
  misc_RNA (1)...(19): siRNA sense strand
gaaaugaggagggcuugga

SEQ ID NO: 118388 - RNA, 19 nt, Homo sapiens
  misc_RNA (1)...(19): siRNA sense strand
gacagguggugaagccaaa

SEQ ID NO: 118389 - RNA, 19 nt, Homo sapiens
  misc_RNA (1)...(19): siRNA sense strand
gagcuuggauagaaaugag

SEQ ID NO: 118390 - RNA, 19 nt, Homo sapiens
  misc_RNA (1)...(19): siRNA sense strand
gagcuuggauagaaaugag

SEQ ID NO: 118391 - RNA, 19 nt, Homo sapiens
  misc_RNA (1)...(19): siRNA sense strand
ucacagagccuccagaaaa

SEQ ID NO: 118392 - RNA, 19 nt, Homo sapiens
  misc_RNA (1)...(19): siRNA sense strand
ucaagaagacugagagcuu

SEQ ID NO: 118393 - RNA, 19 nt, Homo sapiens
  misc_RNA (1)...(19): siRNA sense strand
gaaaguacugugcccuuca

SEQ ID NO: 118394 - RNA, 19 nt, Homo sapiens
  misc_RNA (1)...(19): siRNA sense strand
gauagaaaugaggagauua

SEQ ID NO: 118395 - RNA, 19 nt, Homo sapiens
  misc_RNA (1)...(19): siRNA sense strand
gaaccucaccaauaucuac

SEQ ID NO: 118396 - RNA, 19 nt, Homo sapiens
  misc_RNA (1)...(19): siRNA sense strand
ccagaucugccacauagaa

SEQ ID NO: 118397 - RNA, 19 nt, Homo sapiens
  misc_RNA (1)...(19): siRNA sense strand
gacaggaacagcauggauu

SEQ ID NO: 118398 - RNA, 19 nt, Homo sapiens
  misc_RNA (1)...(19): siRNA sense strand
agggagaacugggcaauga

SEQ ID NO: 118399 - RNA, 19 nt, Homo sapiens
  misc_RNA (1)...(19): siRNA sense strand
gagugugguuggagaugaa

SEQ ID NO: 118400 - RNA, 19 nt, Homo sapiens
  misc_RNA (1)...(19): siRNA sense strand
ccucgggcauucuuccuaa

SEQ ID NO: 118401 - RNA, 19 nt, Homo sapiens
  misc_RNA (1)...(19): siRNA sense strand
gacaguaagccaaauaucu

SEQ ID NO: 118402 - RNA, 19 nt, Homo sapiens
  misc_RNA (1)...(19): siRNA sense strand
uauaagagggugaaaguag

SEQ ID NO: 118403 - RNA, 19 nt, Homo sapiens
  misc_RNA (1)...(19): siRNA sense strand
ccacauagaaggcucucaa

SEQ ID NO: 118404 - RNA, 19 nt, Homo sapiens
  misc_RNA (1)...(19): siRNA sense strand
uaacaccacagacaugaga

SEQ ID NO: 118405 - RNA, 19 nt, Homo sapiens
  misc_RNA (1)...(19): siRNA sense strand
gacaaagcgcugaacuuga

SEQ ID NO: 118406 - RNA, 19 nt, Homo sapiens
  misc_RNA (1)...(19): siRNA sense strand
auaagagggugaaaguaga

SEQ ID NO: 118407 - RNA, 19 nt, Homo sapiens
  misc_RNA (1)...(19): siRNA sense strand
cagcugagguguguaagca

SEQ ID NO: 118408 - RNA, 19 nt, Homo sapiens
  misc_RNA (1)...(19): siRNA sense strand
gaccauggaugcggaagca

SEQ ID NO: 118409 - RNA, 19 nt, Homo sapiens
  misc_RNA (1)...(19): siRNA sense strand
guacugugcccuucagcaa

SEQ ID NO: 118410 - RNA, 19 nt, Homo sapiens
  misc_RNA (1)...(19): siRNA sense strand
ccaaggacaguaagccaaa

SEQ ID NO: 118411 - RNA, 19 nt, Homo sapiens
  misc_RNA (1)...(19): siRNA sense strand
agagagcugugucccaguu

SEQ ID NO: 118412 - RNA, 19 nt, Homo sapiens
  misc_RNA (1)...(19): siRNA sense strand
guauguagcagagaaguug

SEQ ID NO: 118413 - RNA, 19 nt, Homo sapiens
  misc_RNA (1)...(19): siRNA sense strand
aagaguauguagcagagaa

SEQ ID NO: 118414 - RNA, 19 nt, Homo sapiens
  misc_RNA (1)...(19): siRNA sense strand
gcaggaggaagaguaugua

SEQ ID NO: 118415 - RNA, 19 nt, Homo sapiens
  misc_RNA (1)...(19): siRNA sense strand
ggagagggcaagagagaca

SEQ ID NO: 118416 - RNA, 19 nt, Homo sapiens
  misc_RNA (1)...(19): siRNA sense strand
agaaggcucucaacaucau

SEQ ID NO: 118417 - RNA, 19 nt, Homo sapiens
  misc_RNA (1)...(19): siRNA sense strand
cgggcugccuuccagauaa

SEQ ID NO: 118418 - RNA, 19 nt, Homo sapiens
  misc_RNA (1)...(19): siRNA sense strand
gggcugacccugccaucaa

SEQ ID NO: 118419 - RNA, 19 nt, Homo sapiens
  misc_RNA (1)...(19): siRNA sense strand
gcaaugaggagagcuugga

SEQ ID NO: 118420 - RNA, 19 nt, Homo sapiens
  misc_RNA (1)...(19): siRNA sense strand
ucagacagcagccaaagug

SEQ ID NO: 118421 - RNA, 19 nt, Homo sapiens
  misc_RNA (1)...(19): siRNA sense strand
caaaucgauuccucuagag

SEQ ID NO: 118422 - RNA, 19 nt, Homo sapiens
  misc_RNA (1)...(19): siRNA sense strand
cauagaaggcucucaacau

SEQ ID NO: 118423 - RNA, 19 nt, Homo sapiens
  misc_RNA (1)...(19): siRNA sense strand
gauagcuguugcagucuca

SEQ ID NO: 118424 - RNA, 19 nt, Homo sapiens
  misc_RNA (1)...(19): siRNA sense strand
caaaggguguacuauucuc

SEQ ID NO: 118425 - RNA, 19 nt, Homo sapiens
  misc_RNA (1)...(19): siRNA sense strand
gggcugccuuccagauaau

SEQ ID NO: 118426 - RNA, 19 nt, Homo sapiens
  misc_RNA (1)...(19): siRNA sense strand
ucagcagggugccaaggaa

SEQ ID NO: 118427 - RNA, 19 nt, Homo sapiens
  misc_RNA (1)...(19): siRNA sense strand
ugaacuugauugggaagaa

SEQ ID NO: 118428 - RNA, 19 nt, Homo sapiens
  misc_RNA (1)...(19): siRNA sense strand
ggacaguaagccaaauauc

SEQ ID NO: 118429 - RNA, 19 nt, Homo sapiens
  misc_RNA (1)...(19): siRNA sense strand
gguugcaggucgugugugu

SEQ ID NO: 118430 - RNA, 19 nt, Homo sapiens
  misc_RNA (1)...(19): siRNA sense strand
gggcuuggauagaaaugag

SEQ ID NO: 118431 - RNA, 19 nt, Homo sapiens
  misc_RNA (1)...(19): siRNA sense strand
gggcuuggauagaaaugag

SEQ ID NO: 118432 - RNA, 19 nt, Homo sapiens
  misc_RNA (1)...(19): siRNA sense strand
gggcuuggauagaaaugag

SEQ ID NO: 118433 - RNA, 19 nt, Homo sapiens
  misc_RNA (1)...(19): siRNA sense strand
ggagagcuuggauagaaau

SEQ ID NO: 118434 - RNA, 19 nt, Homo sapiens
  misc_RNA (1)...(19): siRNA sense strand
augaagugguguugauaaa

SEQ ID NO: 118435 - RNA, 19 nt, Homo sapiens
  misc_RNA (1)...(19): siRNA sense strand
ugauucagcuguggagugu

SEQ ID NO: 118436 - RNA, 19 nt, Homo sapiens
  misc_RNA (1)...(19): siRNA sense strand
gacgugcuccggcaaauca

SEQ ID NO: 118437 - RNA, 19 nt, Homo sapiens
  misc_RNA (1)...(19): siRNA sense strand
acugagagcuuccaaaaug

SEQ ID NO: 118438 - RNA, 19 nt, Homo sapiens
  misc_RNA (1)...(19): siRNA sense strand
ggagagcuuggauagaaau

SEQ ID NO: 118439 - RNA, 19 nt, Homo sapiens
  misc_RNA (1)...(19): siRNA sense strand
gcagagaaguugccaagua

SEQ ID NO: 118440 - RNA, 19 nt, Homo sapiens
  misc_RNA (1)...(19): siRNA sense strand
gaggagagcuuggauagaa

SEQ ID NO: 118441 - RNA, 19 nt, Homo sapiens
  misc_RNA (1)...(19): siRNA sense strand
gaggagagcuuggauagaa

SEQ ID NO: 118442 - RNA, 19 nt, Homo sapiens
  misc_RNA (1)...(19): siRNA sense strand
acacagagcuggcaaagga

SEQ ID NO: 118443 - RNA, 19 nt, Homo sapiens
  misc_RNA (1)...(19): siRNA sense strand
gaggagggcuuggauagaa

SEQ ID NO: 118444 - RNA, 19 nt, Homo sapiens
  misc_RNA (1)...(19): siRNA sense strand
gaggagggcuuggauagaa

SEQ ID NO: 118445 - RNA, 19 nt, Homo sapiens
  misc_RNA (1)...(19): siRNA sense strand
gaggagggcuuggauagaa

SEQ ID NO: 118446 - RNA, 19 nt, Homo sapiens
  misc_RNA (1)...(19): siRNA sense strand
ccaaaucgauuccucuaga

SEQ ID NO: 118447 - RNA, 19 nt, Homo sapiens
  misc_RNA (1)...(19): siRNA sense strand
ggauagaaaugaggagauu

SEQ ID NO: 118448 - RNA, 19 nt, Homo sapiens
  misc_RNA (1)...(19): siRNA sense strand
gaagacgucugucccaaag

SEQ ID NO: 118449 - RNA, 19 nt, Homo sapiens
  misc_RNA (1)...(19): siRNA sense strand
caaaucagcugaggugugu

SEQ ID NO: 118450 - RNA, 19 nt, Homo sapiens
  misc_RNA (1)...(19): siRNA sense strand
ccaggacacugcucagauu

SEQ ID NO: 118451 - RNA, 19 nt, Homo sapiens
  misc_RNA (1)...(19): siRNA sense strand
guacuauucuccagcaaau

SEQ ID NO: 118452 - RNA, 19 nt, Homo sapiens
  misc_RNA (1)...(19): siRNA sense strand
agacgucugucccaaagua

SEQ ID NO: 118453 - RNA, 19 nt, Homo sapiens
  misc_RNA (1)...(19): siRNA sense strand
caagugaucucagaagcaa

SEQ ID NO: 118454 - RNA, 19 nt, Homo sapiens
  misc_RNA (1)...(19): siRNA sense strand
gggagcaugucuuggaauu

SEQ ID NO: 118455 - RNA, 19 nt, Homo sapiens
  misc_RNA (1)...(19): siRNA sense strand
gaagaugccaccuguguca

SEQ ID NO: 118456 - RNA, 19 nt, Homo sapiens
  misc_RNA (1)...(19): siRNA sense strand
gauaaucucccaagugauc

SEQ ID NO: 118457 - RNA, 19 nt, Homo sapiens
  misc_RNA (1)...(19): siRNA sense strand
ugaagaagcucuguugucu

SEQ ID NO: 118458 - RNA, 19 nt, Homo sapiens
  misc_RNA (1)...(19): siRNA sense strand
gagcaugucuuggaauugg

SEQ ID NO: 118459 - RNA, 19 nt, Homo sapiens
  misc_RNA (1)...(19): siRNA sense strand
ggacacugcucagauucuu

SEQ ID NO: 118460 - RNA, 19 nt, Homo sapiens
  misc_RNA (1)...(19): siRNA sense strand
cagagaaguugccaaguag

SEQ ID NO: 118461 - RNA, 19 nt, Homo sapiens
  misc_RNA (1)...(19): siRNA sense strand
cccaaaggguguacuauuc

SEQ ID NO: 118462 - RNA, 19 nt, Homo sapiens
  misc_RNA (1)...(19): siRNA sense strand
gggaaaaggugcuugaaga

SEQ ID NO: 118463 - RNA, 19 nt, Homo sapiens
  misc_RNA (1)...(19): siRNA sense strand
ggaagacgucugucccaaa

SEQ ID NO: 118464 - RNA, 19 nt, Homo sapiens
  misc_RNA (1)...(19): siRNA sense strand
gaaaugaggagagcuugga

SEQ ID NO: 118465 - RNA, 19 nt, Homo sapiens
  misc_RNA (1)...(19): siRNA sense strand
uacgugagcugccugaaga

SEQ ID NO: 118466 - RNA, 19 nt, Homo sapiens
  misc_RNA (1)...(19): siRNA sense strand
ggaggaagaguauguagca

SEQ ID NO: 118467 - RNA, 19 nt, Homo sapiens
  misc_RNA (1)...(19): siRNA sense strand
gaaaugaggagggcuugga

SEQ ID NO: 118468 - RNA, 19 nt, Homo sapiens
  misc_RNA (1)...(19): siRNA sense strand
gaaaugaggagggcuugga

SEQ ID NO: 118469 - RNA, 19 nt, Homo sapiens
  misc_RNA (1)...(19): siRNA sense strand
gaaaugaggagggcuugga

SEQ ID NO: 118470 - RNA, 19 nt, Homo sapiens
  misc_RNA (1)...(19): siRNA sense strand
gacagguggugaagccaaa

SEQ ID NO: 118471 - RNA, 19 nt, Homo sapiens
  misc_RNA (1)...(19): siRNA sense strand
gagcuuggauagaaaugag

SEQ ID NO: 118472 - RNA, 19 nt, Homo sapiens
  misc_RNA (1)...(19): siRNA sense strand
gagcuuggauagaaaugag

SEQ ID NO: 118473 - RNA, 19 nt, Homo sapiens
  misc_RNA (1)...(19): siRNA sense strand
ucacagagccuccagaaaa

SEQ ID NO: 118474 - RNA, 19 nt, Homo sapiens
  misc_RNA (1)...(19): siRNA sense strand
gaaaguacugugcccuuca

SEQ ID NO: 118475 - RNA, 19 nt, Homo sapiens
  misc_RNA (1)...(19): siRNA sense strand
gauagaaaugaggagauua

SEQ ID NO: 118476 - RNA, 19 nt, Homo sapiens
  misc_RNA (1)...(19): siRNA sense strand
ccucgggcauucuuccuaa

SEQ ID NO: 118477 - RNA, 19 nt, Homo sapiens
  misc_RNA (1)...(19): siRNA sense strand
agggagaacugggcaauga

SEQ ID NO: 118478 - RNA, 19 nt, Homo sapiens
  misc_RNA (1)...(19): siRNA sense strand
uaacaccacagacaugaga

SEQ ID NO: 118479 - RNA, 19 nt, Homo sapiens
  misc_RNA (1)...(19): siRNA sense strand
gacaguaagccaaauaucu

SEQ ID NO: 118480 - RNA, 19 nt, Homo sapiens
  misc_RNA (1)...(19): siRNA sense strand
cagcugagguguguaagca

SEQ ID NO: 118481 - RNA, 19 nt, Homo sapiens
  misc_RNA (1)...(19): siRNA sense strand
gaccauggaugcggaagca

SEQ ID NO: 118482 - RNA, 19 nt, Homo sapiens
  misc_RNA (1)...(19): siRNA sense strand
guacugugcccuucagcaa

SEQ ID NO: 118483 - RNA, 19 nt, Homo sapiens
  misc_RNA (1)...(19): siRNA sense strand
ccaaggacaguaagccaaa

SEQ ID NO: 118484 - RNA, 19 nt, Homo sapiens
  misc_RNA (1)...(19): siRNA sense strand
agagagcugugucccaguu

SEQ ID NO: 118485 - RNA, 19 nt, Homo sapiens
  misc_RNA (1)...(19): siRNA sense strand
guauguagcagagaaguug

SEQ ID NO: 118486 - RNA, 19 nt, Homo sapiens
  misc_RNA (1)...(19): siRNA sense strand
aagaguauguagcagagaa

SEQ ID NO: 118487 - RNA, 19 nt, Homo sapiens
  misc_RNA (1)...(19): siRNA sense strand
gcaggaggaagaguaugua

SEQ ID NO: 118488 - RNA, 19 nt, Homo sapiens
  misc_RNA (1)...(19): siRNA sense strand
ggagagggcaagagagaca

SEQ ID NO: 118489 - RNA, 19 nt, Homo sapiens
  misc_RNA (1)...(19): siRNA sense strand
gggcugacccugccaucaa

SEQ ID NO: 118490 - RNA, 19 nt, Homo sapiens
  misc_RNA (1)...(19): siRNA sense strand
cgggcugccuuccagauaa

SEQ ID NO: 118491 - RNA, 19 nt, Homo sapiens
  misc_RNA (1)...(19): siRNA sense strand
gcaaugaggagagcuugga

SEQ ID NO: 118492 - RNA, 19 nt, Homo sapiens
  misc_RNA (1)...(19): siRNA sense strand
caaaucgauuccucuagag

SEQ ID NO: 118493 - RNA, 19 nt, Homo sapiens
  misc_RNA (1)...(19): siRNA sense strand
ucagacagcagccaaagug

SEQ ID NO: 118494 - RNA, 19 nt, Homo sapiens
  misc_RNA (1)...(19): siRNA sense strand
caaaggguguacuauucuc

SEQ ID NO: 118495 - RNA, 19 nt, Homo sapiens
  misc_RNA (1)...(19): siRNA sense strand
gggcugccuuccagauaau

SEQ ID NO: 118496 - RNA, 19 nt, Homo sapiens
  misc_RNA (1)...(19): siRNA sense strand
ucagcagggugccaaggaa

SEQ ID NO: 118497 - RNA, 19 nt, Homo sapiens
  misc_RNA (1)...(19): siRNA sense strand
ggacaguaagccaaauauc

SEQ ID NO: 118498 - RNA, 19 nt, Homo sapiens
  misc_RNA (1)...(19): siRNA sense strand
gguugcaggucgugugugu

SEQ ID NO: 118499 - RNA, 19 nt, Homo sapiens
  misc_RNA (1)...(19): siRNA sense strand
gggcuuggauagaaaugag

SEQ ID NO: 118500 - RNA, 19 nt, Homo sapiens
  misc_RNA (1)...(19): siRNA sense strand
gggcuuggauagaaaugag

SEQ ID NO: 118501 - RNA, 19 nt, Homo sapiens
  misc_RNA (1)...(19): siRNA sense strand
gggcuuggauagaaaugag

SEQ ID NO: 118502 - RNA, 19 nt, Homo sapiens
  misc_RNA (1)...(19): siRNA sense strand
ggagagcuuggauagaaau

SEQ ID NO: 118503 - RNA, 19 nt, Homo sapiens
  misc_RNA (1)...(19): siRNA sense strand
ggagagcuuggauagaaau

SEQ ID NO: 118504 - RNA, 19 nt, Homo sapiens
  misc_RNA (1)...(19): siRNA sense strand
ggaaaaggugcuugaagaa

SEQ ID NO: 118505 - RNA, 19 nt, Homo sapiens
  misc_RNA (1)...(19): siRNA sense strand
gcgggcugccuuccagaua

SEQ ID NO: 118506 - RNA, 19 nt, Homo sapiens
  misc_RNA (1)...(19): siRNA sense strand
gacuggugaugccguguug

SEQ ID NO: 118507 - RNA, 19 nt, Homo sapiens
  misc_RNA (1)...(19): siRNA sense strand
caaggacaguaagccaaau

SEQ ID NO: 118508 - RNA, 19 nt, Homo sapiens
  misc_RNA (1)...(19): siRNA sense strand
aaucagcugagguguguaa

SEQ ID NO: 118509 - RNA, 19 nt, Homo sapiens
  misc_RNA (1)...(19): siRNA sense strand
ggacuggugaugccguguu

SEQ ID NO: 118510 - RNA, 19 nt, Homo sapiens
  misc_RNA (1)...(19): siRNA sense strand
gagaaguugccaaguaggu

SEQ ID NO: 118511 - RNA, 19 nt, Homo sapiens
  misc_RNA (1)...(19): siRNA sense strand
ugucccaguucaccagaaa

SEQ ID NO: 118512 - RNA, 19 nt, Homo sapiens
  misc_RNA (1)...(19): siRNA sense strand
caccacgguuggcaagguu

SEQ ID NO: 118513 - RNA, 19 nt, Homo sapiens
  misc_RNA (1)...(19): siRNA sense strand
ccaguuccguucgcucuuc

SEQ ID NO: 118514 - RNA, 19 nt, Homo sapiens
  misc_RNA (1)...(19): siRNA sense strand
ucagaguccucgggcauuc

SEQ ID NO: 118515 - RNA, 19 nt, Homo sapiens
  misc_RNA (1)...(19): siRNA sense strand
ccaaaggguguacuauucu

SEQ ID NO: 118516 - RNA, 19 nt, Homo sapiens
  misc_RNA (1)...(19): siRNA sense strand
ucagauucuuucagcacuu

SEQ ID NO: 118517 - RNA, 19 nt, Homo sapiens
  misc_RNA (1)...(19): siRNA sense strand
ggugaagccaaaucgauuc

SEQ ID NO: 118518 - RNA, 19 nt, Homo sapiens
  misc_RNA (1)...(19): siRNA sense strand
cagauucuuucagcacuuc

SEQ ID NO: 118519 - RNA, 19 nt, Homo sapiens
  misc_RNA (1)...(19): siRNA sense strand
aggagagcuuggauagaaa

SEQ ID NO: 118520 - RNA, 19 nt, Homo sapiens
  misc_RNA (1)...(19): siRNA sense strand
aggagagcuuggauagaaa

SEQ ID NO: 118521 - RNA, 19 nt, Homo sapiens
  misc_RNA (1)...(19): siRNA sense strand
acugugcccuucagcaaug

SEQ ID NO: 118522 - RNA, 19 nt, Homo sapiens
  misc_RNA (1)...(19): siRNA sense strand
aaggacaguaagccaaaua

SEQ ID NO: 118523 - RNA, 19 nt, Homo sapiens
  misc_RNA (1)...(19): siRNA sense strand
uggaagaugccaccugugu

SEQ ID NO: 118524 - RNA, 19 nt, Homo sapiens
  misc_RNA (1)...(19): siRNA sense strand
ggccagugcaggaggaaga

SEQ ID NO: 118525 - RNA, 19 nt, Homo sapiens
  misc_RNA (1)...(19): siRNA sense strand
ccaccugugucaccugcau

SEQ ID NO: 118526 - RNA, 19 nt, Homo sapiens
  misc_RNA (1)...(19): siRNA sense strand
ggagggcuuggauagaaau

SEQ ID NO: 118527 - RNA, 19 nt, Homo sapiens
  misc_RNA (1)...(19): siRNA sense strand
aggagggcuuggauagaaa

SEQ ID NO: 118528 - RNA, 19 nt, Homo sapiens
  misc_RNA (1)...(19): siRNA sense strand
ggagggcuuggauagaaau

SEQ ID NO: 118529 - RNA, 19 nt, Homo sapiens
  misc_RNA (1)...(19): siRNA sense strand
aggagggcuuggauagaaa

SEQ ID NO: 118530 - RNA, 19 nt, Homo sapiens
  misc_RNA (1)...(19): siRNA sense strand
ggagggcuuggauagaaau

SEQ ID NO: 118531 - RNA, 19 nt, Homo sapiens
  misc_RNA (1)...(19): siRNA sense strand
aggagggcuuggauagaaa

SEQ ID NO: 118532 - RNA, 19 nt, Homo sapiens
  misc_RNA (1)...(19): siRNA sense strand
ccuaacaccacagacauga

SEQ ID NO: 118533 - RNA, 19 nt, Homo sapiens
  misc_RNA (1)...(19): siRNA sense strand
gagauugcgaccaggaaca

SEQ ID NO: 118534 - RNA, 19 nt, Homo sapiens
  misc_RNA (1)...(19): siRNA sense strand
acacugcucagauucuuuc

SEQ ID NO: 118535 - RNA, 19 nt, Homo sapiens
  misc_RNA (1)...(19): siRNA sense strand
ccaccacgguuggcaaggu

SEQ ID NO: 118536 - RNA, 19 nt, Homo sapiens
  misc_RNA (1)...(19): siRNA sense strand
ucucccaagugaucucaga

SEQ ID NO: 118537 - RNA, 19 nt, Homo sapiens
  misc_RNA (1)...(19): siRNA sense strand
gaagaguauguagcagaga

SEQ ID NO: 118538 - RNA, 19 nt, Homo sapiens
  misc_RNA (1)...(19): siRNA sense strand
acaguaagccaaauaucuc

SEQ ID NO: 118539 - RNA, 19 nt, Homo sapiens
  misc_RNA (1)...(19): siRNA sense strand
gaacaaaggucaugaguga

SEQ ID NO: 118540 - RNA, 19 nt, Homo sapiens
  misc_RNA (1)...(19): siRNA sense strand
caagauaccucaaagaauu

SEQ ID NO: 118541 - RNA, 19 nt, Homo sapiens
  misc_RNA (1)...(19): siRNA sense strand
gcacauuacuggccucuuu

SEQ ID NO: 118542 - RNA, 19 nt, Homo sapiens
  misc_RNA (1)...(19): siRNA sense strand
ggaagaggcugucugauuc

SEQ ID NO: 118543 - RNA, 19 nt, Homo sapiens
  misc_RNA (1)...(19): siRNA sense strand
caaacaggauagcacauua

SEQ ID NO: 118544 - RNA, 19 nt, Homo sapiens
  misc_RNA (1)...(19): siRNA sense strand
uauaagaacucacuggaaa

SEQ ID NO: 118545 - RNA, 19 nt, Homo sapiens
  misc_RNA (1)...(19): siRNA sense strand
gagcugaaauuuagcagaa

SEQ ID NO: 118546 - RNA, 19 nt, Homo sapiens
  misc_RNA (1)...(19): siRNA sense strand
aaacacagauaaaccgaua

SEQ ID NO: 118547 - RNA, 19 nt, Homo sapiens
  misc_RNA (1)...(19): siRNA sense strand
uaacuuaccuagaaggauu

SEQ ID NO: 118548 - RNA, 19 nt, Homo sapiens
  misc_RNA (1)...(19): siRNA sense strand
gcaagaacaucaucaagca

SEQ ID NO: 118549 - RNA, 19 nt, Homo sapiens
  misc_RNA (1)...(19): siRNA sense strand
agagagagcuuuaagugaa

SEQ ID NO: 118550 - RNA, 19 nt, Homo sapiens
  misc_RNA (1)...(19): siRNA sense strand
gagaagcgcaccugccuua

SEQ ID NO: 118551 - RNA, 19 nt, Homo sapiens
  misc_RNA (1)...(19): siRNA sense strand
gcaccaggauucuauuguu

SEQ ID NO: 118552 - RNA, 19 nt, Homo sapiens
  misc_RNA (1)...(19): siRNA sense strand
caacagcaaaccugaauuu

SEQ ID NO: 118553 - RNA, 19 nt, Homo sapiens
  misc_RNA (1)...(19): siRNA sense strand
gcaaggauaugcccucagu

SEQ ID NO: 118554 - RNA, 19 nt, Homo sapiens
  misc_RNA (1)...(19): siRNA sense strand
gaagcgugcuaacgauaaa

SEQ ID NO: 118555 - RNA, 19 nt, Homo sapiens
  misc_RNA (1)...(19): siRNA sense strand
gcagaaaugaucuugaauu

SEQ ID NO: 118556 - RNA, 19 nt, Homo sapiens
  misc_RNA (1)...(19): siRNA sense strand
ggaaugcagucauccaugu

SEQ ID NO: 118557 - RNA, 19 nt, Homo sapiens
  misc_RNA (1)...(19): siRNA sense strand
gaugugagcaaguucaaua

SEQ ID NO: 118558 - RNA, 19 nt, Homo sapiens
  misc_RNA (1)...(19): siRNA sense strand
gucaugugcugcaagauua

SEQ ID NO: 118559 - RNA, 19 nt, Homo sapiens
  misc_RNA (1)...(19): siRNA sense strand
gauaugcccucagucauga

SEQ ID NO: 118560 - RNA, 19 nt, Homo sapiens
  misc_RNA (1)...(19): siRNA sense strand
uagcagaaaugaucuugaa

SEQ ID NO: 118561 - RNA, 19 nt, Homo sapiens
  misc_RNA (1)...(19): siRNA sense strand
aggaagagcugaaauuuag

SEQ ID NO: 118562 - RNA, 19 nt, Homo sapiens
  misc_RNA (1)...(19): siRNA sense strand
gaagaggaucagaacuuua

SEQ ID NO: 118563 - RNA, 19 nt, Homo sapiens
  misc_RNA (1)...(19): siRNA sense strand
gcucuaggcugcagacugu

SEQ ID NO: 118564 - RNA, 19 nt, Homo sapiens
  misc_RNA (1)...(19): siRNA sense strand
ugaagaggaucagaacuuu

SEQ ID NO: 118565 - RNA, 19 nt, Homo sapiens
  misc_RNA (1)...(19): siRNA sense strand
ggagaagaaugaguaugaa

SEQ ID NO: 118566 - RNA, 19 nt, Homo sapiens
  misc_RNA (1)...(19): siRNA sense strand
gcaccugccuuaccagugu

SEQ ID NO: 118567 - RNA, 19 nt, Homo sapiens
  misc_RNA (1)...(19): siRNA sense strand
ugaaauggcacuucuagaa

SEQ ID NO: 118568 - RNA, 19 nt, Homo sapiens
  misc_RNA (1)...(19): siRNA sense strand
gaaauggcacuucuagaau

SEQ ID NO: 118569 - RNA, 19 nt, Homo sapiens
  misc_RNA (1)...(19): siRNA sense strand
gugaaagacuugcugcuau

SEQ ID NO: 118570 - RNA, 19 nt, Homo sapiens
  misc_RNA (1)...(19): siRNA sense strand
gcaaacugauggcuagcaa

SEQ ID NO: 118571 - RNA, 19 nt, Homo sapiens
  misc_RNA (1)...(19): siRNA sense strand
ugcaaggacuucugugaua

SEQ ID NO: 118572 - RNA, 19 nt, Homo sapiens
  misc_RNA (1)...(19): siRNA sense strand
ggacuggaaugcagcaaag

SEQ ID NO: 118573 - RNA, 19 nt, Homo sapiens
  misc_RNA (1)...(19): siRNA sense strand
gagaaaggacccauuaagu

SEQ ID NO: 118574 - RNA, 19 nt, Homo sapiens
  misc_RNA (1)...(19): siRNA sense strand
gacaggagucacagaaaua

SEQ ID NO: 118575 - RNA, 19 nt, Homo sapiens
  misc_RNA (1)...(19): siRNA sense strand
gaugaaaguucuuauucca

SEQ ID NO: 118576 - RNA, 19 nt, Homo sapiens
  misc_RNA (1)...(19): siRNA sense strand
ggaaugucaagccaucuua

SEQ ID NO: 118577 - RNA, 19 nt, Homo sapiens
  misc_RNA (1)...(19): siRNA sense strand
ccucagucaugauucuuua

SEQ ID NO: 118578 - RNA, 19 nt, Homo sapiens
  misc_RNA (1)...(19): siRNA sense strand
uaaauggacugauguacag

SEQ ID NO: 118579 - RNA, 19 nt, Homo sapiens
  misc_RNA (1)...(19): siRNA sense strand
ugugaugacuuacaaauuc

SEQ ID NO: 118580 - RNA, 19 nt, Homo sapiens
  misc_RNA (1)...(19): siRNA sense strand
ugacagcaguggugaugaa

SEQ ID NO: 118581 - RNA, 19 nt, Homo sapiens
  misc_RNA (1)...(19): siRNA sense strand
agaacucacuggaaagaaa

SEQ ID NO: 118582 - RNA, 19 nt, Homo sapiens
  misc_RNA (1)...(19): siRNA sense strand
auacgaaucuuccugaugu

SEQ ID NO: 118583 - RNA, 19 nt, Homo sapiens
  misc_RNA (1)...(19): siRNA sense strand
ggaagcgugcuaacgauaa

SEQ ID NO: 118584 - RNA, 19 nt, Homo sapiens
  misc_RNA (1)...(19): siRNA sense strand
caggaagagcugaaauuua

SEQ ID NO: 118585 - RNA, 19 nt, Homo sapiens
  misc_RNA (1)...(19): siRNA sense strand
auaguuaccuggcagauga

SEQ ID NO: 118586 - RNA, 19 nt, Homo sapiens
  misc_RNA (1)...(19): siRNA sense strand
caaagaagaucaagauacc

SEQ ID NO: 118587 - RNA, 19 nt, Homo sapiens
  misc_RNA (1)...(19): siRNA sense strand
caaccuguuucccuggaua

SEQ ID NO: 118588 - RNA, 19 nt, Homo sapiens
  misc_RNA (1)...(19): siRNA sense strand
gcaaacaggauagcacauu

SEQ ID NO: 118589 - RNA, 19 nt, Homo sapiens
  misc_RNA (1)...(19): siRNA sense strand
gcaaggacuucugugauag

SEQ ID NO: 118590 - RNA, 19 nt, Homo sapiens
  misc_RNA (1)...(19): siRNA sense strand
ccucuuugcuucagucauu

SEQ ID NO: 118591 - RNA, 19 nt, Homo sapiens
  misc_RNA (1)...(19): siRNA sense strand
ugaaagacuugcugcuaug

SEQ ID NO: 118592 - RNA, 19 nt, Homo sapiens
  misc_RNA (1)...(19): siRNA sense strand
gcgcaaauggagaaguuua

SEQ ID NO: 118593 - RNA, 19 nt, Homo sapiens
  misc_RNA (1)...(19): siRNA sense strand
cagcaaaccugaauuuagc

SEQ ID NO: 118594 - RNA, 19 nt, Homo sapiens
  misc_RNA (1)...(19): siRNA sense strand
caccaggauucuauuguuu

SEQ ID NO: 118595 - RNA, 19 nt, Homo sapiens
  misc_RNA (1)...(19): siRNA sense strand
gcuaaacucacaccagaaa

SEQ ID NO: 118596 - RNA, 19 nt, Homo sapiens
  misc_RNA (1)...(19): siRNA sense strand
gaaagugaacacaggaguu

SEQ ID NO: 118597 - RNA, 19 nt, Homo sapiens
  misc_RNA (1)...(19): siRNA sense strand
ggacaaaguggaacaaagg

SEQ ID NO: 118598 - RNA, 19 nt, Homo sapiens
  misc_RNA (1)...(19): siRNA sense strand
cagcgcaaauggagaaguu

SEQ ID NO: 118599 - RNA, 19 nt, Homo sapiens
  misc_RNA (1)...(19): siRNA sense strand
aaaccaacccaauacuaua

SEQ ID NO: 118600 - RNA, 19 nt, Homo sapiens
  misc_RNA (1)...(19): siRNA sense strand
uaacuggaaacacagauaa

SEQ ID NO: 118601 - RNA, 19 nt, Homo sapiens
  misc_RNA (1)...(19): siRNA sense strand
ucaaaguaaugguccaguu

SEQ ID NO: 118602 - RNA, 19 nt, Homo sapiens
  misc_RNA (1)...(19): siRNA sense strand
cagauaaaccgauagguau

SEQ ID NO: 118603 - RNA, 19 nt, Homo sapiens
  misc_RNA (1)...(19): siRNA sense strand
acagauaaaccgauaggua

SEQ ID NO: 118604 - RNA, 19 nt, Homo sapiens
  misc_RNA (1)...(19): siRNA sense strand
acaaugaugugagcaaguu

SEQ ID NO: 118605 - RNA, 19 nt, Homo sapiens
  misc_RNA (1)...(19): siRNA sense strand
ggauaugcccucagucaug

SEQ ID NO: 118606 - RNA, 19 nt, Homo sapiens
  misc_RNA (1)...(19): siRNA sense strand
gcuuuauacugagccauua

SEQ ID NO: 118607 - RNA, 19 nt, Homo sapiens
  misc_RNA (1)...(19): siRNA sense strand
agacaggagucacagaaau

SEQ ID NO: 118608 - RNA, 19 nt, Homo sapiens
  misc_RNA (1)...(19): siRNA sense strand
caaaugcaguugaagaaaa

SEQ ID NO: 118609 - RNA, 19 nt, Homo sapiens
  misc_RNA (1)...(19): siRNA sense strand
aaacaaaugcaguugaaga

SEQ ID NO: 118610 - RNA, 19 nt, Homo sapiens
  misc_RNA (1)...(19): siRNA sense strand
cuggauaacuucacucaau

SEQ ID NO: 118611 - RNA, 19 nt, Homo sapiens
  misc_RNA (1)...(19): siRNA sense strand
cagauaacaauccuaguuu

SEQ ID NO: 118612 - RNA, 19 nt, Homo sapiens
  misc_RNA (1)...(19): siRNA sense strand
gaggaaaguaguacaccua

SEQ ID NO: 118613 - RNA, 19 nt, Homo sapiens
  misc_RNA (1)...(19): siRNA sense strand
cggaagaggcugucugauu

SEQ ID NO: 118614 - RNA, 19 nt, Homo sapiens
  misc_RNA (1)...(19): siRNA sense strand
gagaagaaugaguaugaaa

SEQ ID NO: 118615 - RNA, 19 nt, Homo sapiens
  misc_RNA (1)...(19): siRNA sense strand
cgauagguaugauugauag

SEQ ID NO: 118616 - RNA, 19 nt, Homo sapiens
  misc_RNA (1)...(19): siRNA sense strand
gaaucugaccaaccuguuu

SEQ ID NO: 118617 - RNA, 19 nt, Homo sapiens
  misc_RNA (1)...(19): siRNA sense strand
aaacaagcugcuaacaaua

SEQ ID NO: 118618 - RNA, 19 nt, Homo sapiens
  misc_RNA (1)...(19): siRNA sense strand
gaucagguacugccguuga

SEQ ID NO: 118619 - RNA, 19 nt, Homo sapiens
  misc_RNA (1)...(19): siRNA sense strand
ccaggaagagcugaaauuu

SEQ ID NO: 118620 - RNA, 19 nt, Homo sapiens
  misc_RNA (1)...(19): siRNA sense strand
uagauuaaauagcccuuug

SEQ ID NO: 118621 - RNA, 19 nt, Homo sapiens
  misc_RNA (1)...(19): siRNA sense strand
aagaggaucagaacuuuaa

SEQ ID NO: 118622 - RNA, 19 nt, Homo sapiens
  misc_RNA (1)...(19): siRNA sense strand
gaaugucaagccaucuuaa

SEQ ID NO: 118623 - RNA, 19 nt, Homo sapiens
  misc_RNA (1)...(19): siRNA sense strand
ucacugaugcggagaagaa

SEQ ID NO: 118624 - RNA, 19 nt, Homo sapiens
  misc_RNA (1)...(19): siRNA sense strand
gguguuccaugcccaguga

SEQ ID NO: 118625 - RNA, 19 nt, Homo sapiens
  misc_RNA (1)...(19): siRNA sense strand
gcacuucuagaaucaaaga

SEQ ID NO: 118626 - RNA, 19 nt, Homo sapiens
  misc_RNA (1)...(19): siRNA sense strand
agagaaaacucccuuaaga

SEQ ID NO: 118627 - RNA, 19 nt, Homo sapiens
  misc_RNA (1)...(19): siRNA sense strand
gauaaaccgauagguauga

SEQ ID NO: 118628 - RNA, 19 nt, Homo sapiens
  misc_RNA (1)...(19): siRNA sense strand
uuacuuacaucaagcaaag

SEQ ID NO: 118629 - RNA, 19 nt, Homo sapiens
  misc_RNA (1)...(19): siRNA sense strand
cagcaguggugaugaaagu

SEQ ID NO: 118630 - RNA, 19 nt, Homo sapiens
  misc_RNA (1)...(19): siRNA sense strand
ucagauaacaauccuaguu

SEQ ID NO: 118631 - RNA, 19 nt, Homo sapiens
  misc_RNA (1)...(19): siRNA sense strand
ucacuggaaagaaacaaua

SEQ ID NO: 118632 - RNA, 19 nt, Homo sapiens
  misc_RNA (1)...(19): siRNA sense strand
gagcagagacccagcaaac

SEQ ID NO: 118633 - RNA, 19 nt, Homo sapiens
  misc_RNA (1)...(19): siRNA sense strand
gagaaacacaagacaagga

SEQ ID NO: 118634 - RNA, 19 nt, Homo sapiens
  misc_RNA (1)...(19): siRNA sense strand
cggagaagaaugaguauga

SEQ ID NO: 118635 - RNA, 19 nt, Homo sapiens
  misc_RNA (1)...(19): siRNA sense strand
agaaaggacccauuaagug

SEQ ID NO: 118636 - RNA, 19 nt, Homo sapiens
  misc_RNA (1)...(19): siRNA sense strand
gcaguugcauggauaacag

SEQ ID NO: 118637 - RNA, 19 nt, Homo sapiens
  misc_RNA (1)...(19): siRNA sense strand
ggagucacagaaauaauga

SEQ ID NO: 118638 - RNA, 19 nt, Homo sapiens
  misc_RNA (1)...(19): siRNA sense strand
caagaauggucugcuaagu

SEQ ID NO: 118639 - RNA, 19 nt, Homo sapiens
  misc_RNA (1)...(19): siRNA sense strand
gaaccuagcugccuaugug

SEQ ID NO: 118640 - RNA, 19 nt, Homo sapiens
  misc_RNA (1)...(19): siRNA sense strand
gaaggugaauggagagauu

SEQ ID NO: 118641 - RNA, 19 nt, Homo sapiens
  misc_RNA (1)...(19): siRNA sense strand
ggagcaggcugaauucuca

SEQ ID NO: 118642 - RNA, 19 nt, Homo sapiens
  misc_RNA (1)...(19): siRNA sense strand
gcaaggauggcagagauua

SEQ ID NO: 118643 - RNA, 19 nt, Homo sapiens
  misc_RNA (1)...(19): siRNA sense strand
ggacaucugugccgucaag

SEQ ID NO: 118644 - RNA, 19 nt, Homo sapiens
  misc_RNA (1)...(19): siRNA sense strand
ucauuaagaucuuccauuc

SEQ ID NO: 118645 - RNA, 19 nt, Homo sapiens
  misc_RNA (1)...(19): siRNA sense strand
guggacagcugcucggaaa

SEQ ID NO: 118646 - RNA, 19 nt, Homo sapiens
  misc_RNA (1)...(19): siRNA sense strand
ggaaagaucaaaguggaaa

SEQ ID NO: 118647 - RNA, 19 nt, Homo sapiens
  misc_RNA (1)...(19): siRNA sense strand
uggcagagauuacaucauc

SEQ ID NO: 118648 - RNA, 19 nt, Homo sapiens
  misc_RNA (1)...(19): siRNA sense strand
ucucucagcucauuaagau

SEQ ID NO: 118649 - RNA, 19 nt, Homo sapiens
  misc_RNA (1)...(19): siRNA sense strand
caaccugccuaauggcuau

SEQ ID NO: 118650 - RNA, 19 nt, Homo sapiens
  misc_RNA (1)...(19): siRNA sense strand
cagcaaggauggcagagau

SEQ ID NO: 118651 - RNA, 19 nt, Homo sapiens
  misc_RNA (1)...(19): siRNA sense strand
gaucgaugaugcccauaca

SEQ ID NO: 118652 - RNA, 19 nt, Homo sapiens
  misc_RNA (1)...(19): siRNA sense strand
gaguggagcaggcugaauu

SEQ ID NO: 118653 - RNA, 19 nt, Homo sapiens
  misc_RNA (1)...(19): siRNA sense strand
gguguucucucagcucauu

SEQ ID NO: 118654 - RNA, 19 nt, Homo sapiens
  misc_RNA (1)...(19): siRNA sense strand
ggacaugcaggucgugaga

SEQ ID NO: 118655 - RNA, 19 nt, Homo sapiens
  misc_RNA (1)...(19): siRNA sense strand
gcugauggccgaccuuguu

SEQ ID NO: 118656 - RNA, 19 nt, Homo sapiens
  misc_RNA (1)...(19): siRNA sense strand
ggacagcugcucggaaaug

SEQ ID NO: 118657 - RNA, 19 nt, Homo sapiens
  misc_RNA (1)...(19): siRNA sense strand
gauccaacuacaaggcuua

SEQ ID NO: 118658 - RNA, 19 nt, Homo sapiens
  misc_RNA (1)...(19): siRNA sense strand
gaccugcaacgcccagaua

SEQ ID NO: 118659 - RNA, 19 nt, Homo sapiens
  misc_RNA (1)...(19): siRNA sense strand
cagcugcucggaaauguuu

SEQ ID NO: 118660 - RNA, 19 nt, Homo sapiens
  misc_RNA (1)...(19): siRNA sense strand
acaugcaggucgugagaaa

SEQ ID NO: 118661 - RNA, 19 nt, Homo sapiens
  misc_RNA (1)...(19): siRNA sense strand
gguaauggacagcucaaug

SEQ ID NO: 118662 - RNA, 19 nt, Homo sapiens
  misc_RNA (1)...(19): siRNA sense strand
gaacuggaaggccaacaca

SEQ ID NO: 118663 - RNA, 19 nt, Homo sapiens
  misc_RNA (1)...(19): siRNA sense strand
cagacuggucgaaguauuu

SEQ ID NO: 118664 - RNA, 19 nt, Homo sapiens
  misc_RNA (1)...(19): siRNA sense strand
cgacauccgcauccagaaa

SEQ ID NO: 118665 - RNA, 19 nt, Homo sapiens
  misc_RNA (1)...(19): siRNA sense strand
ggacaugcccacgcuggaa

SEQ ID NO: 118666 - RNA, 19 nt, Homo sapiens
  misc_RNA (1)...(19): siRNA sense strand
gaauggagagauugagauc

SEQ ID NO: 118667 - RNA, 19 nt, Homo sapiens
  misc_RNA (1)...(19): siRNA sense strand
cauacagacuggucgaagu

SEQ ID NO: 118668 - RNA, 19 nt, Homo sapiens
  misc_RNA (1)...(19): siRNA sense strand
ccaaaguggugagcagauc

SEQ ID NO: 118669 - RNA, 19 nt, Homo sapiens
  misc_RNA (1)...(19): siRNA sense strand
gauuggagagcauguggaa

SEQ ID NO: 118670 - RNA, 19 nt, Homo sapiens
  misc_RNA (1)...(19): siRNA sense strand
cgugagaaaugggaccaaa

SEQ ID NO: 118671 - RNA, 19 nt, Homo sapiens
  misc_RNA (1)...(19): siRNA sense strand
cgaccuuguugucuccaaa

SEQ ID NO: 118672 - RNA, 19 nt, Homo sapiens
  misc_RNA (1)...(19): siRNA sense strand
gacagcugcucggaaaugu

SEQ ID NO: 118673 - RNA, 19 nt, Homo sapiens
  misc_RNA (1)...(19): siRNA sense strand
gaaugggaaagaucaaagu

SEQ ID NO: 118674 - RNA, 19 nt, Homo sapiens
  misc_RNA (1)...(19): siRNA sense strand
ggaaugggaaagaucaaag

SEQ ID NO: 118675 - RNA, 19 nt, Homo sapiens
  misc_RNA (1)...(19): siRNA sense strand
auacagacuggucgaagua

SEQ ID NO: 118676 - RNA, 19 nt, Homo sapiens
  misc_RNA (1)...(19): siRNA sense strand
gcaaccugaggaagucuuu

SEQ ID NO: 118677 - RNA, 19 nt, Homo sapiens
  misc_RNA (1)...(19): siRNA sense strand
gcagagauuacaucaucga

SEQ ID NO: 118678 - RNA, 19 nt, Homo sapiens
  misc_RNA (1)...(19): siRNA sense strand
ucuccaggauccagccuuu

SEQ ID NO: 118679 - RNA, 19 nt, Homo sapiens
  misc_RNA (1)...(19): siRNA sense strand
gcagcaagcccuggguguu

SEQ ID NO: 118680 - RNA, 19 nt, Homo sapiens
  misc_RNA (1)...(19): siRNA sense strand
ggucaucggccugcaguau

SEQ ID NO: 118681 - RNA, 19 nt, Homo sapiens
  misc_RNA (1)...(19): siRNA sense strand
gcuuguggagcaaacauuu

SEQ ID NO: 118682 - RNA, 19 nt, Homo sapiens
  misc_RNA (1)...(19): siRNA sense strand
guaauggacagcucaaugc

SEQ ID NO: 118683 - RNA, 19 nt, Homo sapiens
  misc_RNA (1)...(19): siRNA sense strand
uggccaaccugccuaaugg

SEQ ID NO: 118684 - RNA, 19 nt, Homo sapiens
  misc_RNA (1)...(19): siRNA sense strand
ccacgcccauuguucaaag

SEQ ID NO: 118685 - RNA, 19 nt, Homo sapiens
  misc_RNA (1)...(19): siRNA sense strand
acagacuggucgaaguauu

SEQ ID NO: 118686 - RNA, 19 nt, Homo sapiens
  misc_RNA (1)...(19): siRNA sense strand
ugagaaaugggaccaaagu

SEQ ID NO: 118687 - RNA, 19 nt, Homo sapiens
  misc_RNA (1)...(19): siRNA sense strand
gcugucaacucucucuacu

SEQ ID NO: 118688 - RNA, 19 nt, Homo sapiens
  misc_RNA (1)...(19): siRNA sense strand
gagaaaugggaccaaagug

SEQ ID NO: 118689 - RNA, 19 nt, Homo sapiens
  misc_RNA (1)...(19): siRNA sense strand
gcuggaaugggaaagauca

SEQ ID NO: 118690 - RNA, 19 nt, Homo sapiens
  misc_RNA (1)...(19): siRNA sense strand
gggaaagaucaaaguggaa

SEQ ID NO: 118691 - RNA, 19 nt, Homo sapiens
  misc_RNA (1)...(19): siRNA sense strand
gugaauggagagauugaga

SEQ ID NO: 118692 - RNA, 19 nt, Homo sapiens
  misc_RNA (1)...(19): siRNA sense strand
uugccagccuguucucuga

SEQ ID NO: 118693 - RNA, 19 nt, Homo sapiens
  misc_RNA (1)...(19): siRNA sense strand
guggugagcagauccuuca

SEQ ID NO: 118694 - RNA, 19 nt, Homo sapiens
  misc_RNA (1)...(19): siRNA sense strand
cugagaaguucccgcuugu

SEQ ID NO: 118695 - RNA, 19 nt, Homo sapiens
  misc_RNA (1)...(19): siRNA sense strand
ccaccgaggccuucaucga

SEQ ID NO: 118696 - RNA, 19 nt, Homo sapiens
  misc_RNA (1)...(19): siRNA sense strand
gaugaugcccauacagacu

SEQ ID NO: 118697 - RNA, 19 nt, Homo sapiens
  misc_RNA (1)...(19): siRNA sense strand
ucaucggccugcaguaugg

SEQ ID NO: 118698 - RNA, 19 nt, Homo sapiens
  misc_RNA (1)...(19): siRNA sense strand
uuggagagcauguggaaga

SEQ ID NO: 118699 - RNA, 19 nt, Homo sapiens
  misc_RNA (1)...(19): siRNA sense strand
ucgaugaugcccauacaga

SEQ ID NO: 118700 - RNA, 19 nt, Homo sapiens
  misc_RNA (1)...(19): siRNA sense strand
ggucacagccccacacuuc

SEQ ID NO: 118701 - RNA, 19 nt, Homo sapiens
  misc_RNA (1)...(19): siRNA sense strand
cagcaagcccuggguguuc

SEQ ID NO: 118702 - RNA, 19 nt, Homo sapiens
  misc_RNA (1)...(19): siRNA sense strand
ucuacuccgucuacaacuu

SEQ ID NO: 118703 - RNA, 19 nt, Homo sapiens
  misc_RNA (1)...(19): siRNA sense strand
ggaaaaccagcuugacuuc

SEQ ID NO: 118704 - RNA, 19 nt, Homo sapiens
  misc_RNA (1)...(19): siRNA sense strand
cagccuguucucugacuaa

SEQ ID NO: 118705 - RNA, 19 nt, Homo sapiens
  misc_RNA (1)...(19): siRNA sense strand
cuaacagccucagcacauc

SEQ ID NO: 118706 - RNA, 19 nt, Homo sapiens
  misc_RNA (1)...(19): siRNA sense strand
uacaaggcuuacaggagaa

SEQ ID NO: 118707 - RNA, 19 nt, Homo sapiens
  misc_RNA (1)...(19): siRNA sense strand
cuuguugucuccaaaauga

SEQ ID NO: 118708 - RNA, 19 nt, Homo sapiens
  misc_RNA (1)...(19): siRNA sense strand
gaaccuagcugccuaugug

SEQ ID NO: 118709 - RNA, 19 nt, Homo sapiens
  misc_RNA (1)...(19): siRNA sense strand
gaaggugaauggagagauu

SEQ ID NO: 118710 - RNA, 19 nt, Homo sapiens
  misc_RNA (1)...(19): siRNA sense strand
ggagcaggcugaauucuca

SEQ ID NO: 118711 - RNA, 19 nt, Homo sapiens
  misc_RNA (1)...(19): siRNA sense strand
gcaaggauggcagagauua

SEQ ID NO: 118712 - RNA, 19 nt, Homo sapiens
  misc_RNA (1)...(19): siRNA sense strand
ggacaucugugccgucaag

SEQ ID NO: 118713 - RNA, 19 nt, Homo sapiens
  misc_RNA (1)...(19): siRNA sense strand
ucauuaagaucuuccauuc

SEQ ID NO: 118714 - RNA, 19 nt, Homo sapiens
  misc_RNA (1)...(19): siRNA sense strand
guggacagcugcucggaaa

SEQ ID NO: 118715 - RNA, 19 nt, Homo sapiens
  misc_RNA (1)...(19): siRNA sense strand
ggaaagaucaaaguggaaa

SEQ ID NO: 118716 - RNA, 19 nt, Homo sapiens
  misc_RNA (1)...(19): siRNA sense strand
uggcagagauuacaucauc

SEQ ID NO: 118717 - RNA, 19 nt, Homo sapiens
  misc_RNA (1)...(19): siRNA sense strand
ucucucagcucauuaagau

SEQ ID NO: 118718 - RNA, 19 nt, Homo sapiens
  misc_RNA (1)...(19): siRNA sense strand
caaccugccuaauggcuau

SEQ ID NO: 118719 - RNA, 19 nt, Homo sapiens
  misc_RNA (1)...(19): siRNA sense strand
cagcaaggauggcagagau

SEQ ID NO: 118720 - RNA, 19 nt, Homo sapiens
  misc_RNA (1)...(19): siRNA sense strand
gaucgaugaugcccauaca

SEQ ID NO: 118721 - RNA, 19 nt, Homo sapiens
  misc_RNA (1)...(19): siRNA sense strand
gaguggagcaggcugaauu

SEQ ID NO: 118722 - RNA, 19 nt, Homo sapiens
  misc_RNA (1)...(19): siRNA sense strand
gguguucucucagcucauu

SEQ ID NO: 118723 - RNA, 19 nt, Homo sapiens
  misc_RNA (1)...(19): siRNA sense strand
ggacaugcaggucgugaga

SEQ ID NO: 118724 - RNA, 19 nt, Homo sapiens
  misc_RNA (1)...(19): siRNA sense strand
gcugauggccgaccuuguu

SEQ ID NO: 118725 - RNA, 19 nt, Homo sapiens
  misc_RNA (1)...(19): siRNA sense strand
ggacagcugcucggaaaug

SEQ ID NO: 118726 - RNA, 19 nt, Homo sapiens
  misc_RNA (1)...(19): siRNA sense strand
gauccaacuacaaggcuua

SEQ ID NO: 118727 - RNA, 19 nt, Homo sapiens
  misc_RNA (1)...(19): siRNA sense strand
gaccugcaacgcccagaua

SEQ ID NO: 118728 - RNA, 19 nt, Homo sapiens
  misc_RNA (1)...(19): siRNA sense strand
cagcugcucggaaauguuu

SEQ ID NO: 118729 - RNA, 19 nt, Homo sapiens
  misc_RNA (1)...(19): siRNA sense strand
acaugcaggucgugagaaa

SEQ ID NO: 118730 - RNA, 19 nt, Homo sapiens
  misc_RNA (1)...(19): siRNA sense strand
gguaauggacagcucaaug

SEQ ID NO: 118731 - RNA, 19 nt, Homo sapiens
  misc_RNA (1)...(19): siRNA sense strand
gaacuggaaggccaacaca

SEQ ID NO: 118732 - RNA, 19 nt, Homo sapiens
  misc_RNA (1)...(19): siRNA sense strand
cagacuggucgaaguauuu

SEQ ID NO: 118733 - RNA, 19 nt, Homo sapiens
  misc_RNA (1)...(19): siRNA sense strand
cgacauccgcauccagaaa

SEQ ID NO: 118734 - RNA, 19 nt, Homo sapiens
  misc_RNA (1)...(19): siRNA sense strand
ggacaugcccacgcuggaa

SEQ ID NO: 118735 - RNA, 19 nt, Homo sapiens
  misc_RNA (1)...(19): siRNA sense strand
gaauggagagauugagauc

SEQ ID NO: 118736 - RNA, 19 nt, Homo sapiens
  misc_RNA (1)...(19): siRNA sense strand
cauacagacuggucgaagu

SEQ ID NO: 118737 - RNA, 19 nt, Homo sapiens
  misc_RNA (1)...(19): siRNA sense strand
ccaaaguggugagcagauc

SEQ ID NO: 118738 - RNA, 19 nt, Homo sapiens
  misc_RNA (1)...(19): siRNA sense strand
gauuggagagcauguggaa

SEQ ID NO: 118739 - RNA, 19 nt, Homo sapiens
  misc_RNA (1)...(19): siRNA sense strand
cgugagaaaugggaccaaa

SEQ ID NO: 118740 - RNA, 19 nt, Homo sapiens
  misc_RNA (1)...(19): siRNA sense strand
cgaccuuguugucuccaaa

SEQ ID NO: 118741 - RNA, 19 nt, Homo sapiens
  misc_RNA (1)...(19): siRNA sense strand
gacagcugcucggaaaugu

SEQ ID NO: 118742 - RNA, 19 nt, Homo sapiens
  misc_RNA (1)...(19): siRNA sense strand
gaaugggaaagaucaaagu

SEQ ID NO: 118743 - RNA, 19 nt, Homo sapiens
  misc_RNA (1)...(19): siRNA sense strand
ggaaugggaaagaucaaag

SEQ ID NO: 118744 - RNA, 19 nt, Homo sapiens
  misc_RNA (1)...(19): siRNA sense strand
auacagacuggucgaagua

SEQ ID NO: 118745 - RNA, 19 nt, Homo sapiens
  misc_RNA (1)...(19): siRNA sense strand
gcagagauuacaucaucga

SEQ ID NO: 118746 - RNA, 19 nt, Homo sapiens
  misc_RNA (1)...(19): siRNA sense strand
ucuccaggauccagccuuu

SEQ ID NO: 118747 - RNA, 19 nt, Homo sapiens
  misc_RNA (1)...(19): siRNA sense strand
gcagcaagcccuggguguu

SEQ ID NO: 118748 - RNA, 19 nt, Homo sapiens
  misc_RNA (1)...(19): siRNA sense strand
ggucaucggccugcaguau

SEQ ID NO: 118749 - RNA, 19 nt, Homo sapiens
  misc_RNA (1)...(19): siRNA sense strand
ccacgcccauuguucaaag

SEQ ID NO: 118750 - RNA, 19 nt, Homo sapiens
  misc_RNA (1)...(19): siRNA sense strand
guaauggacagcucaaugc

SEQ ID NO: 118751 - RNA, 19 nt, Homo sapiens
  misc_RNA (1)...(19): siRNA sense strand
uggccaaccugccuaaugg

SEQ ID NO: 118752 - RNA, 19 nt, Homo sapiens
  misc_RNA (1)...(19): siRNA sense strand
gcuuguggagcaaacauuu

SEQ ID NO: 118753 - RNA, 19 nt, Homo sapiens
  misc_RNA (1)...(19): siRNA sense strand
acagacuggucgaaguauu

SEQ ID NO: 118754 - RNA, 19 nt, Homo sapiens
  misc_RNA (1)...(19): siRNA sense strand
ugagaaaugggaccaaagu

SEQ ID NO: 118755 - RNA, 19 nt, Homo sapiens
  misc_RNA (1)...(19): siRNA sense strand
gcugucaacucucucuacu

SEQ ID NO: 118756 - RNA, 19 nt, Homo sapiens
  misc_RNA (1)...(19): siRNA sense strand
gagaaaugggaccaaagug

SEQ ID NO: 118757 - RNA, 19 nt, Homo sapiens
  misc_RNA (1)...(19): siRNA sense strand
gcuggaaugggaaagauca

SEQ ID NO: 118758 - RNA, 19 nt, Homo sapiens
  misc_RNA (1)...(19): siRNA sense strand
gggaaagaucaaaguggaa

SEQ ID NO: 118759 - RNA, 19 nt, Homo sapiens
  misc_RNA (1)...(19): siRNA sense strand
gugaauggagagauugaga

SEQ ID NO: 118760 - RNA, 19 nt, Homo sapiens
  misc_RNA (1)...(19): siRNA sense strand
guggugagcagauccuuca

SEQ ID NO: 118761 - RNA, 19 nt, Homo sapiens
  misc_RNA (1)...(19): siRNA sense strand
gaugaugcccauacagacu

SEQ ID NO: 118762 - RNA, 19 nt, Homo sapiens
  misc_RNA (1)...(19): siRNA sense strand
ccaccgaggccuucaucga

SEQ ID NO: 118763 - RNA, 19 nt, Homo sapiens
  misc_RNA (1)...(19): siRNA sense strand
cugagaaguucccgcuugu

SEQ ID NO: 118764 - RNA, 19 nt, Homo sapiens
  misc_RNA (1)...(19): siRNA sense strand
ucaucggccugcaguaugg

SEQ ID NO: 118765 - RNA, 19 nt, Homo sapiens
  misc_RNA (1)...(19): siRNA sense strand
uuggagagcauguggaaga

SEQ ID NO: 118766 - RNA, 19 nt, Homo sapiens
  misc_RNA (1)...(19): siRNA sense strand
ucgaugaugcccauacaga

SEQ ID NO: 118767 - RNA, 19 nt, Homo sapiens
  misc_RNA (1)...(19): siRNA sense strand
ggucacagccccacacuuc

SEQ ID NO: 118768 - RNA, 19 nt, Homo sapiens
  misc_RNA (1)...(19): siRNA sense strand
cagcaagcccuggguguuc

SEQ ID NO: 118769 - RNA, 19 nt, Homo sapiens
  misc_RNA (1)...(19): siRNA sense strand
ucuacuccgucuacaacuu

SEQ ID NO: 118770 - RNA, 19 nt, Homo sapiens
  misc_RNA (1)...(19): siRNA sense strand
ggaaaaccagcuugacuuc

SEQ ID NO: 118771 - RNA, 19 nt, Homo sapiens
  misc_RNA (1)...(19): siRNA sense strand
uacaaggcuuacaggagaa

SEQ ID NO: 118772 - RNA, 19 nt, Homo sapiens
  misc_RNA (1)...(19): siRNA sense strand
cuuguugucuccaaaauga

SEQ ID NO: 118773 - RNA, 19 nt, Homo sapiens
  misc_RNA (1)...(19): siRNA sense strand
gaaccuagcugccuaugug

SEQ ID NO: 118774 - RNA, 19 nt, Homo sapiens
  misc_RNA (1)...(19): siRNA sense strand
gaaggugaauggagagauu

SEQ ID NO: 118775 - RNA, 19 nt, Homo sapiens
  misc_RNA (1)...(19): siRNA sense strand
ggagcaggcugaauucuca

SEQ ID NO: 118776 - RNA, 19 nt, Homo sapiens
  misc_RNA (1)...(19): siRNA sense strand
gcaaggauggcagagauua

SEQ ID NO: 118777 - RNA, 19 nt, Homo sapiens
  misc_RNA (1)...(19): siRNA sense strand
ggacaucugugccgucaag

SEQ ID NO: 118778 - RNA, 19 nt, Homo sapiens
  misc_RNA (1)...(19): siRNA sense strand
ucauuaagaucuuccauuc

SEQ ID NO: 118779 - RNA, 19 nt, Homo sapiens
  misc_RNA (1)...(19): siRNA sense strand
guggacagcugcucggaaa

SEQ ID NO: 118780 - RNA, 19 nt, Homo sapiens
  misc_RNA (1)...(19): siRNA sense strand
ggaaagaucaaaguggaaa

SEQ ID NO: 118781 - RNA, 19 nt, Homo sapiens
  misc_RNA (1)...(19): siRNA sense strand
uggcagagauuacaucauc

SEQ ID NO: 118782 - RNA, 19 nt, Homo sapiens
  misc_RNA (1)...(19): siRNA sense strand
ucucucagcucauuaagau

SEQ ID NO: 118783 - RNA, 19 nt, Homo sapiens
  misc_RNA (1)...(19): siRNA sense strand
caaccugccuaauggcuau

SEQ ID NO: 118784 - RNA, 19 nt, Homo sapiens
  misc_RNA (1)...(19): siRNA sense strand
cagcaaggauggcagagau

SEQ ID NO: 118785 - RNA, 19 nt, Homo sapiens
  misc_RNA (1)...(19): siRNA sense strand
gaucgaugaugcccauaca

SEQ ID NO: 118786 - RNA, 19 nt, Homo sapiens
  misc_RNA (1)...(19): siRNA sense strand
gaguggagcaggcugaauu

SEQ ID NO: 118787 - RNA, 19 nt, Homo sapiens
  misc_RNA (1)...(19): siRNA sense strand
gguguucucucagcucauu

SEQ ID NO: 118788 - RNA, 19 nt, Homo sapiens
  misc_RNA (1)...(19): siRNA sense strand
ggacaugcaggucgugaga

SEQ ID NO: 118789 - RNA, 19 nt, Homo sapiens
  misc_RNA (1)...(19): siRNA sense strand
gcugauggccgaccuuguu

SEQ ID NO: 118790 - RNA, 19 nt, Homo sapiens
  misc_RNA (1)...(19): siRNA sense strand
ggacagcugcucggaaaug

SEQ ID NO: 118791 - RNA, 19 nt, Homo sapiens
  misc_RNA (1)...(19): siRNA sense strand
gauccaacuacaaggcuua

SEQ ID NO: 118792 - RNA, 19 nt, Homo sapiens
  misc_RNA (1)...(19): siRNA sense strand
gaccugcaacgcccagaua

SEQ ID NO: 118793 - RNA, 19 nt, Homo sapiens
  misc_RNA (1)...(19): siRNA sense strand
cagcugcucggaaauguuu

SEQ ID NO: 118794 - RNA, 19 nt, Homo sapiens
  misc_RNA (1)...(19): siRNA sense strand
acaugcaggucgugagaaa

SEQ ID NO: 118795 - RNA, 19 nt, Homo sapiens
  misc_RNA (1)...(19): siRNA sense strand
gguaauggacagcucaaug

SEQ ID NO: 118796 - RNA, 19 nt, Homo sapiens
  misc_RNA (1)...(19): siRNA sense strand
gaacuggaaggccaacaca

SEQ ID NO: 118797 - RNA, 19 nt, Homo sapiens
  misc_RNA (1)...(19): siRNA sense strand
cagacuggucgaaguauuu

SEQ ID NO: 118798 - RNA, 19 nt, Homo sapiens
  misc_RNA (1)...(19): siRNA sense strand
cgacauccgcauccagaaa

SEQ ID NO: 118799 - RNA, 19 nt, Homo sapiens
  misc_RNA (1)...(19): siRNA sense strand
ggacaugcccacgcuggaa

SEQ ID NO: 118800 - RNA, 19 nt, Homo sapiens
  misc_RNA (1)...(19): siRNA sense strand
gaauggagagauugagauc

SEQ ID NO: 118801 - RNA, 19 nt, Homo sapiens
  misc_RNA (1)...(19): siRNA sense strand
cauacagacuggucgaagu

SEQ ID NO: 118802 - RNA, 19 nt, Homo sapiens
  misc_RNA (1)...(19): siRNA sense strand
ccaaaguggugagcagauc

SEQ ID NO: 118803 - RNA, 19 nt, Homo sapiens
  misc_RNA (1)...(19): siRNA sense strand
gauuggagagcauguggaa

SEQ ID NO: 118804 - RNA, 19 nt, Homo sapiens
  misc_RNA (1)...(19): siRNA sense strand
cgugagaaaugggaccaaa

SEQ ID NO: 118805 - RNA, 19 nt, Homo sapiens
  misc_RNA (1)...(19): siRNA sense strand
cgaccuuguugucuccaaa

SEQ ID NO: 118806 - RNA, 19 nt, Homo sapiens
  misc_RNA (1)...(19): siRNA sense strand
gacagcugcucggaaaugu

SEQ ID NO: 118807 - RNA, 19 nt, Homo sapiens
  misc_RNA (1)...(19): siRNA sense strand
gaaugggaaagaucaaagu

SEQ ID NO: 118808 - RNA, 19 nt, Homo sapiens
  misc_RNA (1)...(19): siRNA sense strand
ggaaugggaaagaucaaag

SEQ ID NO: 118809 - RNA, 19 nt, Homo sapiens
  misc_RNA (1)...(19): siRNA sense strand
auacagacuggucgaagua

SEQ ID NO: 118810 - RNA, 19 nt, Homo sapiens
  misc_RNA (1)...(19): siRNA sense strand
gcagagauuacaucaucga

SEQ ID NO: 118811 - RNA, 19 nt, Homo sapiens
  misc_RNA (1)...(19): siRNA sense strand
ucuccaggauccagccuuu

SEQ ID NO: 118812 - RNA, 19 nt, Homo sapiens
  misc_RNA (1)...(19): siRNA sense strand
gcagcaagcccuggguguu

SEQ ID NO: 118813 - RNA, 19 nt, Homo sapiens
  misc_RNA (1)...(19): siRNA sense strand
ggucaucggccugcaguau

SEQ ID NO: 118814 - RNA, 19 nt, Homo sapiens
  misc_RNA (1)...(19): siRNA sense strand
ccacgcccauuguucaaag

SEQ ID NO: 118815 - RNA, 19 nt, Homo sapiens
  misc_RNA (1)...(19): siRNA sense strand
guaauggacagcucaaugc

SEQ ID NO: 118816 - RNA, 19 nt, Homo sapiens
  misc_RNA (1)...(19): siRNA sense strand
uggccaaccugccuaaugg

SEQ ID NO: 118817 - RNA, 19 nt, Homo sapiens
  misc_RNA (1)...(19): siRNA sense strand
gcuuguggagcaaacauuu

SEQ ID NO: 118818 - RNA, 19 nt, Homo sapiens
  misc_RNA (1)...(19): siRNA sense strand
acagacuggucgaaguauu

SEQ ID NO: 118819 - RNA, 19 nt, Homo sapiens
  misc_RNA (1)...(19): siRNA sense strand
ugagaaaugggaccaaagu

SEQ ID NO: 118820 - RNA, 19 nt, Homo sapiens
  misc_RNA (1)...(19): siRNA sense strand
gcugucaacucucucuacu

SEQ ID NO: 118821 - RNA, 19 nt, Homo sapiens
  misc_RNA (1)...(19): siRNA sense strand
gagaaaugggaccaaagug

SEQ ID NO: 118822 - RNA, 19 nt, Homo sapiens
  misc_RNA (1)...(19): siRNA sense strand
gcuggaaugggaaagauca

SEQ ID NO: 118823 - RNA, 19 nt, Homo sapiens
  misc_RNA (1)...(19): siRNA sense strand
gggaaagaucaaaguggaa

SEQ ID NO: 118824 - RNA, 19 nt, Homo sapiens
  misc_RNA (1)...(19): siRNA sense strand
gugaauggagagauugaga

SEQ ID NO: 118825 - RNA, 19 nt, Homo sapiens
  misc_RNA (1)...(19): siRNA sense strand
guggugagcagauccuuca

SEQ ID NO: 118826 - RNA, 19 nt, Homo sapiens
  misc_RNA (1)...(19): siRNA sense strand
gaugaugcccauacagacu

SEQ ID NO: 118827 - RNA, 19 nt, Homo sapiens
  misc_RNA (1)...(19): siRNA sense strand
ccaccgaggccuucaucga

SEQ ID NO: 118828 - RNA, 19 nt, Homo sapiens
  misc_RNA (1)...(19): siRNA sense strand
cugagaaguucccgcuugu

SEQ ID NO: 118829 - RNA, 19 nt, Homo sapiens
  misc_RNA (1)...(19): siRNA sense strand
ucaucggccugcaguaugg

SEQ ID NO: 118830 - RNA, 19 nt, Homo sapiens
  misc_RNA (1)...(19): siRNA sense strand
uuggagagcauguggaaga

SEQ ID NO: 118831 - RNA, 19 nt, Homo sapiens
  misc_RNA (1)...(19): siRNA sense strand
ucgaugaugcccauacaga

SEQ ID NO: 118832 - RNA, 19 nt, Homo sapiens
  misc_RNA (1)...(19): siRNA sense strand
ggucacagccccacacuuc

SEQ ID NO: 118833 - RNA, 19 nt, Homo sapiens
  misc_RNA (1)...(19): siRNA sense strand
cagcaagcccuggguguuc

SEQ ID NO: 118834 - RNA, 19 nt, Homo sapiens
  misc_RNA (1)...(19): siRNA sense strand
ucuacuccgucuacaacuu

SEQ ID NO: 118835 - RNA, 19 nt, Homo sapiens
  misc_RNA (1)...(19): siRNA sense strand
ggaaaaccagcuugacuuc

SEQ ID NO: 118836 - RNA, 19 nt, Homo sapiens
  misc_RNA (1)...(19): siRNA sense strand
uacaaggcuuacaggagaa

SEQ ID NO: 118837 - RNA, 19 nt, Homo sapiens
  misc_RNA (1)...(19): siRNA sense strand
cuuguugucuccaaaauga

SEQ ID NO: 118838 - RNA, 19 nt, Homo sapiens
  misc_RNA (1)...(19): siRNA sense strand
caccucggcuaccuacuua

SEQ ID NO: 118839 - RNA, 19 nt, Homo sapiens
  misc_RNA (1)...(19): siRNA sense strand
cgacaguguuuccgugcaa

SEQ ID NO: 118840 - RNA, 19 nt, Homo sapiens
  misc_RNA (1)...(19): siRNA sense strand
uuucaacacucacccaaga

SEQ ID NO: 118841 - RNA, 19 nt, Homo sapiens
  misc_RNA (1)...(19): siRNA sense strand
ccaguuccacuuugcguuu

SEQ ID NO: 118842 - RNA, 19 nt, Homo sapiens
  misc_RNA (1)...(19): siRNA sense strand
gcucacacugcccaucuuu

SEQ ID NO: 118843 - RNA, 19 nt, Homo sapiens
  misc_RNA (1)...(19): siRNA sense strand
ucaacacucacccaagauu

SEQ ID NO: 118844 - RNA, 19 nt, Homo sapiens
  misc_RNA (1)...(19): siRNA sense strand
caacacucacccaagauuc

SEQ ID NO: 118845 - RNA, 19 nt, Homo sapiens
  misc_RNA (1)...(19): siRNA sense strand
ucugugacgugcuccaguu

SEQ ID NO: 118846 - RNA, 19 nt, Homo sapiens
  misc_RNA (1)...(19): siRNA sense strand
ccaccucggcuaccuacuu

SEQ ID NO: 118847 - RNA, 19 nt, Homo sapiens
  misc_RNA (1)...(19): siRNA sense strand
gugcuccaguuccacuuug

SEQ ID NO: 118848 - RNA, 19 nt, Homo sapiens
  misc_RNA (1)...(19): siRNA sense strand
ggccaugccguucaacuca

SEQ ID NO: 118849 - RNA, 19 nt, Homo sapiens
  misc_RNA (1)...(19): siRNA sense strand
gcaccaccucggcuaccua

SEQ ID NO: 118850 - RNA, 19 nt, Homo sapiens
  misc_RNA (1)...(19): siRNA sense strand
ggcuguuccucucucuuga

SEQ ID NO: 118851 - RNA, 19 nt, Homo sapiens
  misc_RNA (1)...(19): siRNA sense strand
gcacccacaggcacuaugg

SEQ ID NO: 118852 - RNA, 19 nt, Homo sapiens
  misc_RNA (1)...(19): siRNA sense strand
ucucuugccugggcuuugu

SEQ ID NO: 118853 - RNA, 19 nt, Homo sapiens
  misc_RNA (1)...(19): siRNA sense strand
gcaagcagcuggccaccaa

SEQ ID NO: 118854 - RNA, 19 nt, Homo sapiens
  misc_RNA (1)...(19): siRNA sense strand
cgagaucgcucaggacuuu

SEQ ID NO: 118855 - RNA, 19 nt, Homo sapiens
  misc_RNA (1)...(19): siRNA sense strand
gaaguccacugagcugcua

SEQ ID NO: 118856 - RNA, 19 nt, Homo sapiens
  misc_RNA (1)...(19): siRNA sense strand
ccaaacgggucaccaucau

SEQ ID NO: 118857 - RNA, 19 nt, Homo sapiens
  misc_RNA (1)...(19): siRNA sense strand
caaccugugugucauccau

SEQ ID NO: 118858 - RNA, 19 nt, Homo sapiens
  misc_RNA (1)...(19): siRNA sense strand
caucaugccuaaggacauc

SEQ ID NO: 118859 - RNA, 19 nt, Homo sapiens
  misc_RNA (1)...(19): siRNA sense strand
gggucaccaucaugccuaa

SEQ ID NO: 118860 - RNA, 19 nt, Homo sapiens
  misc_RNA (1)...(19): siRNA sense strand
gcuaccagaaguccacuga

SEQ ID NO: 118861 - RNA, 19 nt, Homo sapiens
  misc_RNA (1)...(19): siRNA sense strand
ucaccaucaugccuaagga

SEQ ID NO: 118862 - RNA, 19 nt, Homo sapiens
  misc_RNA (1)...(19): siRNA sense strand
gccaaacgggucaccauca

SEQ ID NO: 118863 - RNA, 19 nt, Homo sapiens
  misc_RNA (1)...(19): siRNA sense strand
caaacgggucaccaucaug

SEQ ID NO: 118864 - RNA, 19 nt, Homo sapiens
  misc_RNA (1)...(19): siRNA sense strand
gaaaugaccuuggagauug

SEQ ID NO: 118865 - RNA, 19 nt, Homo sapiens
  misc_RNA (1)...(19): siRNA sense strand
gaaccaaagucaucaagaa

SEQ ID NO: 118866 - RNA, 19 nt, Homo sapiens
  misc_RNA (1)...(19): siRNA sense strand
gagcaagucuguaccauug

SEQ ID NO: 118867 - RNA, 19 nt, Homo sapiens
  misc_RNA (1)...(19): siRNA sense strand
gagcaaggcugggaguaua

SEQ ID NO: 118868 - RNA, 19 nt, Homo sapiens
  misc_RNA (1)...(19): siRNA sense strand
guacagccgugcagucuuu

SEQ ID NO: 118869 - RNA, 19 nt, Homo sapiens
  misc_RNA (1)...(19): siRNA sense strand
ggacaagacugagagcaaa

SEQ ID NO: 118870 - RNA, 19 nt, Homo sapiens
  misc_RNA (1)...(19): siRNA sense strand
gaacuaugcugccaugaag

SEQ ID NO: 118871 - RNA, 19 nt, Homo sapiens
  misc_RNA (1)...(19): siRNA sense strand
cuagaaagcugcugucaga

SEQ ID NO: 118872 - RNA, 19 nt, Homo sapiens
  misc_RNA (1)...(19): siRNA sense strand
acacacagcuggagaaugu

SEQ ID NO: 118873 - RNA, 19 nt, Homo sapiens
  misc_RNA (1)...(19): siRNA sense strand
ggacagaccguguaauguu

SEQ ID NO: 118874 - RNA, 19 nt, Homo sapiens
  misc_RNA (1)...(19): siRNA sense strand
ggaaacagcccacucuuca

SEQ ID NO: 118875 - RNA, 19 nt, Homo sapiens
  misc_RNA (1)...(19): siRNA sense strand
ggaccucccuucaacauca

SEQ ID NO: 118876 - RNA, 19 nt, Homo sapiens
  misc_RNA (1)...(19): siRNA sense strand
gaagaugagcgacauuuau

SEQ ID NO: 118877 - RNA, 19 nt, Homo sapiens
  misc_RNA (1)...(19): siRNA sense strand
gaagagaaccaaagucauc

SEQ ID NO: 118878 - RNA, 19 nt, Homo sapiens
  misc_RNA (1)...(19): siRNA sense strand
gacagaccguguaauguuu

SEQ ID NO: 118879 - RNA, 19 nt, Homo sapiens
  misc_RNA (1)...(19): siRNA sense strand
gaagugcgccuacaucuag

SEQ ID NO: 118880 - RNA, 19 nt, Homo sapiens
  misc_RNA (1)...(19): siRNA sense strand
ggaaaugaccuuggagauu

SEQ ID NO: 118881 - RNA, 19 nt, Homo sapiens
  misc_RNA (1)...(19): siRNA sense strand
ugaaauauccgauggagaa

SEQ ID NO: 118882 - RNA, 19 nt, Homo sapiens
  misc_RNA (1)...(19): siRNA sense strand
gaggaagaguucaucgauu

SEQ ID NO: 118883 - RNA, 19 nt, Homo sapiens
  misc_RNA (1)...(19): siRNA sense strand
caacuacuguggcaagaau

SEQ ID NO: 118884 - RNA, 19 nt, Homo sapiens
  misc_RNA (1)...(19): siRNA sense strand
gagaaggaccuaaagauca

SEQ ID NO: 118885 - RNA, 19 nt, Homo sapiens
  misc_RNA (1)...(19): siRNA sense strand
caucuacgcugcuacaugu

SEQ ID NO: 118886 - RNA, 19 nt, Homo sapiens
  misc_RNA (1)...(19): siRNA sense strand
ggagggaucucagccaaau

SEQ ID NO: 118887 - RNA, 19 nt, Homo sapiens
  misc_RNA (1)...(19): siRNA sense strand
gagacaagcguguggcaua

SEQ ID NO: 118888 - RNA, 19 nt, Homo sapiens
  misc_RNA (1)...(19): siRNA sense strand
uggaagagguguuugagaa

SEQ ID NO: 118889 - RNA, 19 nt, Homo sapiens
  misc_RNA (1)...(19): siRNA sense strand
agaagacucugcuccauga

SEQ ID NO: 118890 - RNA, 19 nt, Homo sapiens
  misc_RNA (1)...(19): siRNA sense strand
gacaaguucuccuuugaug

SEQ ID NO: 118891 - RNA, 19 nt, Homo sapiens
  misc_RNA (1)...(19): siRNA sense strand
gggaugagcccaacaugaa

SEQ ID NO: 118892 - RNA, 19 nt, Homo sapiens
  misc_RNA (1)...(19): siRNA sense strand
gaaaagaccccucugaaga

SEQ ID NO: 118893 - RNA, 19 nt, Homo sapiens
  misc_RNA (1)...(19): siRNA sense strand
gugaaagguuggaugauug

SEQ ID NO: 118894 - RNA, 19 nt, Homo sapiens
  misc_RNA (1)...(19): siRNA sense strand
guacgaccaugacacuuau

SEQ ID NO: 118895 - RNA, 19 nt, Homo sapiens
  misc_RNA (1)...(19): siRNA sense strand
cguguaauguuucaggaua

SEQ ID NO: 118896 - RNA, 19 nt, Homo sapiens
  misc_RNA (1)...(19): siRNA sense strand
ggaaugagggauuugaaug

SEQ ID NO: 118897 - RNA, 19 nt, Homo sapiens
  misc_RNA (1)...(19): siRNA sense strand
gcacaacgggccucaccua

SEQ ID NO: 118898 - RNA, 19 nt, Homo sapiens
  misc_RNA (1)...(19): siRNA sense strand
agaaggaguucaaccaguu

SEQ ID NO: 118899 - RNA, 19 nt, Homo sapiens
  misc_RNA (1)...(19): siRNA sense strand
gauggacgaugccgugaug

SEQ ID NO: 118900 - RNA, 19 nt, Homo sapiens
  misc_RNA (1)...(19): siRNA sense strand
gagaugaggcggagccauu

SEQ ID NO: 118901 - RNA, 19 nt, Homo sapiens
  misc_RNA (1)...(19): siRNA sense strand
gggagcugcuggccucuuu

SEQ ID NO: 118902 - RNA, 19 nt, Homo sapiens
  misc_RNA (1)...(19): siRNA sense strand
ccaaauggaagcacugaaa

SEQ ID NO: 118903 - RNA, 19 nt, Homo sapiens
  misc_RNA (1)...(19): siRNA sense strand
gagcuucggugugaacaga

SEQ ID NO: 118904 - RNA, 19 nt, Homo sapiens
  misc_RNA (1)...(19): siRNA sense strand
ggagaaggaccuaaagauc

SEQ ID NO: 118905 - RNA, 19 nt, Homo sapiens
  misc_RNA (1)...(19): siRNA sense strand
ggaagaaaucagugaguga

SEQ ID NO: 118906 - RNA, 19 nt, Homo sapiens
  misc_RNA (1)...(19): siRNA sense strand
ggacaucagccauagaauc

SEQ ID NO: 118907 - RNA, 19 nt, Homo sapiens
  misc_RNA (1)...(19): siRNA sense strand
cagaagagggugagaagaa

SEQ ID NO: 118908 - RNA, 19 nt, Homo sapiens
  misc_RNA (1)...(19): siRNA sense strand
gagaagaugagcgacauuu

SEQ ID NO: 118909 - RNA, 19 nt, Homo sapiens
  misc_RNA (1)...(19): siRNA sense strand
gaugugggucgaccuauuu

SEQ ID NO: 118910 - RNA, 19 nt, Homo sapiens
  misc_RNA (1)...(19): siRNA sense strand
aggaagaguucaucgauug

SEQ ID NO: 118911 - RNA, 19 nt, Homo sapiens
  misc_RNA (1)...(19): siRNA sense strand
gugaacagacccacgauuu

SEQ ID NO: 118912 - RNA, 19 nt, Homo sapiens
  misc_RNA (1)...(19): siRNA sense strand
gaagugggaagaugaggaa

SEQ ID NO: 118913 - RNA, 19 nt, Homo sapiens
  misc_RNA (1)...(19): siRNA sense strand
gaagcuacagacaaucuuu

SEQ ID NO: 118914 - RNA, 19 nt, Homo sapiens
  misc_RNA (1)...(19): siRNA sense strand
uggcucagcugacggauga

SEQ ID NO: 118915 - RNA, 19 nt, Homo sapiens
  misc_RNA (1)...(19): siRNA sense strand
ggccagaggcuaccugaaa

SEQ ID NO: 118916 - RNA, 19 nt, Homo sapiens
  misc_RNA (1)...(19): siRNA sense strand
gaugauuggcuuugaagaa

SEQ ID NO: 118917 - RNA, 19 nt, Homo sapiens
  misc_RNA (1)...(19): siRNA sense strand
gggaagacgugcucaucga

SEQ ID NO: 118918 - RNA, 19 nt, Homo sapiens
  misc_RNA (1)...(19): siRNA sense strand
ucaggaaccuccggaagaa

SEQ ID NO: 118919 - RNA, 19 nt, Homo sapiens
  misc_RNA (1)...(19): siRNA sense strand
gaccugggcuggagauugg

SEQ ID NO: 118920 - RNA, 19 nt, Homo sapiens
  misc_RNA (1)...(19): siRNA sense strand
gcgcaaguacucccuguuu

SEQ ID NO: 118921 - RNA, 19 nt, Homo sapiens
  misc_RNA (1)...(19): siRNA sense strand
gcuaccaccuaccugagua

SEQ ID NO: 118922 - RNA, 19 nt, Homo sapiens
  misc_RNA (1)...(19): siRNA sense strand
cagacaaaccgcaggauuu

SEQ ID NO: 118923 - RNA, 19 nt, Homo sapiens
  misc_RNA (1)...(19): siRNA sense strand
gcauugugguggagcugua

SEQ ID NO: 118924 - RNA, 19 nt, Homo sapiens
  misc_RNA (1)...(19): siRNA sense strand
gaggacaucagccauagaa

SEQ ID NO: 118925 - RNA, 19 nt, Homo sapiens
  misc_RNA (1)...(19): siRNA sense strand
ccucagacuuggaugacua

SEQ ID NO: 118926 - RNA, 19 nt, Homo sapiens
  misc_RNA (1)...(19): siRNA sense strand
gugggaagcuacagacaau

SEQ ID NO: 118927 - RNA, 19 nt, Homo sapiens
  misc_RNA (1)...(19): siRNA sense strand
ggaagaaccccaacuuuga

SEQ ID NO: 118928 - RNA, 19 nt, Homo sapiens
  misc_RNA (1)...(19): siRNA sense strand
ugcggaacaugaagaguua

SEQ ID NO: 118929 - RNA, 19 nt, Homo sapiens
  misc_RNA (1)...(19): siRNA sense strand
gaaggaguucaaccaguuu

SEQ ID NO: 118930 - RNA, 19 nt, Homo sapiens
  misc_RNA (1)...(19): siRNA sense strand
caacaugaacccuaagcuu

SEQ ID NO: 118931 - RNA, 19 nt, Homo sapiens
  misc_RNA (1)...(19): siRNA sense strand
agacagacgugcauuaucg

SEQ ID NO: 118932 - RNA, 19 nt, Homo sapiens
  misc_RNA (1)...(19): siRNA sense strand
uaaagaucacucucuauga

SEQ ID NO: 118933 - RNA, 19 nt, Homo sapiens
  misc_RNA (1)...(19): siRNA sense strand
gcauggagccacuggagaa

SEQ ID NO: 118934 - RNA, 19 nt, Homo sapiens
  misc_RNA (1)...(19): siRNA sense strand
caaccgggcugucgaugag

SEQ ID NO: 118935 - RNA, 19 nt, Homo sapiens
  misc_RNA (1)...(19): siRNA sense strand
cauacaagaccaugaaguu

SEQ ID NO: 118936 - RNA, 19 nt, Homo sapiens
  misc_RNA (1)...(19): siRNA sense strand
agaagagggugagaagaaa

SEQ ID NO: 118937 - RNA, 19 nt, Homo sapiens
  misc_RNA (1)...(19): siRNA sense strand
ugugaaagguuggaugauu

SEQ ID NO: 118938 - RNA, 19 nt, Homo sapiens
  misc_RNA (1)...(19): siRNA sense strand
guaacaccuucaagcugua

SEQ ID NO: 118939 - RNA, 19 nt, Homo sapiens
  misc_RNA (1)...(19): siRNA sense strand
gagcaaccgcccagcauug

SEQ ID NO: 118940 - RNA, 19 nt, Homo sapiens
  misc_RNA (1)...(19): siRNA sense strand
cacacugccugccauguuu

SEQ ID NO: 118941 - RNA, 19 nt, Homo sapiens
  misc_RNA (1)...(19): siRNA sense strand
uagcagagagugagcauga

SEQ ID NO: 118942 - RNA, 19 nt, Homo sapiens
  misc_RNA (1)...(19): siRNA sense strand
ugagugaccaggauaacua

SEQ ID NO: 118943 - RNA, 19 nt, Homo sapiens
  misc_RNA (1)...(19): siRNA sense strand
gaagcugucugucuuugcu

SEQ ID NO: 118944 - RNA, 19 nt, Homo sapiens
  misc_RNA (1)...(19): siRNA sense strand
gaaagugugauccuuacau

SEQ ID NO: 118945 - RNA, 19 nt, Homo sapiens
  misc_RNA (1)...(19): siRNA sense strand
cuacaugagugacaacuac

SEQ ID NO: 118946 - RNA, 19 nt, Homo sapiens
  misc_RNA (1)...(19): siRNA sense strand
ccuaugagaacgagacuaa

SEQ ID NO: 118947 - RNA, 19 nt, Homo sapiens
  misc_RNA (1)...(19): siRNA sense strand
ccaccaugcugcaggaugu

SEQ ID NO: 118948 - RNA, 19 nt, Homo sapiens
  misc_RNA (1)...(19): siRNA sense strand
cuaaagaucacucucuaug

SEQ ID NO: 118949 - RNA, 19 nt, Homo sapiens
  misc_RNA (1)...(19): siRNA sense strand
gcacucugccucuggagaa

SEQ ID NO: 118950 - RNA, 19 nt, Homo sapiens
  misc_RNA (1)...(19): siRNA sense strand
ggaggaagaguucaucgau

SEQ ID NO: 118951 - RNA, 19 nt, Homo sapiens
  misc_RNA (1)...(19): siRNA sense strand
gggaaccgcuaccaucuac

SEQ ID NO: 118952 - RNA, 19 nt, Homo sapiens
  misc_RNA (1)...(19): siRNA sense strand
caagaauugugggaagcua

SEQ ID NO: 118953 - RNA, 19 nt, Homo sapiens
  misc_RNA (1)...(19): siRNA sense strand
gaaacagcccacucuucaa

SEQ ID NO: 118954 - RNA, 19 nt, Homo sapiens
  misc_RNA (1)...(19): siRNA sense strand
aaagaucacucucuaugac

SEQ ID NO: 118955 - RNA, 19 nt, Homo sapiens
  misc_RNA (1)...(19): siRNA sense strand
gcccguauuuggaaagaug

SEQ ID NO: 118956 - RNA, 19 nt, Homo sapiens
  misc_RNA (1)...(19): siRNA sense strand
agacggugguggugaagaa

SEQ ID NO: 118957 - RNA, 19 nt, Homo sapiens
  misc_RNA (1)...(19): siRNA sense strand
gggaagcugucugucuuug

SEQ ID NO: 118958 - RNA, 19 nt, Homo sapiens
  misc_RNA (1)...(19): siRNA sense strand
ucaaagaccaugagacgau

SEQ ID NO: 118959 - RNA, 19 nt, Homo sapiens
  misc_RNA (1)...(19): siRNA sense strand
caaguucuccuuugaugau

SEQ ID NO: 118960 - RNA, 19 nt, Homo sapiens
  misc_RNA (1)...(19): siRNA sense strand
guguaauguuucaggauaa

SEQ ID NO: 118961 - RNA, 19 nt, Homo sapiens
  misc_RNA (1)...(19): siRNA sense strand
ccgucaaggucaucgauaa

SEQ ID NO: 118962 - RNA, 19 nt, Homo sapiens
  misc_RNA (1)...(19): siRNA sense strand
agaagacggugguggugaa

SEQ ID NO: 118963 - RNA, 19 nt, Homo sapiens
  misc_RNA (1)...(19): siRNA sense strand
agacuaaguuggcccuugu

SEQ ID NO: 118964 - RNA, 19 nt, Homo sapiens
  misc_RNA (1)...(19): siRNA sense strand
gcaaggugcugcgcgacaa

SEQ ID NO: 118965 - RNA, 19 nt, Homo sapiens
  misc_RNA (1)...(19): siRNA sense strand
gcgacaacauccaggguau

SEQ ID NO: 118966 - RNA, 19 nt, Homo sapiens
  misc_RNA (1)...(19): siRNA sense strand
gcgcauuucuggccucauc

SEQ ID NO: 118967 - RNA, 19 nt, Homo sapiens
  misc_RNA (1)...(19): siRNA sense strand
ugaagguguuccuggagaa

SEQ ID NO: 118968 - RNA, 19 nt, Homo sapiens
  misc_RNA (1)...(19): siRNA sense strand
gacaacauccaggguauca

SEQ ID NO: 118969 - RNA, 19 nt, Homo sapiens
  misc_RNA (1)...(19): siRNA sense strand
ggacgcggcaaaggaggua

SEQ ID NO: 118970 - RNA, 19 nt, Homo sapiens
  misc_RNA (1)...(19): siRNA sense strand
gcggaguguugaagguguu

SEQ ID NO: 118971 - RNA, 19 nt, Homo sapiens
  misc_RNA (1)...(19): siRNA sense strand
gcauuucuggccucaucua

SEQ ID NO: 118972 - RNA, 19 nt, Homo sapiens
  misc_RNA (1)...(19): siRNA sense strand
gagcacgccaagcgcaaga

SEQ ID NO: 118973 - RNA, 19 nt, Homo sapiens
  misc_RNA (1)...(19): siRNA sense strand
gcacaggucuugccagaug

SEQ ID NO: 118974 - RNA, 19 nt, Homo sapiens
  misc_RNA (1)...(19): siRNA sense strand
agaagauggucgugaauua

SEQ ID NO: 118975 - RNA, 19 nt, Homo sapiens
  misc_RNA (1)...(19): siRNA sense strand
ggacauggcuacucaaagc

SEQ ID NO: 118976 - RNA, 19 nt, Homo sapiens
  misc_RNA (1)...(19): siRNA sense strand
gaaccagaccacugucaua

SEQ ID NO: 118977 - RNA, 19 nt, Homo sapiens
  misc_RNA (1)...(19): siRNA sense strand
gacccaagauggacuuuga

SEQ ID NO: 118978 - RNA, 19 nt, Homo sapiens
  misc_RNA (1)...(19): siRNA sense strand
agacguggccuuaaauaua

SEQ ID NO: 118979 - RNA, 19 nt, Homo sapiens
  misc_RNA (1)...(19): siRNA sense strand
gcuguaaggacaauuauuu

SEQ ID NO: 118980 - RNA, 19 nt, Homo sapiens
  misc_RNA (1)...(19): siRNA sense strand
gcaacuaccuucccauggu

SEQ ID NO: 118981 - RNA, 19 nt, Homo sapiens
  misc_RNA (1)...(19): siRNA sense strand
ggacaugggacauaucuuc

SEQ ID NO: 118982 - RNA, 19 nt, Homo sapiens
  misc_RNA (1)...(19): siRNA sense strand
gcccuuggcuguuaugaug

SEQ ID NO: 118983 - RNA, 19 nt, Homo sapiens
  misc_RNA (1)...(19): siRNA sense strand
caguaaggcucauaaagga

SEQ ID NO: 118984 - RNA, 19 nt, Homo sapiens
  misc_RNA (1)...(19): siRNA sense strand
gcagaaggccugugucauc

SEQ ID NO: 118985 - RNA, 19 nt, Homo sapiens
  misc_RNA (1)...(19): siRNA sense strand
ggagaacccugccuaugag

SEQ ID NO: 118986 - RNA, 19 nt, Homo sapiens
  misc_RNA (1)...(19): siRNA sense strand
guuagaagauggucgugaa

SEQ ID NO: 118987 - RNA, 19 nt, Homo sapiens
  misc_RNA (1)...(19): siRNA sense strand
ggagacguggccuuaaaua

SEQ ID NO: 118988 - RNA, 19 nt, Homo sapiens
  misc_RNA (1)...(19): siRNA sense strand
gcaggaaaguugagagcau

SEQ ID NO: 118989 - RNA, 19 nt, Homo sapiens
  misc_RNA (1)...(19): siRNA sense strand
gcacuccgcaggaaaguug

SEQ ID NO: 118990 - RNA, 19 nt, Homo sapiens
  misc_RNA (1)...(19): siRNA sense strand
gacguggccuuaaauauac

SEQ ID NO: 118991 - RNA, 19 nt, Homo sapiens
  misc_RNA (1)...(19): siRNA sense strand
gcucagaagucaccaacca

SEQ ID NO: 118992 - RNA, 19 nt, Homo sapiens
  misc_RNA (1)...(19): siRNA sense strand
ggacucagugcagcauuua

SEQ ID NO: 118993 - RNA, 19 nt, Homo sapiens
  misc_RNA (1)...(19): siRNA sense strand
gcaguaaggcucauaaagg

SEQ ID NO: 118994 - RNA, 19 nt, Homo sapiens
  misc_RNA (1)...(19): siRNA sense strand
caagauggacuuugaucaa

SEQ ID NO: 118995 - RNA, 19 nt, Homo sapiens
  misc_RNA (1)...(19): siRNA sense strand
uacauggaaucuugacuaa

SEQ ID NO: 118996 - RNA, 19 nt, Homo sapiens
  misc_RNA (1)...(19): siRNA sense strand
cauggaaucuugacuaacu

SEQ ID NO: 118997 - RNA, 19 nt, Homo sapiens
  misc_RNA (1)...(19): siRNA sense strand
gaauuaggcuacgcuuaca

SEQ ID NO: 118998 - RNA, 19 nt, Homo sapiens
  misc_RNA (1)...(19): siRNA sense strand
ucaguuaugccuuccauuu

SEQ ID NO: 118999 - RNA, 19 nt, Homo sapiens
  misc_RNA (1)...(19): siRNA sense strand
ggccuuaaauauacacaga

SEQ ID NO: 119000 - RNA, 19 nt, Homo sapiens
  misc_RNA (1)...(19): siRNA sense strand
ugaaggccaugaugucaga

SEQ ID NO: 119001 - RNA, 19 nt, Homo sapiens
  misc_RNA (1)...(19): siRNA sense strand
caaccaauacucaggagaa

SEQ ID NO: 119002 - RNA, 19 nt, Homo sapiens
  misc_RNA (1)...(19): siRNA sense strand
agacugaagccaccuauga

SEQ ID NO: 119003 - RNA, 19 nt, Homo sapiens
  misc_RNA (1)...(19): siRNA sense strand
gaacaugcugagucgcuuu

SEQ ID NO: 119004 - RNA, 19 nt, Homo sapiens
  misc_RNA (1)...(19): siRNA sense strand
guacagcacagagcaacua

SEQ ID NO: 119005 - RNA, 19 nt, Homo sapiens
  misc_RNA (1)...(19): siRNA sense strand
ccagugggcucagaaguca

SEQ ID NO: 119006 - RNA, 19 nt, Homo sapiens
  misc_RNA (1)...(19): siRNA sense strand
cugcuaaggugcacugcua

SEQ ID NO: 119007 - RNA, 19 nt, Homo sapiens
  misc_RNA (1)...(19): siRNA sense strand
caacguaugcacagacaga

SEQ ID NO: 119008 - RNA, 19 nt, Homo sapiens
  misc_RNA (1)...(19): siRNA sense strand
gaacccugccuaugaggaa

SEQ ID NO: 119009 - RNA, 19 nt, Homo sapiens
  misc_RNA (1)...(19): siRNA sense strand
gaagauggucgugaauuag

SEQ ID NO: 119010 - RNA, 19 nt, Homo sapiens
  misc_RNA (1)...(19): siRNA sense strand
gagagcaucauccacaguu

SEQ ID NO: 119011 - RNA, 19 nt, Homo sapiens
  misc_RNA (1)...(19): siRNA sense strand
gcaaaugcaccccgacaua

SEQ ID NO: 119012 - RNA, 19 nt, Homo sapiens
  misc_RNA (1)...(19): siRNA sense strand
acacagagucuucgugaga

SEQ ID NO: 119013 - RNA, 19 nt, Homo sapiens
  misc_RNA (1)...(19): siRNA sense strand
cagaagucaccaaccaaua

SEQ ID NO: 119014 - RNA, 19 nt, Homo sapiens
  misc_RNA (1)...(19): siRNA sense strand
gguauaugcaguccuuuga

SEQ ID NO: 119015 - RNA, 19 nt, Homo sapiens
  misc_RNA (1)...(19): siRNA sense strand
gcaguccuuugacguggaa

SEQ ID NO: 119016 - RNA, 19 nt, Homo sapiens
  misc_RNA (1)...(19): siRNA sense strand
gaucaguguuuaaauucag

SEQ ID NO: 119017 - RNA, 19 nt, Homo sapiens
  misc_RNA (1)...(19): siRNA sense strand
agagcuaccugcagacuca

SEQ ID NO: 119018 - RNA, 19 nt, Homo sapiens
  misc_RNA (1)...(19): siRNA sense strand
gagacguggccuuaaauau

SEQ ID NO: 119019 - RNA, 19 nt, Homo sapiens
  misc_RNA (1)...(19): siRNA sense strand
agagguauaugcaguccuu

SEQ ID NO: 119020 - RNA, 19 nt, Homo sapiens
  misc_RNA (1)...(19): siRNA sense strand
agagcaucauccacaguua

SEQ ID NO: 119021 - RNA, 19 nt, Homo sapiens
  misc_RNA (1)...(19): siRNA sense strand
cuucaccgaucaguguuua

SEQ ID NO: 119022 - RNA, 19 nt, Homo sapiens
  misc_RNA (1)...(19): siRNA sense strand
aggagcagauugccaaaug

SEQ ID NO: 119023 - RNA, 19 nt, Homo sapiens
  misc_RNA (1)...(19): siRNA sense strand
cuggagacguggccuuaaa

SEQ ID NO: 119024 - RNA, 19 nt, Homo sapiens
  misc_RNA (1)...(19): siRNA sense strand
gcgccuggguugguuagaa

SEQ ID NO: 119025 - RNA, 19 nt, Homo sapiens
  misc_RNA (1)...(19): siRNA sense strand
ugacccagaaugagcguua

SEQ ID NO: 119026 - RNA, 19 nt, Homo sapiens
  misc_RNA (1)...(19): siRNA sense strand
aggagaacccugccuauga

SEQ ID NO: 119027 - RNA, 19 nt, Homo sapiens
  misc_RNA (1)...(19): siRNA sense strand
ugacuucaccgaucagugu

SEQ ID NO: 119028 - RNA, 19 nt, Homo sapiens
  misc_RNA (1)...(19): siRNA sense strand
gacuaacucgggugacuuu

SEQ ID NO: 119029 - RNA, 19 nt, Homo sapiens
  misc_RNA (1)...(19): siRNA sense strand
uuacagacccugacgcaau

SEQ ID NO: 119030 - RNA, 19 nt, Homo sapiens
  misc_RNA (1)...(19): siRNA sense strand
gggcacauguggcaguaag

SEQ ID NO: 119031 - RNA, 19 nt, Homo sapiens
  misc_RNA (1)...(19): siRNA sense strand
ggagcagauugccaaaugg

SEQ ID NO: 119032 - RNA, 19 nt, Homo sapiens
  misc_RNA (1)...(19): siRNA sense strand
auagagagcgagagguaua

SEQ ID NO: 119033 - RNA, 19 nt, Homo sapiens
  misc_RNA (1)...(19): siRNA sense strand
gugcacugcuacuauguca

SEQ ID NO: 119034 - RNA, 19 nt, Homo sapiens
  misc_RNA (1)...(19): siRNA sense strand
acauagagagcgagaggua

SEQ ID NO: 119035 - RNA, 19 nt, Homo sapiens
  misc_RNA (1)...(19): siRNA sense strand
accgaucaguguuuaaauu

SEQ ID NO: 119036 - RNA, 19 nt, Homo sapiens
  misc_RNA (1)...(19): siRNA sense strand
cgggugacuuucuccauga

SEQ ID NO: 119037 - RNA, 19 nt, Homo sapiens
  misc_RNA (1)...(19): siRNA sense strand
uaaggugcacugcuacuau

SEQ ID NO: 119038 - RNA, 19 nt, Homo sapiens
  misc_RNA (1)...(19): siRNA sense strand
ugaauuaggcuacgcuuac

SEQ ID NO: 119039 - RNA, 19 nt, Homo sapiens
  misc_RNA (1)...(19): siRNA sense strand
cgaucaguguuuaaauuca

SEQ ID NO: 119040 - RNA, 19 nt, Homo sapiens
  misc_RNA (1)...(19): siRNA sense strand
uaacucgggugacuuucuc

SEQ ID NO: 119041 - RNA, 19 nt, Homo sapiens
  misc_RNA (1)...(19): siRNA sense strand
uggagaaacuagaaaauga

SEQ ID NO: 119042 - RNA, 19 nt, Homo sapiens
  misc_RNA (1)...(19): siRNA sense strand
ccagugacccagaggcaaa

SEQ ID NO: 119043 - RNA, 19 nt, Homo sapiens
  misc_RNA (1)...(19): siRNA sense strand
uggaacggcucaccaacau

SEQ ID NO: 119044 - RNA, 19 nt, Homo sapiens
  misc_RNA (1)...(19): siRNA sense strand
gaaaguugagagcaucauc

SEQ ID NO: 119045 - RNA, 19 nt, Homo sapiens
  misc_RNA (1)...(19): siRNA sense strand
uggcggacauggcuacuca

SEQ ID NO: 119046 - RNA, 19 nt, Homo sapiens
  misc_RNA (1)...(19): siRNA sense strand
auacauggaaucuugacua

SEQ ID NO: 119047 - RNA, 19 nt, Homo sapiens
  misc_RNA (1)...(19): siRNA sense strand
guugggacaugggacauau

SEQ ID NO: 119048 - RNA, 19 nt, Homo sapiens
  misc_RNA (1)...(19): siRNA sense strand
ccuguuaacugaugcuuuu

SEQ ID NO: 119049 - RNA, 19 nt, Homo sapiens
  misc_RNA (1)...(19): siRNA sense strand
gcacugcuacuaugucacu

SEQ ID NO: 119050 - RNA, 19 nt, Homo sapiens
  misc_RNA (1)...(19): siRNA sense strand
acaguuacccggaguuuag

SEQ ID NO: 119051 - RNA, 19 nt, Homo sapiens
  misc_RNA (1)...(19): siRNA sense strand
gugaauuaggcuacgcuua

SEQ ID NO: 119052 - RNA, 19 nt, Homo sapiens
  misc_RNA (1)...(19): siRNA sense strand
caaguggacauggcaagaa

SEQ ID NO: 119053 - RNA, 19 nt, Homo sapiens
  misc_RNA (1)...(19): siRNA sense strand
aaauauacacagagucuuc

SEQ ID NO: 119054 - RNA, 19 nt, Homo sapiens
  misc_RNA (1)...(19): siRNA sense strand
uuagcuguaaggacaauua

SEQ ID NO: 119055 - RNA, 19 nt, Homo sapiens
  misc_RNA (1)...(19): siRNA sense strand
gcggacauggcuacucaaa

SEQ ID NO: 119056 - RNA, 19 nt, Homo sapiens
  misc_RNA (1)...(19): siRNA sense strand
ucaccgaucaguguuuaaa

SEQ ID NO: 119057 - RNA, 19 nt, Homo sapiens
  misc_RNA (1)...(19): siRNA sense strand
ccagaccacugucauacac

SEQ ID NO: 119058 - RNA, 19 nt, Homo sapiens
  misc_RNA (1)...(19): siRNA sense strand
uacagacccugacgcaauc

SEQ ID NO: 119059 - RNA, 19 nt, Homo sapiens
  misc_RNA (1)...(19): siRNA sense strand
cccaggaguuugugauaca

SEQ ID NO: 119060 - RNA, 19 nt, Homo sapiens
  misc_RNA (1)...(19): siRNA sense strand
ccacaguuacccggaguuu

SEQ ID NO: 119061 - RNA, 19 nt, Homo sapiens
  misc_RNA (1)...(19): siRNA sense strand
aaggugcacugcuacuaug

SEQ ID NO: 119062 - RNA, 19 nt, Homo sapiens
  misc_RNA (1)...(19): siRNA sense strand
gcggagggcauuccacauc

SEQ ID NO: 119063 - RNA, 19 nt, Homo sapiens
  misc_RNA (1)...(19): siRNA sense strand
cuacgagggugagaacaca

SEQ ID NO: 119064 - RNA, 19 nt, Homo sapiens
  misc_RNA (1)...(19): siRNA sense strand
gccaugaugucagaauucu

SEQ ID NO: 119065 - RNA, 19 nt, Homo sapiens
  misc_RNA (1)...(19): siRNA sense strand
gcacuccuacacugccauu

SEQ ID NO: 119066 - RNA, 19 nt, Homo sapiens
  misc_RNA (1)...(19): siRNA sense strand
uagaagauggucgugaauu

SEQ ID NO: 119067 - RNA, 19 nt, Homo sapiens
  misc_RNA (1)...(19): siRNA sense strand
ugaccuccaugccauacau

SEQ ID NO: 119068 - RNA, 19 nt, Homo sapiens
  misc_RNA (1)...(19): siRNA sense strand
aggacucagugcagcauuu

SEQ ID NO: 119069 - RNA, 19 nt, Homo sapiens
  misc_RNA (1)...(19): siRNA sense strand
acacugccauucugaacca

SEQ ID NO: 119070 - RNA, 19 nt, Homo sapiens
  misc_RNA (1)...(19): siRNA sense strand
caucaguuaugccuuccau

SEQ ID NO: 119071 - RNA, 19 nt, Homo sapiens
  misc_RNA (1)...(19): siRNA sense strand
gugccaauccggagucuuc

SEQ ID NO: 119072 - RNA, 19 nt, Homo sapiens
  misc_RNA (1)...(19): siRNA sense strand
cagaaugagcguuauaagg

SEQ ID NO: 119073 - RNA, 19 nt, Homo sapiens
  misc_RNA (1)...(19): siRNA sense strand
gaacaaaccugucauagga

SEQ ID NO: 119074 - RNA, 19 nt, Homo sapiens
  misc_RNA (1)...(19): siRNA sense strand
ugaaagacaucucacauau

SEQ ID NO: 119075 - RNA, 19 nt, Homo sapiens
  misc_RNA (1)...(19): siRNA sense strand
gcaagcggaucuucgagua

SEQ ID NO: 119076 - RNA, 19 nt, Homo sapiens
  misc_RNA (1)...(19): siRNA sense strand
gcagaacggucuagauaau

SEQ ID NO: 119077 - RNA, 19 nt, Homo sapiens
  misc_RNA (1)...(19): siRNA sense strand
gaaagacaucucacauaua

SEQ ID NO: 119078 - RNA, 19 nt, Homo sapiens
  misc_RNA (1)...(19): siRNA sense strand
gagcugaacuuccuucgau

SEQ ID NO: 119079 - RNA, 19 nt, Homo sapiens
  misc_RNA (1)...(19): siRNA sense strand
gaucagcaguuuacaguuc

SEQ ID NO: 119080 - RNA, 19 nt, Homo sapiens
  misc_RNA (1)...(19): siRNA sense strand
ccaaguaccuccuccauag

SEQ ID NO: 119081 - RNA, 19 nt, Homo sapiens
  misc_RNA (1)...(19): siRNA sense strand
gggcagaacggucuagaua

SEQ ID NO: 119082 - RNA, 19 nt, Homo sapiens
  misc_RNA (1)...(19): siRNA sense strand
gcauacaaguggcugguuu

SEQ ID NO: 119083 - RNA, 19 nt, Homo sapiens
  misc_RNA (1)...(19): siRNA sense strand
acaaguggcugguuugcua

SEQ ID NO: 119084 - RNA, 19 nt, Homo sapiens
  misc_RNA (1)...(19): siRNA sense strand
uuucgaagcugccaaguuu

SEQ ID NO: 119085 - RNA, 19 nt, Homo sapiens
  misc_RNA (1)...(19): siRNA sense strand
ggaaggacguggcgcuguu

SEQ ID NO: 119086 - RNA, 19 nt, Homo sapiens
  misc_RNA (1)...(19): siRNA sense strand
ggagggcaauguccgcuuu

SEQ ID NO: 119087 - RNA, 19 nt, Homo sapiens
  misc_RNA (1)...(19): siRNA sense strand
gaucgcuccuccugacuuu

SEQ ID NO: 119088 - RNA, 19 nt, Homo sapiens
  misc_RNA (1)...(19): siRNA sense strand
gaauuaagccacggcagua

SEQ ID NO: 119089 - RNA, 19 nt, Homo sapiens
  misc_RNA (1)...(19): siRNA sense strand
gagccgaccuguccuugga

SEQ ID NO: 119090 - RNA, 19 nt, Homo sapiens
  misc_RNA (1)...(19): siRNA sense strand
uaggaagucugaaaucgaa

SEQ ID NO: 119091 - RNA, 19 nt, Homo sapiens
  misc_RNA (1)...(19): siRNA sense strand
guucuggacucaccgauug

SEQ ID NO: 119092 - RNA, 19 nt, Homo sapiens
  misc_RNA (1)...(19): siRNA sense strand
gcaauguccgcuuuaagaa

SEQ ID NO: 119093 - RNA, 19 nt, Homo sapiens
  misc_RNA (1)...(19): siRNA sense strand
gcugaaagacgaugcaguu

SEQ ID NO: 119094 - RNA, 19 nt, Homo sapiens
  misc_RNA (1)...(19): siRNA sense strand
gcagacaagcaacuauuug

SEQ ID NO: 119095 - RNA, 19 nt, Homo sapiens
  misc_RNA (1)...(19): siRNA sense strand
ggcaauguccgcuuuaaga

SEQ ID NO: 119096 - RNA, 19 nt, Homo sapiens
  misc_RNA (1)...(19): siRNA sense strand
agacaucucacauauauuc

SEQ ID NO: 119097 - RNA, 19 nt, Homo sapiens
  misc_RNA (1)...(19): siRNA sense strand
gcacaacugcccacuacga

SEQ ID NO: 119098 - RNA, 19 nt, Homo sapiens
  misc_RNA (1)...(19): siRNA sense strand
aaauaccagugcuugagua

SEQ ID NO: 119099 - RNA, 19 nt, Homo sapiens
  misc_RNA (1)...(19): siRNA sense strand
ccacagaggaggaggaaau

SEQ ID NO: 119100 - RNA, 19 nt, Homo sapiens
  misc_RNA (1)...(19): siRNA sense strand
gaggaauucaucauacauu

SEQ ID NO: 119101 - RNA, 19 nt, Homo sapiens
  misc_RNA (1)...(19): siRNA sense strand
gaucuucgaguaugacuuc

SEQ ID NO: 119102 - RNA, 19 nt, Homo sapiens
  misc_RNA (1)...(19): siRNA sense strand
uuacaguucugguucugaa

SEQ ID NO: 119103 - RNA, 19 nt, Homo sapiens
  misc_RNA (1)...(19): siRNA sense strand
gaaauaccagugcuugagu

SEQ ID NO: 119104 - RNA, 19 nt, Homo sapiens
  misc_RNA (1)...(19): siRNA sense strand
cgaugcaguugcccuggua

SEQ ID NO: 119105 - RNA, 19 nt, Homo sapiens
  misc_RNA (1)...(19): siRNA sense strand
gggcauguaugacucuucu

SEQ ID NO: 119106 - RNA, 19 nt, Homo sapiens
  misc_RNA (1)...(19): siRNA sense strand
agugaugguuggcgacaua

SEQ ID NO: 119107 - RNA, 19 nt, Homo sapiens
  misc_RNA (1)...(19): siRNA sense strand
cugaaagacaucucacaua

SEQ ID NO: 119108 - RNA, 19 nt, Homo sapiens
  misc_RNA (1)...(19): siRNA sense strand
ggaaauaccagugcuugag

SEQ ID NO: 119109 - RNA, 19 nt, Homo sapiens
  misc_RNA (1)...(19): siRNA sense strand
ggcagaacggucuagauaa

SEQ ID NO: 119110 - RNA, 19 nt, Homo sapiens
  misc_RNA (1)...(19): siRNA sense strand
caauguccgcuuuaagaaa

SEQ ID NO: 119111 - RNA, 19 nt, Homo sapiens
  misc_RNA (1)...(19): siRNA sense strand
ucacggugguccagagguu

SEQ ID NO: 119112 - RNA, 19 nt, Homo sapiens
  misc_RNA (1)...(19): siRNA sense strand
ccuuagagaugacaacgau

SEQ ID NO: 119113 - RNA, 19 nt, Homo sapiens
  misc_RNA (1)...(19): siRNA sense strand
gccaaguaccuccuccaua

SEQ ID NO: 119114 - RNA, 19 nt, Homo sapiens
  misc_RNA (1)...(19): siRNA sense strand
cgacggcgagcucuacaaa

SEQ ID NO: 119115 - RNA, 19 nt, Homo sapiens
  misc_RNA (1)...(19): siRNA sense strand
gagaaaagaucaggaagca

SEQ ID NO: 119116 - RNA, 19 nt, Homo sapiens
  misc_RNA (1)...(19): siRNA sense strand
uuaagccacggcaguaaua

SEQ ID NO: 119117 - RNA, 19 nt, Homo sapiens
  misc_RNA (1)...(19): siRNA sense strand
uuugaggucuccaguguug

SEQ ID NO: 119118 - RNA, 19 nt, Homo sapiens
  misc_RNA (1)...(19): siRNA sense strand
cagcagacaagcaacuauu

SEQ ID NO: 119119 - RNA, 19 nt, Homo sapiens
  misc_RNA (1)...(19): siRNA sense strand
gcaguuuacaguucugguu

SEQ ID NO: 119120 - RNA, 19 nt, Homo sapiens
  misc_RNA (1)...(19): siRNA sense strand
auacgaaggugacaacaac

SEQ ID NO: 119121 - RNA, 19 nt, Homo sapiens
  misc_RNA (1)...(19): siRNA sense strand
caacugcacauacgaaggu

SEQ ID NO: 119122 - RNA, 19 nt, Homo sapiens
  misc_RNA (1)...(19): siRNA sense strand
aggaagcagugacuuugaa

SEQ ID NO: 119123 - RNA, 19 nt, Homo sapiens
  misc_RNA (1)...(19): siRNA sense strand
ucgcacaacugcccacuac

SEQ ID NO: 119124 - RNA, 19 nt, Homo sapiens
  misc_RNA (1)...(19): siRNA sense strand
gcaggaaagcaagguguug

SEQ ID NO: 119125 - RNA, 19 nt, Homo sapiens
  misc_RNA (1)...(19): siRNA sense strand
agaacggucuagauaaugg

SEQ ID NO: 119126 - RNA, 19 nt, Homo sapiens
  misc_RNA (1)...(19): siRNA sense strand
ucccaugccuggagugaug

SEQ ID NO: 119127 - RNA, 19 nt, Homo sapiens
  misc_RNA (1)...(19): siRNA sense strand
aagcggaucuucgaguaug

SEQ ID NO: 119128 - RNA, 19 nt, Homo sapiens
  misc_RNA (1)...(19): siRNA sense strand
cauaggaagucugaaaucg

SEQ ID NO: 119129 - RNA, 19 nt, Homo sapiens
  misc_RNA (1)...(19): siRNA sense strand
ugucauaggaagucugaaa

SEQ ID NO: 119130 - RNA, 19 nt, Homo sapiens
  misc_RNA (1)...(19): siRNA sense strand
gaucccaacugcacauacg

SEQ ID NO: 119131 - RNA, 19 nt, Homo sapiens
  misc_RNA (1)...(19): siRNA sense strand
gguuggguguccuuagaga

SEQ ID NO: 119132 - RNA, 19 nt, Homo sapiens
  misc_RNA (1)...(19): siRNA sense strand
ccgguuggguguccuuaga

SEQ ID NO: 119133 - RNA, 19 nt, Homo sapiens
  misc_RNA (1)...(19): siRNA sense strand
gcuuagaccauuucuccaa

SEQ ID NO: 119134 - RNA, 19 nt, Homo sapiens
  misc_RNA (1)...(19): siRNA sense strand
gagcguccuucagcuggaa

SEQ ID NO: 119135 - RNA, 19 nt, Homo sapiens
  misc_RNA (1)...(19): siRNA sense strand
ucgaagcaauguucaagag

SEQ ID NO: 119136 - RNA, 19 nt, Homo sapiens
  misc_RNA (1)...(19): siRNA sense strand
gcaggcgggagaaguguug

SEQ ID NO: 119137 - RNA, 19 nt, Homo sapiens
  misc_RNA (1)...(19): siRNA sense strand
gagggcaauguccgcuuua

SEQ ID NO: 119138 - RNA, 19 nt, Homo sapiens
  misc_RNA (1)...(19): siRNA sense strand
cagucgcccuggcagcaua

SEQ ID NO: 119139 - RNA, 19 nt, Homo sapiens
  misc_RNA (1)...(19): siRNA sense strand
gcacauacgaaggugacaa

SEQ ID NO: 119140 - RNA, 19 nt, Homo sapiens
  misc_RNA (1)...(19): siRNA sense strand
agaaguaucgcgagcugaa

SEQ ID NO: 119141 - RNA, 19 nt, Homo sapiens
  misc_RNA (1)...(19): siRNA sense strand
gaugcaagcggaucuucga

SEQ ID NO: 119142 - RNA, 19 nt, Homo sapiens
  misc_RNA (1)...(19): siRNA sense strand
gcagagcuuggacgugaga

SEQ ID NO: 119143 - RNA, 19 nt, Homo sapiens
  misc_RNA (1)...(19): siRNA sense strand
gaugguuggcgacauagga

SEQ ID NO: 119144 - RNA, 19 nt, Homo sapiens
  misc_RNA (1)...(19): siRNA sense strand
ucaggaagcagugacuuug

SEQ ID NO: 119145 - RNA, 19 nt, Homo sapiens
  misc_RNA (1)...(19): siRNA sense strand
gcagcagacaagcaacuau

SEQ ID NO: 119146 - RNA, 19 nt, Homo sapiens
  misc_RNA (1)...(19): siRNA sense strand
ggaggaaauaccagugcuu

SEQ ID NO: 119147 - RNA, 19 nt, Homo sapiens
  misc_RNA (1)...(19): siRNA sense strand
ggacgucaggcagcgcuuu

SEQ ID NO: 119148 - RNA, 19 nt, Homo sapiens
  misc_RNA (1)...(19): siRNA sense strand
ggaccacccagcaaggaau

SEQ ID NO: 119149 - RNA, 19 nt, Homo sapiens
  misc_RNA (1)...(19): siRNA sense strand
ggccauccuuaaccuaaag

SEQ ID NO: 119150 - RNA, 19 nt, Homo sapiens
  misc_RNA (1)...(19): siRNA sense strand
acgcggugguguuugcuaa

SEQ ID NO: 119151 - RNA, 19 nt, Homo sapiens
  misc_RNA (1)...(19): siRNA sense strand
ugaacaaaccugucauagg

SEQ ID NO: 119152 - RNA, 19 nt, Homo sapiens
  misc_RNA (1)...(19): siRNA sense strand
gcgcuugcuuccauaucug

SEQ ID NO: 119153 - RNA, 19 nt, Homo sapiens
  misc_RNA (1)...(19): siRNA sense strand
cacagaggaggaggaaaua

SEQ ID NO: 119154 - RNA, 19 nt, Homo sapiens
  misc_RNA (1)...(19): siRNA sense strand
gcauguaugacucuucucu

SEQ ID NO: 119155 - RNA, 19 nt, Homo sapiens
  misc_RNA (1)...(19): siRNA sense strand
ugugaacaaaccugucaua

SEQ ID NO: 119156 - RNA, 19 nt, Homo sapiens
  misc_RNA (1)...(19): siRNA sense strand
caggaagcagugacuuuga

SEQ ID NO: 119157 - RNA, 19 nt, Homo sapiens
  misc_RNA (1)...(19): siRNA sense strand
aguaugacuuccucagugu

SEQ ID NO: 119158 - RNA, 19 nt, Homo sapiens
  misc_RNA (1)...(19): siRNA sense strand
uaccagugcuugaguaucc

SEQ ID NO: 119159 - RNA, 19 nt, Homo sapiens
  misc_RNA (1)...(19): siRNA sense strand
gguguuugcuaagcugugu

SEQ ID NO: 119160 - RNA, 19 nt, Homo sapiens
  misc_RNA (1)...(19): siRNA sense strand
caguucugguucugaaaga

SEQ ID NO: 119161 - RNA, 19 nt, Homo sapiens
  misc_RNA (1)...(19): siRNA sense strand
ugacuuuguucuggacuca

SEQ ID NO: 119162 - RNA, 19 nt, Homo sapiens
  misc_RNA (1)...(19): siRNA sense strand
acggcuaucuggccaugaa

SEQ ID NO: 119163 - RNA, 19 nt, Homo sapiens
  misc_RNA (1)...(19): siRNA sense strand
gaccacccagcaaggaauu

SEQ ID NO: 119164 - RNA, 19 nt, Homo sapiens
  misc_RNA (1)...(19): siRNA sense strand
cugaggaauucaucauaca

SEQ ID NO: 119165 - RNA, 19 nt, Homo sapiens
  misc_RNA (1)...(19): siRNA sense strand
ggcgcuugcuuccauaucu

SEQ ID NO: 119166 - RNA, 19 nt, Homo sapiens
  misc_RNA (1)...(19): siRNA sense strand
ggaagcagugacuuugaag

SEQ ID NO: 119167 - RNA, 19 nt, Homo sapiens
  misc_RNA (1)...(19): siRNA sense strand
gcagcugucuacggcuuag

SEQ ID NO: 119168 - RNA, 19 nt, Homo sapiens
  misc_RNA (1)...(19): siRNA sense strand
aguuugaggucuccagugu

SEQ ID NO: 119169 - RNA, 19 nt, Homo sapiens
  misc_RNA (1)...(19): siRNA sense strand
gaccuguccuuggagaagu

SEQ ID NO: 119170 - RNA, 19 nt, Homo sapiens
  misc_RNA (1)...(19): siRNA sense strand
agagcgccguccuggcuuu

SEQ ID NO: 119171 - RNA, 19 nt, Homo sapiens
  misc_RNA (1)...(19): siRNA sense strand
cuaccgaggaggauacuuc

SEQ ID NO: 119172 - RNA, 19 nt, Homo sapiens
  misc_RNA (1)...(19): siRNA sense strand
caagagaaaagaucaggaa

SEQ ID NO: 119173 - RNA, 19 nt, Homo sapiens
  misc_RNA (1)...(19): siRNA sense strand
ggaaagguguuggcauuaa

SEQ ID NO: 119174 - RNA, 19 nt, Homo sapiens
  misc_RNA (1)...(19): siRNA sense strand
gaaagguguuggcauuaaa

SEQ ID NO: 119175 - RNA, 19 nt, Homo sapiens
  misc_RNA (1)...(19): siRNA sense strand
gaucgauccugccauguuu

SEQ ID NO: 119176 - RNA, 19 nt, Homo sapiens
  misc_RNA (1)...(19): siRNA sense strand
gaaagugagcgacgaguuu

SEQ ID NO: 119177 - RNA, 19 nt, Homo sapiens
  misc_RNA (1)...(19): siRNA sense strand
auaaagggcugcaucauga

SEQ ID NO: 119178 - RNA, 19 nt, Homo sapiens
  misc_RNA (1)...(19): siRNA sense strand
ucaaggagcugcugaccaa

SEQ ID NO: 119179 - RNA, 19 nt, Homo sapiens
  misc_RNA (1)...(19): siRNA sense strand
gagcaaguuucaccgaaga

SEQ ID NO: 119180 - RNA, 19 nt, Homo sapiens
  misc_RNA (1)...(19): siRNA sense strand
gcagagaguucagguaugg

SEQ ID NO: 119181 - RNA, 19 nt, Homo sapiens
  misc_RNA (1)...(19): siRNA sense strand
cgaaaguacauucuugaua

SEQ ID NO: 119182 - RNA, 19 nt, Homo sapiens
  misc_RNA (1)...(19): siRNA sense strand
gagaacugguguccacaga

SEQ ID NO: 119183 - RNA, 19 nt, Homo sapiens
  misc_RNA (1)...(19): siRNA sense strand
cgagagccaucuaccgaaa

SEQ ID NO: 119184 - RNA, 19 nt, Homo sapiens
  misc_RNA (1)...(19): siRNA sense strand
cgggaaagguguuggcauu

SEQ ID NO: 119185 - RNA, 19 nt, Homo sapiens
  misc_RNA (1)...(19): siRNA sense strand
gaagaucaucggcaaagug

SEQ ID NO: 119186 - RNA, 19 nt, Homo sapiens
  misc_RNA (1)...(19): siRNA sense strand
gaccuuaaaugaagaugag

SEQ ID NO: 119187 - RNA, 19 nt, Homo sapiens
  misc_RNA (1)...(19): siRNA sense strand
uaaaugaagaugaggaaug

SEQ ID NO: 119188 - RNA, 19 nt, Homo sapiens
  misc_RNA (1)...(19): siRNA sense strand
caaaagaaaugccaagaag

SEQ ID NO: 119189 - RNA, 19 nt, Homo sapiens
  misc_RNA (1)...(19): siRNA sense strand
ggaagcacguacccaaguc

SEQ ID NO: 119190 - RNA, 19 nt, Homo sapiens
  misc_RNA (1)...(19): siRNA sense strand
ccaccaagagcuucauaaa

SEQ ID NO: 119191 - RNA, 19 nt, Homo sapiens
  misc_RNA (1)...(19): siRNA sense strand
accaagagcuucauaaagg

SEQ ID NO: 119192 - RNA, 19 nt, Homo sapiens
  misc_RNA (1)...(19): siRNA sense strand
gcguggagccucagaaguu

SEQ ID NO: 119193 - RNA, 19 nt, Homo sapiens
  misc_RNA (1)...(19): siRNA sense strand
gggaaagguguuggcauua

SEQ ID NO: 119194 - RNA, 19 nt, Homo sapiens
  misc_RNA (1)...(19): siRNA sense strand
ccggaagacucccucagaa

SEQ ID NO: 119195 - RNA, 19 nt, Homo sapiens
  misc_RNA (1)...(19): siRNA sense strand
cauaaagggcugcaucaug

SEQ ID NO: 119196 - RNA, 19 nt, Homo sapiens
  misc_RNA (1)...(19): siRNA sense strand
cagauacuacuucaagaaa

SEQ ID NO: 119197 - RNA, 19 nt, Homo sapiens
  misc_RNA (1)...(19): siRNA sense strand
uaccgaaaguacauucuug

SEQ ID NO: 119198 - RNA, 19 nt, Homo sapiens
  misc_RNA (1)...(19): siRNA sense strand
gagaagaaccagaaaauca

SEQ ID NO: 119199 - RNA, 19 nt, Homo sapiens
  misc_RNA (1)...(19): siRNA sense strand
aaaugaagaugaggaaugg

SEQ ID NO: 119200 - RNA, 19 nt, Homo sapiens
  misc_RNA (1)...(19): siRNA sense strand
gggaagggcauaucuggau

SEQ ID NO: 119201 - RNA, 19 nt, Homo sapiens
  misc_RNA (1)...(19): siRNA sense strand
cuacagauacuacuucaag

SEQ ID NO: 119202 - RNA, 19 nt, Homo sapiens
  misc_RNA (1)...(19): siRNA sense strand
gcauuaaaggugagacuuc

SEQ ID NO: 119203 - RNA, 19 nt, Homo sapiens
  misc_RNA (1)...(19): siRNA sense strand
gcaucguuguggcguacua

SEQ ID NO: 119204 - RNA, 19 nt, Homo sapiens
  misc_RNA (1)...(19): siRNA sense strand
gagaagaucaucggcaaag

SEQ ID NO: 119205 - RNA, 19 nt, Homo sapiens
  misc_RNA (1)...(19): siRNA sense strand
ugcauucccugcuggauga

SEQ ID NO: 119206 - RNA, 19 nt, Homo sapiens
  misc_RNA (1)...(19): siRNA sense strand
gagcgacgaguuugacugu

SEQ ID NO: 119207 - RNA, 19 nt, Homo sapiens
  misc_RNA (1)...(19): siRNA sense strand
ggaugaccaagaugggaua

SEQ ID NO: 119208 - RNA, 19 nt, Homo sapiens
  misc_RNA (1)...(19): siRNA sense strand
gauaccugccgaccuuaaa

SEQ ID NO: 119209 - RNA, 19 nt, Homo sapiens
  misc_RNA (1)...(19): siRNA sense strand
ggauaccugccgaccuuaa

SEQ ID NO: 119210 - RNA, 19 nt, Homo sapiens
  misc_RNA (1)...(19): siRNA sense strand
gaaauccaggccacuaugg

SEQ ID NO: 119211 - RNA, 19 nt, Homo sapiens
  misc_RNA (1)...(19): siRNA sense strand
ccuccuuccuuaagucuga

SEQ ID NO: 119212 - RNA, 19 nt, Homo sapiens
  misc_RNA (1)...(19): siRNA sense strand
gaagaugaggaauggaagu

SEQ ID NO: 119213 - RNA, 19 nt, Homo sapiens
  misc_RNA (1)...(19): siRNA sense strand
cuggauaccugccgaccuu

SEQ ID NO: 119214 - RNA, 19 nt, Homo sapiens
  misc_RNA (1)...(19): siRNA sense strand
accuaucccuccuuccuua

SEQ ID NO: 119215 - RNA, 19 nt, Homo sapiens
  misc_RNA (1)...(19): siRNA sense strand
ggagaagaucaucggcaaa

SEQ ID NO: 119216 - RNA, 19 nt, Homo sapiens
  misc_RNA (1)...(19): siRNA sense strand
gcaaaagaaaugccaagaa

SEQ ID NO: 119217 - RNA, 19 nt, Homo sapiens
  misc_RNA (1)...(19): siRNA sense strand
gaccaggcccagaccgaaa

SEQ ID NO: 119218 - RNA, 19 nt, Homo sapiens
  misc_RNA (1)...(19): siRNA sense strand
ggcagagaguucagguaug

SEQ ID NO: 119219 - RNA, 19 nt, Homo sapiens
  misc_RNA (1)...(19): siRNA sense strand
ggacagggaagggcauauc

SEQ ID NO: 119220 - RNA, 19 nt, Homo sapiens
  misc_RNA (1)...(19): siRNA sense strand
acagauacuacuucaagaa

SEQ ID NO: 119221 - RNA, 19 nt, Homo sapiens
  misc_RNA (1)...(19): siRNA sense strand
ccagacccuugucccuuga

SEQ ID NO: 119222 - RNA, 19 nt, Homo sapiens
  misc_RNA (1)...(19): siRNA sense strand
gaagugugaccaggacaug

SEQ ID NO: 119223 - RNA, 19 nt, Homo sapiens
  misc_RNA (1)...(19): siRNA sense strand
uugcuggacuucugguuug

SEQ ID NO: 119224 - RNA, 19 nt, Homo sapiens
  misc_RNA (1)...(19): siRNA sense strand
gggaugcacacgaggagaa

SEQ ID NO: 119225 - RNA, 19 nt, Homo sapiens
  misc_RNA (1)...(19): siRNA sense strand
cagcgaaggcagagaguuc

SEQ ID NO: 119226 - RNA, 19 nt, Homo sapiens
  misc_RNA (1)...(19): siRNA sense strand
cggaggaugcggagaagaa

SEQ ID NO: 119227 - RNA, 19 nt, Homo sapiens
  misc_RNA (1)...(19): siRNA sense strand
ggaagcuggagcccuguga

SEQ ID NO: 119228 - RNA, 19 nt, Homo sapiens
  misc_RNA (1)...(19): siRNA sense strand
caagaucgcagaggaaggu

SEQ ID NO: 119229 - RNA, 19 nt, Homo sapiens
  misc_RNA (1)...(19): siRNA sense strand
gaagcacguacccaaguca

SEQ ID NO: 119230 - RNA, 19 nt, Homo sapiens
  misc_RNA (1)...(19): siRNA sense strand
gggaagcacguacccaagu

SEQ ID NO: 119231 - RNA, 19 nt, Homo sapiens
  misc_RNA (1)...(19): siRNA sense strand
ggaccucggagcaaguuuc

SEQ ID NO: 119232 - RNA, 19 nt, Homo sapiens
  misc_RNA (1)...(19): siRNA sense strand
gcaaguuucaccgaagaug

SEQ ID NO: 119233 - RNA, 19 nt, Homo sapiens
  misc_RNA (1)...(19): siRNA sense strand
uacagauacuacuucaaga

SEQ ID NO: 119234 - RNA, 19 nt, Homo sapiens
  misc_RNA (1)...(19): siRNA sense strand
gcagcuacagauacuacuu

SEQ ID NO: 119235 - RNA, 19 nt, Homo sapiens
  misc_RNA (1)...(19): siRNA sense strand
cugccgaccuuaaaugaag

SEQ ID NO: 119236 - RNA, 19 nt, Homo sapiens
  misc_RNA (1)...(19): siRNA sense strand
gggcugagucacugcauuc

SEQ ID NO: 119237 - RNA, 19 nt, Homo sapiens
  misc_RNA (1)...(19): siRNA sense strand
cgaaauccaggccacuaug

SEQ ID NO: 119238 - RNA, 19 nt, Homo sapiens
  misc_RNA (1)...(19): siRNA sense strand
gaugggauaagccuguuca

SEQ ID NO: 119239 - RNA, 19 nt, Homo sapiens
  misc_RNA (1)...(19): siRNA sense strand
ugaccaagaugggauaagc

SEQ ID NO: 119240 - RNA, 19 nt, Homo sapiens
  misc_RNA (1)...(19): siRNA sense strand
gaagacucccucagaagcu

SEQ ID NO: 119241 - RNA, 19 nt, Homo sapiens
  misc_RNA (1)...(19): siRNA sense strand
ucccgaggcuacucagaga

SEQ ID NO: 119242 - RNA, 19 nt, Homo sapiens
  misc_RNA (1)...(19): siRNA sense strand
caccaagagcuucauaaag

SEQ ID NO: 119243 - RNA, 19 nt, Homo sapiens
  misc_RNA (1)...(19): siRNA sense strand
uaaagggcugcaucaugaa

SEQ ID NO: 119244 - RNA, 19 nt, Homo sapiens
  misc_RNA (1)...(19): siRNA sense strand
ggaagugugaccaggacau

SEQ ID NO: 119245 - RNA, 19 nt, Homo sapiens
  misc_RNA (1)...(19): siRNA sense strand
cauacaggauccguaagca

SEQ ID NO: 119246 - RNA, 19 nt, Homo sapiens
  misc_RNA (1)...(19): siRNA sense strand
agagccaucuaccgaaagu

SEQ ID NO: 119247 - RNA, 19 nt, Homo sapiens
  misc_RNA (1)...(19): siRNA sense strand
aaagugagcgacgaguuug

SEQ ID NO: 119248 - RNA, 19 nt, Homo sapiens
  misc_RNA (1)...(19): siRNA sense strand
ccugcuggaugaccaagau

SEQ ID NO: 119249 - RNA, 19 nt, Homo sapiens
  misc_RNA (1)...(19): siRNA sense strand
aggcagagaguucagguau

SEQ ID NO: 119250 - RNA, 19 nt, Homo sapiens
  misc_RNA (1)...(19): siRNA sense strand
ugaucgauccugccauguu

SEQ ID NO: 119251 - RNA, 19 nt, Homo sapiens
  misc_RNA (1)...(19): siRNA sense strand
agaccaagccagccaccaa

SEQ ID NO: 119252 - RNA, 19 nt, Homo sapiens
  misc_RNA (1)...(19): siRNA sense strand
cguggagccucagaaguuc

SEQ ID NO: 119253 - RNA, 19 nt, Homo sapiens
  misc_RNA (1)...(19): siRNA sense strand
agaaagugagcgacgaguu

SEQ ID NO: 119254 - RNA, 19 nt, Homo sapiens
  misc_RNA (1)...(19): siRNA sense strand
agauacuacuucaagaaag

SEQ ID NO: 119255 - RNA, 19 nt, Homo sapiens
  misc_RNA (1)...(19): siRNA sense strand
cagcuacagauacuacuuc

SEQ ID NO: 119256 - RNA, 19 nt, Homo sapiens
  misc_RNA (1)...(19): siRNA sense strand
gugggcacguggccaagau

SEQ ID NO: 119257 - RNA, 19 nt, Homo sapiens
  misc_RNA (1)...(19): siRNA sense strand
ucaugaagcagcugaucga

SEQ ID NO: 119258 - RNA, 19 nt, Homo sapiens
  misc_RNA (1)...(19): siRNA sense strand
gugccgacuugcuggacuu

SEQ ID NO: 119259 - RNA, 19 nt, Homo sapiens
  misc_RNA (1)...(19): siRNA sense strand
ggagagcgugcaggucaau

SEQ ID NO: 119260 - RNA, 19 nt, Homo sapiens
  misc_RNA (1)...(19): siRNA sense strand
uuaugucaaugccggcuau

SEQ ID NO: 119261 - RNA, 19 nt, Homo sapiens
  misc_RNA (1)...(19): siRNA sense strand
cgaccuuaaaugaagauga

SEQ ID NO: 119262 - RNA, 19 nt, Homo sapiens
  misc_RNA (1)...(19): siRNA sense strand
ccaggccacuauggaggaa

SEQ ID NO: 119263 - RNA, 19 nt, Homo sapiens
  misc_RNA (1)...(19): siRNA sense strand
ggaaagguguuggcauuaa

SEQ ID NO: 119264 - RNA, 19 nt, Homo sapiens
  misc_RNA (1)...(19): siRNA sense strand
gaaagguguuggcauuaaa

SEQ ID NO: 119265 - RNA, 19 nt, Homo sapiens
  misc_RNA (1)...(19): siRNA sense strand
gaucgauccugccauguuu

SEQ ID NO: 119266 - RNA, 19 nt, Homo sapiens
  misc_RNA (1)...(19): siRNA sense strand
gaaagugagcgacgaguuu

SEQ ID NO: 119267 - RNA, 19 nt, Homo sapiens
  misc_RNA (1)...(19): siRNA sense strand
auaaagggcugcaucauga

SEQ ID NO: 119268 - RNA, 19 nt, Homo sapiens
  misc_RNA (1)...(19): siRNA sense strand
ucaaggagcugcugaccaa

SEQ ID NO: 119269 - RNA, 19 nt, Homo sapiens
  misc_RNA (1)...(19): siRNA sense strand
gagcaaguuucaccgaaga

SEQ ID NO: 119270 - RNA, 19 nt, Homo sapiens
  misc_RNA (1)...(19): siRNA sense strand
gcagagaguucagguaugg

SEQ ID NO: 119271 - RNA, 19 nt, Homo sapiens
  misc_RNA (1)...(19): siRNA sense strand
cgaaaguacauucuugaua

SEQ ID NO: 119272 - RNA, 19 nt, Homo sapiens
  misc_RNA (1)...(19): siRNA sense strand
gagaacugguguccacaga

SEQ ID NO: 119273 - RNA, 19 nt, Homo sapiens
  misc_RNA (1)...(19): siRNA sense strand
cgagagccaucuaccgaaa

SEQ ID NO: 119274 - RNA, 19 nt, Homo sapiens
  misc_RNA (1)...(19): siRNA sense strand
cgggaaagguguuggcauu

SEQ ID NO: 119275 - RNA, 19 nt, Homo sapiens
  misc_RNA (1)...(19): siRNA sense strand
gaagaucaucggcaaagug

SEQ ID NO: 119276 - RNA, 19 nt, Homo sapiens
  misc_RNA (1)...(19): siRNA sense strand
gaccuuaaaugaagaugag

SEQ ID NO: 119277 - RNA, 19 nt, Homo sapiens
  misc_RNA (1)...(19): siRNA sense strand
uaaaugaagaugaggaaug

SEQ ID NO: 119278 - RNA, 19 nt, Homo sapiens
  misc_RNA (1)...(19): siRNA sense strand
caaaagaaaugccaagaag

SEQ ID NO: 119279 - RNA, 19 nt, Homo sapiens
  misc_RNA (1)...(19): siRNA sense strand
ggaagcacguacccaaguc

SEQ ID NO: 119280 - RNA, 19 nt, Homo sapiens
  misc_RNA (1)...(19): siRNA sense strand
ccaccaagagcuucauaaa

SEQ ID NO: 119281 - RNA, 19 nt, Homo sapiens
  misc_RNA (1)...(19): siRNA sense strand
accaagagcuucauaaagg

SEQ ID NO: 119282 - RNA, 19 nt, Homo sapiens
  misc_RNA (1)...(19): siRNA sense strand
gcguggagccucagaaguu

SEQ ID NO: 119283 - RNA, 19 nt, Homo sapiens
  misc_RNA (1)...(19): siRNA sense strand
gggaaagguguuggcauua

SEQ ID NO: 119284 - RNA, 19 nt, Homo sapiens
  misc_RNA (1)...(19): siRNA sense strand
ccggaagacucccucagaa

SEQ ID NO: 119285 - RNA, 19 nt, Homo sapiens
  misc_RNA (1)...(19): siRNA sense strand
cauaaagggcugcaucaug

SEQ ID NO: 119286 - RNA, 19 nt, Homo sapiens
  misc_RNA (1)...(19): siRNA sense strand
cagauacuacuucaagaaa

SEQ ID NO: 119287 - RNA, 19 nt, Homo sapiens
  misc_RNA (1)...(19): siRNA sense strand
uaccgaaaguacauucuug

SEQ ID NO: 119288 - RNA, 19 nt, Homo sapiens
  misc_RNA (1)...(19): siRNA sense strand
gagaagaaccagaaaauca

SEQ ID NO: 119289 - RNA, 19 nt, Homo sapiens
  misc_RNA (1)...(19): siRNA sense strand
aaaugaagaugaggaaugg

SEQ ID NO: 119290 - RNA, 19 nt, Homo sapiens
  misc_RNA (1)...(19): siRNA sense strand
gggaagggcauaucuggau

SEQ ID NO: 119291 - RNA, 19 nt, Homo sapiens
  misc_RNA (1)...(19): siRNA sense strand
cuacagauacuacuucaag

SEQ ID NO: 119292 - RNA, 19 nt, Homo sapiens
  misc_RNA (1)...(19): siRNA sense strand
gcauuaaaggugagacuuc

SEQ ID NO: 119293 - RNA, 19 nt, Homo sapiens
  misc_RNA (1)...(19): siRNA sense strand
gcaucguuguggcguacua

SEQ ID NO: 119294 - RNA, 19 nt, Homo sapiens
  misc_RNA (1)...(19): siRNA sense strand
gagaagaucaucggcaaag

SEQ ID NO: 119295 - RNA, 19 nt, Homo sapiens
  misc_RNA (1)...(19): siRNA sense strand
ugcauucccugcuggauga

SEQ ID NO: 119296 - RNA, 19 nt, Homo sapiens
  misc_RNA (1)...(19): siRNA sense strand
gagcgacgaguuugacugu

SEQ ID NO: 119297 - RNA, 19 nt, Homo sapiens
  misc_RNA (1)...(19): siRNA sense strand
ggaugaccaagaugggaua

SEQ ID NO: 119298 - RNA, 19 nt, Homo sapiens
  misc_RNA (1)...(19): siRNA sense strand
gauaccugccgaccuuaaa

SEQ ID NO: 119299 - RNA, 19 nt, Homo sapiens
  misc_RNA (1)...(19): siRNA sense strand
ggauaccugccgaccuuaa

SEQ ID NO: 119300 - RNA, 19 nt, Homo sapiens
  misc_RNA (1)...(19): siRNA sense strand
gaaauccaggccacuaugg

SEQ ID NO: 119301 - RNA, 19 nt, Homo sapiens
  misc_RNA (1)...(19): siRNA sense strand
ccuccuuccuuaagucuga

SEQ ID NO: 119302 - RNA, 19 nt, Homo sapiens
  misc_RNA (1)...(19): siRNA sense strand
gaagaugaggaauggaagu

SEQ ID NO: 119303 - RNA, 19 nt, Homo sapiens
  misc_RNA (1)...(19): siRNA sense strand
cuggauaccugccgaccuu

SEQ ID NO: 119304 - RNA, 19 nt, Homo sapiens
  misc_RNA (1)...(19): siRNA sense strand
accuaucccuccuuccuua

SEQ ID NO: 119305 - RNA, 19 nt, Homo sapiens
  misc_RNA (1)...(19): siRNA sense strand
ggagaagaucaucggcaaa

SEQ ID NO: 119306 - RNA, 19 nt, Homo sapiens
  misc_RNA (1)...(19): siRNA sense strand
gcaaaagaaaugccaagaa

SEQ ID NO: 119307 - RNA, 19 nt, Homo sapiens
  misc_RNA (1)...(19): siRNA sense strand
gaccaggcccagaccgaaa

SEQ ID NO: 119308 - RNA, 19 nt, Homo sapiens
  misc_RNA (1)...(19): siRNA sense strand
ggcagagaguucagguaug

SEQ ID NO: 119309 - RNA, 19 nt, Homo sapiens
  misc_RNA (1)...(19): siRNA sense strand
ggacagggaagggcauauc

SEQ ID NO: 119310 - RNA, 19 nt, Homo sapiens
  misc_RNA (1)...(19): siRNA sense strand
acagauacuacuucaagaa

SEQ ID NO: 119311 - RNA, 19 nt, Homo sapiens
  misc_RNA (1)...(19): siRNA sense strand
ccagacccuugucccuuga

SEQ ID NO: 119312 - RNA, 19 nt, Homo sapiens
  misc_RNA (1)...(19): siRNA sense strand
gaagugugaccaggacaug

SEQ ID NO: 119313 - RNA, 19 nt, Homo sapiens
  misc_RNA (1)...(19): siRNA sense strand
uugcuggacuucugguuug

SEQ ID NO: 119314 - RNA, 19 nt, Homo sapiens
  misc_RNA (1)...(19): siRNA sense strand
gggaugcacacgaggagaa

SEQ ID NO: 119315 - RNA, 19 nt, Homo sapiens
  misc_RNA (1)...(19): siRNA sense strand
cagcgaaggcagagaguuc

SEQ ID NO: 119316 - RNA, 19 nt, Homo sapiens
  misc_RNA (1)...(19): siRNA sense strand
cggaggaugcggagaagaa

SEQ ID NO: 119317 - RNA, 19 nt, Homo sapiens
  misc_RNA (1)...(19): siRNA sense strand
ggaagcuggagcccuguga

SEQ ID NO: 119318 - RNA, 19 nt, Homo sapiens
  misc_RNA (1)...(19): siRNA sense strand
caagaucgcagaggaaggu

SEQ ID NO: 119319 - RNA, 19 nt, Homo sapiens
  misc_RNA (1)...(19): siRNA sense strand
gaagcacguacccaaguca

SEQ ID NO: 119320 - RNA, 19 nt, Homo sapiens
  misc_RNA (1)...(19): siRNA sense strand
gggaagcacguacccaagu

SEQ ID NO: 119321 - RNA, 19 nt, Homo sapiens
  misc_RNA (1)...(19): siRNA sense strand
ggaccucggagcaaguuuc

SEQ ID NO: 119322 - RNA, 19 nt, Homo sapiens
  misc_RNA (1)...(19): siRNA sense strand
gcaaguuucaccgaagaug

SEQ ID NO: 119323 - RNA, 19 nt, Homo sapiens
  misc_RNA (1)...(19): siRNA sense strand
uacagauacuacuucaaga

SEQ ID NO: 119324 - RNA, 19 nt, Homo sapiens
  misc_RNA (1)...(19): siRNA sense strand
gcagcuacagauacuacuu

SEQ ID NO: 119325 - RNA, 19 nt, Homo sapiens
  misc_RNA (1)...(19): siRNA sense strand
cugccgaccuuaaaugaag

SEQ ID NO: 119326 - RNA, 19 nt, Homo sapiens
  misc_RNA (1)...(19): siRNA sense strand
gggcugagucacugcauuc

SEQ ID NO: 119327 - RNA, 19 nt, Homo sapiens
  misc_RNA (1)...(19): siRNA sense strand
cgaaauccaggccacuaug

SEQ ID NO: 119328 - RNA, 19 nt, Homo sapiens
  misc_RNA (1)...(19): siRNA sense strand
gaugggauaagccuguuca

SEQ ID NO: 119329 - RNA, 19 nt, Homo sapiens
  misc_RNA (1)...(19): siRNA sense strand
ugaccaagaugggauaagc

SEQ ID NO: 119330 - RNA, 19 nt, Homo sapiens
  misc_RNA (1)...(19): siRNA sense strand
gaagacucccucagaagcu

SEQ ID NO: 119331 - RNA, 19 nt, Homo sapiens
  misc_RNA (1)...(19): siRNA sense strand
ucccgaggcuacucagaga

SEQ ID NO: 119332 - RNA, 19 nt, Homo sapiens
  misc_RNA (1)...(19): siRNA sense strand
caccaagagcuucauaaag

SEQ ID NO: 119333 - RNA, 19 nt, Homo sapiens
  misc_RNA (1)...(19): siRNA sense strand
uaaagggcugcaucaugaa

SEQ ID NO: 119334 - RNA, 19 nt, Homo sapiens
  misc_RNA (1)...(19): siRNA sense strand
ggaagugugaccaggacau

SEQ ID NO: 119335 - RNA, 19 nt, Homo sapiens
  misc_RNA (1)...(19): siRNA sense strand
cauacaggauccguaagca

SEQ ID NO: 119336 - RNA, 19 nt, Homo sapiens
  misc_RNA (1)...(19): siRNA sense strand
agagccaucuaccgaaagu

SEQ ID NO: 119337 - RNA, 19 nt, Homo sapiens
  misc_RNA (1)...(19): siRNA sense strand
aaagugagcgacgaguuug

SEQ ID NO: 119338 - RNA, 19 nt, Homo sapiens
  misc_RNA (1)...(19): siRNA sense strand
ccugcuggaugaccaagau

SEQ ID NO: 119339 - RNA, 19 nt, Homo sapiens
  misc_RNA (1)...(19): siRNA sense strand
aggcagagaguucagguau

SEQ ID NO: 119340 - RNA, 19 nt, Homo sapiens
  misc_RNA (1)...(19): siRNA sense strand
ugaucgauccugccauguu

SEQ ID NO: 119341 - RNA, 19 nt, Homo sapiens
  misc_RNA (1)...(19): siRNA sense strand
agaccaagccagccaccaa

SEQ ID NO: 119342 - RNA, 19 nt, Homo sapiens
  misc_RNA (1)...(19): siRNA sense strand
cguggagccucagaaguuc

SEQ ID NO: 119343 - RNA, 19 nt, Homo sapiens
  misc_RNA (1)...(19): siRNA sense strand
agaaagugagcgacgaguu

SEQ ID NO: 119344 - RNA, 19 nt, Homo sapiens
  misc_RNA (1)...(19): siRNA sense strand
agauacuacuucaagaaag

SEQ ID NO: 119345 - RNA, 19 nt, Homo sapiens
  misc_RNA (1)...(19): siRNA sense strand
cagcuacagauacuacuuc

SEQ ID NO: 119346 - RNA, 19 nt, Homo sapiens
  misc_RNA (1)...(19): siRNA sense strand
gugggcacguggccaagau

SEQ ID NO: 119347 - RNA, 19 nt, Homo sapiens
  misc_RNA (1)...(19): siRNA sense strand
ucaugaagcagcugaucga

SEQ ID NO: 119348 - RNA, 19 nt, Homo sapiens
  misc_RNA (1)...(19): siRNA sense strand
gugccgacuugcuggacuu

SEQ ID NO: 119349 - RNA, 19 nt, Homo sapiens
  misc_RNA (1)...(19): siRNA sense strand
ggagagcgugcaggucaau

SEQ ID NO: 119350 - RNA, 19 nt, Homo sapiens
  misc_RNA (1)...(19): siRNA sense strand
uuaugucaaugccggcuau

SEQ ID NO: 119351 - RNA, 19 nt, Homo sapiens
  misc_RNA (1)...(19): siRNA sense strand
cgaccuuaaaugaagauga

SEQ ID NO: 119352 - RNA, 19 nt, Homo sapiens
  misc_RNA (1)...(19): siRNA sense strand
ccaggccacuauggaggaa

SEQ ID NO: 119353 - RNA, 19 nt, Homo sapiens
  misc_RNA (1)...(19): siRNA sense strand
gaagaaugaucauguaguu

SEQ ID NO: 119354 - RNA, 19 nt, Homo sapiens
  misc_RNA (1)...(19): siRNA sense strand
ggaaugagguaccugauga

SEQ ID NO: 119355 - RNA, 19 nt, Homo sapiens
  misc_RNA (1)...(19): siRNA sense strand
caggaaagguguucacaaa

SEQ ID NO: 119356 - RNA, 19 nt, Homo sapiens
  misc_RNA (1)...(19): siRNA sense strand
guacgggaauauaugcuua

SEQ ID NO: 119357 - RNA, 19 nt, Homo sapiens
  misc_RNA (1)...(19): siRNA sense strand
cuacacaaaugcacaaauu

SEQ ID NO: 119358 - RNA, 19 nt, Homo sapiens
  misc_RNA (1)...(19): siRNA sense strand
gggaauauaugcuuaaucu

SEQ ID NO: 119359 - RNA, 19 nt, Homo sapiens
  misc_RNA (1)...(19): siRNA sense strand
ggacaauacucagggaauu

SEQ ID NO: 119360 - RNA, 19 nt, Homo sapiens
  misc_RNA (1)...(19): siRNA sense strand
caaagaaguuccagcacaa

SEQ ID NO: 119361 - RNA, 19 nt, Homo sapiens
  misc_RNA (1)...(19): siRNA sense strand
caccagaggucuugacaaa

SEQ ID NO: 119362 - RNA, 19 nt, Homo sapiens
  misc_RNA (1)...(19): siRNA sense strand
aaacaaaucccacauaauc

SEQ ID NO: 119363 - RNA, 19 nt, Homo sapiens
  misc_RNA (1)...(19): siRNA sense strand
aaauccagcuucaagaaua

SEQ ID NO: 119364 - RNA, 19 nt, Homo sapiens
  misc_RNA (1)...(19): siRNA sense strand
gauaaugucaugggaguua

SEQ ID NO: 119365 - RNA, 19 nt, Homo sapiens
  misc_RNA (1)...(19): siRNA sense strand
cuacgaaaguuaugaauag

SEQ ID NO: 119366 - RNA, 19 nt, Homo sapiens
  misc_RNA (1)...(19): siRNA sense strand
agagaagacugaccauaaa

SEQ ID NO: 119367 - RNA, 19 nt, Homo sapiens
  misc_RNA (1)...(19): siRNA sense strand
caaaacaaaucccacauaa

SEQ ID NO: 119368 - RNA, 19 nt, Homo sapiens
  misc_RNA (1)...(19): siRNA sense strand
gcaggugucauauuucuuu

SEQ ID NO: 119369 - RNA, 19 nt, Homo sapiens
  misc_RNA (1)...(19): siRNA sense strand
ugagagcccugcagugaaa

SEQ ID NO: 119370 - RNA, 19 nt, Homo sapiens
  misc_RNA (1)...(19): siRNA sense strand
ccagaggucuugacaaagu

SEQ ID NO: 119371 - RNA, 19 nt, Homo sapiens
  misc_RNA (1)...(19): siRNA sense strand
cagagaagacugaccauaa

SEQ ID NO: 119372 - RNA, 19 nt, Homo sapiens
  misc_RNA (1)...(19): siRNA sense strand
gaacuucagugccuaacag

SEQ ID NO: 119373 - RNA, 19 nt, Homo sapiens
  misc_RNA (1)...(19): siRNA sense strand
ucaaacaccuccaggacaa

SEQ ID NO: 119374 - RNA, 19 nt, Homo sapiens
  misc_RNA (1)...(19): siRNA sense strand
caaucaaacuacagcaauu

SEQ ID NO: 119375 - RNA, 19 nt, Homo sapiens
  misc_RNA (1)...(19): siRNA sense strand
cuagaaaguuagcaacaaa

SEQ ID NO: 119376 - RNA, 19 nt, Homo sapiens
  misc_RNA (1)...(19): siRNA sense strand
gaucagcaguccaccacaa

SEQ ID NO: 119377 - RNA, 19 nt, Homo sapiens
  misc_RNA (1)...(19): siRNA sense strand
cacaaaagcuucuguuaaa

SEQ ID NO: 119378 - RNA, 19 nt, Homo sapiens
  misc_RNA (1)...(19): siRNA sense strand
cagcuagccugaccuguga

SEQ ID NO: 119379 - RNA, 19 nt, Homo sapiens
  misc_RNA (1)...(19): siRNA sense strand
uaggaagaaugaucaugua

SEQ ID NO: 119380 - RNA, 19 nt, Homo sapiens
  misc_RNA (1)...(19): siRNA sense strand
ugccauaucuggagcauga

SEQ ID NO: 119381 - RNA, 19 nt, Homo sapiens
  misc_RNA (1)...(19): siRNA sense strand
aguaggaccugaagagaaa

SEQ ID NO: 119382 - RNA, 19 nt, Homo sapiens
  misc_RNA (1)...(19): siRNA sense strand
gagcagaauuuuaaacuug

SEQ ID NO: 119383 - RNA, 19 nt, Homo sapiens
  misc_RNA (1)...(19): siRNA sense strand
gaucauguaguuauugcua

SEQ ID NO: 119384 - RNA, 19 nt, Homo sapiens
  misc_RNA (1)...(19): siRNA sense strand
gcuuaugaccugcuugaua

SEQ ID NO: 119385 - RNA, 19 nt, Homo sapiens
  misc_RNA (1)...(19): siRNA sense strand
aguaauagcugugagcauu

SEQ ID NO: 119386 - RNA, 19 nt, Homo sapiens
  misc_RNA (1)...(19): siRNA sense strand
uguacugucuagaaaguua

SEQ ID NO: 119387 - RNA, 19 nt, Homo sapiens
  misc_RNA (1)...(19): siRNA sense strand
gauguacugucuagaaagu

SEQ ID NO: 119388 - RNA, 19 nt, Homo sapiens
  misc_RNA (1)...(19): siRNA sense strand
uuucagcucuguuuauuug

SEQ ID NO: 119389 - RNA, 19 nt, Homo sapiens
  misc_RNA (1)...(19): siRNA sense strand
gaaacuauccaagcugcua

SEQ ID NO: 119390 - RNA, 19 nt, Homo sapiens
  misc_RNA (1)...(19): siRNA sense strand
ccaacaagucauccuauaa

SEQ ID NO: 119391 - RNA, 19 nt, Homo sapiens
  misc_RNA (1)...(19): siRNA sense strand
gauguuaagcccagcaauu

SEQ ID NO: 119392 - RNA, 19 nt, Homo sapiens
  misc_RNA (1)...(19): siRNA sense strand
caagaaguacgggaauaua

SEQ ID NO: 119393 - RNA, 19 nt, Homo sapiens
  misc_RNA (1)...(19): siRNA sense strand
caagucauccuauaagaau

SEQ ID NO: 119394 - RNA, 19 nt, Homo sapiens
  misc_RNA (1)...(19): siRNA sense strand
gcacuuucagcucuguuua

SEQ ID NO: 119395 - RNA, 19 nt, Homo sapiens
  misc_RNA (1)...(19): siRNA sense strand
uaccacagcuuaguaaugu

SEQ ID NO: 119396 - RNA, 19 nt, Homo sapiens
  misc_RNA (1)...(19): siRNA sense strand
uauaagaauugcagcugaa

SEQ ID NO: 119397 - RNA, 19 nt, Homo sapiens
  misc_RNA (1)...(19): siRNA sense strand
uuaaauuuguccagucuga

SEQ ID NO: 119398 - RNA, 19 nt, Homo sapiens
  misc_RNA (1)...(19): siRNA sense strand
gaaaauugcucuaaaacac

SEQ ID NO: 119399 - RNA, 19 nt, Homo sapiens
  misc_RNA (1)...(19): siRNA sense strand
aagaauaacagcagaagaa

SEQ ID NO: 119400 - RNA, 19 nt, Homo sapiens
  misc_RNA (1)...(19): siRNA sense strand
caacagauaaaguuuguag

SEQ ID NO: 119401 - RNA, 19 nt, Homo sapiens
  misc_RNA (1)...(19): siRNA sense strand
gucaaagacuguggaugua

SEQ ID NO: 119402 - RNA, 19 nt, Homo sapiens
  misc_RNA (1)...(19): siRNA sense strand
caacaagucauccuauaag

SEQ ID NO: 119403 - RNA, 19 nt, Homo sapiens
  misc_RNA (1)...(19): siRNA sense strand
aaauacugcuuuaggaaga

SEQ ID NO: 119404 - RNA, 19 nt, Homo sapiens
  misc_RNA (1)...(19): siRNA sense strand
uaaagcuucuugccucguu

SEQ ID NO: 119405 - RNA, 19 nt, Homo sapiens
  misc_RNA (1)...(19): siRNA sense strand
gugaugauuuaacugcuuu

SEQ ID NO: 119406 - RNA, 19 nt, Homo sapiens
  misc_RNA (1)...(19): siRNA sense strand
cuacagcaauugacaugug

SEQ ID NO: 119407 - RNA, 19 nt, Homo sapiens
  misc_RNA (1)...(19): siRNA sense strand
gcacaaauucagauuaaac

SEQ ID NO: 119408 - RNA, 19 nt, Homo sapiens
  misc_RNA (1)...(19): siRNA sense strand
agaagaagcuuuguugcau

SEQ ID NO: 119409 - RNA, 19 nt, Homo sapiens
  misc_RNA (1)...(19): siRNA sense strand
ucugaauucucuuuccuuu

SEQ ID NO: 119410 - RNA, 19 nt, Homo sapiens
  misc_RNA (1)...(19): siRNA sense strand
ggugucauauuucuuucuu

SEQ ID NO: 119411 - RNA, 19 nt, Homo sapiens
  misc_RNA (1)...(19): siRNA sense strand
ggaaaggagggaucuguag

SEQ ID NO: 119412 - RNA, 19 nt, Homo sapiens
  misc_RNA (1)...(19): siRNA sense strand
aaacaagauuccacugagu

SEQ ID NO: 119413 - RNA, 19 nt, Homo sapiens
  misc_RNA (1)...(19): siRNA sense strand
gcccaaggaacccaugaua

SEQ ID NO: 119414 - RNA, 19 nt, Homo sapiens
  misc_RNA (1)...(19): siRNA sense strand
uccaacaagucauccuaua

SEQ ID NO: 119415 - RNA, 19 nt, Homo sapiens
  misc_RNA (1)...(19): siRNA sense strand
gucugcaggugucauauuu

SEQ ID NO: 119416 - RNA, 19 nt, Homo sapiens
  misc_RNA (1)...(19): siRNA sense strand
caugagagcccugcaguga

SEQ ID NO: 119417 - RNA, 19 nt, Homo sapiens
  misc_RNA (1)...(19): siRNA sense strand
cagugaaacucaugaagca

SEQ ID NO: 119418 - RNA, 19 nt, Homo sapiens
  misc_RNA (1)...(19): siRNA sense strand
uuaaagauaugagcuugug

SEQ ID NO: 119419 - RNA, 19 nt, Homo sapiens
  misc_RNA (1)...(19): siRNA sense strand
ucagauggaugagccaaug

SEQ ID NO: 119420 - RNA, 19 nt, Homo sapiens
  misc_RNA (1)...(19): siRNA sense strand
uggauguacugucuagaaa

SEQ ID NO: 119421 - RNA, 19 nt, Homo sapiens
  misc_RNA (1)...(19): siRNA sense strand
aauccagcuucaagaauaa

SEQ ID NO: 119422 - RNA, 19 nt, Homo sapiens
  misc_RNA (1)...(19): siRNA sense strand
ugagguaccugaugaagcu

SEQ ID NO: 119423 - RNA, 19 nt, Homo sapiens
  misc_RNA (1)...(19): siRNA sense strand
uaaacuugcagguguuaaa

SEQ ID NO: 119424 - RNA, 19 nt, Homo sapiens
  misc_RNA (1)...(19): siRNA sense strand
ugacugcuaugcaacagau

SEQ ID NO: 119425 - RNA, 19 nt, Homo sapiens
  misc_RNA (1)...(19): siRNA sense strand
uaaaagacccuacacaaau

SEQ ID NO: 119426 - RNA, 19 nt, Homo sapiens
  misc_RNA (1)...(19): siRNA sense strand
ggaagaaugaucauguagu

SEQ ID NO: 119427 - RNA, 19 nt, Homo sapiens
  misc_RNA (1)...(19): siRNA sense strand
ggaaagguguucacaaaac

SEQ ID NO: 119428 - RNA, 19 nt, Homo sapiens
  misc_RNA (1)...(19): siRNA sense strand
cagagaaacuauccaagcu

SEQ ID NO: 119429 - RNA, 19 nt, Homo sapiens
  misc_RNA (1)...(19): siRNA sense strand
caaagacuguggauguacu

SEQ ID NO: 119430 - RNA, 19 nt, Homo sapiens
  misc_RNA (1)...(19): siRNA sense strand
caauauacacagcuccauu

SEQ ID NO: 119431 - RNA, 19 nt, Homo sapiens
  misc_RNA (1)...(19): siRNA sense strand
gcaggaaagguguucacaa

SEQ ID NO: 119432 - RNA, 19 nt, Homo sapiens
  misc_RNA (1)...(19): siRNA sense strand
uaacagcagaagaagcuuu

SEQ ID NO: 119433 - RNA, 19 nt, Homo sapiens
  misc_RNA (1)...(19): siRNA sense strand
guaccacagcuuaguaaug

SEQ ID NO: 119434 - RNA, 19 nt, Homo sapiens
  misc_RNA (1)...(19): siRNA sense strand
gcauucaucaguuugguau

SEQ ID NO: 119435 - RNA, 19 nt, Homo sapiens
  misc_RNA (1)...(19): siRNA sense strand
cuaaauccagcuucaagaa

SEQ ID NO: 119436 - RNA, 19 nt, Homo sapiens
  misc_RNA (1)...(19): siRNA sense strand
acacaaaugcacaaauuca

SEQ ID NO: 119437 - RNA, 19 nt, Homo sapiens
  misc_RNA (1)...(19): siRNA sense strand
ccacaaaagcuucuguuaa

SEQ ID NO: 119438 - RNA, 19 nt, Homo sapiens
  misc_RNA (1)...(19): siRNA sense strand
aaccagcuauuucagagaa

SEQ ID NO: 119439 - RNA, 19 nt, Homo sapiens
  misc_RNA (1)...(19): siRNA sense strand
uucuagcacucccaaguua

SEQ ID NO: 119440 - RNA, 19 nt, Homo sapiens
  misc_RNA (1)...(19): siRNA sense strand
aauauacacagcuccauuu

SEQ ID NO: 119441 - RNA, 19 nt, Homo sapiens
  misc_RNA (1)...(19): siRNA sense strand
cuaaaacacuugauuccaa

SEQ ID NO: 119442 - RNA, 19 nt, Homo sapiens
  misc_RNA (1)...(19): siRNA sense strand
ccacagcacaguuacaagu

SEQ ID NO: 119443 - RNA, 19 nt, Homo sapiens
  misc_RNA (1)...(19): siRNA sense strand
aaacaccuccaggacaaua

SEQ ID NO: 119444 - RNA, 19 nt, Homo sapiens
  misc_RNA (1)...(19): siRNA sense strand
cuuaaucuguucaaagcuu

SEQ ID NO: 119445 - RNA, 19 nt, Homo sapiens
  misc_RNA (1)...(19): siRNA sense strand
gaaguacgggaauauaugc

SEQ ID NO: 119446 - RNA, 19 nt, Homo sapiens
  misc_RNA (1)...(19): siRNA sense strand
gaaugagguaccugaugaa

SEQ ID NO: 119447 - RNA, 19 nt, Homo sapiens
  misc_RNA (1)...(19): siRNA sense strand
acucagggaauucauuuaa

SEQ ID NO: 119448 - RNA, 19 nt, Homo sapiens
  misc_RNA (1)...(19): siRNA sense strand
ucuagaaaguuagcaacaa

SEQ ID NO: 119449 - RNA, 19 nt, Homo sapiens
  misc_RNA (1)...(19): siRNA sense strand
acagcuccauuucacauga

SEQ ID NO: 119450 - RNA, 19 nt, Homo sapiens
  misc_RNA (1)...(19): siRNA sense strand
caaaugcacaaauucagau

SEQ ID NO: 119451 - RNA, 19 nt, Homo sapiens
  misc_RNA (1)...(19): siRNA sense strand
uguuuaagauugaggacaa

SEQ ID NO: 119452 - RNA, 19 nt, Homo sapiens
  misc_RNA (1)...(19): siRNA sense strand
gaagcuuuguugcauccau

SEQ ID NO: 119453 - RNA, 19 nt, Homo sapiens
  misc_RNA (1)...(19): siRNA sense strand
caagaucacucaaaugaaa

SEQ ID NO: 119454 - RNA, 19 nt, Homo sapiens
  misc_RNA (1)...(19): siRNA sense strand
gcacacggaucuccuuuga

SEQ ID NO: 119455 - RNA, 19 nt, Homo sapiens
  misc_RNA (1)...(19): siRNA sense strand
gcaaacaccugcucaaguc

SEQ ID NO: 119456 - RNA, 19 nt, Homo sapiens
  misc_RNA (1)...(19): siRNA sense strand
ugaagagucugcaaauaaa

SEQ ID NO: 119457 - RNA, 19 nt, Homo sapiens
  misc_RNA (1)...(19): siRNA sense strand
gacaagaucacucaaauga

SEQ ID NO: 119458 - RNA, 19 nt, Homo sapiens
  misc_RNA (1)...(19): siRNA sense strand
ggacguggaugcucugugu

SEQ ID NO: 119459 - RNA, 19 nt, Homo sapiens
  misc_RNA (1)...(19): siRNA sense strand
ugaaauacgugacugaugu

SEQ ID NO: 119460 - RNA, 19 nt, Homo sapiens
  misc_RNA (1)...(19): siRNA sense strand
uaaacaagaugaugaccuu

SEQ ID NO: 119461 - RNA, 19 nt, Homo sapiens
  misc_RNA (1)...(19): siRNA sense strand
gagcuaauguagaccuauu

SEQ ID NO: 119462 - RNA, 19 nt, Homo sapiens
  misc_RNA (1)...(19): siRNA sense strand
ggaaaugauugaagagucu

SEQ ID NO: 119463 - RNA, 19 nt, Homo sapiens
  misc_RNA (1)...(19): siRNA sense strand
ggaguaaccuggacaagcu

SEQ ID NO: 119464 - RNA, 19 nt, Homo sapiens
  misc_RNA (1)...(19): siRNA sense strand
ccaaggaccugaaugacau

SEQ ID NO: 119465 - RNA, 19 nt, Homo sapiens
  misc_RNA (1)...(19): siRNA sense strand
ugaagcaggugaagcagaa

SEQ ID NO: 119466 - RNA, 19 nt, Homo sapiens
  misc_RNA (1)...(19): siRNA sense strand
gagacauccucuuugacua

SEQ ID NO: 119467 - RNA, 19 nt, Homo sapiens
  misc_RNA (1)...(19): siRNA sense strand
ucaaugucgucaauguaua

SEQ ID NO: 119468 - RNA, 19 nt, Homo sapiens
  misc_RNA (1)...(19): siRNA sense strand
gcaccaaccucgucaucuc

SEQ ID NO: 119469 - RNA, 19 nt, Homo sapiens
  misc_RNA (1)...(19): siRNA sense strand
cugcauuucuugagcauaa

SEQ ID NO: 119470 - RNA, 19 nt, Homo sapiens
  misc_RNA (1)...(19): siRNA sense strand
acacggaucuccuuugagu

SEQ ID NO: 119471 - RNA, 19 nt, Homo sapiens
  misc_RNA (1)...(19): siRNA sense strand
gaacgaggaugaggagaac

SEQ ID NO: 119472 - RNA, 19 nt, Homo sapiens
  misc_RNA (1)...(19): siRNA sense strand
ggaucuccuuugaguauga

SEQ ID NO: 119473 - RNA, 19 nt, Homo sapiens
  misc_RNA (1)...(19): siRNA sense strand
gugcagacuuucagcauuc

SEQ ID NO: 119474 - RNA, 19 nt, Homo sapiens
  misc_RNA (1)...(19): siRNA sense strand
ggaguuccuugcagacaug

SEQ ID NO: 119475 - RNA, 19 nt, Homo sapiens
  misc_RNA (1)...(19): siRNA sense strand
gucaauguauacaacgaua

SEQ ID NO: 119476 - RNA, 19 nt, Homo sapiens
  misc_RNA (1)...(19): siRNA sense strand
gcucaaguccuuugugugu

SEQ ID NO: 119477 - RNA, 19 nt, Homo sapiens
  misc_RNA (1)...(19): siRNA sense strand
ggacagaucacuucaucca

SEQ ID NO: 119478 - RNA, 19 nt, Homo sapiens
  misc_RNA (1)...(19): siRNA sense strand
ggaacgaggaugaggagaa

SEQ ID NO: 119479 - RNA, 19 nt, Homo sapiens
  misc_RNA (1)...(19): siRNA sense strand
cauaaacuguggagcuaau

SEQ ID NO: 119480 - RNA, 19 nt, Homo sapiens
  misc_RNA (1)...(19): siRNA sense strand
caagacaagaucacucaaa

SEQ ID NO: 119481 - RNA, 19 nt, Homo sapiens
  misc_RNA (1)...(19): siRNA sense strand
guagaccuauuggauauuc

SEQ ID NO: 119482 - RNA, 19 nt, Homo sapiens
  misc_RNA (1)...(19): siRNA sense strand
uugaagagucugcaaauaa

SEQ ID NO: 119483 - RNA, 19 nt, Homo sapiens
  misc_RNA (1)...(19): siRNA sense strand
ccauggacaucuccuugaa

SEQ ID NO: 119484 - RNA, 19 nt, Homo sapiens
  misc_RNA (1)...(19): siRNA sense strand
aagacaagaucacucaaau

SEQ ID NO: 119485 - RNA, 19 nt, Homo sapiens
  misc_RNA (1)...(19): siRNA sense strand
gccuggaacucgccaagaa

SEQ ID NO: 119486 - RNA, 19 nt, Homo sapiens
  misc_RNA (1)...(19): siRNA sense strand
gaaauacgugacugauguu

SEQ ID NO: 119487 - RNA, 19 nt, Homo sapiens
  misc_RNA (1)...(19): siRNA sense strand
ggccaucguuggacuaaca

SEQ ID NO: 119488 - RNA, 19 nt, Homo sapiens
  misc_RNA (1)...(19): siRNA sense strand
gagaagcgcacacgguuag

SEQ ID NO: 119489 - RNA, 19 nt, Homo sapiens
  misc_RNA (1)...(19): siRNA sense strand
ccagaucaaauuacucauu

SEQ ID NO: 119490 - RNA, 19 nt, Homo sapiens
  misc_RNA (1)...(19): siRNA sense strand
ucaaguccuuuguguguuc

SEQ ID NO: 119491 - RNA, 19 nt, Homo sapiens
  misc_RNA (1)...(19): siRNA sense strand
gaugaugaccuugaaguuc

SEQ ID NO: 119492 - RNA, 19 nt, Homo sapiens
  misc_RNA (1)...(19): siRNA sense strand
gaagagucugcaaauaaau

SEQ ID NO: 119493 - RNA, 19 nt, Homo sapiens
  misc_RNA (1)...(19): siRNA sense strand
cgucagccauggugauguu

SEQ ID NO: 119494 - RNA, 19 nt, Homo sapiens
  misc_RNA (1)...(19): siRNA sense strand
gaaguucccgccuaugaag

SEQ ID NO: 119495 - RNA, 19 nt, Homo sapiens
  misc_RNA (1)...(19): siRNA sense strand
gagcauaaagaacaguuuc

SEQ ID NO: 119496 - RNA, 19 nt, Homo sapiens
  misc_RNA (1)...(19): siRNA sense strand
ucacucaaaugaaauacgu

SEQ ID NO: 119497 - RNA, 19 nt, Homo sapiens
  misc_RNA (1)...(19): siRNA sense strand
gaugaagacacuauauucu

SEQ ID NO: 119498 - RNA, 19 nt, Homo sapiens
  misc_RNA (1)...(19): siRNA sense strand
gcuguaccauggccuggaa

SEQ ID NO: 119499 - RNA, 19 nt, Homo sapiens
  misc_RNA (1)...(19): siRNA sense strand
cagccauggugauguuuga

SEQ ID NO: 119500 - RNA, 19 nt, Homo sapiens
  misc_RNA (1)...(19): siRNA sense strand
acuacgagcaguaugaaua

SEQ ID NO: 119501 - RNA, 19 nt, Homo sapiens
  misc_RNA (1)...(19): siRNA sense strand
gggaugaagaggaggauga

SEQ ID NO: 119502 - RNA, 19 nt, Homo sapiens
  misc_RNA (1)...(19): siRNA sense strand
caacgauacccagaucaaa

SEQ ID NO: 119503 - RNA, 19 nt, Homo sapiens
  misc_RNA (1)...(19): siRNA sense strand
ccuauuggauauucuucaa

SEQ ID NO: 119504 - RNA, 19 nt, Homo sapiens
  misc_RNA (1)...(19): siRNA sense strand
gccagucaaugucgucaau

SEQ ID NO: 119505 - RNA, 19 nt, Homo sapiens
  misc_RNA (1)...(19): siRNA sense strand
uaauguagaccuauuggau

SEQ ID NO: 119506 - RNA, 19 nt, Homo sapiens
  misc_RNA (1)...(19): siRNA sense strand
uuauuucccuccuguccua

SEQ ID NO: 119507 - RNA, 19 nt, Homo sapiens
  misc_RNA (1)...(19): siRNA sense strand
aaggagaauuugcgggaaa

SEQ ID NO: 119508 - RNA, 19 nt, Homo sapiens
  misc_RNA (1)...(19): siRNA sense strand
aauguagaccuauuggaua

SEQ ID NO: 119509 - RNA, 19 nt, Homo sapiens
  misc_RNA (1)...(19): siRNA sense strand
gauugaagagucugcaaau

SEQ ID NO: 119510 - RNA, 19 nt, Homo sapiens
  misc_RNA (1)...(19): siRNA sense strand
aaacuguggagcuaaugua

SEQ ID NO: 119511 - RNA, 19 nt, Homo sapiens
  misc_RNA (1)...(19): siRNA sense strand
ggaugcugcacaaccauuu

SEQ ID NO: 119512 - RNA, 19 nt, Homo sapiens
  misc_RNA (1)...(19): siRNA sense strand
ugaugaagacacuauauuc

SEQ ID NO: 119513 - RNA, 19 nt, Homo sapiens
  misc_RNA (1)...(19): siRNA sense strand
auacaacgauacccagauc

SEQ ID NO: 119514 - RNA, 19 nt, Homo sapiens
  misc_RNA (1)...(19): siRNA sense strand
gguucaagcuguggucugu

SEQ ID NO: 119515 - RNA, 19 nt, Homo sapiens
  misc_RNA (1)...(19): siRNA sense strand
ugagaagcgcacacgguua

SEQ ID NO: 119516 - RNA, 19 nt, Homo sapiens
  misc_RNA (1)...(19): siRNA sense strand
cgauacccagaucaaauua

SEQ ID NO: 119517 - RNA, 19 nt, Homo sapiens
  misc_RNA (1)...(19): siRNA sense strand
cagucaaugucgucaaugu

SEQ ID NO: 119518 - RNA, 19 nt, Homo sapiens
  misc_RNA (1)...(19): siRNA sense strand
gaugucaugcuguucucua

SEQ ID NO: 119519 - RNA, 19 nt, Homo sapiens
  misc_RNA (1)...(19): siRNA sense strand
gaagcgcacacgguuagaa

SEQ ID NO: 119520 - RNA, 19 nt, Homo sapiens
  misc_RNA (1)...(19): siRNA sense strand
gucaaugucgucaauguau

SEQ ID NO: 119521 - RNA, 19 nt, Homo sapiens
  misc_RNA (1)...(19): siRNA sense strand
uguuugagcuggcuuggau

SEQ ID NO: 119522 - RNA, 19 nt, Homo sapiens
  misc_RNA (1)...(19): siRNA sense strand
cuacgagcaguaugaauau

SEQ ID NO: 119523 - RNA, 19 nt, Homo sapiens
  misc_RNA (1)...(19): siRNA sense strand
auugaagagucugcaaaua

SEQ ID NO: 119524 - RNA, 19 nt, Homo sapiens
  misc_RNA (1)...(19): siRNA sense strand
gaggaucggagcaaguuuc

SEQ ID NO: 119525 - RNA, 19 nt, Homo sapiens
  misc_RNA (1)...(19): siRNA sense strand
gcucggacaggaagaacuu

SEQ ID NO: 119526 - RNA, 19 nt, Homo sapiens
  misc_RNA (1)...(19): siRNA sense strand
cuauauucuuuguguguga

SEQ ID NO: 119527 - RNA, 19 nt, Homo sapiens
  misc_RNA (1)...(19): siRNA sense strand
gcucagggacagaucacuu

SEQ ID NO: 119528 - RNA, 19 nt, Homo sapiens
  misc_RNA (1)...(19): siRNA sense strand
ggccagcgacguggucuuu

SEQ ID NO: 119529 - RNA, 19 nt, Homo sapiens
  misc_RNA (1)...(19): siRNA sense strand
cgugcagacuuucagcauu

SEQ ID NO: 119530 - RNA, 19 nt, Homo sapiens
  misc_RNA (1)...(19): siRNA sense strand
gacaugcgcgugcagacuu

SEQ ID NO: 119531 - RNA, 19 nt, Homo sapiens
  misc_RNA (1)...(19): siRNA sense strand
cucauaaacuguggagcua

SEQ ID NO: 119532 - RNA, 19 nt, Homo sapiens
  misc_RNA (1)...(19): siRNA sense strand
gaggagauaguggagcaaa

SEQ ID NO: 119533 - RNA, 19 nt, Homo sapiens
  misc_RNA (1)...(19): siRNA sense strand
ggaugaagaggaggaugaa

SEQ ID NO: 119534 - RNA, 19 nt, Homo sapiens
  misc_RNA (1)...(19): siRNA sense strand
gcacuggucccuccaugac

SEQ ID NO: 119535 - RNA, 19 nt, Homo sapiens
  misc_RNA (1)...(19): siRNA sense strand
gcuguggucugugcaugga

SEQ ID NO: 119536 - RNA, 19 nt, Homo sapiens
  misc_RNA (1)...(19): siRNA sense strand
ggauauucuucaaccugau

SEQ ID NO: 119537 - RNA, 19 nt, Homo sapiens
  misc_RNA (1)...(19): siRNA sense strand
gcauaaagaacaguuucau

SEQ ID NO: 119538 - RNA, 19 nt, Homo sapiens
  misc_RNA (1)...(19): siRNA sense strand
uuucuggacgcacuuauuu

SEQ ID NO: 119539 - RNA, 19 nt, Homo sapiens
  misc_RNA (1)...(19): siRNA sense strand
gauauucuucaaccugaug

SEQ ID NO: 119540 - RNA, 19 nt, Homo sapiens
  misc_RNA (1)...(19): siRNA sense strand
auacgugacugauguuggu

SEQ ID NO: 119541 - RNA, 19 nt, Homo sapiens
  misc_RNA (1)...(19): siRNA sense strand
ugaaguucccgccuaugaa

SEQ ID NO: 119542 - RNA, 19 nt, Homo sapiens
  misc_RNA (1)...(19): siRNA sense strand
gugaccacgugcaauauac

SEQ ID NO: 119543 - RNA, 19 nt, Homo sapiens
  misc_RNA (1)...(19): siRNA sense strand
cuccagaugucaugcuguu

SEQ ID NO: 119544 - RNA, 19 nt, Homo sapiens
  misc_RNA (1)...(19): siRNA sense strand
agaggaggaugaagagcau

SEQ ID NO: 119545 - RNA, 19 nt, Homo sapiens
  misc_RNA (1)...(19): siRNA sense strand
auguagaccuauuggauau

SEQ ID NO: 119546 - RNA, 19 nt, Homo sapiens
  misc_RNA (1)...(19): siRNA sense strand
gcucccggaugcugcacaa

SEQ ID NO: 119547 - RNA, 19 nt, Homo sapiens
  misc_RNA (1)...(19): siRNA sense strand
agggacagaucacuucauc

SEQ ID NO: 119548 - RNA, 19 nt, Homo sapiens
  misc_RNA (1)...(19): siRNA sense strand
ugcgggaaaugauugaaga

SEQ ID NO: 119549 - RNA, 19 nt, Homo sapiens
  misc_RNA (1)...(19): siRNA sense strand
agugugaccacgugcaaua

SEQ ID NO: 119550 - RNA, 19 nt, Homo sapiens
  misc_RNA (1)...(19): siRNA sense strand
cguguccgauuuccgcaaa

SEQ ID NO: 119551 - RNA, 19 nt, Homo sapiens
  misc_RNA (1)...(19): siRNA sense strand
ggacaucgucagccauggu

SEQ ID NO: 119552 - RNA, 19 nt, Homo sapiens
  misc_RNA (1)...(19): siRNA sense strand
uuugaccucucaguaauug

SEQ ID NO: 119553 - RNA, 19 nt, Homo sapiens
  misc_RNA (1)...(19): siRNA sense strand
gcacggacaucgcguacaa

SEQ ID NO: 119554 - RNA, 19 nt, Homo sapiens
  misc_RNA (1)...(19): siRNA sense strand
gaagccaacucacaguauu

SEQ ID NO: 119555 - RNA, 19 nt, Homo sapiens
  misc_RNA (1)...(19): siRNA sense strand
gcgaggcgcucaugaacaa

SEQ ID NO: 119556 - RNA, 19 nt, Homo sapiens
  misc_RNA (1)...(19): siRNA sense strand
guucuacccucuagugaaa

SEQ ID NO: 119557 - RNA, 19 nt, Homo sapiens
  misc_RNA (1)...(19): siRNA sense strand
gcaccuggauuggcauuug

SEQ ID NO: 119558 - RNA, 19 nt, Homo sapiens
  misc_RNA (1)...(19): siRNA sense strand
ccgcugagcucaaguucuu

SEQ ID NO: 119559 - RNA, 19 nt, Homo sapiens
  misc_RNA (1)...(19): siRNA sense strand
uguaugggcucauguacuu

SEQ ID NO: 119560 - RNA, 19 nt, Homo sapiens
  misc_RNA (1)...(19): siRNA sense strand
ggacuucacggucuucaug

SEQ ID NO: 119561 - RNA, 19 nt, Homo sapiens
  misc_RNA (1)...(19): siRNA sense strand
gcaccauccucuucaugau

SEQ ID NO: 119562 - RNA, 19 nt, Homo sapiens
  misc_RNA (1)...(19): siRNA sense strand
ucacggucuucaugauuaa

SEQ ID NO: 119563 - RNA, 19 nt, Homo sapiens
  misc_RNA (1)...(19): siRNA sense strand
ggcgcgagcugggaacuuu

SEQ ID NO: 119564 - RNA, 19 nt, Homo sapiens
  misc_RNA (1)...(19): siRNA sense strand
uuacguaccugguggacau

SEQ ID NO: 119565 - RNA, 19 nt, Homo sapiens
  misc_RNA (1)...(19): siRNA sense strand
cgucaucgccugcuacuuc

SEQ ID NO: 119566 - RNA, 19 nt, Homo sapiens
  misc_RNA (1)...(19): siRNA sense strand
uucacggucuucaugauua

SEQ ID NO: 119567 - RNA, 19 nt, Homo sapiens
  misc_RNA (1)...(19): siRNA sense strand
cgagugguguguaaugaca

SEQ ID NO: 119568 - RNA, 19 nt, Homo sapiens
  misc_RNA (1)...(19): siRNA sense strand
acacgaggcucaccaacag

SEQ ID NO: 119569 - RNA, 19 nt, Homo sapiens
  misc_RNA (1)...(19): siRNA sense strand
caagguguaugggcucaug

SEQ ID NO: 119570 - RNA, 19 nt, Homo sapiens
  misc_RNA (1)...(19): siRNA sense strand
gaagaccgaguggugugua

SEQ ID NO: 119571 - RNA, 19 nt, Homo sapiens
  misc_RNA (1)...(19): siRNA sense strand
ggaggaggcgccuaagaag

SEQ ID NO: 119572 - RNA, 19 nt, Homo sapiens
  misc_RNA (1)...(19): siRNA sense strand
ucaugaugcucuacuucuu

SEQ ID NO: 119573 - RNA, 19 nt, Homo sapiens
  misc_RNA (1)...(19): siRNA sense strand
gguguguaaugacaaguuc

SEQ ID NO: 119574 - RNA, 19 nt, Homo sapiens
  misc_RNA (1)...(19): siRNA sense strand
gcaccaagaccgagaagcu

SEQ ID NO: 119575 - RNA, 19 nt, Homo sapiens
  misc_RNA (1)...(19): siRNA sense strand
uagugaaagugcaguguuc

SEQ ID NO: 119576 - RNA, 19 nt, Homo sapiens
  misc_RNA (1)...(19): siRNA sense strand
ggccagacacgcucaagug

SEQ ID NO: 119577 - RNA, 19 nt, Homo sapiens
  misc_RNA (1)...(19): siRNA sense strand
gaggaggaggcgccuaaga

SEQ ID NO: 119578 - RNA, 19 nt, Homo sapiens
  misc_RNA (1)...(19): siRNA sense strand
guacaaccagaccaucaug

SEQ ID NO: 119579 - RNA, 19 nt, Homo sapiens
  misc_RNA (1)...(19): siRNA sense strand
ccuccuaccucaacuacca

SEQ ID NO: 119580 - RNA, 19 nt, Homo sapiens
  misc_RNA (1)...(19): siRNA sense strand
ccucgcugcuuccagaguu

SEQ ID NO: 119581 - RNA, 19 nt, Homo sapiens
  misc_RNA (1)...(19): siRNA sense strand
cgaagccaacucacaguau

SEQ ID NO: 119582 - RNA, 19 nt, Homo sapiens
  misc_RNA (1)...(19): siRNA sense strand
ggauuggcauuuggucagu

SEQ ID NO: 119583 - RNA, 19 nt, Homo sapiens
  misc_RNA (1)...(19): siRNA sense strand
ucacggugcuuacguaccu

SEQ ID NO: 119584 - RNA, 19 nt, Homo sapiens
  misc_RNA (1)...(19): siRNA sense strand
gcaccaguucuacccucua

SEQ ID NO: 119585 - RNA, 19 nt, Homo sapiens
  misc_RNA (1)...(19): siRNA sense strand
gaccgagugguguguaaug

SEQ ID NO: 119586 - RNA, 19 nt, Homo sapiens
  misc_RNA (1)...(19): siRNA sense strand
aagaccgagugguguguaa

SEQ ID NO: 119587 - RNA, 19 nt, Homo sapiens
  misc_RNA (1)...(19): siRNA sense strand
caccaguucuacccucuag

SEQ ID NO: 119588 - RNA, 19 nt, Homo sapiens
  misc_RNA (1)...(19): siRNA sense strand
ccaguucuacccucuagug

SEQ ID NO: 119589 - RNA, 19 nt, Homo sapiens
  misc_RNA (1)...(19): siRNA sense strand
gggcugcaccauccucuuc

SEQ ID NO: 119590 - RNA, 19 nt, Homo sapiens
  misc_RNA (1)...(19): siRNA sense strand
gcugcgaggcgcucaugaa

SEQ ID NO: 119591 - RNA, 19 nt, Homo sapiens
  misc_RNA (1)...(19): siRNA sense strand
gaggaggcgccuaagaagu

SEQ ID NO: 119592 - RNA, 19 nt, Homo sapiens
  misc_RNA (1)...(19): siRNA sense strand
aggaggaggcgccuaagaa

SEQ ID NO: 119593 - RNA, 19 nt, Homo sapiens
  misc_RNA (1)...(19): siRNA sense strand
ggccaucgaagccaacuca

SEQ ID NO: 119594 - RNA, 19 nt, Homo sapiens
  misc_RNA (1)...(19): siRNA sense strand
ccagaacacguccgacaag

SEQ ID NO: 119595 - RNA, 19 nt, Homo sapiens
  misc_RNA (1)...(19): siRNA sense strand
ccucuucguguaccuguuu

SEQ ID NO: 119596 - RNA, 19 nt, Homo sapiens
  misc_RNA (1)...(19): siRNA sense strand
ucuucacggugcuuacgua

SEQ ID NO: 119597 - RNA, 19 nt, Homo sapiens
  misc_RNA (1)...(19): siRNA sense strand
gaggcucaccaacagcaaa

SEQ ID NO: 119598 - RNA, 19 nt, Homo sapiens
  misc_RNA (1)...(19): siRNA sense strand
gccagaacacguccgacaa

SEQ ID NO: 119599 - RNA, 19 nt, Homo sapiens
  misc_RNA (1)...(19): siRNA sense strand
gcucaccaacagcaaacaa

SEQ ID NO: 119600 - RNA, 19 nt, Homo sapiens
  misc_RNA (1)...(19): siRNA sense strand
agaccgagaagcuggagaa

SEQ ID NO: 119601 - RNA, 19 nt, Homo sapiens
  misc_RNA (1)...(19): siRNA sense strand
ucgaagccaacucacagua

SEQ ID NO: 119602 - RNA, 19 nt, Homo sapiens
  misc_RNA (1)...(19): siRNA sense strand
gcguacaaccagaccauca

SEQ ID NO: 119603 - RNA, 19 nt, Homo sapiens
  misc_RNA (1)...(19): siRNA sense strand
cggucuucaugauuaagua

SEQ ID NO: 119604 - RNA, 19 nt, Homo sapiens
  misc_RNA (1)...(19): siRNA sense strand
gcccggacuucacggucuu

SEQ ID NO: 119605 - RNA, 19 nt, Homo sapiens
  misc_RNA (1)...(19): siRNA sense strand
gcugcaagagcuacgcuau

SEQ ID NO: 119606 - RNA, 19 nt, Homo sapiens
  misc_RNA (1)...(19): siRNA sense strand
caugaugcucuacuucuuc

SEQ ID NO: 119607 - RNA, 19 nt, Homo sapiens
  misc_RNA (1)...(19): siRNA sense strand
gugagccgaccaaggugua

SEQ ID NO: 119608 - RNA, 19 nt, Homo sapiens
  misc_RNA (1)...(19): siRNA sense strand
aagccaacucacaguauuu

SEQ ID NO: 119609 - RNA, 19 nt, Homo sapiens
  misc_RNA (1)...(19): siRNA sense strand
ggaagaccgaguggugugu

SEQ ID NO: 119610 - RNA, 19 nt, Homo sapiens
  misc_RNA (1)...(19): siRNA sense strand
gcacggacaucgccuacaa

SEQ ID NO: 119611 - RNA, 19 nt, Homo sapiens
  misc_RNA (1)...(19): siRNA sense strand
gcgaggcgcucaugaacaa

SEQ ID NO: 119612 - RNA, 19 nt, Homo sapiens
  misc_RNA (1)...(19): siRNA sense strand
ucaaguaccugaugaccau

SEQ ID NO: 119613 - RNA, 19 nt, Homo sapiens
  misc_RNA (1)...(19): siRNA sense strand
ccaacggccugauguacuu

SEQ ID NO: 119614 - RNA, 19 nt, Homo sapiens
  misc_RNA (1)...(19): siRNA sense strand
cgacuucaccgucuucaug

SEQ ID NO: 119615 - RNA, 19 nt, Homo sapiens
  misc_RNA (1)...(19): siRNA sense strand
guucgucuaccucuucaua

SEQ ID NO: 119616 - RNA, 19 nt, Homo sapiens
  misc_RNA (1)...(19): siRNA sense strand
gcaccaagaccgagaagcu

SEQ ID NO: 119617 - RNA, 19 nt, Homo sapiens
  misc_RNA (1)...(19): siRNA sense strand
ucauggugcucuacuucuu

SEQ ID NO: 119618 - RNA, 19 nt, Homo sapiens
  misc_RNA (1)...(19): siRNA sense strand
cauaggcacguccuucuug

SEQ ID NO: 119619 - RNA, 19 nt, Homo sapiens
  misc_RNA (1)...(19): siRNA sense strand
ggccugauguacuuuaagg

SEQ ID NO: 119620 - RNA, 19 nt, Homo sapiens
  misc_RNA (1)...(19): siRNA sense strand
aaacacgacggcaccaaga

SEQ ID NO: 119621 - RNA, 19 nt, Homo sapiens
  misc_RNA (1)...(19): siRNA sense strand
uggugaaggugcaguguuc

SEQ ID NO: 119622 - RNA, 19 nt, Homo sapiens
  misc_RNA (1)...(19): siRNA sense strand
gucauucugucucucacuu

SEQ ID NO: 119623 - RNA, 19 nt, Homo sapiens
  misc_RNA (1)...(19): siRNA sense strand
gcugcgaggcgcucaugaa

SEQ ID NO: 119624 - RNA, 19 nt, Homo sapiens
  misc_RNA (1)...(19): siRNA sense strand
ucagcgugcucuacacagu

SEQ ID NO: 119625 - RNA, 19 nt, Homo sapiens
  misc_RNA (1)...(19): siRNA sense strand
gggcugcaccauccucuuc

SEQ ID NO: 119626 - RNA, 19 nt, Homo sapiens
  misc_RNA (1)...(19): siRNA sense strand
gccucgaggugcaccaguu

SEQ ID NO: 119627 - RNA, 19 nt, Homo sapiens
  misc_RNA (1)...(19): siRNA sense strand
gacuucaccgucuucauga

SEQ ID NO: 119628 - RNA, 19 nt, Homo sapiens
  misc_RNA (1)...(19): siRNA sense strand
cguauccgcaccaucauga

SEQ ID NO: 119629 - RNA, 19 nt, Homo sapiens
  misc_RNA (1)...(19): siRNA sense strand
uuucuuaugcuccauguau

SEQ ID NO: 119630 - RNA, 19 nt, Homo sapiens
  misc_RNA (1)...(19): siRNA sense strand
uggcgccucuguucgucua

SEQ ID NO: 119631 - RNA, 19 nt, Homo sapiens
  misc_RNA (1)...(19): siRNA sense strand
gaggccaacucgcaguacu

SEQ ID NO: 119632 - RNA, 19 nt, Homo sapiens
  misc_RNA (1)...(19): siRNA sense strand
ccaucguccuggccugcua

SEQ ID NO: 119633 - RNA, 19 nt, Homo sapiens
  misc_RNA (1)...(19): siRNA sense strand
agaccgagaagcuggagaa

SEQ ID NO: 119634 - RNA, 19 nt, Homo sapiens
  misc_RNA (1)...(19): siRNA sense strand
uauccgcaccaucaugaaa

SEQ ID NO: 119635 - RNA, 19 nt, Homo sapiens
  misc_RNA (1)...(19): siRNA sense strand
ucuuuaccguucucaccua

SEQ ID NO: 119636 - RNA, 19 nt, Homo sapiens
  misc_RNA (1)...(19): siRNA sense strand
cguccuggccugcuacuuc

SEQ ID NO: 119637 - RNA, 19 nt, Homo sapiens
  misc_RNA (1)...(19): siRNA sense strand
gcacgcacugccacuauaa

SEQ ID NO: 119638 - RNA, 19 nt, Homo sapiens
  misc_RNA (1)...(19): siRNA sense strand
ucacugugcucaccuucuu

SEQ ID NO: 119639 - RNA, 19 nt, Homo sapiens
  misc_RNA (1)...(19): siRNA sense strand
uggagaagcucauggucaa

SEQ ID NO: 119640 - RNA, 19 nt, Homo sapiens
  misc_RNA (1)...(19): siRNA sense strand
cggcagcuauuuccacaug

SEQ ID NO: 119641 - RNA, 19 nt, Homo sapiens
  misc_RNA (1)...(19): siRNA sense strand
acacagagaagcuggagaa

SEQ ID NO: 119642 - RNA, 19 nt, Homo sapiens
  misc_RNA (1)...(19): siRNA sense strand
ggucggcgcugugcuucuu

SEQ ID NO: 119643 - RNA, 19 nt, Homo sapiens
  misc_RNA (1)...(19): siRNA sense strand
ccaccugcgucaucguuug

SEQ ID NO: 119644 - RNA, 19 nt, Homo sapiens
  misc_RNA (1)...(19): siRNA sense strand
gcucaaaauuuucauguca

SEQ ID NO: 119645 - RNA, 19 nt, Homo sapiens
  misc_RNA (1)...(19): siRNA sense strand
gagaagcucauggucaaga

SEQ ID NO: 119646 - RNA, 19 nt, Homo sapiens
  misc_RNA (1)...(19): siRNA sense strand
ugacugggcuuugcuacgu

SEQ ID NO: 119647 - RNA, 19 nt, Homo sapiens
  misc_RNA (1)...(19): siRNA sense strand
gcaagguggcgggugauga

SEQ ID NO: 119648 - RNA, 19 nt, Homo sapiens
  misc_RNA (1)...(19): siRNA sense strand
gcucaagaccaucgucauc

SEQ ID NO: 119649 - RNA, 19 nt, Homo sapiens
  misc_RNA (1)...(19): siRNA sense strand
cuacgaacgccucaacaug

SEQ ID NO: 119650 - RNA, 19 nt, Homo sapiens
  misc_RNA (1)...(19): siRNA sense strand
cgucaucguuugcuauguc

SEQ ID NO: 119651 - RNA, 19 nt, Homo sapiens
  misc_RNA (1)...(19): siRNA sense strand
ccgagaaguuccaguacgu

SEQ ID NO: 119652 - RNA, 19 nt, Homo sapiens
  misc_RNA (1)...(19): siRNA sense strand
cugccgagcuagcggaguu

SEQ ID NO: 119653 - RNA, 19 nt, Homo sapiens
  misc_RNA (1)...(19): siRNA sense strand
gcacgcuggucuuccuacu

SEQ ID NO: 119654 - RNA, 19 nt, Homo sapiens
  misc_RNA (1)...(19): siRNA sense strand
gcgagaaccccgagaaguu

SEQ ID NO: 119655 - RNA, 19 nt, Homo sapiens
  misc_RNA (1)...(19): siRNA sense strand
ccugugcuaccgcaagaua

SEQ ID NO: 119656 - RNA, 19 nt, Homo sapiens
  misc_RNA (1)...(19): siRNA sense strand
acgaacgccucaacaugga

SEQ ID NO: 119657 - RNA, 19 nt, Homo sapiens
  misc_RNA (1)...(19): siRNA sense strand
cguuugcuaugucuacgaa

SEQ ID NO: 119658 - RNA, 19 nt, Homo sapiens
  misc_RNA (1)...(19): siRNA sense strand
caagguggcgggugaugag

SEQ ID NO: 119659 - RNA, 19 nt, Homo sapiens
  misc_RNA (1)...(19): siRNA sense strand
accguggucuugcacauga

SEQ ID NO: 119660 - RNA, 19 nt, Homo sapiens
  misc_RNA (1)...(19): siRNA sense strand
gaugagcugacugggcuuu

SEQ ID NO: 119661 - RNA, 19 nt, Homo sapiens
  misc_RNA (1)...(19): siRNA sense strand
ggucuucuccauccucuac

SEQ ID NO: 119662 - RNA, 19 nt, Homo sapiens
  misc_RNA (1)...(19): siRNA sense strand
gcaccaacacagagaagcu

SEQ ID NO: 119663 - RNA, 19 nt, Homo sapiens
  misc_RNA (1)...(19): siRNA sense strand
agaagcucauggucaagau

SEQ ID NO: 119664 - RNA, 19 nt, Homo sapiens
  misc_RNA (1)...(19): siRNA sense strand
caagaagacucgcaucauc

SEQ ID NO: 119665 - RNA, 19 nt, Homo sapiens
  misc_RNA (1)...(19): siRNA sense strand
caacaagcuucugggcaaa

SEQ ID NO: 119666 - RNA, 19 nt, Homo sapiens
  misc_RNA (1)...(19): siRNA sense strand
caacauccaggccgugcua

SEQ ID NO: 119667 - RNA, 19 nt, Homo sapiens
  misc_RNA (1)...(19): siRNA sense strand
guaccugaccgccgagauc

SEQ ID NO: 119668 - RNA, 19 nt, Homo sapiens
  misc_RNA (1)...(19): siRNA sense strand
acaaggcgaagggcaagua

SEQ ID NO: 119669 - RNA, 19 nt, Homo sapiens
  misc_RNA (1)...(19): siRNA sense strand
gugcuacugcccaagaaga

SEQ ID NO: 119670 - RNA, 19 nt, Homo sapiens
  misc_RNA (1)...(19): siRNA sense strand
ggugguguccugcccaaua

SEQ ID NO: 119671 - RNA, 19 nt, Homo sapiens
  misc_RNA (1)...(19): siRNA sense strand
caagaagacccgcaucauc

SEQ ID NO: 119672 - RNA, 19 nt, Homo sapiens
  misc_RNA (1)...(19): siRNA sense strand
guaccuaaccgccgagauc

SEQ ID NO: 119673 - RNA, 19 nt, Homo sapiens
  misc_RNA (1)...(19): siRNA sense strand
gugguguccugcccaauau

SEQ ID NO: 119674 - RNA, 19 nt, Homo sapiens
  misc_RNA (1)...(19): siRNA sense strand
aaacugagagccaccacaa

SEQ ID NO: 119675 - RNA, 19 nt, Homo sapiens
  misc_RNA (1)...(19): siRNA sense strand
gcaacgacgaggagcucaa

SEQ ID NO: 119676 - RNA, 19 nt, Homo sapiens
  misc_RNA (1)...(19): siRNA sense strand
cgacgaggagcucaacaag

SEQ ID NO: 119677 - RNA, 19 nt, Homo sapiens
  misc_RNA (1)...(19): siRNA sense strand
aggcaaagcucgcgccaaa

SEQ ID NO: 119678 - RNA, 19 nt, Homo sapiens
  misc_RNA (1)...(19): siRNA sense strand
ccacaaggccaaaggcaaa

SEQ ID NO: 119679 - RNA, 19 nt, Homo sapiens
  misc_RNA (1)...(19): siRNA sense strand
ccaagaagaccgagaguca

SEQ ID NO: 119680 - RNA, 19 nt, Homo sapiens
  misc_RNA (1)...(19): siRNA sense strand
guaccugacugccgagauc

SEQ ID NO: 119681 - RNA, 19 nt, Homo sapiens
  misc_RNA (1)...(19): siRNA sense strand
caagaagacccgcauuauc

SEQ ID NO: 119682 - RNA, 19 nt, Homo sapiens
  misc_RNA (1)...(19): siRNA sense strand
caacauccaggcugugcua

SEQ ID NO: 119683 - RNA, 19 nt, Homo sapiens
  misc_RNA (1)...(19): siRNA sense strand
caaggccaaaggcaaauaa

SEQ ID NO: 119684 - RNA, 19 nt, Homo sapiens
  misc_RNA (1)...(19): siRNA sense strand
aacaagaagacccgcauua

SEQ ID NO: 119685 - RNA, 19 nt, Homo sapiens
  misc_RNA (1)...(19): siRNA sense strand
gcaaagcucgcgccaaagc

SEQ ID NO: 119686 - RNA, 19 nt, Homo sapiens
  misc_RNA (1)...(19): siRNA sense strand
caacaagaagacccgcauu

SEQ ID NO: 119687 - RNA, 19 nt, Homo sapiens
  misc_RNA (1)...(19): siRNA sense strand
gaccgagagucaccacaag

SEQ ID NO: 119688 - RNA, 19 nt, Homo sapiens
  misc_RNA (1)...(19): siRNA sense strand
acaagaagacccgcauuau

SEQ ID NO: 119689 - RNA, 19 nt, Homo sapiens
  misc_RNA (1)...(19): siRNA sense strand
cauccaggcugugcuacug

SEQ ID NO: 119690 - RNA, 19 nt, Homo sapiens
  misc_RNA (1)...(19): siRNA sense strand
aagaagacccgcauuaucc

SEQ ID NO: 119691 - RNA, 19 nt, Homo sapiens
  misc_RNA (1)...(19): siRNA sense strand
caagcugcugggcaaagua

SEQ ID NO: 119692 - RNA, 19 nt, Homo sapiens
  misc_RNA (1)...(19): siRNA sense strand
gcaacgacgaggagcucaa

SEQ ID NO: 119693 - RNA, 19 nt, Homo sapiens
  misc_RNA (1)...(19): siRNA sense strand
cgacgaggagcucaacaag

SEQ ID NO: 119694 - RNA, 19 nt, Homo sapiens
  misc_RNA (1)...(19): siRNA sense strand
gcugugcuacugcccaaga

SEQ ID NO: 119695 - RNA, 19 nt, Homo sapiens
  misc_RNA (1)...(19): siRNA sense strand
gugcuacugcccaagaaga

SEQ ID NO: 119696 - RNA, 19 nt, Homo sapiens
  misc_RNA (1)...(19): siRNA sense strand
caacaagcugcugggcaaa

SEQ ID NO: 119697 - RNA, 19 nt, Homo sapiens
  misc_RNA (1)...(19): siRNA sense strand
ggugguguccugcccaaca

SEQ ID NO: 119698 - RNA, 19 nt, Homo sapiens
  misc_RNA (1)...(19): siRNA sense strand
aagcugcugggcaaaguaa

SEQ ID NO: 119699 - RNA, 19 nt, Homo sapiens
  misc_RNA (1)...(19): siRNA sense strand
acaagcugcugggcaaagu

SEQ ID NO: 119700 - RNA, 19 nt, Homo sapiens
  misc_RNA (1)...(19): siRNA sense strand
caagaagacucgcaucauc

SEQ ID NO: 119701 - RNA, 19 nt, Homo sapiens
  misc_RNA (1)...(19): siRNA sense strand
aggcaaagcucgcgccaaa

SEQ ID NO: 119702 - RNA, 19 nt, Homo sapiens
  misc_RNA (1)...(19): siRNA sense strand
cuaagaagaccgagaguca

SEQ ID NO: 119703 - RNA, 19 nt, Homo sapiens
  misc_RNA (1)...(19): siRNA sense strand
cgacgaggagcucaacaaa

SEQ ID NO: 119704 - RNA, 19 nt, Homo sapiens
  misc_RNA (1)...(19): siRNA sense strand
acgaggagcucaacaaacu

SEQ ID NO: 119705 - RNA, 19 nt, Homo sapiens
  misc_RNA (1)...(19): siRNA sense strand
gcaaagcucgcgccaaagc

SEQ ID NO: 119706 - RNA, 19 nt, Homo sapiens
  misc_RNA (1)...(19): siRNA sense strand
gaccgagagucaccacaag

SEQ ID NO: 119707 - RNA, 19 nt, Homo sapiens
  misc_RNA (1)...(19): siRNA sense strand
ggagcucaacaaacugcua

SEQ ID NO: 119708 - RNA, 19 nt, Homo sapiens
  misc_RNA (1)...(19): siRNA sense strand
uaacauccaggccgugcuu

SEQ ID NO: 119709 - RNA, 19 nt, Homo sapiens
  misc_RNA (1)...(19): siRNA sense strand
gcaacgacgaggagcucaa

SEQ ID NO: 119710 - RNA, 19 nt, Homo sapiens
  misc_RNA (1)...(19): siRNA sense strand
caaggccaagggcaaguga

SEQ ID NO: 119711 - RNA, 19 nt, Homo sapiens
  misc_RNA (1)...(19): siRNA sense strand
guaccuaacugccgagauc

SEQ ID NO: 119712 - RNA, 19 nt, Homo sapiens
  misc_RNA (1)...(19): siRNA sense strand
gggcuccaauuuccuguag

SEQ ID NO: 119713 - RNA, 19 nt, Homo sapiens
  misc_RNA (1)...(19): siRNA sense strand
gagagccaccacaaagcua

SEQ ID NO: 119714 - RNA, 19 nt, Homo sapiens
  misc_RNA (1)...(19): siRNA sense strand
caaagcuaagggcaaguaa

SEQ ID NO: 119715 - RNA, 19 nt, Homo sapiens
  misc_RNA (1)...(19): siRNA sense strand
acaaagcuaagggcaagua

SEQ ID NO: 119716 - RNA, 19 nt, Homo sapiens
  misc_RNA (1)...(19): siRNA sense strand
uaacauccaggccguacug

SEQ ID NO: 119717 - RNA, 19 nt, Homo sapiens
  misc_RNA (1)...(19): siRNA sense strand
agacugagagccaccacaa

SEQ ID NO: 119718 - RNA, 19 nt, Homo sapiens
  misc_RNA (1)...(19): siRNA sense strand
gcaacgacgaggagcucaa

SEQ ID NO: 119719 - RNA, 19 nt, Homo sapiens
  misc_RNA (1)...(19): siRNA sense strand
gugcuggaguaccuaacug

SEQ ID NO: 119720 - RNA, 19 nt, Homo sapiens
  misc_RNA (1)...(19): siRNA sense strand
cgacgaggagcucaacaag

SEQ ID NO: 119721 - RNA, 19 nt, Homo sapiens
  misc_RNA (1)...(19): siRNA sense strand
guacugcuccccaagaaga

SEQ ID NO: 119722 - RNA, 19 nt, Homo sapiens
  misc_RNA (1)...(19): siRNA sense strand
guacugcucccuaagaaga

SEQ ID NO: 119723 - RNA, 19 nt, Homo sapiens
  misc_RNA (1)...(19): siRNA sense strand
cuaagaagacggagaguca

SEQ ID NO: 119724 - RNA, 19 nt, Homo sapiens
  misc_RNA (1)...(19): siRNA sense strand
uggcugcgguccucgagua

SEQ ID NO: 119725 - RNA, 19 nt, Homo sapiens
  misc_RNA (1)...(19): siRNA sense strand
caagaagacgcgcaucauc

SEQ ID NO: 119726 - RNA, 19 nt, Homo sapiens
  misc_RNA (1)...(19): siRNA sense strand
gaacaagcugcugggcaaa

SEQ ID NO: 119727 - RNA, 19 nt, Homo sapiens
  misc_RNA (1)...(19): siRNA sense strand
gcaacgacgaggaacugaa

SEQ ID NO: 119728 - RNA, 19 nt, Homo sapiens
  misc_RNA (1)...(19): siRNA sense strand
caaggcaaagggcaaguga

SEQ ID NO: 119729 - RNA, 19 nt, Homo sapiens
  misc_RNA (1)...(19): siRNA sense strand
ccguacugcucccuaagaa

SEQ ID NO: 119730 - RNA, 19 nt, Homo sapiens
  misc_RNA (1)...(19): siRNA sense strand
uaacauccaggccguacug

SEQ ID NO: 119731 - RNA, 19 nt, Homo sapiens
  misc_RNA (1)...(19): siRNA sense strand
acgaggaacugaacaagcu

SEQ ID NO: 119732 - RNA, 19 nt, Homo sapiens
  misc_RNA (1)...(19): siRNA sense strand
gacggagagucaccacaag

SEQ ID NO: 119733 - RNA, 19 nt, Homo sapiens
  misc_RNA (1)...(19): siRNA sense strand
caacgacgaggaacugaac

SEQ ID NO: 119734 - RNA, 19 nt, Homo sapiens
  misc_RNA (1)...(19): siRNA sense strand
agacggagagucaccacaa

SEQ ID NO: 119735 - RNA, 19 nt, Homo sapiens
  misc_RNA (1)...(19): siRNA sense strand
gcucgggacaacaagaaga

SEQ ID NO: 119736 - RNA, 19 nt, Homo sapiens
  misc_RNA (1)...(19): siRNA sense strand
acaagcugcugggcaaagu

SEQ ID NO: 119737 - RNA, 19 nt, Homo sapiens
  misc_RNA (1)...(19): siRNA sense strand
cauccaggccguucuguua

SEQ ID NO: 119738 - RNA, 19 nt, Homo sapiens
  misc_RNA (1)...(19): siRNA sense strand
gccguucuguuaccaaaga

SEQ ID NO: 119739 - RNA, 19 nt, Homo sapiens
  misc_RNA (1)...(19): siRNA sense strand
ccacaaagccaaaagcaaa

SEQ ID NO: 119740 - RNA, 19 nt, Homo sapiens
  misc_RNA (1)...(19): siRNA sense strand
caagaagacgcgcaucauc

SEQ ID NO: 119741 - RNA, 19 nt, Homo sapiens
  misc_RNA (1)...(19): siRNA sense strand
cgaaagccacaaagccaaa

SEQ ID NO: 119742 - RNA, 19 nt, Homo sapiens
  misc_RNA (1)...(19): siRNA sense strand
gaacaagcugcugggcaaa

SEQ ID NO: 119743 - RNA, 19 nt, Homo sapiens
  misc_RNA (1)...(19): siRNA sense strand
gcaacgacgaggaacugaa

SEQ ID NO: 119744 - RNA, 19 nt, Homo sapiens
  misc_RNA (1)...(19): siRNA sense strand
gaaaaccgaaagccacaaa

SEQ ID NO: 119745 - RNA, 19 nt, Homo sapiens
  misc_RNA (1)...(19): siRNA sense strand
acgaggaacugaacaagcu

SEQ ID NO: 119746 - RNA, 19 nt, Homo sapiens
  misc_RNA (1)...(19): siRNA sense strand
guaccugaccgccgagauc

SEQ ID NO: 119747 - RNA, 19 nt, Homo sapiens
  misc_RNA (1)...(19): siRNA sense strand
caacgacgaggaacugaac

SEQ ID NO: 119748 - RNA, 19 nt, Homo sapiens
  misc_RNA (1)...(19): siRNA sense strand
gcucgggacaacaagaaga

SEQ ID NO: 119749 - RNA, 19 nt, Homo sapiens
  misc_RNA (1)...(19): siRNA sense strand
uaacauccaggccguucug

SEQ ID NO: 119750 - RNA, 19 nt, Homo sapiens
  misc_RNA (1)...(19): siRNA sense strand
acaagcugcugggcaaagu

SEQ ID NO: 119751 - RNA, 19 nt, Homo sapiens
  misc_RNA (1)...(19): siRNA sense strand
gaagaaggauggcaagaag

SEQ ID NO: 119752 - RNA, 19 nt, Homo sapiens
  misc_RNA (1)...(19): siRNA sense strand
ccaaggccgucaccaagua

SEQ ID NO: 119753 - RNA, 19 nt, Homo sapiens
  misc_RNA (1)...(19): siRNA sense strand
gaagaagggcuccaagaag

SEQ ID NO: 119754 - RNA, 19 nt, Homo sapiens
  misc_RNA (1)...(19): siRNA sense strand
guacaccagcuccaaguaa

SEQ ID NO: 119755 - RNA, 19 nt, Homo sapiens
  misc_RNA (1)...(19): siRNA sense strand
cgaagaagggcuccaagaa

SEQ ID NO: 119756 - RNA, 19 nt, Homo sapiens
  misc_RNA (1)...(19): siRNA sense strand
acaccggcaucucuucuaa

SEQ ID NO: 119757 - RNA, 19 nt, Homo sapiens
  misc_RNA (1)...(19): siRNA sense strand
aacaagcgcucgaccauca

SEQ ID NO: 119758 - RNA, 19 nt, Homo sapiens
  misc_RNA (1)...(19): siRNA sense strand
gcaccaaggccgucaccaa

SEQ ID NO: 119759 - RNA, 19 nt, Homo sapiens
  misc_RNA (1)...(19): siRNA sense strand
gcuacuccguguacgugua

SEQ ID NO: 119760 - RNA, 19 nt, Homo sapiens
  misc_RNA (1)...(19): siRNA sense strand
ccaagaaggcggugaccaa

SEQ ID NO: 119761 - RNA, 19 nt, Homo sapiens
  misc_RNA (1)...(19): siRNA sense strand
ugaccaaggcccagaagaa

SEQ ID NO: 119762 - RNA, 19 nt, Homo sapiens
  misc_RNA (1)...(19): siRNA sense strand
ccaaggcccagaagaagga

SEQ ID NO: 119763 - RNA, 19 nt, Homo sapiens
  misc_RNA (1)...(19): siRNA sense strand
agaagaaggauggcaagaa

SEQ ID NO: 119764 - RNA, 19 nt, Homo sapiens
  misc_RNA (1)...(19): siRNA sense strand
gaccaaggcccagaagaag

SEQ ID NO: 119765 - RNA, 19 nt, Homo sapiens
  misc_RNA (1)...(19): siRNA sense strand
ccgaagaagggcuccaaga

SEQ ID NO: 119766 - RNA, 19 nt, Homo sapiens
  misc_RNA (1)...(19): siRNA sense strand
ccaaguacaccagcuccaa

SEQ ID NO: 119767 - RNA, 19 nt, Homo sapiens
  misc_RNA (1)...(19): siRNA sense strand
gacaccggcaucucuucua

SEQ ID NO: 119768 - RNA, 19 nt, Homo sapiens
  misc_RNA (1)...(19): siRNA sense strand
caugaacuccuucgucaac

SEQ ID NO: 119769 - RNA, 19 nt, Homo sapiens
  misc_RNA (1)...(19): siRNA sense strand
gaagaaaggcuccaagaag

SEQ ID NO: 119770 - RNA, 19 nt, Homo sapiens
  misc_RNA (1)...(19): siRNA sense strand
ccaaggccgucaccaagua

SEQ ID NO: 119771 - RNA, 19 nt, Homo sapiens
  misc_RNA (1)...(19): siRNA sense strand
guacaccaguuccaaguga

SEQ ID NO: 119772 - RNA, 19 nt, Homo sapiens
  misc_RNA (1)...(19): siRNA sense strand
ugacaaaggcccagaagaa

SEQ ID NO: 119773 - RNA, 19 nt, Homo sapiens
  misc_RNA (1)...(19): siRNA sense strand
gaagaaggacggcaagaag

SEQ ID NO: 119774 - RNA, 19 nt, Homo sapiens
  misc_RNA (1)...(19): siRNA sense strand
ccaagaaggcagugacaaa

SEQ ID NO: 119775 - RNA, 19 nt, Homo sapiens
  misc_RNA (1)...(19): siRNA sense strand
ugaacuccuucgucaauga

SEQ ID NO: 119776 - RNA, 19 nt, Homo sapiens
  misc_RNA (1)...(19): siRNA sense strand
aacaagcgcucgaccauca

SEQ ID NO: 119777 - RNA, 19 nt, Homo sapiens
  misc_RNA (1)...(19): siRNA sense strand
cgaagaaaggcuccaagaa

SEQ ID NO: 119778 - RNA, 19 nt, Homo sapiens
  misc_RNA (1)...(19): siRNA sense strand
gcaccaaggccgucaccaa

SEQ ID NO: 119779 - RNA, 19 nt, Homo sapiens
  misc_RNA (1)...(19): siRNA sense strand
caaaggcccagaagaagga

SEQ ID NO: 119780 - RNA, 19 nt, Homo sapiens
  misc_RNA (1)...(19): siRNA sense strand
gcuacuccguguacgugua

SEQ ID NO: 119781 - RNA, 19 nt, Homo sapiens
  misc_RNA (1)...(19): siRNA sense strand
caugaacuccuucgucaau

SEQ ID NO: 119782 - RNA, 19 nt, Homo sapiens
  misc_RNA (1)...(19): siRNA sense strand
gacaaaggcccagaagaag

SEQ ID NO: 119783 - RNA, 19 nt, Homo sapiens
  misc_RNA (1)...(19): siRNA sense strand
caagaaggcagugacaaag

SEQ ID NO: 119784 - RNA, 19 nt, Homo sapiens
  misc_RNA (1)...(19): siRNA sense strand
agaagaaggacggcaagaa

SEQ ID NO: 119785 - RNA, 19 nt, Homo sapiens
  misc_RNA (1)...(19): siRNA sense strand
ccaaguacaccaguuccaa

SEQ ID NO: 119786 - RNA, 19 nt, Homo sapiens
  misc_RNA (1)...(19): siRNA sense strand
ccgaagaaaggcuccaaga

SEQ ID NO: 119787 - RNA, 19 nt, Homo sapiens
  misc_RNA (1)...(19): siRNA sense strand
acaccgguaucucguccaa

SEQ ID NO: 119788 - RNA, 19 nt, Homo sapiens
  misc_RNA (1)...(19): siRNA sense strand
ucaccaaguacaccaguuc

SEQ ID NO: 119789 - RNA, 19 nt, Homo sapiens
  misc_RNA (1)...(19): siRNA sense strand
gaagaaggauggaaagaag

SEQ ID NO: 119790 - RNA, 19 nt, Homo sapiens
  misc_RNA (1)...(19): siRNA sense strand
ccaaggccgucaccaagua

SEQ ID NO: 119791 - RNA, 19 nt, Homo sapiens
  misc_RNA (1)...(19): siRNA sense strand
uaacaaggcucagaagaag

SEQ ID NO: 119792 - RNA, 19 nt, Homo sapiens
  misc_RNA (1)...(19): siRNA sense strand
ccaagaaggccauuaacaa

SEQ ID NO: 119793 - RNA, 19 nt, Homo sapiens
  misc_RNA (1)...(19): siRNA sense strand
gagcuacucuguguaugug

SEQ ID NO: 119794 - RNA, 19 nt, Homo sapiens
  misc_RNA (1)...(19): siRNA sense strand
gcuacucuguguaugugua

SEQ ID NO: 119795 - RNA, 19 nt, Homo sapiens
  misc_RNA (1)...(19): siRNA sense strand
caagaaggccauuaacaag

SEQ ID NO: 119796 - RNA, 19 nt, Homo sapiens
  misc_RNA (1)...(19): siRNA sense strand
gcuccaagaaggccauuaa

SEQ ID NO: 119797 - RNA, 19 nt, Homo sapiens
  misc_RNA (1)...(19): siRNA sense strand
aacaagcgcucgaccauca

SEQ ID NO: 119798 - RNA, 19 nt, Homo sapiens
  misc_RNA (1)...(19): siRNA sense strand
gcaccaaggccgucaccaa

SEQ ID NO: 119799 - RNA, 19 nt, Homo sapiens
  misc_RNA (1)...(19): siRNA sense strand
uuaacaaggcucagaagaa

SEQ ID NO: 119800 - RNA, 19 nt, Homo sapiens
  misc_RNA (1)...(19): siRNA sense strand
agaagaaggauggaaagaa

SEQ ID NO: 119801 - RNA, 19 nt, Homo sapiens
  misc_RNA (1)...(19): siRNA sense strand
guauaccagcuccaaguga

SEQ ID NO: 119802 - RNA, 19 nt, Homo sapiens
  misc_RNA (1)...(19): siRNA sense strand
acaaggcucagaagaagga

SEQ ID NO: 119803 - RNA, 19 nt, Homo sapiens
  misc_RNA (1)...(19): siRNA sense strand
ccaaguauaccagcuccaa

SEQ ID NO: 119804 - RNA, 19 nt, Homo sapiens
  misc_RNA (1)...(19): siRNA sense strand
cgacaucuuugagcguauc

SEQ ID NO: 119805 - RNA, 19 nt, Homo sapiens
  misc_RNA (1)...(19): siRNA sense strand
acaccggcaucucuuccaa

SEQ ID NO: 119806 - RNA, 19 nt, Homo sapiens
  misc_RNA (1)...(19): siRNA sense strand
ccauuaacaaggcucagaa

SEQ ID NO: 119807 - RNA, 19 nt, Homo sapiens
  misc_RNA (1)...(19): siRNA sense strand
ccaaggcuaugggaaucau

SEQ ID NO: 119808 - RNA, 19 nt, Homo sapiens
  misc_RNA (1)...(19): siRNA sense strand
cagaagaaggauggaaaga

SEQ ID NO: 119809 - RNA, 19 nt, Homo sapiens
  misc_RNA (1)...(19): siRNA sense strand
aaucugcuccagucccuaa

SEQ ID NO: 119810 - RNA, 19 nt, Homo sapiens
  misc_RNA (1)...(19): siRNA sense strand
gagcguaucgccggagaag

SEQ ID NO: 119811 - RNA, 19 nt, Homo sapiens
  misc_RNA (1)...(19): siRNA sense strand
caugaacuccuucgucaac

SEQ ID NO: 119812 - RNA, 19 nt, Homo sapiens
  misc_RNA (1)...(19): siRNA sense strand
gcaaacgcagccgcaagga

SEQ ID NO: 119813 - RNA, 19 nt, Homo sapiens
  misc_RNA (1)...(19): siRNA sense strand
gcucagaagaaggauggaa

SEQ ID NO: 119814 - RNA, 19 nt, Homo sapiens
  misc_RNA (1)...(19): siRNA sense strand
gaagaaggaugguaagaag

SEQ ID NO: 119815 - RNA, 19 nt, Homo sapiens
  misc_RNA (1)...(19): siRNA sense strand
ccaaggccgucaccaagua

SEQ ID NO: 119816 - RNA, 19 nt, Homo sapiens
  misc_RNA (1)...(19): siRNA sense strand
ggagagcuauuccguguac

SEQ ID NO: 119817 - RNA, 19 nt, Homo sapiens
  misc_RNA (1)...(19): siRNA sense strand
gcuauuccguguacgugua

SEQ ID NO: 119818 - RNA, 19 nt, Homo sapiens
  misc_RNA (1)...(19): siRNA sense strand
guacaccagcucuaaguaa

SEQ ID NO: 119819 - RNA, 19 nt, Homo sapiens
  misc_RNA (1)...(19): siRNA sense strand
aacaagcgcuccaccauca

SEQ ID NO: 119820 - RNA, 19 nt, Homo sapiens
  misc_RNA (1)...(19): siRNA sense strand
ccaaguacaccagcucuaa

SEQ ID NO: 119821 - RNA, 19 nt, Homo sapiens
  misc_RNA (1)...(19): siRNA sense strand
gcaccaaggccgucaccaa

SEQ ID NO: 119822 - RNA, 19 nt, Homo sapiens
  misc_RNA (1)...(19): siRNA sense strand
ccaaggcgcagaagaagga

SEQ ID NO: 119823 - RNA, 19 nt, Homo sapiens
  misc_RNA (1)...(19): siRNA sense strand
ugaccaaggcgcagaagaa

SEQ ID NO: 119824 - RNA, 19 nt, Homo sapiens
  misc_RNA (1)...(19): siRNA sense strand
agaagaaggaugguaagaa

SEQ ID NO: 119825 - RNA, 19 nt, Homo sapiens
  misc_RNA (1)...(19): siRNA sense strand
cgcagaagaaggaugguaa

SEQ ID NO: 119826 - RNA, 19 nt, Homo sapiens
  misc_RNA (1)...(19): siRNA sense strand
gcagaagaaggaugguaag

SEQ ID NO: 119827 - RNA, 19 nt, Homo sapiens
  misc_RNA (1)...(19): siRNA sense strand
gcgcagaagaaggauggua

SEQ ID NO: 119828 - RNA, 19 nt, Homo sapiens
  misc_RNA (1)...(19): siRNA sense strand
acaccggcaucucauccaa

SEQ ID NO: 119829 - RNA, 19 nt, Homo sapiens
  misc_RNA (1)...(19): siRNA sense strand
cagaagaaggaugguaaga

SEQ ID NO: 119830 - RNA, 19 nt, Homo sapiens
  misc_RNA (1)...(19): siRNA sense strand
gaccaaggcgcagaagaag

SEQ ID NO: 119831 - RNA, 19 nt, Homo sapiens
  misc_RNA (1)...(19): siRNA sense strand
caugaacuccuucgucaac

SEQ ID NO: 119832 - RNA, 19 nt, Homo sapiens
  misc_RNA (1)...(19): siRNA sense strand
caaguacaccagcucuaag

SEQ ID NO: 119833 - RNA, 19 nt, Homo sapiens
  misc_RNA (1)...(19): siRNA sense strand
ccaaggccguuaccaagua

SEQ ID NO: 119834 - RNA, 19 nt, Homo sapiens
  misc_RNA (1)...(19): siRNA sense strand
gaucaugaauuccuuuguc

SEQ ID NO: 119835 - RNA, 19 nt, Homo sapiens
  misc_RNA (1)...(19): siRNA sense strand
gaagaagggcuccaagaag

SEQ ID NO: 119836 - RNA, 19 nt, Homo sapiens
  misc_RNA (1)...(19): siRNA sense strand
gaagaaggacggcaagaag

SEQ ID NO: 119837 - RNA, 19 nt, Homo sapiens
  misc_RNA (1)...(19): siRNA sense strand
guacaccagcuccaaguaa

SEQ ID NO: 119838 - RNA, 19 nt, Homo sapiens
  misc_RNA (1)...(19): siRNA sense strand
cgaagaagggcuccaagaa

SEQ ID NO: 119839 - RNA, 19 nt, Homo sapiens
  misc_RNA (1)...(19): siRNA sense strand
gcaccaaggccguuaccaa

SEQ ID NO: 119840 - RNA, 19 nt, Homo sapiens
  misc_RNA (1)...(19): siRNA sense strand
aacaagcgcucgaccauca

SEQ ID NO: 119841 - RNA, 19 nt, Homo sapiens
  misc_RNA (1)...(19): siRNA sense strand
acaccggcaucuccucuaa

SEQ ID NO: 119842 - RNA, 19 nt, Homo sapiens
  misc_RNA (1)...(19): siRNA sense strand
ccaagaaggccgugaccaa

SEQ ID NO: 119843 - RNA, 19 nt, Homo sapiens
  misc_RNA (1)...(19): siRNA sense strand
ccaaggcgcagaagaagga

SEQ ID NO: 119844 - RNA, 19 nt, Homo sapiens
  misc_RNA (1)...(19): siRNA sense strand
ugaccaaggcgcagaagaa

SEQ ID NO: 119845 - RNA, 19 nt, Homo sapiens
  misc_RNA (1)...(19): siRNA sense strand
uguacaaggugcugaaaca

SEQ ID NO: 119846 - RNA, 19 nt, Homo sapiens
  misc_RNA (1)...(19): siRNA sense strand
ugaauuccuuugucaacga

SEQ ID NO: 119847 - RNA, 19 nt, Homo sapiens
  misc_RNA (1)...(19): siRNA sense strand
gcuacuccguauacgugua

SEQ ID NO: 119848 - RNA, 19 nt, Homo sapiens
  misc_RNA (1)...(19): siRNA sense strand
ccaagcacgcugugucaga

SEQ ID NO: 119849 - RNA, 19 nt, Homo sapiens
  misc_RNA (1)...(19): siRNA sense strand
ccguauacguguacaaggu

SEQ ID NO: 119850 - RNA, 19 nt, Homo sapiens
  misc_RNA (1)...(19): siRNA sense strand
agaagaaggacggcaagaa

SEQ ID NO: 119851 - RNA, 19 nt, Homo sapiens
  misc_RNA (1)...(19): siRNA sense strand
ccgaagaagggcuccaaga

SEQ ID NO: 119852 - RNA, 19 nt, Homo sapiens
  misc_RNA (1)...(19): siRNA sense strand
ccaaguacaccagcuccaa

SEQ ID NO: 119853 - RNA, 19 nt, Homo sapiens
  misc_RNA (1)...(19): siRNA sense strand
caaggccguuaccaaguac

SEQ ID NO: 119854 - RNA, 19 nt, Homo sapiens
  misc_RNA (1)...(19): siRNA sense strand
gaccaaggcgcagaagaag

SEQ ID NO: 119855 - RNA, 19 nt, Homo sapiens
  misc_RNA (1)...(19): siRNA sense strand
ggccaagcacgcuguguca

SEQ ID NO: 119856 - RNA, 19 nt, Homo sapiens
  misc_RNA (1)...(19): siRNA sense strand
gagggcaccaaggccguua

SEQ ID NO: 119857 - RNA, 19 nt, Homo sapiens
  misc_RNA (1)...(19): siRNA sense strand
gaagaaggauggcaagaag

SEQ ID NO: 119858 - RNA, 19 nt, Homo sapiens
  misc_RNA (1)...(19): siRNA sense strand
guacaccagcuccaaauaa

SEQ ID NO: 119859 - RNA, 19 nt, Homo sapiens
  misc_RNA (1)...(19): siRNA sense strand
gaucaugaauuccuuuguc

SEQ ID NO: 119860 - RNA, 19 nt, Homo sapiens
  misc_RNA (1)...(19): siRNA sense strand
gcacuaaggccgucaccaa

SEQ ID NO: 119861 - RNA, 19 nt, Homo sapiens
  misc_RNA (1)...(19): siRNA sense strand
cuaaggccgucaccaagua

SEQ ID NO: 119862 - RNA, 19 nt, Homo sapiens
  misc_RNA (1)...(19): siRNA sense strand
gaagaagggcuccaagaag

SEQ ID NO: 119863 - RNA, 19 nt, Homo sapiens
  misc_RNA (1)...(19): siRNA sense strand
gagcuacuccguauacguu

SEQ ID NO: 119864 - RNA, 19 nt, Homo sapiens
  misc_RNA (1)...(19): siRNA sense strand
gcuacuccguauacguuua

SEQ ID NO: 119865 - RNA, 19 nt, Homo sapiens
  misc_RNA (1)...(19): siRNA sense strand
cgaagaagggcuccaagaa

SEQ ID NO: 119866 - RNA, 19 nt, Homo sapiens
  misc_RNA (1)...(19): siRNA sense strand
ccaagaaggcggugaccaa

SEQ ID NO: 119867 - RNA, 19 nt, Homo sapiens
  misc_RNA (1)...(19): siRNA sense strand
ccaaggcgcagaagaagga

SEQ ID NO: 119868 - RNA, 19 nt, Homo sapiens
  misc_RNA (1)...(19): siRNA sense strand
ugaccaaggcgcagaagaa

SEQ ID NO: 119869 - RNA, 19 nt, Homo sapiens
  misc_RNA (1)...(19): siRNA sense strand
ugaauuccuuugucaacga

SEQ ID NO: 119870 - RNA, 19 nt, Homo sapiens
  misc_RNA (1)...(19): siRNA sense strand
caaguacaccagcuccaaa

SEQ ID NO: 119871 - RNA, 19 nt, Homo sapiens
  misc_RNA (1)...(19): siRNA sense strand
gaauuccuuugucaacgau

SEQ ID NO: 119872 - RNA, 19 nt, Homo sapiens
  misc_RNA (1)...(19): siRNA sense strand
cuucccgccuggcucauua

SEQ ID NO: 119873 - RNA, 19 nt, Homo sapiens
  misc_RNA (1)...(19): siRNA sense strand
ccguauacguuuacaaggu

SEQ ID NO: 119874 - RNA, 19 nt, Homo sapiens
  misc_RNA (1)...(19): siRNA sense strand
aacaagcguucgaccauca

SEQ ID NO: 119875 - RNA, 19 nt, Homo sapiens
  misc_RNA (1)...(19): siRNA sense strand
agaagaaggauggcaagaa

SEQ ID NO: 119876 - RNA, 19 nt, Homo sapiens
  misc_RNA (1)...(19): siRNA sense strand
ccgccuggcucauuacaac

SEQ ID NO: 119877 - RNA, 19 nt, Homo sapiens
  misc_RNA (1)...(19): siRNA sense strand
ccaaguacaccagcuccaa

SEQ ID NO: 119878 - RNA, 19 nt, Homo sapiens
  misc_RNA (1)...(19): siRNA sense strand
ccgaagaagggcuccaaga

SEQ ID NO: 119879 - RNA, 19 nt, Homo sapiens
  misc_RNA (1)...(19): siRNA sense strand
gaccaaggcgcagaagaag

SEQ ID NO: 119880 - RNA, 19 nt, Homo sapiens
  misc_RNA (1)...(19): siRNA sense strand
acaccggcaucuccuccaa

SEQ ID NO: 119881 - RNA, 19 nt, Homo sapiens
  misc_RNA (1)...(19): siRNA sense strand
gaagaaggauggcaagaag

SEQ ID NO: 119882 - RNA, 19 nt, Homo sapiens
  misc_RNA (1)...(19): siRNA sense strand
ccaaggcggucaccaagua

SEQ ID NO: 119883 - RNA, 19 nt, Homo sapiens
  misc_RNA (1)...(19): siRNA sense strand
ggagagcuauuccguguac

SEQ ID NO: 119884 - RNA, 19 nt, Homo sapiens
  misc_RNA (1)...(19): siRNA sense strand
gcuauuccguguacgugua

SEQ ID NO: 119885 - RNA, 19 nt, Homo sapiens
  misc_RNA (1)...(19): siRNA sense strand
gaagaagggcuccaagaag

SEQ ID NO: 119886 - RNA, 19 nt, Homo sapiens
  misc_RNA (1)...(19): siRNA sense strand
guacaccagcuccaaguaa

SEQ ID NO: 119887 - RNA, 19 nt, Homo sapiens
  misc_RNA (1)...(19): siRNA sense strand
cgaagaagggcuccaagaa

SEQ ID NO: 119888 - RNA, 19 nt, Homo sapiens
  misc_RNA (1)...(19): siRNA sense strand
aacaagcgcucgaccauca

SEQ ID NO: 119889 - RNA, 19 nt, Homo sapiens
  misc_RNA (1)...(19): siRNA sense strand
gcaccaaggcggucaccaa

SEQ ID NO: 119890 - RNA, 19 nt, Homo sapiens
  misc_RNA (1)...(19): siRNA sense strand
ccaagaaggcggugaccaa

SEQ ID NO: 119891 - RNA, 19 nt, Homo sapiens
  misc_RNA (1)...(19): siRNA sense strand
ccaaggcacagaagaagga

SEQ ID NO: 119892 - RNA, 19 nt, Homo sapiens
  misc_RNA (1)...(19): siRNA sense strand
ugaccaaggcacagaagaa

SEQ ID NO: 119893 - RNA, 19 nt, Homo sapiens
  misc_RNA (1)...(19): siRNA sense strand
agaagaaggauggcaagaa

SEQ ID NO: 119894 - RNA, 19 nt, Homo sapiens
  misc_RNA (1)...(19): siRNA sense strand
gaccaaggcacagaagaag

SEQ ID NO: 119895 - RNA, 19 nt, Homo sapiens
  misc_RNA (1)...(19): siRNA sense strand
ccaaguacaccagcuccaa

SEQ ID NO: 119896 - RNA, 19 nt, Homo sapiens
  misc_RNA (1)...(19): siRNA sense strand
ccgaagaagggcuccaaga

SEQ ID NO: 119897 - RNA, 19 nt, Homo sapiens
  misc_RNA (1)...(19): siRNA sense strand
acaccggcaucucguccaa

SEQ ID NO: 119898 - RNA, 19 nt, Homo sapiens
  misc_RNA (1)...(19): siRNA sense strand
gaagaaagauggcaagaag

SEQ ID NO: 119899 - RNA, 19 nt, Homo sapiens
  misc_RNA (1)...(19): siRNA sense strand
ccaaggccgucaccaagua

SEQ ID NO: 119900 - RNA, 19 nt, Homo sapiens
  misc_RNA (1)...(19): siRNA sense strand
ccaaagcgcagaagaaaga

SEQ ID NO: 119901 - RNA, 19 nt, Homo sapiens
  misc_RNA (1)...(19): siRNA sense strand
caucaugaauucuuucguu

SEQ ID NO: 119902 - RNA, 19 nt, Homo sapiens
  misc_RNA (1)...(19): siRNA sense strand
gaagaagggcuccaagaag

SEQ ID NO: 119903 - RNA, 19 nt, Homo sapiens
  misc_RNA (1)...(19): siRNA sense strand
gaccaaagcgcagaagaaa

SEQ ID NO: 119904 - RNA, 19 nt, Homo sapiens
  misc_RNA (1)...(19): siRNA sense strand
guacaccagcuccaaguaa

SEQ ID NO: 119905 - RNA, 19 nt, Homo sapiens
  misc_RNA (1)...(19): siRNA sense strand
cgaagaagggcuccaagaa

SEQ ID NO: 119906 - RNA, 19 nt, Homo sapiens
  misc_RNA (1)...(19): siRNA sense strand
aacaagcgcucgaccauca

SEQ ID NO: 119907 - RNA, 19 nt, Homo sapiens
  misc_RNA (1)...(19): siRNA sense strand
gcaccaaggccgucaccaa

SEQ ID NO: 119908 - RNA, 19 nt, Homo sapiens
  misc_RNA (1)...(19): siRNA sense strand
caagaaggcagugaccaaa

SEQ ID NO: 119909 - RNA, 19 nt, Homo sapiens
  misc_RNA (1)...(19): siRNA sense strand
uguacaaggugcugaaaca

SEQ ID NO: 119910 - RNA, 19 nt, Homo sapiens
  misc_RNA (1)...(19): siRNA sense strand
guuacucuguguacgugua

SEQ ID NO: 119911 - RNA, 19 nt, Homo sapiens
  misc_RNA (1)...(19): siRNA sense strand
acacuggcaucucuuccaa

SEQ ID NO: 119912 - RNA, 19 nt, Homo sapiens
  misc_RNA (1)...(19): siRNA sense strand
ccaagaaggcagugaccaa

SEQ ID NO: 119913 - RNA, 19 nt, Homo sapiens
  misc_RNA (1)...(19): siRNA sense strand
ugaccaaagcgcagaagaa

SEQ ID NO: 119914 - RNA, 19 nt, Homo sapiens
  misc_RNA (1)...(19): siRNA sense strand
caugaauucuuucguuaac

SEQ ID NO: 119915 - RNA, 19 nt, Homo sapiens
  misc_RNA (1)...(19): siRNA sense strand
gcagccgcaaggagaguua

SEQ ID NO: 119916 - RNA, 19 nt, Homo sapiens
  misc_RNA (1)...(19): siRNA sense strand
agaagaaagauggcaagaa

SEQ ID NO: 119917 - RNA, 19 nt, Homo sapiens
  misc_RNA (1)...(19): siRNA sense strand
ccaaguacaccagcuccaa

SEQ ID NO: 119918 - RNA, 19 nt, Homo sapiens
  misc_RNA (1)...(19): siRNA sense strand
ccgaagaagggcuccaaga

SEQ ID NO: 119919 - RNA, 19 nt, Homo sapiens
  misc_RNA (1)...(19): siRNA sense strand
agaaggcagugaccaaagc

SEQ ID NO: 119920 - RNA, 19 nt, Homo sapiens
  misc_RNA (1)...(19): siRNA sense strand
ugggcaucaugaauucuuu

SEQ ID NO: 119921 - RNA, 19 nt, Homo sapiens
  misc_RNA (1)...(19): siRNA sense strand
caaaggccgucaccaagua

SEQ ID NO: 119922 - RNA, 19 nt, Homo sapiens
  misc_RNA (1)...(19): siRNA sense strand
gcacaaaggccgucaccaa

SEQ ID NO: 119923 - RNA, 19 nt, Homo sapiens
  misc_RNA (1)...(19): siRNA sense strand
ugaacuccuucgucaauga

SEQ ID NO: 119924 - RNA, 19 nt, Homo sapiens
  misc_RNA (1)...(19): siRNA sense strand
aacaagcgcucgaccauca

SEQ ID NO: 119925 - RNA, 19 nt, Homo sapiens
  misc_RNA (1)...(19): siRNA sense strand
guacaccagcuccaaguga

SEQ ID NO: 119926 - RNA, 19 nt, Homo sapiens
  misc_RNA (1)...(19): siRNA sense strand
guuacucuaucuacgugua

SEQ ID NO: 119927 - RNA, 19 nt, Homo sapiens
  misc_RNA (1)...(19): siRNA sense strand
ccaagaaagccguaaccaa

SEQ ID NO: 119928 - RNA, 19 nt, Homo sapiens
  misc_RNA (1)...(19): siRNA sense strand
caugaacuccuucgucaau

SEQ ID NO: 119929 - RNA, 19 nt, Homo sapiens
  misc_RNA (1)...(19): siRNA sense strand
acaccggcaucucaucgaa

SEQ ID NO: 119930 - RNA, 19 nt, Homo sapiens
  misc_RNA (1)...(19): siRNA sense strand
aagcgcagccgcaaagaga

SEQ ID NO: 119931 - RNA, 19 nt, Homo sapiens
  misc_RNA (1)...(19): siRNA sense strand
gcagccgcaaagagaguua

SEQ ID NO: 119932 - RNA, 19 nt, Homo sapiens
  misc_RNA (1)...(19): siRNA sense strand
ccaaguacaccagcuccaa

SEQ ID NO: 119933 - RNA, 19 nt, Homo sapiens
  misc_RNA (1)...(19): siRNA sense strand
acaaaggccgucaccaagu

SEQ ID NO: 119934 - RNA, 19 nt, Homo sapiens
  misc_RNA (1)...(19): siRNA sense strand
cuaucuacguguacaaggu

SEQ ID NO: 119935 - RNA, 19 nt, Homo sapiens
  misc_RNA (1)...(19): siRNA sense strand
caagaaagccgucaccaaa

SEQ ID NO: 119936 - RNA, 19 nt, Homo sapiens
  misc_RNA (1)...(19): siRNA sense strand
ccaaggcggucaccaagua

SEQ ID NO: 119937 - RNA, 19 nt, Homo sapiens
  misc_RNA (1)...(19): siRNA sense strand
gaagaaagacggcaagaag

SEQ ID NO: 119938 - RNA, 19 nt, Homo sapiens
  misc_RNA (1)...(19): siRNA sense strand
aaagagagcuacuccaucu

SEQ ID NO: 119939 - RNA, 19 nt, Homo sapiens
  misc_RNA (1)...(19): siRNA sense strand
ccaaagcccagaagaaaga

SEQ ID NO: 119940 - RNA, 19 nt, Homo sapiens
  misc_RNA (1)...(19): siRNA sense strand
gcaaagagagcuacuccau

SEQ ID NO: 119941 - RNA, 19 nt, Homo sapiens
  misc_RNA (1)...(19): siRNA sense strand
caccaaagcccagaagaaa

SEQ ID NO: 119942 - RNA, 19 nt, Homo sapiens
  misc_RNA (1)...(19): siRNA sense strand
gcuacuccaucuacgugua

SEQ ID NO: 119943 - RNA, 19 nt, Homo sapiens
  misc_RNA (1)...(19): siRNA sense strand
aacaagcgcuccaccauca

SEQ ID NO: 119944 - RNA, 19 nt, Homo sapiens
  misc_RNA (1)...(19): siRNA sense strand
gcaccaaggcggucaccaa

SEQ ID NO: 119945 - RNA, 19 nt, Homo sapiens
  misc_RNA (1)...(19): siRNA sense strand
guacaccagcuccaaguga

SEQ ID NO: 119946 - RNA, 19 nt, Homo sapiens
  misc_RNA (1)...(19): siRNA sense strand
ccaagaaagccgucaccaa

SEQ ID NO: 119947 - RNA, 19 nt, Homo sapiens
  misc_RNA (1)...(19): siRNA sense strand
ucaccaaagcccagaagaa

SEQ ID NO: 119948 - RNA, 19 nt, Homo sapiens
  misc_RNA (1)...(19): siRNA sense strand
caucacaucccgcgagauc

SEQ ID NO: 119949 - RNA, 19 nt, Homo sapiens
  misc_RNA (1)...(19): siRNA sense strand
agaaagccgucaccaaagc

SEQ ID NO: 119950 - RNA, 19 nt, Homo sapiens
  misc_RNA (1)...(19): siRNA sense strand
aagcgcagccgcaaagaga

SEQ ID NO: 119951 - RNA, 19 nt, Homo sapiens
  misc_RNA (1)...(19): siRNA sense strand
ccaucuacguguacaaggu

SEQ ID NO: 119952 - RNA, 19 nt, Homo sapiens
  misc_RNA (1)...(19): siRNA sense strand
ccaaguacaccagcuccaa

SEQ ID NO: 119953 - RNA, 19 nt, Homo sapiens
  misc_RNA (1)...(19): siRNA sense strand
agaagaaagacggcaagaa

SEQ ID NO: 119954 - RNA, 19 nt, Homo sapiens
  misc_RNA (1)...(19): siRNA sense strand
caugaacuccuucgucaac

SEQ ID NO: 119955 - RNA, 19 nt, Homo sapiens
  misc_RNA (1)...(19): siRNA sense strand
acaccggcaucucguccaa

SEQ ID NO: 119956 - RNA, 19 nt, Homo sapiens
  misc_RNA (1)...(19): siRNA sense strand
gcaaacaguuggccacuaa

SEQ ID NO: 119957 - RNA, 19 nt, Homo sapiens
  misc_RNA (1)...(19): siRNA sense strand
gaaguccacugaacugcuu

SEQ ID NO: 119958 - RNA, 19 nt, Homo sapiens
  misc_RNA (1)...(19): siRNA sense strand
ccacugaacugcuuauucg

SEQ ID NO: 119959 - RNA, 19 nt, Homo sapiens
  misc_RNA (1)...(19): siRNA sense strand
gagauccgccguuaucaga

SEQ ID NO: 119960 - RNA, 19 nt, Homo sapiens
  misc_RNA (1)...(19): siRNA sense strand
gcaaacugcucggaagucu

SEQ ID NO: 119961 - RNA, 19 nt, Homo sapiens
  misc_RNA (1)...(19): siRNA sense strand
gugcgaggccuacuuggua

SEQ ID NO: 119962 - RNA, 19 nt, Homo sapiens
  misc_RNA (1)...(19): siRNA sense strand
cugaacugcuuauucguaa

SEQ ID NO: 119963 - RNA, 19 nt, Homo sapiens
  misc_RNA (1)...(19): siRNA sense strand
gccaagcgcgucacuauca

SEQ ID NO: 119964 - RNA, 19 nt, Homo sapiens
  misc_RNA (1)...(19): siRNA sense strand
ccagagcuccgcugugaug

SEQ ID NO: 119965 - RNA, 19 nt, Homo sapiens
  misc_RNA (1)...(19): siRNA sense strand
gauccgccguuaucagaag

SEQ ID NO: 119966 - RNA, 19 nt, Homo sapiens
  misc_RNA (1)...(19): siRNA sense strand
ucacuaucaugcccaagga

SEQ ID NO: 119967 - RNA, 19 nt, Homo sapiens
  misc_RNA (1)...(19): siRNA sense strand
gaacugcuuauucguaaac

SEQ ID NO: 119968 - RNA, 19 nt, Homo sapiens
  misc_RNA (1)...(19): siRNA sense strand
gcaaggcgccacgcaaaca

SEQ ID NO: 119969 - RNA, 19 nt, Homo sapiens
  misc_RNA (1)...(19): siRNA sense strand
uuccagagcuccgcuguga

SEQ ID NO: 119970 - RNA, 19 nt, Homo sapiens
  misc_RNA (1)...(19): siRNA sense strand
gagauugcgcaggacuuua

SEQ ID NO: 119971 - RNA, 19 nt, Homo sapiens
  misc_RNA (1)...(19): siRNA sense strand
agauugcgcaggacuuuaa

SEQ ID NO: 119972 - RNA, 19 nt, Homo sapiens
  misc_RNA (1)...(19): siRNA sense strand
ugaacugcuuauucguaaa

SEQ ID NO: 119973 - RNA, 19 nt, Homo sapiens
  misc_RNA (1)...(19): siRNA sense strand
gcgcaggacuuuaaaacag

SEQ ID NO: 119974 - RNA, 19 nt, Homo sapiens
  misc_RNA (1)...(19): siRNA sense strand
ccaagcgcgucacuaucau

SEQ ID NO: 119975 - RNA, 19 nt, Homo sapiens
  misc_RNA (1)...(19): siRNA sense strand
aaacugcucggaagucuac

SEQ ID NO: 119976 - RNA, 19 nt, Homo sapiens
  misc_RNA (1)...(19): siRNA sense strand
caaacugcucggaagucua

SEQ ID NO: 119977 - RNA, 19 nt, Homo sapiens
  misc_RNA (1)...(19): siRNA sense strand
cgcaaacaguuggccacua

SEQ ID NO: 119978 - RNA, 19 nt, Homo sapiens
  misc_RNA (1)...(19): siRNA sense strand
acugaacugcuuauucgua

SEQ ID NO: 119979 - RNA, 19 nt, Homo sapiens
  misc_RNA (1)...(19): siRNA sense strand
gcaagcagcuggccaccaa

SEQ ID NO: 119980 - RNA, 19 nt, Homo sapiens
  misc_RNA (1)...(19): siRNA sense strand
caccaaggcugcucgaaag

SEQ ID NO: 119981 - RNA, 19 nt, Homo sapiens
  misc_RNA (1)...(19): siRNA sense strand
cgaccgagcugcugauucg

SEQ ID NO: 119982 - RNA, 19 nt, Homo sapiens
  misc_RNA (1)...(19): siRNA sense strand
ugaagaagccccaccguua

SEQ ID NO: 119983 - RNA, 19 nt, Homo sapiens
  misc_RNA (1)...(19): siRNA sense strand
ccaccaaggcugcucgaaa

SEQ ID NO: 119984 - RNA, 19 nt, Homo sapiens
  misc_RNA (1)...(19): siRNA sense strand
ggaaagcgccacgcaagca

SEQ ID NO: 119985 - RNA, 19 nt, Homo sapiens
  misc_RNA (1)...(19): siRNA sense strand
ugacuaucaugcccaagga

SEQ ID NO: 119986 - RNA, 19 nt, Homo sapiens
  misc_RNA (1)...(19): siRNA sense strand
ccagcuugcucgccgcauu

SEQ ID NO: 119987 - RNA, 19 nt, Homo sapiens
  misc_RNA (1)...(19): siRNA sense strand
gccaagcgagugacuauca

SEQ ID NO: 119988 - RNA, 19 nt, Homo sapiens
  misc_RNA (1)...(19): siRNA sense strand
cgcaggacuucaagacuga

SEQ ID NO: 119989 - RNA, 19 nt, Homo sapiens
  misc_RNA (1)...(19): siRNA sense strand
ucaagacugaucugcguuu

SEQ ID NO: 119990 - RNA, 19 nt, Homo sapiens
  misc_RNA (1)...(19): siRNA sense strand
ccaagcgagugacuaucau

SEQ ID NO: 119991 - RNA, 19 nt, Homo sapiens
  misc_RNA (1)...(19): siRNA sense strand
ugagaucgcgcaggacuuc

SEQ ID NO: 119992 - RNA, 19 nt, Homo sapiens
  misc_RNA (1)...(19): siRNA sense strand
agacugaucugcguuuuca

SEQ ID NO: 119993 - RNA, 19 nt, Homo sapiens
  misc_RNA (1)...(19): siRNA sense strand
ggacuucaagacugaucug

SEQ ID NO: 119994 - RNA, 19 nt, Homo sapiens
  misc_RNA (1)...(19): siRNA sense strand
gcaaacagcucgcaagucu

SEQ ID NO: 119995 - RNA, 19 nt, Homo sapiens
  misc_RNA (1)...(19): siRNA sense strand
gcuaaacgcgucaccauca

SEQ ID NO: 119996 - RNA, 19 nt, Homo sapiens
  misc_RNA (1)...(19): siRNA sense strand
gcaaagcuccgcgcaagca

SEQ ID NO: 119997 - RNA, 19 nt, Homo sapiens
  misc_RNA (1)...(19): siRNA sense strand
acaccaaucugugcgcuau

SEQ ID NO: 119998 - RNA, 19 nt, Homo sapiens
  misc_RNA (1)...(19): siRNA sense strand
agaaaucgcccaggacuuc

SEQ ID NO: 119999 - RNA, 19 nt, Homo sapiens
  misc_RNA (1)...(19): siRNA sense strand
cuacuaaagcagcccguaa

SEQ ID NO: 120000 - RNA, 19 nt, Homo sapiens
  misc_RNA (1)...(19): siRNA sense strand
ucaccaucaugcccaaaga

SEQ ID NO: 120001 - RNA, 19 nt, Homo sapiens
  misc_RNA (1)...(19): siRNA sense strand
aaacagcucgcaagucuac

SEQ ID NO: 120002 - RNA, 19 nt, Homo sapiens
  misc_RNA (1)...(19): siRNA sense strand
caucaugcccaaagauauc

SEQ ID NO: 120003 - RNA, 19 nt, Homo sapiens
  misc_RNA (1)...(19): siRNA sense strand
gagaaaucgcccaggacuu

SEQ ID NO: 120004 - RNA, 19 nt, Homo sapiens
  misc_RNA (1)...(19): siRNA sense strand
gaaaucgcccaggacuuca

SEQ ID NO: 120005 - RNA, 19 nt, Homo sapiens
  misc_RNA (1)...(19): siRNA sense strand
cuaaacgcgucaccaucau

SEQ ID NO: 120006 - RNA, 19 nt, Homo sapiens
  misc_RNA (1)...(19): siRNA sense strand
caaacagcucgcaagucua

SEQ ID NO: 120007 - RNA, 19 nt, Homo sapiens
  misc_RNA (1)...(19): siRNA sense strand
ccaucaugcccaaagauau

SEQ ID NO: 120008 - RNA, 19 nt, Homo sapiens
  misc_RNA (1)...(19): siRNA sense strand
ugugcgcuauucacgcuaa

SEQ ID NO: 120009 - RNA, 19 nt, Homo sapiens
  misc_RNA (1)...(19): siRNA sense strand
gcaaacagcuggccacuaa

SEQ ID NO: 120010 - RNA, 19 nt, Homo sapiens
  misc_RNA (1)...(19): siRNA sense strand
agaaauagcucaggacuuc

SEQ ID NO: 120011 - RNA, 19 nt, Homo sapiens
  misc_RNA (1)...(19): siRNA sense strand
gaccugcgcuuccagaguu

SEQ ID NO: 120012 - RNA, 19 nt, Homo sapiens
  misc_RNA (1)...(19): siRNA sense strand
caucaugccuaaagacauc

SEQ ID NO: 120013 - RNA, 19 nt, Homo sapiens
  misc_RNA (1)...(19): siRNA sense strand
ccagaagucuaccgagcuu

SEQ ID NO: 120014 - RNA, 19 nt, Homo sapiens
  misc_RNA (1)...(19): siRNA sense strand
guaaagcaccgcgcaaaca

SEQ ID NO: 120015 - RNA, 19 nt, Homo sapiens
  misc_RNA (1)...(19): siRNA sense strand
cuaagcagacggcucguaa

SEQ ID NO: 120016 - RNA, 19 nt, Homo sapiens
  misc_RNA (1)...(19): siRNA sense strand
gcgugaccaucaugccuaa

SEQ ID NO: 120017 - RNA, 19 nt, Homo sapiens
  misc_RNA (1)...(19): siRNA sense strand
gccaaacgcgugaccauca

SEQ ID NO: 120018 - RNA, 19 nt, Homo sapiens
  misc_RNA (1)...(19): siRNA sense strand
ugaccaucaugccuaaaga

SEQ ID NO: 120019 - RNA, 19 nt, Homo sapiens
  misc_RNA (1)...(19): siRNA sense strand
uccggaagcugccguuuca

SEQ ID NO: 120020 - RNA, 19 nt, Homo sapiens
  misc_RNA (1)...(19): siRNA sense strand
gagaaauagcucaggacuu

SEQ ID NO: 120021 - RNA, 19 nt, Homo sapiens
  misc_RNA (1)...(19): siRNA sense strand
acaccaaccugugcgcuau

SEQ ID NO: 120022 - RNA, 19 nt, Homo sapiens
  misc_RNA (1)...(19): siRNA sense strand
gcgccuggugcgagaaaua

SEQ ID NO: 120023 - RNA, 19 nt, Homo sapiens
  misc_RNA (1)...(19): siRNA sense strand
ccaaacgcgugaccaucau

SEQ ID NO: 120024 - RNA, 19 nt, Homo sapiens
  misc_RNA (1)...(19): siRNA sense strand
aagcagacggcucguaaau

SEQ ID NO: 120025 - RNA, 19 nt, Homo sapiens
  misc_RNA (1)...(19): siRNA sense strand
aaauagcucaggacuucaa

SEQ ID NO: 120026 - RNA, 19 nt, Homo sapiens
  misc_RNA (1)...(19): siRNA sense strand
uaagcagacggcucguaaa

SEQ ID NO: 120027 - RNA, 19 nt, Homo sapiens
  misc_RNA (1)...(19): siRNA sense strand
gaaauagcucaggacuuca

SEQ ID NO: 120028 - RNA, 19 nt, Homo sapiens
  misc_RNA (1)...(19): siRNA sense strand
uaaagcaccgcgcaaacag

SEQ ID NO: 120029 - RNA, 19 nt, Homo sapiens
  misc_RNA (1)...(19): siRNA sense strand
gcaagcagcuggccaccaa

SEQ ID NO: 120030 - RNA, 19 nt, Homo sapiens
  misc_RNA (1)...(19): siRNA sense strand
gccaaacgcgucacuauua

SEQ ID NO: 120031 - RNA, 19 nt, Homo sapiens
  misc_RNA (1)...(19): siRNA sense strand
ggagaucgcacaggacuuu

SEQ ID NO: 120032 - RNA, 19 nt, Homo sapiens
  misc_RNA (1)...(19): siRNA sense strand
ccaaacgcgucacuauuau

SEQ ID NO: 120033 - RNA, 19 nt, Homo sapiens
  misc_RNA (1)...(19): siRNA sense strand
ucacuauuaugccuaaaga

SEQ ID NO: 120034 - RNA, 19 nt, Homo sapiens
  misc_RNA (1)...(19): siRNA sense strand
gaagucgaccgagcugcua

SEQ ID NO: 120035 - RNA, 19 nt, Homo sapiens
  misc_RNA (1)...(19): siRNA sense strand
gcgucacuauuaugccuaa

SEQ ID NO: 120036 - RNA, 19 nt, Homo sapiens
  misc_RNA (1)...(19): siRNA sense strand
uauuaugccuaaagacauc

SEQ ID NO: 120037 - RNA, 19 nt, Homo sapiens
  misc_RNA (1)...(19): siRNA sense strand
caaacgcgucacuauuaug

SEQ ID NO: 120038 - RNA, 19 nt, Homo sapiens
  misc_RNA (1)...(19): siRNA sense strand
gcacgaacaaagcaaacag

SEQ ID NO: 120039 - RNA, 19 nt, Homo sapiens
  misc_RNA (1)...(19): siRNA sense strand
gagaucgcacaggacuuua

SEQ ID NO: 120040 - RNA, 19 nt, Homo sapiens
  misc_RNA (1)...(19): siRNA sense strand
gaucgcacaggacuuuaag

SEQ ID NO: 120041 - RNA, 19 nt, Homo sapiens
  misc_RNA (1)...(19): siRNA sense strand
cgccaaacgcgucacuauu

SEQ ID NO: 120042 - RNA, 19 nt, Homo sapiens
  misc_RNA (1)...(19): siRNA sense strand
gcaagcagcuggccacuaa

SEQ ID NO: 120043 - RNA, 19 nt, Homo sapiens
  misc_RNA (1)...(19): siRNA sense strand
caagacagaucugcgcuuu

SEQ ID NO: 120044 - RNA, 19 nt, Homo sapiens
  misc_RNA (1)...(19): siRNA sense strand
gagauucgccgcuaucaga

SEQ ID NO: 120045 - RNA, 19 nt, Homo sapiens
  misc_RNA (1)...(19): siRNA sense strand
agaaaucgcucaggacuuc

SEQ ID NO: 120046 - RNA, 19 nt, Homo sapiens
  misc_RNA (1)...(19): siRNA sense strand
agacagaucugcgcuuuca

SEQ ID NO: 120047 - RNA, 19 nt, Homo sapiens
  misc_RNA (1)...(19): siRNA sense strand
gcuaagcgagugacuauca

SEQ ID NO: 120048 - RNA, 19 nt, Homo sapiens
  misc_RNA (1)...(19): siRNA sense strand
ucagcucgcucgccgcauu

SEQ ID NO: 120049 - RNA, 19 nt, Homo sapiens
  misc_RNA (1)...(19): siRNA sense strand
ugacuaucaugcccaagga

SEQ ID NO: 120050 - RNA, 19 nt, Homo sapiens
  misc_RNA (1)...(19): siRNA sense strand
caaccugugugccauccau

SEQ ID NO: 120051 - RNA, 19 nt, Homo sapiens
  misc_RNA (1)...(19): siRNA sense strand
gagaaaucgcucaggacuu

SEQ ID NO: 120052 - RNA, 19 nt, Homo sapiens
  misc_RNA (1)...(19): siRNA sense strand
ugugugccauccaugcuaa

SEQ ID NO: 120053 - RNA, 19 nt, Homo sapiens
  misc_RNA (1)...(19): siRNA sense strand
caacgccuggugcgagaaa

SEQ ID NO: 120054 - RNA, 19 nt, Homo sapiens
  misc_RNA (1)...(19): siRNA sense strand
uaucaugcccaaggacauu

SEQ ID NO: 120055 - RNA, 19 nt, Homo sapiens
  misc_RNA (1)...(19): siRNA sense strand
ggacuucaagacagaucug

SEQ ID NO: 120056 - RNA, 19 nt, Homo sapiens
  misc_RNA (1)...(19): siRNA sense strand
cuaagcgagugacuaucau

SEQ ID NO: 120057 - RNA, 19 nt, Homo sapiens
  misc_RNA (1)...(19): siRNA sense strand
ggaagcagcuggccaccaa

SEQ ID NO: 120058 - RNA, 19 nt, Homo sapiens
  misc_RNA (1)...(19): siRNA sense strand
gccaagcgugucacuauua

SEQ ID NO: 120059 - RNA, 19 nt, Homo sapiens
  misc_RNA (1)...(19): siRNA sense strand
ccaagcgugucacuauuau

SEQ ID NO: 120060 - RNA, 19 nt, Homo sapiens
  misc_RNA (1)...(19): siRNA sense strand
gagauccgccguuaucaga

SEQ ID NO: 120061 - RNA, 19 nt, Homo sapiens
  misc_RNA (1)...(19): siRNA sense strand
ucacuauuaugccuaagga

SEQ ID NO: 120062 - RNA, 19 nt, Homo sapiens
  misc_RNA (1)...(19): siRNA sense strand
gauccgccguuaucagaag

SEQ ID NO: 120063 - RNA, 19 nt, Homo sapiens
  misc_RNA (1)...(19): siRNA sense strand
acaccaaccucugugcuau

SEQ ID NO: 120064 - RNA, 19 nt, Homo sapiens
  misc_RNA (1)...(19): siRNA sense strand
gacaccaaccucugugcua

SEQ ID NO: 120065 - RNA, 19 nt, Homo sapiens
  misc_RNA (1)...(19): siRNA sense strand
ucuggugggucucuuugaa

SEQ ID NO: 120066 - RNA, 19 nt, Homo sapiens
  misc_RNA (1)...(19): siRNA sense strand
cgccaagcgugucacuauu

SEQ ID NO: 120067 - RNA, 19 nt, Homo sapiens
  misc_RNA (1)...(19): siRNA sense strand
cgacuggcggugugaagaa

SEQ ID NO: 120068 - RNA, 19 nt, Homo sapiens
  misc_RNA (1)...(19): siRNA sense strand
ugcgugagauccgccguua

SEQ ID NO: 120069 - RNA, 19 nt, Homo sapiens
  misc_RNA (1)...(19): siRNA sense strand
ugaagacaccaaccucugu

SEQ ID NO: 120070 - RNA, 19 nt, Homo sapiens
  misc_RNA (1)...(19): siRNA sense strand
gugucacuauuaugccuaa

SEQ ID NO: 120071 - RNA, 19 nt, Homo sapiens
  misc_RNA (1)...(19): siRNA sense strand
cgugagauccgccguuauc

SEQ ID NO: 120072 - RNA, 19 nt, Homo sapiens
  misc_RNA (1)...(19): siRNA sense strand
caaccucugugcuauucac

SEQ ID NO: 120073 - RNA, 19 nt, Homo sapiens
  misc_RNA (1)...(19): siRNA sense strand
uccgcaaacugccauuuca

SEQ ID NO: 120074 - RNA, 19 nt, Homo sapiens
  misc_RNA (1)...(19): siRNA sense strand
gcaagcagcuggcuaccaa

SEQ ID NO: 120075 - RNA, 19 nt, Homo sapiens
  misc_RNA (1)...(19): siRNA sense strand
gcuaagcgagugacuauua

SEQ ID NO: 120076 - RNA, 19 nt, Homo sapiens
  misc_RNA (1)...(19): siRNA sense strand
agaaaucgcccaagacuuc

SEQ ID NO: 120077 - RNA, 19 nt, Homo sapiens
  misc_RNA (1)...(19): siRNA sense strand
ugacuauuaugcccaaaga

SEQ ID NO: 120078 - RNA, 19 nt, Homo sapiens
  misc_RNA (1)...(19): siRNA sense strand
cuaagcgagugacuauuau

SEQ ID NO: 120079 - RNA, 19 nt, Homo sapiens
  misc_RNA (1)...(19): siRNA sense strand
aaacagacagcucggaaau

SEQ ID NO: 120080 - RNA, 19 nt, Homo sapiens
  misc_RNA (1)...(19): siRNA sense strand
uaaacagacagcucggaaa

SEQ ID NO: 120081 - RNA, 19 nt, Homo sapiens
  misc_RNA (1)...(19): siRNA sense strand
cgaccgaguugcugauucg

SEQ ID NO: 120082 - RNA, 19 nt, Homo sapiens
  misc_RNA (1)...(19): siRNA sense strand
guaaagcgccacgcaagca

SEQ ID NO: 120083 - RNA, 19 nt, Homo sapiens
  misc_RNA (1)...(19): siRNA sense strand
gagaaaucgcccaagacuu

SEQ ID NO: 120084 - RNA, 19 nt, Homo sapiens
  misc_RNA (1)...(19): siRNA sense strand
gaaaucgcccaagacuuca

SEQ ID NO: 120085 - RNA, 19 nt, Homo sapiens
  misc_RNA (1)...(19): siRNA sense strand
cgagaaaucgcccaagacu

SEQ ID NO: 120086 - RNA, 19 nt, Homo sapiens
  misc_RNA (1)...(19): siRNA sense strand
acagacagcucggaaaucc

SEQ ID NO: 120087 - RNA, 19 nt, Homo sapiens
  misc_RNA (1)...(19): siRNA sense strand
aagcggaucucuggucuga

SEQ ID NO: 120088 - RNA, 19 nt, Homo sapiens
  misc_RNA (1)...(19): siRNA sense strand
gacguggucuacgcgcuua

SEQ ID NO: 120089 - RNA, 19 nt, Homo sapiens
  misc_RNA (1)...(19): siRNA sense strand
gcgggaaggguuuggguaa

SEQ ID NO: 120090 - RNA, 19 nt, Homo sapiens
  misc_RNA (1)...(19): siRNA sense strand
ucucuggucugaucuacga

SEQ ID NO: 120091 - RNA, 19 nt, Homo sapiens
  misc_RNA (1)...(19): siRNA sense strand
gggaaggguuuggguaagg

SEQ ID NO: 120092 - RNA, 19 nt, Homo sapiens
  misc_RNA (1)...(19): siRNA sense strand
gccaagcgcaagacaguca

SEQ ID NO: 120093 - RNA, 19 nt, Homo sapiens
  misc_RNA (1)...(19): siRNA sense strand
gagcacgccaagcgcaaga

SEQ ID NO: 120094 - RNA, 19 nt, Homo sapiens
  misc_RNA (1)...(19): siRNA sense strand
gacaacauccagggcauca

SEQ ID NO: 120095 - RNA, 19 nt, Homo sapiens
  misc_RNA (1)...(19): siRNA sense strand
acgcacccuuuauggcuuu

SEQ ID NO: 120096 - RNA, 19 nt, Homo sapiens
  misc_RNA (1)...(19): siRNA sense strand
uuauggcuuuggcgguuaa

SEQ ID NO: 120097 - RNA, 19 nt, Homo sapiens
  misc_RNA (1)...(19): siRNA sense strand
gcggaaagggucuagguaa

SEQ ID NO: 120098 - RNA, 19 nt, Homo sapiens
  misc_RNA (1)...(19): siRNA sense strand
gacaauauccaaggaauca

SEQ ID NO: 120099 - RNA, 19 nt, Homo sapiens
  misc_RNA (1)...(19): siRNA sense strand
gaacacgccaaacgcaaga

SEQ ID NO: 120100 - RNA, 19 nt, Homo sapiens
  misc_RNA (1)...(19): siRNA sense strand
gcguauuucuggccucauu

SEQ ID NO: 120101 - RNA, 19 nt, Homo sapiens
  misc_RNA (1)...(19): siRNA sense strand
gcgccaagcgucaccguaa

SEQ ID NO: 120102 - RNA, 19 nt, Homo sapiens
  misc_RNA (1)...(19): siRNA sense strand
guauuucuggccucauuua

SEQ ID NO: 120103 - RNA, 19 nt, Homo sapiens
  misc_RNA (1)...(19): siRNA sense strand
cguaagguauugcgugaca

SEQ ID NO: 120104 - RNA, 19 nt, Homo sapiens
  misc_RNA (1)...(19): siRNA sense strand
gccagggacgcacucuuua

SEQ ID NO: 120105 - RNA, 19 nt, Homo sapiens
  misc_RNA (1)...(19): siRNA sense strand
gugacaauauccaaggaau

SEQ ID NO: 120106 - RNA, 19 nt, Homo sapiens
  misc_RNA (1)...(19): siRNA sense strand
gcggagugcugaaaguuuu

SEQ ID NO: 120107 - RNA, 19 nt, Homo sapiens
  misc_RNA (1)...(19): siRNA sense strand
cggaaagggucuagguaag

SEQ ID NO: 120108 - RNA, 19 nt, Homo sapiens
  misc_RNA (1)...(19): siRNA sense strand
ggaaagggucuagguaagg

SEQ ID NO: 120109 - RNA, 19 nt, Homo sapiens
  misc_RNA (1)...(19): siRNA sense strand
cgccagggacgcacucuuu

SEQ ID NO: 120110 - RNA, 19 nt, Homo sapiens
  misc_RNA (1)...(19): siRNA sense strand
gccaaacgcaagacaguca

SEQ ID NO: 120111 - RNA, 19 nt, Homo sapiens
  misc_RNA (1)...(19): siRNA sense strand
ccagggacgcacucuuuau

SEQ ID NO: 120112 - RNA, 19 nt, Homo sapiens
  misc_RNA (1)...(19): siRNA sense strand
gcgugacaauauccaagga

SEQ ID NO: 120113 - RNA, 19 nt, Homo sapiens
  misc_RNA (1)...(19): siRNA sense strand
cagggacgcacucuuuaug

SEQ ID NO: 120114 - RNA, 19 nt, Homo sapiens
  misc_RNA (1)...(19): siRNA sense strand
ggcggaaagggucuaggua

SEQ ID NO: 120115 - RNA, 19 nt, Homo sapiens
  misc_RNA (1)...(19): siRNA sense strand
caagcgucaccguaaggua

SEQ ID NO: 120116 - RNA, 19 nt, Homo sapiens
  misc_RNA (1)...(19): siRNA sense strand
gcgaugcugucaccuacac

SEQ ID NO: 120117 - RNA, 19 nt, Homo sapiens
  misc_RNA (1)...(19): siRNA sense strand
cuacacggaacacgccaaa

SEQ ID NO: 120118 - RNA, 19 nt, Homo sapiens
  misc_RNA (1)...(19): siRNA sense strand
guaagguauugcgugacaa

SEQ ID NO: 120119 - RNA, 19 nt, Homo sapiens
  misc_RNA (1)...(19): siRNA sense strand
aagcgucaccguaagguau

SEQ ID NO: 120120 - RNA, 19 nt, Homo sapiens
  misc_RNA (1)...(19): siRNA sense strand
gcaaagugcugcgugacaa

SEQ ID NO: 120121 - RNA, 19 nt, Homo sapiens
  misc_RNA (1)...(19): siRNA sense strand
gcaaaggugguaaagguuu

SEQ ID NO: 120122 - RNA, 19 nt, Homo sapiens
  misc_RNA (1)...(19): siRNA sense strand
gcauuucgggccucauuua

SEQ ID NO: 120123 - RNA, 19 nt, Homo sapiens
  misc_RNA (1)...(19): siRNA sense strand
aggcaaaggugguaaaggu

SEQ ID NO: 120124 - RNA, 19 nt, Homo sapiens
  misc_RNA (1)...(19): siRNA sense strand
ucacugcaauggauguugu

SEQ ID NO: 120125 - RNA, 19 nt, Homo sapiens
  misc_RNA (1)...(19): siRNA sense strand
caagcgccaucgcaaagug

SEQ ID NO: 120126 - RNA, 19 nt, Homo sapiens
  misc_RNA (1)...(19): siRNA sense strand
gcgguguucuuaagguguu

SEQ ID NO: 120127 - RNA, 19 nt, Homo sapiens
  misc_RNA (1)...(19): siRNA sense strand
ugcaauggauguugucuac

SEQ ID NO: 120128 - RNA, 19 nt, Homo sapiens
  misc_RNA (1)...(19): siRNA sense strand
uuaagguguuccuggagaa

SEQ ID NO: 120129 - RNA, 19 nt, Homo sapiens
  misc_RNA (1)...(19): siRNA sense strand
gguagaggcaaagguggua

SEQ ID NO: 120130 - RNA, 19 nt, Homo sapiens
  misc_RNA (1)...(19): siRNA sense strand
agugcugcgugacaacaua

SEQ ID NO: 120131 - RNA, 19 nt, Homo sapiens
  misc_RNA (1)...(19): siRNA sense strand
ggcaaaggugguaaagguu

SEQ ID NO: 120132 - RNA, 19 nt, Homo sapiens
  misc_RNA (1)...(19): siRNA sense strand
guuccuggagaaugugaua

SEQ ID NO: 120133 - RNA, 19 nt, Homo sapiens
  misc_RNA (1)...(19): siRNA sense strand
gccaagcgccaucgcaaag

SEQ ID NO: 120134 - RNA, 19 nt, Homo sapiens
  misc_RNA (1)...(19): siRNA sense strand
gccagggacgcacucugua

SEQ ID NO: 120135 - RNA, 19 nt, Homo sapiens
  misc_RNA (1)...(19): siRNA sense strand
ggaagggucuuggcaaagg

SEQ ID NO: 120136 - RNA, 19 nt, Homo sapiens
  misc_RNA (1)...(19): siRNA sense strand
guaaaguacugcgcgacaa

SEQ ID NO: 120137 - RNA, 19 nt, Homo sapiens
  misc_RNA (1)...(19): siRNA sense strand
cgggaagggucuuggcaaa

SEQ ID NO: 120138 - RNA, 19 nt, Homo sapiens
  misc_RNA (1)...(19): siRNA sense strand
gcuaagcgccaccguaaag

SEQ ID NO: 120139 - RNA, 19 nt, Homo sapiens
  misc_RNA (1)...(19): siRNA sense strand
ugaagguguuccuggagaa

SEQ ID NO: 120140 - RNA, 19 nt, Homo sapiens
  misc_RNA (1)...(19): siRNA sense strand
uaagcgccaccguaaagua

SEQ ID NO: 120141 - RNA, 19 nt, Homo sapiens
  misc_RNA (1)...(19): siRNA sense strand
gacaauauccagggcauca

SEQ ID NO: 120142 - RNA, 19 nt, Homo sapiens
  misc_RNA (1)...(19): siRNA sense strand
gccgcacccucuacgguuu

SEQ ID NO: 120143 - RNA, 19 nt, Homo sapiens
  misc_RNA (1)...(19): siRNA sense strand
uaaaguacugcgcgacaau

SEQ ID NO: 120144 - RNA, 19 nt, Homo sapiens
  misc_RNA (1)...(19): siRNA sense strand
gggacgccgugaccuauac

SEQ ID NO: 120145 - RNA, 19 nt, Homo sapiens
  misc_RNA (1)...(19): siRNA sense strand
aaaguacugcgcgacaaua

SEQ ID NO: 120146 - RNA, 19 nt, Homo sapiens
  misc_RNA (1)...(19): siRNA sense strand
gagcacgccaagcgcaaga

SEQ ID NO: 120147 - RNA, 19 nt, Homo sapiens
  misc_RNA (1)...(19): siRNA sense strand
guacugcgcgacaauaucc

SEQ ID NO: 120148 - RNA, 19 nt, Homo sapiens
  misc_RNA (1)...(19): siRNA sense strand
gcgccaccguaaaguacug

SEQ ID NO: 120149 - RNA, 19 nt, Homo sapiens
  misc_RNA (1)...(19): siRNA sense strand
ucuccggccucaucuacga

SEQ ID NO: 120150 - RNA, 19 nt, Homo sapiens
  misc_RNA (1)...(19): siRNA sense strand
ggaagggucuuggcaaagg

SEQ ID NO: 120151 - RNA, 19 nt, Homo sapiens
  misc_RNA (1)...(19): siRNA sense strand
guaaaguacugcgcgacaa

SEQ ID NO: 120152 - RNA, 19 nt, Homo sapiens
  misc_RNA (1)...(19): siRNA sense strand
cgggaagggucuuggcaaa

SEQ ID NO: 120153 - RNA, 19 nt, Homo sapiens
  misc_RNA (1)...(19): siRNA sense strand
gcuaagcgccaccguaaag

SEQ ID NO: 120154 - RNA, 19 nt, Homo sapiens
  misc_RNA (1)...(19): siRNA sense strand
ugaagguguuccuggagaa

SEQ ID NO: 120155 - RNA, 19 nt, Homo sapiens
  misc_RNA (1)...(19): siRNA sense strand
uaagcgccaccguaaagua

SEQ ID NO: 120156 - RNA, 19 nt, Homo sapiens
  misc_RNA (1)...(19): siRNA sense strand
gacaauauccagggcauca

SEQ ID NO: 120157 - RNA, 19 nt, Homo sapiens
  misc_RNA (1)...(19): siRNA sense strand
gccgcacccucuacgguuu

SEQ ID NO: 120158 - RNA, 19 nt, Homo sapiens
  misc_RNA (1)...(19): siRNA sense strand
uaaaguacugcgcgacaau

SEQ ID NO: 120159 - RNA, 19 nt, Homo sapiens
  misc_RNA (1)...(19): siRNA sense strand
gggacgccgugaccuauac

SEQ ID NO: 120160 - RNA, 19 nt, Homo sapiens
  misc_RNA (1)...(19): siRNA sense strand
aaaguacugcgcgacaaua

SEQ ID NO: 120161 - RNA, 19 nt, Homo sapiens
  misc_RNA (1)...(19): siRNA sense strand
gagcacgccaagcgcaaga

SEQ ID NO: 120162 - RNA, 19 nt, Homo sapiens
  misc_RNA (1)...(19): siRNA sense strand
guacugcgcgacaauaucc

SEQ ID NO: 120163 - RNA, 19 nt, Homo sapiens
  misc_RNA (1)...(19): siRNA sense strand
gcgccaccguaaaguacug

SEQ ID NO: 120164 - RNA, 19 nt, Homo sapiens
  misc_RNA (1)...(19): siRNA sense strand
ucuccggccucaucuacga

SEQ ID NO: 120165 - RNA, 19 nt, Homo sapiens
  misc_RNA (1)...(19): siRNA sense strand
guaaggugcuccgggauaa

SEQ ID NO: 120166 - RNA, 19 nt, Homo sapiens
  misc_RNA (1)...(19): siRNA sense strand
gauaacauccagggcauua

SEQ ID NO: 120167 - RNA, 19 nt, Homo sapiens
  misc_RNA (1)...(19): siRNA sense strand
gugcuaagcgccaucguaa

SEQ ID NO: 120168 - RNA, 19 nt, Homo sapiens
  misc_RNA (1)...(19): siRNA sense strand
agccauggauguaguauau

SEQ ID NO: 120169 - RNA, 19 nt, Homo sapiens
  misc_RNA (1)...(19): siRNA sense strand
uuuccggucuuaucuauga

SEQ ID NO: 120170 - RNA, 19 nt, Homo sapiens
  misc_RNA (1)...(19): siRNA sense strand
gaggugugcuuaagguuuu

SEQ ID NO: 120171 - RNA, 19 nt, Homo sapiens
  misc_RNA (1)...(19): siRNA sense strand
ucacagccauggauguagu

SEQ ID NO: 120172 - RNA, 19 nt, Homo sapiens
  misc_RNA (1)...(19): siRNA sense strand
gcuaagcgccaucguaagg

SEQ ID NO: 120173 - RNA, 19 nt, Homo sapiens
  misc_RNA (1)...(19): siRNA sense strand
cgaggugugcuuaagguuu

SEQ ID NO: 120174 - RNA, 19 nt, Homo sapiens
  misc_RNA (1)...(19): siRNA sense strand
cauuuccggucuuaucuau

SEQ ID NO: 120175 - RNA, 19 nt, Homo sapiens
  misc_RNA (1)...(19): siRNA sense strand
aagcgcauuuccggucuua

SEQ ID NO: 120176 - RNA, 19 nt, Homo sapiens
  misc_RNA (1)...(19): siRNA sense strand
gagacucgaggugugcuua

SEQ ID NO: 120177 - RNA, 19 nt, Homo sapiens
  misc_RNA (1)...(19): siRNA sense strand
cguaaggugcuccgggaua

SEQ ID NO: 120178 - RNA, 19 nt, Homo sapiens
  misc_RNA (1)...(19): siRNA sense strand
gcauuuccggucuuaucua

SEQ ID NO: 120179 - RNA, 19 nt, Homo sapiens
  misc_RNA (1)...(19): siRNA sense strand
uaacauccagggcauuaca

SEQ ID NO: 120180 - RNA, 19 nt, Homo sapiens
  misc_RNA (1)...(19): siRNA sense strand
ggugcuaagcgccaucgua

SEQ ID NO: 120181 - RNA, 19 nt, Homo sapiens
  misc_RNA (1)...(19): siRNA sense strand
ccauggauguaguauaugc

SEQ ID NO: 120182 - RNA, 19 nt, Homo sapiens
  misc_RNA (1)...(19): siRNA sense strand
gcgcauuuccggucuuauc

SEQ ID NO: 120183 - RNA, 19 nt, Homo sapiens
  misc_RNA (1)...(19): siRNA sense strand
ugucacagccauggaugua

SEQ ID NO: 120184 - RNA, 19 nt, Homo sapiens
  misc_RNA (1)...(19): siRNA sense strand
ggagcacgccaagcgcaaa

SEQ ID NO: 120185 - RNA, 19 nt, Homo sapiens
  misc_RNA (1)...(19): siRNA sense strand
caagcgcauuuccggucuu

SEQ ID NO: 120186 - RNA, 19 nt, Homo sapiens
  misc_RNA (1)...(19): siRNA sense strand
cgacagggacgcacucuuu

SEQ ID NO: 120187 - RNA, 19 nt, Homo sapiens
  misc_RNA (1)...(19): siRNA sense strand
gcaagaccgugacagcaau

SEQ ID NO: 120188 - RNA, 19 nt, Homo sapiens
  misc_RNA (1)...(19): siRNA sense strand
gcgaauuucuggccuuauc

SEQ ID NO: 120189 - RNA, 19 nt, Homo sapiens
  misc_RNA (1)...(19): siRNA sense strand
uuucuggccuuaucuauga

SEQ ID NO: 120190 - RNA, 19 nt, Homo sapiens
  misc_RNA (1)...(19): siRNA sense strand
gacagggacgcacucuuua

SEQ ID NO: 120191 - RNA, 19 nt, Homo sapiens
  misc_RNA (1)...(19): siRNA sense strand
gaauuucuggccuuaucua

SEQ ID NO: 120192 - RNA, 19 nt, Homo sapiens
  misc_RNA (1)...(19): siRNA sense strand
ugaggagacucgugguguu

SEQ ID NO: 120193 - RNA, 19 nt, Homo sapiens
  misc_RNA (1)...(19): siRNA sense strand
aagcgaauuucuggccuua

SEQ ID NO: 120194 - RNA, 19 nt, Homo sapiens
  misc_RNA (1)...(19): siRNA sense strand
ugaagguguuccuggagaa

SEQ ID NO: 120195 - RNA, 19 nt, Homo sapiens
  misc_RNA (1)...(19): siRNA sense strand
gauaacauccagggcauca

SEQ ID NO: 120196 - RNA, 19 nt, Homo sapiens
  misc_RNA (1)...(19): siRNA sense strand
gggaggagcuaagcgucau

SEQ ID NO: 120197 - RNA, 19 nt, Homo sapiens
  misc_RNA (1)...(19): siRNA sense strand
uuacacagagcacgccaaa

SEQ ID NO: 120198 - RNA, 19 nt, Homo sapiens
  misc_RNA (1)...(19): siRNA sense strand
ggagacucgugguguucug

SEQ ID NO: 120199 - RNA, 19 nt, Homo sapiens
  misc_RNA (1)...(19): siRNA sense strand
acacagagcacgccaaacg

SEQ ID NO: 120200 - RNA, 19 nt, Homo sapiens
  misc_RNA (1)...(19): siRNA sense strand
uaagcgucaucgcaagguu

SEQ ID NO: 120201 - RNA, 19 nt, Homo sapiens
  misc_RNA (1)...(19): siRNA sense strand
gagcacgccaaacgcaaga

SEQ ID NO: 120202 - RNA, 19 nt, Homo sapiens
  misc_RNA (1)...(19): siRNA sense strand
gugguguucugaagguguu

SEQ ID NO: 120203 - RNA, 19 nt, Homo sapiens
  misc_RNA (1)...(19): siRNA sense strand
ggaaaagguuuggguaagg

SEQ ID NO: 120204 - RNA, 19 nt, Homo sapiens
  misc_RNA (1)...(19): siRNA sense strand
ggcggugucaagcgaauuu

SEQ ID NO: 120205 - RNA, 19 nt, Homo sapiens
  misc_RNA (1)...(19): siRNA sense strand
gaggagacucgugguguuc

SEQ ID NO: 120206 - RNA, 19 nt, Homo sapiens
  misc_RNA (1)...(19): siRNA sense strand
gaccgugacagcaauggau

SEQ ID NO: 120207 - RNA, 19 nt, Homo sapiens
  misc_RNA (1)...(19): siRNA sense strand
cagcaauggauguggucua

SEQ ID NO: 120208 - RNA, 19 nt, Homo sapiens
  misc_RNA (1)...(19): siRNA sense strand
gaauuuccgguuugauuua

SEQ ID NO: 120209 - RNA, 19 nt, Homo sapiens
  misc_RNA (1)...(19): siRNA sense strand
gaaaagugcugcgggauaa

SEQ ID NO: 120210 - RNA, 19 nt, Homo sapiens
  misc_RNA (1)...(19): siRNA sense strand
gcaaaggcgguaaagguuu

SEQ ID NO: 120211 - RNA, 19 nt, Homo sapiens
  misc_RNA (1)...(19): siRNA sense strand
gcgaauuuccgguuugauu

SEQ ID NO: 120212 - RNA, 19 nt, Homo sapiens
  misc_RNA (1)...(19): siRNA sense strand
cgaauuuccgguuugauuu

SEQ ID NO: 120213 - RNA, 19 nt, Homo sapiens
  misc_RNA (1)...(19): siRNA sense strand
uaagcgaauuuccgguuug

SEQ ID NO: 120214 - RNA, 19 nt, Homo sapiens
  misc_RNA (1)...(19): siRNA sense strand
uuaagcgaauuuccgguuu

SEQ ID NO: 120215 - RNA, 19 nt, Homo sapiens
  misc_RNA (1)...(19): siRNA sense strand
ggcaaaggcgguaaagguu

SEQ ID NO: 120216 - RNA, 19 nt, Homo sapiens
  misc_RNA (1)...(19): siRNA sense strand
gauaacauccaaggcauca

SEQ ID NO: 120217 - RNA, 19 nt, Homo sapiens
  misc_RNA (1)...(19): siRNA sense strand
gguaaagguuuggguaagg

SEQ ID NO: 120218 - RNA, 19 nt, Homo sapiens
  misc_RNA (1)...(19): siRNA sense strand
gcgguaaagguuuggguaa

SEQ ID NO: 120219 - RNA, 19 nt, Homo sapiens
  misc_RNA (1)...(19): siRNA sense strand
guacggcuucggcgguuaa

SEQ ID NO: 120220 - RNA, 19 nt, Homo sapiens
  misc_RNA (1)...(19): siRNA sense strand
gacugucacugccauggau

SEQ ID NO: 120221 - RNA, 19 nt, Homo sapiens
  misc_RNA (1)...(19): siRNA sense strand
aagcgaauuuccgguuuga

SEQ ID NO: 120222 - RNA, 19 nt, Homo sapiens
  misc_RNA (1)...(19): siRNA sense strand
cggcaaaggcgguaaaggu

SEQ ID NO: 120223 - RNA, 19 nt, Homo sapiens
  misc_RNA (1)...(19): siRNA sense strand
cauccaaggcaucaccaaa

SEQ ID NO: 120224 - RNA, 19 nt, Homo sapiens
  misc_RNA (1)...(19): siRNA sense strand
gccaagcgcaagacuguca

SEQ ID NO: 120225 - RNA, 19 nt, Homo sapiens
  misc_RNA (1)...(19): siRNA sense strand
gucaaggacgcacucugua

SEQ ID NO: 120226 - RNA, 19 nt, Homo sapiens
  misc_RNA (1)...(19): siRNA sense strand
uuuccgguuugauuuauga

SEQ ID NO: 120227 - RNA, 19 nt, Homo sapiens
  misc_RNA (1)...(19): siRNA sense strand
gagcacgccaagcgcaaga

SEQ ID NO: 120228 - RNA, 19 nt, Homo sapiens
  misc_RNA (1)...(19): siRNA sense strand
cgaaaagugcugcgggaua

SEQ ID NO: 120229 - RNA, 19 nt, Homo sapiens
  misc_RNA (1)...(19): siRNA sense strand
gauaacauccagggcauua

SEQ ID NO: 120230 - RNA, 19 nt, Homo sapiens
  misc_RNA (1)...(19): siRNA sense strand
gaaagggacuggguaaagg

SEQ ID NO: 120231 - RNA, 19 nt, Homo sapiens
  misc_RNA (1)...(19): siRNA sense strand
guaagguccugcgagauaa

SEQ ID NO: 120232 - RNA, 19 nt, Homo sapiens
  misc_RNA (1)...(19): siRNA sense strand
cguaagguccugcgagaua

SEQ ID NO: 120233 - RNA, 19 nt, Homo sapiens
  misc_RNA (1)...(19): siRNA sense strand
agacagggacgcacucuuu

SEQ ID NO: 120234 - RNA, 19 nt, Homo sapiens
  misc_RNA (1)...(19): siRNA sense strand
gcgcauuucuggucucauc

SEQ ID NO: 120235 - RNA, 19 nt, Homo sapiens
  misc_RNA (1)...(19): siRNA sense strand
gacagggacgcacucuuua

SEQ ID NO: 120236 - RNA, 19 nt, Homo sapiens
  misc_RNA (1)...(19): siRNA sense strand
ggaaagggacuggguaaag

SEQ ID NO: 120237 - RNA, 19 nt, Homo sapiens
  misc_RNA (1)...(19): siRNA sense strand
gccaaacgcaagacaguga

SEQ ID NO: 120238 - RNA, 19 nt, Homo sapiens
  misc_RNA (1)...(19): siRNA sense strand
gcggaaagggacuggguaa

SEQ ID NO: 120239 - RNA, 19 nt, Homo sapiens
  misc_RNA (1)...(19): siRNA sense strand
gcauuucuggucucaucua

SEQ ID NO: 120240 - RNA, 19 nt, Homo sapiens
  misc_RNA (1)...(19): siRNA sense strand
ucuacgcgcugaagagaca

SEQ ID NO: 120241 - RNA, 19 nt, Homo sapiens
  misc_RNA (1)...(19): siRNA sense strand
uuucuggucucaucuacga

SEQ ID NO: 120242 - RNA, 19 nt, Homo sapiens
  misc_RNA (1)...(19): siRNA sense strand
gagcacgccaaacgcaaga

SEQ ID NO: 120243 - RNA, 19 nt, Homo sapiens
  misc_RNA (1)...(19): siRNA sense strand
ggucuacgcgcugaagaga

SEQ ID NO: 120244 - RNA, 19 nt, Homo sapiens
  misc_RNA (1)...(19): siRNA sense strand
gaaaacgugauucgugaug

SEQ ID NO: 120245 - RNA, 19 nt, Homo sapiens
  misc_RNA (1)...(19): siRNA sense strand
uucgugaugcugugacuua

SEQ ID NO: 120246 - RNA, 19 nt, Homo sapiens
  misc_RNA (1)...(19): siRNA sense strand
gcgcaucucaggccuuaua

SEQ ID NO: 120247 - RNA, 19 nt, Homo sapiens
  misc_RNA (1)...(19): siRNA sense strand
gcaaaguucugcgcgacaa

SEQ ID NO: 120248 - RNA, 19 nt, Homo sapiens
  misc_RNA (1)...(19): siRNA sense strand
gagacacgcggaguucuua

SEQ ID NO: 120249 - RNA, 19 nt, Homo sapiens
  misc_RNA (1)...(19): siRNA sense strand
ggaagggucugggcaaagg

SEQ ID NO: 120250 - RNA, 19 nt, Homo sapiens
  misc_RNA (1)...(19): siRNA sense strand
gcggaguucuuaaaguguu

SEQ ID NO: 120251 - RNA, 19 nt, Homo sapiens
  misc_RNA (1)...(19): siRNA sense strand
ucucaggccuuauauacga

SEQ ID NO: 120252 - RNA, 19 nt, Homo sapiens
  misc_RNA (1)...(19): siRNA sense strand
aagcgcaucucaggccuua

SEQ ID NO: 120253 - RNA, 19 nt, Homo sapiens
  misc_RNA (1)...(19): siRNA sense strand
guaauccgcgaugcaguua

SEQ ID NO: 120254 - RNA, 19 nt, Homo sapiens
  misc_RNA (1)...(19): siRNA sense strand
ggagacacgcggaguucuu

SEQ ID NO: 120255 - RNA, 19 nt, Homo sapiens
  misc_RNA (1)...(19): siRNA sense strand
gcaucucaggccuuauaua

SEQ ID NO: 120256 - RNA, 19 nt, Homo sapiens
  misc_RNA (1)...(19): siRNA sense strand
acgcggaguucuuaaagug

SEQ ID NO: 120257 - RNA, 19 nt, Homo sapiens
  misc_RNA (1)...(19): siRNA sense strand
caucucaggccuuauauac

SEQ ID NO: 120258 - RNA, 19 nt, Homo sapiens
  misc_RNA (1)...(19): siRNA sense strand
gcuaagcgccaccgcaaag

SEQ ID NO: 120259 - RNA, 19 nt, Homo sapiens
  misc_RNA (1)...(19): siRNA sense strand
gaggagacacgcggaguuc

SEQ ID NO: 120260 - RNA, 19 nt, Homo sapiens
  misc_RNA (1)...(19): siRNA sense strand
gccaaacgcaagacaguca

SEQ ID NO: 120261 - RNA, 19 nt, Homo sapiens
  misc_RNA (1)...(19): siRNA sense strand
gacacgcggaguucuuaaa

SEQ ID NO: 120262 - RNA, 19 nt, Homo sapiens
  misc_RNA (1)...(19): siRNA sense strand
gaauguaauccgcgaugca

SEQ ID NO: 120263 - RNA, 19 nt, Homo sapiens
  misc_RNA (1)...(19): siRNA sense strand
gagcacgccaaacgcaaga

SEQ ID NO: 120264 - RNA, 19 nt, Homo sapiens
  misc_RNA (1)...(19): siRNA sense strand
gggcaaaggaggcgcuaag

SEQ ID NO: 120265 - RNA, 19 nt, Homo sapiens
  misc_RNA (1)...(19): siRNA sense strand
gcgaugcaguuaccuacac

SEQ ID NO: 120266 - RNA, 19 nt, Homo sapiens
  misc_RNA (1)...(19): siRNA sense strand
cggaguucuuaaaguguuu

SEQ ID NO: 120267 - RNA, 19 nt, Homo sapiens
  misc_RNA (1)...(19): siRNA sense strand
cgggaagggucugggcaaa

SEQ ID NO: 120268 - RNA, 19 nt, Homo sapiens
  misc_RNA (1)...(19): siRNA sense strand
uaagcgccaccgcaaaguu

SEQ ID NO: 120269 - RNA, 19 nt, Homo sapiens
  misc_RNA (1)...(19): siRNA sense strand
cgaggagacacgcggaguu

SEQ ID NO: 120270 - RNA, 19 nt, Homo sapiens
  misc_RNA (1)...(19): siRNA sense strand
guucugcgcgacaacauuc

SEQ ID NO: 120271 - RNA, 19 nt, Homo sapiens
  misc_RNA (1)...(19): siRNA sense strand
uguaauccgcgaugcaguu

SEQ ID NO: 120272 - RNA, 19 nt, Homo sapiens
  misc_RNA (1)...(19): siRNA sense strand
cuacacggagcacgccaaa

SEQ ID NO: 120273 - RNA, 19 nt, Homo sapiens
  misc_RNA (1)...(19): siRNA sense strand
gcagugggcugacauauau

SEQ ID NO: 120274 - RNA, 19 nt, Homo sapiens
  misc_RNA (1)...(19): siRNA sense strand
gcaggagacucaaagauuu

SEQ ID NO: 120275 - RNA, 19 nt, Homo sapiens
  misc_RNA (1)...(19): siRNA sense strand
ucagagaaaccuuuaauca

SEQ ID NO: 120276 - RNA, 19 nt, Homo sapiens
  misc_RNA (1)...(19): siRNA sense strand
gacacucacucggcgaaua

SEQ ID NO: 120277 - RNA, 19 nt, Homo sapiens
  misc_RNA (1)...(19): siRNA sense strand
gaacuucauccguccuuug

SEQ ID NO: 120278 - RNA, 19 nt, Homo sapiens
  misc_RNA (1)...(19): siRNA sense strand
ccacggagccugcaacauc

SEQ ID NO: 120279 - RNA, 19 nt, Homo sapiens
  misc_RNA (1)...(19): siRNA sense strand
gaaaauagcagagagauuc

SEQ ID NO: 120280 - RNA, 19 nt, Homo sapiens
  misc_RNA (1)...(19): siRNA sense strand
gggcugacauauauuuauc

SEQ ID NO: 120281 - RNA, 19 nt, Homo sapiens
  misc_RNA (1)...(19): siRNA sense strand
ucaaagauuuucccuguaa

SEQ ID NO: 120282 - RNA, 19 nt, Homo sapiens
  misc_RNA (1)...(19): siRNA sense strand
gagaugcugguguucauuu

SEQ ID NO: 120283 - RNA, 19 nt, Homo sapiens
  misc_RNA (1)...(19): siRNA sense strand
aagcagugguucagagaaa

SEQ ID NO: 120284 - RNA, 19 nt, Homo sapiens
  misc_RNA (1)...(19): siRNA sense strand
uuaaucaccucuuugcaau

SEQ ID NO: 120285 - RNA, 19 nt, Homo sapiens
  misc_RNA (1)...(19): siRNA sense strand
caucauuucagacaaguuu

SEQ ID NO: 120286 - RNA, 19 nt, Homo sapiens
  misc_RNA (1)...(19): siRNA sense strand
aaucaccucuuugcaauug

SEQ ID NO: 120287 - RNA, 19 nt, Homo sapiens
  misc_RNA (1)...(19): siRNA sense strand
ccagauaccaccagugaug

SEQ ID NO: 120288 - RNA, 19 nt, Homo sapiens
  misc_RNA (1)...(19): siRNA sense strand
ggcagugggcugacauaua

SEQ ID NO: 120289 - RNA, 19 nt, Homo sapiens
  misc_RNA (1)...(19): siRNA sense strand
gcuuauuccucacacuuau

SEQ ID NO: 120290 - RNA, 19 nt, Homo sapiens
  misc_RNA (1)...(19): siRNA sense strand
ggaacuucauccguccuuu

SEQ ID NO: 120291 - RNA, 19 nt, Homo sapiens
  misc_RNA (1)...(19): siRNA sense strand
cagcacggauugcaguugu

SEQ ID NO: 120292 - RNA, 19 nt, Homo sapiens
  misc_RNA (1)...(19): siRNA sense strand
ccagauacacccauucaca

SEQ ID NO: 120293 - RNA, 19 nt, Homo sapiens
  misc_RNA (1)...(19): siRNA sense strand
gccaaguccuccaaguuca

SEQ ID NO: 120294 - RNA, 19 nt, Homo sapiens
  misc_RNA (1)...(19): siRNA sense strand
ggccaaguccuccaaguuc

SEQ ID NO: 120295 - RNA, 19 nt, Homo sapiens
  misc_RNA (1)...(19): siRNA sense strand
ggacacagcacggauugca

SEQ ID NO: 120296 - RNA, 19 nt, Homo sapiens
  misc_RNA (1)...(19): siRNA sense strand
gaagcagugguucagagaa

SEQ ID NO: 120297 - RNA, 19 nt, Homo sapiens
  misc_RNA (1)...(19): siRNA sense strand
uagaagaccugugggaacu

SEQ ID NO: 120298 - RNA, 19 nt, Homo sapiens
  misc_RNA (1)...(19): siRNA sense strand
guucagagaaaccuuuaau

SEQ ID NO: 120299 - RNA, 19 nt, Homo sapiens
  misc_RNA (1)...(19): siRNA sense strand
gggccaaguccuccaaguu

SEQ ID NO: 120300 - RNA, 19 nt, Homo sapiens
  misc_RNA (1)...(19): siRNA sense strand
gacaaguuuacuccagaua

SEQ ID NO: 120301 - RNA, 19 nt, Homo sapiens
  misc_RNA (1)...(19): siRNA sense strand
aaccuuuaaucaccucuuu

SEQ ID NO: 120302 - RNA, 19 nt, Homo sapiens
  misc_RNA (1)...(19): siRNA sense strand
cacggagccugcaacauca

SEQ ID NO: 120303 - RNA, 19 nt, Homo sapiens
  misc_RNA (1)...(19): siRNA sense strand
gggagaaggugggcuugag

SEQ ID NO: 120304 - RNA, 19 nt, Homo sapiens
  misc_RNA (1)...(19): siRNA sense strand
ugcaggagacucaaagauu

SEQ ID NO: 120305 - RNA, 19 nt, Homo sapiens
  misc_RNA (1)...(19): siRNA sense strand
agacaaguuuacuccagau

SEQ ID NO: 120306 - RNA, 19 nt, Homo sapiens
  misc_RNA (1)...(19): siRNA sense strand
gcgugcgacugcagacaga

SEQ ID NO: 120307 - RNA, 19 nt, Homo sapiens
  misc_RNA (1)...(19): siRNA sense strand
gcagaagcagugguucaga

SEQ ID NO: 120308 - RNA, 19 nt, Homo sapiens
  misc_RNA (1)...(19): siRNA sense strand
ggagaugcugguguucauu

SEQ ID NO: 120309 - RNA, 19 nt, Homo sapiens
  misc_RNA (1)...(19): siRNA sense strand
cuucauccguccuuugaca

SEQ ID NO: 120310 - RNA, 19 nt, Homo sapiens
  misc_RNA (1)...(19): siRNA sense strand
caacuguucaggccuugga

SEQ ID NO: 120311 - RNA, 19 nt, Homo sapiens
  misc_RNA (1)...(19): siRNA sense strand
caaguuuacuccagauacc

SEQ ID NO: 120312 - RNA, 19 nt, Homo sapiens
  misc_RNA (1)...(19): siRNA sense strand
ccguuaccaucauuucaga

SEQ ID NO: 120313 - RNA, 19 nt, Homo sapiens
  misc_RNA (1)...(19): siRNA sense strand
uaccaucauuucagacaag

SEQ ID NO: 120314 - RNA, 19 nt, Homo sapiens
  misc_RNA (1)...(19): siRNA sense strand
cagagaaaccuuuaaucac

SEQ ID NO: 120315 - RNA, 19 nt, Homo sapiens
  misc_RNA (1)...(19): siRNA sense strand
ucacucggcgaauagaaga

SEQ ID NO: 120316 - RNA, 19 nt, Homo sapiens
  misc_RNA (1)...(19): siRNA sense strand
uuuaaucaccucuuugcaa

SEQ ID NO: 120317 - RNA, 19 nt, Homo sapiens
  misc_RNA (1)...(19): siRNA sense strand
ugcagaagcuggagaugcu

SEQ ID NO: 120318 - RNA, 19 nt, Homo sapiens
  misc_RNA (1)...(19): siRNA sense strand
acacgcagaagcagugguu

SEQ ID NO: 120319 - RNA, 19 nt, Homo sapiens
  misc_RNA (1)...(19): siRNA sense strand
aaaggggacuggaaucugu

SEQ ID NO: 120320 - RNA, 19 nt, Homo sapiens
  misc_RNA (1)...(19): siRNA sense strand
gugggcugacauauauuua

SEQ ID NO: 120321 - RNA, 19 nt, Homo sapiens
  misc_RNA (1)...(19): siRNA sense strand
agaugcugguguucauuug

SEQ ID NO: 120322 - RNA, 19 nt, Homo sapiens
  misc_RNA (1)...(19): siRNA sense strand
cuccagauaccaccaguga

SEQ ID NO: 120323 - RNA, 19 nt, Homo sapiens
  misc_RNA (1)...(19): siRNA sense strand
uggagaugcugguguucau

SEQ ID NO: 120324 - RNA, 19 nt, Homo sapiens
  misc_RNA (1)...(19): siRNA sense strand
guggcagccggaaugcuua

SEQ ID NO: 120325 - RNA, 19 nt, Homo sapiens
  misc_RNA (1)...(19): siRNA sense strand
gcagugggcugacauauau

SEQ ID NO: 120326 - RNA, 19 nt, Homo sapiens
  misc_RNA (1)...(19): siRNA sense strand
gcaggagacucaaagauuu

SEQ ID NO: 120327 - RNA, 19 nt, Homo sapiens
  misc_RNA (1)...(19): siRNA sense strand
ucagagaaaccuuuaauca

SEQ ID NO: 120328 - RNA, 19 nt, Homo sapiens
  misc_RNA (1)...(19): siRNA sense strand
gacacucacucggcgaaua

SEQ ID NO: 120329 - RNA, 19 nt, Homo sapiens
  misc_RNA (1)...(19): siRNA sense strand
gaacuucauccguccuuug

SEQ ID NO: 120330 - RNA, 19 nt, Homo sapiens
  misc_RNA (1)...(19): siRNA sense strand
ccacggagccugcaacauc

SEQ ID NO: 120331 - RNA, 19 nt, Homo sapiens
  misc_RNA (1)...(19): siRNA sense strand
gaaaauagcagagagauuc

SEQ ID NO: 120332 - RNA, 19 nt, Homo sapiens
  misc_RNA (1)...(19): siRNA sense strand
gggcugacauauauuuauc

SEQ ID NO: 120333 - RNA, 19 nt, Homo sapiens
  misc_RNA (1)...(19): siRNA sense strand
ucaaagauuuucccuguaa

SEQ ID NO: 120334 - RNA, 19 nt, Homo sapiens
  misc_RNA (1)...(19): siRNA sense strand
gagaugcugguguucauuu

SEQ ID NO: 120335 - RNA, 19 nt, Homo sapiens
  misc_RNA (1)...(19): siRNA sense strand
aagcagugguucagagaaa

SEQ ID NO: 120336 - RNA, 19 nt, Homo sapiens
  misc_RNA (1)...(19): siRNA sense strand
uuaaucaccucuuugcaau

SEQ ID NO: 120337 - RNA, 19 nt, Homo sapiens
  misc_RNA (1)...(19): siRNA sense strand
caucauuucagacaaguuu

SEQ ID NO: 120338 - RNA, 19 nt, Homo sapiens
  misc_RNA (1)...(19): siRNA sense strand
aaucaccucuuugcaauug

SEQ ID NO: 120339 - RNA, 19 nt, Homo sapiens
  misc_RNA (1)...(19): siRNA sense strand
ccagauaccaccagugaug

SEQ ID NO: 120340 - RNA, 19 nt, Homo sapiens
  misc_RNA (1)...(19): siRNA sense strand
ggcagugggcugacauaua

SEQ ID NO: 120341 - RNA, 19 nt, Homo sapiens
  misc_RNA (1)...(19): siRNA sense strand
gcuuauuccucacacuuau

SEQ ID NO: 120342 - RNA, 19 nt, Homo sapiens
  misc_RNA (1)...(19): siRNA sense strand
ggaacuucauccguccuuu

SEQ ID NO: 120343 - RNA, 19 nt, Homo sapiens
  misc_RNA (1)...(19): siRNA sense strand
cagcacggauugcaguugu

SEQ ID NO: 120344 - RNA, 19 nt, Homo sapiens
  misc_RNA (1)...(19): siRNA sense strand
ccagauacacccauucaca

SEQ ID NO: 120345 - RNA, 19 nt, Homo sapiens
  misc_RNA (1)...(19): siRNA sense strand
gccaaguccuccaaguuca

SEQ ID NO: 120346 - RNA, 19 nt, Homo sapiens
  misc_RNA (1)...(19): siRNA sense strand
ggccaaguccuccaaguuc

SEQ ID NO: 120347 - RNA, 19 nt, Homo sapiens
  misc_RNA (1)...(19): siRNA sense strand
ggacacagcacggauugca

SEQ ID NO: 120348 - RNA, 19 nt, Homo sapiens
  misc_RNA (1)...(19): siRNA sense strand
gaagcagugguucagagaa

SEQ ID NO: 120349 - RNA, 19 nt, Homo sapiens
  misc_RNA (1)...(19): siRNA sense strand
uagaagaccugugggaacu

SEQ ID NO: 120350 - RNA, 19 nt, Homo sapiens
  misc_RNA (1)...(19): siRNA sense strand
guucagagaaaccuuuaau

SEQ ID NO: 120351 - RNA, 19 nt, Homo sapiens
  misc_RNA (1)...(19): siRNA sense strand
gggccaaguccuccaaguu

SEQ ID NO: 120352 - RNA, 19 nt, Homo sapiens
  misc_RNA (1)...(19): siRNA sense strand
gacaaguuuacuccagaua

SEQ ID NO: 120353 - RNA, 19 nt, Homo sapiens
  misc_RNA (1)...(19): siRNA sense strand
aaccuuuaaucaccucuuu

SEQ ID NO: 120354 - RNA, 19 nt, Homo sapiens
  misc_RNA (1)...(19): siRNA sense strand
cacggagccugcaacauca

SEQ ID NO: 120355 - RNA, 19 nt, Homo sapiens
  misc_RNA (1)...(19): siRNA sense strand
gggagaaggugggcuugag

SEQ ID NO: 120356 - RNA, 19 nt, Homo sapiens
  misc_RNA (1)...(19): siRNA sense strand
ugcaggagacucaaagauu

SEQ ID NO: 120357 - RNA, 19 nt, Homo sapiens
  misc_RNA (1)...(19): siRNA sense strand
agacaaguuuacuccagau

SEQ ID NO: 120358 - RNA, 19 nt, Homo sapiens
  misc_RNA (1)...(19): siRNA sense strand
gcgugcgacugcagacaga

SEQ ID NO: 120359 - RNA, 19 nt, Homo sapiens
  misc_RNA (1)...(19): siRNA sense strand
gcagaagcagugguucaga

SEQ ID NO: 120360 - RNA, 19 nt, Homo sapiens
  misc_RNA (1)...(19): siRNA sense strand
ggagaugcugguguucauu

SEQ ID NO: 120361 - RNA, 19 nt, Homo sapiens
  misc_RNA (1)...(19): siRNA sense strand
cuucauccguccuuugaca

SEQ ID NO: 120362 - RNA, 19 nt, Homo sapiens
  misc_RNA (1)...(19): siRNA sense strand
caacuguucaggccuugga

SEQ ID NO: 120363 - RNA, 19 nt, Homo sapiens
  misc_RNA (1)...(19): siRNA sense strand
caaguuuacuccagauacc

SEQ ID NO: 120364 - RNA, 19 nt, Homo sapiens
  misc_RNA (1)...(19): siRNA sense strand
ccguuaccaucauuucaga

SEQ ID NO: 120365 - RNA, 19 nt, Homo sapiens
  misc_RNA (1)...(19): siRNA sense strand
uaccaucauuucagacaag

SEQ ID NO: 120366 - RNA, 19 nt, Homo sapiens
  misc_RNA (1)...(19): siRNA sense strand
cagagaaaccuuuaaucac

SEQ ID NO: 120367 - RNA, 19 nt, Homo sapiens
  misc_RNA (1)...(19): siRNA sense strand
ucacucggcgaauagaaga

SEQ ID NO: 120368 - RNA, 19 nt, Homo sapiens
  misc_RNA (1)...(19): siRNA sense strand
uuuaaucaccucuuugcaa

SEQ ID NO: 120369 - RNA, 19 nt, Homo sapiens
  misc_RNA (1)...(19): siRNA sense strand
ugcagaagcuggagaugcu

SEQ ID NO: 120370 - RNA, 19 nt, Homo sapiens
  misc_RNA (1)...(19): siRNA sense strand
acacgcagaagcagugguu

SEQ ID NO: 120371 - RNA, 19 nt, Homo sapiens
  misc_RNA (1)...(19): siRNA sense strand
aaaggggacuggaaucugu

SEQ ID NO: 120372 - RNA, 19 nt, Homo sapiens
  misc_RNA (1)...(19): siRNA sense strand
gugggcugacauauauuua

SEQ ID NO: 120373 - RNA, 19 nt, Homo sapiens
  misc_RNA (1)...(19): siRNA sense strand
agaugcugguguucauuug

SEQ ID NO: 120374 - RNA, 19 nt, Homo sapiens
  misc_RNA (1)...(19): siRNA sense strand
cuccagauaccaccaguga

SEQ ID NO: 120375 - RNA, 19 nt, Homo sapiens
  misc_RNA (1)...(19): siRNA sense strand
uggagaugcugguguucau

SEQ ID NO: 120376 - RNA, 19 nt, Homo sapiens
  misc_RNA (1)...(19): siRNA sense strand
guggcagccggaaugcuua

SEQ ID NO: 120377 - RNA, 19 nt, Homo sapiens
  misc_RNA (1)...(19): siRNA sense strand
gcaagguacugagcgauaa

SEQ ID NO: 120378 - RNA, 19 nt, Homo sapiens
  misc_RNA (1)...(19): siRNA sense strand
guacugagcgauaauauuc

SEQ ID NO: 120379 - RNA, 19 nt, Homo sapiens
  misc_RNA (1)...(19): siRNA sense strand
caagugccaucgcaaggua

SEQ ID NO: 120380 - RNA, 19 nt, Homo sapiens
  misc_RNA (1)...(19): siRNA sense strand
ggaaaggcggugccaagug

SEQ ID NO: 120381 - RNA, 19 nt, Homo sapiens
  misc_RNA (1)...(19): siRNA sense strand
caucuugggccucauuuau

SEQ ID NO: 120382 - RNA, 19 nt, Homo sapiens
  misc_RNA (1)...(19): siRNA sense strand
gcaucuugggccucauuua

SEQ ID NO: 120383 - RNA, 19 nt, Homo sapiens
  misc_RNA (1)...(19): siRNA sense strand
uggaaaaugugaucuggua

SEQ ID NO: 120384 - RNA, 19 nt, Homo sapiens
  misc_RNA (1)...(19): siRNA sense strand
gguacugagcgauaauauu

SEQ ID NO: 120385 - RNA, 19 nt, Homo sapiens
  misc_RNA (1)...(19): siRNA sense strand
gcucaaacgccagggaaga

SEQ ID NO: 120386 - RNA, 19 nt, Homo sapiens
  misc_RNA (1)...(19): siRNA sense strand
ggcauuaccaagugcacua

SEQ ID NO: 120387 - RNA, 19 nt, Homo sapiens
  misc_RNA (1)...(19): siRNA sense strand
cgcaagguacugagcgaua

SEQ ID NO: 120388 - RNA, 19 nt, Homo sapiens
  misc_RNA (1)...(19): siRNA sense strand
gcgcaucuugggccucauu

SEQ ID NO: 120389 - RNA, 19 nt, Homo sapiens
  misc_RNA (1)...(19): siRNA sense strand
gagcacgccaagcgcaaga

SEQ ID NO: 120390 - RNA, 19 nt, Homo sapiens
  misc_RNA (1)...(19): siRNA sense strand
ggaaaaggccuugggaaag

SEQ ID NO: 120391 - RNA, 19 nt, Homo sapiens
  misc_RNA (1)...(19): siRNA sense strand
gggaaaggcggugccaagu

SEQ ID NO: 120392 - RNA, 19 nt, Homo sapiens
  misc_RNA (1)...(19): siRNA sense strand
cagaagaccuuuccagauu

SEQ ID NO: 120393 - RNA, 19 nt, Homo sapiens
  misc_RNA (1)...(19): siRNA sense strand
ugaagaacaugaagucuga

SEQ ID NO: 120394 - RNA, 19 nt, Homo sapiens
  misc_RNA (1)...(19): siRNA sense strand
gcaagaggcugcgugagaa

SEQ ID NO: 120395 - RNA, 19 nt, Homo sapiens
  misc_RNA (1)...(19): siRNA sense strand
gcucuggacuggauauuuc

SEQ ID NO: 120396 - RNA, 19 nt, Homo sapiens
  misc_RNA (1)...(19): siRNA sense strand
agagggagcuugccuugaa

SEQ ID NO: 120397 - RNA, 19 nt, Homo sapiens
  misc_RNA (1)...(19): siRNA sense strand
ugaagaugcugaagucuca

SEQ ID NO: 120398 - RNA, 19 nt, Homo sapiens
  misc_RNA (1)...(19): siRNA sense strand
gagcagauccguucgaagu

SEQ ID NO: 120399 - RNA, 19 nt, Homo sapiens
  misc_RNA (1)...(19): siRNA sense strand
uggcagagcugaagaagca

SEQ ID NO: 120400 - RNA, 19 nt, Homo sapiens
  misc_RNA (1)...(19): siRNA sense strand
gcaugcagcuggaggaaag

SEQ ID NO: 120401 - RNA, 19 nt, Homo sapiens
  misc_RNA (1)...(19): siRNA sense strand
ggaaagagcagagcagauc

SEQ ID NO: 120402 - RNA, 19 nt, Homo sapiens
  misc_RNA (1)...(19): siRNA sense strand
ccaggaagccaaucagaaa

SEQ ID NO: 120403 - RNA, 19 nt, Homo sapiens
  misc_RNA (1)...(19): siRNA sense strand
ccacagggcagcagcauga

SEQ ID NO: 120404 - RNA, 19 nt, Homo sapiens
  misc_RNA (1)...(19): siRNA sense strand
caugaagucugagcuggua

SEQ ID NO: 120405 - RNA, 19 nt, Homo sapiens
  misc_RNA (1)...(19): siRNA sense strand
gaaacaaagagcagacaug

SEQ ID NO: 120406 - RNA, 19 nt, Homo sapiens
  misc_RNA (1)...(19): siRNA sense strand
uggaagggcugcagaggaa

SEQ ID NO: 120407 - RNA, 19 nt, Homo sapiens
  misc_RNA (1)...(19): siRNA sense strand
gcuuggagcuggagaacga

SEQ ID NO: 120408 - RNA, 19 nt, Homo sapiens
  misc_RNA (1)...(19): siRNA sense strand
agaccaagauccaggaguu

SEQ ID NO: 120409 - RNA, 19 nt, Homo sapiens
  misc_RNA (1)...(19): siRNA sense strand
ugagaucuuugaacaacuu

SEQ ID NO: 120410 - RNA, 19 nt, Homo sapiens
  misc_RNA (1)...(19): siRNA sense strand
ccaaggagcgggacgguau

SEQ ID NO: 120411 - RNA, 19 nt, Homo sapiens
  misc_RNA (1)...(19): siRNA sense strand
gggaggcucuggacuggau

SEQ ID NO: 120412 - RNA, 19 nt, Homo sapiens
  misc_RNA (1)...(19): siRNA sense strand
gaccagagcaggaccaaag

SEQ ID NO: 120413 - RNA, 19 nt, Homo sapiens
  misc_RNA (1)...(19): siRNA sense strand
caucaggacuccagaagac

SEQ ID NO: 120414 - RNA, 19 nt, Homo sapiens
  misc_RNA (1)...(19): siRNA sense strand
uauccacccugagaucuuu

SEQ ID NO: 120415 - RNA, 19 nt, Homo sapiens
  misc_RNA (1)...(19): siRNA sense strand
gaccacgagcagcagauua

SEQ ID NO: 120416 - RNA, 19 nt, Homo sapiens
  misc_RNA (1)...(19): siRNA sense strand
gugccgagcugaagaacca

SEQ ID NO: 120417 - RNA, 19 nt, Homo sapiens
  misc_RNA (1)...(19): siRNA sense strand
gcgggaggcugaggauaug

SEQ ID NO: 120418 - RNA, 19 nt, Homo sapiens
  misc_RNA (1)...(19): siRNA sense strand
gaagaccuuuccagauucg

SEQ ID NO: 120419 - RNA, 19 nt, Homo sapiens
  misc_RNA (1)...(19): siRNA sense strand
augcagcgauugugaagaa

SEQ ID NO: 120420 - RNA, 19 nt, Homo sapiens
  misc_RNA (1)...(19): siRNA sense strand
cagagcagauccguucgaa

SEQ ID NO: 120421 - RNA, 19 nt, Homo sapiens
  misc_RNA (1)...(19): siRNA sense strand
ccagaagaccuuuccagau

SEQ ID NO: 120422 - RNA, 19 nt, Homo sapiens
  misc_RNA (1)...(19): siRNA sense strand
cugaggauauggugcagaa

SEQ ID NO: 120423 - RNA, 19 nt, Homo sapiens
  misc_RNA (1)...(19): siRNA sense strand
agaagaccuuuccagauuc

SEQ ID NO: 120424 - RNA, 19 nt, Homo sapiens
  misc_RNA (1)...(19): siRNA sense strand
ggagauggagcugaagaug

SEQ ID NO: 120425 - RNA, 19 nt, Homo sapiens
  misc_RNA (1)...(19): siRNA sense strand
agauggagcugagucacaa

SEQ ID NO: 120426 - RNA, 19 nt, Homo sapiens
  misc_RNA (1)...(19): siRNA sense strand
ccaggcgacugcucaucuu

SEQ ID NO: 120427 - RNA, 19 nt, Homo sapiens
  misc_RNA (1)...(19): siRNA sense strand
cagacaugcuggagaugga

SEQ ID NO: 120428 - RNA, 19 nt, Homo sapiens
  misc_RNA (1)...(19): siRNA sense strand
gaaggucgaggagcuggaa

SEQ ID NO: 120429 - RNA, 19 nt, Homo sapiens
  misc_RNA (1)...(19): siRNA sense strand
gagcugaagaugcugaagu

SEQ ID NO: 120430 - RNA, 19 nt, Homo sapiens
  misc_RNA (1)...(19): siRNA sense strand
caagaggcugcgugagaaa

SEQ ID NO: 120431 - RNA, 19 nt, Homo sapiens
  misc_RNA (1)...(19): siRNA sense strand
gccaggaagccaaucagaa

SEQ ID NO: 120432 - RNA, 19 nt, Homo sapiens
  misc_RNA (1)...(19): siRNA sense strand
agagcaggaugcagcgauu

SEQ ID NO: 120433 - RNA, 19 nt, Homo sapiens
  misc_RNA (1)...(19): siRNA sense strand
ggcgacugcucaucuucaa

SEQ ID NO: 120434 - RNA, 19 nt, Homo sapiens
  misc_RNA (1)...(19): siRNA sense strand
gcaucaggacuccagaaga

SEQ ID NO: 120435 - RNA, 19 nt, Homo sapiens
  misc_RNA (1)...(19): siRNA sense strand
ccugagaucuuugaacaac

SEQ ID NO: 120436 - RNA, 19 nt, Homo sapiens
  misc_RNA (1)...(19): siRNA sense strand
gagcaucaggacuccagaa

SEQ ID NO: 120437 - RNA, 19 nt, Homo sapiens
  misc_RNA (1)...(19): siRNA sense strand
gagagugccgagcugaaga

SEQ ID NO: 120438 - RNA, 19 nt, Homo sapiens
  misc_RNA (1)...(19): siRNA sense strand
agauggagcugaagaugcu

SEQ ID NO: 120439 - RNA, 19 nt, Homo sapiens
  misc_RNA (1)...(19): siRNA sense strand
acccugagaucuuugaaca

SEQ ID NO: 120440 - RNA, 19 nt, Homo sapiens
  misc_RNA (1)...(19): siRNA sense strand
gagggagcuugccuugaag

SEQ ID NO: 120441 - RNA, 19 nt, Homo sapiens
  misc_RNA (1)...(19): siRNA sense strand
ucaccacggagaaccagua

SEQ ID NO: 120442 - RNA, 19 nt, Homo sapiens
  misc_RNA (1)...(19): siRNA sense strand
cggacacgcucagguugaa

SEQ ID NO: 120443 - RNA, 19 nt, Homo sapiens
  misc_RNA (1)...(19): siRNA sense strand
gggagaaaaugcagaugga

SEQ ID NO: 120444 - RNA, 19 nt, Homo sapiens
  misc_RNA (1)...(19): siRNA sense strand
ggagagugccgagcugaag

SEQ ID NO: 120445 - RNA, 19 nt, Homo sapiens
  misc_RNA (1)...(19): siRNA sense strand
gaccaucaacgcacugaag

SEQ ID NO: 120446 - RNA, 19 nt, Homo sapiens
  misc_RNA (1)...(19): siRNA sense strand
cagcgauugugaagaacau

SEQ ID NO: 120447 - RNA, 19 nt, Homo sapiens
  misc_RNA (1)...(19): siRNA sense strand
gcggacacgcucagguuga

SEQ ID NO: 120448 - RNA, 19 nt, Homo sapiens
  misc_RNA (1)...(19): siRNA sense strand
gcgauugugaagaacauga

SEQ ID NO: 120449 - RNA, 19 nt, Homo sapiens
  misc_RNA (1)...(19): siRNA sense strand
guccagcucugccgaacag

SEQ ID NO: 120450 - RNA, 19 nt, Homo sapiens
  misc_RNA (1)...(19): siRNA sense strand
guuccaagaugcagcuacu

SEQ ID NO: 120451 - RNA, 19 nt, Homo sapiens
  misc_RNA (1)...(19): siRNA sense strand
gcucaccggcuaccagauc

SEQ ID NO: 120452 - RNA, 19 nt, Homo sapiens
  misc_RNA (1)...(19): siRNA sense strand
gaagaagcagguggagagu

SEQ ID NO: 120453 - RNA, 19 nt, Homo sapiens
  misc_RNA (1)...(19): siRNA sense strand
cagcuggaccugcaacaca

SEQ ID NO: 120454 - RNA, 19 nt, Homo sapiens
  misc_RNA (1)...(19): siRNA sense strand
caggaugcagcgauuguga

SEQ ID NO: 120455 - RNA, 19 nt, Homo sapiens
  misc_RNA (1)...(19): siRNA sense strand
gcagagcagauccguucga

SEQ ID NO: 120456 - RNA, 19 nt, Homo sapiens
  misc_RNA (1)...(19): siRNA sense strand
gaagcugucccugcaagag

SEQ ID NO: 120457 - RNA, 19 nt, Homo sapiens
  misc_RNA (1)...(19): siRNA sense strand
gagcaugcagcuggaggaa

SEQ ID NO: 120458 - RNA, 19 nt, Homo sapiens
  misc_RNA (1)...(19): siRNA sense strand
ggaugcagcgauugugaag

SEQ ID NO: 120459 - RNA, 19 nt, Homo sapiens
  misc_RNA (1)...(19): siRNA sense strand
ggcagugucagcagaacuu

SEQ ID NO: 120460 - RNA, 19 nt, Homo sapiens
  misc_RNA (1)...(19): siRNA sense strand
gaagaaccagcggcucaag

SEQ ID NO: 120461 - RNA, 19 nt, Homo sapiens
  misc_RNA (1)...(19): siRNA sense strand
ggagguggcagagcugaag

SEQ ID NO: 120462 - RNA, 19 nt, Homo sapiens
  misc_RNA (1)...(19): siRNA sense strand
agaaccagcggcucaagga

SEQ ID NO: 120463 - RNA, 19 nt, Homo sapiens
  misc_RNA (1)...(19): siRNA sense strand
ggcagcagcaugacugaca

SEQ ID NO: 120464 - RNA, 19 nt, Homo sapiens
  misc_RNA (1)...(19): siRNA sense strand
accacgagcagcagauuaa

SEQ ID NO: 120465 - RNA, 19 nt, Homo sapiens
  misc_RNA (1)...(19): siRNA sense strand
gcagcaugacugacagaca

SEQ ID NO: 120466 - RNA, 19 nt, Homo sapiens
  misc_RNA (1)...(19): siRNA sense strand
gggaggccagaaacaaaga

SEQ ID NO: 120467 - RNA, 19 nt, Homo sapiens
  misc_RNA (1)...(19): siRNA sense strand
caacgggcugcuccaggaa

SEQ ID NO: 120468 - RNA, 19 nt, Homo sapiens
  misc_RNA (1)...(19): siRNA sense strand
gggcggaggagaagaugca

SEQ ID NO: 120469 - RNA, 19 nt, Homo sapiens
  misc_RNA (1)...(19): siRNA sense strand
gagcaggaugcagcgauug

SEQ ID NO: 120470 - RNA, 19 nt, Homo sapiens
  misc_RNA (1)...(19): siRNA sense strand
gacaaugacuuccucaaug

SEQ ID NO: 120471 - RNA, 19 nt, Homo sapiens
  misc_RNA (1)...(19): siRNA sense strand
ucaaugagcugagcaaugu

SEQ ID NO: 120472 - RNA, 19 nt, Homo sapiens
  misc_RNA (1)...(19): siRNA sense strand
gaaauaccaccaguuuaua

SEQ ID NO: 120473 - RNA, 19 nt, Homo sapiens
  misc_RNA (1)...(19): siRNA sense strand
ggacaaucaucucuucaau

SEQ ID NO: 120474 - RNA, 19 nt, Homo sapiens
  misc_RNA (1)...(19): siRNA sense strand
aaagaaauaccaccaguuu

SEQ ID NO: 120475 - RNA, 19 nt, Homo sapiens
  misc_RNA (1)...(19): siRNA sense strand
acaaugacuuccucaauga

SEQ ID NO: 120476 - RNA, 19 nt, Homo sapiens
  misc_RNA (1)...(19): siRNA sense strand
gaucaggauuaccagaauu

SEQ ID NO: 120477 - RNA, 19 nt, Homo sapiens
  misc_RNA (1)...(19): siRNA sense strand
gacaaucaucucuucaaua

SEQ ID NO: 120478 - RNA, 19 nt, Homo sapiens
  misc_RNA (1)...(19): siRNA sense strand
gccagaaagugaagcuauu

SEQ ID NO: 120479 - RNA, 19 nt, Homo sapiens
  misc_RNA (1)...(19): siRNA sense strand
gaccguggaugguguggaa

SEQ ID NO: 120480 - RNA, 19 nt, Homo sapiens
  misc_RNA (1)...(19): siRNA sense strand
agaaauaccaccaguuuau

SEQ ID NO: 120481 - RNA, 19 nt, Homo sapiens
  misc_RNA (1)...(19): siRNA sense strand
cccagccgcuuuaaguuua

SEQ ID NO: 120482 - RNA, 19 nt, Homo sapiens
  misc_RNA (1)...(19): siRNA sense strand
ggagagguuuggaauugau

SEQ ID NO: 120483 - RNA, 19 nt, Homo sapiens
  misc_RNA (1)...(19): siRNA sense strand
ggacuugccaacauucaaa

SEQ ID NO: 120484 - RNA, 19 nt, Homo sapiens
  misc_RNA (1)...(19): siRNA sense strand
cgggagagguuuggaauug

SEQ ID NO: 120485 - RNA, 19 nt, Homo sapiens
  misc_RNA (1)...(19): siRNA sense strand
aaucaucucuucaauaagg

SEQ ID NO: 120486 - RNA, 19 nt, Homo sapiens
  misc_RNA (1)...(19): siRNA sense strand
gcaagaccaagaccaagaa

SEQ ID NO: 120487 - RNA, 19 nt, Homo sapiens
  misc_RNA (1)...(19): siRNA sense strand
gaaccugcccagccgcuuu

SEQ ID NO: 120488 - RNA, 19 nt, Homo sapiens
  misc_RNA (1)...(19): siRNA sense strand
guucuacgguugccagaga

SEQ ID NO: 120489 - RNA, 19 nt, Homo sapiens
  misc_RNA (1)...(19): siRNA sense strand
gcugagcaauguuccuguu

SEQ ID NO: 120490 - RNA, 19 nt, Homo sapiens
  misc_RNA (1)...(19): siRNA sense strand
gagaagcgagcgacaagga

SEQ ID NO: 120491 - RNA, 19 nt, Homo sapiens
  misc_RNA (1)...(19): siRNA sense strand
gggagagguuuggaauuga

SEQ ID NO: 120492 - RNA, 19 nt, Homo sapiens
  misc_RNA (1)...(19): siRNA sense strand
gguggacaaucaucucuuc

SEQ ID NO: 120493 - RNA, 19 nt, Homo sapiens
  misc_RNA (1)...(19): siRNA sense strand
gcuaaugccagaugacuuc

SEQ ID NO: 120494 - RNA, 19 nt, Homo sapiens
  misc_RNA (1)...(19): siRNA sense strand
agaccaagaagaagcauuu

SEQ ID NO: 120495 - RNA, 19 nt, Homo sapiens
  misc_RNA (1)...(19): siRNA sense strand
agaccaagaccaagaagaa

SEQ ID NO: 120496 - RNA, 19 nt, Homo sapiens
  misc_RNA (1)...(19): siRNA sense strand
agaucaagguggacaauca

SEQ ID NO: 120497 - RNA, 19 nt, Homo sapiens
  misc_RNA (1)...(19): siRNA sense strand
gcccagccgcuuuaaguuu

SEQ ID NO: 120498 - RNA, 19 nt, Homo sapiens
  misc_RNA (1)...(19): siRNA sense strand
uaaagaaauaccaccaguu

SEQ ID NO: 120499 - RNA, 19 nt, Homo sapiens
  misc_RNA (1)...(19): siRNA sense strand
ugaaccacacgaucaauga

SEQ ID NO: 120500 - RNA, 19 nt, Homo sapiens
  misc_RNA (1)...(19): siRNA sense strand
aagaaauaccaccaguuua

SEQ ID NO: 120501 - RNA, 19 nt, Homo sapiens
  misc_RNA (1)...(19): siRNA sense strand
aaugccagaugacuucaaa

SEQ ID NO: 120502 - RNA, 19 nt, Homo sapiens
  misc_RNA (1)...(19): siRNA sense strand
uggcggagaugcacaacau

SEQ ID NO: 120503 - RNA, 19 nt, Homo sapiens
  misc_RNA (1)...(19): siRNA sense strand
uggaugguguggaaaccua

SEQ ID NO: 120504 - RNA, 19 nt, Homo sapiens
  misc_RNA (1)...(19): siRNA sense strand
ugaucaggauuaccagaau

SEQ ID NO: 120505 - RNA, 19 nt, Homo sapiens
  misc_RNA (1)...(19): siRNA sense strand
acaaggagaaggccaagga

SEQ ID NO: 120506 - RNA, 19 nt, Homo sapiens
  misc_RNA (1)...(19): siRNA sense strand
ucacugugcaucgcaagua

SEQ ID NO: 120507 - RNA, 19 nt, Homo sapiens
  misc_RNA (1)...(19): siRNA sense strand
agacaaugacuuccucaau

SEQ ID NO: 120508 - RNA, 19 nt, Homo sapiens
  misc_RNA (1)...(19): siRNA sense strand
ccagcaagaccaagaccaa

SEQ ID NO: 120509 - RNA, 19 nt, Homo sapiens
  misc_RNA (1)...(19): siRNA sense strand
aaaagaacuuccuggagaa

SEQ ID NO: 120510 - RNA, 19 nt, Homo sapiens
  misc_RNA (1)...(19): siRNA sense strand
ucgcaaguaugaccucaag

SEQ ID NO: 120511 - RNA, 19 nt, Homo sapiens
  misc_RNA (1)...(19): siRNA sense strand
ugucauggcaacacgcuuu

SEQ ID NO: 120512 - RNA, 19 nt, Homo sapiens
  misc_RNA (1)...(19): siRNA sense strand
cacaguuccugggcaugua

SEQ ID NO: 120513 - RNA, 19 nt, Homo sapiens
  misc_RNA (1)...(19): siRNA sense strand
gaucaagguggacaaucau

SEQ ID NO: 120514 - RNA, 19 nt, Homo sapiens
  misc_RNA (1)...(19): siRNA sense strand
gaaccacacgaucaaugag

SEQ ID NO: 120515 - RNA, 19 nt, Homo sapiens
  misc_RNA (1)...(19): siRNA sense strand
ccaagaagaagcauuucgu

SEQ ID NO: 120516 - RNA, 19 nt, Homo sapiens
  misc_RNA (1)...(19): siRNA sense strand
gcaagaucaagguggacaa

SEQ ID NO: 120517 - RNA, 19 nt, Homo sapiens
  misc_RNA (1)...(19): siRNA sense strand
gaaacugaagcgggacguu

SEQ ID NO: 120518 - RNA, 19 nt, Homo sapiens
  misc_RNA (1)...(19): siRNA sense strand
aaauaccaccaguuuauag

SEQ ID NO: 120519 - RNA, 19 nt, Homo sapiens
  misc_RNA (1)...(19): siRNA sense strand
ccagaaagugaagcuauuc

SEQ ID NO: 120520 - RNA, 19 nt, Homo sapiens
  misc_RNA (1)...(19): siRNA sense strand
caaugacuuccucaaugaa

SEQ ID NO: 120521 - RNA, 19 nt, Homo sapiens
  misc_RNA (1)...(19): siRNA sense strand
gagcaauguuccuguuccu

SEQ ID NO: 120522 - RNA, 19 nt, Homo sapiens
  misc_RNA (1)...(19): siRNA sense strand
gugaaccacacgaucaaug

SEQ ID NO: 120523 - RNA, 19 nt, Homo sapiens
  misc_RNA (1)...(19): siRNA sense strand
cagagaagcgagcgacaag

SEQ ID NO: 120524 - RNA, 19 nt, Homo sapiens
  misc_RNA (1)...(19): siRNA sense strand
gcuuugucaucaagacugu

SEQ ID NO: 120525 - RNA, 19 nt, Homo sapiens
  misc_RNA (1)...(19): siRNA sense strand
uucaaagccuacagcaaga

SEQ ID NO: 120526 - RNA, 19 nt, Homo sapiens
  misc_RNA (1)...(19): siRNA sense strand
caagaucaagguggacaau

SEQ ID NO: 120527 - RNA, 19 nt, Homo sapiens
  misc_RNA (1)...(19): siRNA sense strand
gaacuuccuggagaaacug

SEQ ID NO: 120528 - RNA, 19 nt, Homo sapiens
  misc_RNA (1)...(19): siRNA sense strand
agaacuuccuggagaaacu

SEQ ID NO: 120529 - RNA, 19 nt, Homo sapiens
  misc_RNA (1)...(19): siRNA sense strand
aaagaacuuccuggagaaa

SEQ ID NO: 120530 - RNA, 19 nt, Homo sapiens
  misc_RNA (1)...(19): siRNA sense strand
ccacaguuccugggcaugu

SEQ ID NO: 120531 - RNA, 19 nt, Homo sapiens
  misc_RNA (1)...(19): siRNA sense strand
auucaaagacaaugacuuc

SEQ ID NO: 120532 - RNA, 19 nt, Homo sapiens
  misc_RNA (1)...(19): siRNA sense strand
ccagagaagcgagcgacaa

SEQ ID NO: 120533 - RNA, 19 nt, Homo sapiens
  misc_RNA (1)...(19): siRNA sense strand
cacugugcaucgcaaguau

SEQ ID NO: 120534 - RNA, 19 nt, Homo sapiens
  misc_RNA (1)...(19): siRNA sense strand
ccaagaccaagaagaagca

SEQ ID NO: 120535 - RNA, 19 nt, Homo sapiens
  misc_RNA (1)...(19): siRNA sense strand
ugccaacauucaaagacaa

SEQ ID NO: 120536 - RNA, 19 nt, Homo sapiens
  misc_RNA (1)...(19): siRNA sense strand
gacaaugacuuccucaaug

SEQ ID NO: 120537 - RNA, 19 nt, Homo sapiens
  misc_RNA (1)...(19): siRNA sense strand
ucaaugagcugagcaaugu

SEQ ID NO: 120538 - RNA, 19 nt, Homo sapiens
  misc_RNA (1)...(19): siRNA sense strand
gaaauaccaccaguuuaua

SEQ ID NO: 120539 - RNA, 19 nt, Homo sapiens
  misc_RNA (1)...(19): siRNA sense strand
ggacaaucaucucuucaau

SEQ ID NO: 120540 - RNA, 19 nt, Homo sapiens
  misc_RNA (1)...(19): siRNA sense strand
aaagaaauaccaccaguuu

SEQ ID NO: 120541 - RNA, 19 nt, Homo sapiens
  misc_RNA (1)...(19): siRNA sense strand
acaaugacuuccucaauga

SEQ ID NO: 120542 - RNA, 19 nt, Homo sapiens
  misc_RNA (1)...(19): siRNA sense strand
gaucaggauuaccagaauu

SEQ ID NO: 120543 - RNA, 19 nt, Homo sapiens
  misc_RNA (1)...(19): siRNA sense strand
gacaaucaucucuucaaua

SEQ ID NO: 120544 - RNA, 19 nt, Homo sapiens
  misc_RNA (1)...(19): siRNA sense strand
gccagaaagugaagcuauu

SEQ ID NO: 120545 - RNA, 19 nt, Homo sapiens
  misc_RNA (1)...(19): siRNA sense strand
gaccguggaugguguggaa

SEQ ID NO: 120546 - RNA, 19 nt, Homo sapiens
  misc_RNA (1)...(19): siRNA sense strand
agaaauaccaccaguuuau

SEQ ID NO: 120547 - RNA, 19 nt, Homo sapiens
  misc_RNA (1)...(19): siRNA sense strand
cccagccgcuuuaaguuua

SEQ ID NO: 120548 - RNA, 19 nt, Homo sapiens
  misc_RNA (1)...(19): siRNA sense strand
ggagagguuuggaauugau

SEQ ID NO: 120549 - RNA, 19 nt, Homo sapiens
  misc_RNA (1)...(19): siRNA sense strand
ggacuugccaacauucaaa

SEQ ID NO: 120550 - RNA, 19 nt, Homo sapiens
  misc_RNA (1)...(19): siRNA sense strand
cgggagagguuuggaauug

SEQ ID NO: 120551 - RNA, 19 nt, Homo sapiens
  misc_RNA (1)...(19): siRNA sense strand
aaucaucucuucaauaagg

SEQ ID NO: 120552 - RNA, 19 nt, Homo sapiens
  misc_RNA (1)...(19): siRNA sense strand
gcaagaccaagaccaagaa

SEQ ID NO: 120553 - RNA, 19 nt, Homo sapiens
  misc_RNA (1)...(19): siRNA sense strand
gaaccugcccagccgcuuu

SEQ ID NO: 120554 - RNA, 19 nt, Homo sapiens
  misc_RNA (1)...(19): siRNA sense strand
guucuacgguugccagaga

SEQ ID NO: 120555 - RNA, 19 nt, Homo sapiens
  misc_RNA (1)...(19): siRNA sense strand
gcugagcaauguuccuguu

SEQ ID NO: 120556 - RNA, 19 nt, Homo sapiens
  misc_RNA (1)...(19): siRNA sense strand
gagaagcgagcgacaagga

SEQ ID NO: 120557 - RNA, 19 nt, Homo sapiens
  misc_RNA (1)...(19): siRNA sense strand
gggagagguuuggaauuga

SEQ ID NO: 120558 - RNA, 19 nt, Homo sapiens
  misc_RNA (1)...(19): siRNA sense strand
gguggacaaucaucucuuc

SEQ ID NO: 120559 - RNA, 19 nt, Homo sapiens
  misc_RNA (1)...(19): siRNA sense strand
gcuaaugccagaugacuuc

SEQ ID NO: 120560 - RNA, 19 nt, Homo sapiens
  misc_RNA (1)...(19): siRNA sense strand
agaccaagaagaagcauuu

SEQ ID NO: 120561 - RNA, 19 nt, Homo sapiens
  misc_RNA (1)...(19): siRNA sense strand
agaccaagaccaagaagaa

SEQ ID NO: 120562 - RNA, 19 nt, Homo sapiens
  misc_RNA (1)...(19): siRNA sense strand
agaucaagguggacaauca

SEQ ID NO: 120563 - RNA, 19 nt, Homo sapiens
  misc_RNA (1)...(19): siRNA sense strand
gcccagccgcuuuaaguuu

SEQ ID NO: 120564 - RNA, 19 nt, Homo sapiens
  misc_RNA (1)...(19): siRNA sense strand
uaaagaaauaccaccaguu

SEQ ID NO: 120565 - RNA, 19 nt, Homo sapiens
  misc_RNA (1)...(19): siRNA sense strand
ugaaccacacgaucaauga

SEQ ID NO: 120566 - RNA, 19 nt, Homo sapiens
  misc_RNA (1)...(19): siRNA sense strand
aagaaauaccaccaguuua

SEQ ID NO: 120567 - RNA, 19 nt, Homo sapiens
  misc_RNA (1)...(19): siRNA sense strand
aaugccagaugacuucaaa

SEQ ID NO: 120568 - RNA, 19 nt, Homo sapiens
  misc_RNA (1)...(19): siRNA sense strand
uggcggagaugcacaacau

SEQ ID NO: 120569 - RNA, 19 nt, Homo sapiens
  misc_RNA (1)...(19): siRNA sense strand
uggaugguguggaaaccua

SEQ ID NO: 120570 - RNA, 19 nt, Homo sapiens
  misc_RNA (1)...(19): siRNA sense strand
ugaucaggauuaccagaau

SEQ ID NO: 120571 - RNA, 19 nt, Homo sapiens
  misc_RNA (1)...(19): siRNA sense strand
acaaggagaaggccaagga

SEQ ID NO: 120572 - RNA, 19 nt, Homo sapiens
  misc_RNA (1)...(19): siRNA sense strand
ucacugugcaucgcaagua

SEQ ID NO: 120573 - RNA, 19 nt, Homo sapiens
  misc_RNA (1)...(19): siRNA sense strand
agacaaugacuuccucaau

SEQ ID NO: 120574 - RNA, 19 nt, Homo sapiens
  misc_RNA (1)...(19): siRNA sense strand
ccagcaagaccaagaccaa

SEQ ID NO: 120575 - RNA, 19 nt, Homo sapiens
  misc_RNA (1)...(19): siRNA sense strand
aaaagaacuuccuggagaa

SEQ ID NO: 120576 - RNA, 19 nt, Homo sapiens
  misc_RNA (1)...(19): siRNA sense strand
ucgcaaguaugaccucaag

SEQ ID NO: 120577 - RNA, 19 nt, Homo sapiens
  misc_RNA (1)...(19): siRNA sense strand
ugucauggcaacacgcuuu

SEQ ID NO: 120578 - RNA, 19 nt, Homo sapiens
  misc_RNA (1)...(19): siRNA sense strand
cacaguuccugggcaugua

SEQ ID NO: 120579 - RNA, 19 nt, Homo sapiens
  misc_RNA (1)...(19): siRNA sense strand
gaucaagguggacaaucau

SEQ ID NO: 120580 - RNA, 19 nt, Homo sapiens
  misc_RNA (1)...(19): siRNA sense strand
gaaccacacgaucaaugag

SEQ ID NO: 120581 - RNA, 19 nt, Homo sapiens
  misc_RNA (1)...(19): siRNA sense strand
ccaagaagaagcauuucgu

SEQ ID NO: 120582 - RNA, 19 nt, Homo sapiens
  misc_RNA (1)...(19): siRNA sense strand
gcaagaucaagguggacaa

SEQ ID NO: 120583 - RNA, 19 nt, Homo sapiens
  misc_RNA (1)...(19): siRNA sense strand
gaaacugaagcgggacguu

SEQ ID NO: 120584 - RNA, 19 nt, Homo sapiens
  misc_RNA (1)...(19): siRNA sense strand
aaauaccaccaguuuauag

SEQ ID NO: 120585 - RNA, 19 nt, Homo sapiens
  misc_RNA (1)...(19): siRNA sense strand
ccagaaagugaagcuauuc

SEQ ID NO: 120586 - RNA, 19 nt, Homo sapiens
  misc_RNA (1)...(19): siRNA sense strand
caaugacuuccucaaugaa

SEQ ID NO: 120587 - RNA, 19 nt, Homo sapiens
  misc_RNA (1)...(19): siRNA sense strand
gagcaauguuccuguuccu

SEQ ID NO: 120588 - RNA, 19 nt, Homo sapiens
  misc_RNA (1)...(19): siRNA sense strand
gugaaccacacgaucaaug

SEQ ID NO: 120589 - RNA, 19 nt, Homo sapiens
  misc_RNA (1)...(19): siRNA sense strand
cagagaagcgagcgacaag

SEQ ID NO: 120590 - RNA, 19 nt, Homo sapiens
  misc_RNA (1)...(19): siRNA sense strand
gcuuugucaucaagacugu

SEQ ID NO: 120591 - RNA, 19 nt, Homo sapiens
  misc_RNA (1)...(19): siRNA sense strand
uucaaagccuacagcaaga

SEQ ID NO: 120592 - RNA, 19 nt, Homo sapiens
  misc_RNA (1)...(19): siRNA sense strand
caagaucaagguggacaau

SEQ ID NO: 120593 - RNA, 19 nt, Homo sapiens
  misc_RNA (1)...(19): siRNA sense strand
gaacuuccuggagaaacug

SEQ ID NO: 120594 - RNA, 19 nt, Homo sapiens
  misc_RNA (1)...(19): siRNA sense strand
agaacuuccuggagaaacu

SEQ ID NO: 120595 - RNA, 19 nt, Homo sapiens
  misc_RNA (1)...(19): siRNA sense strand
aaagaacuuccuggagaaa

SEQ ID NO: 120596 - RNA, 19 nt, Homo sapiens
  misc_RNA (1)...(19): siRNA sense strand
ccacaguuccugggcaugu

SEQ ID NO: 120597 - RNA, 19 nt, Homo sapiens
  misc_RNA (1)...(19): siRNA sense strand
auucaaagacaaugacuuc

SEQ ID NO: 120598 - RNA, 19 nt, Homo sapiens
  misc_RNA (1)...(19): siRNA sense strand
ccagagaagcgagcgacaa

SEQ ID NO: 120599 - RNA, 19 nt, Homo sapiens
  misc_RNA (1)...(19): siRNA sense strand
cacugugcaucgcaaguau

SEQ ID NO: 120600 - RNA, 19 nt, Homo sapiens
  misc_RNA (1)...(19): siRNA sense strand
ccaagaccaagaagaagca

SEQ ID NO: 120601 - RNA, 19 nt, Homo sapiens
  misc_RNA (1)...(19): siRNA sense strand
ugccaacauucaaagacaa

SEQ ID NO: 120602 - RNA, 19 nt, Homo sapiens
  misc_RNA (1)...(19): siRNA sense strand
gaaagaacauggccugugu

SEQ ID NO: 120603 - RNA, 19 nt, Homo sapiens
  misc_RNA (1)...(19): siRNA sense strand
gaaacaauaugaugcagau

SEQ ID NO: 120604 - RNA, 19 nt, Homo sapiens
  misc_RNA (1)...(19): siRNA sense strand
ccucggaacuucucagaua

SEQ ID NO: 120605 - RNA, 19 nt, Homo sapiens
  misc_RNA (1)...(19): siRNA sense strand
gcugagcgcuauggcauua

SEQ ID NO: 120606 - RNA, 19 nt, Homo sapiens
  misc_RNA (1)...(19): siRNA sense strand
uaacaccacugacaucuuc

SEQ ID NO: 120607 - RNA, 19 nt, Homo sapiens
  misc_RNA (1)...(19): siRNA sense strand
gcaagcagcugagcgcuau

SEQ ID NO: 120608 - RNA, 19 nt, Homo sapiens
  misc_RNA (1)...(19): siRNA sense strand
uaugugagcucauuaaugc

SEQ ID NO: 120609 - RNA, 19 nt, Homo sapiens
  misc_RNA (1)...(19): siRNA sense strand
gcagaagauugagaaacaa

SEQ ID NO: 120610 - RNA, 19 nt, Homo sapiens
  misc_RNA (1)...(19): siRNA sense strand
ccaacugguucccuaagaa

SEQ ID NO: 120611 - RNA, 19 nt, Homo sapiens
  misc_RNA (1)...(19): siRNA sense strand
ggagaauccucggaacuuc

SEQ ID NO: 120612 - RNA, 19 nt, Homo sapiens
  misc_RNA (1)...(19): siRNA sense strand
ccacugacaucuuccaaac

SEQ ID NO: 120613 - RNA, 19 nt, Homo sapiens
  misc_RNA (1)...(19): siRNA sense strand
ucaagcagauggagcagau

SEQ ID NO: 120614 - RNA, 19 nt, Homo sapiens
  misc_RNA (1)...(19): siRNA sense strand
caacugguucccuaagaaa

SEQ ID NO: 120615 - RNA, 19 nt, Homo sapiens
  misc_RNA (1)...(19): siRNA sense strand
caagaacgugaucggguua

SEQ ID NO: 120616 - RNA, 19 nt, Homo sapiens
  misc_RNA (1)...(19): siRNA sense strand
gcgagaacuuccagaacug

SEQ ID NO: 120617 - RNA, 19 nt, Homo sapiens
  misc_RNA (1)...(19): siRNA sense strand
gcucauuaaugcacuguac

SEQ ID NO: 120618 - RNA, 19 nt, Homo sapiens
  misc_RNA (1)...(19): siRNA sense strand
uggagcagaucucucaguu

SEQ ID NO: 120619 - RNA, 19 nt, Homo sapiens
  misc_RNA (1)...(19): siRNA sense strand
cagauaaccagcugcaaga

SEQ ID NO: 120620 - RNA, 19 nt, Homo sapiens
  misc_RNA (1)...(19): siRNA sense strand
uaagaaauccaaggagaau

SEQ ID NO: 120621 - RNA, 19 nt, Homo sapiens
  misc_RNA (1)...(19): siRNA sense strand
agcagaagauugagaaaca

SEQ ID NO: 120622 - RNA, 19 nt, Homo sapiens
  misc_RNA (1)...(19): siRNA sense strand
ggugcuaugugagcucauu

SEQ ID NO: 120623 - RNA, 19 nt, Homo sapiens
  misc_RNA (1)...(19): siRNA sense strand
ggcaguagcccgagaugau

SEQ ID NO: 120624 - RNA, 19 nt, Homo sapiens
  misc_RNA (1)...(19): siRNA sense strand
gcaguagcccgagaugaug

SEQ ID NO: 120625 - RNA, 19 nt, Homo sapiens
  misc_RNA (1)...(19): siRNA sense strand
cuaagaaauccaaggagaa

SEQ ID NO: 120626 - RNA, 19 nt, Homo sapiens
  misc_RNA (1)...(19): siRNA sense strand
acugacaucuuccaaacug

SEQ ID NO: 120627 - RNA, 19 nt, Homo sapiens
  misc_RNA (1)...(19): siRNA sense strand
acaauaugaugcagaucug

SEQ ID NO: 120628 - RNA, 19 nt, Homo sapiens
  misc_RNA (1)...(19): siRNA sense strand
gcauuaacaccacugacau

SEQ ID NO: 120629 - RNA, 19 nt, Homo sapiens
  misc_RNA (1)...(19): siRNA sense strand
gguuacagaugggcaccaa

SEQ ID NO: 120630 - RNA, 19 nt, Homo sapiens
  misc_RNA (1)...(19): siRNA sense strand
gaggugcagcagaagauug

SEQ ID NO: 120631 - RNA, 19 nt, Homo sapiens
  misc_RNA (1)...(19): siRNA sense strand
ggcauuaacaccacugaca

SEQ ID NO: 120632 - RNA, 19 nt, Homo sapiens
  misc_RNA (1)...(19): siRNA sense strand
cgcgagaacuuccagaacu

SEQ ID NO: 120633 - RNA, 19 nt, Homo sapiens
  misc_RNA (1)...(19): siRNA sense strand
cucggaacuucucagauaa

SEQ ID NO: 120634 - RNA, 19 nt, Homo sapiens
  misc_RNA (1)...(19): siRNA sense strand
cccaacugguucccuaaga

SEQ ID NO: 120635 - RNA, 19 nt, Homo sapiens
  misc_RNA (1)...(19): siRNA sense strand
gcagcagaagauugagaaa

SEQ ID NO: 120636 - RNA, 19 nt, Homo sapiens
  misc_RNA (1)...(19): siRNA sense strand
ugagaaacaauaugaugca

SEQ ID NO: 120637 - RNA, 19 nt, Homo sapiens
  misc_RNA (1)...(19): siRNA sense strand
ggaggugcagcagaagauu

SEQ ID NO: 120638 - RNA, 19 nt, Homo sapiens
  misc_RNA (1)...(19): siRNA sense strand
guggaccucugggaaggaa

SEQ ID NO: 120639 - RNA, 19 nt, Homo sapiens
  misc_RNA (1)...(19): siRNA sense strand
gcuaugugagcucauuaau

SEQ ID NO: 120640 - RNA, 19 nt, Homo sapiens
  misc_RNA (1)...(19): siRNA sense strand
gggaggugcagcagaagau

SEQ ID NO: 120641 - RNA, 19 nt, Homo sapiens
  misc_RNA (1)...(19): siRNA sense strand
ggagcagaucucucaguuc

SEQ ID NO: 120642 - RNA, 19 nt, Homo sapiens
  misc_RNA (1)...(19): siRNA sense strand
gacgcgagaacuuccagaa

SEQ ID NO: 120643 - RNA, 19 nt, Homo sapiens
  misc_RNA (1)...(19): siRNA sense strand
cuaugugagcucauuaaug

SEQ ID NO: 120644 - RNA, 19 nt, Homo sapiens
  misc_RNA (1)...(19): siRNA sense strand
gugcuaugugagcucauua

SEQ ID NO: 120645 - RNA, 19 nt, Homo sapiens
  misc_RNA (1)...(19): siRNA sense strand
gagcaaagcuacccucaug

SEQ ID NO: 120646 - RNA, 19 nt, Homo sapiens
  misc_RNA (1)...(19): siRNA sense strand
gcagacagcuaccggauga

SEQ ID NO: 120647 - RNA, 19 nt, Homo sapiens
  misc_RNA (1)...(19): siRNA sense strand
gaccagagcugugaaauca

SEQ ID NO: 120648 - RNA, 19 nt, Homo sapiens
  misc_RNA (1)...(19): siRNA sense strand
uaacugcccucucgcguaa

SEQ ID NO: 120649 - RNA, 19 nt, Homo sapiens
  misc_RNA (1)...(19): siRNA sense strand
aaacugccauucucuauga

SEQ ID NO: 120650 - RNA, 19 nt, Homo sapiens
  misc_RNA (1)...(19): siRNA sense strand
gaaccucgcucagcacuuc

SEQ ID NO: 120651 - RNA, 19 nt, Homo sapiens
  misc_RNA (1)...(19): siRNA sense strand
ggacccaacuguggaauau

SEQ ID NO: 120652 - RNA, 19 nt, Homo sapiens
  misc_RNA (1)...(19): siRNA sense strand
cggcagaacucgccuguga

SEQ ID NO: 120653 - RNA, 19 nt, Homo sapiens
  misc_RNA (1)...(19): siRNA sense strand
gaaaucaugcugaaccauu

SEQ ID NO: 120654 - RNA, 19 nt, Homo sapiens
  misc_RNA (1)...(19): siRNA sense strand
gcagcgagauggugacuuc

SEQ ID NO: 120655 - RNA, 19 nt, Homo sapiens
  misc_RNA (1)...(19): siRNA sense strand
gauggugacuuccuaguuc

SEQ ID NO: 120656 - RNA, 19 nt, Homo sapiens
  misc_RNA (1)...(19): siRNA sense strand
gaacugaacccagcguuug

SEQ ID NO: 120657 - RNA, 19 nt, Homo sapiens
  misc_RNA (1)...(19): siRNA sense strand
gaaacaugccggugaauca

SEQ ID NO: 120658 - RNA, 19 nt, Homo sapiens
  misc_RNA (1)...(19): siRNA sense strand
cagcaaaggugcacaaguc

SEQ ID NO: 120659 - RNA, 19 nt, Homo sapiens
  misc_RNA (1)...(19): siRNA sense strand
ccgagaaacugaagaagga

SEQ ID NO: 120660 - RNA, 19 nt, Homo sapiens
  misc_RNA (1)...(19): siRNA sense strand
ucaaccagaugaagaaaug

SEQ ID NO: 120661 - RNA, 19 nt, Homo sapiens
  misc_RNA (1)...(19): siRNA sense strand
ucagcaaacuccugcauga

SEQ ID NO: 120662 - RNA, 19 nt, Homo sapiens
  misc_RNA (1)...(19): siRNA sense strand
ggaccucuauuccuucuca

SEQ ID NO: 120663 - RNA, 19 nt, Homo sapiens
  misc_RNA (1)...(19): siRNA sense strand
ggaaaccuccucagaaaca

SEQ ID NO: 120664 - RNA, 19 nt, Homo sapiens
  misc_RNA (1)...(19): siRNA sense strand
ccagaugccuaucaagaug

SEQ ID NO: 120665 - RNA, 19 nt, Homo sapiens
  misc_RNA (1)...(19): siRNA sense strand
cuucucagcucucaugaaa

SEQ ID NO: 120666 - RNA, 19 nt, Homo sapiens
  misc_RNA (1)...(19): siRNA sense strand
ggaaagaccuugggaaccu

SEQ ID NO: 120667 - RNA, 19 nt, Homo sapiens
  misc_RNA (1)...(19): siRNA sense strand
ccagaaacaugccggugaa

SEQ ID NO: 120668 - RNA, 19 nt, Homo sapiens
  misc_RNA (1)...(19): siRNA sense strand
gcagagaguccacaugugu

SEQ ID NO: 120669 - RNA, 19 nt, Homo sapiens
  misc_RNA (1)...(19): siRNA sense strand
ccagagcugugaaaucaug

SEQ ID NO: 120670 - RNA, 19 nt, Homo sapiens
  misc_RNA (1)...(19): siRNA sense strand
gaagagccuugucccucaa

SEQ ID NO: 120671 - RNA, 19 nt, Homo sapiens
  misc_RNA (1)...(19): siRNA sense strand
agagagauaugagaaauuc

SEQ ID NO: 120672 - RNA, 19 nt, Homo sapiens
  misc_RNA (1)...(19): siRNA sense strand
ggcgaaaccuucaccuuca

SEQ ID NO: 120673 - RNA, 19 nt, Homo sapiens
  misc_RNA (1)...(19): siRNA sense strand
gaagagaugaggaggaaca

SEQ ID NO: 120674 - RNA, 19 nt, Homo sapiens
  misc_RNA (1)...(19): siRNA sense strand
gaaagacacaacacaaugg

SEQ ID NO: 120675 - RNA, 19 nt, Homo sapiens
  misc_RNA (1)...(19): siRNA sense strand
ucaaucagacagagagaua

SEQ ID NO: 120676 - RNA, 19 nt, Homo sapiens
  misc_RNA (1)...(19): siRNA sense strand
gcugugaaaucaugcugaa

SEQ ID NO: 120677 - RNA, 19 nt, Homo sapiens
  misc_RNA (1)...(19): siRNA sense strand
gcgagauggugacuuccua

SEQ ID NO: 120678 - RNA, 19 nt, Homo sapiens
  misc_RNA (1)...(19): siRNA sense strand
gcucagcacuucaaaauca

SEQ ID NO: 120679 - RNA, 19 nt, Homo sapiens
  misc_RNA (1)...(19): siRNA sense strand
ggucaucgcccagcacgua

SEQ ID NO: 120680 - RNA, 19 nt, Homo sapiens
  misc_RNA (1)...(19): siRNA sense strand
gcaaagcuacccucaugug

SEQ ID NO: 120681 - RNA, 19 nt, Homo sapiens
  misc_RNA (1)...(19): siRNA sense strand
caacuacugugaacugaac

SEQ ID NO: 120682 - RNA, 19 nt, Homo sapiens
  misc_RNA (1)...(19): siRNA sense strand
ccucaaagcccaccaguca

SEQ ID NO: 120683 - RNA, 19 nt, Homo sapiens
  misc_RNA (1)...(19): siRNA sense strand
caugaaagcccuggaaaug

SEQ ID NO: 120684 - RNA, 19 nt, Homo sapiens
  misc_RNA (1)...(19): siRNA sense strand
ggggaaaccuccucagaaa

SEQ ID NO: 120685 - RNA, 19 nt, Homo sapiens
  misc_RNA (1)...(19): siRNA sense strand
gaaaccuccucagaaacaa

SEQ ID NO: 120686 - RNA, 19 nt, Homo sapiens
  misc_RNA (1)...(19): siRNA sense strand
ccacagaucacaagguuag

SEQ ID NO: 120687 - RNA, 19 nt, Homo sapiens
  misc_RNA (1)...(19): siRNA sense strand
gaaaugccacagaucacaa

SEQ ID NO: 120688 - RNA, 19 nt, Homo sapiens
  misc_RNA (1)...(19): siRNA sense strand
uugcaagccuucccagaaa

SEQ ID NO: 120689 - RNA, 19 nt, Homo sapiens
  misc_RNA (1)...(19): siRNA sense strand
ugaaagacacaacacaaug

SEQ ID NO: 120690 - RNA, 19 nt, Homo sapiens
  misc_RNA (1)...(19): siRNA sense strand
cccauaagguccugugaug

SEQ ID NO: 120691 - RNA, 19 nt, Homo sapiens
  misc_RNA (1)...(19): siRNA sense strand
ucacagccaagcagaauga

SEQ ID NO: 120692 - RNA, 19 nt, Homo sapiens
  misc_RNA (1)...(19): siRNA sense strand
ggaaccuccuccuguaaag

SEQ ID NO: 120693 - RNA, 19 nt, Homo sapiens
  misc_RNA (1)...(19): siRNA sense strand
acagagagauaugagaaau

SEQ ID NO: 120694 - RNA, 19 nt, Homo sapiens
  misc_RNA (1)...(19): siRNA sense strand
caaaggugcacaagucaau

SEQ ID NO: 120695 - RNA, 19 nt, Homo sapiens
  misc_RNA (1)...(19): siRNA sense strand
cugcaggguugcuaggaua

SEQ ID NO: 120696 - RNA, 19 nt, Homo sapiens
  misc_RNA (1)...(19): siRNA sense strand
gcucaggccuggaacucau

SEQ ID NO: 120697 - RNA, 19 nt, Homo sapiens
  misc_RNA (1)...(19): siRNA sense strand
gaaccgacaugugggaaaa

SEQ ID NO: 120698 - RNA, 19 nt, Homo sapiens
  misc_RNA (1)...(19): siRNA sense strand
gcaaggugccguuccucaa

SEQ ID NO: 120699 - RNA, 19 nt, Homo sapiens
  misc_RNA (1)...(19): siRNA sense strand
cuaucaagaugugucuaua

SEQ ID NO: 120700 - RNA, 19 nt, Homo sapiens
  misc_RNA (1)...(19): siRNA sense strand
gaaaucugcaagacugaau

SEQ ID NO: 120701 - RNA, 19 nt, Homo sapiens
  misc_RNA (1)...(19): siRNA sense strand
cagaugaagaaaugaauga

SEQ ID NO: 120702 - RNA, 19 nt, Homo sapiens
  misc_RNA (1)...(19): siRNA sense strand
cagcugcgccuggacauaa

SEQ ID NO: 120703 - RNA, 19 nt, Homo sapiens
  misc_RNA (1)...(19): siRNA sense strand
cugaagagaugaggaggaa

SEQ ID NO: 120704 - RNA, 19 nt, Homo sapiens
  misc_RNA (1)...(19): siRNA sense strand
ggaacucuggcgucaacua

SEQ ID NO: 120705 - RNA, 19 nt, Homo sapiens
  misc_RNA (1)...(19): siRNA sense strand
gcccagaugccuaucaaga

SEQ ID NO: 120706 - RNA, 19 nt, Homo sapiens
  misc_RNA (1)...(19): siRNA sense strand
agacagagagauaugagaa

SEQ ID NO: 120707 - RNA, 19 nt, Homo sapiens
  misc_RNA (1)...(19): siRNA sense strand
ggaaaugccacagaucaca

SEQ ID NO: 120708 - RNA, 19 nt, Homo sapiens
  misc_RNA (1)...(19): siRNA sense strand
gcauugcaguggacauucu

SEQ ID NO: 120709 - RNA, 19 nt, Homo sapiens
  misc_RNA (1)...(19): siRNA sense strand
gccuggaacucauuaccuu

SEQ ID NO: 120710 - RNA, 19 nt, Homo sapiens
  misc_RNA (1)...(19): siRNA sense strand
ccaaacugccauucucuau

SEQ ID NO: 120711 - RNA, 19 nt, Homo sapiens
  misc_RNA (1)...(19): siRNA sense strand
ucaaagcccaccagucaga

SEQ ID NO: 120712 - RNA, 19 nt, Homo sapiens
  misc_RNA (1)...(19): siRNA sense strand
ggcaacagcgcgauucaug

SEQ ID NO: 120713 - RNA, 19 nt, Homo sapiens
  misc_RNA (1)...(19): siRNA sense strand
ugaugccgcuugugacguu

SEQ ID NO: 120714 - RNA, 19 nt, Homo sapiens
  misc_RNA (1)...(19): siRNA sense strand
ugccacagaucacaagguu

SEQ ID NO: 120715 - RNA, 19 nt, Homo sapiens
  misc_RNA (1)...(19): siRNA sense strand
cgguggaacugaaggauuc

SEQ ID NO: 120716 - RNA, 19 nt, Homo sapiens
  misc_RNA (1)...(19): siRNA sense strand
gcaaaggugcacaagucaa

SEQ ID NO: 120717 - RNA, 19 nt, Homo sapiens
  misc_RNA (1)...(19): siRNA sense strand
cuucagggauccacaucuu

SEQ ID NO: 120718 - RNA, 19 nt, Homo sapiens
  misc_RNA (1)...(19): siRNA sense strand
ugagaaauucaaccagauu

SEQ ID NO: 120719 - RNA, 19 nt, Homo sapiens
  misc_RNA (1)...(19): siRNA sense strand
gauaugagaaauucaacca

SEQ ID NO: 120720 - RNA, 19 nt, Homo sapiens
  misc_RNA (1)...(19): siRNA sense strand
gacagagagauaugagaaa

SEQ ID NO: 120721 - RNA, 19 nt, Homo sapiens
  misc_RNA (1)...(19): siRNA sense strand
guugaaacgugcaaaagaa

SEQ ID NO: 120722 - RNA, 19 nt, Homo sapiens
  misc_RNA (1)...(19): siRNA sense strand
uggaauaugugaaguucuc

SEQ ID NO: 120723 - RNA, 19 nt, Homo sapiens
  misc_RNA (1)...(19): siRNA sense strand
ugaaugaaaucugcaagac

SEQ ID NO: 120724 - RNA, 19 nt, Homo sapiens
  misc_RNA (1)...(19): siRNA sense strand
ggaugaaugcugagaggau

SEQ ID NO: 120725 - RNA, 19 nt, Homo sapiens
  misc_RNA (1)...(19): siRNA sense strand
gaacucuggcgucaacuac

SEQ ID NO: 120726 - RNA, 19 nt, Homo sapiens
  misc_RNA (1)...(19): siRNA sense strand
ccagggaagccacacagaa

SEQ ID NO: 120727 - RNA, 19 nt, Homo sapiens
  misc_RNA (1)...(19): siRNA sense strand
gccaacuacugugaacuga

SEQ ID NO: 120728 - RNA, 19 nt, Homo sapiens
  misc_RNA (1)...(19): siRNA sense strand
gcaguaccaguucgagaug

SEQ ID NO: 120729 - RNA, 19 nt, Homo sapiens
  misc_RNA (1)...(19): siRNA sense strand
caaacugccauucucuaug

SEQ ID NO: 120730 - RNA, 19 nt, Homo sapiens
  misc_RNA (1)...(19): siRNA sense strand
ucucagcucucaugaaagc

SEQ ID NO: 120731 - RNA, 19 nt, Homo sapiens
  misc_RNA (1)...(19): siRNA sense strand
caacucagaggccaacuac

SEQ ID NO: 120732 - RNA, 19 nt, Homo sapiens
  misc_RNA (1)...(19): siRNA sense strand
gcagaguggcgccaucauc

SEQ ID NO: 120733 - RNA, 19 nt, Homo sapiens
  misc_RNA (1)...(19): siRNA sense strand
gagagcuaccugccgauug

SEQ ID NO: 120734 - RNA, 19 nt, Homo sapiens
  misc_RNA (1)...(19): siRNA sense strand
ggaaccgacaugugggaaa

SEQ ID NO: 120735 - RNA, 19 nt, Homo sapiens
  misc_RNA (1)...(19): siRNA sense strand
cugccuggcucaacucaga

SEQ ID NO: 120736 - RNA, 19 nt, Homo sapiens
  misc_RNA (1)...(19): siRNA sense strand
ucacaugcaggacagaaga

SEQ ID NO: 120737 - RNA, 19 nt, Homo sapiens
  misc_RNA (1)...(19): siRNA sense strand
auuggaaccuccuccugua

SEQ ID NO: 120738 - RNA, 19 nt, Homo sapiens
  misc_RNA (1)...(19): siRNA sense strand
gcugaaccauuuggcaaca

SEQ ID NO: 120739 - RNA, 19 nt, Homo sapiens
  misc_RNA (1)...(19): siRNA sense strand
cagaucacaagguuagaaa

SEQ ID NO: 120740 - RNA, 19 nt, Homo sapiens
  misc_RNA (1)...(19): siRNA sense strand
uaggauacuuggagucucu

SEQ ID NO: 120741 - RNA, 19 nt, Homo sapiens
  misc_RNA (1)...(19): siRNA sense strand
aaaagguccuccucccaua

SEQ ID NO: 120742 - RNA, 19 nt, Homo sapiens
  misc_RNA (1)...(19): siRNA sense strand
gagaauaagccccuggaaa

SEQ ID NO: 120743 - RNA, 19 nt, Homo sapiens
  misc_RNA (1)...(19): siRNA sense strand
gcucacagccaagcagaau

SEQ ID NO: 120744 - RNA, 19 nt, Homo sapiens
  misc_RNA (1)...(19): siRNA sense strand
cagagagauaugagaaauu

SEQ ID NO: 120745 - RNA, 19 nt, Homo sapiens
  misc_RNA (1)...(19): siRNA sense strand
ggacguggccauugaaauu

SEQ ID NO: 120746 - RNA, 19 nt, Homo sapiens
  misc_RNA (1)...(19): siRNA sense strand
gaacacaccgcuguacuuu

SEQ ID NO: 120747 - RNA, 19 nt, Homo sapiens
  misc_RNA (1)...(19): siRNA sense strand
agacugaccuucugaguau

SEQ ID NO: 120748 - RNA, 19 nt, Homo sapiens
  misc_RNA (1)...(19): siRNA sense strand
gugcagggcugaagacaug

SEQ ID NO: 120749 - RNA, 19 nt, Homo sapiens
  misc_RNA (1)...(19): siRNA sense strand
uagcuucggugaucaagaa

SEQ ID NO: 120750 - RNA, 19 nt, Homo sapiens
  misc_RNA (1)...(19): siRNA sense strand
ggaggaggcuguccagaac

SEQ ID NO: 120751 - RNA, 19 nt, Homo sapiens
  misc_RNA (1)...(19): siRNA sense strand
gagacugaccuucugagua

SEQ ID NO: 120752 - RNA, 19 nt, Homo sapiens
  misc_RNA (1)...(19): siRNA sense strand
gaaaggggauugccaguca

SEQ ID NO: 120753 - RNA, 19 nt, Homo sapiens
  misc_RNA (1)...(19): siRNA sense strand
ggaagaaauuugggaaguc

SEQ ID NO: 120754 - RNA, 19 nt, Homo sapiens
  misc_RNA (1)...(19): siRNA sense strand
aaacugagcccaauuacca

SEQ ID NO: 120755 - RNA, 19 nt, Homo sapiens
  misc_RNA (1)...(19): siRNA sense strand
gcaaaggcagcucaucuca

SEQ ID NO: 120756 - RNA, 19 nt, Homo sapiens
  misc_RNA (1)...(19): siRNA sense strand
gaaauucuugccacucgaa

SEQ ID NO: 120757 - RNA, 19 nt, Homo sapiens
  misc_RNA (1)...(19): siRNA sense strand
ccagaaccguuuccaugga

SEQ ID NO: 120758 - RNA, 19 nt, Homo sapiens
  misc_RNA (1)...(19): siRNA sense strand
ggaccuagcagagaggaaa

SEQ ID NO: 120759 - RNA, 19 nt, Homo sapiens
  misc_RNA (1)...(19): siRNA sense strand
gaauugaggacagcucuga

SEQ ID NO: 120760 - RNA, 19 nt, Homo sapiens
  misc_RNA (1)...(19): siRNA sense strand
cgugacagcuacucuggaa

SEQ ID NO: 120761 - RNA, 19 nt, Homo sapiens
  misc_RNA (1)...(19): siRNA sense strand
ggaccgcagugccauugug

SEQ ID NO: 120762 - RNA, 19 nt, Homo sapiens
  misc_RNA (1)...(19): siRNA sense strand
cagcucaucucacgaaacu

SEQ ID NO: 120763 - RNA, 19 nt, Homo sapiens
  misc_RNA (1)...(19): siRNA sense strand
caucaagcccuccaggaaa

SEQ ID NO: 120764 - RNA, 19 nt, Homo sapiens
  misc_RNA (1)...(19): siRNA sense strand
gcucaucucacgaaacuuc

SEQ ID NO: 120765 - RNA, 19 nt, Homo sapiens
  misc_RNA (1)...(19): siRNA sense strand
ugagaccaguggcaucuug

SEQ ID NO: 120766 - RNA, 19 nt, Homo sapiens
  misc_RNA (1)...(19): siRNA sense strand
ccaggaaacugagcccaau

SEQ ID NO: 120767 - RNA, 19 nt, Homo sapiens
  misc_RNA (1)...(19): siRNA sense strand
acacaccgcuguacuuugc

SEQ ID NO: 120768 - RNA, 19 nt, Homo sapiens
  misc_RNA (1)...(19): siRNA sense strand
aggaaacugagcccaauua

SEQ ID NO: 120769 - RNA, 19 nt, Homo sapiens
  misc_RNA (1)...(19): siRNA sense strand
ucuccaggaugcagugaaa

SEQ ID NO: 120770 - RNA, 19 nt, Homo sapiens
  misc_RNA (1)...(19): siRNA sense strand
ucaggaccuucuugaacuu

SEQ ID NO: 120771 - RNA, 19 nt, Homo sapiens
  misc_RNA (1)...(19): siRNA sense strand
gaugugagacugaccuucu

SEQ ID NO: 120772 - RNA, 19 nt, Homo sapiens
  misc_RNA (1)...(19): siRNA sense strand
ucaagaacacaccgcugua

SEQ ID NO: 120773 - RNA, 19 nt, Homo sapiens
  misc_RNA (1)...(19): siRNA sense strand
gaacuucagcguggacaag

SEQ ID NO: 120774 - RNA, 19 nt, Homo sapiens
  misc_RNA (1)...(19): siRNA sense strand
guccugauucgcauccuua

SEQ ID NO: 120775 - RNA, 19 nt, Homo sapiens
  misc_RNA (1)...(19): siRNA sense strand
gcagcccacagcccaguuu

SEQ ID NO: 120776 - RNA, 19 nt, Homo sapiens
  misc_RNA (1)...(19): siRNA sense strand
caauuaccaaguccugauu

SEQ ID NO: 120777 - RNA, 19 nt, Homo sapiens
  misc_RNA (1)...(19): siRNA sense strand
ucaucaagcccuccaggaa

SEQ ID NO: 120778 - RNA, 19 nt, Homo sapiens
  misc_RNA (1)...(19): siRNA sense strand
cagaaggaccuagcagaga

SEQ ID NO: 120779 - RNA, 19 nt, Homo sapiens
  misc_RNA (1)...(19): siRNA sense strand
cggccuagcuucggugauc

SEQ ID NO: 120780 - RNA, 19 nt, Homo sapiens
  misc_RNA (1)...(19): siRNA sense strand
ggaaacugagcccaauuac

SEQ ID NO: 120781 - RNA, 19 nt, Homo sapiens
  misc_RNA (1)...(19): siRNA sense strand
cuacugagggccauuacug

SEQ ID NO: 120782 - RNA, 19 nt, Homo sapiens
  misc_RNA (1)...(19): siRNA sense strand
gcugacaaacuucaucaag

SEQ ID NO: 120783 - RNA, 19 nt, Homo sapiens
  misc_RNA (1)...(19): siRNA sense strand
gcagucuacaaacacaauu

SEQ ID NO: 120784 - RNA, 19 nt, Homo sapiens
  misc_RNA (1)...(19): siRNA sense strand
gaguucaggaagaaauuug

SEQ ID NO: 120785 - RNA, 19 nt, Homo sapiens
  misc_RNA (1)...(19): siRNA sense strand
ccaauuaccaaguccugau

SEQ ID NO: 120786 - RNA, 19 nt, Homo sapiens
  misc_RNA (1)...(19): siRNA sense strand
aggaagaaauuugggaagu

SEQ ID NO: 120787 - RNA, 19 nt, Homo sapiens
  misc_RNA (1)...(19): siRNA sense strand
agaacacaccgcuguacuu

SEQ ID NO: 120788 - RNA, 19 nt, Homo sapiens
  misc_RNA (1)...(19): siRNA sense strand
cuacucuucucuccaggau

SEQ ID NO: 120789 - RNA, 19 nt, Homo sapiens
  misc_RNA (1)...(19): siRNA sense strand
uccgaguguuugaucagua

SEQ ID NO: 120790 - RNA, 19 nt, Homo sapiens
  misc_RNA (1)...(19): siRNA sense strand
ccggcaaccuggagaggau

SEQ ID NO: 120791 - RNA, 19 nt, Homo sapiens
  misc_RNA (1)...(19): siRNA sense strand
ccaguuugacgcccaggaa

SEQ ID NO: 120792 - RNA, 19 nt, Homo sapiens
  misc_RNA (1)...(19): siRNA sense strand
auccuuaucucucgaugug

SEQ ID NO: 120793 - RNA, 19 nt, Homo sapiens
  misc_RNA (1)...(19): siRNA sense strand
gcucugcucggccuagcuu

SEQ ID NO: 120794 - RNA, 19 nt, Homo sapiens
  misc_RNA (1)...(19): siRNA sense strand
ccagcgaaauccugaacac

SEQ ID NO: 120795 - RNA, 19 nt, Homo sapiens
  misc_RNA (1)...(19): siRNA sense strand
guuugacgcccaggaauug

SEQ ID NO: 120796 - RNA, 19 nt, Homo sapiens
  misc_RNA (1)...(19): siRNA sense strand
cuguggacguggccauuga

SEQ ID NO: 120797 - RNA, 19 nt, Homo sapiens
  misc_RNA (1)...(19): siRNA sense strand
caagaacacaccgcuguac

SEQ ID NO: 120798 - RNA, 19 nt, Homo sapiens
  misc_RNA (1)...(19): siRNA sense strand
gccuggcagucuacaaaca

SEQ ID NO: 120799 - RNA, 19 nt, Homo sapiens
  misc_RNA (1)...(19): siRNA sense strand
gaacuuggcucucuaucaa

SEQ ID NO: 120800 - RNA, 19 nt, Homo sapiens
  misc_RNA (1)...(19): siRNA sense strand
gcagaugacuuuaaagaga

SEQ ID NO: 120801 - RNA, 19 nt, Homo sapiens
  misc_RNA (1)...(19): siRNA sense strand
ggugugagcuggaacaaau

SEQ ID NO: 120802 - RNA, 19 nt, Homo sapiens
  misc_RNA (1)...(19): siRNA sense strand
uagaaagucugaaagaaga

SEQ ID NO: 120803 - RNA, 19 nt, Homo sapiens
  misc_RNA (1)...(19): siRNA sense strand
gagcagaugacuuuaaaga

SEQ ID NO: 120804 - RNA, 19 nt, Homo sapiens
  misc_RNA (1)...(19): siRNA sense strand
ggaaauuaacucucuguau

SEQ ID NO: 120805 - RNA, 19 nt, Homo sapiens
  misc_RNA (1)...(19): siRNA sense strand
gcacuggucuggacgacau

SEQ ID NO: 120806 - RNA, 19 nt, Homo sapiens
  misc_RNA (1)...(19): siRNA sense strand
ggagagagauguugaaaag

SEQ ID NO: 120807 - RNA, 19 nt, Homo sapiens
  misc_RNA (1)...(19): siRNA sense strand
cggagcagaugacuuuaaa

SEQ ID NO: 120808 - RNA, 19 nt, Homo sapiens
  misc_RNA (1)...(19): siRNA sense strand
ggaccuggagagucaaaua

SEQ ID NO: 120809 - RNA, 19 nt, Homo sapiens
  misc_RNA (1)...(19): siRNA sense strand
gagcagccauuucgaaagg

SEQ ID NO: 120810 - RNA, 19 nt, Homo sapiens
  misc_RNA (1)...(19): siRNA sense strand
aaauggaccuggagaguca

SEQ ID NO: 120811 - RNA, 19 nt, Homo sapiens
  misc_RNA (1)...(19): siRNA sense strand
ggaugcaccuggagagcaa

SEQ ID NO: 120812 - RNA, 19 nt, Homo sapiens
  misc_RNA (1)...(19): siRNA sense strand
ggccggagcagaugacuuu

SEQ ID NO: 120813 - RNA, 19 nt, Homo sapiens
  misc_RNA (1)...(19): siRNA sense strand
uggaauauauggccaaagu

SEQ ID NO: 120814 - RNA, 19 nt, Homo sapiens
  misc_RNA (1)...(19): siRNA sense strand
gucaggagcuggaaacaca

SEQ ID NO: 120815 - RNA, 19 nt, Homo sapiens
  misc_RNA (1)...(19): siRNA sense strand
gaagaacuuggcucucuau

SEQ ID NO: 120816 - RNA, 19 nt, Homo sapiens
  misc_RNA (1)...(19): siRNA sense strand
gcaagugccagcugcagaa

SEQ ID NO: 120817 - RNA, 19 nt, Homo sapiens
  misc_RNA (1)...(19): siRNA sense strand
caucagcagugucuuccuu

SEQ ID NO: 120818 - RNA, 19 nt, Homo sapiens
  misc_RNA (1)...(19): siRNA sense strand
ugaagcugcugcacaaaca

SEQ ID NO: 120819 - RNA, 19 nt, Homo sapiens
  misc_RNA (1)...(19): siRNA sense strand
agaagaacuuggcucucua

SEQ ID NO: 120820 - RNA, 19 nt, Homo sapiens
  misc_RNA (1)...(19): siRNA sense strand
gaaacuaugaagaggaugu

SEQ ID NO: 120821 - RNA, 19 nt, Homo sapiens
  misc_RNA (1)...(19): siRNA sense strand
aaacacaacugcggaugca

SEQ ID NO: 120822 - RNA, 19 nt, Homo sapiens
  misc_RNA (1)...(19): siRNA sense strand
gagggaccauggugcuguu

SEQ ID NO: 120823 - RNA, 19 nt, Homo sapiens
  misc_RNA (1)...(19): siRNA sense strand
aagaaacuaugaagaggau

SEQ ID NO: 120824 - RNA, 19 nt, Homo sapiens
  misc_RNA (1)...(19): siRNA sense strand
ccuggagagucaaauagaa

SEQ ID NO: 120825 - RNA, 19 nt, Homo sapiens
  misc_RNA (1)...(19): siRNA sense strand
ccaaagugcacgcccuuga

SEQ ID NO: 120826 - RNA, 19 nt, Homo sapiens
  misc_RNA (1)...(19): siRNA sense strand
agagagauguugaaaagaa

SEQ ID NO: 120827 - RNA, 19 nt, Homo sapiens
  misc_RNA (1)...(19): siRNA sense strand
aagaagaacuuggcucucu

SEQ ID NO: 120828 - RNA, 19 nt, Homo sapiens
  misc_RNA (1)...(19): siRNA sense strand
gagacgaucagaauucagu

SEQ ID NO: 120829 - RNA, 19 nt, Homo sapiens
  misc_RNA (1)...(19): siRNA sense strand
gaggcuaauuugacuaaaa

SEQ ID NO: 120830 - RNA, 19 nt, Homo sapiens
  misc_RNA (1)...(19): siRNA sense strand
ggagaacaccuugcacgau

SEQ ID NO: 120831 - RNA, 19 nt, Homo sapiens
  misc_RNA (1)...(19): siRNA sense strand
gguggaauauauggccaaa

SEQ ID NO: 120832 - RNA, 19 nt, Homo sapiens
  misc_RNA (1)...(19): siRNA sense strand
gaauucagugggagagaga

SEQ ID NO: 120833 - RNA, 19 nt, Homo sapiens
  misc_RNA (1)...(19): siRNA sense strand
caaauagaaagucugaaag

SEQ ID NO: 120834 - RNA, 19 nt, Homo sapiens
  misc_RNA (1)...(19): siRNA sense strand
ggaccauggugcuguugag

SEQ ID NO: 120835 - RNA, 19 nt, Homo sapiens
  misc_RNA (1)...(19): siRNA sense strand
gaaacgaggccuggagaac

SEQ ID NO: 120836 - RNA, 19 nt, Homo sapiens
  misc_RNA (1)...(19): siRNA sense strand
gcugccugguggaauauau

SEQ ID NO: 120837 - RNA, 19 nt, Homo sapiens
  misc_RNA (1)...(19): siRNA sense strand
aggcggagcucagggaaau

SEQ ID NO: 120838 - RNA, 19 nt, Homo sapiens
  misc_RNA (1)...(19): siRNA sense strand
gcuccaagcuaagcaacag

SEQ ID NO: 120839 - RNA, 19 nt, Homo sapiens
  misc_RNA (1)...(19): siRNA sense strand
ccuccaggcugagacagaa

SEQ ID NO: 120840 - RNA, 19 nt, Homo sapiens
  misc_RNA (1)...(19): siRNA sense strand
ugaugaggcuaauuugacu

SEQ ID NO: 120841 - RNA, 19 nt, Homo sapiens
  misc_RNA (1)...(19): siRNA sense strand
gcagaagaggaaauuaacu

SEQ ID NO: 120842 - RNA, 19 nt, Homo sapiens
  misc_RNA (1)...(19): siRNA sense strand
aaacgaggccuggagaaca

SEQ ID NO: 120843 - RNA, 19 nt, Homo sapiens
  misc_RNA (1)...(19): siRNA sense strand
gaggaaauuaacucucugu

SEQ ID NO: 120844 - RNA, 19 nt, Homo sapiens
  misc_RNA (1)...(19): siRNA sense strand
cagaagaggaaauuaacuc

SEQ ID NO: 120845 - RNA, 19 nt, Homo sapiens
  misc_RNA (1)...(19): siRNA sense strand
gaccuggagagucaaauag

SEQ ID NO: 120846 - RNA, 19 nt, Homo sapiens
  misc_RNA (1)...(19): siRNA sense strand
ggcugagacagaauccuua

SEQ ID NO: 120847 - RNA, 19 nt, Homo sapiens
  misc_RNA (1)...(19): siRNA sense strand
ggaauauauggccaaagug

SEQ ID NO: 120848 - RNA, 19 nt, Homo sapiens
  misc_RNA (1)...(19): siRNA sense strand
ggugaggcagucuuggaaa

SEQ ID NO: 120849 - RNA, 19 nt, Homo sapiens
  misc_RNA (1)...(19): siRNA sense strand
ggggcugccugguggaaua

SEQ ID NO: 120850 - RNA, 19 nt, Homo sapiens
  misc_RNA (1)...(19): siRNA sense strand
gaugaggcuaauuugacua

SEQ ID NO: 120851 - RNA, 19 nt, Homo sapiens
  misc_RNA (1)...(19): siRNA sense strand
caggaccaaugccaugagu

SEQ ID NO: 120852 - RNA, 19 nt, Homo sapiens
  misc_RNA (1)...(19): siRNA sense strand
ucagcagugucuuccuuca

SEQ ID NO: 120853 - RNA, 19 nt, Homo sapiens
  misc_RNA (1)...(19): siRNA sense strand
agucaaauagaaagucuga

SEQ ID NO: 120854 - RNA, 19 nt, Homo sapiens
  misc_RNA (1)...(19): siRNA sense strand
ggagagucaaauagaaagu

SEQ ID NO: 120855 - RNA, 19 nt, Homo sapiens
  misc_RNA (1)...(19): siRNA sense strand
ccggagcagaugacuuuaa

SEQ ID NO: 120856 - RNA, 19 nt, Homo sapiens
  misc_RNA (1)...(19): siRNA sense strand
gggugaggcagucuuggaa

SEQ ID NO: 120857 - RNA, 19 nt, Homo sapiens
  misc_RNA (1)...(19): siRNA sense strand
agugccagcugcagaagga

SEQ ID NO: 120858 - RNA, 19 nt, Homo sapiens
  misc_RNA (1)...(19): siRNA sense strand
auagaaagucugaaagaag

SEQ ID NO: 120859 - RNA, 19 nt, Homo sapiens
  misc_RNA (1)...(19): siRNA sense strand
agagucaaauagaaagucu

SEQ ID NO: 120860 - RNA, 19 nt, Homo sapiens
  misc_RNA (1)...(19): siRNA sense strand
caaagugcacgcccuugag

SEQ ID NO: 120861 - RNA, 19 nt, Homo sapiens
  misc_RNA (1)...(19): siRNA sense strand
cuggagagucaaauagaaa

SEQ ID NO: 120862 - RNA, 19 nt, Homo sapiens
  misc_RNA (1)...(19): siRNA sense strand
auccuuacgugcccugaaa

SEQ ID NO: 120863 - RNA, 19 nt, Homo sapiens
  misc_RNA (1)...(19): siRNA sense strand
ggcagggugugagcuggaa

SEQ ID NO: 120864 - RNA, 19 nt, Homo sapiens
  misc_RNA (1)...(19): siRNA sense strand
gagugagaggcgaguggua

SEQ ID NO: 120865 - RNA, 19 nt, Homo sapiens
  misc_RNA (1)...(19): siRNA sense strand
gaaaguaggcauaguaaga

SEQ ID NO: 120866 - RNA, 19 nt, Homo sapiens
  misc_RNA (1)...(19): siRNA sense strand
guagauggguuuaaugugu

SEQ ID NO: 120867 - RNA, 19 nt, Homo sapiens
  misc_RNA (1)...(19): siRNA sense strand
caagaaaguaggcauagua

SEQ ID NO: 120868 - RNA, 19 nt, Homo sapiens
  misc_RNA (1)...(19): siRNA sense strand
caggugaugugauuacuuu

SEQ ID NO: 120869 - RNA, 19 nt, Homo sapiens
  misc_RNA (1)...(19): siRNA sense strand
ggaauuaaaggcuugauau

SEQ ID NO: 120870 - RNA, 19 nt, Homo sapiens
  misc_RNA (1)...(19): siRNA sense strand
cagcaaagaauccaaguuu

SEQ ID NO: 120871 - RNA, 19 nt, Homo sapiens
  misc_RNA (1)...(19): siRNA sense strand
gcaaagcuccaaagagaau

SEQ ID NO: 120872 - RNA, 19 nt, Homo sapiens
  misc_RNA (1)...(19): siRNA sense strand
ugacaaaccaggagaaguu

SEQ ID NO: 120873 - RNA, 19 nt, Homo sapiens
  misc_RNA (1)...(19): siRNA sense strand
ccucaggcauuccagauuu

SEQ ID NO: 120874 - RNA, 19 nt, Homo sapiens
  misc_RNA (1)...(19): siRNA sense strand
gucaaggcuucguaucuua

SEQ ID NO: 120875 - RNA, 19 nt, Homo sapiens
  misc_RNA (1)...(19): siRNA sense strand
caaaaucgaugcaaacaau

SEQ ID NO: 120876 - RNA, 19 nt, Homo sapiens
  misc_RNA (1)...(19): siRNA sense strand
gcaaagaauccaaguuuac

SEQ ID NO: 120877 - RNA, 19 nt, Homo sapiens
  misc_RNA (1)...(19): siRNA sense strand
caacuagggacacaauauu

SEQ ID NO: 120878 - RNA, 19 nt, Homo sapiens
  misc_RNA (1)...(19): siRNA sense strand
gcaacuagggacacaauau

SEQ ID NO: 120879 - RNA, 19 nt, Homo sapiens
  misc_RNA (1)...(19): siRNA sense strand
gaaauuguagauggguuua

SEQ ID NO: 120880 - RNA, 19 nt, Homo sapiens
  misc_RNA (1)...(19): siRNA sense strand
ggaguggauuacugugauu

SEQ ID NO: 120881 - RNA, 19 nt, Homo sapiens
  misc_RNA (1)...(19): siRNA sense strand
gguggagaauggaaacuga

SEQ ID NO: 120882 - RNA, 19 nt, Homo sapiens
  misc_RNA (1)...(19): siRNA sense strand
aaguuuaccuucaagauga

SEQ ID NO: 120883 - RNA, 19 nt, Homo sapiens
  misc_RNA (1)...(19): siRNA sense strand
ggaguuuguugaccucaug

SEQ ID NO: 120884 - RNA, 19 nt, Homo sapiens
  misc_RNA (1)...(19): siRNA sense strand
uuacacaacugggaagcua

SEQ ID NO: 120885 - RNA, 19 nt, Homo sapiens
  misc_RNA (1)...(19): siRNA sense strand
caagaugaauccaggugau

SEQ ID NO: 120886 - RNA, 19 nt, Homo sapiens
  misc_RNA (1)...(19): siRNA sense strand
agcaaagaauccaaguuua

SEQ ID NO: 120887 - RNA, 19 nt, Homo sapiens
  misc_RNA (1)...(19): siRNA sense strand
gaauccaaguuuaccuuca

SEQ ID NO: 120888 - RNA, 19 nt, Homo sapiens
  misc_RNA (1)...(19): siRNA sense strand
ccgaugagcauuacaguga

SEQ ID NO: 120889 - RNA, 19 nt, Homo sapiens
  misc_RNA (1)...(19): siRNA sense strand
uggaagcucuugaugugaa

SEQ ID NO: 120890 - RNA, 19 nt, Homo sapiens
  misc_RNA (1)...(19): siRNA sense strand
gaugagcauuacagugaau

SEQ ID NO: 120891 - RNA, 19 nt, Homo sapiens
  misc_RNA (1)...(19): siRNA sense strand
gcuccaaagagaauuguuu

SEQ ID NO: 120892 - RNA, 19 nt, Homo sapiens
  misc_RNA (1)...(19): siRNA sense strand
caaacaauguggcuuacac

SEQ ID NO: 120893 - RNA, 19 nt, Homo sapiens
  misc_RNA (1)...(19): siRNA sense strand
uaagcuuucacacugauua

SEQ ID NO: 120894 - RNA, 19 nt, Homo sapiens
  misc_RNA (1)...(19): siRNA sense strand
caccggagcaucugacaaa

SEQ ID NO: 120895 - RNA, 19 nt, Homo sapiens
  misc_RNA (1)...(19): siRNA sense strand
caaguuuaccuucaagaug

SEQ ID NO: 120896 - RNA, 19 nt, Homo sapiens
  misc_RNA (1)...(19): siRNA sense strand
ugauaaaggccaagugguu

SEQ ID NO: 120897 - RNA, 19 nt, Homo sapiens
  misc_RNA (1)...(19): siRNA sense strand
caacuucaauaacgcaacu

SEQ ID NO: 120898 - RNA, 19 nt, Homo sapiens
  misc_RNA (1)...(19): siRNA sense strand
aguggaagcucuugaugug

SEQ ID NO: 120899 - RNA, 19 nt, Homo sapiens
  misc_RNA (1)...(19): siRNA sense strand
ggcagaggguggagaaugg

SEQ ID NO: 120900 - RNA, 19 nt, Homo sapiens
  misc_RNA (1)...(19): siRNA sense strand
ugucaaggcuucguaucuu

SEQ ID NO: 120901 - RNA, 19 nt, Homo sapiens
  misc_RNA (1)...(19): siRNA sense strand
ugaagcaggaacugagaua

SEQ ID NO: 120902 - RNA, 19 nt, Homo sapiens
  misc_RNA (1)...(19): siRNA sense strand
gcucuccacccucaagaaa

SEQ ID NO: 120903 - RNA, 19 nt, Homo sapiens
  misc_RNA (1)...(19): siRNA sense strand
gauaucccgccaucuagaa

SEQ ID NO: 120904 - RNA, 19 nt, Homo sapiens
  misc_RNA (1)...(19): siRNA sense strand
ggacuuuacagacauugga

SEQ ID NO: 120905 - RNA, 19 nt, Homo sapiens
  misc_RNA (1)...(19): siRNA sense strand
ggauggguuuccucuaucu

SEQ ID NO: 120906 - RNA, 19 nt, Homo sapiens
  misc_RNA (1)...(19): siRNA sense strand
guucgcaucaacuucaaua

SEQ ID NO: 120907 - RNA, 19 nt, Homo sapiens
  misc_RNA (1)...(19): siRNA sense strand
gcuaagcuuucacacugau

SEQ ID NO: 120908 - RNA, 19 nt, Homo sapiens
  misc_RNA (1)...(19): siRNA sense strand
ugaugaacaugcauacaag

SEQ ID NO: 120909 - RNA, 19 nt, Homo sapiens
  misc_RNA (1)...(19): siRNA sense strand
gggauguggucaugucaag

SEQ ID NO: 120910 - RNA, 19 nt, Homo sapiens
  misc_RNA (1)...(19): siRNA sense strand
gauaacuggcgcuuacuuc

SEQ ID NO: 120911 - RNA, 19 nt, Homo sapiens
  misc_RNA (1)...(19): siRNA sense strand
aagaaaguaggcauaguaa

SEQ ID NO: 120912 - RNA, 19 nt, Homo sapiens
  misc_RNA (1)...(19): siRNA sense strand
ccaagugguucgcaucaac

SEQ ID NO: 120913 - RNA, 19 nt, Homo sapiens
  misc_RNA (1)...(19): siRNA sense strand
ugacggggcucauuugaug

SEQ ID NO: 120914 - RNA, 19 nt, Homo sapiens
  misc_RNA (1)...(19): siRNA sense strand
gggacacaauauuugaugu

SEQ ID NO: 120915 - RNA, 19 nt, Homo sapiens
  misc_RNA (1)...(19): siRNA sense strand
uaacgcaacuagggacaca

SEQ ID NO: 120916 - RNA, 19 nt, Homo sapiens
  misc_RNA (1)...(19): siRNA sense strand
cgaugagcauuacagugaa

SEQ ID NO: 120917 - RNA, 19 nt, Homo sapiens
  misc_RNA (1)...(19): siRNA sense strand
aauccaaguuuaccuucaa

SEQ ID NO: 120918 - RNA, 19 nt, Homo sapiens
  misc_RNA (1)...(19): siRNA sense strand
gcuguaugguugagagaca

SEQ ID NO: 120919 - RNA, 19 nt, Homo sapiens
  misc_RNA (1)...(19): siRNA sense strand
ucaaggcuucguaucuuaa

SEQ ID NO: 120920 - RNA, 19 nt, Homo sapiens
  misc_RNA (1)...(19): siRNA sense strand
gaagcaggaacugagauau

SEQ ID NO: 120921 - RNA, 19 nt, Homo sapiens
  misc_RNA (1)...(19): siRNA sense strand
gggcucauuugaugcagau

SEQ ID NO: 120922 - RNA, 19 nt, Homo sapiens
  misc_RNA (1)...(19): siRNA sense strand
gcucugaaggaguuuguug

SEQ ID NO: 120923 - RNA, 19 nt, Homo sapiens
  misc_RNA (1)...(19): siRNA sense strand
ccucaagaaaguaggcaua

SEQ ID NO: 120924 - RNA, 19 nt, Homo sapiens
  misc_RNA (1)...(19): siRNA sense strand
ucugauugcuaccuggauu

SEQ ID NO: 120925 - RNA, 19 nt, Homo sapiens
  misc_RNA (1)...(19): siRNA sense strand
aaauaauccucaggcauuc

SEQ ID NO: 120926 - RNA, 19 nt, Homo sapiens
  misc_RNA (1)...(19): siRNA sense strand
aaaauaauccucaggcauu

SEQ ID NO: 120927 - RNA, 19 nt, Homo sapiens
  misc_RNA (1)...(19): siRNA sense strand
uuuccucuaucucacauuu

SEQ ID NO: 120928 - RNA, 19 nt, Homo sapiens
  misc_RNA (1)...(19): siRNA sense strand
cggagcaucugacaaacca

SEQ ID NO: 120929 - RNA, 19 nt, Homo sapiens
  misc_RNA (1)...(19): siRNA sense strand
cuagggacacaauauuuga

SEQ ID NO: 120930 - RNA, 19 nt, Homo sapiens
  misc_RNA (1)...(19): siRNA sense strand
acggaaacuucuaguggaa

SEQ ID NO: 120931 - RNA, 19 nt, Homo sapiens
  misc_RNA (1)...(19): siRNA sense strand
gcaaaagcacggaaacuuc

SEQ ID NO: 120932 - RNA, 19 nt, Homo sapiens
  misc_RNA (1)...(19): siRNA sense strand
ucaagaaaguaggcauagu

SEQ ID NO: 120933 - RNA, 19 nt, Homo sapiens
  misc_RNA (1)...(19): siRNA sense strand
gcuugauauuugacagaaa

SEQ ID NO: 120934 - RNA, 19 nt, Homo sapiens
  misc_RNA (1)...(19): siRNA sense strand
cagcuacccacuuuggauu

SEQ ID NO: 120935 - RNA, 19 nt, Homo sapiens
  misc_RNA (1)...(19): siRNA sense strand
uaaggcagaggguggagaa

SEQ ID NO: 120936 - RNA, 19 nt, Homo sapiens
  misc_RNA (1)...(19): siRNA sense strand
ggcuugauauuugacagaa

SEQ ID NO: 120937 - RNA, 19 nt, Homo sapiens
  misc_RNA (1)...(19): siRNA sense strand
gcuaugaagcaggaacuga

SEQ ID NO: 120938 - RNA, 19 nt, Homo sapiens
  misc_RNA (1)...(19): siRNA sense strand
augcaaacaauguggcuua

SEQ ID NO: 120939 - RNA, 19 nt, Homo sapiens
  misc_RNA (1)...(19): siRNA sense strand
ucuccacccucaagaaagu

SEQ ID NO: 120940 - RNA, 19 nt, Homo sapiens
  misc_RNA (1)...(19): siRNA sense strand
gugaauuccaggcugauug

SEQ ID NO: 120941 - RNA, 19 nt, Homo sapiens
  misc_RNA (1)...(19): siRNA sense strand
ccaagcaggccagagcaaa

SEQ ID NO: 120942 - RNA, 19 nt, Homo sapiens
  misc_RNA (1)...(19): siRNA sense strand
uuugauaacuggcgcuuac

SEQ ID NO: 120943 - RNA, 19 nt, Homo sapiens
  misc_RNA (1)...(19): siRNA sense strand
ccaaguuuaccuucaagau

SEQ ID NO: 120944 - RNA, 19 nt, Homo sapiens
  misc_RNA (1)...(19): siRNA sense strand
ccucaugaacagcaaagaa

SEQ ID NO: 120945 - RNA, 19 nt, Homo sapiens
  misc_RNA (1)...(19): siRNA sense strand
agaaauuguagauggguuu

SEQ ID NO: 120946 - RNA, 19 nt, Homo sapiens
  misc_RNA (1)...(19): siRNA sense strand
guaggcauaguaagacuca

SEQ ID NO: 120947 - RNA, 19 nt, Homo sapiens
  misc_RNA (1)...(19): siRNA sense strand
uggaguggauuacugugau

SEQ ID NO: 120948 - RNA, 19 nt, Homo sapiens
  misc_RNA (1)...(19): siRNA sense strand
uggaauuaaaggcuugaua

SEQ ID NO: 120949 - RNA, 19 nt, Homo sapiens
  misc_RNA (1)...(19): siRNA sense strand
aacuggcgcuuacuucaug

SEQ ID NO: 120950 - RNA, 19 nt, Homo sapiens
  misc_RNA (1)...(19): siRNA sense strand
gugaugugauuacuuuuga

SEQ ID NO: 120951 - RNA, 19 nt, Homo sapiens
  misc_RNA (1)...(19): siRNA sense strand
gaugaauccaggugaugug

SEQ ID NO: 120952 - RNA, 19 nt, Homo sapiens
  misc_RNA (1)...(19): siRNA sense strand
augcugcucugaaggaguu

SEQ ID NO: 120953 - RNA, 19 nt, Homo sapiens
  misc_RNA (1)...(19): siRNA sense strand
cagcuucuucacugcauaa

SEQ ID NO: 120954 - RNA, 19 nt, Homo sapiens
  misc_RNA (1)...(19): siRNA sense strand
aagauaugaugaacaugca

SEQ ID NO: 120955 - RNA, 19 nt, Homo sapiens
  misc_RNA (1)...(19): siRNA sense strand
cuaccuggauucugcaaaa

SEQ ID NO: 120956 - RNA, 19 nt, Homo sapiens
  misc_RNA (1)...(19): siRNA sense strand
gccaagugguucgcaucaa

SEQ ID NO: 120957 - RNA, 19 nt, Homo sapiens
  misc_RNA (1)...(19): siRNA sense strand
cuucuucacugcauaaagc

SEQ ID NO: 120958 - RNA, 19 nt, Homo sapiens
  misc_RNA (1)...(19): siRNA sense strand
ucagcuucuucacugcaua

SEQ ID NO: 120959 - RNA, 19 nt, Homo sapiens
  misc_RNA (1)...(19): siRNA sense strand
gcaaacaauguggcuuaca

SEQ ID NO: 120960 - RNA, 19 nt, Homo sapiens
  misc_RNA (1)...(19): siRNA sense strand
uaacuggcgcuuacuucau

SEQ ID NO: 120961 - RNA, 19 nt, Homo sapiens
  misc_RNA (1)...(19): siRNA sense strand
ggaagcucuugaugugaac

SEQ ID NO: 120962 - RNA, 19 nt, Homo sapiens
  misc_RNA (1)...(19): siRNA sense strand
cgcaucaacuucaauaacg

SEQ ID NO: 120963 - RNA, 19 nt, Homo sapiens
  misc_RNA (1)...(19): siRNA sense strand
gggugauucagaaauugua

SEQ ID NO: 120964 - RNA, 19 nt, Homo sapiens
  misc_RNA (1)...(19): siRNA sense strand
ccucuaccuuuguggacuu

SEQ ID NO: 120965 - RNA, 19 nt, Homo sapiens
  misc_RNA (1)...(19): siRNA sense strand
ggacggagagcuuggauua

SEQ ID NO: 120966 - RNA, 19 nt, Homo sapiens
  misc_RNA (1)...(19): siRNA sense strand
agaaggagcuuuauaacaa

SEQ ID NO: 120967 - RNA, 19 nt, Homo sapiens
  misc_RNA (1)...(19): siRNA sense strand
ggaagaacuuggacgaaug

SEQ ID NO: 120968 - RNA, 19 nt, Homo sapiens
  misc_RNA (1)...(19): siRNA sense strand
ggaaauggccgagggaaug

SEQ ID NO: 120969 - RNA, 19 nt, Homo sapiens
  misc_RNA (1)...(19): siRNA sense strand
ggcaagagcuuccgcuaca

SEQ ID NO: 120970 - RNA, 19 nt, Homo sapiens
  misc_RNA (1)...(19): siRNA sense strand
guaaggagcaccugcagaa

SEQ ID NO: 120971 - RNA, 19 nt, Homo sapiens
  misc_RNA (1)...(19): siRNA sense strand
cgacauugcuguguacuuc

SEQ ID NO: 120972 - RNA, 19 nt, Homo sapiens
  misc_RNA (1)...(19): siRNA sense strand
ggcagaaggagcuuuauaa

SEQ ID NO: 120973 - RNA, 19 nt, Homo sapiens
  misc_RNA (1)...(19): siRNA sense strand
gcaagagccucaucaucca

SEQ ID NO: 120974 - RNA, 19 nt, Homo sapiens
  misc_RNA (1)...(19): siRNA sense strand
ccacggaucccaauucaga

SEQ ID NO: 120975 - RNA, 19 nt, Homo sapiens
  misc_RNA (1)...(19): siRNA sense strand
ggaaccacauggagagcaa

SEQ ID NO: 120976 - RNA, 19 nt, Homo sapiens
  misc_RNA (1)...(19): siRNA sense strand
gaaggagcuuuauaacaac

SEQ ID NO: 120977 - RNA, 19 nt, Homo sapiens
  misc_RNA (1)...(19): siRNA sense strand
gaagcuggccgacugugaa

SEQ ID NO: 120978 - RNA, 19 nt, Homo sapiens
  misc_RNA (1)...(19): siRNA sense strand
gaccucuugucccggauua

SEQ ID NO: 120979 - RNA, 19 nt, Homo sapiens
  misc_RNA (1)...(19): siRNA sense strand
agagagaaaucccaaugga

SEQ ID NO: 120980 - RNA, 19 nt, Homo sapiens
  misc_RNA (1)...(19): siRNA sense strand
gaagacgaguggaagaacu

SEQ ID NO: 120981 - RNA, 19 nt, Homo sapiens
  misc_RNA (1)...(19): siRNA sense strand
aaagacggccguggaauuu

SEQ ID NO: 120982 - RNA, 19 nt, Homo sapiens
  misc_RNA (1)...(19): siRNA sense strand
caucucagcacaugacauu

SEQ ID NO: 120983 - RNA, 19 nt, Homo sapiens
  misc_RNA (1)...(19): siRNA sense strand
cgagcggccuuuccaaugu

SEQ ID NO: 120984 - RNA, 19 nt, Homo sapiens
  misc_RNA (1)...(19): siRNA sense strand
gcaagagcuuccgcuacaa

SEQ ID NO: 120985 - RNA, 19 nt, Homo sapiens
  misc_RNA (1)...(19): siRNA sense strand
caugcaggcucaagaaugg

SEQ ID NO: 120986 - RNA, 19 nt, Homo sapiens
  misc_RNA (1)...(19): siRNA sense strand
acggagagcuuggauuaga

SEQ ID NO: 120987 - RNA, 19 nt, Homo sapiens
  misc_RNA (1)...(19): siRNA sense strand
gaagaacuuggacgaaugg

SEQ ID NO: 120988 - RNA, 19 nt, Homo sapiens
  misc_RNA (1)...(19): siRNA sense strand
ccaagguuccagugacuuu

SEQ ID NO: 120989 - RNA, 19 nt, Homo sapiens
  misc_RNA (1)...(19): siRNA sense strand
gagcggccuuuccaaugug

SEQ ID NO: 120990 - RNA, 19 nt, Homo sapiens
  misc_RNA (1)...(19): siRNA sense strand
cagaaggagcuuuauaaca

SEQ ID NO: 120991 - RNA, 19 nt, Homo sapiens
  misc_RNA (1)...(19): siRNA sense strand
uggaagaacuuggacgaau

SEQ ID NO: 120992 - RNA, 19 nt, Homo sapiens
  misc_RNA (1)...(19): siRNA sense strand
agaggcggcuggagaacuu

SEQ ID NO: 120993 - RNA, 19 nt, Homo sapiens
  misc_RNA (1)...(19): siRNA sense strand
gcagaaggagcuuuauaac

SEQ ID NO: 120994 - RNA, 19 nt, Homo sapiens
  misc_RNA (1)...(19): siRNA sense strand
ggauuuggcagacagagau

SEQ ID NO: 120995 - RNA, 19 nt, Homo sapiens
  misc_RNA (1)...(19): siRNA sense strand
gcgagcggccuuuccaaug

SEQ ID NO: 120996 - RNA, 19 nt, Homo sapiens
  misc_RNA (1)...(19): siRNA sense strand
gaagaagcuggccgacugu

SEQ ID NO: 120997 - RNA, 19 nt, Homo sapiens
  misc_RNA (1)...(19): siRNA sense strand
uggagaacuuggagaacuu

SEQ ID NO: 120998 - RNA, 19 nt, Homo sapiens
  misc_RNA (1)...(19): siRNA sense strand
gccaaugccuuuucaguuc

SEQ ID NO: 120999 - RNA, 19 nt, Homo sapiens
  misc_RNA (1)...(19): siRNA sense strand
acaaggagucgcucaagga

SEQ ID NO: 121000 - RNA, 19 nt, Homo sapiens
  misc_RNA (1)...(19): siRNA sense strand
ggaccacgcgacucaaugg

SEQ ID NO: 121001 - RNA, 19 nt, Homo sapiens
  misc_RNA (1)...(19): siRNA sense strand
ggaauuugggaaccacaug

SEQ ID NO: 121002 - RNA, 19 nt, Homo sapiens
  misc_RNA (1)...(19): siRNA sense strand
cccaauggaucccgaagca

SEQ ID NO: 121003 - RNA, 19 nt, Homo sapiens
  misc_RNA (1)...(19): siRNA sense strand
uggcagaaggagcuuuaua

SEQ ID NO: 121004 - RNA, 19 nt, Homo sapiens
  misc_RNA (1)...(19): siRNA sense strand
ggagcuuuauaacaaccuu

SEQ ID NO: 121005 - RNA, 19 nt, Homo sapiens
  misc_RNA (1)...(19): siRNA sense strand
ccagauagggcaccugucu

SEQ ID NO: 121006 - RNA, 19 nt, Homo sapiens
  misc_RNA (1)...(19): siRNA sense strand
gagagagaaaucccaaugg

SEQ ID NO: 121007 - RNA, 19 nt, Homo sapiens
  misc_RNA (1)...(19): siRNA sense strand
uuaaacaggaggagcauca

SEQ ID NO: 121008 - RNA, 19 nt, Homo sapiens
  misc_RNA (1)...(19): siRNA sense strand
gcgcaagagccucaucauc

SEQ ID NO: 121009 - RNA, 19 nt, Homo sapiens
  misc_RNA (1)...(19): siRNA sense strand
ugugggaucagcaggauuu

SEQ ID NO: 121010 - RNA, 19 nt, Homo sapiens
  misc_RNA (1)...(19): siRNA sense strand
ggagaacuuggagaacuug

SEQ ID NO: 121011 - RNA, 19 nt, Homo sapiens
  misc_RNA (1)...(19): siRNA sense strand
uucccacccuuuccagaua

SEQ ID NO: 121012 - RNA, 19 nt, Homo sapiens
  misc_RNA (1)...(19): siRNA sense strand
ucucucaucucagcacaug

SEQ ID NO: 121013 - RNA, 19 nt, Homo sapiens
  misc_RNA (1)...(19): siRNA sense strand
agacggccguggaauuugg

SEQ ID NO: 121014 - RNA, 19 nt, Homo sapiens
  misc_RNA (1)...(19): siRNA sense strand
agagagagaaaucccaaug

SEQ ID NO: 121015 - RNA, 19 nt, Homo sapiens
  misc_RNA (1)...(19): siRNA sense strand
aauggcagaaggagcuuua

SEQ ID NO: 121016 - RNA, 19 nt, Homo sapiens
  misc_RNA (1)...(19): siRNA sense strand
ggacagccgagaagaagcu

SEQ ID NO: 121017 - RNA, 19 nt, Homo sapiens
  misc_RNA (1)...(19): siRNA sense strand
gauuuggcagacagagaua

SEQ ID NO: 121018 - RNA, 19 nt, Homo sapiens
  misc_RNA (1)...(19): siRNA sense strand
ccaugcaggcucaagaaug

SEQ ID NO: 121019 - RNA, 19 nt, Homo sapiens
  misc_RNA (1)...(19): siRNA sense strand
gcccaugcaggcucaagaa

SEQ ID NO: 121020 - RNA, 19 nt, Homo sapiens
  misc_RNA (1)...(19): siRNA sense strand
gaaauggccgagggaaugc

SEQ ID NO: 121021 - RNA, 19 nt, Homo sapiens
  misc_RNA (1)...(19): siRNA sense strand
caagagcuuccgcuacaag

SEQ ID NO: 121022 - RNA, 19 nt, Homo sapiens
  misc_RNA (1)...(19): siRNA sense strand
gggaaauggccgagggaau

SEQ ID NO: 121023 - RNA, 19 nt, Homo sapiens
  misc_RNA (1)...(19): siRNA sense strand
ucccacggaucccaauuca

SEQ ID NO: 121024 - RNA, 19 nt, Homo sapiens
  misc_RNA (1)...(19): siRNA sense strand
agauagggcaccugucuuc

SEQ ID NO: 121025 - RNA, 19 nt, Homo sapiens
  misc_RNA (1)...(19): siRNA sense strand
ccucuugucccggauuaaa

SEQ ID NO: 121026 - RNA, 19 nt, Homo sapiens
  misc_RNA (1)...(19): siRNA sense strand
gcccacagcagagaucuca

SEQ ID NO: 121027 - RNA, 19 nt, Homo sapiens
  misc_RNA (1)...(19): siRNA sense strand
ggaucccaauucagagucu

SEQ ID NO: 121028 - RNA, 19 nt, Homo sapiens
  misc_RNA (1)...(19): siRNA sense strand
cagcaggauuuggcagaca

SEQ ID NO: 121029 - RNA, 19 nt, Homo sapiens
  misc_RNA (1)...(19): siRNA sense strand
gaagaccuacagccguaag

SEQ ID NO: 121030 - RNA, 19 nt, Homo sapiens
  misc_RNA (1)...(19): siRNA sense strand
gaauaugccugccugaaag

SEQ ID NO: 121031 - RNA, 19 nt, Homo sapiens
  misc_RNA (1)...(19): siRNA sense strand
ggaauaugccugccugaaa

SEQ ID NO: 121032 - RNA, 19 nt, Homo sapiens
  misc_RNA (1)...(19): siRNA sense strand
ugacaucgcuggccuucuu

SEQ ID NO: 121033 - RNA, 19 nt, Homo sapiens
  misc_RNA (1)...(19): siRNA sense strand
gaaagggaccauccucuuc

SEQ ID NO: 121034 - RNA, 19 nt, Homo sapiens
  misc_RNA (1)...(19): siRNA sense strand
ccaagaugcugugaccuuu

SEQ ID NO: 121035 - RNA, 19 nt, Homo sapiens
  misc_RNA (1)...(19): siRNA sense strand
cguagccgcugccuaugua

SEQ ID NO: 121036 - RNA, 19 nt, Homo sapiens
  misc_RNA (1)...(19): siRNA sense strand
caagccgccucccacauug

SEQ ID NO: 121037 - RNA, 19 nt, Homo sapiens
  misc_RNA (1)...(19): siRNA sense strand
ccaagccgccucccacauu

SEQ ID NO: 121038 - RNA, 19 nt, Homo sapiens
  misc_RNA (1)...(19): siRNA sense strand
aagaugcugugaccuuuga

SEQ ID NO: 121039 - RNA, 19 nt, Homo sapiens
  misc_RNA (1)...(19): siRNA sense strand
ccagcauacucaagaagau

SEQ ID NO: 121040 - RNA, 19 nt, Homo sapiens
  misc_RNA (1)...(19): siRNA sense strand
gcggugcaguggcuucaau

SEQ ID NO: 121041 - RNA, 19 nt, Homo sapiens
  misc_RNA (1)...(19): siRNA sense strand
ugaaagggaccauccucuu

SEQ ID NO: 121042 - RNA, 19 nt, Homo sapiens
  misc_RNA (1)...(19): siRNA sense strand
gagcuuagccccaaggaau

SEQ ID NO: 121043 - RNA, 19 nt, Homo sapiens
  misc_RNA (1)...(19): siRNA sense strand
caagaugcugugaccuuug

SEQ ID NO: 121044 - RNA, 19 nt, Homo sapiens
  misc_RNA (1)...(19): siRNA sense strand
aaagggaccauccucuuca

SEQ ID NO: 121045 - RNA, 19 nt, Homo sapiens
  misc_RNA (1)...(19): siRNA sense strand
gccauucucuacgcacuuc

SEQ ID NO: 121046 - RNA, 19 nt, Homo sapiens
  misc_RNA (1)...(19): siRNA sense strand
cgggaggccuuggauguuc

SEQ ID NO: 121047 - RNA, 19 nt, Homo sapiens
  misc_RNA (1)...(19): siRNA sense strand
cagcauacucaagaagauu

SEQ ID NO: 121048 - RNA, 19 nt, Homo sapiens
  misc_RNA (1)...(19): siRNA sense strand
gugcccagcauacucaaga

SEQ ID NO: 121049 - RNA, 19 nt, Homo sapiens
  misc_RNA (1)...(19): siRNA sense strand
ccagcuaugugcaccucau

SEQ ID NO: 121050 - RNA, 19 nt, Homo sapiens
  misc_RNA (1)...(19): siRNA sense strand
gcaaacacuucaacaugua

SEQ ID NO: 121051 - RNA, 19 nt, Homo sapiens
  misc_RNA (1)...(19): siRNA sense strand
caagacagcucgcguguga

SEQ ID NO: 121052 - RNA, 19 nt, Homo sapiens
  misc_RNA (1)...(19): siRNA sense strand
ccacacagcugaaaguauu

SEQ ID NO: 121053 - RNA, 19 nt, Homo sapiens
  misc_RNA (1)...(19): siRNA sense strand
gaaaugggcucgguuuguu

SEQ ID NO: 121054 - RNA, 19 nt, Homo sapiens
  misc_RNA (1)...(19): siRNA sense strand
ggaaguugguuguuauaaa

SEQ ID NO: 121055 - RNA, 19 nt, Homo sapiens
  misc_RNA (1)...(19): siRNA sense strand
guagaaaccuuacuuacug

SEQ ID NO: 121056 - RNA, 19 nt, Homo sapiens
  misc_RNA (1)...(19): siRNA sense strand
gaacauccuuuaguauuga

SEQ ID NO: 121057 - RNA, 19 nt, Homo sapiens
  misc_RNA (1)...(19): siRNA sense strand
ggaacauccuuuaguauug

SEQ ID NO: 121058 - RNA, 19 nt, Homo sapiens
  misc_RNA (1)...(19): siRNA sense strand
gaacccaacggauaguuua

SEQ ID NO: 121059 - RNA, 19 nt, Homo sapiens
  misc_RNA (1)...(19): siRNA sense strand
gaucaugcaugucaaagga

SEQ ID NO: 121060 - RNA, 19 nt, Homo sapiens
  misc_RNA (1)...(19): siRNA sense strand
caauauaccuguucuugau

SEQ ID NO: 121061 - RNA, 19 nt, Homo sapiens
  misc_RNA (1)...(19): siRNA sense strand
guagggaacucugcacuaa

SEQ ID NO: 121062 - RNA, 19 nt, Homo sapiens
  misc_RNA (1)...(19): siRNA sense strand
gcaagaguuugaucgcuuu

SEQ ID NO: 121063 - RNA, 19 nt, Homo sapiens
  misc_RNA (1)...(19): siRNA sense strand
ccagaagucuuguauuguu

SEQ ID NO: 121064 - RNA, 19 nt, Homo sapiens
  misc_RNA (1)...(19): siRNA sense strand
cauggaacauccuuuagua

SEQ ID NO: 121065 - RNA, 19 nt, Homo sapiens
  misc_RNA (1)...(19): siRNA sense strand
gcugggauguuaagaguuu

SEQ ID NO: 121066 - RNA, 19 nt, Homo sapiens
  misc_RNA (1)...(19): siRNA sense strand
ugacagagcugaagaccau

SEQ ID NO: 121067 - RNA, 19 nt, Homo sapiens
  misc_RNA (1)...(19): siRNA sense strand
gauuaaaccuugucauagu

SEQ ID NO: 121068 - RNA, 19 nt, Homo sapiens
  misc_RNA (1)...(19): siRNA sense strand
caacggauaguuuauauug

SEQ ID NO: 121069 - RNA, 19 nt, Homo sapiens
  misc_RNA (1)...(19): siRNA sense strand
gaacucugcacuaaacuuu

SEQ ID NO: 121070 - RNA, 19 nt, Homo sapiens
  misc_RNA (1)...(19): siRNA sense strand
caaaguggacucuuagaaa

SEQ ID NO: 121071 - RNA, 19 nt, Homo sapiens
  misc_RNA (1)...(19): siRNA sense strand
gaaaggaagcauaaagaug

SEQ ID NO: 121072 - RNA, 19 nt, Homo sapiens
  misc_RNA (1)...(19): siRNA sense strand
gaagaauuguauaccuuug

SEQ ID NO: 121073 - RNA, 19 nt, Homo sapiens
  misc_RNA (1)...(19): siRNA sense strand
gggcuaaauugcauuguug

SEQ ID NO: 121074 - RNA, 19 nt, Homo sapiens
  misc_RNA (1)...(19): siRNA sense strand
guauagaccuccagaaguc

SEQ ID NO: 121075 - RNA, 19 nt, Homo sapiens
  misc_RNA (1)...(19): siRNA sense strand
agacaaugguugaaauuug

SEQ ID NO: 121076 - RNA, 19 nt, Homo sapiens
  misc_RNA (1)...(19): siRNA sense strand
caaaagcucugcagauuga

SEQ ID NO: 121077 - RNA, 19 nt, Homo sapiens
  misc_RNA (1)...(19): siRNA sense strand
cagauuaaaccuugucaua

SEQ ID NO: 121078 - RNA, 19 nt, Homo sapiens
  misc_RNA (1)...(19): siRNA sense strand
gagaaaggaagcauaaaga

SEQ ID NO: 121079 - RNA, 19 nt, Homo sapiens
  misc_RNA (1)...(19): siRNA sense strand
aaacggaaauggagauugu

SEQ ID NO: 121080 - RNA, 19 nt, Homo sapiens
  misc_RNA (1)...(19): siRNA sense strand
ccaaugagcucugugaagu

SEQ ID NO: 121081 - RNA, 19 nt, Homo sapiens
  misc_RNA (1)...(19): siRNA sense strand
ggagaucccugucuuccau

SEQ ID NO: 121082 - RNA, 19 nt, Homo sapiens
  misc_RNA (1)...(19): siRNA sense strand
guauggaaaugcacuguau

SEQ ID NO: 121083 - RNA, 19 nt, Homo sapiens
  misc_RNA (1)...(19): siRNA sense strand
ccagagauguggaaagcaa

SEQ ID NO: 121084 - RNA, 19 nt, Homo sapiens
  misc_RNA (1)...(19): siRNA sense strand
uaaagaagcagagaagauu

SEQ ID NO: 121085 - RNA, 19 nt, Homo sapiens
  misc_RNA (1)...(19): siRNA sense strand
acaacaaucucugcacuuu

SEQ ID NO: 121086 - RNA, 19 nt, Homo sapiens
  misc_RNA (1)...(19): siRNA sense strand
caauaacaguucuggaaau

SEQ ID NO: 121087 - RNA, 19 nt, Homo sapiens
  misc_RNA (1)...(19): siRNA sense strand
gcaagcaggcaucuucaaa

SEQ ID NO: 121088 - RNA, 19 nt, Homo sapiens
  misc_RNA (1)...(19): siRNA sense strand
gguccaagauccuguuugu

SEQ ID NO: 121089 - RNA, 19 nt, Homo sapiens
  misc_RNA (1)...(19): siRNA sense strand
uggacaaaguggacucuua

SEQ ID NO: 121090 - RNA, 19 nt, Homo sapiens
  misc_RNA (1)...(19): siRNA sense strand
ugaaugacaugaaguugug

SEQ ID NO: 121091 - RNA, 19 nt, Homo sapiens
  misc_RNA (1)...(19): siRNA sense strand
caaaaugccugcaagagaa

SEQ ID NO: 121092 - RNA, 19 nt, Homo sapiens
  misc_RNA (1)...(19): siRNA sense strand
gcaagagaauccugauguc

SEQ ID NO: 121093 - RNA, 19 nt, Homo sapiens
  misc_RNA (1)...(19): siRNA sense strand
ugauguaugugaacagauu

SEQ ID NO: 121094 - RNA, 19 nt, Homo sapiens
  misc_RNA (1)...(19): siRNA sense strand
gcauuguguuguaaucauu

SEQ ID NO: 121095 - RNA, 19 nt, Homo sapiens
  misc_RNA (1)...(19): siRNA sense strand
ccaaaugugccgugaugua

SEQ ID NO: 121096 - RNA, 19 nt, Homo sapiens
  misc_RNA (1)...(19): siRNA sense strand
caacaaucucugcacuuua

SEQ ID NO: 121097 - RNA, 19 nt, Homo sapiens
  misc_RNA (1)...(19): siRNA sense strand
gagcacaguucagaagaug

SEQ ID NO: 121098 - RNA, 19 nt, Homo sapiens
  misc_RNA (1)...(19): siRNA sense strand
gaacaaauucccugaagac

SEQ ID NO: 121099 - RNA, 19 nt, Homo sapiens
  misc_RNA (1)...(19): siRNA sense strand
gacaaugguugaaauuugg

SEQ ID NO: 121100 - RNA, 19 nt, Homo sapiens
  misc_RNA (1)...(19): siRNA sense strand
gagaagauugagucccuua

SEQ ID NO: 121101 - RNA, 19 nt, Homo sapiens
  misc_RNA (1)...(19): siRNA sense strand
aacaaucucugcacuuuau

SEQ ID NO: 121102 - RNA, 19 nt, Homo sapiens
  misc_RNA (1)...(19): siRNA sense strand
uaacaguucuggaaauacu

SEQ ID NO: 121103 - RNA, 19 nt, Homo sapiens
  misc_RNA (1)...(19): siRNA sense strand
ggacaaaguggacucuuag

SEQ ID NO: 121104 - RNA, 19 nt, Homo sapiens
  misc_RNA (1)...(19): siRNA sense strand
gcgggugcauuguguugua

SEQ ID NO: 121105 - RNA, 19 nt, Homo sapiens
  misc_RNA (1)...(19): siRNA sense strand
gaguuuggaucaugcaugu

SEQ ID NO: 121106 - RNA, 19 nt, Homo sapiens
  misc_RNA (1)...(19): siRNA sense strand
acacagaguuggcaagagu

SEQ ID NO: 121107 - RNA, 19 nt, Homo sapiens
  misc_RNA (1)...(19): siRNA sense strand
gaacagauuuucuccucaa

SEQ ID NO: 121108 - RNA, 19 nt, Homo sapiens
  misc_RNA (1)...(19): siRNA sense strand
cuccagaagucuuguauug

SEQ ID NO: 121109 - RNA, 19 nt, Homo sapiens
  misc_RNA (1)...(19): siRNA sense strand
uagguaacauuguagaaga

SEQ ID NO: 121110 - RNA, 19 nt, Homo sapiens
  misc_RNA (1)...(19): siRNA sense strand
ggagaaaggaagcauaaag

SEQ ID NO: 121111 - RNA, 19 nt, Homo sapiens
  misc_RNA (1)...(19): siRNA sense strand
gaucaaggagccaugaaug

SEQ ID NO: 121112 - RNA, 19 nt, Homo sapiens
  misc_RNA (1)...(19): siRNA sense strand
guggagaccagaacaaauu

SEQ ID NO: 121113 - RNA, 19 nt, Homo sapiens
  misc_RNA (1)...(19): siRNA sense strand
gcaauaaagaagcagagaa

SEQ ID NO: 121114 - RNA, 19 nt, Homo sapiens
  misc_RNA (1)...(19): siRNA sense strand
ugucaaaggauccauguaa

SEQ ID NO: 121115 - RNA, 19 nt, Homo sapiens
  misc_RNA (1)...(19): siRNA sense strand
aaugagcucugugaaguaa

SEQ ID NO: 121116 - RNA, 19 nt, Homo sapiens
  misc_RNA (1)...(19): siRNA sense strand
agaauacugucaagccauu

SEQ ID NO: 121117 - RNA, 19 nt, Homo sapiens
  misc_RNA (1)...(19): siRNA sense strand
cuuguucacugcagauuaa

SEQ ID NO: 121118 - RNA, 19 nt, Homo sapiens
  misc_RNA (1)...(19): siRNA sense strand
ccgggaaccuugccaguug

SEQ ID NO: 121119 - RNA, 19 nt, Homo sapiens
  misc_RNA (1)...(19): siRNA sense strand
gagacaaugguugaaauuu

SEQ ID NO: 121120 - RNA, 19 nt, Homo sapiens
  misc_RNA (1)...(19): siRNA sense strand
cacuugcucuggacauaua

SEQ ID NO: 121121 - RNA, 19 nt, Homo sapiens
  misc_RNA (1)...(19): siRNA sense strand
ccucaucauuucccaggua

SEQ ID NO: 121122 - RNA, 19 nt, Homo sapiens
  misc_RNA (1)...(19): siRNA sense strand
gccaauaacaguucuggaa

SEQ ID NO: 121123 - RNA, 19 nt, Homo sapiens
  misc_RNA (1)...(19): siRNA sense strand
gaccaucaguuugaguuug

SEQ ID NO: 121124 - RNA, 19 nt, Homo sapiens
  misc_RNA (1)...(19): siRNA sense strand
cagagacaaugguugaaau

SEQ ID NO: 121125 - RNA, 19 nt, Homo sapiens
  misc_RNA (1)...(19): siRNA sense strand
gaauccugauguccaagaa

SEQ ID NO: 121126 - RNA, 19 nt, Homo sapiens
  misc_RNA (1)...(19): siRNA sense strand
gcuguagaaaccuuacuua

SEQ ID NO: 121127 - RNA, 19 nt, Homo sapiens
  misc_RNA (1)...(19): siRNA sense strand
gcucuggacauauaacuga

SEQ ID NO: 121128 - RNA, 19 nt, Homo sapiens
  misc_RNA (1)...(19): siRNA sense strand
ggauacuauugcuaaggua

SEQ ID NO: 121129 - RNA, 19 nt, Homo sapiens
  misc_RNA (1)...(19): siRNA sense strand
gaagugacucaucccugua

SEQ ID NO: 121130 - RNA, 19 nt, Homo sapiens
  misc_RNA (1)...(19): siRNA sense strand
ccaaguacuuuagguaaca

SEQ ID NO: 121131 - RNA, 19 nt, Homo sapiens
  misc_RNA (1)...(19): siRNA sense strand
cagaacaaauucccugaag

SEQ ID NO: 121132 - RNA, 19 nt, Homo sapiens
  misc_RNA (1)...(19): siRNA sense strand
gcugugaacuggcuauugc

SEQ ID NO: 121133 - RNA, 19 nt, Homo sapiens
  misc_RNA (1)...(19): siRNA sense strand
ccaauaacaguucuggaaa

SEQ ID NO: 121134 - RNA, 19 nt, Homo sapiens
  misc_RNA (1)...(19): siRNA sense strand
guaugaguguguaccaaga

SEQ ID NO: 121135 - RNA, 19 nt, Homo sapiens
  misc_RNA (1)...(19): siRNA sense strand
cagaagucuuguauuguug

SEQ ID NO: 121136 - RNA, 19 nt, Homo sapiens
  misc_RNA (1)...(19): siRNA sense strand
ggaaaugcacuguauagac

SEQ ID NO: 121137 - RNA, 19 nt, Homo sapiens
  misc_RNA (1)...(19): siRNA sense strand
cuugaaagcucacaaucug

SEQ ID NO: 121138 - RNA, 19 nt, Homo sapiens
  misc_RNA (1)...(19): siRNA sense strand
ggaaauggagauuguugau

SEQ ID NO: 121139 - RNA, 19 nt, Homo sapiens
  misc_RNA (1)...(19): siRNA sense strand
ggaacccaacggauaguuu

SEQ ID NO: 121140 - RNA, 19 nt, Homo sapiens
  misc_RNA (1)...(19): siRNA sense strand
caaaggauaaccaaaugug

SEQ ID NO: 121141 - RNA, 19 nt, Homo sapiens
  misc_RNA (1)...(19): siRNA sense strand
gaggugcgcugcuccuucu

SEQ ID NO: 121142 - RNA, 19 nt, Homo sapiens
  misc_RNA (1)...(19): siRNA sense strand
ugcaaugucuguucuuguu

SEQ ID NO: 121143 - RNA, 19 nt, Homo sapiens
  misc_RNA (1)...(19): siRNA sense strand
caaaugugccgugauguau

SEQ ID NO: 121144 - RNA, 19 nt, Homo sapiens
  misc_RNA (1)...(19): siRNA sense strand
gaagaccacacagcugaaa

SEQ ID NO: 121145 - RNA, 19 nt, Homo sapiens
  misc_RNA (1)...(19): siRNA sense strand
guaaugcacagucagauca

SEQ ID NO: 121146 - RNA, 19 nt, Homo sapiens
  misc_RNA (1)...(19): siRNA sense strand
agugugauguguuuggaua

SEQ ID NO: 121147 - RNA, 19 nt, Homo sapiens
  misc_RNA (1)...(19): siRNA sense strand
aagauugagucccuuauca

SEQ ID NO: 121148 - RNA, 19 nt, Homo sapiens
  misc_RNA (1)...(19): siRNA sense strand
gaagauugagucccuuauc

SEQ ID NO: 121149 - RNA, 19 nt, Homo sapiens
  misc_RNA (1)...(19): siRNA sense strand
cagcauugaaucagaaauu

SEQ ID NO: 121150 - RNA, 19 nt, Homo sapiens
  misc_RNA (1)...(19): siRNA sense strand
gaacucccauccagaauga

SEQ ID NO: 121151 - RNA, 19 nt, Homo sapiens
  misc_RNA (1)...(19): siRNA sense strand
agaaugaucugcuugagua

SEQ ID NO: 121152 - RNA, 19 nt, Homo sapiens
  misc_RNA (1)...(19): siRNA sense strand
guagaacgcuucaauaguc

SEQ ID NO: 121153 - RNA, 19 nt, Homo sapiens
  misc_RNA (1)...(19): siRNA sense strand
gugaagaacugguacaaug

SEQ ID NO: 121154 - RNA, 19 nt, Homo sapiens
  misc_RNA (1)...(19): siRNA sense strand
cuaaauaucugccugugaa

SEQ ID NO: 121155 - RNA, 19 nt, Homo sapiens
  misc_RNA (1)...(19): siRNA sense strand
gaaacucccuguccaugug

SEQ ID NO: 121156 - RNA, 19 nt, Homo sapiens
  misc_RNA (1)...(19): siRNA sense strand
gagcaggucguuuguugua

SEQ ID NO: 121157 - RNA, 19 nt, Homo sapiens
  misc_RNA (1)...(19): siRNA sense strand
aaagaagacuugcuauauc

SEQ ID NO: 121158 - RNA, 19 nt, Homo sapiens
  misc_RNA (1)...(19): siRNA sense strand
cgaauuacacccagacuuu

SEQ ID NO: 121159 - RNA, 19 nt, Homo sapiens
  misc_RNA (1)...(19): siRNA sense strand
ggacagcagucagcaugaa

SEQ ID NO: 121160 - RNA, 19 nt, Homo sapiens
  misc_RNA (1)...(19): siRNA sense strand
gugaauagaugccugauac

SEQ ID NO: 121161 - RNA, 19 nt, Homo sapiens
  misc_RNA (1)...(19): siRNA sense strand
gaagcuagccucagugaca

SEQ ID NO: 121162 - RNA, 19 nt, Homo sapiens
  misc_RNA (1)...(19): siRNA sense strand
cuucugauauccuuucuaa

SEQ ID NO: 121163 - RNA, 19 nt, Homo sapiens
  misc_RNA (1)...(19): siRNA sense strand
ggaugaagcuagccucagu

SEQ ID NO: 121164 - RNA, 19 nt, Homo sapiens
  misc_RNA (1)...(19): siRNA sense strand
gaacccagccaaugaugaa

SEQ ID NO: 121165 - RNA, 19 nt, Homo sapiens
  misc_RNA (1)...(19): siRNA sense strand
ugagucagcuaaccaauca

SEQ ID NO: 121166 - RNA, 19 nt, Homo sapiens
  misc_RNA (1)...(19): siRNA sense strand
gcauuuauucgaagcauuu

SEQ ID NO: 121167 - RNA, 19 nt, Homo sapiens
  misc_RNA (1)...(19): siRNA sense strand
uggaaccacugcacugaua

SEQ ID NO: 121168 - RNA, 19 nt, Homo sapiens
  misc_RNA (1)...(19): siRNA sense strand
ggaagaggaggauggcuuu

SEQ ID NO: 121169 - RNA, 19 nt, Homo sapiens
  misc_RNA (1)...(19): siRNA sense strand
acaaugagguugggaaaug

SEQ ID NO: 121170 - RNA, 19 nt, Homo sapiens
  misc_RNA (1)...(19): siRNA sense strand
caugaagcauuuauucgaa

SEQ ID NO: 121171 - RNA, 19 nt, Homo sapiens
  misc_RNA (1)...(19): siRNA sense strand
caagaagcauuuugaauug

SEQ ID NO: 121172 - RNA, 19 nt, Homo sapiens
  misc_RNA (1)...(19): siRNA sense strand
gcagucagcaugaagcauu

SEQ ID NO: 121173 - RNA, 19 nt, Homo sapiens
  misc_RNA (1)...(19): siRNA sense strand
gcagcugugugguggauga

SEQ ID NO: 121174 - RNA, 19 nt, Homo sapiens
  misc_RNA (1)...(19): siRNA sense strand
gaagcgagccaagguugua

SEQ ID NO: 121175 - RNA, 19 nt, Homo sapiens
  misc_RNA (1)...(19): siRNA sense strand
gcucuaaucuaugauaagu

SEQ ID NO: 121176 - RNA, 19 nt, Homo sapiens
  misc_RNA (1)...(19): siRNA sense strand
gaacugguacaaugagguu

SEQ ID NO: 121177 - RNA, 19 nt, Homo sapiens
  misc_RNA (1)...(19): siRNA sense strand
gagaugggccuaggaaaga

SEQ ID NO: 121178 - RNA, 19 nt, Homo sapiens
  misc_RNA (1)...(19): siRNA sense strand
ucauccagcucuaaucuau

SEQ ID NO: 121179 - RNA, 19 nt, Homo sapiens
  misc_RNA (1)...(19): siRNA sense strand
gcacgauguccauuaagaa

SEQ ID NO: 121180 - RNA, 19 nt, Homo sapiens
  misc_RNA (1)...(19): siRNA sense strand
ggcacgauguccauuaaga

SEQ ID NO: 121181 - RNA, 19 nt, Homo sapiens
  misc_RNA (1)...(19): siRNA sense strand
caaaccggcagaagaauug

SEQ ID NO: 121182 - RNA, 19 nt, Homo sapiens
  misc_RNA (1)...(19): siRNA sense strand
gcaugaagcauuuauucga

SEQ ID NO: 121183 - RNA, 19 nt, Homo sapiens
  misc_RNA (1)...(19): siRNA sense strand
ucagagagagggagugaaa

SEQ ID NO: 121184 - RNA, 19 nt, Homo sapiens
  misc_RNA (1)...(19): siRNA sense strand
aaagaugccuugguucugu

SEQ ID NO: 121185 - RNA, 19 nt, Homo sapiens
  misc_RNA (1)...(19): siRNA sense strand
ggacacaggcucaagaacu

SEQ ID NO: 121186 - RNA, 19 nt, Homo sapiens
  misc_RNA (1)...(19): siRNA sense strand
cagcucuaaucuaugauaa

SEQ ID NO: 121187 - RNA, 19 nt, Homo sapiens
  misc_RNA (1)...(19): siRNA sense strand
ggacugcccaugaauucaa

SEQ ID NO: 121188 - RNA, 19 nt, Homo sapiens
  misc_RNA (1)...(19): siRNA sense strand
ccguagcagugacaaagua

SEQ ID NO: 121189 - RNA, 19 nt, Homo sapiens
  misc_RNA (1)...(19): siRNA sense strand
aagaagacuugcuauaucu

SEQ ID NO: 121190 - RNA, 19 nt, Homo sapiens
  misc_RNA (1)...(19): siRNA sense strand
gacacaggcucaagaacuc

SEQ ID NO: 121191 - RNA, 19 nt, Homo sapiens
  misc_RNA (1)...(19): siRNA sense strand
ugaagaacugguacaauga

SEQ ID NO: 121192 - RNA, 19 nt, Homo sapiens
  misc_RNA (1)...(19): siRNA sense strand
caaaagaagacuugcuaua

SEQ ID NO: 121193 - RNA, 19 nt, Homo sapiens
  misc_RNA (1)...(19): siRNA sense strand
cagacugaguuauacaaga

SEQ ID NO: 121194 - RNA, 19 nt, Homo sapiens
  misc_RNA (1)...(19): siRNA sense strand
auacggaggacuucugaua

SEQ ID NO: 121195 - RNA, 19 nt, Homo sapiens
  misc_RNA (1)...(19): siRNA sense strand
ccuagggacugcccaugaa

SEQ ID NO: 121196 - RNA, 19 nt, Homo sapiens
  misc_RNA (1)...(19): siRNA sense strand
gaugagaugggccuaggaa

SEQ ID NO: 121197 - RNA, 19 nt, Homo sapiens
  misc_RNA (1)...(19): siRNA sense strand
gaauuacacccagacuuug

SEQ ID NO: 121198 - RNA, 19 nt, Homo sapiens
  misc_RNA (1)...(19): siRNA sense strand
uauuucagcuugguacauu

SEQ ID NO: 121199 - RNA, 19 nt, Homo sapiens
  misc_RNA (1)...(19): siRNA sense strand
ucaagaacucugagaauca

SEQ ID NO: 121200 - RNA, 19 nt, Homo sapiens
  misc_RNA (1)...(19): siRNA sense strand
guacaaugagguugggaaa

SEQ ID NO: 121201 - RNA, 19 nt, Homo sapiens
  misc_RNA (1)...(19): siRNA sense strand
ggaacucccauccagaaug

SEQ ID NO: 121202 - RNA, 19 nt, Homo sapiens
  misc_RNA (1)...(19): siRNA sense strand
cuaaccggcuggucauguu

SEQ ID NO: 121203 - RNA, 19 nt, Homo sapiens
  misc_RNA (1)...(19): siRNA sense strand
uagugcuggugucgaauua

SEQ ID NO: 121204 - RNA, 19 nt, Homo sapiens
  misc_RNA (1)...(19): siRNA sense strand
gguccuggauuauauucug

SEQ ID NO: 121205 - RNA, 19 nt, Homo sapiens
  misc_RNA (1)...(19): siRNA sense strand
gagugugucuucccuuucu

SEQ ID NO: 121206 - RNA, 19 nt, Homo sapiens
  misc_RNA (1)...(19): siRNA sense strand
agagagagggagugaaauu

SEQ ID NO: 121207 - RNA, 19 nt, Homo sapiens
  misc_RNA (1)...(19): siRNA sense strand
ccaaaccggcagaagaauu

SEQ ID NO: 121208 - RNA, 19 nt, Homo sapiens
  misc_RNA (1)...(19): siRNA sense strand
augaucugcuugaguauuu

SEQ ID NO: 121209 - RNA, 19 nt, Homo sapiens
  misc_RNA (1)...(19): siRNA sense strand
cagcaugaagcauuuauuc

SEQ ID NO: 121210 - RNA, 19 nt, Homo sapiens
  misc_RNA (1)...(19): siRNA sense strand
ggaaccacugcacugauaa

SEQ ID NO: 121211 - RNA, 19 nt, Homo sapiens
  misc_RNA (1)...(19): siRNA sense strand
ggauguagagcgccacuuc

SEQ ID NO: 121212 - RNA, 19 nt, Homo sapiens
  misc_RNA (1)...(19): siRNA sense strand
gagcagcugugugguggau

SEQ ID NO: 121213 - RNA, 19 nt, Homo sapiens
  misc_RNA (1)...(19): siRNA sense strand
uccaucaccucgcuaaaga

SEQ ID NO: 121214 - RNA, 19 nt, Homo sapiens
  misc_RNA (1)...(19): siRNA sense strand
agacugaguuauacaagag

SEQ ID NO: 121215 - RNA, 19 nt, Homo sapiens
  misc_RNA (1)...(19): siRNA sense strand
ggacuucugauauccuuuc

SEQ ID NO: 121216 - RNA, 19 nt, Homo sapiens
  misc_RNA (1)...(19): siRNA sense strand
gaagaacugguacaaugag

SEQ ID NO: 121217 - RNA, 19 nt, Homo sapiens
  misc_RNA (1)...(19): siRNA sense strand
ccagcauucucaugaggaa

SEQ ID NO: 121218 - RNA, 19 nt, Homo sapiens
  misc_RNA (1)...(19): siRNA sense strand
guuguagaacgcuucaaua

SEQ ID NO: 121219 - RNA, 19 nt, Homo sapiens
  misc_RNA (1)...(19): siRNA sense strand
caagagguuucugagacaa

SEQ ID NO: 121220 - RNA, 19 nt, Homo sapiens
  misc_RNA (1)...(19): siRNA sense strand
acaagagguuucugagaca

SEQ ID NO: 121221 - RNA, 19 nt, Homo sapiens
  misc_RNA (1)...(19): siRNA sense strand
guaaucauccagcucuaau

SEQ ID NO: 121222 - RNA, 19 nt, Homo sapiens
  misc_RNA (1)...(19): siRNA sense strand
ggaacccagccaaugauga

SEQ ID NO: 121223 - RNA, 19 nt, Homo sapiens
  misc_RNA (1)...(19): siRNA sense strand
uugagcaggucguuuguug

SEQ ID NO: 121224 - RNA, 19 nt, Homo sapiens
  misc_RNA (1)...(19): siRNA sense strand
gaguugaaggagcuguuua

SEQ ID NO: 121225 - RNA, 19 nt, Homo sapiens
  misc_RNA (1)...(19): siRNA sense strand
cagggaccauugaggagaa

SEQ ID NO: 121226 - RNA, 19 nt, Homo sapiens
  misc_RNA (1)...(19): siRNA sense strand
agaugcugguccuggauua

SEQ ID NO: 121227 - RNA, 19 nt, Homo sapiens
  misc_RNA (1)...(19): siRNA sense strand
gcagugagacccagaucca

SEQ ID NO: 121228 - RNA, 19 nt, Homo sapiens
  misc_RNA (1)...(19): siRNA sense strand
gaagauugagcaggucguu

SEQ ID NO: 121229 - RNA, 19 nt, Homo sapiens
  misc_RNA (1)...(19): siRNA sense strand
gaggaucuaaggaugaaau

SEQ ID NO: 121230 - RNA, 19 nt, Homo sapiens
  misc_RNA (1)...(19): siRNA sense strand
ccuauucucaguaagguuu

SEQ ID NO: 121231 - RNA, 19 nt, Homo sapiens
  misc_RNA (1)...(19): siRNA sense strand
cagucagcaugaagcauuu

SEQ ID NO: 121232 - RNA, 19 nt, Homo sapiens
  misc_RNA (1)...(19): siRNA sense strand
gaagacuugcuauaucuac

SEQ ID NO: 121233 - RNA, 19 nt, Homo sapiens
  misc_RNA (1)...(19): siRNA sense strand
agaggaggauggcuuugug

SEQ ID NO: 121234 - RNA, 19 nt, Homo sapiens
  misc_RNA (1)...(19): siRNA sense strand
aagaagcuuuguaaucauc

SEQ ID NO: 121235 - RNA, 19 nt, Homo sapiens
  misc_RNA (1)...(19): siRNA sense strand
gagacgcugcugcuaguga

SEQ ID NO: 121236 - RNA, 19 nt, Homo sapiens
  misc_RNA (1)...(19): siRNA sense strand
guguuggucuggucauaug

SEQ ID NO: 121237 - RNA, 19 nt, Homo sapiens
  misc_RNA (1)...(19): siRNA sense strand
gagagagggagugaaauuc

SEQ ID NO: 121238 - RNA, 19 nt, Homo sapiens
  misc_RNA (1)...(19): siRNA sense strand
auccagcucuaaucuauga

SEQ ID NO: 121239 - RNA, 19 nt, Homo sapiens
  misc_RNA (1)...(19): siRNA sense strand
gugcuggugucgaauuaca

SEQ ID NO: 121240 - RNA, 19 nt, Homo sapiens
  misc_RNA (1)...(19): siRNA sense strand
ccagcucuaaucuaugaua

SEQ ID NO: 121241 - RNA, 19 nt, Homo sapiens
  misc_RNA (1)...(19): siRNA sense strand
aaguagugcuggugucgaa

SEQ ID NO: 121242 - RNA, 19 nt, Homo sapiens
  misc_RNA (1)...(19): siRNA sense strand
aagaugccuugguucugua

SEQ ID NO: 121243 - RNA, 19 nt, Homo sapiens
  misc_RNA (1)...(19): siRNA sense strand
caucgagcccugacuuugu

SEQ ID NO: 121244 - RNA, 19 nt, Homo sapiens
  misc_RNA (1)...(19): siRNA sense strand
guagugcuggugucgaauu

SEQ ID NO: 121245 - RNA, 19 nt, Homo sapiens
  misc_RNA (1)...(19): siRNA sense strand
gagggacacaggcucaaga

SEQ ID NO: 121246 - RNA, 19 nt, Homo sapiens
  misc_RNA (1)...(19): siRNA sense strand
uggaggaucuaaggaugaa

SEQ ID NO: 121247 - RNA, 19 nt, Homo sapiens
  misc_RNA (1)...(19): siRNA sense strand
ccagagugcaagccagaaa

SEQ ID NO: 121248 - RNA, 19 nt, Homo sapiens
  misc_RNA (1)...(19): siRNA sense strand
ucaccucgcuaaagaagcu

SEQ ID NO: 121249 - RNA, 19 nt, Homo sapiens
  misc_RNA (1)...(19): siRNA sense strand
gaaccacugcacugauaag

SEQ ID NO: 121250 - RNA, 19 nt, Homo sapiens
  misc_RNA (1)...(19): siRNA sense strand
gaugauagaugaaaccaaa

SEQ ID NO: 121251 - RNA, 19 nt, Homo sapiens
  misc_RNA (1)...(19): siRNA sense strand
cuacagagcuccagaaauc

SEQ ID NO: 121252 - RNA, 19 nt, Homo sapiens
  misc_RNA (1)...(19): siRNA sense strand
gaaaagacauggaguuauu

SEQ ID NO: 121253 - RNA, 19 nt, Homo sapiens
  misc_RNA (1)...(19): siRNA sense strand
cagaagcucuacacauaua

SEQ ID NO: 121254 - RNA, 19 nt, Homo sapiens
  misc_RNA (1)...(19): siRNA sense strand
gcacaccaauugacauaug

SEQ ID NO: 121255 - RNA, 19 nt, Homo sapiens
  misc_RNA (1)...(19): siRNA sense strand
gaacaagcccugaagcaau

SEQ ID NO: 121256 - RNA, 19 nt, Homo sapiens
  misc_RNA (1)...(19): siRNA sense strand
gaaagggugugaugacuac

SEQ ID NO: 121257 - RNA, 19 nt, Homo sapiens
  misc_RNA (1)...(19): siRNA sense strand
ggaauagccaauaagcuua

SEQ ID NO: 121258 - RNA, 19 nt, Homo sapiens
  misc_RNA (1)...(19): siRNA sense strand
ccaucuagcuuaucgauau

SEQ ID NO: 121259 - RNA, 19 nt, Homo sapiens
  misc_RNA (1)...(19): siRNA sense strand
gaggugagaugaagguaga

SEQ ID NO: 121260 - RNA, 19 nt, Homo sapiens
  misc_RNA (1)...(19): siRNA sense strand
accagaagcucuacacaua

SEQ ID NO: 121261 - RNA, 19 nt, Homo sapiens
  misc_RNA (1)...(19): siRNA sense strand
aacaagcccugaagcaaua

SEQ ID NO: 121262 - RNA, 19 nt, Homo sapiens
  misc_RNA (1)...(19): siRNA sense strand
gaugacuacuuguuuauag

SEQ ID NO: 121263 - RNA, 19 nt, Homo sapiens
  misc_RNA (1)...(19): siRNA sense strand
uuaagacacccuuggauua

SEQ ID NO: 121264 - RNA, 19 nt, Homo sapiens
  misc_RNA (1)...(19): siRNA sense strand
gauaugaggugcugaaaau

SEQ ID NO: 121265 - RNA, 19 nt, Homo sapiens
  misc_RNA (1)...(19): siRNA sense strand
ugugaugacuacuuguuua

SEQ ID NO: 121266 - RNA, 19 nt, Homo sapiens
  misc_RNA (1)...(19): siRNA sense strand
gacaguacguggcccuaaa

SEQ ID NO: 121267 - RNA, 19 nt, Homo sapiens
  misc_RNA (1)...(19): siRNA sense strand
ucaagaauuuggcaacaga

SEQ ID NO: 121268 - RNA, 19 nt, Homo sapiens
  misc_RNA (1)...(19): siRNA sense strand
gaauagccaauaagcuuaa

SEQ ID NO: 121269 - RNA, 19 nt, Homo sapiens
  misc_RNA (1)...(19): siRNA sense strand
ccagaaaucaucuuaggaa

SEQ ID NO: 121270 - RNA, 19 nt, Homo sapiens
  misc_RNA (1)...(19): siRNA sense strand
ggucuaugaucacaaacuu

SEQ ID NO: 121271 - RNA, 19 nt, Homo sapiens
  misc_RNA (1)...(19): siRNA sense strand
caauugacauauggaguuu

SEQ ID NO: 121272 - RNA, 19 nt, Homo sapiens
  misc_RNA (1)...(19): siRNA sense strand
ccacccagaagacuaaaua

SEQ ID NO: 121273 - RNA, 19 nt, Homo sapiens
  misc_RNA (1)...(19): siRNA sense strand
ccagaaauuuacuuuguag

SEQ ID NO: 121274 - RNA, 19 nt, Homo sapiens
  misc_RNA (1)...(19): siRNA sense strand
gaccccagcucaagcauua

SEQ ID NO: 121275 - RNA, 19 nt, Homo sapiens
  misc_RNA (1)...(19): siRNA sense strand
ucacaaacuucgacaguac

SEQ ID NO: 121276 - RNA, 19 nt, Homo sapiens
  misc_RNA (1)...(19): siRNA sense strand
gcacugaaagggugugaug

SEQ ID NO: 121277 - RNA, 19 nt, Homo sapiens
  misc_RNA (1)...(19): siRNA sense strand
ggauaaaacugguaguaug

SEQ ID NO: 121278 - RNA, 19 nt, Homo sapiens
  misc_RNA (1)...(19): siRNA sense strand
guucaaauguacucugcaa

SEQ ID NO: 121279 - RNA, 19 nt, Homo sapiens
  misc_RNA (1)...(19): siRNA sense strand
ggaaacggguaguuaaucc

SEQ ID NO: 121280 - RNA, 19 nt, Homo sapiens
  misc_RNA (1)...(19): siRNA sense strand
uaagcugccuccaguuguu

SEQ ID NO: 121281 - RNA, 19 nt, Homo sapiens
  misc_RNA (1)...(19): siRNA sense strand
uaugaccgcugagcaguuu

SEQ ID NO: 121282 - RNA, 19 nt, Homo sapiens
  misc_RNA (1)...(19): siRNA sense strand
cccagaagacuaaauauga

SEQ ID NO: 121283 - RNA, 19 nt, Homo sapiens
  misc_RNA (1)...(19): siRNA sense strand
ggaugaaggagaccaguug

SEQ ID NO: 121284 - RNA, 19 nt, Homo sapiens
  misc_RNA (1)...(19): siRNA sense strand
cagggucuaugaucacaaa

SEQ ID NO: 121285 - RNA, 19 nt, Homo sapiens
  misc_RNA (1)...(19): siRNA sense strand
cagcacaccaauugacaua

SEQ ID NO: 121286 - RNA, 19 nt, Homo sapiens
  misc_RNA (1)...(19): siRNA sense strand
caagugcuuuccagggauu

SEQ ID NO: 121287 - RNA, 19 nt, Homo sapiens
  misc_RNA (1)...(19): siRNA sense strand
aaacgugccaaguacuuua

SEQ ID NO: 121288 - RNA, 19 nt, Homo sapiens
  misc_RNA (1)...(19): siRNA sense strand
ucagauugcuugaauacag

SEQ ID NO: 121289 - RNA, 19 nt, Homo sapiens
  misc_RNA (1)...(19): siRNA sense strand
cgugccaaguacuuuauua

SEQ ID NO: 121290 - RNA, 19 nt, Homo sapiens
  misc_RNA (1)...(19): siRNA sense strand
uggagcaucuuaagaaaca

SEQ ID NO: 121291 - RNA, 19 nt, Homo sapiens
  misc_RNA (1)...(19): siRNA sense strand
gcaaugagaagcgcuuuca

SEQ ID NO: 121292 - RNA, 19 nt, Homo sapiens
  misc_RNA (1)...(19): siRNA sense strand
ggauggaggugagaugaag

SEQ ID NO: 121293 - RNA, 19 nt, Homo sapiens
  misc_RNA (1)...(19): siRNA sense strand
ccaauugacauauggaguu

SEQ ID NO: 121294 - RNA, 19 nt, Homo sapiens
  misc_RNA (1)...(19): siRNA sense strand
uugcauggccuuugaauug

SEQ ID NO: 121295 - RNA, 19 nt, Homo sapiens
  misc_RNA (1)...(19): siRNA sense strand
ucaagcagcugaggagauc

SEQ ID NO: 121296 - RNA, 19 nt, Homo sapiens
  misc_RNA (1)...(19): siRNA sense strand
acagcuguuucaagaauuu

SEQ ID NO: 121297 - RNA, 19 nt, Homo sapiens
  misc_RNA (1)...(19): siRNA sense strand
gaucacaaacuucgacagu

SEQ ID NO: 121298 - RNA, 19 nt, Homo sapiens
  misc_RNA (1)...(19): siRNA sense strand
ccaguuggccugcaugaug

SEQ ID NO: 121299 - RNA, 19 nt, Homo sapiens
  misc_RNA (1)...(19): siRNA sense strand
ucagggaaacggguaguua

SEQ ID NO: 121300 - RNA, 19 nt, Homo sapiens
  misc_RNA (1)...(19): siRNA sense strand
guaugaacguuauccacau

SEQ ID NO: 121301 - RNA, 19 nt, Homo sapiens
  misc_RNA (1)...(19): siRNA sense strand
gagaccaucuagcuuaucg

SEQ ID NO: 121302 - RNA, 19 nt, Homo sapiens
  misc_RNA (1)...(19): siRNA sense strand
gaagcgcuuucaucgucaa

SEQ ID NO: 121303 - RNA, 19 nt, Homo sapiens
  misc_RNA (1)...(19): siRNA sense strand
uggaauagccaauaagcuu

SEQ ID NO: 121304 - RNA, 19 nt, Homo sapiens
  misc_RNA (1)...(19): siRNA sense strand
ccagaagacuaaauaugac

SEQ ID NO: 121305 - RNA, 19 nt, Homo sapiens
  misc_RNA (1)...(19): siRNA sense strand
cagggaaacggguaguuaa

SEQ ID NO: 121306 - RNA, 19 nt, Homo sapiens
  misc_RNA (1)...(19): siRNA sense strand
caucuuaagaaacaggaua

SEQ ID NO: 121307 - RNA, 19 nt, Homo sapiens
  misc_RNA (1)...(19): siRNA sense strand
gagaucauacucagcacuu

SEQ ID NO: 121308 - RNA, 19 nt, Homo sapiens
  misc_RNA (1)...(19): siRNA sense strand
ucaaauguacucugcaauc

SEQ ID NO: 121309 - RNA, 19 nt, Homo sapiens
  misc_RNA (1)...(19): siRNA sense strand
gcauuaagacacccuugga

SEQ ID NO: 121310 - RNA, 19 nt, Homo sapiens
  misc_RNA (1)...(19): siRNA sense strand
ugaaagggugugaugacua

SEQ ID NO: 121311 - RNA, 19 nt, Homo sapiens
  misc_RNA (1)...(19): siRNA sense strand
aauccaaacgugccaagua

SEQ ID NO: 121312 - RNA, 19 nt, Homo sapiens
  misc_RNA (1)...(19): siRNA sense strand
cuacacauauauccagucu

SEQ ID NO: 121313 - RNA, 19 nt, Homo sapiens
  misc_RNA (1)...(19): siRNA sense strand
gaaccaccuccacccagaa

SEQ ID NO: 121314 - RNA, 19 nt, Homo sapiens
  misc_RNA (1)...(19): siRNA sense strand
gugccaaguacuuuauuaa

SEQ ID NO: 121315 - RNA, 19 nt, Homo sapiens
  misc_RNA (1)...(19): siRNA sense strand
gauaaaacugguaguauga

SEQ ID NO: 121316 - RNA, 19 nt, Homo sapiens
  misc_RNA (1)...(19): siRNA sense strand
ucauguaccucgagaccau

SEQ ID NO: 121317 - RNA, 19 nt, Homo sapiens
  misc_RNA (1)...(19): siRNA sense strand
cuacuuguuuauagaguuc

SEQ ID NO: 121318 - RNA, 19 nt, Homo sapiens
  misc_RNA (1)...(19): siRNA sense strand
aauguacucugcaauccuu

SEQ ID NO: 121319 - RNA, 19 nt, Homo sapiens
  misc_RNA (1)...(19): siRNA sense strand
caaacgugccaaguacuuu

SEQ ID NO: 121320 - RNA, 19 nt, Homo sapiens
  misc_RNA (1)...(19): siRNA sense strand
uaugaacguuauccacaug

SEQ ID NO: 121321 - RNA, 19 nt, Homo sapiens
  misc_RNA (1)...(19): siRNA sense strand
gcugaggagauccggauuu

SEQ ID NO: 121322 - RNA, 19 nt, Homo sapiens
  misc_RNA (1)...(19): siRNA sense strand
gcagguggccagggucuau

SEQ ID NO: 121323 - RNA, 19 nt, Homo sapiens
  misc_RNA (1)...(19): siRNA sense strand
aagcuaacuuaaugucaga

SEQ ID NO: 121324 - RNA, 19 nt, Homo sapiens
  misc_RNA (1)...(19): siRNA sense strand
gguaguuaauccugcaagu

SEQ ID NO: 121325 - RNA, 19 nt, Homo sapiens
  misc_RNA (1)...(19): siRNA sense strand
ccagaccucucaccaccau

SEQ ID NO: 121326 - RNA, 19 nt, Homo sapiens
  misc_RNA (1)...(19): siRNA sense strand
uaagacacccuuggauuag

SEQ ID NO: 121327 - RNA, 19 nt, Homo sapiens
  misc_RNA (1)...(19): siRNA sense strand
ccaaacgugccaaguacuu

SEQ ID NO: 121328 - RNA, 19 nt, Homo sapiens
  misc_RNA (1)...(19): siRNA sense strand
uaacaggacagccucucuu

SEQ ID NO: 121329 - RNA, 19 nt, Homo sapiens
  misc_RNA (1)...(19): siRNA sense strand
ccagaagcucuacacauau

SEQ ID NO: 121330 - RNA, 19 nt, Homo sapiens
  misc_RNA (1)...(19): siRNA sense strand
cagauugcuugaauacagu

SEQ ID NO: 121331 - RNA, 19 nt, Homo sapiens
  misc_RNA (1)...(19): siRNA sense strand
ccaguugguacgcaaguuu

SEQ ID NO: 121332 - RNA, 19 nt, Homo sapiens
  misc_RNA (1)...(19): siRNA sense strand
caaauguacucugcaaucc

SEQ ID NO: 121333 - RNA, 19 nt, Homo sapiens
  misc_RNA (1)...(19): siRNA sense strand
gauagaugaaaccaaaugu

SEQ ID NO: 121334 - RNA, 19 nt, Homo sapiens
  misc_RNA (1)...(19): siRNA sense strand
gacuuuggguccagcuguu

SEQ ID NO: 121335 - RNA, 19 nt, Homo sapiens
  misc_RNA (1)...(19): siRNA sense strand
caucuagcuuaucgauaug

SEQ ID NO: 121336 - RNA, 19 nt, Homo sapiens
  misc_RNA (1)...(19): siRNA sense strand
ccaauaauggaggguauga

SEQ ID NO: 121337 - RNA, 19 nt, Homo sapiens
  misc_RNA (1)...(19): siRNA sense strand
aaaaugcucuccuacuguu

SEQ ID NO: 121338 - RNA, 19 nt, Homo sapiens
  misc_RNA (1)...(19): siRNA sense strand
ucgagaccaucuagcuuau

SEQ ID NO: 121339 - RNA, 19 nt, Homo sapiens
  misc_RNA (1)...(19): siRNA sense strand
ugccaaaacugauuagcua

SEQ ID NO: 121340 - RNA, 19 nt, Homo sapiens
  misc_RNA (1)...(19): siRNA sense strand
gaagcucuacacauauauc

SEQ ID NO: 121341 - RNA, 19 nt, Homo sapiens
  misc_RNA (1)...(19): siRNA sense strand
aauaauggaggguaugaug

SEQ ID NO: 121342 - RNA, 19 nt, Homo sapiens
  misc_RNA (1)...(19): siRNA sense strand
ggugugaugacuacuuguu

SEQ ID NO: 121343 - RNA, 19 nt, Homo sapiens
  misc_RNA (1)...(19): siRNA sense strand
uaugaggugcugaaaauua

SEQ ID NO: 121344 - RNA, 19 nt, Homo sapiens
  misc_RNA (1)...(19): siRNA sense strand
cucgagaccaucuagcuua

SEQ ID NO: 121345 - RNA, 19 nt, Homo sapiens
  misc_RNA (1)...(19): siRNA sense strand
gggaaacggguaguuaauc

SEQ ID NO: 121346 - RNA, 19 nt, Homo sapiens
  misc_RNA (1)...(19): siRNA sense strand
gagaccaguuggccugcau

SEQ ID NO: 121347 - RNA, 19 nt, Homo sapiens
  misc_RNA (1)...(19): siRNA sense strand
uuuggagcaucuuaagaaa

SEQ ID NO: 121348 - RNA, 19 nt, Homo sapiens
  misc_RNA (1)...(19): siRNA sense strand
caaaacuucuggagcaauc

SEQ ID NO: 121349 - RNA, 19 nt, Homo sapiens
  misc_RNA (1)...(19): siRNA sense strand
gcuaacuuaaugucagaaa

SEQ ID NO: 121350 - RNA, 19 nt, Homo sapiens
  misc_RNA (1)...(19): siRNA sense strand
ggacaaggauaacacaaug

SEQ ID NO: 121351 - RNA, 19 nt, Homo sapiens
  misc_RNA (1)...(19): siRNA sense strand
caaaugggcuuacaacagu

SEQ ID NO: 121352 - RNA, 19 nt, Homo sapiens
  misc_RNA (1)...(19): siRNA sense strand
ggacagugcucacgacaca

SEQ ID NO: 121353 - RNA, 19 nt, Homo sapiens
  misc_RNA (1)...(19): siRNA sense strand
cagcuacccugaaauauau

SEQ ID NO: 121354 - RNA, 19 nt, Homo sapiens
  misc_RNA (1)...(19): siRNA sense strand
uagaagcgguauuaaagua

SEQ ID NO: 121355 - RNA, 19 nt, Homo sapiens
  misc_RNA (1)...(19): siRNA sense strand
ucacguggcuuacagguau

SEQ ID NO: 121356 - RNA, 19 nt, Homo sapiens
  misc_RNA (1)...(19): siRNA sense strand
ggaagcaggacaaggauaa

SEQ ID NO: 121357 - RNA, 19 nt, Homo sapiens
  misc_RNA (1)...(19): siRNA sense strand
gcacguggcccuaaagaug

SEQ ID NO: 121358 - RNA, 19 nt, Homo sapiens
  misc_RNA (1)...(19): siRNA sense strand
ucacaucuauauccaaguu

SEQ ID NO: 121359 - RNA, 19 nt, Homo sapiens
  misc_RNA (1)...(19): siRNA sense strand
ggacuaauuuggcgcagau

SEQ ID NO: 121360 - RNA, 19 nt, Homo sapiens
  misc_RNA (1)...(19): siRNA sense strand
caacaaugguggcuaugau

SEQ ID NO: 121361 - RNA, 19 nt, Homo sapiens
  misc_RNA (1)...(19): siRNA sense strand
cagcuggccuguaugauug

SEQ ID NO: 121362 - RNA, 19 nt, Homo sapiens
  misc_RNA (1)...(19): siRNA sense strand
caaguuaccuccaccuucu

SEQ ID NO: 121363 - RNA, 19 nt, Homo sapiens
  misc_RNA (1)...(19): siRNA sense strand
aacaagcaaugaagcaaua

SEQ ID NO: 121364 - RNA, 19 nt, Homo sapiens
  misc_RNA (1)...(19): siRNA sense strand
gggaccagcuggccuguau

SEQ ID NO: 121365 - RNA, 19 nt, Homo sapiens
  misc_RNA (1)...(19): siRNA sense strand
gagcucaucaagaagaaua

SEQ ID NO: 121366 - RNA, 19 nt, Homo sapiens
  misc_RNA (1)...(19): siRNA sense strand
uaaagauggugcggaauga

SEQ ID NO: 121367 - RNA, 19 nt, Homo sapiens
  misc_RNA (1)...(19): siRNA sense strand
gaacaagcaaugaagcaau

SEQ ID NO: 121368 - RNA, 19 nt, Homo sapiens
  misc_RNA (1)...(19): siRNA sense strand
gguagaagcgguauuaaag

SEQ ID NO: 121369 - RNA, 19 nt, Homo sapiens
  misc_RNA (1)...(19): siRNA sense strand
caugacaccugaacaagca

SEQ ID NO: 121370 - RNA, 19 nt, Homo sapiens
  misc_RNA (1)...(19): siRNA sense strand
ccaaacugaggacuaauuu

SEQ ID NO: 121371 - RNA, 19 nt, Homo sapiens
  misc_RNA (1)...(19): siRNA sense strand
gauaacacaaugaauguca

SEQ ID NO: 121372 - RNA, 19 nt, Homo sapiens
  misc_RNA (1)...(19): siRNA sense strand
gagaaaacgucagugaaaa

SEQ ID NO: 121373 - RNA, 19 nt, Homo sapiens
  misc_RNA (1)...(19): siRNA sense strand
cagagcuccugacggguua

SEQ ID NO: 121374 - RNA, 19 nt, Homo sapiens
  misc_RNA (1)...(19): siRNA sense strand
gcccaacaaugguggcuau

SEQ ID NO: 121375 - RNA, 19 nt, Homo sapiens
  misc_RNA (1)...(19): siRNA sense strand
ggagaaaacgucagugaaa

SEQ ID NO: 121376 - RNA, 19 nt, Homo sapiens
  misc_RNA (1)...(19): siRNA sense strand
caggguagaagcgguauua

SEQ ID NO: 121377 - RNA, 19 nt, Homo sapiens
  misc_RNA (1)...(19): siRNA sense strand
caaguuugcccacucgauu

SEQ ID NO: 121378 - RNA, 19 nt, Homo sapiens
  misc_RNA (1)...(19): siRNA sense strand
gcagaugacagaugccaau

SEQ ID NO: 121379 - RNA, 19 nt, Homo sapiens
  misc_RNA (1)...(19): siRNA sense strand
ggguagaagcgguauuaaa

SEQ ID NO: 121380 - RNA, 19 nt, Homo sapiens
  misc_RNA (1)...(19): siRNA sense strand
ggugcuaucacaucuauau

SEQ ID NO: 121381 - RNA, 19 nt, Homo sapiens
  misc_RNA (1)...(19): siRNA sense strand
ggccuacgaucacaaaguc

SEQ ID NO: 121382 - RNA, 19 nt, Homo sapiens
  misc_RNA (1)...(19): siRNA sense strand
ccagcuggccuguaugauu

SEQ ID NO: 121383 - RNA, 19 nt, Homo sapiens
  misc_RNA (1)...(19): siRNA sense strand
uuaccgggcuccagaagug

SEQ ID NO: 121384 - RNA, 19 nt, Homo sapiens
  misc_RNA (1)...(19): siRNA sense strand
cuuccaaacugaggacuaa

SEQ ID NO: 121385 - RNA, 19 nt, Homo sapiens
  misc_RNA (1)...(19): siRNA sense strand
gaccagcuggccuguauga

SEQ ID NO: 121386 - RNA, 19 nt, Homo sapiens
  misc_RNA (1)...(19): siRNA sense strand
gccuuugguucgcaaguuu

SEQ ID NO: 121387 - RNA, 19 nt, Homo sapiens
  misc_RNA (1)...(19): siRNA sense strand
aaacugaggacuaauuugg

SEQ ID NO: 121388 - RNA, 19 nt, Homo sapiens
  misc_RNA (1)...(19): siRNA sense strand
gcuaucacaucuauaucca

SEQ ID NO: 121389 - RNA, 19 nt, Homo sapiens
  misc_RNA (1)...(19): siRNA sense strand
ggacagauccagguucaac

SEQ ID NO: 121390 - RNA, 19 nt, Homo sapiens
  misc_RNA (1)...(19): siRNA sense strand
ccaaaugggcuuacaacag

SEQ ID NO: 121391 - RNA, 19 nt, Homo sapiens
  misc_RNA (1)...(19): siRNA sense strand
gagcuccaccucucuaaag

SEQ ID NO: 121392 - RNA, 19 nt, Homo sapiens
  misc_RNA (1)...(19): siRNA sense strand
agaggacaguguugccaaa

SEQ ID NO: 121393 - RNA, 19 nt, Homo sapiens
  misc_RNA (1)...(19): siRNA sense strand
gcaugcccauugauaugug

SEQ ID NO: 121394 - RNA, 19 nt, Homo sapiens
  misc_RNA (1)...(19): siRNA sense strand
cuaaagauggugcggaaug

SEQ ID NO: 121395 - RNA, 19 nt, Homo sapiens
  misc_RNA (1)...(19): siRNA sense strand
aaggauaacacaaugaaug

SEQ ID NO: 121396 - RNA, 19 nt, Homo sapiens
  misc_RNA (1)...(19): siRNA sense strand
gauuuuggcuccaguuguu

SEQ ID NO: 121397 - RNA, 19 nt, Homo sapiens
  misc_RNA (1)...(19): siRNA sense strand
guagaagcgguauuaaagu

SEQ ID NO: 121398 - RNA, 19 nt, Homo sapiens
  misc_RNA (1)...(19): siRNA sense strand
caaggccuacgaucacaaa

SEQ ID NO: 121399 - RNA, 19 nt, Homo sapiens
  misc_RNA (1)...(19): siRNA sense strand
acaaggauaacacaaugaa

SEQ ID NO: 121400 - RNA, 19 nt, Homo sapiens
  misc_RNA (1)...(19): siRNA sense strand
gcaagcagcggaggagauc

SEQ ID NO: 121401 - RNA, 19 nt, Homo sapiens
  misc_RNA (1)...(19): siRNA sense strand
gagcaugaaccucuaugag

SEQ ID NO: 121402 - RNA, 19 nt, Homo sapiens
  misc_RNA (1)...(19): siRNA sense strand
ccggugcuaucacaucuau

SEQ ID NO: 121403 - RNA, 19 nt, Homo sapiens
  misc_RNA (1)...(19): siRNA sense strand
gggcuucagucugccuuug

SEQ ID NO: 121404 - RNA, 19 nt, Homo sapiens
  misc_RNA (1)...(19): siRNA sense strand
gacaaggauaacacaauga

SEQ ID NO: 121405 - RNA, 19 nt, Homo sapiens
  misc_RNA (1)...(19): siRNA sense strand
ggagauccgaauccuggaa

SEQ ID NO: 121406 - RNA, 19 nt, Homo sapiens
  misc_RNA (1)...(19): siRNA sense strand
ggcaugcccucacagaaac

SEQ ID NO: 121407 - RNA, 19 nt, Homo sapiens
  misc_RNA (1)...(19): siRNA sense strand
caaccaaaugggcuuacaa

SEQ ID NO: 121408 - RNA, 19 nt, Homo sapiens
  misc_RNA (1)...(19): siRNA sense strand
ggagcuccaccucucuaaa

SEQ ID NO: 121409 - RNA, 19 nt, Homo sapiens
  misc_RNA (1)...(19): siRNA sense strand
ccaccucucuaaaguccau

SEQ ID NO: 121410 - RNA, 19 nt, Homo sapiens
  misc_RNA (1)...(19): siRNA sense strand
ugucacgacucucucagau

SEQ ID NO: 121411 - RNA, 19 nt, Homo sapiens
  misc_RNA (1)...(19): siRNA sense strand
gcucacgacacaaccaaau

SEQ ID NO: 121412 - RNA, 19 nt, Homo sapiens
  misc_RNA (1)...(19): siRNA sense strand
caaugaagcaauacaugca

SEQ ID NO: 121413 - RNA, 19 nt, Homo sapiens
  misc_RNA (1)...(19): siRNA sense strand
ugaggaggcgguugccaaa

SEQ ID NO: 121414 - RNA, 19 nt, Homo sapiens
  misc_RNA (1)...(19): siRNA sense strand
ccaacaaugguggcuauga

SEQ ID NO: 121415 - RNA, 19 nt, Homo sapiens
  misc_RNA (1)...(19): siRNA sense strand
ucuugggucuaaaugcuaa

SEQ ID NO: 121416 - RNA, 19 nt, Homo sapiens
  misc_RNA (1)...(19): siRNA sense strand
agaagcgguauuaaaguaa

SEQ ID NO: 121417 - RNA, 19 nt, Homo sapiens
  misc_RNA (1)...(19): siRNA sense strand
ccacaucugcaugacguuu

SEQ ID NO: 121418 - RNA, 19 nt, Homo sapiens
  misc_RNA (1)...(19): siRNA sense strand
gcaggacaaggauaacaca

SEQ ID NO: 121419 - RNA, 19 nt, Homo sapiens
  misc_RNA (1)...(19): siRNA sense strand
gggucuaaaugcuaagaag

SEQ ID NO: 121420 - RNA, 19 nt, Homo sapiens
  misc_RNA (1)...(19): siRNA sense strand
cuucgaacaccaugagauu

SEQ ID NO: 121421 - RNA, 19 nt, Homo sapiens
  misc_RNA (1)...(19): siRNA sense strand
agauccagguucaacaguu

SEQ ID NO: 121422 - RNA, 19 nt, Homo sapiens
  misc_RNA (1)...(19): siRNA sense strand
acaaugguggcuaugauga

SEQ ID NO: 121423 - RNA, 19 nt, Homo sapiens
  misc_RNA (1)...(19): siRNA sense strand
caggugggcccaacaaugg

SEQ ID NO: 121424 - RNA, 19 nt, Homo sapiens
  misc_RNA (1)...(19): siRNA sense strand
ccuguaugauugaacuguu

SEQ ID NO: 121425 - RNA, 19 nt, Homo sapiens
  misc_RNA (1)...(19): siRNA sense strand
gauccugcagugcgcauga

SEQ ID NO: 121426 - RNA, 19 nt, Homo sapiens
  misc_RNA (1)...(19): siRNA sense strand
ggucaaggccuacgaucac

SEQ ID NO: 121427 - RNA, 19 nt, Homo sapiens
  misc_RNA (1)...(19): siRNA sense strand
uaaagcagcaggguagaag

SEQ ID NO: 121428 - RNA, 19 nt, Homo sapiens
  misc_RNA (1)...(19): siRNA sense strand
cuuaagcccgagaacauuu

SEQ ID NO: 121429 - RNA, 19 nt, Homo sapiens
  misc_RNA (1)...(19): siRNA sense strand
gcucaucaagaagaauaaa

SEQ ID NO: 121430 - RNA, 19 nt, Homo sapiens
  misc_RNA (1)...(19): siRNA sense strand
acaucugcaugacguuuga

SEQ ID NO: 121431 - RNA, 19 nt, Homo sapiens
  misc_RNA (1)...(19): siRNA sense strand
ugacaggugggcccaacaa

SEQ ID NO: 121432 - RNA, 19 nt, Homo sapiens
  misc_RNA (1)...(19): siRNA sense strand
ggacaguguugccaaaacu

SEQ ID NO: 121433 - RNA, 19 nt, Homo sapiens
  misc_RNA (1)...(19): siRNA sense strand
gcagugcuuggaugcuuug

SEQ ID NO: 121434 - RNA, 19 nt, Homo sapiens
  misc_RNA (1)...(19): siRNA sense strand
aaugguggcuaugaugaug

SEQ ID NO: 121435 - RNA, 19 nt, Homo sapiens
  misc_RNA (1)...(19): siRNA sense strand
acggacagauccagguuca

SEQ ID NO: 121436 - RNA, 19 nt, Homo sapiens
  misc_RNA (1)...(19): siRNA sense strand
agauggcucugugguccua

SEQ ID NO: 121437 - RNA, 19 nt, Homo sapiens
  misc_RNA (1)...(19): siRNA sense strand
uaaauuccagggcuucagu

SEQ ID NO: 121438 - RNA, 19 nt, Homo sapiens
  misc_RNA (1)...(19): siRNA sense strand
caccugaacaagcaaugaa

SEQ ID NO: 121439 - RNA, 19 nt, Homo sapiens
  misc_RNA (1)...(19): siRNA sense strand
acagaugccaaugggaaua

SEQ ID NO: 121440 - RNA, 19 nt, Homo sapiens
  misc_RNA (1)...(19): siRNA sense strand
augaagcaauacaugcaaa

SEQ ID NO: 121441 - RNA, 19 nt, Homo sapiens
  misc_RNA (1)...(19): siRNA sense strand
uggaacaccugcggaagca

SEQ ID NO: 121442 - RNA, 19 nt, Homo sapiens
  misc_RNA (1)...(19): siRNA sense strand
gggagcuccaccucucuaa

SEQ ID NO: 121443 - RNA, 19 nt, Homo sapiens
  misc_RNA (1)...(19): siRNA sense strand
cuguaugauugaacuguug

SEQ ID NO: 121444 - RNA, 19 nt, Homo sapiens
  misc_RNA (1)...(19): siRNA sense strand
caaggauaacacaaugaau

SEQ ID NO: 121445 - RNA, 19 nt, Homo sapiens
  misc_RNA (1)...(19): siRNA sense strand
gacagaugccaaugggaau

SEQ ID NO: 121446 - RNA, 19 nt, Homo sapiens
  misc_RNA (1)...(19): siRNA sense strand
acacaaccaaaugggcuua

SEQ ID NO: 121447 - RNA, 19 nt, Homo sapiens
  misc_RNA (1)...(19): siRNA sense strand
uggcaugcccauugauaug

SEQ ID NO: 121448 - RNA, 19 nt, Homo sapiens
  misc_RNA (1)...(19): siRNA sense strand
gcuuggaugcuuugcacaa

SEQ ID NO: 121449 - RNA, 19 nt, Homo sapiens
  misc_RNA (1)...(19): siRNA sense strand
gcaaccacaucugcaugac

SEQ ID NO: 121450 - RNA, 19 nt, Homo sapiens
  misc_RNA (1)...(19): siRNA sense strand
ggacaaggauaacacaaug

SEQ ID NO: 121451 - RNA, 19 nt, Homo sapiens
  misc_RNA (1)...(19): siRNA sense strand
caaaugggcuuacaacagu

SEQ ID NO: 121452 - RNA, 19 nt, Homo sapiens
  misc_RNA (1)...(19): siRNA sense strand
ggacagugcucacgacaca

SEQ ID NO: 121453 - RNA, 19 nt, Homo sapiens
  misc_RNA (1)...(19): siRNA sense strand
cagcuacccugaaauauau

SEQ ID NO: 121454 - RNA, 19 nt, Homo sapiens
  misc_RNA (1)...(19): siRNA sense strand
uagaagcgguauuaaagua

SEQ ID NO: 121455 - RNA, 19 nt, Homo sapiens
  misc_RNA (1)...(19): siRNA sense strand
gcaguaagcacacaaugaa

SEQ ID NO: 121456 - RNA, 19 nt, Homo sapiens
  misc_RNA (1)...(19): siRNA sense strand
ucacguggcuuacagguau

SEQ ID NO: 121457 - RNA, 19 nt, Homo sapiens
  misc_RNA (1)...(19): siRNA sense strand
ggaagcaggacaaggauaa

SEQ ID NO: 121458 - RNA, 19 nt, Homo sapiens
  misc_RNA (1)...(19): siRNA sense strand
gcacguggcccuaaagaug

SEQ ID NO: 121459 - RNA, 19 nt, Homo sapiens
  misc_RNA (1)...(19): siRNA sense strand
ucacaucuauauccaaguu

SEQ ID NO: 121460 - RNA, 19 nt, Homo sapiens
  misc_RNA (1)...(19): siRNA sense strand
ggacuaauuuggcgcagau

SEQ ID NO: 121461 - RNA, 19 nt, Homo sapiens
  misc_RNA (1)...(19): siRNA sense strand
caacaaugguggcuaugau

SEQ ID NO: 121462 - RNA, 19 nt, Homo sapiens
  misc_RNA (1)...(19): siRNA sense strand
cagcuggccuguaugauug

SEQ ID NO: 121463 - RNA, 19 nt, Homo sapiens
  misc_RNA (1)...(19): siRNA sense strand
caaguuaccuccaccuucu

SEQ ID NO: 121464 - RNA, 19 nt, Homo sapiens
  misc_RNA (1)...(19): siRNA sense strand
aacaagcaaugaagcaaua

SEQ ID NO: 121465 - RNA, 19 nt, Homo sapiens
  misc_RNA (1)...(19): siRNA sense strand
gggaccagcuggccuguau

SEQ ID NO: 121466 - RNA, 19 nt, Homo sapiens
  misc_RNA (1)...(19): siRNA sense strand
gagcucaucaagaagaaua

SEQ ID NO: 121467 - RNA, 19 nt, Homo sapiens
  misc_RNA (1)...(19): siRNA sense strand
uaaagauggugcggaauga

SEQ ID NO: 121468 - RNA, 19 nt, Homo sapiens
  misc_RNA (1)...(19): siRNA sense strand
gaacaagcaaugaagcaau

SEQ ID NO: 121469 - RNA, 19 nt, Homo sapiens
  misc_RNA (1)...(19): siRNA sense strand
gguagaagcgguauuaaag

SEQ ID NO: 121470 - RNA, 19 nt, Homo sapiens
  misc_RNA (1)...(19): siRNA sense strand
guaagcacacaaugaauga

SEQ ID NO: 121471 - RNA, 19 nt, Homo sapiens
  misc_RNA (1)...(19): siRNA sense strand
caugacaccugaacaagca

SEQ ID NO: 121472 - RNA, 19 nt, Homo sapiens
  misc_RNA (1)...(19): siRNA sense strand
ccaaacugaggacuaauuu

SEQ ID NO: 121473 - RNA, 19 nt, Homo sapiens
  misc_RNA (1)...(19): siRNA sense strand
gauaacacaaugaauguca

SEQ ID NO: 121474 - RNA, 19 nt, Homo sapiens
  misc_RNA (1)...(19): siRNA sense strand
gagaaaacgucagugaaaa

SEQ ID NO: 121475 - RNA, 19 nt, Homo sapiens
  misc_RNA (1)...(19): siRNA sense strand
cagagcuccugacggguua

SEQ ID NO: 121476 - RNA, 19 nt, Homo sapiens
  misc_RNA (1)...(19): siRNA sense strand
gcccaacaaugguggcuau

SEQ ID NO: 121477 - RNA, 19 nt, Homo sapiens
  misc_RNA (1)...(19): siRNA sense strand
ggagaaaacgucagugaaa

SEQ ID NO: 121478 - RNA, 19 nt, Homo sapiens
  misc_RNA (1)...(19): siRNA sense strand
caggguagaagcgguauua

SEQ ID NO: 121479 - RNA, 19 nt, Homo sapiens
  misc_RNA (1)...(19): siRNA sense strand
caaguuugcccacucgauu

SEQ ID NO: 121480 - RNA, 19 nt, Homo sapiens
  misc_RNA (1)...(19): siRNA sense strand
gcagaugacagaugccaau

SEQ ID NO: 121481 - RNA, 19 nt, Homo sapiens
  misc_RNA (1)...(19): siRNA sense strand
ggguagaagcgguauuaaa

SEQ ID NO: 121482 - RNA, 19 nt, Homo sapiens
  misc_RNA (1)...(19): siRNA sense strand
ggugcuaucacaucuauau

SEQ ID NO: 121483 - RNA, 19 nt, Homo sapiens
  misc_RNA (1)...(19): siRNA sense strand
ggccuacgaucacaaaguc

SEQ ID NO: 121484 - RNA, 19 nt, Homo sapiens
  misc_RNA (1)...(19): siRNA sense strand
ccagcuggccuguaugauu

SEQ ID NO: 121485 - RNA, 19 nt, Homo sapiens
  misc_RNA (1)...(19): siRNA sense strand
uuaccgggcuccagaagug

SEQ ID NO: 121486 - RNA, 19 nt, Homo sapiens
  misc_RNA (1)...(19): siRNA sense strand
ugaaugaucaccugcaugu

SEQ ID NO: 121487 - RNA, 19 nt, Homo sapiens
  misc_RNA (1)...(19): siRNA sense strand
cuuccaaacugaggacuaa

SEQ ID NO: 121488 - RNA, 19 nt, Homo sapiens
  misc_RNA (1)...(19): siRNA sense strand
gaccagcuggccuguauga

SEQ ID NO: 121489 - RNA, 19 nt, Homo sapiens
  misc_RNA (1)...(19): siRNA sense strand
ggcaguaagcacacaauga

SEQ ID NO: 121490 - RNA, 19 nt, Homo sapiens
  misc_RNA (1)...(19): siRNA sense strand
aaacugaggacuaauuugg

SEQ ID NO: 121491 - RNA, 19 nt, Homo sapiens
  misc_RNA (1)...(19): siRNA sense strand
gccuuugguucgcaaguuu

SEQ ID NO: 121492 - RNA, 19 nt, Homo sapiens
  misc_RNA (1)...(19): siRNA sense strand
ccaaaugggcuuacaacag

SEQ ID NO: 121493 - RNA, 19 nt, Homo sapiens
  misc_RNA (1)...(19): siRNA sense strand
gcuaucacaucuauaucca

SEQ ID NO: 121494 - RNA, 19 nt, Homo sapiens
  misc_RNA (1)...(19): siRNA sense strand
ggacagauccagguucaac

SEQ ID NO: 121495 - RNA, 19 nt, Homo sapiens
  misc_RNA (1)...(19): siRNA sense strand
gagcuccaccucucuaaag

SEQ ID NO: 121496 - RNA, 19 nt, Homo sapiens
  misc_RNA (1)...(19): siRNA sense strand
agaggacaguguugccaaa

SEQ ID NO: 121497 - RNA, 19 nt, Homo sapiens
  misc_RNA (1)...(19): siRNA sense strand
gcaugcccauugauaugug

SEQ ID NO: 121498 - RNA, 19 nt, Homo sapiens
  misc_RNA (1)...(19): siRNA sense strand
cuaaagauggugcggaaug

SEQ ID NO: 121499 - RNA, 19 nt, Homo sapiens
  misc_RNA (1)...(19): siRNA sense strand
aaggauaacacaaugaaug

SEQ ID NO: 121500 - RNA, 19 nt, Homo sapiens
  misc_RNA (1)...(19): siRNA sense strand
gauuuuggcuccaguuguu

SEQ ID NO: 121501 - RNA, 19 nt, Homo sapiens
  misc_RNA (1)...(19): siRNA sense strand
guagaagcgguauuaaagu

SEQ ID NO: 121502 - RNA, 19 nt, Homo sapiens
  misc_RNA (1)...(19): siRNA sense strand
caaggccuacgaucacaaa

SEQ ID NO: 121503 - RNA, 19 nt, Homo sapiens
  misc_RNA (1)...(19): siRNA sense strand
acaaggauaacacaaugaa

SEQ ID NO: 121504 - RNA, 19 nt, Homo sapiens
  misc_RNA (1)...(19): siRNA sense strand
gcaagcagcggaggagauc

SEQ ID NO: 121505 - RNA, 19 nt, Homo sapiens
  misc_RNA (1)...(19): siRNA sense strand
gagcaugaaccucuaugag

SEQ ID NO: 121506 - RNA, 19 nt, Homo sapiens
  misc_RNA (1)...(19): siRNA sense strand
ccggugcuaucacaucuau

SEQ ID NO: 121507 - RNA, 19 nt, Homo sapiens
  misc_RNA (1)...(19): siRNA sense strand
gggcuucagucugccuuug

SEQ ID NO: 121508 - RNA, 19 nt, Homo sapiens
  misc_RNA (1)...(19): siRNA sense strand
gacaaggauaacacaauga

SEQ ID NO: 121509 - RNA, 19 nt, Homo sapiens
  misc_RNA (1)...(19): siRNA sense strand
caaccaaaugggcuuacaa

SEQ ID NO: 121510 - RNA, 19 nt, Homo sapiens
  misc_RNA (1)...(19): siRNA sense strand
ggcaugcccucacagaaac

SEQ ID NO: 121511 - RNA, 19 nt, Homo sapiens
  misc_RNA (1)...(19): siRNA sense strand
ggagauccgaauccuggaa

SEQ ID NO: 121512 - RNA, 19 nt, Homo sapiens
  misc_RNA (1)...(19): siRNA sense strand
ggagcuccaccucucuaaa

SEQ ID NO: 121513 - RNA, 19 nt, Homo sapiens
  misc_RNA (1)...(19): siRNA sense strand
ccaccucucuaaaguccau

SEQ ID NO: 121514 - RNA, 19 nt, Homo sapiens
  misc_RNA (1)...(19): siRNA sense strand
ugucacgacucucucagau

SEQ ID NO: 121515 - RNA, 19 nt, Homo sapiens
  misc_RNA (1)...(19): siRNA sense strand
gcucacgacacaaccaaau

SEQ ID NO: 121516 - RNA, 19 nt, Homo sapiens
  misc_RNA (1)...(19): siRNA sense strand
caaugaagcaauacaugca

SEQ ID NO: 121517 - RNA, 19 nt, Homo sapiens
  misc_RNA (1)...(19): siRNA sense strand
ugaggaggcgguugccaaa

SEQ ID NO: 121518 - RNA, 19 nt, Homo sapiens
  misc_RNA (1)...(19): siRNA sense strand
ccaacaaugguggcuauga

SEQ ID NO: 121519 - RNA, 19 nt, Homo sapiens
  misc_RNA (1)...(19): siRNA sense strand
ucuugggucuaaaugcuaa

SEQ ID NO: 121520 - RNA, 19 nt, Homo sapiens
  misc_RNA (1)...(19): siRNA sense strand
agaagcgguauuaaaguaa

SEQ ID NO: 121521 - RNA, 19 nt, Homo sapiens
  misc_RNA (1)...(19): siRNA sense strand
ccacaucugcaugacguuu

SEQ ID NO: 121522 - RNA, 19 nt, Homo sapiens
  misc_RNA (1)...(19): siRNA sense strand
gcaggacaaggauaacaca

SEQ ID NO: 121523 - RNA, 19 nt, Homo sapiens
  misc_RNA (1)...(19): siRNA sense strand
gggucuaaaugcuaagaag

SEQ ID NO: 121524 - RNA, 19 nt, Homo sapiens
  misc_RNA (1)...(19): siRNA sense strand
cuucgaacaccaugagauu

SEQ ID NO: 121525 - RNA, 19 nt, Homo sapiens
  misc_RNA (1)...(19): siRNA sense strand
agauccagguucaacaguu

SEQ ID NO: 121526 - RNA, 19 nt, Homo sapiens
  misc_RNA (1)...(19): siRNA sense strand
acaaugguggcuaugauga

SEQ ID NO: 121527 - RNA, 19 nt, Homo sapiens
  misc_RNA (1)...(19): siRNA sense strand
caggugggcccaacaaugg

SEQ ID NO: 121528 - RNA, 19 nt, Homo sapiens
  misc_RNA (1)...(19): siRNA sense strand
ccuguaugauugaacuguu

SEQ ID NO: 121529 - RNA, 19 nt, Homo sapiens
  misc_RNA (1)...(19): siRNA sense strand
gauccugcagugcgcauga

SEQ ID NO: 121530 - RNA, 19 nt, Homo sapiens
  misc_RNA (1)...(19): siRNA sense strand
ggucaaggccuacgaucac

SEQ ID NO: 121531 - RNA, 19 nt, Homo sapiens
  misc_RNA (1)...(19): siRNA sense strand
uaaagcagcaggguagaag

SEQ ID NO: 121532 - RNA, 19 nt, Homo sapiens
  misc_RNA (1)...(19): siRNA sense strand
cuuaagcccgagaacauuu

SEQ ID NO: 121533 - RNA, 19 nt, Homo sapiens
  misc_RNA (1)...(19): siRNA sense strand
gcucaucaagaagaauaaa

SEQ ID NO: 121534 - RNA, 19 nt, Homo sapiens
  misc_RNA (1)...(19): siRNA sense strand
acaucugcaugacguuuga

SEQ ID NO: 121535 - RNA, 19 nt, Homo sapiens
  misc_RNA (1)...(19): siRNA sense strand
ugacaggugggcccaacaa

SEQ ID NO: 121536 - RNA, 19 nt, Homo sapiens
  misc_RNA (1)...(19): siRNA sense strand
ggacaguguugccaaaacu

SEQ ID NO: 121537 - RNA, 19 nt, Homo sapiens
  misc_RNA (1)...(19): siRNA sense strand
gcagugcuuggaugcuuug

SEQ ID NO: 121538 - RNA, 19 nt, Homo sapiens
  misc_RNA (1)...(19): siRNA sense strand
aaugguggcuaugaugaug

SEQ ID NO: 121539 - RNA, 19 nt, Homo sapiens
  misc_RNA (1)...(19): siRNA sense strand
acggacagauccagguuca

SEQ ID NO: 121540 - RNA, 19 nt, Homo sapiens
  misc_RNA (1)...(19): siRNA sense strand
agauggcucugugguccua

SEQ ID NO: 121541 - RNA, 19 nt, Homo sapiens
  misc_RNA (1)...(19): siRNA sense strand
uaaauuccagggcuucagu

SEQ ID NO: 121542 - RNA, 19 nt, Homo sapiens
  misc_RNA (1)...(19): siRNA sense strand
aguaagcacacaaugaaug

SEQ ID NO: 121543 - RNA, 19 nt, Homo sapiens
  misc_RNA (1)...(19): siRNA sense strand
acagaugccaaugggaaua

SEQ ID NO: 121544 - RNA, 19 nt, Homo sapiens
  misc_RNA (1)...(19): siRNA sense strand
gggagcuccaccucucuaa

SEQ ID NO: 121545 - RNA, 19 nt, Homo sapiens
  misc_RNA (1)...(19): siRNA sense strand
caccugaacaagcaaugaa

SEQ ID NO: 121546 - RNA, 19 nt, Homo sapiens
  misc_RNA (1)...(19): siRNA sense strand
augaagcaauacaugcaaa

SEQ ID NO: 121547 - RNA, 19 nt, Homo sapiens
  misc_RNA (1)...(19): siRNA sense strand
uggaacaccugcggaagca

SEQ ID NO: 121548 - RNA, 19 nt, Homo sapiens
  misc_RNA (1)...(19): siRNA sense strand
cuguaugauugaacuguug

SEQ ID NO: 121549 - RNA, 19 nt, Homo sapiens
  misc_RNA (1)...(19): siRNA sense strand
gacagaugccaaugggaau

SEQ ID NO: 121550 - RNA, 19 nt, Homo sapiens
  misc_RNA (1)...(19): siRNA sense strand
gaacuuggacugauuauug

SEQ ID NO: 121551 - RNA, 19 nt, Homo sapiens
  misc_RNA (1)...(19): siRNA sense strand
gaaacuugcuccagaagaa

SEQ ID NO: 121552 - RNA, 19 nt, Homo sapiens
  misc_RNA (1)...(19): siRNA sense strand
ggugguauccuuauaauua

SEQ ID NO: 121553 - RNA, 19 nt, Homo sapiens
  misc_RNA (1)...(19): siRNA sense strand
gaaagacuaucucccaguu

SEQ ID NO: 121554 - RNA, 19 nt, Homo sapiens
  misc_RNA (1)...(19): siRNA sense strand
gcagauauuugauugaugu

SEQ ID NO: 121555 - RNA, 19 nt, Homo sapiens
  misc_RNA (1)...(19): siRNA sense strand
gaagaacuuggacugauua

SEQ ID NO: 121556 - RNA, 19 nt, Homo sapiens
  misc_RNA (1)...(19): siRNA sense strand
guacccaggucaagugauu

SEQ ID NO: 121557 - RNA, 19 nt, Homo sapiens
  misc_RNA (1)...(19): siRNA sense strand
aaacaaggaccuagguaua

SEQ ID NO: 121558 - RNA, 19 nt, Homo sapiens
  misc_RNA (1)...(19): siRNA sense strand
ggagaggacuauucacaca

SEQ ID NO: 121559 - RNA, 19 nt, Homo sapiens
  misc_RNA (1)...(19): siRNA sense strand
ggaccuagguauaaucuac

SEQ ID NO: 121560 - RNA, 19 nt, Homo sapiens
  misc_RNA (1)...(19): siRNA sense strand
ggacucguuucauugcuuu

SEQ ID NO: 121561 - RNA, 19 nt, Homo sapiens
  misc_RNA (1)...(19): siRNA sense strand
agaaacuguuccuuacuua

SEQ ID NO: 121562 - RNA, 19 nt, Homo sapiens
  misc_RNA (1)...(19): siRNA sense strand
ugaagaacuuggacugauu

SEQ ID NO: 121563 - RNA, 19 nt, Homo sapiens
  misc_RNA (1)...(19): siRNA sense strand
cagagaauccacauguuua

SEQ ID NO: 121564 - RNA, 19 nt, Homo sapiens
  misc_RNA (1)...(19): siRNA sense strand
aaagaaacuugcuccagaa

SEQ ID NO: 121565 - RNA, 19 nt, Homo sapiens
  misc_RNA (1)...(19): siRNA sense strand
ggacauugcuuagaaagac

SEQ ID NO: 121566 - RNA, 19 nt, Homo sapiens
  misc_RNA (1)...(19): siRNA sense strand
cagaaacuguuccuuacuu

SEQ ID NO: 121567 - RNA, 19 nt, Homo sapiens
  misc_RNA (1)...(19): siRNA sense strand
gaggccagaugaugcaauu

SEQ ID NO: 121568 - RNA, 19 nt, Homo sapiens
  misc_RNA (1)...(19): siRNA sense strand
gaaacuguuccuuacuuaa

SEQ ID NO: 121569 - RNA, 19 nt, Homo sapiens
  misc_RNA (1)...(19): siRNA sense strand
ccagaggauuugccagaaa

SEQ ID NO: 121570 - RNA, 19 nt, Homo sapiens
  misc_RNA (1)...(19): siRNA sense strand
ccacuguacccaugguuua

SEQ ID NO: 121571 - RNA, 19 nt, Homo sapiens
  misc_RNA (1)...(19): siRNA sense strand
ucagaaugguccuaucaga

SEQ ID NO: 121572 - RNA, 19 nt, Homo sapiens
  misc_RNA (1)...(19): siRNA sense strand
ucagagaauccacauguuu

SEQ ID NO: 121573 - RNA, 19 nt, Homo sapiens
  misc_RNA (1)...(19): siRNA sense strand
ucacucagcuccucgacau

SEQ ID NO: 121574 - RNA, 19 nt, Homo sapiens
  misc_RNA (1)...(19): siRNA sense strand
agaaugguccuaucagaaa

SEQ ID NO: 121575 - RNA, 19 nt, Homo sapiens
  misc_RNA (1)...(19): siRNA sense strand
gguccuaucagaaagaauu

SEQ ID NO: 121576 - RNA, 19 nt, Homo sapiens
  misc_RNA (1)...(19): siRNA sense strand
gccagaaacuguuccuuac

SEQ ID NO: 121577 - RNA, 19 nt, Homo sapiens
  misc_RNA (1)...(19): siRNA sense strand
aaacuacauugaagaccuu

SEQ ID NO: 121578 - RNA, 19 nt, Homo sapiens
  misc_RNA (1)...(19): siRNA sense strand
ucaagugccugaugaugag

SEQ ID NO: 121579 - RNA, 19 nt, Homo sapiens
  misc_RNA (1)...(19): siRNA sense strand
uauaauuacuccagacucu

SEQ ID NO: 121580 - RNA, 19 nt, Homo sapiens
  misc_RNA (1)...(19): siRNA sense strand
gaaugguccuaucagaaag

SEQ ID NO: 121581 - RNA, 19 nt, Homo sapiens
  misc_RNA (1)...(19): siRNA sense strand
gccagaugaugcaauugaa

SEQ ID NO: 121582 - RNA, 19 nt, Homo sapiens
  misc_RNA (1)...(19): siRNA sense strand
ugcaaccaguccacaauaa

SEQ ID NO: 121583 - RNA, 19 nt, Homo sapiens
  misc_RNA (1)...(19): siRNA sense strand
ugccagaaacuguuccuua

SEQ ID NO: 121584 - RNA, 19 nt, Homo sapiens
  misc_RNA (1)...(19): siRNA sense strand
acaaggaccuagguauaau

SEQ ID NO: 121585 - RNA, 19 nt, Homo sapiens
  misc_RNA (1)...(19): siRNA sense strand
uaaacaaggaccuagguau

SEQ ID NO: 121586 - RNA, 19 nt, Homo sapiens
  misc_RNA (1)...(19): siRNA sense strand
ggccagaugaugcaauuga

SEQ ID NO: 121587 - RNA, 19 nt, Homo sapiens
  misc_RNA (1)...(19): siRNA sense strand
gccugggacucguuucauu

SEQ ID NO: 121588 - RNA, 19 nt, Homo sapiens
  misc_RNA (1)...(19): siRNA sense strand
cacaggagguauucuugga

SEQ ID NO: 121589 - RNA, 19 nt, Homo sapiens
  misc_RNA (1)...(19): siRNA sense strand
cagaaugguccuaucagaa

SEQ ID NO: 121590 - RNA, 19 nt, Homo sapiens
  misc_RNA (1)...(19): siRNA sense strand
aggacuggcuaccucauuu

SEQ ID NO: 121591 - RNA, 19 nt, Homo sapiens
  misc_RNA (1)...(19): siRNA sense strand
ggacgcuccucagccaaga

SEQ ID NO: 121592 - RNA, 19 nt, Homo sapiens
  misc_RNA (1)...(19): siRNA sense strand
ggacuggcuaccucauuug

SEQ ID NO: 121593 - RNA, 19 nt, Homo sapiens
  misc_RNA (1)...(19): siRNA sense strand
gcaacaaucagucagaaaa

SEQ ID NO: 121594 - RNA, 19 nt, Homo sapiens
  misc_RNA (1)...(19): siRNA sense strand
ccacaauaagccuguuaaa

SEQ ID NO: 121595 - RNA, 19 nt, Homo sapiens
  misc_RNA (1)...(19): siRNA sense strand
gggacucguuucauugcuu

SEQ ID NO: 121596 - RNA, 19 nt, Homo sapiens
  misc_RNA (1)...(19): siRNA sense strand
acacccagacccaaaguuu

SEQ ID NO: 121597 - RNA, 19 nt, Homo sapiens
  misc_RNA (1)...(19): siRNA sense strand
cuaccucauuugcagauau

SEQ ID NO: 121598 - RNA, 19 nt, Homo sapiens
  misc_RNA (1)...(19): siRNA sense strand
aacaaggaccuagguauaa

SEQ ID NO: 121599 - RNA, 19 nt, Homo sapiens
  misc_RNA (1)...(19): siRNA sense strand
agacucagcacaucucaug

SEQ ID NO: 121600 - RNA, 19 nt, Homo sapiens
  misc_RNA (1)...(19): siRNA sense strand
uaccucauuugcagauauu

SEQ ID NO: 121601 - RNA, 19 nt, Homo sapiens
  misc_RNA (1)...(19): siRNA sense strand
cgaaagguggaaagacuau

SEQ ID NO: 121602 - RNA, 19 nt, Homo sapiens
  misc_RNA (1)...(19): siRNA sense strand
ucacacaggagguauucuu

SEQ ID NO: 121603 - RNA, 19 nt, Homo sapiens
  misc_RNA (1)...(19): siRNA sense strand
aacuuggacugauuauuga

SEQ ID NO: 121604 - RNA, 19 nt, Homo sapiens
  misc_RNA (1)...(19): siRNA sense strand
ggauuugccagaaacuguu

SEQ ID NO: 121605 - RNA, 19 nt, Homo sapiens
  misc_RNA (1)...(19): siRNA sense strand
ccaagaagaagggcggaaa

SEQ ID NO: 121606 - RNA, 19 nt, Homo sapiens
  misc_RNA (1)...(19): siRNA sense strand
gugguauccuuauaauuac

SEQ ID NO: 121607 - RNA, 19 nt, Homo sapiens
  misc_RNA (1)...(19): siRNA sense strand
gcaaccaguccacaauaag

SEQ ID NO: 121608 - RNA, 19 nt, Homo sapiens
  misc_RNA (1)...(19): siRNA sense strand
agacaaaacuacauugaag

SEQ ID NO: 121609 - RNA, 19 nt, Homo sapiens
  misc_RNA (1)...(19): siRNA sense strand
cagaggauuugccagaaac

SEQ ID NO: 121610 - RNA, 19 nt, Homo sapiens
  misc_RNA (1)...(19): siRNA sense strand
uauccagccuguugggaau

SEQ ID NO: 121611 - RNA, 19 nt, Homo sapiens
  misc_RNA (1)...(19): siRNA sense strand
gacauugcuuagaaagaca

SEQ ID NO: 121612 - RNA, 19 nt, Homo sapiens
  misc_RNA (1)...(19): siRNA sense strand
gaagggcggaaaccacauc

SEQ ID NO: 121613 - RNA, 19 nt, Homo sapiens
  misc_RNA (1)...(19): siRNA sense strand
gaagacucagcacaucuca

SEQ ID NO: 121614 - RNA, 19 nt, Homo sapiens
  misc_RNA (1)...(19): siRNA sense strand
gcuccucagccaagaagaa

SEQ ID NO: 121615 - RNA, 19 nt, Homo sapiens
  misc_RNA (1)...(19): siRNA sense strand
gcuaccucauuugcagaua

SEQ ID NO: 121616 - RNA, 19 nt, Homo sapiens
  misc_RNA (1)...(19): siRNA sense strand
ggaaugugaagcccaaugc

SEQ ID NO: 121617 - RNA, 19 nt, Homo sapiens
  misc_RNA (1)...(19): siRNA sense strand
cuagguauaaucuacauca

SEQ ID NO: 121618 - RNA, 19 nt, Homo sapiens
  misc_RNA (1)...(19): siRNA sense strand
gaaagacaaaacuacauug

SEQ ID NO: 121619 - RNA, 19 nt, Homo sapiens
  misc_RNA (1)...(19): siRNA sense strand
uaacaaaauccgagaacaa

SEQ ID NO: 121620 - RNA, 19 nt, Homo sapiens
  misc_RNA (1)...(19): siRNA sense strand
uuaaacaaggaccuaggua

SEQ ID NO: 121621 - RNA, 19 nt, Homo sapiens
  misc_RNA (1)...(19): siRNA sense strand
gaaaccacauccccgaaag

SEQ ID NO: 121622 - RNA, 19 nt, Homo sapiens
  misc_RNA (1)...(19): siRNA sense strand
caaaauccgagaacaaaau

SEQ ID NO: 121623 - RNA, 19 nt, Homo sapiens
  misc_RNA (1)...(19): siRNA sense strand
cccgaaagguggaaagacu

SEQ ID NO: 121624 - RNA, 19 nt, Homo sapiens
  misc_RNA (1)...(19): siRNA sense strand
gaaggcgugaggccagaug

SEQ ID NO: 121625 - RNA, 19 nt, Homo sapiens
  misc_RNA (1)...(19): siRNA sense strand
acucagcuccucgacauuu

SEQ ID NO: 121626 - RNA, 19 nt, Homo sapiens
  misc_RNA (1)...(19): siRNA sense strand
gaacaaaaugaagaacuug

SEQ ID NO: 121627 - RNA, 19 nt, Homo sapiens
  misc_RNA (1)...(19): siRNA sense strand
ccgaaagguggaaagacua

SEQ ID NO: 121628 - RNA, 19 nt, Homo sapiens
  misc_RNA (1)...(19): siRNA sense strand
uuauaaaccagaggauuug

SEQ ID NO: 121629 - RNA, 19 nt, Homo sapiens
  misc_RNA (1)...(19): siRNA sense strand
uuucagagaauccacaugu

SEQ ID NO: 121630 - RNA, 19 nt, Homo sapiens
  misc_RNA (1)...(19): siRNA sense strand
gggacauugcuuagaaaga

SEQ ID NO: 121631 - RNA, 19 nt, Homo sapiens
  misc_RNA (1)...(19): siRNA sense strand
ccagaugaugcaauugaau

SEQ ID NO: 121632 - RNA, 19 nt, Homo sapiens
  misc_RNA (1)...(19): siRNA sense strand
acacgcuguuaauggguuu

SEQ ID NO: 121633 - RNA, 19 nt, Homo sapiens
  misc_RNA (1)...(19): siRNA sense strand
uugcaacaaucagucagaa

SEQ ID NO: 121634 - RNA, 19 nt, Homo sapiens
  misc_RNA (1)...(19): siRNA sense strand
caaggaccuagguauaauc

SEQ ID NO: 121635 - RNA, 19 nt, Homo sapiens
  misc_RNA (1)...(19): siRNA sense strand
ggaaaccacauccccgaaa

SEQ ID NO: 121636 - RNA, 19 nt, Homo sapiens
  misc_RNA (1)...(19): siRNA sense strand
guccacaauaagccuguua

SEQ ID NO: 121637 - RNA, 19 nt, Homo sapiens
  misc_RNA (1)...(19): siRNA sense strand
ucguuucauugcuuucaaa

SEQ ID NO: 121638 - RNA, 19 nt, Homo sapiens
  misc_RNA (1)...(19): siRNA sense strand
caaauaagcucagaacaaa

SEQ ID NO: 121639 - RNA, 19 nt, Homo sapiens
  misc_RNA (1)...(19): siRNA sense strand
gacaagaaauccaaacaua

SEQ ID NO: 121640 - RNA, 19 nt, Homo sapiens
  misc_RNA (1)...(19): siRNA sense strand
ggaacgagacccucacuua

SEQ ID NO: 121641 - RNA, 19 nt, Homo sapiens
  misc_RNA (1)...(19): siRNA sense strand
gaucacagaugaagacaug

SEQ ID NO: 121642 - RNA, 19 nt, Homo sapiens
  misc_RNA (1)...(19): siRNA sense strand
ggacaagacugaagacaag

SEQ ID NO: 121643 - RNA, 19 nt, Homo sapiens
  misc_RNA (1)...(19): siRNA sense strand
gcaaauaagcucagaacaa

SEQ ID NO: 121644 - RNA, 19 nt, Homo sapiens
  misc_RNA (1)...(19): siRNA sense strand
ggccagauguggacaagaa

SEQ ID NO: 121645 - RNA, 19 nt, Homo sapiens
  misc_RNA (1)...(19): siRNA sense strand
ucaagcagaucuccgacua

SEQ ID NO: 121646 - RNA, 19 nt, Homo sapiens
  misc_RNA (1)...(19): siRNA sense strand
uuaaugaggaguucuguua

SEQ ID NO: 121647 - RNA, 19 nt, Homo sapiens
  misc_RNA (1)...(19): siRNA sense strand
gcagaucuccgacuacuuc

SEQ ID NO: 121648 - RNA, 19 nt, Homo sapiens
  misc_RNA (1)...(19): siRNA sense strand
ggaguucuguuacgagauc

SEQ ID NO: 121649 - RNA, 19 nt, Homo sapiens
  misc_RNA (1)...(19): siRNA sense strand
caagaaauccaaacauaag

SEQ ID NO: 121650 - RNA, 19 nt, Homo sapiens
  misc_RNA (1)...(19): siRNA sense strand
gaagacaugauccgcaaga

SEQ ID NO: 121651 - RNA, 19 nt, Homo sapiens
  misc_RNA (1)...(19): siRNA sense strand
ccaagggccugaagccaau

SEQ ID NO: 121652 - RNA, 19 nt, Homo sapiens
  misc_RNA (1)...(19): siRNA sense strand
gaacgagacccucacuuac

SEQ ID NO: 121653 - RNA, 19 nt, Homo sapiens
  misc_RNA (1)...(19): siRNA sense strand
gagccaguaaggcaaauaa

SEQ ID NO: 121654 - RNA, 19 nt, Homo sapiens
  misc_RNA (1)...(19): siRNA sense strand
uaagacagcggugaagaaa

SEQ ID NO: 121655 - RNA, 19 nt, Homo sapiens
  misc_RNA (1)...(19): siRNA sense strand
ggacaagaaauccaaacau

SEQ ID NO: 121656 - RNA, 19 nt, Homo sapiens
  misc_RNA (1)...(19): siRNA sense strand
acgagacccucacuuacua

SEQ ID NO: 121657 - RNA, 19 nt, Homo sapiens
  misc_RNA (1)...(19): siRNA sense strand
ggacaaauuccggcacaau

SEQ ID NO: 121658 - RNA, 19 nt, Homo sapiens
  misc_RNA (1)...(19): siRNA sense strand
gaaauccaaacauaagaca

SEQ ID NO: 121659 - RNA, 19 nt, Homo sapiens
  misc_RNA (1)...(19): siRNA sense strand
acaaauuccggcacaauga

SEQ ID NO: 121660 - RNA, 19 nt, Homo sapiens
  misc_RNA (1)...(19): siRNA sense strand
ggaguuuaaugaggaguuc

SEQ ID NO: 121661 - RNA, 19 nt, Homo sapiens
  misc_RNA (1)...(19): siRNA sense strand
gacaaauuccggcacaaug

SEQ ID NO: 121662 - RNA, 19 nt, Homo sapiens
  misc_RNA (1)...(19): siRNA sense strand
gggauuacgacauuggaaa

SEQ ID NO: 121663 - RNA, 19 nt, Homo sapiens
  misc_RNA (1)...(19): siRNA sense strand
gcaagacccugcggaucuc

SEQ ID NO: 121664 - RNA, 19 nt, Homo sapiens
  misc_RNA (1)...(19): siRNA sense strand
cguuugggauuacgacauu

SEQ ID NO: 121665 - RNA, 19 nt, Homo sapiens
  misc_RNA (1)...(19): siRNA sense strand
ucaaguacagcucacagaa

SEQ ID NO: 121666 - RNA, 19 nt, Homo sapiens
  misc_RNA (1)...(19): siRNA sense strand
accaagaccuucaacaucu

SEQ ID NO: 121667 - RNA, 19 nt, Homo sapiens
  misc_RNA (1)...(19): siRNA sense strand
gcccuccacugcaccauca

SEQ ID NO: 121668 - RNA, 19 nt, Homo sapiens
  misc_RNA (1)...(19): siRNA sense strand
gaggucaccguuugggauu

SEQ ID NO: 121669 - RNA, 19 nt, Homo sapiens
  misc_RNA (1)...(19): siRNA sense strand
ugaagccaauggaccacaa

SEQ ID NO: 121670 - RNA, 19 nt, Homo sapiens
  misc_RNA (1)...(19): siRNA sense strand
ccaagaccuucaacaucug

SEQ ID NO: 121671 - RNA, 19 nt, Homo sapiens
  misc_RNA (1)...(19): siRNA sense strand
uaaggcaaauaagcucaga

SEQ ID NO: 121672 - RNA, 19 nt, Homo sapiens
  misc_RNA (1)...(19): siRNA sense strand
acuacgggaucacagauga

SEQ ID NO: 121673 - RNA, 19 nt, Homo sapiens
  misc_RNA (1)...(19): siRNA sense strand
guacagcucacagaagcaa

SEQ ID NO: 121674 - RNA, 19 nt, Homo sapiens
  misc_RNA (1)...(19): siRNA sense strand
caccaagaccuucaacauc

SEQ ID NO: 121675 - RNA, 19 nt, Homo sapiens
  misc_RNA (1)...(19): siRNA sense strand
uuucauugguggugugguu

SEQ ID NO: 121676 - RNA, 19 nt, Homo sapiens
  misc_RNA (1)...(19): siRNA sense strand
uguaugaccaggagaacaa

SEQ ID NO: 121677 - RNA, 19 nt, Homo sapiens
  misc_RNA (1)...(19): siRNA sense strand
cugaagcacugguuugacu

SEQ ID NO: 121678 - RNA, 19 nt, Homo sapiens
  misc_RNA (1)...(19): siRNA sense strand
ugaacccggaguuuaauga

SEQ ID NO: 121679 - RNA, 19 nt, Homo sapiens
  misc_RNA (1)...(19): siRNA sense strand
caaguacagcucacagaag

SEQ ID NO: 121680 - RNA, 19 nt, Homo sapiens
  misc_RNA (1)...(19): siRNA sense strand
caacaucugccuggagaag

SEQ ID NO: 121681 - RNA, 19 nt, Homo sapiens
  misc_RNA (1)...(19): siRNA sense strand
acaccaagaccuucaacau

SEQ ID NO: 121682 - RNA, 19 nt, Homo sapiens
  misc_RNA (1)...(19): siRNA sense strand
ugguuugacugccugaaga

SEQ ID NO: 121683 - RNA, 19 nt, Homo sapiens
  misc_RNA (1)...(19): siRNA sense strand
ccucaucucccucaaguac

SEQ ID NO: 121684 - RNA, 19 nt, Homo sapiens
  misc_RNA (1)...(19): siRNA sense strand
ggagccaguaaggcaaaua

SEQ ID NO: 121685 - RNA, 19 nt, Homo sapiens
  misc_RNA (1)...(19): siRNA sense strand
uugacugccugaagaacaa

SEQ ID NO: 121686 - RNA, 19 nt, Homo sapiens
  misc_RNA (1)...(19): siRNA sense strand
gaacccggaguuuaaugag

SEQ ID NO: 121687 - RNA, 19 nt, Homo sapiens
  misc_RNA (1)...(19): siRNA sense strand
cauaagacagcggugaaga

SEQ ID NO: 121688 - RNA, 19 nt, Homo sapiens
  misc_RNA (1)...(19): siRNA sense strand
aaacccaaccacaccaaga

SEQ ID NO: 121689 - RNA, 19 nt, Homo sapiens
  misc_RNA (1)...(19): siRNA sense strand
ucacagaugaagacaugau

SEQ ID NO: 121690 - RNA, 19 nt, Homo sapiens
  misc_RNA (1)...(19): siRNA sense strand
gcgaggacgacgaggaugu

SEQ ID NO: 121691 - RNA, 19 nt, Homo sapiens
  misc_RNA (1)...(19): siRNA sense strand
ggauguggaccagcucuuc

SEQ ID NO: 121692 - RNA, 19 nt, Homo sapiens
  misc_RNA (1)...(19): siRNA sense strand
ggucaccguuugggauuac

SEQ ID NO: 121693 - RNA, 19 nt, Homo sapiens
  misc_RNA (1)...(19): siRNA sense strand
auaagacagcggugaagaa

SEQ ID NO: 121694 - RNA, 19 nt, Homo sapiens
  misc_RNA (1)...(19): siRNA sense strand
ccaguaaggcaaauaagcu

SEQ ID NO: 121695 - RNA, 19 nt, Homo sapiens
  misc_RNA (1)...(19): siRNA sense strand
cccugaacccggaguuuaa

SEQ ID NO: 121696 - RNA, 19 nt, Homo sapiens
  misc_RNA (1)...(19): siRNA sense strand
gaggccagauguggacaag

SEQ ID NO: 121697 - RNA, 19 nt, Homo sapiens
  misc_RNA (1)...(19): siRNA sense strand
aagcagaucuccgacuacu

SEQ ID NO: 121698 - RNA, 19 nt, Homo sapiens
  misc_RNA (1)...(19): siRNA sense strand
gaagccaauggaccacaau

SEQ ID NO: 121699 - RNA, 19 nt, Homo sapiens
  misc_RNA (1)...(19): siRNA sense strand
ugugugacgaggacaaauu

SEQ ID NO: 121700 - RNA, 19 nt, Homo sapiens
  misc_RNA (1)...(19): siRNA sense strand
cccuggaggucaccguuug

SEQ ID NO: 121701 - RNA, 19 nt, Homo sapiens
  misc_RNA (1)...(19): siRNA sense strand
gggagaaggcgaccaucag

SEQ ID NO: 121702 - RNA, 19 nt, Homo sapiens
  misc_RNA (1)...(19): siRNA sense strand
caaauuccggcacaaugag

SEQ ID NO: 121703 - RNA, 19 nt, Homo sapiens
  misc_RNA (1)...(19): siRNA sense strand
ggaaugaggaccugacuua

SEQ ID NO: 121704 - RNA, 19 nt, Homo sapiens
  misc_RNA (1)...(19): siRNA sense strand
gacaagaaauccaagcaua

SEQ ID NO: 121705 - RNA, 19 nt, Homo sapiens
  misc_RNA (1)...(19): siRNA sense strand
ccauggacgucaacgguua

SEQ ID NO: 121706 - RNA, 19 nt, Homo sapiens
  misc_RNA (1)...(19): siRNA sense strand
gugcggagguggacagcua

SEQ ID NO: 121707 - RNA, 19 nt, Homo sapiens
  misc_RNA (1)...(19): siRNA sense strand
aaacgaagacucagaggaa

SEQ ID NO: 121708 - RNA, 19 nt, Homo sapiens
  misc_RNA (1)...(19): siRNA sense strand
cauaagacgugugugaaga

SEQ ID NO: 121709 - RNA, 19 nt, Homo sapiens
  misc_RNA (1)...(19): siRNA sense strand
agacgugugugaagaagaa

SEQ ID NO: 121710 - RNA, 19 nt, Homo sapiens
  misc_RNA (1)...(19): siRNA sense strand
gaagaagcauuuuaacauc

SEQ ID NO: 121711 - RNA, 19 nt, Homo sapiens
  misc_RNA (1)...(19): siRNA sense strand
acaagaaauccaagcauaa

SEQ ID NO: 121712 - RNA, 19 nt, Homo sapiens
  misc_RNA (1)...(19): siRNA sense strand
ccuguuaucugaaggacuu

SEQ ID NO: 121713 - RNA, 19 nt, Homo sapiens
  misc_RNA (1)...(19): siRNA sense strand
ggcccgauguggacaagaa

SEQ ID NO: 121714 - RNA, 19 nt, Homo sapiens
  misc_RNA (1)...(19): siRNA sense strand
ggacuaugacauuggcaaa

SEQ ID NO: 121715 - RNA, 19 nt, Homo sapiens
  misc_RNA (1)...(19): siRNA sense strand
ggcacacccugaccaguga

SEQ ID NO: 121716 - RNA, 19 nt, Homo sapiens
  misc_RNA (1)...(19): siRNA sense strand
ggcaucuccuguuaucuga

SEQ ID NO: 121717 - RNA, 19 nt, Homo sapiens
  misc_RNA (1)...(19): siRNA sense strand
ugaaucccguguggaauga

SEQ ID NO: 121718 - RNA, 19 nt, Homo sapiens
  misc_RNA (1)...(19): siRNA sense strand
acagcgggaucacagauga

SEQ ID NO: 121719 - RNA, 19 nt, Homo sapiens
  misc_RNA (1)...(19): siRNA sense strand
guaaggccaauaagcuaaa

SEQ ID NO: 121720 - RNA, 19 nt, Homo sapiens
  misc_RNA (1)...(19): siRNA sense strand
ggacaagaaauccaagcau

SEQ ID NO: 121721 - RNA, 19 nt, Homo sapiens
  misc_RNA (1)...(19): siRNA sense strand
caagaaauccaagcauaag

SEQ ID NO: 121722 - RNA, 19 nt, Homo sapiens
  misc_RNA (1)...(19): siRNA sense strand
gccucaagcccauggauuu

SEQ ID NO: 121723 - RNA, 19 nt, Homo sapiens
  misc_RNA (1)...(19): siRNA sense strand
gggcaucuccuguuaucug

SEQ ID NO: 121724 - RNA, 19 nt, Homo sapiens
  misc_RNA (1)...(19): siRNA sense strand
ucaagcccauggauuucaa

SEQ ID NO: 121725 - RNA, 19 nt, Homo sapiens
  misc_RNA (1)...(19): siRNA sense strand
gcauaagacgugugugaag

SEQ ID NO: 121726 - RNA, 19 nt, Homo sapiens
  misc_RNA (1)...(19): siRNA sense strand
aagcauaagacguguguga

SEQ ID NO: 121727 - RNA, 19 nt, Homo sapiens
  misc_RNA (1)...(19): siRNA sense strand
uggcaaauccaaugacuuc

SEQ ID NO: 121728 - RNA, 19 nt, Homo sapiens
  misc_RNA (1)...(19): siRNA sense strand
cgucugggacuaugacauu

SEQ ID NO: 121729 - RNA, 19 nt, Homo sapiens
  misc_RNA (1)...(19): siRNA sense strand
gagucacaaugaguuuauu

SEQ ID NO: 121730 - RNA, 19 nt, Homo sapiens
  misc_RNA (1)...(19): siRNA sense strand
ugaagaagaagacucucaa

SEQ ID NO: 121731 - RNA, 19 nt, Homo sapiens
  misc_RNA (1)...(19): siRNA sense strand
gcgaucgcaugaccaucaa

SEQ ID NO: 121732 - RNA, 19 nt, Homo sapiens
  misc_RNA (1)...(19): siRNA sense strand
cagaggaacacacugaauc

SEQ ID NO: 121733 - RNA, 19 nt, Homo sapiens
  misc_RNA (1)...(19): siRNA sense strand
acucucaacccagaauuua

SEQ ID NO: 121734 - RNA, 19 nt, Homo sapiens
  misc_RNA (1)...(19): siRNA sense strand
ugaggggcaucuccuguua

SEQ ID NO: 121735 - RNA, 19 nt, Homo sapiens
  misc_RNA (1)...(19): siRNA sense strand
ggaucgccgucugugauga

SEQ ID NO: 121736 - RNA, 19 nt, Homo sapiens
  misc_RNA (1)...(19): siRNA sense strand
ggaguuugaccuucucuac

SEQ ID NO: 121737 - RNA, 19 nt, Homo sapiens
  misc_RNA (1)...(19): siRNA sense strand
gcaugaccaucaacaucca

SEQ ID NO: 121738 - RNA, 19 nt, Homo sapiens
  misc_RNA (1)...(19): siRNA sense strand
gacaagcugagucacaaug

SEQ ID NO: 121739 - RNA, 19 nt, Homo sapiens
  misc_RNA (1)...(19): siRNA sense strand
gaggacaagcugagucaca

SEQ ID NO: 121740 - RNA, 19 nt, Homo sapiens
  misc_RNA (1)...(19): siRNA sense strand
ccaccaagacccuggaagu

SEQ ID NO: 121741 - RNA, 19 nt, Homo sapiens
  misc_RNA (1)...(19): siRNA sense strand
ggacaagcugagucacaau

SEQ ID NO: 121742 - RNA, 19 nt, Homo sapiens
  misc_RNA (1)...(19): siRNA sense strand
caucuccuguuaucugaag

SEQ ID NO: 121743 - RNA, 19 nt, Homo sapiens
  misc_RNA (1)...(19): siRNA sense strand
caagcugagucacaaugag

SEQ ID NO: 121744 - RNA, 19 nt, Homo sapiens
  misc_RNA (1)...(19): siRNA sense strand
ggcgaucgcaugaccauca

SEQ ID NO: 121745 - RNA, 19 nt, Homo sapiens
  misc_RNA (1)...(19): siRNA sense strand
gaagaagaagacucucaac

SEQ ID NO: 121746 - RNA, 19 nt, Homo sapiens
  misc_RNA (1)...(19): siRNA sense strand
caacauccaggagcacaug

SEQ ID NO: 121747 - RNA, 19 nt, Homo sapiens
  misc_RNA (1)...(19): siRNA sense strand
gcugagucacaaugaguuu

SEQ ID NO: 121748 - RNA, 19 nt, Homo sapiens
  misc_RNA (1)...(19): siRNA sense strand
uaagacgugugugaagaag

SEQ ID NO: 121749 - RNA, 19 nt, Homo sapiens
  misc_RNA (1)...(19): siRNA sense strand
acuaugacauuggcaaauc

SEQ ID NO: 121750 - RNA, 19 nt, Homo sapiens
  misc_RNA (1)...(19): siRNA sense strand
uguaaggccaauaagcuaa

SEQ ID NO: 121751 - RNA, 19 nt, Homo sapiens
  misc_RNA (1)...(19): siRNA sense strand
gacucucaacccagaauuu

SEQ ID NO: 121752 - RNA, 19 nt, Homo sapiens
  misc_RNA (1)...(19): siRNA sense strand
aggacaagcugagucacaa

SEQ ID NO: 121753 - RNA, 19 nt, Homo sapiens
  misc_RNA (1)...(19): siRNA sense strand
gaucgcaugaccaucaaca

SEQ ID NO: 121754 - RNA, 19 nt, Homo sapiens
  misc_RNA (1)...(19): siRNA sense strand
ccaagcauaagacgugugu

SEQ ID NO: 121755 - RNA, 19 nt, Homo sapiens
  misc_RNA (1)...(19): siRNA sense strand
aguuugaccuucucuacga

SEQ ID NO: 121756 - RNA, 19 nt, Homo sapiens
  misc_RNA (1)...(19): siRNA sense strand
caggaucgccgucugugau

SEQ ID NO: 121757 - RNA, 19 nt, Homo sapiens
  misc_RNA (1)...(19): siRNA sense strand
gugaagaagaagacucuca

SEQ ID NO: 121758 - RNA, 19 nt, Homo sapiens
  misc_RNA (1)...(19): siRNA sense strand
ugagucacaaugaguuuau

SEQ ID NO: 121759 - RNA, 19 nt, Homo sapiens
  misc_RNA (1)...(19): siRNA sense strand
gcucaggaucgccgucugu

SEQ ID NO: 121760 - RNA, 19 nt, Homo sapiens
  misc_RNA (1)...(19): siRNA sense strand
gccucaagccuucgcagaa

SEQ ID NO: 121761 - RNA, 19 nt, Homo sapiens
  misc_RNA (1)...(19): siRNA sense strand
gaaugaggaccugacuuac

SEQ ID NO: 121762 - RNA, 19 nt, Homo sapiens
  misc_RNA (1)...(19): siRNA sense strand
ucuccacucuggccaccaa

SEQ ID NO: 121763 - RNA, 19 nt, Homo sapiens
  misc_RNA (1)...(19): siRNA sense strand
agaauuuaacgaggaguuu

SEQ ID NO: 121764 - RNA, 19 nt, Homo sapiens
  misc_RNA (1)...(19): siRNA sense strand
cagaauuuaacgaggaguu

SEQ ID NO: 121765 - RNA, 19 nt, Homo sapiens
  misc_RNA (1)...(19): siRNA sense strand
gaagacucucaacccagaa

SEQ ID NO: 121766 - RNA, 19 nt, Homo sapiens
  misc_RNA (1)...(19): siRNA sense strand
acaagcugagucacaauga

SEQ ID NO: 121767 - RNA, 19 nt, Homo sapiens
  misc_RNA (1)...(19): siRNA sense strand
ggcaggagcucaaauauaa

SEQ ID NO: 121768 - RNA, 19 nt, Homo sapiens
  misc_RNA (1)...(19): siRNA sense strand
ggaaacaccucaggaagaa

SEQ ID NO: 121769 - RNA, 19 nt, Homo sapiens
  misc_RNA (1)...(19): siRNA sense strand
gaacauugcugagacauca

SEQ ID NO: 121770 - RNA, 19 nt, Homo sapiens
  misc_RNA (1)...(19): siRNA sense strand
caagaaggcuuaugaagag

SEQ ID NO: 121771 - RNA, 19 nt, Homo sapiens
  misc_RNA (1)...(19): siRNA sense strand
gaagcagccuccagaagaa

SEQ ID NO: 121772 - RNA, 19 nt, Homo sapiens
  misc_RNA (1)...(19): siRNA sense strand
ggaagaagcgugaggaaga

SEQ ID NO: 121773 - RNA, 19 nt, Homo sapiens
  misc_RNA (1)...(19): siRNA sense strand
gaagaagcgugaggaagaa

SEQ ID NO: 121774 - RNA, 19 nt, Homo sapiens
  misc_RNA (1)...(19): siRNA sense strand
ggaacaagguaccacgaaa

SEQ ID NO: 121775 - RNA, 19 nt, Homo sapiens
  misc_RNA (1)...(19): siRNA sense strand
cuuggaagcuuguguagua

SEQ ID NO: 121776 - RNA, 19 nt, Homo sapiens
  misc_RNA (1)...(19): siRNA sense strand
ccaaagaguucaugagaca

SEQ ID NO: 121777 - RNA, 19 nt, Homo sapiens
  misc_RNA (1)...(19): siRNA sense strand
caucacugcugguuacuuu

SEQ ID NO: 121778 - RNA, 19 nt, Homo sapiens
  misc_RNA (1)...(19): siRNA sense strand
ggaagcagccuccagaaga

SEQ ID NO: 121779 - RNA, 19 nt, Homo sapiens
  misc_RNA (1)...(19): siRNA sense strand
guaaacagcagacagagaa

SEQ ID NO: 121780 - RNA, 19 nt, Homo sapiens
  misc_RNA (1)...(19): siRNA sense strand
ggaggagcgugaugccuuu

SEQ ID NO: 121781 - RNA, 19 nt, Homo sapiens
  misc_RNA (1)...(19): siRNA sense strand
agacacugcugcugacuuu

SEQ ID NO: 121782 - RNA, 19 nt, Homo sapiens
  misc_RNA (1)...(19): siRNA sense strand
gaucuuagccucugagaag

SEQ ID NO: 121783 - RNA, 19 nt, Homo sapiens
  misc_RNA (1)...(19): siRNA sense strand
ggucagacaagaaggcuua

SEQ ID NO: 121784 - RNA, 19 nt, Homo sapiens
  misc_RNA (1)...(19): siRNA sense strand
gacauucucuuuggauuga

SEQ ID NO: 121785 - RNA, 19 nt, Homo sapiens
  misc_RNA (1)...(19): siRNA sense strand
gaaaggcagugguagaaaa

SEQ ID NO: 121786 - RNA, 19 nt, Homo sapiens
  misc_RNA (1)...(19): siRNA sense strand
aaacaaggguaugaagauu

SEQ ID NO: 121787 - RNA, 19 nt, Homo sapiens
  misc_RNA (1)...(19): siRNA sense strand
ggaggagaccauugaguuu

SEQ ID NO: 121788 - RNA, 19 nt, Homo sapiens
  misc_RNA (1)...(19): siRNA sense strand
ggaguaaacagcagacaga

SEQ ID NO: 121789 - RNA, 19 nt, Homo sapiens
  misc_RNA (1)...(19): siRNA sense strand
gacagguacuggagauuga

SEQ ID NO: 121790 - RNA, 19 nt, Homo sapiens
  misc_RNA (1)...(19): siRNA sense strand
ccacccagaucccgcagua

SEQ ID NO: 121791 - RNA, 19 nt, Homo sapiens
  misc_RNA (1)...(19): siRNA sense strand
ggagaugggugugaagcuu

SEQ ID NO: 121792 - RNA, 19 nt, Homo sapiens
  misc_RNA (1)...(19): siRNA sense strand
ccauugagggcaucauuua

SEQ ID NO: 121793 - RNA, 19 nt, Homo sapiens
  misc_RNA (1)...(19): siRNA sense strand
ggaaugagguuggcuacag

SEQ ID NO: 121794 - RNA, 19 nt, Homo sapiens
  misc_RNA (1)...(19): siRNA sense strand
aggcggagcuggcugauga

SEQ ID NO: 121795 - RNA, 19 nt, Homo sapiens
  misc_RNA (1)...(19): siRNA sense strand
acacagacauucucuuugg

SEQ ID NO: 121796 - RNA, 19 nt, Homo sapiens
  misc_RNA (1)...(19): siRNA sense strand
agccugaccuggcgaguua

SEQ ID NO: 121797 - RNA, 19 nt, Homo sapiens
  misc_RNA (1)...(19): siRNA sense strand
gugugaagcuugggaauga

SEQ ID NO: 121798 - RNA, 19 nt, Homo sapiens
  misc_RNA (1)...(19): siRNA sense strand
gagacaggcucagggaaga

SEQ ID NO: 121799 - RNA, 19 nt, Homo sapiens
  misc_RNA (1)...(19): siRNA sense strand
gaggaggguuauacaaaca

SEQ ID NO: 121800 - RNA, 19 nt, Homo sapiens
  misc_RNA (1)...(19): siRNA sense strand
acaagaaggcuuaugaaga

SEQ ID NO: 121801 - RNA, 19 nt, Homo sapiens
  misc_RNA (1)...(19): siRNA sense strand
agacaucacccaccauuga

SEQ ID NO: 121802 - RNA, 19 nt, Homo sapiens
  misc_RNA (1)...(19): siRNA sense strand
acacacagacauucucuuu

SEQ ID NO: 121803 - RNA, 19 nt, Homo sapiens
  misc_RNA (1)...(19): siRNA sense strand
gaacuguccuccgcuacau

SEQ ID NO: 121804 - RNA, 19 nt, Homo sapiens
  misc_RNA (1)...(19): siRNA sense strand
caacucaggcccagcagaa

SEQ ID NO: 121805 - RNA, 19 nt, Homo sapiens
  misc_RNA (1)...(19): siRNA sense strand
gaacaagguaccacgaaag

SEQ ID NO: 121806 - RNA, 19 nt, Homo sapiens
  misc_RNA (1)...(19): siRNA sense strand
caaacaaggguaugaagau

SEQ ID NO: 121807 - RNA, 19 nt, Homo sapiens
  misc_RNA (1)...(19): siRNA sense strand
gcucagaagcgccucaaga

SEQ ID NO: 121808 - RNA, 19 nt, Homo sapiens
  misc_RNA (1)...(19): siRNA sense strand
caacaacuccaucuucuac

SEQ ID NO: 121809 - RNA, 19 nt, Homo sapiens
  misc_RNA (1)...(19): siRNA sense strand
ggaagcuuguguaguaucu

SEQ ID NO: 121810 - RNA, 19 nt, Homo sapiens
  misc_RNA (1)...(19): siRNA sense strand
ggucguccaugcugacaau

SEQ ID NO: 121811 - RNA, 19 nt, Homo sapiens
  misc_RNA (1)...(19): siRNA sense strand
cgaaaggacccuacacaca

SEQ ID NO: 121812 - RNA, 19 nt, Homo sapiens
  misc_RNA (1)...(19): siRNA sense strand
uccagaggcugacuacuug

SEQ ID NO: 121813 - RNA, 19 nt, Homo sapiens
  misc_RNA (1)...(19): siRNA sense strand
aaaggacccuacacacaga

SEQ ID NO: 121814 - RNA, 19 nt, Homo sapiens
  misc_RNA (1)...(19): siRNA sense strand
cagacaagaaggcuuauga

SEQ ID NO: 121815 - RNA, 19 nt, Homo sapiens
  misc_RNA (1)...(19): siRNA sense strand
gaccuaaugcacuuugauu

SEQ ID NO: 121816 - RNA, 19 nt, Homo sapiens
  misc_RNA (1)...(19): siRNA sense strand
cggcaggagcucaaauaua

SEQ ID NO: 121817 - RNA, 19 nt, Homo sapiens
  misc_RNA (1)...(19): siRNA sense strand
caccaaguccucaucauug

SEQ ID NO: 121818 - RNA, 19 nt, Homo sapiens
  misc_RNA (1)...(19): siRNA sense strand
gcuccuggcugcuauugca

SEQ ID NO: 121819 - RNA, 19 nt, Homo sapiens
  misc_RNA (1)...(19): siRNA sense strand
cagcgucccugaaguuugg

SEQ ID NO: 121820 - RNA, 19 nt, Homo sapiens
  misc_RNA (1)...(19): siRNA sense strand
caauggacacugcccguuu

SEQ ID NO: 121821 - RNA, 19 nt, Homo sapiens
  misc_RNA (1)...(19): siRNA sense strand
cagacauucucuuuggauu

SEQ ID NO: 121822 - RNA, 19 nt, Homo sapiens
  misc_RNA (1)...(19): siRNA sense strand
gaggagaccauugaguuug

SEQ ID NO: 121823 - RNA, 19 nt, Homo sapiens
  misc_RNA (1)...(19): siRNA sense strand
caccaaagaguucaugaga

SEQ ID NO: 121824 - RNA, 19 nt, Homo sapiens
  misc_RNA (1)...(19): siRNA sense strand
gaaaccacagugccugaga

SEQ ID NO: 121825 - RNA, 19 nt, Homo sapiens
  misc_RNA (1)...(19): siRNA sense strand
gauccaggguucuguaagc

SEQ ID NO: 121826 - RNA, 19 nt, Homo sapiens
  misc_RNA (1)...(19): siRNA sense strand
gggcccugcuggagaagaa

SEQ ID NO: 121827 - RNA, 19 nt, Homo sapiens
  misc_RNA (1)...(19): siRNA sense strand
ugaaacagcagcagacagu

SEQ ID NO: 121828 - RNA, 19 nt, Homo sapiens
  misc_RNA (1)...(19): siRNA sense strand
ggccaucacugcugguuac

SEQ ID NO: 121829 - RNA, 19 nt, Homo sapiens
  misc_RNA (1)...(19): siRNA sense strand
cagcaaggccucagccaau

SEQ ID NO: 121830 - RNA, 19 nt, Homo sapiens
  misc_RNA (1)...(19): siRNA sense strand
ucaccaaguccucaucauu

SEQ ID NO: 121831 - RNA, 19 nt, Homo sapiens
  misc_RNA (1)...(19): siRNA sense strand
uggcugcuauugcaaauca

SEQ ID NO: 121832 - RNA, 19 nt, Homo sapiens
  misc_RNA (1)...(19): siRNA sense strand
gggcagcgucccugaaguu

SEQ ID NO: 121833 - RNA, 19 nt, Homo sapiens
  misc_RNA (1)...(19): siRNA sense strand
acaaggaucggacucgaaa

SEQ ID NO: 121834 - RNA, 19 nt, Homo sapiens
  misc_RNA (1)...(19): siRNA sense strand
ugagacagguacuggagau

SEQ ID NO: 121835 - RNA, 19 nt, Homo sapiens
  misc_RNA (1)...(19): siRNA sense strand
gcuaccacaugcccaagga

SEQ ID NO: 121836 - RNA, 19 nt, Homo sapiens
  misc_RNA (1)...(19): siRNA sense strand
ucccugagcugcggaagaa

SEQ ID NO: 121837 - RNA, 19 nt, Homo sapiens
  misc_RNA (1)...(19): siRNA sense strand
ggaucggacucgaaauguc

SEQ ID NO: 121838 - RNA, 19 nt, Homo sapiens
  misc_RNA (1)...(19): siRNA sense strand
ggaagaagaggaggaagag

SEQ ID NO: 121839 - RNA, 19 nt, Homo sapiens
  misc_RNA (1)...(19): siRNA sense strand
ugaggaggguuauacaaac

SEQ ID NO: 121840 - RNA, 19 nt, Homo sapiens
  misc_RNA (1)...(19): siRNA sense strand
gugaggagacugugaguag

SEQ ID NO: 121841 - RNA, 19 nt, Homo sapiens
  misc_RNA (1)...(19): siRNA sense strand
cggaaacaccucaggaaga

SEQ ID NO: 121842 - RNA, 19 nt, Homo sapiens
  misc_RNA (1)...(19): siRNA sense strand
gacaagaaggcuuaugaag

SEQ ID NO: 121843 - RNA, 19 nt, Homo sapiens
  misc_RNA (1)...(19): siRNA sense strand
gucaacaacuccaucuucu

SEQ ID NO: 121844 - RNA, 19 nt, Homo sapiens
  misc_RNA (1)...(19): siRNA sense strand
ggaccagcuugggcaaugu

SEQ ID NO: 121845 - RNA, 19 nt, Homo sapiens
  misc_RNA (1)...(19): siRNA sense strand
gcacgucgcccaguuucug

SEQ ID NO: 121846 - RNA, 19 nt, Homo sapiens
  misc_RNA (1)...(19): siRNA sense strand
gacucgaaauguccuggaa

SEQ ID NO: 121847 - RNA, 19 nt, Homo sapiens
  misc_RNA (1)...(19): siRNA sense strand
ugugagaacuuuguacagu

SEQ ID NO: 121848 - RNA, 19 nt, Homo sapiens
  misc_RNA (1)...(19): siRNA sense strand
ccaccugguucugcuaaau

SEQ ID NO: 121849 - RNA, 19 nt, Homo sapiens
  misc_RNA (1)...(19): siRNA sense strand
gcguggugaugguggauga

SEQ ID NO: 121850 - RNA, 19 nt, Homo sapiens
  misc_RNA (1)...(19): siRNA sense strand
caugacagaugggaugcuu

SEQ ID NO: 121851 - RNA, 19 nt, Homo sapiens
  misc_RNA (1)...(19): siRNA sense strand
ggaggguuauacaaacaag

SEQ ID NO: 121852 - RNA, 19 nt, Homo sapiens
  misc_RNA (1)...(19): siRNA sense strand
gugcagcgccuacgagaca

SEQ ID NO: 121853 - RNA, 19 nt, Homo sapiens
  misc_RNA (1)...(19): siRNA sense strand
acugauaccuuggaucuca

SEQ ID NO: 121854 - RNA, 19 nt, Homo sapiens
  misc_RNA (1)...(19): siRNA sense strand
gcuacagcauccgcuuuga

SEQ ID NO: 121855 - RNA, 19 nt, Homo sapiens
  misc_RNA (1)...(19): siRNA sense strand
guggugcugugagaacuuu

SEQ ID NO: 121856 - RNA, 19 nt, Homo sapiens
  misc_RNA (1)...(19): siRNA sense strand
caaugcccgugucaacuuc

SEQ ID NO: 121857 - RNA, 19 nt, Homo sapiens
  misc_RNA (1)...(19): siRNA sense strand
cuacuuggaagcuugugua

SEQ ID NO: 121858 - RNA, 19 nt, Homo sapiens
  misc_RNA (1)...(19): siRNA sense strand
accaaguccucaucauuga

SEQ ID NO: 121859 - RNA, 19 nt, Homo sapiens
  misc_RNA (1)...(19): siRNA sense strand
gcucuuggaacguguggaa

SEQ ID NO: 121860 - RNA, 19 nt, Homo sapiens
  misc_RNA (1)...(19): siRNA sense strand
gcuggaagggcucuuggaa

SEQ ID NO: 121861 - RNA, 19 nt, Homo sapiens
  misc_RNA (1)...(19): siRNA sense strand
ccuaaugcacuuugauuuc

SEQ ID NO: 121862 - RNA, 19 nt, Homo sapiens
  misc_RNA (1)...(19): siRNA sense strand
gcaaggccucagccaauca

SEQ ID NO: 121863 - RNA, 19 nt, Homo sapiens
  misc_RNA (1)...(19): siRNA sense strand
ugagacaucacccaccauu

SEQ ID NO: 121864 - RNA, 19 nt, Homo sapiens
  misc_RNA (1)...(19): siRNA sense strand
ggauugaucaaggauguug

SEQ ID NO: 121865 - RNA, 19 nt, Homo sapiens
  misc_RNA (1)...(19): siRNA sense strand
agggauccaugaccuaaug

SEQ ID NO: 121866 - RNA, 19 nt, Homo sapiens
  misc_RNA (1)...(19): siRNA sense strand
ucccaacuccucccucuuu

SEQ ID NO: 121867 - RNA, 19 nt, Homo sapiens
  misc_RNA (1)...(19): siRNA sense strand
ucagcgagaucuacaauuu

SEQ ID NO: 121868 - RNA, 19 nt, Homo sapiens
  misc_RNA (1)...(19): siRNA sense strand
ugacggagcacuuuccuua

SEQ ID NO: 121869 - RNA, 19 nt, Homo sapiens
  misc_RNA (1)...(19): siRNA sense strand
gggaacaguugaaggauga

SEQ ID NO: 121870 - RNA, 19 nt, Homo sapiens
  misc_RNA (1)...(19): siRNA sense strand
gagaacaaaucaggaaguu

SEQ ID NO: 121871 - RNA, 19 nt, Homo sapiens
  misc_RNA (1)...(19): siRNA sense strand
gcacuuuccuuacuucaag

SEQ ID NO: 121872 - RNA, 19 nt, Homo sapiens
  misc_RNA (1)...(19): siRNA sense strand
gcacacacccuccugcuau

SEQ ID NO: 121873 - RNA, 19 nt, Homo sapiens
  misc_RNA (1)...(19): siRNA sense strand
agacaaguauccuggcuuu

SEQ ID NO: 121874 - RNA, 19 nt, Homo sapiens
  misc_RNA (1)...(19): siRNA sense strand
guucagaggucaaagucaa

SEQ ID NO: 121875 - RNA, 19 nt, Homo sapiens
  misc_RNA (1)...(19): siRNA sense strand
gcagaggccugguguaacg

SEQ ID NO: 121876 - RNA, 19 nt, Homo sapiens
  misc_RNA (1)...(19): siRNA sense strand
gaggaaagaucccauugcu

SEQ ID NO: 121877 - RNA, 19 nt, Homo sapiens
  misc_RNA (1)...(19): siRNA sense strand
gaagaggaaagaucccauu

SEQ ID NO: 121878 - RNA, 19 nt, Homo sapiens
  misc_RNA (1)...(19): siRNA sense strand
gugcugggauguucugcua

SEQ ID NO: 121879 - RNA, 19 nt, Homo sapiens
  misc_RNA (1)...(19): siRNA sense strand
cagccucccuugcagcaua

SEQ ID NO: 121880 - RNA, 19 nt, Homo sapiens
  misc_RNA (1)...(19): siRNA sense strand
cccgauggcuggaagaauu

SEQ ID NO: 121881 - RNA, 19 nt, Homo sapiens
  misc_RNA (1)...(19): siRNA sense strand
gaagguggagaacaaauca

SEQ ID NO: 121882 - RNA, 19 nt, Homo sapiens
  misc_RNA (1)...(19): siRNA sense strand
ucgagaagguggagaacaa

SEQ ID NO: 121883 - RNA, 19 nt, Homo sapiens
  misc_RNA (1)...(19): siRNA sense strand
cagcagaggccugguguaa

SEQ ID NO: 121884 - RNA, 19 nt, Homo sapiens
  misc_RNA (1)...(19): siRNA sense strand
ccucuacucugccuuuaug

SEQ ID NO: 121885 - RNA, 19 nt, Homo sapiens
  misc_RNA (1)...(19): siRNA sense strand
caaccuaucccucaacaag

SEQ ID NO: 121886 - RNA, 19 nt, Homo sapiens
  misc_RNA (1)...(19): siRNA sense strand
gaacaguugaaggaugaua

SEQ ID NO: 121887 - RNA, 19 nt, Homo sapiens
  misc_RNA (1)...(19): siRNA sense strand
ggagcacuuuccuuacuuc

SEQ ID NO: 121888 - RNA, 19 nt, Homo sapiens
  misc_RNA (1)...(19): siRNA sense strand
caaaacccaucuauuccua

SEQ ID NO: 121889 - RNA, 19 nt, Homo sapiens
  misc_RNA (1)...(19): siRNA sense strand
cggccaagaucgacaagau

SEQ ID NO: 121890 - RNA, 19 nt, Homo sapiens
  misc_RNA (1)...(19): siRNA sense strand
acaagcggccuuuccauga

SEQ ID NO: 121891 - RNA, 19 nt, Homo sapiens
  misc_RNA (1)...(19): siRNA sense strand
gcuccucacacuaucagua

SEQ ID NO: 121892 - RNA, 19 nt, Homo sapiens
  misc_RNA (1)...(19): siRNA sense strand
ggagaacaaaucaggaagu

SEQ ID NO: 121893 - RNA, 19 nt, Homo sapiens
  misc_RNA (1)...(19): siRNA sense strand
uauccuggcuuuggcuuug

SEQ ID NO: 121894 - RNA, 19 nt, Homo sapiens
  misc_RNA (1)...(19): siRNA sense strand
caagcggccuuuccaugag

SEQ ID NO: 121895 - RNA, 19 nt, Homo sapiens
  misc_RNA (1)...(19): siRNA sense strand
cagccacagugccaagcua

SEQ ID NO: 121896 - RNA, 19 nt, Homo sapiens
  misc_RNA (1)...(19): siRNA sense strand
aaacccaucuauuccuaca

SEQ ID NO: 121897 - RNA, 19 nt, Homo sapiens
  misc_RNA (1)...(19): siRNA sense strand
gaguggugcugggauguuc

SEQ ID NO: 121898 - RNA, 19 nt, Homo sapiens
  misc_RNA (1)...(19): siRNA sense strand
gcugccagauggagaccuu

SEQ ID NO: 121899 - RNA, 19 nt, Homo sapiens
  misc_RNA (1)...(19): siRNA sense strand
gagaagguggagaacaaau

SEQ ID NO: 121900 - RNA, 19 nt, Homo sapiens
  misc_RNA (1)...(19): siRNA sense strand
gcucucacccucagacaag

SEQ ID NO: 121901 - RNA, 19 nt, Homo sapiens
  misc_RNA (1)...(19): siRNA sense strand
guggagaacaaaucaggaa

SEQ ID NO: 121902 - RNA, 19 nt, Homo sapiens
  misc_RNA (1)...(19): siRNA sense strand
agcgagaucuacaauuuua

SEQ ID NO: 121903 - RNA, 19 nt, Homo sapiens
  misc_RNA (1)...(19): siRNA sense strand
ucacugacuucgacuucca

SEQ ID NO: 121904 - RNA, 19 nt, Homo sapiens
  misc_RNA (1)...(19): siRNA sense strand
ggcacaaccuaucccucaa

SEQ ID NO: 121905 - RNA, 19 nt, Homo sapiens
  misc_RNA (1)...(19): siRNA sense strand
cggagcacuuuccuuacuu

SEQ ID NO: 121906 - RNA, 19 nt, Homo sapiens
  misc_RNA (1)...(19): siRNA sense strand
caagaucgacaagaugcaa

SEQ ID NO: 121907 - RNA, 19 nt, Homo sapiens
  misc_RNA (1)...(19): siRNA sense strand
cacaaccuaucccucaaca

SEQ ID NO: 121908 - RNA, 19 nt, Homo sapiens
  misc_RNA (1)...(19): siRNA sense strand
auggagaccuuggcacuga

SEQ ID NO: 121909 - RNA, 19 nt, Homo sapiens
  misc_RNA (1)...(19): siRNA sense strand
ucaacaagugcuucgagaa

SEQ ID NO: 121910 - RNA, 19 nt, Homo sapiens
  misc_RNA (1)...(19): siRNA sense strand
cuacagcauccucaucuuc

SEQ ID NO: 121911 - RNA, 19 nt, Homo sapiens
  misc_RNA (1)...(19): siRNA sense strand
ucauggcccuuaagaacag

SEQ ID NO: 121912 - RNA, 19 nt, Homo sapiens
  misc_RNA (1)...(19): siRNA sense strand
uaccugggcuccucacacu

SEQ ID NO: 121913 - RNA, 19 nt, Homo sapiens
  misc_RNA (1)...(19): siRNA sense strand
gcaccucaccacccucuac

SEQ ID NO: 121914 - RNA, 19 nt, Homo sapiens
  misc_RNA (1)...(19): siRNA sense strand
cacacacccuccugcuaug

SEQ ID NO: 121915 - RNA, 19 nt, Homo sapiens
  misc_RNA (1)...(19): siRNA sense strand
agaauucuguccggcacaa

SEQ ID NO: 121916 - RNA, 19 nt, Homo sapiens
  misc_RNA (1)...(19): siRNA sense strand
gcacaaccuaucccucaac

SEQ ID NO: 121917 - RNA, 19 nt, Homo sapiens
  misc_RNA (1)...(19): siRNA sense strand
agaccacccuggcccucaa

SEQ ID NO: 121918 - RNA, 19 nt, Homo sapiens
  misc_RNA (1)...(19): siRNA sense strand
cgagaagguggagaacaaa

SEQ ID NO: 121919 - RNA, 19 nt, Homo sapiens
  misc_RNA (1)...(19): siRNA sense strand
cuuccugccuggcuucuca

SEQ ID NO: 121920 - RNA, 19 nt, Homo sapiens
  misc_RNA (1)...(19): siRNA sense strand
agggaaaccugugggaaca

SEQ ID NO: 121921 - RNA, 19 nt, Homo sapiens
  misc_RNA (1)...(19): siRNA sense strand
cugcaggaccuacuuaugg

SEQ ID NO: 121922 - RNA, 19 nt, Homo sapiens
  misc_RNA (1)...(19): siRNA sense strand
guacaagcggccuuuccau

SEQ ID NO: 121923 - RNA, 19 nt, Homo sapiens
  misc_RNA (1)...(19): siRNA sense strand
acaaguauccuggcuuugg

SEQ ID NO: 121924 - RNA, 19 nt, Homo sapiens
  misc_RNA (1)...(19): siRNA sense strand
gcuaccagccucccuugca

SEQ ID NO: 121925 - RNA, 19 nt, Homo sapiens
  misc_RNA (1)...(19): siRNA sense strand
ggcacacacccuccugcua

SEQ ID NO: 121926 - RNA, 19 nt, Homo sapiens
  misc_RNA (1)...(19): siRNA sense strand
ggccaagaucgacaagaug

SEQ ID NO: 121927 - RNA, 19 nt, Homo sapiens
  misc_RNA (1)...(19): siRNA sense strand
cagcugcucgucauuugug

SEQ ID NO: 121928 - RNA, 19 nt, Homo sapiens
  misc_RNA (1)...(19): siRNA sense strand
ccuacagcauccucaucuu

SEQ ID NO: 121929 - RNA, 19 nt, Homo sapiens
  misc_RNA (1)...(19): siRNA sense strand
guacuaaucuucagucaaa

SEQ ID NO: 121930 - RNA, 19 nt, Homo sapiens
  misc_RNA (1)...(19): siRNA sense strand
gaagagcuauuaacagaaa

SEQ ID NO: 121931 - RNA, 19 nt, Homo sapiens
  misc_RNA (1)...(19): siRNA sense strand
ggauuaaacuggcucauuu

SEQ ID NO: 121932 - RNA, 19 nt, Homo sapiens
  misc_RNA (1)...(19): siRNA sense strand
gaacaccucuucagaacaa

SEQ ID NO: 121933 - RNA, 19 nt, Homo sapiens
  misc_RNA (1)...(19): siRNA sense strand
cagaagaagucauugaaua

SEQ ID NO: 121934 - RNA, 19 nt, Homo sapiens
  misc_RNA (1)...(19): siRNA sense strand
uaaacuggcucauuucuuu

SEQ ID NO: 121935 - RNA, 19 nt, Homo sapiens
  misc_RNA (1)...(19): siRNA sense strand
ggaaagaggugcaaagaag

SEQ ID NO: 121936 - RNA, 19 nt, Homo sapiens
  misc_RNA (1)...(19): siRNA sense strand
ggagaagacuauagagaaa

SEQ ID NO: 121937 - RNA, 19 nt, Homo sapiens
  misc_RNA (1)...(19): siRNA sense strand
gaggagauguaauaccuua

SEQ ID NO: 121938 - RNA, 19 nt, Homo sapiens
  misc_RNA (1)...(19): siRNA sense strand
gagcuguggucacuucuua

SEQ ID NO: 121939 - RNA, 19 nt, Homo sapiens
  misc_RNA (1)...(19): siRNA sense strand
gauaggagauaaagaacaa

SEQ ID NO: 121940 - RNA, 19 nt, Homo sapiens
  misc_RNA (1)...(19): siRNA sense strand
gaagauaucgaugguauuu

SEQ ID NO: 121941 - RNA, 19 nt, Homo sapiens
  misc_RNA (1)...(19): siRNA sense strand
gagaauggcaucaauggua

SEQ ID NO: 121942 - RNA, 19 nt, Homo sapiens
  misc_RNA (1)...(19): siRNA sense strand
agaaagcacuugacacaaa

SEQ ID NO: 121943 - RNA, 19 nt, Homo sapiens
  misc_RNA (1)...(19): siRNA sense strand
ggaaugguauacucggaua

SEQ ID NO: 121944 - RNA, 19 nt, Homo sapiens
  misc_RNA (1)...(19): siRNA sense strand
gaaaugggccuaggaaaga

SEQ ID NO: 121945 - RNA, 19 nt, Homo sapiens
  misc_RNA (1)...(19): siRNA sense strand
acacagggauuuaccaauu

SEQ ID NO: 121946 - RNA, 19 nt, Homo sapiens
  misc_RNA (1)...(19): siRNA sense strand
caaacaauuucucuucuug

SEQ ID NO: 121947 - RNA, 19 nt, Homo sapiens
  misc_RNA (1)...(19): siRNA sense strand
gaagaucguuuucugauuu

SEQ ID NO: 121948 - RNA, 19 nt, Homo sapiens
  misc_RNA (1)...(19): siRNA sense strand
acagaaagcuccaaagcaa

SEQ ID NO: 121949 - RNA, 19 nt, Homo sapiens
  misc_RNA (1)...(19): siRNA sense strand
gaagcugaaucccuuaaug

SEQ ID NO: 121950 - RNA, 19 nt, Homo sapiens
  misc_RNA (1)...(19): siRNA sense strand
gauacagagucaaguguuu

SEQ ID NO: 121951 - RNA, 19 nt, Homo sapiens
  misc_RNA (1)...(19): siRNA sense strand
ggaccgagcacauagaauu

SEQ ID NO: 121952 - RNA, 19 nt, Homo sapiens
  misc_RNA (1)...(19): siRNA sense strand
agauuugacugguuucuua

SEQ ID NO: 121953 - RNA, 19 nt, Homo sapiens
  misc_RNA (1)...(19): siRNA sense strand
gaauuaaggcugauguuga

SEQ ID NO: 121954 - RNA, 19 nt, Homo sapiens
  misc_RNA (1)...(19): siRNA sense strand
gcaacgagcuccaggacau

SEQ ID NO: 121955 - RNA, 19 nt, Homo sapiens
  misc_RNA (1)...(19): siRNA sense strand
uagacaagcugcucccuaa

SEQ ID NO: 121956 - RNA, 19 nt, Homo sapiens
  misc_RNA (1)...(19): siRNA sense strand
gaaccugguccaccuuaua

SEQ ID NO: 121957 - RNA, 19 nt, Homo sapiens
  misc_RNA (1)...(19): siRNA sense strand
uaucaaagcuaaugagaag

SEQ ID NO: 121958 - RNA, 19 nt, Homo sapiens
  misc_RNA (1)...(19): siRNA sense strand
gaggaaauauuugaugaug

SEQ ID NO: 121959 - RNA, 19 nt, Homo sapiens
  misc_RNA (1)...(19): siRNA sense strand
ugauaacacuguagaagaa

SEQ ID NO: 121960 - RNA, 19 nt, Homo sapiens
  misc_RNA (1)...(19): siRNA sense strand
agacaagacuccaucaaug

SEQ ID NO: 121961 - RNA, 19 nt, Homo sapiens
  misc_RNA (1)...(19): siRNA sense strand
aaagaagacugcagagaug

SEQ ID NO: 121962 - RNA, 19 nt, Homo sapiens
  misc_RNA (1)...(19): siRNA sense strand
gaaaagaguuugccuccaa

SEQ ID NO: 121963 - RNA, 19 nt, Homo sapiens
  misc_RNA (1)...(19): siRNA sense strand
guucagauuugacugguuu

SEQ ID NO: 121964 - RNA, 19 nt, Homo sapiens
  misc_RNA (1)...(19): siRNA sense strand
gcacuugacacaaagauug

SEQ ID NO: 121965 - RNA, 19 nt, Homo sapiens
  misc_RNA (1)...(19): siRNA sense strand
gauuauggcucagauugaa

SEQ ID NO: 121966 - RNA, 19 nt, Homo sapiens
  misc_RNA (1)...(19): siRNA sense strand
gaaagcacuugacacaaag

SEQ ID NO: 121967 - RNA, 19 nt, Homo sapiens
  misc_RNA (1)...(19): siRNA sense strand
cgagauggaggaaauauuu

SEQ ID NO: 121968 - RNA, 19 nt, Homo sapiens
  misc_RNA (1)...(19): siRNA sense strand
caaagaagaauaagcauca

SEQ ID NO: 121969 - RNA, 19 nt, Homo sapiens
  misc_RNA (1)...(19): siRNA sense strand
agaaugggauguaugugua

SEQ ID NO: 121970 - RNA, 19 nt, Homo sapiens
  misc_RNA (1)...(19): siRNA sense strand
gaccaaagccuucaacaca

SEQ ID NO: 121971 - RNA, 19 nt, Homo sapiens
  misc_RNA (1)...(19): siRNA sense strand
ggauuuaccaauuggaaua

SEQ ID NO: 121972 - RNA, 19 nt, Homo sapiens
  misc_RNA (1)...(19): siRNA sense strand
gauccuaccuaugaagaaa

SEQ ID NO: 121973 - RNA, 19 nt, Homo sapiens
  misc_RNA (1)...(19): siRNA sense strand
guucuuuccuccacguuua

SEQ ID NO: 121974 - RNA, 19 nt, Homo sapiens
  misc_RNA (1)...(19): siRNA sense strand
gaaccaaacagcacaaagu

SEQ ID NO: 121975 - RNA, 19 nt, Homo sapiens
  misc_RNA (1)...(19): siRNA sense strand
ugaagacucuccaucguau

SEQ ID NO: 121976 - RNA, 19 nt, Homo sapiens
  misc_RNA (1)...(19): siRNA sense strand
cugaaucccuuaaugauga

SEQ ID NO: 121977 - RNA, 19 nt, Homo sapiens
  misc_RNA (1)...(19): siRNA sense strand
ugacuuugauuccugguuu

SEQ ID NO: 121978 - RNA, 19 nt, Homo sapiens
  misc_RNA (1)...(19): siRNA sense strand
gaugaugcgucaccuggaa

SEQ ID NO: 121979 - RNA, 19 nt, Homo sapiens
  misc_RNA (1)...(19): siRNA sense strand
ccuuaaugaugaagaguua

SEQ ID NO: 121980 - RNA, 19 nt, Homo sapiens
  misc_RNA (1)...(19): siRNA sense strand
gaauaagcaucaagaaagc

SEQ ID NO: 121981 - RNA, 19 nt, Homo sapiens
  misc_RNA (1)...(19): siRNA sense strand
caaagaagacugcagagau

SEQ ID NO: 121982 - RNA, 19 nt, Homo sapiens
  misc_RNA (1)...(19): siRNA sense strand
acacuuagaucuguuuguu

SEQ ID NO: 121983 - RNA, 19 nt, Homo sapiens
  misc_RNA (1)...(19): siRNA sense strand
ccaaagccuucaacacaga

SEQ ID NO: 121984 - RNA, 19 nt, Homo sapiens
  misc_RNA (1)...(19): siRNA sense strand
aaacauggaacuagaagaa

SEQ ID NO: 121985 - RNA, 19 nt, Homo sapiens
  misc_RNA (1)...(19): siRNA sense strand
gaagaauaagcaucaagaa

SEQ ID NO: 121986 - RNA, 19 nt, Homo sapiens
  misc_RNA (1)...(19): siRNA sense strand
gaaagaggugcaaagaaga

SEQ ID NO: 121987 - RNA, 19 nt, Homo sapiens
  misc_RNA (1)...(19): siRNA sense strand
gauuagacauggagcaaca

SEQ ID NO: 121988 - RNA, 19 nt, Homo sapiens
  misc_RNA (1)...(19): siRNA sense strand
caaacugaccgggcaaaua

SEQ ID NO: 121989 - RNA, 19 nt, Homo sapiens
  misc_RNA (1)...(19): siRNA sense strand
uuggguacaugaaacauua

SEQ ID NO: 121990 - RNA, 19 nt, Homo sapiens
  misc_RNA (1)...(19): siRNA sense strand
cuuagaaacuuuacaaugg

SEQ ID NO: 121991 - RNA, 19 nt, Homo sapiens
  misc_RNA (1)...(19): siRNA sense strand
gaugaagaguuagaggaaa

SEQ ID NO: 121992 - RNA, 19 nt, Homo sapiens
  misc_RNA (1)...(19): siRNA sense strand
agagaagucuguguucaaa

SEQ ID NO: 121993 - RNA, 19 nt, Homo sapiens
  misc_RNA (1)...(19): siRNA sense strand
caacucagcaggcaagaug

SEQ ID NO: 121994 - RNA, 19 nt, Homo sapiens
  misc_RNA (1)...(19): siRNA sense strand
caaagggaaugguauacuc

SEQ ID NO: 121995 - RNA, 19 nt, Homo sapiens
  misc_RNA (1)...(19): siRNA sense strand
uaauucagcagaugacuuu

SEQ ID NO: 121996 - RNA, 19 nt, Homo sapiens
  misc_RNA (1)...(19): siRNA sense strand
augaagagcuauuaacaga

SEQ ID NO: 121997 - RNA, 19 nt, Homo sapiens
  misc_RNA (1)...(19): siRNA sense strand
gaagaacagcuuaaaauug

SEQ ID NO: 121998 - RNA, 19 nt, Homo sapiens
  misc_RNA (1)...(19): siRNA sense strand
ggucuuggcaucaaucuug

SEQ ID NO: 121999 - RNA, 19 nt, Homo sapiens
  misc_RNA (1)...(19): siRNA sense strand
aauuaaggcugauguugaa

SEQ ID NO: 122000 - RNA, 19 nt, Homo sapiens
  misc_RNA (1)...(19): siRNA sense strand
ggaggaugaagagcuauua

SEQ ID NO: 122001 - RNA, 19 nt, Homo sapiens
  misc_RNA (1)...(19): siRNA sense strand
ugccagauguguuuaauuc

SEQ ID NO: 122002 - RNA, 19 nt, Homo sapiens
  misc_RNA (1)...(19): siRNA sense strand
gagaaugggauguaugugu

SEQ ID NO: 122003 - RNA, 19 nt, Homo sapiens
  misc_RNA (1)...(19): siRNA sense strand
aaccagauccuaccuauga

SEQ ID NO: 122004 - RNA, 19 nt, Homo sapiens
  misc_RNA (1)...(19): siRNA sense strand
ggagaggcgagaauucaaa

SEQ ID NO: 122005 - RNA, 19 nt, Homo sapiens
  misc_RNA (1)...(19): siRNA sense strand
cgaaggagaagacuauaga

SEQ ID NO: 122006 - RNA, 19 nt, Homo sapiens
  misc_RNA (1)...(19): siRNA sense strand
gagacaagacuccaucaau

SEQ ID NO: 122007 - RNA, 19 nt, Homo sapiens
  misc_RNA (1)...(19): siRNA sense strand
ggaugaagagcuauuaaca

SEQ ID NO: 122008 - RNA, 19 nt, Homo sapiens
  misc_RNA (1)...(19): siRNA sense strand
gagaaaacauggaacuaga

SEQ ID NO: 122009 - RNA, 19 nt, Homo sapiens
  misc_RNA (1)...(19): siRNA sense strand
gaaauccugagcugccuaa

SEQ ID NO: 122010 - RNA, 19 nt, Homo sapiens
  misc_RNA (1)...(19): siRNA sense strand
ugggaaagaugaaaugcuu

SEQ ID NO: 122011 - RNA, 19 nt, Homo sapiens
  misc_RNA (1)...(19): siRNA sense strand
gaacaaaauugggaaagau

SEQ ID NO: 122012 - RNA, 19 nt, Homo sapiens
  misc_RNA (1)...(19): siRNA sense strand
gucagaguguuccgcuuua

SEQ ID NO: 122013 - RNA, 19 nt, Homo sapiens
  misc_RNA (1)...(19): siRNA sense strand
gugagggaauucaagacua

SEQ ID NO: 122014 - RNA, 19 nt, Homo sapiens
  misc_RNA (1)...(19): siRNA sense strand
gggguaaacugagagauua

SEQ ID NO: 122015 - RNA, 19 nt, Homo sapiens
  misc_RNA (1)...(19): siRNA sense strand
agaggaggaugaagagcua

SEQ ID NO: 122016 - RNA, 19 nt, Homo sapiens
  misc_RNA (1)...(19): siRNA sense strand
uggaggaaauauuugauga

SEQ ID NO: 122017 - RNA, 19 nt, Homo sapiens
  misc_RNA (1)...(19): siRNA sense strand
ggcgagaauucaaagaaga

SEQ ID NO: 122018 - RNA, 19 nt, Homo sapiens
  misc_RNA (1)...(19): siRNA sense strand
gggcaaauagauucgagua

SEQ ID NO: 122019 - RNA, 19 nt, Homo sapiens
  misc_RNA (1)...(19): siRNA sense strand
cagagucaaguguuuauaa

SEQ ID NO: 122020 - RNA, 19 nt, Homo sapiens
  misc_RNA (1)...(19): siRNA sense strand
gcaaagaagacugcagaga

SEQ ID NO: 122021 - RNA, 19 nt, Homo sapiens
  misc_RNA (1)...(19): siRNA sense strand
gaagaaagaauaguagaac

SEQ ID NO: 122022 - RNA, 19 nt, Homo sapiens
  misc_RNA (1)...(19): siRNA sense strand
guggagaaauuaugaguac

SEQ ID NO: 122023 - RNA, 19 nt, Homo sapiens
  misc_RNA (1)...(19): siRNA sense strand
acaaggguauuggacauuu

SEQ ID NO: 122024 - RNA, 19 nt, Homo sapiens
  misc_RNA (1)...(19): siRNA sense strand
ugucagagacguuuuauua

SEQ ID NO: 122025 - RNA, 19 nt, Homo sapiens
  misc_RNA (1)...(19): siRNA sense strand
ugagugaauucaagagaug

SEQ ID NO: 122026 - RNA, 19 nt, Homo sapiens
  misc_RNA (1)...(19): siRNA sense strand
aaacugaccgggcaaauag

SEQ ID NO: 122027 - RNA, 19 nt, Homo sapiens
  misc_RNA (1)...(19): siRNA sense strand
aaguagaucuucaggcuau

SEQ ID NO: 122028 - RNA, 19 nt, Homo sapiens
  misc_RNA (1)...(19): siRNA sense strand
ggagauguaauaccuuaau

SEQ ID NO: 122029 - RNA, 19 nt, Homo sapiens
  misc_RNA (1)...(19): siRNA sense strand
gaggagagcuggccagguu

SEQ ID NO: 122030 - RNA, 19 nt, Homo sapiens
  misc_RNA (1)...(19): siRNA sense strand
gagcaacccuucaaucaug

SEQ ID NO: 122031 - RNA, 19 nt, Homo sapiens
  misc_RNA (1)...(19): siRNA sense strand
agaaggagcuggagaccua

SEQ ID NO: 122032 - RNA, 19 nt, Homo sapiens
  misc_RNA (1)...(19): siRNA sense strand
gagaggauauuacauugug

SEQ ID NO: 122033 - RNA, 19 nt, Homo sapiens
  misc_RNA (1)...(19): siRNA sense strand
uuacauaccugaagcuaga

SEQ ID NO: 122034 - RNA, 19 nt, Homo sapiens
  misc_RNA (1)...(19): siRNA sense strand
gagcaggcuuugaucauug

SEQ ID NO: 122035 - RNA, 19 nt, Homo sapiens
  misc_RNA (1)...(19): siRNA sense strand
ggacagacccuucgauucu

SEQ ID NO: 122036 - RNA, 19 nt, Homo sapiens
  misc_RNA (1)...(19): siRNA sense strand
gggacuauguggauaaaga

SEQ ID NO: 122037 - RNA, 19 nt, Homo sapiens
  misc_RNA (1)...(19): siRNA sense strand
gaaacuggcuagcuguuac

SEQ ID NO: 122038 - RNA, 19 nt, Homo sapiens
  misc_RNA (1)...(19): siRNA sense strand
auaaugagcugaagaaacu

SEQ ID NO: 122039 - RNA, 19 nt, Homo sapiens
  misc_RNA (1)...(19): siRNA sense strand
ggauaaagagaaagaaaug

SEQ ID NO: 122040 - RNA, 19 nt, Homo sapiens
  misc_RNA (1)...(19): siRNA sense strand
caagaccaauuuccacuuc

SEQ ID NO: 122041 - RNA, 19 nt, Homo sapiens
  misc_RNA (1)...(19): siRNA sense strand
gaaccuguccuuuacauac

SEQ ID NO: 122042 - RNA, 19 nt, Homo sapiens
  misc_RNA (1)...(19): siRNA sense strand
cuucggugcuagugaaaua

SEQ ID NO: 122043 - RNA, 19 nt, Homo sapiens
  misc_RNA (1)...(19): siRNA sense strand
agauugagcugcuugacuu

SEQ ID NO: 122044 - RNA, 19 nt, Homo sapiens
  misc_RNA (1)...(19): siRNA sense strand
ccacuguccuguucaagau

SEQ ID NO: 122045 - RNA, 19 nt, Homo sapiens
  misc_RNA (1)...(19): siRNA sense strand
gacagacccuucgauucua

SEQ ID NO: 122046 - RNA, 19 nt, Homo sapiens
  misc_RNA (1)...(19): siRNA sense strand
aaacuuggagaggauauua

SEQ ID NO: 122047 - RNA, 19 nt, Homo sapiens
  misc_RNA (1)...(19): siRNA sense strand
ucaauaaugagcugaagaa

SEQ ID NO: 122048 - RNA, 19 nt, Homo sapiens
  misc_RNA (1)...(19): siRNA sense strand
uggagaggauauuacauug

SEQ ID NO: 122049 - RNA, 19 nt, Homo sapiens
  misc_RNA (1)...(19): siRNA sense strand
cuauguggauaaagagaaa

SEQ ID NO: 122050 - RNA, 19 nt, Homo sapiens
  misc_RNA (1)...(19): siRNA sense strand
acagacccuucgauucuaa

SEQ ID NO: 122051 - RNA, 19 nt, Homo sapiens
  misc_RNA (1)...(19): siRNA sense strand
gaaauguggcaccgcaugu

SEQ ID NO: 122052 - RNA, 19 nt, Homo sapiens
  misc_RNA (1)...(19): siRNA sense strand
gcauggagcugggccuucu

SEQ ID NO: 122053 - RNA, 19 nt, Homo sapiens
  misc_RNA (1)...(19): siRNA sense strand
gaaggacgucauccgagaa

SEQ ID NO: 122054 - RNA, 19 nt, Homo sapiens
  misc_RNA (1)...(19): siRNA sense strand
agagcaggcuuugaucauu

SEQ ID NO: 122055 - RNA, 19 nt, Homo sapiens
  misc_RNA (1)...(19): siRNA sense strand
ggagagcaggcuuugauca

SEQ ID NO: 122056 - RNA, 19 nt, Homo sapiens
  misc_RNA (1)...(19): siRNA sense strand
gcaagaccaauuuccacuu

SEQ ID NO: 122057 - RNA, 19 nt, Homo sapiens
  misc_RNA (1)...(19): siRNA sense strand
uacgagcgguuaagucaga

SEQ ID NO: 122058 - RNA, 19 nt, Homo sapiens
  misc_RNA (1)...(19): siRNA sense strand
ggacgucauccgagaagga

SEQ ID NO: 122059 - RNA, 19 nt, Homo sapiens
  misc_RNA (1)...(19): siRNA sense strand
gaugccaaagugagauaua

SEQ ID NO: 122060 - RNA, 19 nt, Homo sapiens
  misc_RNA (1)...(19): siRNA sense strand
gaaaacuccucggcuaaug

SEQ ID NO: 122061 - RNA, 19 nt, Homo sapiens
  misc_RNA (1)...(19): siRNA sense strand
gacccuucgauucuaauua

SEQ ID NO: 122062 - RNA, 19 nt, Homo sapiens
  misc_RNA (1)...(19): siRNA sense strand
ggagcaacccuucaaucau

SEQ ID NO: 122063 - RNA, 19 nt, Homo sapiens
  misc_RNA (1)...(19): siRNA sense strand
ggagaggauauuacauugu

SEQ ID NO: 122064 - RNA, 19 nt, Homo sapiens
  misc_RNA (1)...(19): siRNA sense strand
cuccugaaccuguccuuua

SEQ ID NO: 122065 - RNA, 19 nt, Homo sapiens
  misc_RNA (1)...(19): siRNA sense strand
gaaacuuggagaggauauu

SEQ ID NO: 122066 - RNA, 19 nt, Homo sapiens
  misc_RNA (1)...(19): siRNA sense strand
ggccagguuucuguucaaa

SEQ ID NO: 122067 - RNA, 19 nt, Homo sapiens
  misc_RNA (1)...(19): siRNA sense strand
gagcuggccagguuucugu

SEQ ID NO: 122068 - RNA, 19 nt, Homo sapiens
  misc_RNA (1)...(19): siRNA sense strand
ccgccaagcuuccuguucu

SEQ ID NO: 122069 - RNA, 19 nt, Homo sapiens
  misc_RNA (1)...(19): siRNA sense strand
cagggacuauguggauaaa

SEQ ID NO: 122070 - RNA, 19 nt, Homo sapiens
  misc_RNA (1)...(19): siRNA sense strand
gagagcaggcuuugaucau

SEQ ID NO: 122071 - RNA, 19 nt, Homo sapiens
  misc_RNA (1)...(19): siRNA sense strand
aaagggcccuguugcuucu

SEQ ID NO: 122072 - RNA, 19 nt, Homo sapiens
  misc_RNA (1)...(19): siRNA sense strand
agaaacuggcuagcuguua

SEQ ID NO: 122073 - RNA, 19 nt, Homo sapiens
  misc_RNA (1)...(19): siRNA sense strand
aaaccgaacuacgccuaug

SEQ ID NO: 122074 - RNA, 19 nt, Homo sapiens
  misc_RNA (1)...(19): siRNA sense strand
guggauaaagagaaagaaa

SEQ ID NO: 122075 - RNA, 19 nt, Homo sapiens
  misc_RNA (1)...(19): siRNA sense strand
auggauaccuggaacacuu

SEQ ID NO: 122076 - RNA, 19 nt, Homo sapiens
  misc_RNA (1)...(19): siRNA sense strand
gcagcaagaccaauuucca

SEQ ID NO: 122077 - RNA, 19 nt, Homo sapiens
  misc_RNA (1)...(19): siRNA sense strand
gagcagcaagaccaauuuc

SEQ ID NO: 122078 - RNA, 19 nt, Homo sapiens
  misc_RNA (1)...(19): siRNA sense strand
aaugaaacuuggagaggau

SEQ ID NO: 122079 - RNA, 19 nt, Homo sapiens
  misc_RNA (1)...(19): siRNA sense strand
uacagggacuauguggaua

SEQ ID NO: 122080 - RNA, 19 nt, Homo sapiens
  misc_RNA (1)...(19): siRNA sense strand
gcuagaccgacccaccaua

SEQ ID NO: 122081 - RNA, 19 nt, Homo sapiens
  misc_RNA (1)...(19): siRNA sense strand
augccaaagugagauauaa

SEQ ID NO: 122082 - RNA, 19 nt, Homo sapiens
  misc_RNA (1)...(19): siRNA sense strand
uuacagggacuauguggau

SEQ ID NO: 122083 - RNA, 19 nt, Homo sapiens
  misc_RNA (1)...(19): siRNA sense strand
gcuauggagagcaggcuuu

SEQ ID NO: 122084 - RNA, 19 nt, Homo sapiens
  misc_RNA (1)...(19): siRNA sense strand
aaacuccucggcuaaugaa

SEQ ID NO: 122085 - RNA, 19 nt, Homo sapiens
  misc_RNA (1)...(19): siRNA sense strand
cuucaaucaugacaucaau

SEQ ID NO: 122086 - RNA, 19 nt, Homo sapiens
  misc_RNA (1)...(19): siRNA sense strand
ggagagcuggccagguuuc

SEQ ID NO: 122087 - RNA, 19 nt, Homo sapiens
  misc_RNA (1)...(19): siRNA sense strand
uuggagaggauauuacauu

SEQ ID NO: 122088 - RNA, 19 nt, Homo sapiens
  misc_RNA (1)...(19): siRNA sense strand
caauaaugagcugaagaaa

SEQ ID NO: 122089 - RNA, 19 nt, Homo sapiens
  misc_RNA (1)...(19): siRNA sense strand
ugagcugcuugacuuccua

SEQ ID NO: 122090 - RNA, 19 nt, Homo sapiens
  misc_RNA (1)...(19): siRNA sense strand
acaccacuguccuguucaa

SEQ ID NO: 122091 - RNA, 19 nt, Homo sapiens
  misc_RNA (1)...(19): siRNA sense strand
ugagcagcaagaccaauuu

SEQ ID NO: 122092 - RNA, 19 nt, Homo sapiens
  misc_RNA (1)...(19): siRNA sense strand
ggacuauguggauaaagag

SEQ ID NO: 122093 - RNA, 19 nt, Homo sapiens
  misc_RNA (1)...(19): siRNA sense strand
acagggacuauguggauaa

SEQ ID NO: 122094 - RNA, 19 nt, Homo sapiens
  misc_RNA (1)...(19): siRNA sense strand
caucaauaaugagcugaag

SEQ ID NO: 122095 - RNA, 19 nt, Homo sapiens
  misc_RNA (1)...(19): siRNA sense strand
uguacgagcgguuaaguca

SEQ ID NO: 122096 - RNA, 19 nt, Homo sapiens
  misc_RNA (1)...(19): siRNA sense strand
cuacagcaggagaaaguug

SEQ ID NO: 122097 - RNA, 19 nt, Homo sapiens
  misc_RNA (1)...(19): siRNA sense strand
uuucuaugaugccaaagug

SEQ ID NO: 122098 - RNA, 19 nt, Homo sapiens
  misc_RNA (1)...(19): siRNA sense strand
cuacggaacgggaguuugg

SEQ ID NO: 122099 - RNA, 19 nt, Homo sapiens
  misc_RNA (1)...(19): siRNA sense strand
gaccaauuuccacuucaga

SEQ ID NO: 122100 - RNA, 19 nt, Homo sapiens
  misc_RNA (1)...(19): siRNA sense strand
caaaccgaacuacgccuau

SEQ ID NO: 122101 - RNA, 19 nt, Homo sapiens
  misc_RNA (1)...(19): siRNA sense strand
aggagcaacccuucaauca

SEQ ID NO: 122102 - RNA, 19 nt, Homo sapiens
  misc_RNA (1)...(19): siRNA sense strand
gaucauugaccaaaagaau

SEQ ID NO: 122103 - RNA, 19 nt, Homo sapiens
  misc_RNA (1)...(19): siRNA sense strand
ugaaccuguccuuuacaua

SEQ ID NO: 122104 - RNA, 19 nt, Homo sapiens
  misc_RNA (1)...(19): siRNA sense strand
gucagaggaugcuggacau

SEQ ID NO: 122105 - RNA, 19 nt, Homo sapiens
  misc_RNA (1)...(19): siRNA sense strand
ucguuucuaugaugccaaa

SEQ ID NO: 122106 - RNA, 19 nt, Homo sapiens
  misc_RNA (1)...(19): siRNA sense strand
gaccaaaccuacaagauaa

SEQ ID NO: 122107 - RNA, 19 nt, Homo sapiens
  misc_RNA (1)...(19): siRNA sense strand
gagaagcuauagccaaaua

SEQ ID NO: 122108 - RNA, 19 nt, Homo sapiens
  misc_RNA (1)...(19): siRNA sense strand
gaaaggagauacugucuac

SEQ ID NO: 122109 - RNA, 19 nt, Homo sapiens
  misc_RNA (1)...(19): siRNA sense strand
caaggcaucuucccuguuu

SEQ ID NO: 122110 - RNA, 19 nt, Homo sapiens
  misc_RNA (1)...(19): siRNA sense strand
cuacagaccucuuuccaaa

SEQ ID NO: 122111 - RNA, 19 nt, Homo sapiens
  misc_RNA (1)...(19): siRNA sense strand
cuaaggaguugucauuuaa

SEQ ID NO: 122112 - RNA, 19 nt, Homo sapiens
  misc_RNA (1)...(19): siRNA sense strand
ucuaaggaguugucauuua

SEQ ID NO: 122113 - RNA, 19 nt, Homo sapiens
  misc_RNA (1)...(19): siRNA sense strand
ggaucaagcaccacucuua

SEQ ID NO: 122114 - RNA, 19 nt, Homo sapiens
  misc_RNA (1)...(19): siRNA sense strand
ggagauagaguuauucuuc

SEQ ID NO: 122115 - RNA, 19 nt, Homo sapiens
  misc_RNA (1)...(19): siRNA sense strand
cgaccaaaccuacaagaua

SEQ ID NO: 122116 - RNA, 19 nt, Homo sapiens
  misc_RNA (1)...(19): siRNA sense strand
cagagaaagugaugucauu

SEQ ID NO: 122117 - RNA, 19 nt, Homo sapiens
  misc_RNA (1)...(19): siRNA sense strand
ucacucaacuccagcauug

SEQ ID NO: 122118 - RNA, 19 nt, Homo sapiens
  misc_RNA (1)...(19): siRNA sense strand
caucaauucuucagcauga

SEQ ID NO: 122119 - RNA, 19 nt, Homo sapiens
  misc_RNA (1)...(19): siRNA sense strand
aaagggagauagaguuauu

SEQ ID NO: 122120 - RNA, 19 nt, Homo sapiens
  misc_RNA (1)...(19): siRNA sense strand
gcaccacucuuacaaaguc

SEQ ID NO: 122121 - RNA, 19 nt, Homo sapiens
  misc_RNA (1)...(19): siRNA sense strand
gguacaagacgauguuuaa

SEQ ID NO: 122122 - RNA, 19 nt, Homo sapiens
  misc_RNA (1)...(19): siRNA sense strand
ggaguugucauuuaagaaa

SEQ ID NO: 122123 - RNA, 19 nt, Homo sapiens
  misc_RNA (1)...(19): siRNA sense strand
aaacugguaugaagguaaa

SEQ ID NO: 122124 - RNA, 19 nt, Homo sapiens
  misc_RNA (1)...(19): siRNA sense strand
cggagaagcuauagccaaa

SEQ ID NO: 122125 - RNA, 19 nt, Homo sapiens
  misc_RNA (1)...(19): siRNA sense strand
aaagugaugucauugaugu

SEQ ID NO: 122126 - RNA, 19 nt, Homo sapiens
  misc_RNA (1)...(19): siRNA sense strand
caucuucccuguuuccuau

SEQ ID NO: 122127 - RNA, 19 nt, Homo sapiens
  misc_RNA (1)...(19): siRNA sense strand
gacacagacauguauaaua

SEQ ID NO: 122128 - RNA, 19 nt, Homo sapiens
  misc_RNA (1)...(19): siRNA sense strand
gaucaaaacugguaugaag

SEQ ID NO: 122129 - RNA, 19 nt, Homo sapiens
  misc_RNA (1)...(19): siRNA sense strand
gcaaagacccaaaccuaca

SEQ ID NO: 122130 - RNA, 19 nt, Homo sapiens
  misc_RNA (1)...(19): siRNA sense strand
ggagaaaucggagaagcua

SEQ ID NO: 122131 - RNA, 19 nt, Homo sapiens
  misc_RNA (1)...(19): siRNA sense strand
caacagacaaggcaucuuc

SEQ ID NO: 122132 - RNA, 19 nt, Homo sapiens
  misc_RNA (1)...(19): siRNA sense strand
gagaaagugaugucauuga

SEQ ID NO: 122133 - RNA, 19 nt, Homo sapiens
  misc_RNA (1)...(19): siRNA sense strand
gagaaagggagauagaguu

SEQ ID NO: 122134 - RNA, 19 nt, Homo sapiens
  misc_RNA (1)...(19): siRNA sense strand
agaaagggagauagaguua

SEQ ID NO: 122135 - RNA, 19 nt, Homo sapiens
  misc_RNA (1)...(19): siRNA sense strand
uaacuauacucccaggaau

SEQ ID NO: 122136 - RNA, 19 nt, Homo sapiens
  misc_RNA (1)...(19): siRNA sense strand
gagauagaguuauucuucu

SEQ ID NO: 122137 - RNA, 19 nt, Homo sapiens
  misc_RNA (1)...(19): siRNA sense strand
acaagacgauguuuaagca

SEQ ID NO: 122138 - RNA, 19 nt, Homo sapiens
  misc_RNA (1)...(19): siRNA sense strand
ccacagcuauucuagugau

SEQ ID NO: 122139 - RNA, 19 nt, Homo sapiens
  misc_RNA (1)...(19): siRNA sense strand
gaaagcacagccugcaaga

SEQ ID NO: 122140 - RNA, 19 nt, Homo sapiens
  misc_RNA (1)...(19): siRNA sense strand
gaucggucuucaacagaaa

SEQ ID NO: 122141 - RNA, 19 nt, Homo sapiens
  misc_RNA (1)...(19): siRNA sense strand
gauaaaagaucaccaacuc

SEQ ID NO: 122142 - RNA, 19 nt, Homo sapiens
  misc_RNA (1)...(19): siRNA sense strand
caucuaaggaguugucauu

SEQ ID NO: 122143 - RNA, 19 nt, Homo sapiens
  misc_RNA (1)...(19): siRNA sense strand
gaaagugaugucauugaug

SEQ ID NO: 122144 - RNA, 19 nt, Homo sapiens
  misc_RNA (1)...(19): siRNA sense strand
gaaagacccaugaguucug

SEQ ID NO: 122145 - RNA, 19 nt, Homo sapiens
  misc_RNA (1)...(19): siRNA sense strand
agaaaucggagaagcuaua

SEQ ID NO: 122146 - RNA, 19 nt, Homo sapiens
  misc_RNA (1)...(19): siRNA sense strand
ucagacaucuaaggaguug

SEQ ID NO: 122147 - RNA, 19 nt, Homo sapiens
  misc_RNA (1)...(19): siRNA sense strand
agaaagugaugucauugau

SEQ ID NO: 122148 - RNA, 19 nt, Homo sapiens
  misc_RNA (1)...(19): siRNA sense strand
cccaaggacugguacaaga

SEQ ID NO: 122149 - RNA, 19 nt, Homo sapiens
  misc_RNA (1)...(19): siRNA sense strand
gaaccuggcaagucaucaa

SEQ ID NO: 122150 - RNA, 19 nt, Homo sapiens
  misc_RNA (1)...(19): siRNA sense strand
uaucaguccucuauagaca

SEQ ID NO: 122151 - RNA, 19 nt, Homo sapiens
  misc_RNA (1)...(19): siRNA sense strand
aagacgauguuuaagcaaa

SEQ ID NO: 122152 - RNA, 19 nt, Homo sapiens
  misc_RNA (1)...(19): siRNA sense strand
ugucauugaugucauggaa

SEQ ID NO: 122153 - RNA, 19 nt, Homo sapiens
  misc_RNA (1)...(19): siRNA sense strand
agauaacagugaauggaaa

SEQ ID NO: 122154 - RNA, 19 nt, Homo sapiens
  misc_RNA (1)...(19): siRNA sense strand
ggcaagucaucaauucuuc

SEQ ID NO: 122155 - RNA, 19 nt, Homo sapiens
  misc_RNA (1)...(19): siRNA sense strand
uuaaggcucagacaucuaa

SEQ ID NO: 122156 - RNA, 19 nt, Homo sapiens
  misc_RNA (1)...(19): siRNA sense strand
gaagcuauagccaaauaca

SEQ ID NO: 122157 - RNA, 19 nt, Homo sapiens
  misc_RNA (1)...(19): siRNA sense strand
gaugacacagacauguaua

SEQ ID NO: 122158 - RNA, 19 nt, Homo sapiens
  misc_RNA (1)...(19): siRNA sense strand
guggagcugucacugagaa

SEQ ID NO: 122159 - RNA, 19 nt, Homo sapiens
  misc_RNA (1)...(19): siRNA sense strand
gcaucuucccgaucucaua

SEQ ID NO: 122160 - RNA, 19 nt, Homo sapiens
  misc_RNA (1)...(19): siRNA sense strand
gaagaggaacuccagaaaa

SEQ ID NO: 122161 - RNA, 19 nt, Homo sapiens
  misc_RNA (1)...(19): siRNA sense strand
ggucugagccaaggaguau

SEQ ID NO: 122162 - RNA, 19 nt, Homo sapiens
  misc_RNA (1)...(19): siRNA sense strand
gacgauguuuaagcaaauu

SEQ ID NO: 122163 - RNA, 19 nt, Homo sapiens
  misc_RNA (1)...(19): siRNA sense strand
gaaagggagauagaguuau

SEQ ID NO: 122164 - RNA, 19 nt, Homo sapiens
  misc_RNA (1)...(19): siRNA sense strand
gaaaaguggacacaagaaa

SEQ ID NO: 122165 - RNA, 19 nt, Homo sapiens
  misc_RNA (1)...(19): siRNA sense strand
cugcaaagacccaaaccua

SEQ ID NO: 122166 - RNA, 19 nt, Homo sapiens
  misc_RNA (1)...(19): siRNA sense strand
guacaacccacccuacagu

SEQ ID NO: 122167 - RNA, 19 nt, Homo sapiens
  misc_RNA (1)...(19): siRNA sense strand
ggaaagacccaugaguucu

SEQ ID NO: 122168 - RNA, 19 nt, Homo sapiens
  misc_RNA (1)...(19): siRNA sense strand
auaugaaccuggcaaguca

SEQ ID NO: 122169 - RNA, 19 nt, Homo sapiens
  misc_RNA (1)...(19): siRNA sense strand
uucaggcucuguauaacua

SEQ ID NO: 122170 - RNA, 19 nt, Homo sapiens
  misc_RNA (1)...(19): siRNA sense strand
gauaggauucacagcuuga

SEQ ID NO: 122171 - RNA, 19 nt, Homo sapiens
  misc_RNA (1)...(19): siRNA sense strand
caacuucaacgcagacaca

SEQ ID NO: 122172 - RNA, 19 nt, Homo sapiens
  misc_RNA (1)...(19): siRNA sense strand
aaggaguugucauuuaaga

SEQ ID NO: 122173 - RNA, 19 nt, Homo sapiens
  misc_RNA (1)...(19): siRNA sense strand
caagcaccacucuuacaaa

SEQ ID NO: 122174 - RNA, 19 nt, Homo sapiens
  misc_RNA (1)...(19): siRNA sense strand
caaagugcgagcaggacua

SEQ ID NO: 122175 - RNA, 19 nt, Homo sapiens
  misc_RNA (1)...(19): siRNA sense strand
cugcaagcauggccaguga

SEQ ID NO: 122176 - RNA, 19 nt, Homo sapiens
  misc_RNA (1)...(19): siRNA sense strand
agacgauguuuaagcaaau

SEQ ID NO: 122177 - RNA, 19 nt, Homo sapiens
  misc_RNA (1)...(19): siRNA sense strand
ucacugagaaagggagaua

SEQ ID NO: 122178 - RNA, 19 nt, Homo sapiens
  misc_RNA (1)...(19): siRNA sense strand
cagauaacagugaauggaa

SEQ ID NO: 122179 - RNA, 19 nt, Homo sapiens
  misc_RNA (1)...(19): siRNA sense strand
ucaguccucuauagacaga

SEQ ID NO: 122180 - RNA, 19 nt, Homo sapiens
  misc_RNA (1)...(19): siRNA sense strand
ccuggcaagucaucaauuc

SEQ ID NO: 122181 - RNA, 19 nt, Homo sapiens
  misc_RNA (1)...(19): siRNA sense strand
gcacggcacaucccucgau

SEQ ID NO: 122182 - RNA, 19 nt, Homo sapiens
  misc_RNA (1)...(19): siRNA sense strand
aagcaccacucuuacaaag

SEQ ID NO: 122183 - RNA, 19 nt, Homo sapiens
  misc_RNA (1)...(19): siRNA sense strand
ucaagcaccacucuuacaa

SEQ ID NO: 122184 - RNA, 19 nt, Homo sapiens
  misc_RNA (1)...(19): siRNA sense strand
agacagaagccuggaaaga

SEQ ID NO: 122185 - RNA, 19 nt, Homo sapiens
  misc_RNA (1)...(19): siRNA sense strand
agagaucggucuucaacag

SEQ ID NO: 122186 - RNA, 19 nt, Homo sapiens
  misc_RNA (1)...(19): siRNA sense strand
caagccggaugaugacaca

SEQ ID NO: 122187 - RNA, 19 nt, Homo sapiens
  misc_RNA (1)...(19): siRNA sense strand
agaagaggaacuccagaaa

SEQ ID NO: 122188 - RNA, 19 nt, Homo sapiens
  misc_RNA (1)...(19): siRNA sense strand
aaauucacauggugcacaa

SEQ ID NO: 122189 - RNA, 19 nt, Homo sapiens
  misc_RNA (1)...(19): siRNA sense strand
gagcucagagaaagugaug

SEQ ID NO: 122190 - RNA, 19 nt, Homo sapiens
  misc_RNA (1)...(19): siRNA sense strand
cguuucaggcucuguauaa

SEQ ID NO: 122191 - RNA, 19 nt, Homo sapiens
  misc_RNA (1)...(19): siRNA sense strand
ccgugagucccaugaguua

SEQ ID NO: 122192 - RNA, 19 nt, Homo sapiens
  misc_RNA (1)...(19): siRNA sense strand
gaaaucggagaagcuauag

SEQ ID NO: 122193 - RNA, 19 nt, Homo sapiens
  misc_RNA (1)...(19): siRNA sense strand
gaucaagcaccacucuuac

SEQ ID NO: 122194 - RNA, 19 nt, Homo sapiens
  misc_RNA (1)...(19): siRNA sense strand
gagaucggucuucaacaga

SEQ ID NO: 122195 - RNA, 19 nt, Homo sapiens
  misc_RNA (1)...(19): siRNA sense strand
gcacaagccggaugaugac

SEQ ID NO: 122196 - RNA, 19 nt, Homo sapiens
  misc_RNA (1)...(19): siRNA sense strand
cccaugaguuacuaucaga

SEQ ID NO: 122197 - RNA, 19 nt, Homo sapiens
  misc_RNA (1)...(19): siRNA sense strand
ccaacucagagccagauaa

SEQ ID NO: 122198 - RNA, 19 nt, Homo sapiens
  misc_RNA (1)...(19): siRNA sense strand
ccagauaacagugaaugga

SEQ ID NO: 122199 - RNA, 19 nt, Homo sapiens
  misc_RNA (1)...(19): siRNA sense strand
gaggaagagaagagaguga

SEQ ID NO: 122200 - RNA, 19 nt, Homo sapiens
  misc_RNA (1)...(19): siRNA sense strand
guccuguguuuacucauga

SEQ ID NO: 122201 - RNA, 19 nt, Homo sapiens
  misc_RNA (1)...(19): siRNA sense strand
gagaaagcacagccugcaa

SEQ ID NO: 122202 - RNA, 19 nt, Homo sapiens
  misc_RNA (1)...(19): siRNA sense strand
gagauacugucuacauccu

SEQ ID NO: 122203 - RNA, 19 nt, Homo sapiens
  misc_RNA (1)...(19): siRNA sense strand
uggaaagacccaugaguuc

SEQ ID NO: 122204 - RNA, 19 nt, Homo sapiens
  misc_RNA (1)...(19): siRNA sense strand
gcaagucaucaauucuuca

SEQ ID NO: 122205 - RNA, 19 nt, Homo sapiens
  misc_RNA (1)...(19): siRNA sense strand
caaaccuacagaccucuuu

SEQ ID NO: 122206 - RNA, 19 nt, Homo sapiens
  misc_RNA (1)...(19): siRNA sense strand
gagaagcuauagccaaaua

SEQ ID NO: 122207 - RNA, 19 nt, Homo sapiens
  misc_RNA (1)...(19): siRNA sense strand
gaaaggagauacugucuac

SEQ ID NO: 122208 - RNA, 19 nt, Homo sapiens
  misc_RNA (1)...(19): siRNA sense strand
caaggcaucuucccuguuu

SEQ ID NO: 122209 - RNA, 19 nt, Homo sapiens
  misc_RNA (1)...(19): siRNA sense strand
cuacagaccucuuuccaaa

SEQ ID NO: 122210 - RNA, 19 nt, Homo sapiens
  misc_RNA (1)...(19): siRNA sense strand
cuaaggaguugucauuuaa

SEQ ID NO: 122211 - RNA, 19 nt, Homo sapiens
  misc_RNA (1)...(19): siRNA sense strand
ucuaaggaguugucauuua

SEQ ID NO: 122212 - RNA, 19 nt, Homo sapiens
  misc_RNA (1)...(19): siRNA sense strand
ggaucaagcaccacucuua

SEQ ID NO: 122213 - RNA, 19 nt, Homo sapiens
  misc_RNA (1)...(19): siRNA sense strand
ggagauagaguuauucuuc

SEQ ID NO: 122214 - RNA, 19 nt, Homo sapiens
  misc_RNA (1)...(19): siRNA sense strand
cagagaaagugaugucauu

SEQ ID NO: 122215 - RNA, 19 nt, Homo sapiens
  misc_RNA (1)...(19): siRNA sense strand
ucacucaacuccagcauug

SEQ ID NO: 122216 - RNA, 19 nt, Homo sapiens
  misc_RNA (1)...(19): siRNA sense strand
caucaauucuucagcauga

SEQ ID NO: 122217 - RNA, 19 nt, Homo sapiens
  misc_RNA (1)...(19): siRNA sense strand
aaagggagauagaguuauu

SEQ ID NO: 122218 - RNA, 19 nt, Homo sapiens
  misc_RNA (1)...(19): siRNA sense strand
gcaccacucuuacaaaguc

SEQ ID NO: 122219 - RNA, 19 nt, Homo sapiens
  misc_RNA (1)...(19): siRNA sense strand
gguacaagacgauguuuaa

SEQ ID NO: 122220 - RNA, 19 nt, Homo sapiens
  misc_RNA (1)...(19): siRNA sense strand
ggaguugucauuuaagaaa

SEQ ID NO: 122221 - RNA, 19 nt, Homo sapiens
  misc_RNA (1)...(19): siRNA sense strand
aaacugguaugaagguaaa

SEQ ID NO: 122222 - RNA, 19 nt, Homo sapiens
  misc_RNA (1)...(19): siRNA sense strand
cggagaagcuauagccaaa

SEQ ID NO: 122223 - RNA, 19 nt, Homo sapiens
  misc_RNA (1)...(19): siRNA sense strand
aaagugaugucauugaugu

SEQ ID NO: 122224 - RNA, 19 nt, Homo sapiens
  misc_RNA (1)...(19): siRNA sense strand
caucuucccuguuuccuau

SEQ ID NO: 122225 - RNA, 19 nt, Homo sapiens
  misc_RNA (1)...(19): siRNA sense strand
gacacagacauguauaaua

SEQ ID NO: 122226 - RNA, 19 nt, Homo sapiens
  misc_RNA (1)...(19): siRNA sense strand
gaucaaaacugguaugaag

SEQ ID NO: 122227 - RNA, 19 nt, Homo sapiens
  misc_RNA (1)...(19): siRNA sense strand
gcaaagacccaaaccuaca

SEQ ID NO: 122228 - RNA, 19 nt, Homo sapiens
  misc_RNA (1)...(19): siRNA sense strand
ggagaaaucggagaagcua

SEQ ID NO: 122229 - RNA, 19 nt, Homo sapiens
  misc_RNA (1)...(19): siRNA sense strand
caacagacaaggcaucuuc

SEQ ID NO: 122230 - RNA, 19 nt, Homo sapiens
  misc_RNA (1)...(19): siRNA sense strand
gagaaagugaugucauuga

SEQ ID NO: 122231 - RNA, 19 nt, Homo sapiens
  misc_RNA (1)...(19): siRNA sense strand
gagaaagggagauagaguu

SEQ ID NO: 122232 - RNA, 19 nt, Homo sapiens
  misc_RNA (1)...(19): siRNA sense strand
agaaagggagauagaguua

SEQ ID NO: 122233 - RNA, 19 nt, Homo sapiens
  misc_RNA (1)...(19): siRNA sense strand
uaacuauacucccaggaau

SEQ ID NO: 122234 - RNA, 19 nt, Homo sapiens
  misc_RNA (1)...(19): siRNA sense strand
gagauagaguuauucuucu

SEQ ID NO: 122235 - RNA, 19 nt, Homo sapiens
  misc_RNA (1)...(19): siRNA sense strand
acaagacgauguuuaagca

SEQ ID NO: 122236 - RNA, 19 nt, Homo sapiens
  misc_RNA (1)...(19): siRNA sense strand
ccacagcuauucuagugau

SEQ ID NO: 122237 - RNA, 19 nt, Homo sapiens
  misc_RNA (1)...(19): siRNA sense strand
gaaagcacagccugcaaga

SEQ ID NO: 122238 - RNA, 19 nt, Homo sapiens
  misc_RNA (1)...(19): siRNA sense strand
gaucggucuucaacagaaa

SEQ ID NO: 122239 - RNA, 19 nt, Homo sapiens
  misc_RNA (1)...(19): siRNA sense strand
caucuaaggaguugucauu

SEQ ID NO: 122240 - RNA, 19 nt, Homo sapiens
  misc_RNA (1)...(19): siRNA sense strand
gaaagugaugucauugaug

SEQ ID NO: 122241 - RNA, 19 nt, Homo sapiens
  misc_RNA (1)...(19): siRNA sense strand
gaaagacccaugaguucug

SEQ ID NO: 122242 - RNA, 19 nt, Homo sapiens
  misc_RNA (1)...(19): siRNA sense strand
agaaaucggagaagcuaua

SEQ ID NO: 122243 - RNA, 19 nt, Homo sapiens
  misc_RNA (1)...(19): siRNA sense strand
ucagacaucuaaggaguug

SEQ ID NO: 122244 - RNA, 19 nt, Homo sapiens
  misc_RNA (1)...(19): siRNA sense strand
agaaagugaugucauugau

SEQ ID NO: 122245 - RNA, 19 nt, Homo sapiens
  misc_RNA (1)...(19): siRNA sense strand
cccaaggacugguacaaga

SEQ ID NO: 122246 - RNA, 19 nt, Homo sapiens
  misc_RNA (1)...(19): siRNA sense strand
gaaccuggcaagucaucaa

SEQ ID NO: 122247 - RNA, 19 nt, Homo sapiens
  misc_RNA (1)...(19): siRNA sense strand
uaucaguccucuauagaca

SEQ ID NO: 122248 - RNA, 19 nt, Homo sapiens
  misc_RNA (1)...(19): siRNA sense strand
aagacgauguuuaagcaaa

SEQ ID NO: 122249 - RNA, 19 nt, Homo sapiens
  misc_RNA (1)...(19): siRNA sense strand
ugucauugaugucauggaa

SEQ ID NO: 122250 - RNA, 19 nt, Homo sapiens
  misc_RNA (1)...(19): siRNA sense strand
ggcaagucaucaauucuuc

SEQ ID NO: 122251 - RNA, 19 nt, Homo sapiens
  misc_RNA (1)...(19): siRNA sense strand
uuaaggcucagacaucuaa

SEQ ID NO: 122252 - RNA, 19 nt, Homo sapiens
  misc_RNA (1)...(19): siRNA sense strand
gaagcuauagccaaauaca

SEQ ID NO: 122253 - RNA, 19 nt, Homo sapiens
  misc_RNA (1)...(19): siRNA sense strand
gaugacacagacauguaua

SEQ ID NO: 122254 - RNA, 19 nt, Homo sapiens
  misc_RNA (1)...(19): siRNA sense strand
guggagcugucacugagaa

SEQ ID NO: 122255 - RNA, 19 nt, Homo sapiens
  misc_RNA (1)...(19): siRNA sense strand
gcaucuucccgaucucaua

SEQ ID NO: 122256 - RNA, 19 nt, Homo sapiens
  misc_RNA (1)...(19): siRNA sense strand
gaagaggaacuccagaaaa

SEQ ID NO: 122257 - RNA, 19 nt, Homo sapiens
  misc_RNA (1)...(19): siRNA sense strand
ggucugagccaaggaguau

SEQ ID NO: 122258 - RNA, 19 nt, Homo sapiens
  misc_RNA (1)...(19): siRNA sense strand
gacgauguuuaagcaaauu

SEQ ID NO: 122259 - RNA, 19 nt, Homo sapiens
  misc_RNA (1)...(19): siRNA sense strand
gaaagggagauagaguuau

SEQ ID NO: 122260 - RNA, 19 nt, Homo sapiens
  misc_RNA (1)...(19): siRNA sense strand
gaaaaguggacacaagaaa

SEQ ID NO: 122261 - RNA, 19 nt, Homo sapiens
  misc_RNA (1)...(19): siRNA sense strand
cugcaaagacccaaaccua

SEQ ID NO: 122262 - RNA, 19 nt, Homo sapiens
  misc_RNA (1)...(19): siRNA sense strand
guacaacccacccuacagu

SEQ ID NO: 122263 - RNA, 19 nt, Homo sapiens
  misc_RNA (1)...(19): siRNA sense strand
ggaaagacccaugaguucu

SEQ ID NO: 122264 - RNA, 19 nt, Homo sapiens
  misc_RNA (1)...(19): siRNA sense strand
auaugaaccuggcaaguca

SEQ ID NO: 122265 - RNA, 19 nt, Homo sapiens
  misc_RNA (1)...(19): siRNA sense strand
uucaggcucuguauaacua

SEQ ID NO: 122266 - RNA, 19 nt, Homo sapiens
  misc_RNA (1)...(19): siRNA sense strand
gauaggauucacagcuuga

SEQ ID NO: 122267 - RNA, 19 nt, Homo sapiens
  misc_RNA (1)...(19): siRNA sense strand
caacuucaacgcagacaca

SEQ ID NO: 122268 - RNA, 19 nt, Homo sapiens
  misc_RNA (1)...(19): siRNA sense strand
aaggaguugucauuuaaga

SEQ ID NO: 122269 - RNA, 19 nt, Homo sapiens
  misc_RNA (1)...(19): siRNA sense strand
caagcaccacucuuacaaa

SEQ ID NO: 122270 - RNA, 19 nt, Homo sapiens
  misc_RNA (1)...(19): siRNA sense strand
caaagugcgagcaggacua

SEQ ID NO: 122271 - RNA, 19 nt, Homo sapiens
  misc_RNA (1)...(19): siRNA sense strand
cugcaagcauggccaguga

SEQ ID NO: 122272 - RNA, 19 nt, Homo sapiens
  misc_RNA (1)...(19): siRNA sense strand
agacgauguuuaagcaaau

SEQ ID NO: 122273 - RNA, 19 nt, Homo sapiens
  misc_RNA (1)...(19): siRNA sense strand
ucacugagaaagggagaua

SEQ ID NO: 122274 - RNA, 19 nt, Homo sapiens
  misc_RNA (1)...(19): siRNA sense strand
ucaguccucuauagacaga

SEQ ID NO: 122275 - RNA, 19 nt, Homo sapiens
  misc_RNA (1)...(19): siRNA sense strand
ccuggcaagucaucaauuc

SEQ ID NO: 122276 - RNA, 19 nt, Homo sapiens
  misc_RNA (1)...(19): siRNA sense strand
gcacggcacaucccucgau

SEQ ID NO: 122277 - RNA, 19 nt, Homo sapiens
  misc_RNA (1)...(19): siRNA sense strand
aagcaccacucuuacaaag

SEQ ID NO: 122278 - RNA, 19 nt, Homo sapiens
  misc_RNA (1)...(19): siRNA sense strand
ucaagcaccacucuuacaa

SEQ ID NO: 122279 - RNA, 19 nt, Homo sapiens
  misc_RNA (1)...(19): siRNA sense strand
agacagaagccuggaaaga

SEQ ID NO: 122280 - RNA, 19 nt, Homo sapiens
  misc_RNA (1)...(19): siRNA sense strand
agagaucggucuucaacag

SEQ ID NO: 122281 - RNA, 19 nt, Homo sapiens
  misc_RNA (1)...(19): siRNA sense strand
caagccggaugaugacaca

SEQ ID NO: 122282 - RNA, 19 nt, Homo sapiens
  misc_RNA (1)...(19): siRNA sense strand
agaagaggaacuccagaaa

SEQ ID NO: 122283 - RNA, 19 nt, Homo sapiens
  misc_RNA (1)...(19): siRNA sense strand
gcacaagccggaugaugac

SEQ ID NO: 122284 - RNA, 19 nt, Homo sapiens
  misc_RNA (1)...(19): siRNA sense strand
gagcucagagaaagugaug

SEQ ID NO: 122285 - RNA, 19 nt, Homo sapiens
  misc_RNA (1)...(19): siRNA sense strand
cguuucaggcucuguauaa

SEQ ID NO: 122286 - RNA, 19 nt, Homo sapiens
  misc_RNA (1)...(19): siRNA sense strand
gaaaucggagaagcuauag

SEQ ID NO: 122287 - RNA, 19 nt, Homo sapiens
  misc_RNA (1)...(19): siRNA sense strand
gaucaagcaccacucuuac

SEQ ID NO: 122288 - RNA, 19 nt, Homo sapiens
  misc_RNA (1)...(19): siRNA sense strand
aaauucacauggugcacaa

SEQ ID NO: 122289 - RNA, 19 nt, Homo sapiens
  misc_RNA (1)...(19): siRNA sense strand
gagaucggucuucaacaga

SEQ ID NO: 122290 - RNA, 19 nt, Homo sapiens
  misc_RNA (1)...(19): siRNA sense strand
caaaccuacagaccucuuu

SEQ ID NO: 122291 - RNA, 19 nt, Homo sapiens
  misc_RNA (1)...(19): siRNA sense strand
guccuguguuuacucauga

SEQ ID NO: 122292 - RNA, 19 nt, Homo sapiens
  misc_RNA (1)...(19): siRNA sense strand
gagaaagcacagccugcaa

SEQ ID NO: 122293 - RNA, 19 nt, Homo sapiens
  misc_RNA (1)...(19): siRNA sense strand
gagauacugucuacauccu

SEQ ID NO: 122294 - RNA, 19 nt, Homo sapiens
  misc_RNA (1)...(19): siRNA sense strand
uggaaagacccaugaguuc

SEQ ID NO: 122295 - RNA, 19 nt, Homo sapiens
  misc_RNA (1)...(19): siRNA sense strand
gcaagucaucaauucuuca

SEQ ID NO: 122296 - RNA, 19 nt, Homo sapiens
  misc_RNA (1)...(19): siRNA sense strand
gaggaagagaagagaguga

SEQ ID NO: 122297 - RNA, 19 nt, Homo sapiens
  misc_RNA (1)...(19): siRNA sense strand
agaucggucuucaacagaa

SEQ ID NO: 122298 - RNA, 19 nt, Homo sapiens
  misc_RNA (1)...(19): siRNA sense strand
uuaagcaaauucacauggu

SEQ ID NO: 122299 - RNA, 19 nt, Homo sapiens
  misc_RNA (1)...(19): siRNA sense strand
gaguugucauuuaagaaag

SEQ ID NO: 122300 - RNA, 19 nt, Homo sapiens
  misc_RNA (1)...(19): siRNA sense strand
gcaccaagggaaagaagag

SEQ ID NO: 122301 - RNA, 19 nt, Homo sapiens
  misc_RNA (1)...(19): siRNA sense strand
gaugaugacacagacaugu

SEQ ID NO: 122302 - RNA, 19 nt, Homo sapiens
  misc_RNA (1)...(19): siRNA sense strand
ggaauccccacagcaauua

SEQ ID NO: 122303 - RNA, 19 nt, Homo sapiens
  misc_RNA (1)...(19): siRNA sense strand
aagcauggccagugacuuc

SEQ ID NO: 122304 - RNA, 19 nt, Homo sapiens
  misc_RNA (1)...(19): siRNA sense strand
guggggaccucaagaagaa

SEQ ID NO: 122305 - RNA, 19 nt, Homo sapiens
  misc_RNA (1)...(19): siRNA sense strand
ccaagggaaagaagaggaa

SEQ ID NO: 122306 - RNA, 19 nt, Homo sapiens
  misc_RNA (1)...(19): siRNA sense strand
acaaagaagucuccuauaa

SEQ ID NO: 122307 - RNA, 19 nt, Homo sapiens
  misc_RNA (1)...(19): siRNA sense strand
ggaagagggugacuacauu

SEQ ID NO: 122308 - RNA, 19 nt, Homo sapiens
  misc_RNA (1)...(19): siRNA sense strand
gagagugacuacauguuua

SEQ ID NO: 122309 - RNA, 19 nt, Homo sapiens
  misc_RNA (1)...(19): siRNA sense strand
ccacaaagccguucucaaa

SEQ ID NO: 122310 - RNA, 19 nt, Homo sapiens
  misc_RNA (1)...(19): siRNA sense strand
ugaaacaggucgaaucuau

SEQ ID NO: 122311 - RNA, 19 nt, Homo sapiens
  misc_RNA (1)...(19): siRNA sense strand
caaagaagaucaggaagga

SEQ ID NO: 122312 - RNA, 19 nt, Homo sapiens
  misc_RNA (1)...(19): siRNA sense strand
gaaaaucucugaagaaaag

SEQ ID NO: 122313 - RNA, 19 nt, Homo sapiens
  misc_RNA (1)...(19): siRNA sense strand
caaagaagccaaagaagug

SEQ ID NO: 122314 - RNA, 19 nt, Homo sapiens
  misc_RNA (1)...(19): siRNA sense strand
caacauggacuucacuaaa

SEQ ID NO: 122315 - RNA, 19 nt, Homo sapiens
  misc_RNA (1)...(19): siRNA sense strand
gagagaagacgcccacaaa

SEQ ID NO: 122316 - RNA, 19 nt, Homo sapiens
  misc_RNA (1)...(19): siRNA sense strand
gagcucgccugucuucuga

SEQ ID NO: 122317 - RNA, 19 nt, Homo sapiens
  misc_RNA (1)...(19): siRNA sense strand
uaagagaccuaaccgacuu

SEQ ID NO: 122318 - RNA, 19 nt, Homo sapiens
  misc_RNA (1)...(19): siRNA sense strand
gaaaggauccgauggugau

SEQ ID NO: 122319 - RNA, 19 nt, Homo sapiens
  misc_RNA (1)...(19): siRNA sense strand
ggagcaguauuucuucuug

SEQ ID NO: 122320 - RNA, 19 nt, Homo sapiens
  misc_RNA (1)...(19): siRNA sense strand
caaagccguucucaaaguu

SEQ ID NO: 122321 - RNA, 19 nt, Homo sapiens
  misc_RNA (1)...(19): siRNA sense strand
caaacgaccucucagaucu

SEQ ID NO: 122322 - RNA, 19 nt, Homo sapiens
  misc_RNA (1)...(19): siRNA sense strand
gcaaagaagccaaagaagu

SEQ ID NO: 122323 - RNA, 19 nt, Homo sapiens
  misc_RNA (1)...(19): siRNA sense strand
aaagauguguggcagguaa

SEQ ID NO: 122324 - RNA, 19 nt, Homo sapiens
  misc_RNA (1)...(19): siRNA sense strand
uaaagaggaugacucaaag

SEQ ID NO: 122325 - RNA, 19 nt, Homo sapiens
  misc_RNA (1)...(19): siRNA sense strand
ucaagaggguacaugauga

SEQ ID NO: 122326 - RNA, 19 nt, Homo sapiens
  misc_RNA (1)...(19): siRNA sense strand
gagccacccuucuauaaag

SEQ ID NO: 122327 - RNA, 19 nt, Homo sapiens
  misc_RNA (1)...(19): siRNA sense strand
caacccaucugcaaaccuu

SEQ ID NO: 122328 - RNA, 19 nt, Homo sapiens
  misc_RNA (1)...(19): siRNA sense strand
aaagaagucuccuauaacu

SEQ ID NO: 122329 - RNA, 19 nt, Homo sapiens
  misc_RNA (1)...(19): siRNA sense strand
cuuguaagcuccagugauu

SEQ ID NO: 122330 - RNA, 19 nt, Homo sapiens
  misc_RNA (1)...(19): siRNA sense strand
caauggagcucgccugucu

SEQ ID NO: 122331 - RNA, 19 nt, Homo sapiens
  misc_RNA (1)...(19): siRNA sense strand
caaaggacaaugacaguga

SEQ ID NO: 122332 - RNA, 19 nt, Homo sapiens
  misc_RNA (1)...(19): siRNA sense strand
ggaaaccagugcucuagag

SEQ ID NO: 122333 - RNA, 19 nt, Homo sapiens
  misc_RNA (1)...(19): siRNA sense strand
ggaagauucagacuuuauu

SEQ ID NO: 122334 - RNA, 19 nt, Homo sapiens
  misc_RNA (1)...(19): siRNA sense strand
ccaaagaugcagcuucaaa

SEQ ID NO: 122335 - RNA, 19 nt, Homo sapiens
  misc_RNA (1)...(19): siRNA sense strand
guaggcagguccacuguca

SEQ ID NO: 122336 - RNA, 19 nt, Homo sapiens
  misc_RNA (1)...(19): siRNA sense strand
gugaguaugugccaauguu

SEQ ID NO: 122337 - RNA, 19 nt, Homo sapiens
  misc_RNA (1)...(19): siRNA sense strand
caaaagcaccugauacuaa

SEQ ID NO: 122338 - RNA, 19 nt, Homo sapiens
  misc_RNA (1)...(19): siRNA sense strand
gggcaaagaagaucaggaa

SEQ ID NO: 122339 - RNA, 19 nt, Homo sapiens
  misc_RNA (1)...(19): siRNA sense strand
ucugagugcuguauggaua

SEQ ID NO: 122340 - RNA, 19 nt, Homo sapiens
  misc_RNA (1)...(19): siRNA sense strand
aauguuaccuggaaaguuc

SEQ ID NO: 122341 - RNA, 19 nt, Homo sapiens
  misc_RNA (1)...(19): siRNA sense strand
gagccgcugucucugcuuu

SEQ ID NO: 122342 - RNA, 19 nt, Homo sapiens
  misc_RNA (1)...(19): siRNA sense strand
ggagccacccuucuauaaa

SEQ ID NO: 122343 - RNA, 19 nt, Homo sapiens
  misc_RNA (1)...(19): siRNA sense strand
gcaaacgaccucucagauc

SEQ ID NO: 122344 - RNA, 19 nt, Homo sapiens
  misc_RNA (1)...(19): siRNA sense strand
gaccuaaccgacuuucuuu

SEQ ID NO: 122345 - RNA, 19 nt, Homo sapiens
  misc_RNA (1)...(19): siRNA sense strand
gcaaauuaacucaaagcaa

SEQ ID NO: 122346 - RNA, 19 nt, Homo sapiens
  misc_RNA (1)...(19): siRNA sense strand
ggcaaaggcucaggaagug

SEQ ID NO: 122347 - RNA, 19 nt, Homo sapiens
  misc_RNA (1)...(19): siRNA sense strand
gaggaggucguguuuguga

SEQ ID NO: 122348 - RNA, 19 nt, Homo sapiens
  misc_RNA (1)...(19): siRNA sense strand
acaaagccguucucaaagu

SEQ ID NO: 122349 - RNA, 19 nt, Homo sapiens
  misc_RNA (1)...(19): siRNA sense strand
aagcggaggugacuacaug

SEQ ID NO: 122350 - RNA, 19 nt, Homo sapiens
  misc_RNA (1)...(19): siRNA sense strand
gaagagggugacuacauug

SEQ ID NO: 122351 - RNA, 19 nt, Homo sapiens
  misc_RNA (1)...(19): siRNA sense strand
ggaggaaaccagugcucua

SEQ ID NO: 122352 - RNA, 19 nt, Homo sapiens
  misc_RNA (1)...(19): siRNA sense strand
gaagaugagagccuugugu

SEQ ID NO: 122353 - RNA, 19 nt, Homo sapiens
  misc_RNA (1)...(19): siRNA sense strand
gacaaagaagucuccuaua

SEQ ID NO: 122354 - RNA, 19 nt, Homo sapiens
  misc_RNA (1)...(19): siRNA sense strand
uaauaaagaggaugacuca

SEQ ID NO: 122355 - RNA, 19 nt, Homo sapiens
  misc_RNA (1)...(19): siRNA sense strand
ggaagaagagcaggagaga

SEQ ID NO: 122356 - RNA, 19 nt, Homo sapiens
  misc_RNA (1)...(19): siRNA sense strand
auaaagaggaugacucaaa

SEQ ID NO: 122357 - RNA, 19 nt, Homo sapiens
  misc_RNA (1)...(19): siRNA sense strand
ugacagaggagccacgaaa

SEQ ID NO: 122358 - RNA, 19 nt, Homo sapiens
  misc_RNA (1)...(19): siRNA sense strand
gaaacaggucgaaucuaug

SEQ ID NO: 122359 - RNA, 19 nt, Homo sapiens
  misc_RNA (1)...(19): siRNA sense strand
ugagagugacuacauguuu

SEQ ID NO: 122360 - RNA, 19 nt, Homo sapiens
  misc_RNA (1)...(19): siRNA sense strand
gcucagaaggucccgcuuu

SEQ ID NO: 122361 - RNA, 19 nt, Homo sapiens
  misc_RNA (1)...(19): siRNA sense strand
caagcgacaagaagacuaa

SEQ ID NO: 122362 - RNA, 19 nt, Homo sapiens
  misc_RNA (1)...(19): siRNA sense strand
gggcaaaggcucaggaagu

SEQ ID NO: 122363 - RNA, 19 nt, Homo sapiens
  misc_RNA (1)...(19): siRNA sense strand
gugacuacaugccuaugaa

SEQ ID NO: 122364 - RNA, 19 nt, Homo sapiens
  misc_RNA (1)...(19): siRNA sense strand
gaacgagucggagcaggaa

SEQ ID NO: 122365 - RNA, 19 nt, Homo sapiens
  misc_RNA (1)...(19): siRNA sense strand
gagggugacuacauugaag

SEQ ID NO: 122366 - RNA, 19 nt, Homo sapiens
  misc_RNA (1)...(19): siRNA sense strand
gacagaaugacaacaguga

SEQ ID NO: 122367 - RNA, 19 nt, Homo sapiens
  misc_RNA (1)...(19): siRNA sense strand
gcaggaaagcugguacuug

SEQ ID NO: 122368 - RNA, 19 nt, Homo sapiens
  misc_RNA (1)...(19): siRNA sense strand
gaaaccagugcucuagaga

SEQ ID NO: 122369 - RNA, 19 nt, Homo sapiens
  misc_RNA (1)...(19): siRNA sense strand
caaagaagucuccuauaac

SEQ ID NO: 122370 - RNA, 19 nt, Homo sapiens
  misc_RNA (1)...(19): siRNA sense strand
gugccaauguuaccuggaa

SEQ ID NO: 122371 - RNA, 19 nt, Homo sapiens
  misc_RNA (1)...(19): siRNA sense strand
caccugauacuaauaaaga

SEQ ID NO: 122372 - RNA, 19 nt, Homo sapiens
  misc_RNA (1)...(19): siRNA sense strand
cuacaugccuaugaacaau

SEQ ID NO: 122373 - RNA, 19 nt, Homo sapiens
  misc_RNA (1)...(19): siRNA sense strand
cagacagccucgagagaga

SEQ ID NO: 122374 - RNA, 19 nt, Homo sapiens
  misc_RNA (1)...(19): siRNA sense strand
aaacaggucgaaucuaugu

SEQ ID NO: 122375 - RNA, 19 nt, Homo sapiens
  misc_RNA (1)...(19): siRNA sense strand
cuacuucucucuaccaaac

SEQ ID NO: 122376 - RNA, 19 nt, Homo sapiens
  misc_RNA (1)...(19): siRNA sense strand
gacacucggagcaguauuu

SEQ ID NO: 122377 - RNA, 19 nt, Homo sapiens
  misc_RNA (1)...(19): siRNA sense strand
ggagagaagacgcccacaa

SEQ ID NO: 122378 - RNA, 19 nt, Homo sapiens
  misc_RNA (1)...(19): siRNA sense strand
gaaugacaacagugaguau

SEQ ID NO: 122379 - RNA, 19 nt, Homo sapiens
  misc_RNA (1)...(19): siRNA sense strand
ggguggcucuuccuccaaa

SEQ ID NO: 122380 - RNA, 19 nt, Homo sapiens
  misc_RNA (1)...(19): siRNA sense strand
gggaagauucagacuuuau

SEQ ID NO: 122381 - RNA, 19 nt, Homo sapiens
  misc_RNA (1)...(19): siRNA sense strand
cacgaaagaaugcaaagaa

SEQ ID NO: 122382 - RNA, 19 nt, Homo sapiens
  misc_RNA (1)...(19): siRNA sense strand
gugacuacauugaaguaau

SEQ ID NO: 122383 - RNA, 19 nt, Homo sapiens
  misc_RNA (1)...(19): siRNA sense strand
agugaaagaugcagagauc

SEQ ID NO: 122384 - RNA, 19 nt, Homo sapiens
  misc_RNA (1)...(19): siRNA sense strand
aaccagugcucuagagaug

SEQ ID NO: 122385 - RNA, 19 nt, Homo sapiens
  misc_RNA (1)...(19): siRNA sense strand
ugacaacagugaguaugug

SEQ ID NO: 122386 - RNA, 19 nt, Homo sapiens
  misc_RNA (1)...(19): siRNA sense strand
gaggagccacgaaagaaug

SEQ ID NO: 122387 - RNA, 19 nt, Homo sapiens
  misc_RNA (1)...(19): siRNA sense strand
caaagcaagcaacagcaaa

SEQ ID NO: 122388 - RNA, 19 nt, Homo sapiens
  misc_RNA (1)...(19): siRNA sense strand
gcggagccacccuucuaua

SEQ ID NO: 122389 - RNA, 19 nt, Homo sapiens
  misc_RNA (1)...(19): siRNA sense strand
caaaaugucucugcuucaa

SEQ ID NO: 122390 - RNA, 19 nt, Homo sapiens
  misc_RNA (1)...(19): siRNA sense strand
aagaugaggaugacccaua

SEQ ID NO: 122391 - RNA, 19 nt, Homo sapiens
  misc_RNA (1)...(19): siRNA sense strand
ccacagagccagagcuuuu

SEQ ID NO: 122392 - RNA, 19 nt, Homo sapiens
  misc_RNA (1)...(19): siRNA sense strand
cggagccacccuucuauaa

SEQ ID NO: 122393 - RNA, 19 nt, Homo sapiens
  misc_RNA (1)...(19): siRNA sense strand
gagaagacgcccacaaagc

SEQ ID NO: 122394 - RNA, 19 nt, Homo sapiens
  misc_RNA (1)...(19): siRNA sense strand
gaagaagagcaggagagaa

SEQ ID NO: 122395 - RNA, 19 nt, Homo sapiens
  misc_RNA (1)...(19): siRNA sense strand
gaaccaccaccuguagcua

SEQ ID NO: 122396 - RNA, 19 nt, Homo sapiens
  misc_RNA (1)...(19): siRNA sense strand
cgaccaagcgacaagaaga

SEQ ID NO: 122397 - RNA, 19 nt, Homo sapiens
  misc_RNA (1)...(19): siRNA sense strand
caaagaugcagcuucaaag

SEQ ID NO: 122398 - RNA, 19 nt, Homo sapiens
  misc_RNA (1)...(19): siRNA sense strand
uuucggagcucaccuuugg

SEQ ID NO: 122399 - RNA, 19 nt, Homo sapiens
  misc_RNA (1)...(19): siRNA sense strand
acaaugacagugagaguga

SEQ ID NO: 122400 - RNA, 19 nt, Homo sapiens
  misc_RNA (1)...(19): siRNA sense strand
ggacaaugacagugagagu

SEQ ID NO: 122401 - RNA, 19 nt, Homo sapiens
  misc_RNA (1)...(19): siRNA sense strand
cagaggagccacgaaagaa

SEQ ID NO: 122402 - RNA, 19 nt, Homo sapiens
  misc_RNA (1)...(19): siRNA sense strand
gauucaagaggguacauga

SEQ ID NO: 122403 - RNA, 19 nt, Homo sapiens
  misc_RNA (1)...(19): siRNA sense strand
cgacaccucauugcucuuu

SEQ ID NO: 122404 - RNA, 19 nt, Homo sapiens
  misc_RNA (1)...(19): siRNA sense strand
ggaggggccuagacaaaga

SEQ ID NO: 122405 - RNA, 19 nt, Homo sapiens
  misc_RNA (1)...(19): siRNA sense strand
acagugccauucgcuauga

SEQ ID NO: 122406 - RNA, 19 nt, Homo sapiens
  misc_RNA (1)...(19): siRNA sense strand
gaagaaggguuauuuguug

SEQ ID NO: 122407 - RNA, 19 nt, Homo sapiens
  misc_RNA (1)...(19): siRNA sense strand
ggaaacaaaugguuagaaa

SEQ ID NO: 122408 - RNA, 19 nt, Homo sapiens
  misc_RNA (1)...(19): siRNA sense strand
gaagauagauugccugaag

SEQ ID NO: 122409 - RNA, 19 nt, Homo sapiens
  misc_RNA (1)...(19): siRNA sense strand
gaauacagauccugaaaga

SEQ ID NO: 122410 - RNA, 19 nt, Homo sapiens
  misc_RNA (1)...(19): siRNA sense strand
gauuauaucucuccugaaa

SEQ ID NO: 122411 - RNA, 19 nt, Homo sapiens
  misc_RNA (1)...(19): siRNA sense strand
aagaauaucugcuguguuu

SEQ ID NO: 122412 - RNA, 19 nt, Homo sapiens
  misc_RNA (1)...(19): siRNA sense strand
caacagauaugcccuggaa

SEQ ID NO: 122413 - RNA, 19 nt, Homo sapiens
  misc_RNA (1)...(19): siRNA sense strand
gcgcaagacucaccaguuu

SEQ ID NO: 122414 - RNA, 19 nt, Homo sapiens
  misc_RNA (1)...(19): siRNA sense strand
gaccauacacuaucauuua

SEQ ID NO: 122415 - RNA, 19 nt, Homo sapiens
  misc_RNA (1)...(19): siRNA sense strand
caacagauacaucgaauuu

SEQ ID NO: 122416 - RNA, 19 nt, Homo sapiens
  misc_RNA (1)...(19): siRNA sense strand
ugaaagaucugcccaugaa

SEQ ID NO: 122417 - RNA, 19 nt, Homo sapiens
  misc_RNA (1)...(19): siRNA sense strand
gaucggagcuguuuaagag

SEQ ID NO: 122418 - RNA, 19 nt, Homo sapiens
  misc_RNA (1)...(19): siRNA sense strand
ggaauugauugggauaaua

SEQ ID NO: 122419 - RNA, 19 nt, Homo sapiens
  misc_RNA (1)...(19): siRNA sense strand
caugagggaugaagaauuu

SEQ ID NO: 122420 - RNA, 19 nt, Homo sapiens
  misc_RNA (1)...(19): siRNA sense strand
agaaagaacugcaugauuc

SEQ ID NO: 122421 - RNA, 19 nt, Homo sapiens
  misc_RNA (1)...(19): siRNA sense strand
gaaauucaagucccauaua

SEQ ID NO: 122422 - RNA, 19 nt, Homo sapiens
  misc_RNA (1)...(19): siRNA sense strand
gaagagaaagucaaaguga

SEQ ID NO: 122423 - RNA, 19 nt, Homo sapiens
  misc_RNA (1)...(19): siRNA sense strand
gauaauagucggaaacaaa

SEQ ID NO: 122424 - RNA, 19 nt, Homo sapiens
  misc_RNA (1)...(19): siRNA sense strand
aaaggcagguccucuguua

SEQ ID NO: 122425 - RNA, 19 nt, Homo sapiens
  misc_RNA (1)...(19): siRNA sense strand
uaaccaaacuaaagacuga

SEQ ID NO: 122426 - RNA, 19 nt, Homo sapiens
  misc_RNA (1)...(19): siRNA sense strand
gaugguggguuuaauaaga

SEQ ID NO: 122427 - RNA, 19 nt, Homo sapiens
  misc_RNA (1)...(19): siRNA sense strand
gaacaucgacuuggucaaa

SEQ ID NO: 122428 - RNA, 19 nt, Homo sapiens
  misc_RNA (1)...(19): siRNA sense strand
guuaguagcccaacagaua

SEQ ID NO: 122429 - RNA, 19 nt, Homo sapiens
  misc_RNA (1)...(19): siRNA sense strand
ggguauagauccucagaaa

SEQ ID NO: 122430 - RNA, 19 nt, Homo sapiens
  misc_RNA (1)...(19): siRNA sense strand
gcaaauccuuccucuuguu

SEQ ID NO: 122431 - RNA, 19 nt, Homo sapiens
  misc_RNA (1)...(19): siRNA sense strand
ugaagaaagggauguauua

SEQ ID NO: 122432 - RNA, 19 nt, Homo sapiens
  misc_RNA (1)...(19): siRNA sense strand
gaacuuaaguauacacaac

SEQ ID NO: 122433 - RNA, 19 nt, Homo sapiens
  misc_RNA (1)...(19): siRNA sense strand
gacaauauacugauggaua

SEQ ID NO: 122434 - RNA, 19 nt, Homo sapiens
  misc_RNA (1)...(19): siRNA sense strand
gaaggaaauccauacagua

SEQ ID NO: 122435 - RNA, 19 nt, Homo sapiens
  misc_RNA (1)...(19): siRNA sense strand
caaaugcgauuacauagag

SEQ ID NO: 122436 - RNA, 19 nt, Homo sapiens
  misc_RNA (1)...(19): siRNA sense strand
caagaagaguugaauaaag

SEQ ID NO: 122437 - RNA, 19 nt, Homo sapiens
  misc_RNA (1)...(19): siRNA sense strand
caagagauaaccaaacuaa

SEQ ID NO: 122438 - RNA, 19 nt, Homo sapiens
  misc_RNA (1)...(19): siRNA sense strand
aaagagagguuucaguuuc

SEQ ID NO: 122439 - RNA, 19 nt, Homo sapiens
  misc_RNA (1)...(19): siRNA sense strand
gcacuaugcuuuccaggau

SEQ ID NO: 122440 - RNA, 19 nt, Homo sapiens
  misc_RNA (1)...(19): siRNA sense strand
gauaaaguguuugccauga

SEQ ID NO: 122441 - RNA, 19 nt, Homo sapiens
  misc_RNA (1)...(19): siRNA sense strand
gaaagugaguucaaacaac

SEQ ID NO: 122442 - RNA, 19 nt, Homo sapiens
  misc_RNA (1)...(19): siRNA sense strand
gcuacgagauccagaaaug

SEQ ID NO: 122443 - RNA, 19 nt, Homo sapiens
  misc_RNA (1)...(19): siRNA sense strand
gaacuacucucagaaaucg

SEQ ID NO: 122444 - RNA, 19 nt, Homo sapiens
  misc_RNA (1)...(19): siRNA sense strand
gaugugaacuccauggaau

SEQ ID NO: 122445 - RNA, 19 nt, Homo sapiens
  misc_RNA (1)...(19): siRNA sense strand
agaaagggauguauuagug

SEQ ID NO: 122446 - RNA, 19 nt, Homo sapiens
  misc_RNA (1)...(19): siRNA sense strand
guugauaucuuugauguga

SEQ ID NO: 122447 - RNA, 19 nt, Homo sapiens
  misc_RNA (1)...(19): siRNA sense strand
gcagagagcacuggcuaua

SEQ ID NO: 122448 - RNA, 19 nt, Homo sapiens
  misc_RNA (1)...(19): siRNA sense strand
gagaaggaauacaugcaaa

SEQ ID NO: 122449 - RNA, 19 nt, Homo sapiens
  misc_RNA (1)...(19): siRNA sense strand
guggagacauuacuggaua

SEQ ID NO: 122450 - RNA, 19 nt, Homo sapiens
  misc_RNA (1)...(19): siRNA sense strand
guaacagaaucaagucauu

SEQ ID NO: 122451 - RNA, 19 nt, Homo sapiens
  misc_RNA (1)...(19): siRNA sense strand
gaauugauguggccagcaa

SEQ ID NO: 122452 - RNA, 19 nt, Homo sapiens
  misc_RNA (1)...(19): siRNA sense strand
gaaacuaaagggugucaaa

SEQ ID NO: 122453 - RNA, 19 nt, Homo sapiens
  misc_RNA (1)...(19): siRNA sense strand
ccauauaacuuguguaaac

SEQ ID NO: 122454 - RNA, 19 nt, Homo sapiens
  misc_RNA (1)...(19): siRNA sense strand
gggaggaauuugaaaguga

SEQ ID NO: 122455 - RNA, 19 nt, Homo sapiens
  misc_RNA (1)...(19): siRNA sense strand
uuagacaaaucaaggcuua

SEQ ID NO: 122456 - RNA, 19 nt, Homo sapiens
  misc_RNA (1)...(19): siRNA sense strand
uaaaguguuugccaugaaa

SEQ ID NO: 122457 - RNA, 19 nt, Homo sapiens
  misc_RNA (1)...(19): siRNA sense strand
caguugagaucuccaguaa

SEQ ID NO: 122458 - RNA, 19 nt, Homo sapiens
  misc_RNA (1)...(19): siRNA sense strand
gaacaucagcaagagauaa

SEQ ID NO: 122459 - RNA, 19 nt, Homo sapiens
  misc_RNA (1)...(19): siRNA sense strand
gauauggaccugaauguga

SEQ ID NO: 122460 - RNA, 19 nt, Homo sapiens
  misc_RNA (1)...(19): siRNA sense strand
gcaauugacucaguucauc

SEQ ID NO: 122461 - RNA, 19 nt, Homo sapiens
  misc_RNA (1)...(19): siRNA sense strand
cagcaaauuugaagauaga

SEQ ID NO: 122462 - RNA, 19 nt, Homo sapiens
  misc_RNA (1)...(19): siRNA sense strand
ucgaacagcugauaaagga

SEQ ID NO: 122463 - RNA, 19 nt, Homo sapiens
  misc_RNA (1)...(19): siRNA sense strand
cagcaaauccuuccucuug

SEQ ID NO: 122464 - RNA, 19 nt, Homo sapiens
  misc_RNA (1)...(19): siRNA sense strand
gcauugggauauacacuga

SEQ ID NO: 122465 - RNA, 19 nt, Homo sapiens
  misc_RNA (1)...(19): siRNA sense strand
caacuggcuuuccaccuaa

SEQ ID NO: 122466 - RNA, 19 nt, Homo sapiens
  misc_RNA (1)...(19): siRNA sense strand
ucaacuggcuuuccaccua

SEQ ID NO: 122467 - RNA, 19 nt, Homo sapiens
  misc_RNA (1)...(19): siRNA sense strand
gaagaagaacuuggaacua

SEQ ID NO: 122468 - RNA, 19 nt, Homo sapiens
  misc_RNA (1)...(19): siRNA sense strand
guugagaucuccaguaaag

SEQ ID NO: 122469 - RNA, 19 nt, Homo sapiens
  misc_RNA (1)...(19): siRNA sense strand
cugaagagcuuagaucuga

SEQ ID NO: 122470 - RNA, 19 nt, Homo sapiens
  misc_RNA (1)...(19): siRNA sense strand
gaacuuggaacuacucuca

SEQ ID NO: 122471 - RNA, 19 nt, Homo sapiens
  misc_RNA (1)...(19): siRNA sense strand
gaagcuacgugaacagagu

SEQ ID NO: 122472 - RNA, 19 nt, Homo sapiens
  misc_RNA (1)...(19): siRNA sense strand
ggauggcaaucuucaguga

SEQ ID NO: 122473 - RNA, 19 nt, Homo sapiens
  misc_RNA (1)...(19): siRNA sense strand
gaaagaaucaguugcacau

SEQ ID NO: 122474 - RNA, 19 nt, Homo sapiens
  misc_RNA (1)...(19): siRNA sense strand
uguaggaacuccagauuau

SEQ ID NO: 122475 - RNA, 19 nt, Homo sapiens
  misc_RNA (1)...(19): siRNA sense strand
gggaaacgaagaaggguua

SEQ ID NO: 122476 - RNA, 19 nt, Homo sapiens
  misc_RNA (1)...(19): siRNA sense strand
ccaggcagccgcaaucaua

SEQ ID NO: 122477 - RNA, 19 nt, Homo sapiens
  misc_RNA (1)...(19): siRNA sense strand
gaauaggaacagcauauga

SEQ ID NO: 122478 - RNA, 19 nt, Homo sapiens
  misc_RNA (1)...(19): siRNA sense strand
gaaaucgaacagcugauaa

SEQ ID NO: 122479 - RNA, 19 nt, Homo sapiens
  misc_RNA (1)...(19): siRNA sense strand
uuaaagaucuagcagacaa

SEQ ID NO: 122480 - RNA, 19 nt, Homo sapiens
  misc_RNA (1)...(19): siRNA sense strand
gagauaaccaaacuaaaga

SEQ ID NO: 122481 - RNA, 19 nt, Homo sapiens
  misc_RNA (1)...(19): siRNA sense strand
uaacagcaagcaaagauuu

SEQ ID NO: 122482 - RNA, 19 nt, Homo sapiens
  misc_RNA (1)...(19): siRNA sense strand
gaaaugcuuuacggagaaa

SEQ ID NO: 122483 - RNA, 19 nt, Homo sapiens
  misc_RNA (1)...(19): siRNA sense strand
uaaagaauaucugcugugu

SEQ ID NO: 122484 - RNA, 19 nt, Homo sapiens
  misc_RNA (1)...(19): siRNA sense strand
gaucuccaguaaagaauau

SEQ ID NO: 122485 - RNA, 19 nt, Homo sapiens
  misc_RNA (1)...(19): siRNA sense strand
gcaagacccgucacagaaa

SEQ ID NO: 122486 - RNA, 19 nt, Homo sapiens
  misc_RNA (1)...(19): siRNA sense strand
gcuggaaguucauacagaa

SEQ ID NO: 122487 - RNA, 19 nt, Homo sapiens
  misc_RNA (1)...(19): siRNA sense strand
gauagcaauugacucaguu

SEQ ID NO: 122488 - RNA, 19 nt, Homo sapiens
  misc_RNA (1)...(19): siRNA sense strand
gcauagaacaucagcaaga

SEQ ID NO: 122489 - RNA, 19 nt, Homo sapiens
  misc_RNA (1)...(19): siRNA sense strand
gaaugugacugguggucuu

SEQ ID NO: 122490 - RNA, 19 nt, Homo sapiens
  misc_RNA (1)...(19): siRNA sense strand
ggagguugcuguaguaaaa

SEQ ID NO: 122491 - RNA, 19 nt, Homo sapiens
  misc_RNA (1)...(19): siRNA sense strand
gauauacucaucugccuuu

SEQ ID NO: 122492 - RNA, 19 nt, Homo sapiens
  misc_RNA (1)...(19): siRNA sense strand
ggauucucaugccauauaa

SEQ ID NO: 122493 - RNA, 19 nt, Homo sapiens
  misc_RNA (1)...(19): siRNA sense strand
aagaagagguuaaagaucu

SEQ ID NO: 122494 - RNA, 19 nt, Homo sapiens
  misc_RNA (1)...(19): siRNA sense strand
gcaguuagaagaagagguu

SEQ ID NO: 122495 - RNA, 19 nt, Homo sapiens
  misc_RNA (1)...(19): siRNA sense strand
gaaagaacugcaugauuca

SEQ ID NO: 122496 - RNA, 19 nt, Homo sapiens
  misc_RNA (1)...(19): siRNA sense strand
cugaagauauggcuagauu

SEQ ID NO: 122497 - RNA, 19 nt, Homo sapiens
  misc_RNA (1)...(19): siRNA sense strand
ggagacaauaaauggauua

SEQ ID NO: 122498 - RNA, 19 nt, Homo sapiens
  misc_RNA (1)...(19): siRNA sense strand
gaaagggauguauuaguga

SEQ ID NO: 122499 - RNA, 19 nt, Homo sapiens
  misc_RNA (1)...(19): siRNA sense strand
gcccaaaucacagaaauaa

SEQ ID NO: 122500 - RNA, 19 nt, Homo sapiens
  misc_RNA (1)...(19): siRNA sense strand
guucgacccuuaaacaaug

SEQ ID NO: 122501 - RNA, 19 nt, Homo sapiens
  misc_RNA (1)...(19): siRNA sense strand
acaguaugcuccauucaaa

SEQ ID NO: 122502 - RNA, 19 nt, Homo sapiens
  misc_RNA (1)...(19): siRNA sense strand
gagcaagacccgucacaga

SEQ ID NO: 122503 - RNA, 19 nt, Homo sapiens
  misc_RNA (1)...(19): siRNA sense strand
gguccucuguuaugaacua

SEQ ID NO: 122504 - RNA, 19 nt, Homo sapiens
  misc_RNA (1)...(19): siRNA sense strand
agauugaacucauuccaaa

SEQ ID NO: 122505 - RNA, 19 nt, Homo sapiens
  misc_RNA (1)...(19): siRNA sense strand
aaacgaagaaggguuauuu

SEQ ID NO: 122506 - RNA, 19 nt, Homo sapiens
  misc_RNA (1)...(19): siRNA sense strand
gaagaaggguuauuuguug

SEQ ID NO: 122507 - RNA, 19 nt, Homo sapiens
  misc_RNA (1)...(19): siRNA sense strand
ggaaacaaaugguuagaaa

SEQ ID NO: 122508 - RNA, 19 nt, Homo sapiens
  misc_RNA (1)...(19): siRNA sense strand
gaagauagauugccugaag

SEQ ID NO: 122509 - RNA, 19 nt, Homo sapiens
  misc_RNA (1)...(19): siRNA sense strand
gaauacagauccugaaaga

SEQ ID NO: 122510 - RNA, 19 nt, Homo sapiens
  misc_RNA (1)...(19): siRNA sense strand
gauuauaucucuccugaaa

SEQ ID NO: 122511 - RNA, 19 nt, Homo sapiens
  misc_RNA (1)...(19): siRNA sense strand
aagaauaucugcuguguuu

SEQ ID NO: 122512 - RNA, 19 nt, Homo sapiens
  misc_RNA (1)...(19): siRNA sense strand
caacagauaugcccuggaa

SEQ ID NO: 122513 - RNA, 19 nt, Homo sapiens
  misc_RNA (1)...(19): siRNA sense strand
gcgcaagacucaccaguuu

SEQ ID NO: 122514 - RNA, 19 nt, Homo sapiens
  misc_RNA (1)...(19): siRNA sense strand
gaccauacacuaucauuua

SEQ ID NO: 122515 - RNA, 19 nt, Homo sapiens
  misc_RNA (1)...(19): siRNA sense strand
caacagauacaucgaauuu

SEQ ID NO: 122516 - RNA, 19 nt, Homo sapiens
  misc_RNA (1)...(19): siRNA sense strand
ugaaagaucugcccaugaa

SEQ ID NO: 122517 - RNA, 19 nt, Homo sapiens
  misc_RNA (1)...(19): siRNA sense strand
gaucggagcuguuuaagag

SEQ ID NO: 122518 - RNA, 19 nt, Homo sapiens
  misc_RNA (1)...(19): siRNA sense strand
ggaauugauugggauaaua

SEQ ID NO: 122519 - RNA, 19 nt, Homo sapiens
  misc_RNA (1)...(19): siRNA sense strand
caugagggaugaagaauuu

SEQ ID NO: 122520 - RNA, 19 nt, Homo sapiens
  misc_RNA (1)...(19): siRNA sense strand
agaaagaacugcaugauuc

SEQ ID NO: 122521 - RNA, 19 nt, Homo sapiens
  misc_RNA (1)...(19): siRNA sense strand
gaaauucaagucccauaua

SEQ ID NO: 122522 - RNA, 19 nt, Homo sapiens
  misc_RNA (1)...(19): siRNA sense strand
gaagagaaagucaaaguga

SEQ ID NO: 122523 - RNA, 19 nt, Homo sapiens
  misc_RNA (1)...(19): siRNA sense strand
gauaauagucggaaacaaa

SEQ ID NO: 122524 - RNA, 19 nt, Homo sapiens
  misc_RNA (1)...(19): siRNA sense strand
aaaggcagguccucuguua

SEQ ID NO: 122525 - RNA, 19 nt, Homo sapiens
  misc_RNA (1)...(19): siRNA sense strand
uaaccaaacuaaagacuga

SEQ ID NO: 122526 - RNA, 19 nt, Homo sapiens
  misc_RNA (1)...(19): siRNA sense strand
gaugguggguuuaauaaga

SEQ ID NO: 122527 - RNA, 19 nt, Homo sapiens
  misc_RNA (1)...(19): siRNA sense strand
gaacaucgacuuggucaaa

SEQ ID NO: 122528 - RNA, 19 nt, Homo sapiens
  misc_RNA (1)...(19): siRNA sense strand
guuaguagcccaacagaua

SEQ ID NO: 122529 - RNA, 19 nt, Homo sapiens
  misc_RNA (1)...(19): siRNA sense strand
ggguauagauccucagaaa

SEQ ID NO: 122530 - RNA, 19 nt, Homo sapiens
  misc_RNA (1)...(19): siRNA sense strand
gcaaauccuuccucuuguu

SEQ ID NO: 122531 - RNA, 19 nt, Homo sapiens
  misc_RNA (1)...(19): siRNA sense strand
ugaagaaagggauguauua

SEQ ID NO: 122532 - RNA, 19 nt, Homo sapiens
  misc_RNA (1)...(19): siRNA sense strand
gaacuuaaguauacacaac

SEQ ID NO: 122533 - RNA, 19 nt, Homo sapiens
  misc_RNA (1)...(19): siRNA sense strand
gacaauauacugauggaua

SEQ ID NO: 122534 - RNA, 19 nt, Homo sapiens
  misc_RNA (1)...(19): siRNA sense strand
gaaggaaauccauacagua

SEQ ID NO: 122535 - RNA, 19 nt, Homo sapiens
  misc_RNA (1)...(19): siRNA sense strand
caaaugcgauuacauagag

SEQ ID NO: 122536 - RNA, 19 nt, Homo sapiens
  misc_RNA (1)...(19): siRNA sense strand
caagaagaguugaauaaag

SEQ ID NO: 122537 - RNA, 19 nt, Homo sapiens
  misc_RNA (1)...(19): siRNA sense strand
caagagauaaccaaacuaa

SEQ ID NO: 122538 - RNA, 19 nt, Homo sapiens
  misc_RNA (1)...(19): siRNA sense strand
aaagagagguuucaguuuc

SEQ ID NO: 122539 - RNA, 19 nt, Homo sapiens
  misc_RNA (1)...(19): siRNA sense strand
gcacuaugcuuuccaggau

SEQ ID NO: 122540 - RNA, 19 nt, Homo sapiens
  misc_RNA (1)...(19): siRNA sense strand
gauaaaguguuugccauga

SEQ ID NO: 122541 - RNA, 19 nt, Homo sapiens
  misc_RNA (1)...(19): siRNA sense strand
gaaagugaguucaaacaac

SEQ ID NO: 122542 - RNA, 19 nt, Homo sapiens
  misc_RNA (1)...(19): siRNA sense strand
gcuacgagauccagaaaug

SEQ ID NO: 122543 - RNA, 19 nt, Homo sapiens
  misc_RNA (1)...(19): siRNA sense strand
gaacuacucucagaaaucg

SEQ ID NO: 122544 - RNA, 19 nt, Homo sapiens
  misc_RNA (1)...(19): siRNA sense strand
gaugugaacuccauggaau

SEQ ID NO: 122545 - RNA, 19 nt, Homo sapiens
  misc_RNA (1)...(19): siRNA sense strand
agaaagggauguauuagug

SEQ ID NO: 122546 - RNA, 19 nt, Homo sapiens
  misc_RNA (1)...(19): siRNA sense strand
guugauaucuuugauguga

SEQ ID NO: 122547 - RNA, 19 nt, Homo sapiens
  misc_RNA (1)...(19): siRNA sense strand
gcagagagcacuggcuaua

SEQ ID NO: 122548 - RNA, 19 nt, Homo sapiens
  misc_RNA (1)...(19): siRNA sense strand
gagaaggaauacaugcaaa

SEQ ID NO: 122549 - RNA, 19 nt, Homo sapiens
  misc_RNA (1)...(19): siRNA sense strand
guggagacauuacuggaua

SEQ ID NO: 122550 - RNA, 19 nt, Homo sapiens
  misc_RNA (1)...(19): siRNA sense strand
guaacagaaucaagucauu

SEQ ID NO: 122551 - RNA, 19 nt, Homo sapiens
  misc_RNA (1)...(19): siRNA sense strand
gaauugauguggccagcaa

SEQ ID NO: 122552 - RNA, 19 nt, Homo sapiens
  misc_RNA (1)...(19): siRNA sense strand
gaaacuaaagggugucaaa

SEQ ID NO: 122553 - RNA, 19 nt, Homo sapiens
  misc_RNA (1)...(19): siRNA sense strand
ccauauaacuuguguaaac

SEQ ID NO: 122554 - RNA, 19 nt, Homo sapiens
  misc_RNA (1)...(19): siRNA sense strand
gggaggaauuugaaaguga

SEQ ID NO: 122555 - RNA, 19 nt, Homo sapiens
  misc_RNA (1)...(19): siRNA sense strand
uuagacaaaucaaggcuua

SEQ ID NO: 122556 - RNA, 19 nt, Homo sapiens
  misc_RNA (1)...(19): siRNA sense strand
uaaaguguuugccaugaaa

SEQ ID NO: 122557 - RNA, 19 nt, Homo sapiens
  misc_RNA (1)...(19): siRNA sense strand
caguugagaucuccaguaa

SEQ ID NO: 122558 - RNA, 19 nt, Homo sapiens
  misc_RNA (1)...(19): siRNA sense strand
gaacaucagcaagagauaa

SEQ ID NO: 122559 - RNA, 19 nt, Homo sapiens
  misc_RNA (1)...(19): siRNA sense strand
gauauggaccugaauguga

SEQ ID NO: 122560 - RNA, 19 nt, Homo sapiens
  misc_RNA (1)...(19): siRNA sense strand
gcaauugacucaguucauc

SEQ ID NO: 122561 - RNA, 19 nt, Homo sapiens
  misc_RNA (1)...(19): siRNA sense strand
cagcaaauuugaagauaga

SEQ ID NO: 122562 - RNA, 19 nt, Homo sapiens
  misc_RNA (1)...(19): siRNA sense strand
ucgaacagcugauaaagga

SEQ ID NO: 122563 - RNA, 19 nt, Homo sapiens
  misc_RNA (1)...(19): siRNA sense strand
cagcaaauccuuccucuug

SEQ ID NO: 122564 - RNA, 19 nt, Homo sapiens
  misc_RNA (1)...(19): siRNA sense strand
gcauugggauauacacuga

SEQ ID NO: 122565 - RNA, 19 nt, Homo sapiens
  misc_RNA (1)...(19): siRNA sense strand
caacuggcuuuccaccuaa

SEQ ID NO: 122566 - RNA, 19 nt, Homo sapiens
  misc_RNA (1)...(19): siRNA sense strand
ucaacuggcuuuccaccua

SEQ ID NO: 122567 - RNA, 19 nt, Homo sapiens
  misc_RNA (1)...(19): siRNA sense strand
gaagaagaacuuggaacua

SEQ ID NO: 122568 - RNA, 19 nt, Homo sapiens
  misc_RNA (1)...(19): siRNA sense strand
guugagaucuccaguaaag

SEQ ID NO: 122569 - RNA, 19 nt, Homo sapiens
  misc_RNA (1)...(19): siRNA sense strand
cugaagagcuuagaucuga

SEQ ID NO: 122570 - RNA, 19 nt, Homo sapiens
  misc_RNA (1)...(19): siRNA sense strand
gaacuuggaacuacucuca

SEQ ID NO: 122571 - RNA, 19 nt, Homo sapiens
  misc_RNA (1)...(19): siRNA sense strand
gaagcuacgugaacagagu

SEQ ID NO: 122572 - RNA, 19 nt, Homo sapiens
  misc_RNA (1)...(19): siRNA sense strand
ggauggcaaucuucaguga

SEQ ID NO: 122573 - RNA, 19 nt, Homo sapiens
  misc_RNA (1)...(19): siRNA sense strand
gaaagaaucaguugcacau

SEQ ID NO: 122574 - RNA, 19 nt, Homo sapiens
  misc_RNA (1)...(19): siRNA sense strand
uguaggaacuccagauuau

SEQ ID NO: 122575 - RNA, 19 nt, Homo sapiens
  misc_RNA (1)...(19): siRNA sense strand
gggaaacgaagaaggguua

SEQ ID NO: 122576 - RNA, 19 nt, Homo sapiens
  misc_RNA (1)...(19): siRNA sense strand
ccaggcagccgcaaucaua

SEQ ID NO: 122577 - RNA, 19 nt, Homo sapiens
  misc_RNA (1)...(19): siRNA sense strand
gaauaggaacagcauauga

SEQ ID NO: 122578 - RNA, 19 nt, Homo sapiens
  misc_RNA (1)...(19): siRNA sense strand
gaaaucgaacagcugauaa

SEQ ID NO: 122579 - RNA, 19 nt, Homo sapiens
  misc_RNA (1)...(19): siRNA sense strand
uuaaagaucuagcagacaa

SEQ ID NO: 122580 - RNA, 19 nt, Homo sapiens
  misc_RNA (1)...(19): siRNA sense strand
gagauaaccaaacuaaaga

SEQ ID NO: 122581 - RNA, 19 nt, Homo sapiens
  misc_RNA (1)...(19): siRNA sense strand
uaacagcaagcaaagauuu

SEQ ID NO: 122582 - RNA, 19 nt, Homo sapiens
  misc_RNA (1)...(19): siRNA sense strand
gaaaugcuuuacggagaaa

SEQ ID NO: 122583 - RNA, 19 nt, Homo sapiens
  misc_RNA (1)...(19): siRNA sense strand
uaaagaauaucugcugugu

SEQ ID NO: 122584 - RNA, 19 nt, Homo sapiens
  misc_RNA (1)...(19): siRNA sense strand
gaucuccaguaaagaauau

SEQ ID NO: 122585 - RNA, 19 nt, Homo sapiens
  misc_RNA (1)...(19): siRNA sense strand
gcaagacccgucacagaaa

SEQ ID NO: 122586 - RNA, 19 nt, Homo sapiens
  misc_RNA (1)...(19): siRNA sense strand
gcuggaaguucauacagaa

SEQ ID NO: 122587 - RNA, 19 nt, Homo sapiens
  misc_RNA (1)...(19): siRNA sense strand
gauagcaauugacucaguu

SEQ ID NO: 122588 - RNA, 19 nt, Homo sapiens
  misc_RNA (1)...(19): siRNA sense strand
gcauagaacaucagcaaga

SEQ ID NO: 122589 - RNA, 19 nt, Homo sapiens
  misc_RNA (1)...(19): siRNA sense strand
gaaugugacugguggucuu

SEQ ID NO: 122590 - RNA, 19 nt, Homo sapiens
  misc_RNA (1)...(19): siRNA sense strand
ggagguugcuguaguaaaa

SEQ ID NO: 122591 - RNA, 19 nt, Homo sapiens
  misc_RNA (1)...(19): siRNA sense strand
gauauacucaucugccuuu

SEQ ID NO: 122592 - RNA, 19 nt, Homo sapiens
  misc_RNA (1)...(19): siRNA sense strand
ggauucucaugccauauaa

SEQ ID NO: 122593 - RNA, 19 nt, Homo sapiens
  misc_RNA (1)...(19): siRNA sense strand
aagaagagguuaaagaucu

SEQ ID NO: 122594 - RNA, 19 nt, Homo sapiens
  misc_RNA (1)...(19): siRNA sense strand
gcaguuagaagaagagguu

SEQ ID NO: 122595 - RNA, 19 nt, Homo sapiens
  misc_RNA (1)...(19): siRNA sense strand
gaaagaacugcaugauuca

SEQ ID NO: 122596 - RNA, 19 nt, Homo sapiens
  misc_RNA (1)...(19): siRNA sense strand
cugaagauauggcuagauu

SEQ ID NO: 122597 - RNA, 19 nt, Homo sapiens
  misc_RNA (1)...(19): siRNA sense strand
ggagacaauaaauggauua

SEQ ID NO: 122598 - RNA, 19 nt, Homo sapiens
  misc_RNA (1)...(19): siRNA sense strand
gaaagggauguauuaguga

SEQ ID NO: 122599 - RNA, 19 nt, Homo sapiens
  misc_RNA (1)...(19): siRNA sense strand
gcccaaaucacagaaauaa

SEQ ID NO: 122600 - RNA, 19 nt, Homo sapiens
  misc_RNA (1)...(19): siRNA sense strand
guucgacccuuaaacaaug

SEQ ID NO: 122601 - RNA, 19 nt, Homo sapiens
  misc_RNA (1)...(19): siRNA sense strand
acaguaugcuccauucaaa

SEQ ID NO: 122602 - RNA, 19 nt, Homo sapiens
  misc_RNA (1)...(19): siRNA sense strand
gagcaagacccgucacaga

SEQ ID NO: 122603 - RNA, 19 nt, Homo sapiens
  misc_RNA (1)...(19): siRNA sense strand
gguccucuguuaugaacua

SEQ ID NO: 122604 - RNA, 19 nt, Homo sapiens
  misc_RNA (1)...(19): siRNA sense strand
agauugaacucauuccaaa

SEQ ID NO: 122605 - RNA, 19 nt, Homo sapiens
  misc_RNA (1)...(19): siRNA sense strand
aaacgaagaaggguuauuu

SEQ ID NO: 122606 - RNA, 19 nt, Homo sapiens
  misc_RNA (1)...(19): siRNA sense strand
gcuaaaggcucuagaaaga

SEQ ID NO: 122607 - RNA, 19 nt, Homo sapiens
  misc_RNA (1)...(19): siRNA sense strand
gaagaaaccugugguaaag

SEQ ID NO: 122608 - RNA, 19 nt, Homo sapiens
  misc_RNA (1)...(19): siRNA sense strand
caaagaagguggagggaaa

SEQ ID NO: 122609 - RNA, 19 nt, Homo sapiens
  misc_RNA (1)...(19): siRNA sense strand
gggaagagguugaguggaa

SEQ ID NO: 122610 - RNA, 19 nt, Homo sapiens
  misc_RNA (1)...(19): siRNA sense strand
ggaagaaaccugugguaaa

SEQ ID NO: 122611 - RNA, 19 nt, Homo sapiens
  misc_RNA (1)...(19): siRNA sense strand
gaaagaagaggaugaggaa

SEQ ID NO: 122612 - RNA, 19 nt, Homo sapiens
  misc_RNA (1)...(19): siRNA sense strand
ggagagcagugaugaggaa

SEQ ID NO: 122613 - RNA, 19 nt, Homo sapiens
  misc_RNA (1)...(19): siRNA sense strand
gaagacaaacuggaccuua

SEQ ID NO: 122614 - RNA, 19 nt, Homo sapiens
  misc_RNA (1)...(19): siRNA sense strand
uaaaggcucuagaaagaug

SEQ ID NO: 122615 - RNA, 19 nt, Homo sapiens
  misc_RNA (1)...(19): siRNA sense strand
agaaggagaugcaggaguu

SEQ ID NO: 122616 - RNA, 19 nt, Homo sapiens
  misc_RNA (1)...(19): siRNA sense strand
gaagguggagggaaauaaa

SEQ ID NO: 122617 - RNA, 19 nt, Homo sapiens
  misc_RNA (1)...(19): siRNA sense strand
aagaagagcuccaggaaag

SEQ ID NO: 122618 - RNA, 19 nt, Homo sapiens
  misc_RNA (1)...(19): siRNA sense strand
gcagugauggcgagaguaa

SEQ ID NO: 122619 - RNA, 19 nt, Homo sapiens
  misc_RNA (1)...(19): siRNA sense strand
gauccuagcccagaagaaa

SEQ ID NO: 122620 - RNA, 19 nt, Homo sapiens
  misc_RNA (1)...(19): siRNA sense strand
agaaaccugugguaaagaa

SEQ ID NO: 122621 - RNA, 19 nt, Homo sapiens
  misc_RNA (1)...(19): siRNA sense strand
gaggacaggacccagcuua

SEQ ID NO: 122622 - RNA, 19 nt, Homo sapiens
  misc_RNA (1)...(19): siRNA sense strand
ggcaaggccucagucagua

SEQ ID NO: 122623 - RNA, 19 nt, Homo sapiens
  misc_RNA (1)...(19): siRNA sense strand
gaugacagugggagagaua

SEQ ID NO: 122624 - RNA, 19 nt, Homo sapiens
  misc_RNA (1)...(19): siRNA sense strand
gaaacuacaagaagcuguu

SEQ ID NO: 122625 - RNA, 19 nt, Homo sapiens
  misc_RNA (1)...(19): siRNA sense strand
aggaggagcugcugaagau

SEQ ID NO: 122626 - RNA, 19 nt, Homo sapiens
  misc_RNA (1)...(19): siRNA sense strand
ucagcacgcuuacgcauuc

SEQ ID NO: 122627 - RNA, 19 nt, Homo sapiens
  misc_RNA (1)...(19): siRNA sense strand
aaacuggaccuuaccaaga

SEQ ID NO: 122628 - RNA, 19 nt, Homo sapiens
  misc_RNA (1)...(19): siRNA sense strand
aaagugaacaggagaguga

SEQ ID NO: 122629 - RNA, 19 nt, Homo sapiens
  misc_RNA (1)...(19): siRNA sense strand
ggagggaaauaaaggaacu

SEQ ID NO: 122630 - RNA, 19 nt, Homo sapiens
  misc_RNA (1)...(19): siRNA sense strand
ccaagaagagcuccaggaa

SEQ ID NO: 122631 - RNA, 19 nt, Homo sapiens
  misc_RNA (1)...(19): siRNA sense strand
gacggacccuggacucaga

SEQ ID NO: 122632 - RNA, 19 nt, Homo sapiens
  misc_RNA (1)...(19): siRNA sense strand
acaaggagcgccugaguau

SEQ ID NO: 122633 - RNA, 19 nt, Homo sapiens
  misc_RNA (1)...(19): siRNA sense strand
caagaagagcuccaggaaa

SEQ ID NO: 122634 - RNA, 19 nt, Homo sapiens
  misc_RNA (1)...(19): siRNA sense strand
guagcgacccggagagaaa

SEQ ID NO: 122635 - RNA, 19 nt, Homo sapiens
  misc_RNA (1)...(19): siRNA sense strand
cuagaaagauggccagacu

SEQ ID NO: 122636 - RNA, 19 nt, Homo sapiens
  misc_RNA (1)...(19): siRNA sense strand
gaggagcuguaagcagaaa

SEQ ID NO: 122637 - RNA, 19 nt, Homo sapiens
  misc_RNA (1)...(19): siRNA sense strand
gcagagagaggaggaagug

SEQ ID NO: 122638 - RNA, 19 nt, Homo sapiens
  misc_RNA (1)...(19): siRNA sense strand
gaagucagcccagccaaag

SEQ ID NO: 122639 - RNA, 19 nt, Homo sapiens
  misc_RNA (1)...(19): siRNA sense strand
ggacaggacccagcuuaag

SEQ ID NO: 122640 - RNA, 19 nt, Homo sapiens
  misc_RNA (1)...(19): siRNA sense strand
ggaagcaggccagggaaga

SEQ ID NO: 122641 - RNA, 19 nt, Homo sapiens
  misc_RNA (1)...(19): siRNA sense strand
cuggaacccuuuaggagaa

SEQ ID NO: 122642 - RNA, 19 nt, Homo sapiens
  misc_RNA (1)...(19): siRNA sense strand
cagcuaaaggcucuagaaa

SEQ ID NO: 122643 - RNA, 19 nt, Homo sapiens
  misc_RNA (1)...(19): siRNA sense strand
gcgaggaagagcagaaaga

SEQ ID NO: 122644 - RNA, 19 nt, Homo sapiens
  misc_RNA (1)...(19): siRNA sense strand
gggaggagaggagcuguaa

SEQ ID NO: 122645 - RNA, 19 nt, Homo sapiens
  misc_RNA (1)...(19): siRNA sense strand
gaagcaggccagggaagaa

SEQ ID NO: 122646 - RNA, 19 nt, Homo sapiens
  misc_RNA (1)...(19): siRNA sense strand
gaagaugcagguggaugaa

SEQ ID NO: 122647 - RNA, 19 nt, Homo sapiens
  misc_RNA (1)...(19): siRNA sense strand
ugaagaugcagguggauga

SEQ ID NO: 122648 - RNA, 19 nt, Homo sapiens
  misc_RNA (1)...(19): siRNA sense strand
gaggaggagcugcugaaga

SEQ ID NO: 122649 - RNA, 19 nt, Homo sapiens
  misc_RNA (1)...(19): siRNA sense strand
ggaggaggaagagaaagaa

SEQ ID NO: 122650 - RNA, 19 nt, Homo sapiens
  misc_RNA (1)...(19): siRNA sense strand
gaacuaaaagccugaagga

SEQ ID NO: 122651 - RNA, 19 nt, Homo sapiens
  misc_RNA (1)...(19): siRNA sense strand
guacagccuggaacccuuu

SEQ ID NO: 122652 - RNA, 19 nt, Homo sapiens
  misc_RNA (1)...(19): siRNA sense strand
gcagcgaggacgaggaaga

SEQ ID NO: 122653 - RNA, 19 nt, Homo sapiens
  misc_RNA (1)...(19): siRNA sense strand
ggaagagaaagaagaggau

SEQ ID NO: 122654 - RNA, 19 nt, Homo sapiens
  misc_RNA (1)...(19): siRNA sense strand
aacuggaccuuaccaagaa

SEQ ID NO: 122655 - RNA, 19 nt, Homo sapiens
  misc_RNA (1)...(19): siRNA sense strand
ggaggaagagaaagaagag

SEQ ID NO: 122656 - RNA, 19 nt, Homo sapiens
  misc_RNA (1)...(19): siRNA sense strand
cagcagugauggcgagagu

SEQ ID NO: 122657 - RNA, 19 nt, Homo sapiens
  misc_RNA (1)...(19): siRNA sense strand
guucagaggacagcaaaga

SEQ ID NO: 122658 - RNA, 19 nt, Homo sapiens
  misc_RNA (1)...(19): siRNA sense strand
uggaagcgcuaggcaugaa

SEQ ID NO: 122659 - RNA, 19 nt, Homo sapiens
  misc_RNA (1)...(19): siRNA sense strand
gaggagaagcaggcacuga

SEQ ID NO: 122660 - RNA, 19 nt, Homo sapiens
  misc_RNA (1)...(19): siRNA sense strand
cacaaggagcgccugagua

SEQ ID NO: 122661 - RNA, 19 nt, Homo sapiens
  misc_RNA (1)...(19): siRNA sense strand
aagacaaacuggaccuuac

SEQ ID NO: 122662 - RNA, 19 nt, Homo sapiens
  misc_RNA (1)...(19): siRNA sense strand
gggaaauaaaggaacuaaa

SEQ ID NO: 122663 - RNA, 19 nt, Homo sapiens
  misc_RNA (1)...(19): siRNA sense strand
agaagaaagagcagagaga

SEQ ID NO: 122664 - RNA, 19 nt, Homo sapiens
  misc_RNA (1)...(19): siRNA sense strand
gaggagaggagcuguaagc

SEQ ID NO: 122665 - RNA, 19 nt, Homo sapiens
  misc_RNA (1)...(19): siRNA sense strand
gcagugaggaggaggaaaa

SEQ ID NO: 122666 - RNA, 19 nt, Homo sapiens
  misc_RNA (1)...(19): siRNA sense strand
gacccuggacucagaugaa

SEQ ID NO: 122667 - RNA, 19 nt, Homo sapiens
  misc_RNA (1)...(19): siRNA sense strand
ggagaagcaggcacugaag

SEQ ID NO: 122668 - RNA, 19 nt, Homo sapiens
  misc_RNA (1)...(19): siRNA sense strand
gcaauggccggagaaaguc

SEQ ID NO: 122669 - RNA, 19 nt, Homo sapiens
  misc_RNA (1)...(19): siRNA sense strand
guucacccguagcuucuuc

SEQ ID NO: 122670 - RNA, 19 nt, Homo sapiens
  misc_RNA (1)...(19): siRNA sense strand
gcagacguacagccuggaa

SEQ ID NO: 122671 - RNA, 19 nt, Homo sapiens
  misc_RNA (1)...(19): siRNA sense strand
gacaggacccagcuuaagg

SEQ ID NO: 122672 - RNA, 19 nt, Homo sapiens
  misc_RNA (1)...(19): siRNA sense strand
ggaggaaguggaggaggaa

SEQ ID NO: 122673 - RNA, 19 nt, Homo sapiens
  misc_RNA (1)...(19): siRNA sense strand
cuaaaagccugaaggaaag

SEQ ID NO: 122674 - RNA, 19 nt, Homo sapiens
  misc_RNA (1)...(19): siRNA sense strand
ggaugacagugggagagau

SEQ ID NO: 122675 - RNA, 19 nt, Homo sapiens
  misc_RNA (1)...(19): siRNA sense strand
uaggaagaaaccuguggua

SEQ ID NO: 122676 - RNA, 19 nt, Homo sapiens
  misc_RNA (1)...(19): siRNA sense strand
ccaguggugaggaaaguga

SEQ ID NO: 122677 - RNA, 19 nt, Homo sapiens
  misc_RNA (1)...(19): siRNA sense strand
gcaaggccucagucaguag

SEQ ID NO: 122678 - RNA, 19 nt, Homo sapiens
  misc_RNA (1)...(19): siRNA sense strand
aaagguuccgcuucaauuc

SEQ ID NO: 122679 - RNA, 19 nt, Homo sapiens
  misc_RNA (1)...(19): siRNA sense strand
ggaaagugaacaggagagu

SEQ ID NO: 122680 - RNA, 19 nt, Homo sapiens
  misc_RNA (1)...(19): siRNA sense strand
ggaaguggaggaggaagag

SEQ ID NO: 122681 - RNA, 19 nt, Homo sapiens
  misc_RNA (1)...(19): siRNA sense strand
gcccaucgaaacuacaaga

SEQ ID NO: 122682 - RNA, 19 nt, Homo sapiens
  misc_RNA (1)...(19): siRNA sense strand
aggaaaggcaggacacgaa

SEQ ID NO: 122683 - RNA, 19 nt, Homo sapiens
  misc_RNA (1)...(19): siRNA sense strand
gagagggagguaagugaca

SEQ ID NO: 122684 - RNA, 19 nt, Homo sapiens
  misc_RNA (1)...(19): siRNA sense strand
ggagcaauggccggagaaa

SEQ ID NO: 122685 - RNA, 19 nt, Homo sapiens
  misc_RNA (1)...(19): siRNA sense strand
ucagaggacagcaaagaag

SEQ ID NO: 122686 - RNA, 19 nt, Homo sapiens
  misc_RNA (1)...(19): siRNA sense strand
ggacccuggacucagauga

SEQ ID NO: 122687 - RNA, 19 nt, Homo sapiens
  misc_RNA (1)...(19): siRNA sense strand
agaagucagcccagccaaa

SEQ ID NO: 122688 - RNA, 19 nt, Homo sapiens
  misc_RNA (1)...(19): siRNA sense strand
ggaagacaaacuggaccuu

SEQ ID NO: 122689 - RNA, 19 nt, Homo sapiens
  misc_RNA (1)...(19): siRNA sense strand
ggccggagaaagucagcua

SEQ ID NO: 122690 - RNA, 19 nt, Homo sapiens
  misc_RNA (1)...(19): siRNA sense strand
gagauccuagcccagaaga

SEQ ID NO: 122691 - RNA, 19 nt, Homo sapiens
  misc_RNA (1)...(19): siRNA sense strand
aggaagaaaccugugguaa

SEQ ID NO: 122692 - RNA, 19 nt, Homo sapiens
  misc_RNA (1)...(19): siRNA sense strand
agacucagacagcgaggaa

SEQ ID NO: 122693 - RNA, 19 nt, Homo sapiens
  misc_RNA (1)...(19): siRNA sense strand
acuaaaagccugaaggaaa

SEQ ID NO: 122694 - RNA, 19 nt, Homo sapiens
  misc_RNA (1)...(19): siRNA sense strand
agaagguggagggaaauaa

SEQ ID NO: 122695 - RNA, 19 nt, Homo sapiens
  misc_RNA (1)...(19): siRNA sense strand
gagcagugaggaggaggaa

SEQ ID NO: 122696 - RNA, 19 nt, Homo sapiens
  misc_RNA (1)...(19): siRNA sense strand
ccggaccucagcacgcuua

SEQ ID NO: 122697 - RNA, 19 nt, Homo sapiens
  misc_RNA (1)...(19): siRNA sense strand
gauagaaucuccacugaaa

SEQ ID NO: 122698 - RNA, 19 nt, Homo sapiens
  misc_RNA (1)...(19): siRNA sense strand
gaucaaagcuccaaacuac

SEQ ID NO: 122699 - RNA, 19 nt, Homo sapiens
  misc_RNA (1)...(19): siRNA sense strand
ggacaaagaugccagaaca

SEQ ID NO: 122700 - RNA, 19 nt, Homo sapiens
  misc_RNA (1)...(19): siRNA sense strand
caugaaggauauugaagua

SEQ ID NO: 122701 - RNA, 19 nt, Homo sapiens
  misc_RNA (1)...(19): siRNA sense strand
gagcuaaagcccaggaaua

SEQ ID NO: 122702 - RNA, 19 nt, Homo sapiens
  misc_RNA (1)...(19): siRNA sense strand
gagaguugcuauucacuau

SEQ ID NO: 122703 - RNA, 19 nt, Homo sapiens
  misc_RNA (1)...(19): siRNA sense strand
gaacaagccuacugguuuu

SEQ ID NO: 122704 - RNA, 19 nt, Homo sapiens
  misc_RNA (1)...(19): siRNA sense strand
gagcugggauaagacuuua

SEQ ID NO: 122705 - RNA, 19 nt, Homo sapiens
  misc_RNA (1)...(19): siRNA sense strand
uuacugugcugacgugaua

SEQ ID NO: 122706 - RNA, 19 nt, Homo sapiens
  misc_RNA (1)...(19): siRNA sense strand
gauacucgaucgucaaauc

SEQ ID NO: 122707 - RNA, 19 nt, Homo sapiens
  misc_RNA (1)...(19): siRNA sense strand
caaucacaauggaaacaua

SEQ ID NO: 122708 - RNA, 19 nt, Homo sapiens
  misc_RNA (1)...(19): siRNA sense strand
gaguugcuauucacuauau

SEQ ID NO: 122709 - RNA, 19 nt, Homo sapiens
  misc_RNA (1)...(19): siRNA sense strand
gaaggauauugaaguaaca

SEQ ID NO: 122710 - RNA, 19 nt, Homo sapiens
  misc_RNA (1)...(19): siRNA sense strand
gaugguagauucagcuucu

SEQ ID NO: 122711 - RNA, 19 nt, Homo sapiens
  misc_RNA (1)...(19): siRNA sense strand
ugucaucgaucuaauggaa

SEQ ID NO: 122712 - RNA, 19 nt, Homo sapiens
  misc_RNA (1)...(19): siRNA sense strand
agaacaagccuacugguuu

SEQ ID NO: 122713 - RNA, 19 nt, Homo sapiens
  misc_RNA (1)...(19): siRNA sense strand
ggucaaagggacaugaauu

SEQ ID NO: 122714 - RNA, 19 nt, Homo sapiens
  misc_RNA (1)...(19): siRNA sense strand
gaugggagcaaaguguuua

SEQ ID NO: 122715 - RNA, 19 nt, Homo sapiens
  misc_RNA (1)...(19): siRNA sense strand
caaagggacaugaauuuua

SEQ ID NO: 122716 - RNA, 19 nt, Homo sapiens
  misc_RNA (1)...(19): siRNA sense strand
ggaucaaagcuccaaacua

SEQ ID NO: 122717 - RNA, 19 nt, Homo sapiens
  misc_RNA (1)...(19): siRNA sense strand
ggagaguugcuauucacua

SEQ ID NO: 122718 - RNA, 19 nt, Homo sapiens
  misc_RNA (1)...(19): siRNA sense strand
ggagcugggauaagacuuu

SEQ ID NO: 122719 - RNA, 19 nt, Homo sapiens
  misc_RNA (1)...(19): siRNA sense strand
gucaaagggacaugaauuu

SEQ ID NO: 122720 - RNA, 19 nt, Homo sapiens
  misc_RNA (1)...(19): siRNA sense strand
cuaaagcccaggaauaaga

SEQ ID NO: 122721 - RNA, 19 nt, Homo sapiens
  misc_RNA (1)...(19): siRNA sense strand
ugauaaaacugccaaaaug

SEQ ID NO: 122722 - RNA, 19 nt, Homo sapiens
  misc_RNA (1)...(19): siRNA sense strand
ggaaacauauuugcauacg

SEQ ID NO: 122723 - RNA, 19 nt, Homo sapiens
  misc_RNA (1)...(19): siRNA sense strand
ccaaagauaacuucaccuu

SEQ ID NO: 122724 - RNA, 19 nt, Homo sapiens
  misc_RNA (1)...(19): siRNA sense strand
ugaaggauauugaaguaac

SEQ ID NO: 122725 - RNA, 19 nt, Homo sapiens
  misc_RNA (1)...(19): siRNA sense strand
gacaaucacaaucccauga

SEQ ID NO: 122726 - RNA, 19 nt, Homo sapiens
  misc_RNA (1)...(19): siRNA sense strand
gaucagcccaucucagcuu

SEQ ID NO: 122727 - RNA, 19 nt, Homo sapiens
  misc_RNA (1)...(19): siRNA sense strand
ugugggaccucagcaguaa

SEQ ID NO: 122728 - RNA, 19 nt, Homo sapiens
  misc_RNA (1)...(19): siRNA sense strand
acaaagaugccagaacaaa

SEQ ID NO: 122729 - RNA, 19 nt, Homo sapiens
  misc_RNA (1)...(19): siRNA sense strand
gcaggaucaugggcuaaug

SEQ ID NO: 122730 - RNA, 19 nt, Homo sapiens
  misc_RNA (1)...(19): siRNA sense strand
ggauagaaucuccacugaa

SEQ ID NO: 122731 - RNA, 19 nt, Homo sapiens
  misc_RNA (1)...(19): siRNA sense strand
acacugggccugugcuuga

SEQ ID NO: 122732 - RNA, 19 nt, Homo sapiens
  misc_RNA (1)...(19): siRNA sense strand
aaucuccacugaaacauca

SEQ ID NO: 122733 - RNA, 19 nt, Homo sapiens
  misc_RNA (1)...(19): siRNA sense strand
caaauccuaugaugguuuu

SEQ ID NO: 122734 - RNA, 19 nt, Homo sapiens
  misc_RNA (1)...(19): siRNA sense strand
gcugggauaagacuuuaaa

SEQ ID NO: 122735 - RNA, 19 nt, Homo sapiens
  misc_RNA (1)...(19): siRNA sense strand
gaugauagcauugguuguc

SEQ ID NO: 122736 - RNA, 19 nt, Homo sapiens
  misc_RNA (1)...(19): siRNA sense strand
ugugggaucugaugguaga

SEQ ID NO: 122737 - RNA, 19 nt, Homo sapiens
  misc_RNA (1)...(19): siRNA sense strand
gcagugcaacuacagacaa

SEQ ID NO: 122738 - RNA, 19 nt, Homo sapiens
  misc_RNA (1)...(19): siRNA sense strand
aaacagaacaagccuacug

SEQ ID NO: 122739 - RNA, 19 nt, Homo sapiens
  misc_RNA (1)...(19): siRNA sense strand
ggauauugaaguaacauca

SEQ ID NO: 122740 - RNA, 19 nt, Homo sapiens
  misc_RNA (1)...(19): siRNA sense strand
ggacagaccauuccaaaag

SEQ ID NO: 122741 - RNA, 19 nt, Homo sapiens
  misc_RNA (1)...(19): siRNA sense strand
gcaguaaccaagcgauaca

SEQ ID NO: 122742 - RNA, 19 nt, Homo sapiens
  misc_RNA (1)...(19): siRNA sense strand
acugggagcugggauaaga

SEQ ID NO: 122743 - RNA, 19 nt, Homo sapiens
  misc_RNA (1)...(19): siRNA sense strand
uaaccaagcgauacagauc

SEQ ID NO: 122744 - RNA, 19 nt, Homo sapiens
  misc_RNA (1)...(19): siRNA sense strand
aggauagaaucuccacuga

SEQ ID NO: 122745 - RNA, 19 nt, Homo sapiens
  misc_RNA (1)...(19): siRNA sense strand
ucaaauccuaugaugguuu

SEQ ID NO: 122746 - RNA, 19 nt, Homo sapiens
  misc_RNA (1)...(19): siRNA sense strand
caacuacagacaaucacaa

SEQ ID NO: 122747 - RNA, 19 nt, Homo sapiens
  misc_RNA (1)...(19): siRNA sense strand
aaacuacagcugugugaug

SEQ ID NO: 122748 - RNA, 19 nt, Homo sapiens
  misc_RNA (1)...(19): siRNA sense strand
cagaacaagccuacugguu

SEQ ID NO: 122749 - RNA, 19 nt, Homo sapiens
  misc_RNA (1)...(19): siRNA sense strand
uagcauugguugucugucu

SEQ ID NO: 122750 - RNA, 19 nt, Homo sapiens
  misc_RNA (1)...(19): siRNA sense strand
ccggggaacuuucuuauug

SEQ ID NO: 122751 - RNA, 19 nt, Homo sapiens
  misc_RNA (1)...(19): siRNA sense strand
cgucaaauccuaugauggu

SEQ ID NO: 122752 - RNA, 19 nt, Homo sapiens
  misc_RNA (1)...(19): siRNA sense strand
gggauacucgaucgucaaa

SEQ ID NO: 122753 - RNA, 19 nt, Homo sapiens
  misc_RNA (1)...(19): siRNA sense strand
cagcaguaaccaagcgaua

SEQ ID NO: 122754 - RNA, 19 nt, Homo sapiens
  misc_RNA (1)...(19): siRNA sense strand
ccaaacuacagcuguguga

SEQ ID NO: 122755 - RNA, 19 nt, Homo sapiens
  misc_RNA (1)...(19): siRNA sense strand
uaaagcccaggaauaagaa

SEQ ID NO: 122756 - RNA, 19 nt, Homo sapiens
  misc_RNA (1)...(19): siRNA sense strand
guucauggcacccuugcaa

SEQ ID NO: 122757 - RNA, 19 nt, Homo sapiens
  misc_RNA (1)...(19): siRNA sense strand
uagaaucuccacugaaaca

SEQ ID NO: 122758 - RNA, 19 nt, Homo sapiens
  misc_RNA (1)...(19): siRNA sense strand
gcauugguugucugucuuu

SEQ ID NO: 122759 - RNA, 19 nt, Homo sapiens
  misc_RNA (1)...(19): siRNA sense strand
gcagagaggggccugauug

SEQ ID NO: 122760 - RNA, 19 nt, Homo sapiens
  misc_RNA (1)...(19): siRNA sense strand
gcaacugugggaucugaug

SEQ ID NO: 122761 - RNA, 19 nt, Homo sapiens
  misc_RNA (1)...(19): siRNA sense strand
uuuacggcaucgugugaua

SEQ ID NO: 122762 - RNA, 19 nt, Homo sapiens
  misc_RNA (1)...(19): siRNA sense strand
cacaauggaaacauauuug

SEQ ID NO: 122763 - RNA, 19 nt, Homo sapiens
  misc_RNA (1)...(19): siRNA sense strand
aacuacagcugugugauga

SEQ ID NO: 122764 - RNA, 19 nt, Homo sapiens
  misc_RNA (1)...(19): siRNA sense strand
gugcaacuacagacaauca

SEQ ID NO: 122765 - RNA, 19 nt, Homo sapiens
  misc_RNA (1)...(19): siRNA sense strand
uaauggaaccaacacuuca

SEQ ID NO: 122766 - RNA, 19 nt, Homo sapiens
  misc_RNA (1)...(19): siRNA sense strand
cuaauggaaccaacacuuc

SEQ ID NO: 122767 - RNA, 19 nt, Homo sapiens
  misc_RNA (1)...(19): siRNA sense strand
gcaacuacagacaaucaca

SEQ ID NO: 122768 - RNA, 19 nt, Homo sapiens
  misc_RNA (1)...(19): siRNA sense strand
caaucacaaucccaugaag

SEQ ID NO: 122769 - RNA, 19 nt, Homo sapiens
  misc_RNA (1)...(19): siRNA sense strand
gacaguggacagaccauuc

SEQ ID NO: 122770 - RNA, 19 nt, Homo sapiens
  misc_RNA (1)...(19): siRNA sense strand
cagugcaacuacagacaau

SEQ ID NO: 122771 - RNA, 19 nt, Homo sapiens
  misc_RNA (1)...(19): siRNA sense strand
gaaucuccacugaaacauc

SEQ ID NO: 122772 - RNA, 19 nt, Homo sapiens
  misc_RNA (1)...(19): siRNA sense strand
gaucgucaaauccuaugau

SEQ ID NO: 122773 - RNA, 19 nt, Homo sapiens
  misc_RNA (1)...(19): siRNA sense strand
ugacugggagcugggauaa

SEQ ID NO: 122774 - RNA, 19 nt, Homo sapiens
  misc_RNA (1)...(19): siRNA sense strand
gacaaagaugccagaacaa

SEQ ID NO: 122775 - RNA, 19 nt, Homo sapiens
  misc_RNA (1)...(19): siRNA sense strand
caaagaugccagaacaaaa

SEQ ID NO: 122776 - RNA, 19 nt, Homo sapiens
  misc_RNA (1)...(19): siRNA sense strand
gauaaaacugccaaaaugu

SEQ ID NO: 122777 - RNA, 19 nt, Homo sapiens
  misc_RNA (1)...(19): siRNA sense strand
agcuaaagcccaggaauaa

SEQ ID NO: 122778 - RNA, 19 nt, Homo sapiens
  misc_RNA (1)...(19): siRNA sense strand
ccaugaaggauauugaagu

SEQ ID NO: 122779 - RNA, 19 nt, Homo sapiens
  misc_RNA (1)...(19): siRNA sense strand
gcaucgguguguggcuauu

SEQ ID NO: 122780 - RNA, 19 nt, Homo sapiens
  misc_RNA (1)...(19): siRNA sense strand
aaucaaccuucugaauuca

SEQ ID NO: 122781 - RNA, 19 nt, Homo sapiens
  misc_RNA (1)...(19): siRNA sense strand
ucaaagcuccaaacuacag

SEQ ID NO: 122782 - RNA, 19 nt, Homo sapiens
  misc_RNA (1)...(19): siRNA sense strand
gauagcauugguugucugu

SEQ ID NO: 122783 - RNA, 19 nt, Homo sapiens
  misc_RNA (1)...(19): siRNA sense strand
guaaccaagcgauacagau

SEQ ID NO: 122784 - RNA, 19 nt, Homo sapiens
  misc_RNA (1)...(19): siRNA sense strand
gcccaggaauaagaaguag

SEQ ID NO: 122785 - RNA, 19 nt, Homo sapiens
  misc_RNA (1)...(19): siRNA sense strand
caggacauuuaugcgguaa

SEQ ID NO: 122786 - RNA, 19 nt, Homo sapiens
  misc_RNA (1)...(19): siRNA sense strand
cuuuaaaugucaucgaucu

SEQ ID NO: 122787 - RNA, 19 nt, Homo sapiens
  misc_RNA (1)...(19): siRNA sense strand
ggaccucagcaguaaccaa

SEQ ID NO: 122788 - RNA, 19 nt, Homo sapiens
  misc_RNA (1)...(19): siRNA sense strand
uugcauacgcuuccagcua

SEQ ID NO: 122789 - RNA, 19 nt, Homo sapiens
  misc_RNA (1)...(19): siRNA sense strand
acugugggaucugauggua

SEQ ID NO: 122790 - RNA, 19 nt, Homo sapiens
  misc_RNA (1)...(19): siRNA sense strand
uugcaacugugggaucuga

SEQ ID NO: 122791 - RNA, 19 nt, Homo sapiens
  misc_RNA (1)...(19): siRNA sense strand
cuucggaacaguuagauca

SEQ ID NO: 122792 - RNA, 19 nt, Homo sapiens
  misc_RNA (1)...(19): siRNA sense strand
gucaaauccuaugaugguu

SEQ ID NO: 122793 - RNA, 19 nt, Homo sapiens
  misc_RNA (1)...(19): siRNA sense strand
caauggaaacauauuugca

SEQ ID NO: 122794 - RNA, 19 nt, Homo sapiens
  misc_RNA (1)...(19): siRNA sense strand
acaaucacaaucccaugaa

SEQ ID NO: 122795 - RNA, 19 nt, Homo sapiens
  misc_RNA (1)...(19): siRNA sense strand
guucgcugcugggaaguuc

SEQ ID NO: 122796 - RNA, 19 nt, Homo sapiens
  misc_RNA (1)...(19): siRNA sense strand
guucaagacaguggacaga

SEQ ID NO: 122797 - RNA, 19 nt, Homo sapiens
  misc_RNA (1)...(19): siRNA sense strand
ggaggaaggugauuucaaa

SEQ ID NO: 122798 - RNA, 19 nt, Homo sapiens
  misc_RNA (1)...(19): siRNA sense strand
ggccagaacugcucuaauu

SEQ ID NO: 122799 - RNA, 19 nt, Homo sapiens
  misc_RNA (1)...(19): siRNA sense strand
gcagugggaugcucuauga

SEQ ID NO: 122800 - RNA, 19 nt, Homo sapiens
  misc_RNA (1)...(19): siRNA sense strand
gcacauauccacagugaaa

SEQ ID NO: 122801 - RNA, 19 nt, Homo sapiens
  misc_RNA (1)...(19): siRNA sense strand
gagcacauauccacaguga

SEQ ID NO: 122802 - RNA, 19 nt, Homo sapiens
  misc_RNA (1)...(19): siRNA sense strand
caacgaagaugacccuaug

SEQ ID NO: 122803 - RNA, 19 nt, Homo sapiens
  misc_RNA (1)...(19): siRNA sense strand
gaagagcaaugugggagua

SEQ ID NO: 122804 - RNA, 19 nt, Homo sapiens
  misc_RNA (1)...(19): siRNA sense strand
gagcuggacugaagacuau

SEQ ID NO: 122805 - RNA, 19 nt, Homo sapiens
  misc_RNA (1)...(19): siRNA sense strand
gugggacgcugcccuguua

SEQ ID NO: 122806 - RNA, 19 nt, Homo sapiens
  misc_RNA (1)...(19): siRNA sense strand
guugugaucuccgugauua

SEQ ID NO: 122807 - RNA, 19 nt, Homo sapiens
  misc_RNA (1)...(19): siRNA sense strand
ggagugccguguuccauga

SEQ ID NO: 122808 - RNA, 19 nt, Homo sapiens
  misc_RNA (1)...(19): siRNA sense strand
ggccaaagccgauggaauu

SEQ ID NO: 122809 - RNA, 19 nt, Homo sapiens
  misc_RNA (1)...(19): siRNA sense strand
gaacuggcuucuuguccaa

SEQ ID NO: 122810 - RNA, 19 nt, Homo sapiens
  misc_RNA (1)...(19): siRNA sense strand
gaucacaaaggucaaguuu

SEQ ID NO: 122811 - RNA, 19 nt, Homo sapiens
  misc_RNA (1)...(19): siRNA sense strand
gagauuccauccaggaguu

SEQ ID NO: 122812 - RNA, 19 nt, Homo sapiens
  misc_RNA (1)...(19): siRNA sense strand
gaccugaccugcccaaugg

SEQ ID NO: 122813 - RNA, 19 nt, Homo sapiens
  misc_RNA (1)...(19): siRNA sense strand
caugauugcuuucagaaug

SEQ ID NO: 122814 - RNA, 19 nt, Homo sapiens
  misc_RNA (1)...(19): siRNA sense strand
gagagguucuugccuagug

SEQ ID NO: 122815 - RNA, 19 nt, Homo sapiens
  misc_RNA (1)...(19): siRNA sense strand
gccauucgcuucuacuaug

SEQ ID NO: 122816 - RNA, 19 nt, Homo sapiens
  misc_RNA (1)...(19): siRNA sense strand
caagaugcuucgucggaaa

SEQ ID NO: 122817 - RNA, 19 nt, Homo sapiens
  misc_RNA (1)...(19): siRNA sense strand
ccuaugagcuggacugaag

SEQ ID NO: 122818 - RNA, 19 nt, Homo sapiens
  misc_RNA (1)...(19): siRNA sense strand
ccaacuccuucuacuauga

SEQ ID NO: 122819 - RNA, 19 nt, Homo sapiens
  misc_RNA (1)...(19): siRNA sense strand
ccacaacuauggcaucuac

SEQ ID NO: 122820 - RNA, 19 nt, Homo sapiens
  misc_RNA (1)...(19): siRNA sense strand
gcaagcuggugcugaggaa

SEQ ID NO: 122821 - RNA, 19 nt, Homo sapiens
  misc_RNA (1)...(19): siRNA sense strand
uaaccuggauguuccugaa

SEQ ID NO: 122822 - RNA, 19 nt, Homo sapiens
  misc_RNA (1)...(19): siRNA sense strand
gaguagcccucaccuucaa

SEQ ID NO: 122823 - RNA, 19 nt, Homo sapiens
  misc_RNA (1)...(19): siRNA sense strand
ggcagagacuccauacaug

SEQ ID NO: 122824 - RNA, 19 nt, Homo sapiens
  misc_RNA (1)...(19): siRNA sense strand
ggaagugguuggugaagac

SEQ ID NO: 122825 - RNA, 19 nt, Homo sapiens
  misc_RNA (1)...(19): siRNA sense strand
gccagaacugcucuaauua

SEQ ID NO: 122826 - RNA, 19 nt, Homo sapiens
  misc_RNA (1)...(19): siRNA sense strand
caagaugccagagcacaua

SEQ ID NO: 122827 - RNA, 19 nt, Homo sapiens
  misc_RNA (1)...(19): siRNA sense strand
gugcagggcagcaggauaa

SEQ ID NO: 122828 - RNA, 19 nt, Homo sapiens
  misc_RNA (1)...(19): siRNA sense strand
cagaacugcucuaauuaca

SEQ ID NO: 122829 - RNA, 19 nt, Homo sapiens
  misc_RNA (1)...(19): siRNA sense strand
gcaaaagcauccugaagau

SEQ ID NO: 122830 - RNA, 19 nt, Homo sapiens
  misc_RNA (1)...(19): siRNA sense strand
caacaccaccaaagugcua

SEQ ID NO: 122831 - RNA, 19 nt, Homo sapiens
  misc_RNA (1)...(19): siRNA sense strand
gggcagagacuccauacau

SEQ ID NO: 122832 - RNA, 19 nt, Homo sapiens
  misc_RNA (1)...(19): siRNA sense strand
gaaggcagccaccaucaag

SEQ ID NO: 122833 - RNA, 19 nt, Homo sapiens
  misc_RNA (1)...(19): siRNA sense strand
gaacaaaagagaagacaga

SEQ ID NO: 122834 - RNA, 19 nt, Homo sapiens
  misc_RNA (1)...(19): siRNA sense strand
gucaaccacuugccacuug

SEQ ID NO: 122835 - RNA, 19 nt, Homo sapiens
  misc_RNA (1)...(19): siRNA sense strand
ggugaaugcugacugugau

SEQ ID NO: 122836 - RNA, 19 nt, Homo sapiens
  misc_RNA (1)...(19): siRNA sense strand
gauggcuccuccagaauca

SEQ ID NO: 122837 - RNA, 19 nt, Homo sapiens
  misc_RNA (1)...(19): siRNA sense strand
aagacagcuuuccagauua

SEQ ID NO: 122838 - RNA, 19 nt, Homo sapiens
  misc_RNA (1)...(19): siRNA sense strand
ccacagcugcccagacuga

SEQ ID NO: 122839 - RNA, 19 nt, Homo sapiens
  misc_RNA (1)...(19): siRNA sense strand
uggacaggcugcagaaguu

SEQ ID NO: 122840 - RNA, 19 nt, Homo sapiens
  misc_RNA (1)...(19): siRNA sense strand
ucacaaugcccaagacuag

SEQ ID NO: 122841 - RNA, 19 nt, Homo sapiens
  misc_RNA (1)...(19): siRNA sense strand
gcgugucucugugcuguaa

SEQ ID NO: 122842 - RNA, 19 nt, Homo sapiens
  misc_RNA (1)...(19): siRNA sense strand
ugaugaacccugagacaaa

SEQ ID NO: 122843 - RNA, 19 nt, Homo sapiens
  misc_RNA (1)...(19): siRNA sense strand
ccaggugaaugcugacugu

SEQ ID NO: 122844 - RNA, 19 nt, Homo sapiens
  misc_RNA (1)...(19): siRNA sense strand
gcaucuacacugucacuga

SEQ ID NO: 122845 - RNA, 19 nt, Homo sapiens
  misc_RNA (1)...(19): siRNA sense strand
gcgggaagggcgacuauga

SEQ ID NO: 122846 - RNA, 19 nt, Homo sapiens
  misc_RNA (1)...(19): siRNA sense strand
gggaagugguuggugaaga

SEQ ID NO: 122847 - RNA, 19 nt, Homo sapiens
  misc_RNA (1)...(19): siRNA sense strand
aagcaugacuggcuacaag

SEQ ID NO: 122848 - RNA, 19 nt, Homo sapiens
  misc_RNA (1)...(19): siRNA sense strand
caccaacuccuucuacuau

SEQ ID NO: 122849 - RNA, 19 nt, Homo sapiens
  misc_RNA (1)...(19): siRNA sense strand
gcagugaggccagcgaaga

SEQ ID NO: 122850 - RNA, 19 nt, Homo sapiens
  misc_RNA (1)...(19): siRNA sense strand
ggaguagcccucaccuuca

SEQ ID NO: 122851 - RNA, 19 nt, Homo sapiens
  misc_RNA (1)...(19): siRNA sense strand
ccagaaucaugaagagcaa

SEQ ID NO: 122852 - RNA, 19 nt, Homo sapiens
  misc_RNA (1)...(19): siRNA sense strand
gugggaugcucuaugauca

SEQ ID NO: 122853 - RNA, 19 nt, Homo sapiens
  misc_RNA (1)...(19): siRNA sense strand
agacagcuuuccagauuag

SEQ ID NO: 122854 - RNA, 19 nt, Homo sapiens
  misc_RNA (1)...(19): siRNA sense strand
gaaacucuggucacucaau

SEQ ID NO: 122855 - RNA, 19 nt, Homo sapiens
  misc_RNA (1)...(19): siRNA sense strand
gcuacacgcuacccaccaa

SEQ ID NO: 122856 - RNA, 19 nt, Homo sapiens
  misc_RNA (1)...(19): siRNA sense strand
ggaggaggaaggugauuuc

SEQ ID NO: 122857 - RNA, 19 nt, Homo sapiens
  misc_RNA (1)...(19): siRNA sense strand
ccugagagcuaucuuaucc

SEQ ID NO: 122858 - RNA, 19 nt, Homo sapiens
  misc_RNA (1)...(19): siRNA sense strand
caaagccgauggaauucag

SEQ ID NO: 122859 - RNA, 19 nt, Homo sapiens
  misc_RNA (1)...(19): siRNA sense strand
ggaucgauaugacuacaac

SEQ ID NO: 122860 - RNA, 19 nt, Homo sapiens
  misc_RNA (1)...(19): siRNA sense strand
ggacaggcugcagaaguuu

SEQ ID NO: 122861 - RNA, 19 nt, Homo sapiens
  misc_RNA (1)...(19): siRNA sense strand
cagacucgcacacgcauuu

SEQ ID NO: 122862 - RNA, 19 nt, Homo sapiens
  misc_RNA (1)...(19): siRNA sense strand
ucugagauuuccuagaguu

SEQ ID NO: 122863 - RNA, 19 nt, Homo sapiens
  misc_RNA (1)...(19): siRNA sense strand
ccaccaacuccuucuacua

SEQ ID NO: 122864 - RNA, 19 nt, Homo sapiens
  misc_RNA (1)...(19): siRNA sense strand
gaugaacccugagacaaaa

SEQ ID NO: 122865 - RNA, 19 nt, Homo sapiens
  misc_RNA (1)...(19): siRNA sense strand
gaccaaggccuggguguuc

SEQ ID NO: 122866 - RNA, 19 nt, Homo sapiens
  misc_RNA (1)...(19): siRNA sense strand
gugccugccuucugugaug

SEQ ID NO: 122867 - RNA, 19 nt, Homo sapiens
  misc_RNA (1)...(19): siRNA sense strand
gugcuaccuuucaacaaga

SEQ ID NO: 122868 - RNA, 19 nt, Homo sapiens
  misc_RNA (1)...(19): siRNA sense strand
ggacgcugcccuguuaaga

SEQ ID NO: 122869 - RNA, 19 nt, Homo sapiens
  misc_RNA (1)...(19): siRNA sense strand
ggacgccauucgcuucuac

SEQ ID NO: 122870 - RNA, 19 nt, Homo sapiens
  misc_RNA (1)...(19): siRNA sense strand
uccgauggcuccuccagaa

SEQ ID NO: 122871 - RNA, 19 nt, Homo sapiens
  misc_RNA (1)...(19): siRNA sense strand
ggaccagcccaaugucuca

SEQ ID NO: 122872 - RNA, 19 nt, Homo sapiens
  misc_RNA (1)...(19): siRNA sense strand
ggacagggaccagcccaau

SEQ ID NO: 122873 - RNA, 19 nt, Homo sapiens
  misc_RNA (1)...(19): siRNA sense strand
ccucagcccuaucucaaca

SEQ ID NO: 122874 - RNA, 19 nt, Homo sapiens
  misc_RNA (1)...(19): siRNA sense strand
gcccaagacuagccugaag

SEQ ID NO: 122875 - RNA, 19 nt, Homo sapiens
  misc_RNA (1)...(19): siRNA sense strand
cguauggcauguucucugu

SEQ ID NO: 122876 - RNA, 19 nt, Homo sapiens
  misc_RNA (1)...(19): siRNA sense strand
ggagugguggccucucuga

SEQ ID NO: 122877 - RNA, 19 nt, Homo sapiens
  misc_RNA (1)...(19): siRNA sense strand
cauguucucuguggacuuc

SEQ ID NO: 122878 - RNA, 19 nt, Homo sapiens
  misc_RNA (1)...(19): siRNA sense strand
agacagugaugggagauuc

SEQ ID NO: 122879 - RNA, 19 nt, Homo sapiens
  misc_RNA (1)...(19): siRNA sense strand
uauggcaucuacacuguca

SEQ ID NO: 122880 - RNA, 19 nt, Homo sapiens
  misc_RNA (1)...(19): siRNA sense strand
ccacugggccacaacuaug

SEQ ID NO: 122881 - RNA, 19 nt, Homo sapiens
  misc_RNA (1)...(19): siRNA sense strand
aaacucuggucacucaauc

SEQ ID NO: 122882 - RNA, 19 nt, Homo sapiens
  misc_RNA (1)...(19): siRNA sense strand
ccucagagccacuuaaugc

SEQ ID NO: 122883 - RNA, 19 nt, Homo sapiens
  misc_RNA (1)...(19): siRNA sense strand
aaagugaaggccaguguga

SEQ ID NO: 122884 - RNA, 19 nt, Homo sapiens
  misc_RNA (1)...(19): siRNA sense strand
gcacuuucacccuccaugu

SEQ ID NO: 122885 - RNA, 19 nt, Homo sapiens
  misc_RNA (1)...(19): siRNA sense strand
gggaacagccguguaagca

SEQ ID NO: 122886 - RNA, 19 nt, Homo sapiens
  misc_RNA (1)...(19): siRNA sense strand
caagguugcccagcugauu

SEQ ID NO: 122887 - RNA, 19 nt, Homo sapiens
  misc_RNA (1)...(19): siRNA sense strand
gcauuugcuuggcagagau

SEQ ID NO: 122888 - RNA, 19 nt, Homo sapiens
  misc_RNA (1)...(19): siRNA sense strand
gccaggacuucaugcuuca

SEQ ID NO: 122889 - RNA, 19 nt, Homo sapiens
  misc_RNA (1)...(19): siRNA sense strand
caacgacaccagugaguac

SEQ ID NO: 122890 - RNA, 19 nt, Homo sapiens
  misc_RNA (1)...(19): siRNA sense strand
caugaggauccacggguua

SEQ ID NO: 122891 - RNA, 19 nt, Homo sapiens
  misc_RNA (1)...(19): siRNA sense strand
ugacgaaggagacacuuuc

SEQ ID NO: 122892 - RNA, 19 nt, Homo sapiens
  misc_RNA (1)...(19): siRNA sense strand
ugccagcgguguacggaaa

SEQ ID NO: 122893 - RNA, 19 nt, Homo sapiens
  misc_RNA (1)...(19): siRNA sense strand
guacucacaaugcccaaga

SEQ ID NO: 122894 - RNA, 19 nt, Homo sapiens
  misc_RNA (1)...(19): siRNA sense strand
gugaugcugugcagaacug

SEQ ID NO: 122895 - RNA, 19 nt, Homo sapiens
  misc_RNA (1)...(19): siRNA sense strand
uaaauucaacccaaaugca

SEQ ID NO: 122896 - RNA, 19 nt, Homo sapiens
  misc_RNA (1)...(19): siRNA sense strand
gaaggggagugccguguuc

SEQ ID NO: 122897 - RNA, 19 nt, Homo sapiens
  misc_RNA (1)...(19): siRNA sense strand
ucaucuaccucaccaugua

SEQ ID NO: 122898 - RNA, 19 nt, Homo sapiens
  misc_RNA (1)...(19): siRNA sense strand
gcugaugcccagaacauuu

SEQ ID NO: 122899 - RNA, 19 nt, Homo sapiens
  misc_RNA (1)...(19): siRNA sense strand
ggucuuugcccuaaucuuc

SEQ ID NO: 122900 - RNA, 19 nt, Homo sapiens
  misc_RNA (1)...(19): siRNA sense strand
ccacggaccuguucauccu

SEQ ID NO: 122901 - RNA, 19 nt, Homo sapiens
  misc_RNA (1)...(19): siRNA sense strand
cauguacgccagcagcuuu

SEQ ID NO: 122902 - RNA, 19 nt, Homo sapiens
  misc_RNA (1)...(19): siRNA sense strand
ccuguggucuuugcccuaa

SEQ ID NO: 122903 - RNA, 19 nt, Homo sapiens
  misc_RNA (1)...(19): siRNA sense strand
cuggaugccuggcucuuug

SEQ ID NO: 122904 - RNA, 19 nt, Homo sapiens
  misc_RNA (1)...(19): siRNA sense strand
cgcccuaccucagcuacua

SEQ ID NO: 122905 - RNA, 19 nt, Homo sapiens
  misc_RNA (1)...(19): siRNA sense strand
ccgugcaccugcucaucua

SEQ ID NO: 122906 - RNA, 19 nt, Homo sapiens
  misc_RNA (1)...(19): siRNA sense strand
gcuggaugccuggcucuuu

SEQ ID NO: 122907 - RNA, 19 nt, Homo sapiens
  misc_RNA (1)...(19): siRNA sense strand
gcgcucauccugugcuucu

SEQ ID NO: 122908 - RNA, 19 nt, Homo sapiens
  misc_RNA (1)...(19): siRNA sense strand
gaaauuugauccacccuua

SEQ ID NO: 122909 - RNA, 19 nt, Homo sapiens
  misc_RNA (1)...(19): siRNA sense strand
gaaaguaggccaacugaua

SEQ ID NO: 122910 - RNA, 19 nt, Homo sapiens
  misc_RNA (1)...(19): siRNA sense strand
acacaaaccuguugccuua

SEQ ID NO: 122911 - RNA, 19 nt, Homo sapiens
  misc_RNA (1)...(19): siRNA sense strand
gagauaagcuuuggauuug

SEQ ID NO: 122912 - RNA, 19 nt, Homo sapiens
  misc_RNA (1)...(19): siRNA sense strand
gaacagcuauucccucgaa

SEQ ID NO: 122913 - RNA, 19 nt, Homo sapiens
  misc_RNA (1)...(19): siRNA sense strand
ugaacgagauggcucauua

SEQ ID NO: 122914 - RNA, 19 nt, Homo sapiens
  misc_RNA (1)...(19): siRNA sense strand
caucagaacucaccuuuga

SEQ ID NO: 122915 - RNA, 19 nt, Homo sapiens
  misc_RNA (1)...(19): siRNA sense strand
caaacucccugacagaaua

SEQ ID NO: 122916 - RNA, 19 nt, Homo sapiens
  misc_RNA (1)...(19): siRNA sense strand
caaucgagcuguuggauaa

SEQ ID NO: 122917 - RNA, 19 nt, Homo sapiens
  misc_RNA (1)...(19): siRNA sense strand
gaaccaaugcagaaauuua

SEQ ID NO: 122918 - RNA, 19 nt, Homo sapiens
  misc_RNA (1)...(19): siRNA sense strand
gagaaacacugcagggauu

SEQ ID NO: 122919 - RNA, 19 nt, Homo sapiens
  misc_RNA (1)...(19): siRNA sense strand
agaauucacucaacaagua

SEQ ID NO: 122920 - RNA, 19 nt, Homo sapiens
  misc_RNA (1)...(19): siRNA sense strand
gggaaucacugccauagaa

SEQ ID NO: 122921 - RNA, 19 nt, Homo sapiens
  misc_RNA (1)...(19): siRNA sense strand
ucagauagcacaagaauuu

SEQ ID NO: 122922 - RNA, 19 nt, Homo sapiens
  misc_RNA (1)...(19): siRNA sense strand
ggacaguucagaagaaaua

SEQ ID NO: 122923 - RNA, 19 nt, Homo sapiens
  misc_RNA (1)...(19): siRNA sense strand
gcaaagccaucccaaguuc

SEQ ID NO: 122924 - RNA, 19 nt, Homo sapiens
  misc_RNA (1)...(19): siRNA sense strand
ggagaagacuuugcaguug

SEQ ID NO: 122925 - RNA, 19 nt, Homo sapiens
  misc_RNA (1)...(19): siRNA sense strand
aaacggaagucuuucauug

SEQ ID NO: 122926 - RNA, 19 nt, Homo sapiens
  misc_RNA (1)...(19): siRNA sense strand
ugaaggagaugaugaugaa

SEQ ID NO: 122927 - RNA, 19 nt, Homo sapiens
  misc_RNA (1)...(19): siRNA sense strand
caagagaugucccauguca

SEQ ID NO: 122928 - RNA, 19 nt, Homo sapiens
  misc_RNA (1)...(19): siRNA sense strand
ggagagagauaccauccuu

SEQ ID NO: 122929 - RNA, 19 nt, Homo sapiens
  misc_RNA (1)...(19): siRNA sense strand
ggaguacccuuuaguuugu

SEQ ID NO: 122930 - RNA, 19 nt, Homo sapiens
  misc_RNA (1)...(19): siRNA sense strand
gaacaggaguacccuuuag

SEQ ID NO: 122931 - RNA, 19 nt, Homo sapiens
  misc_RNA (1)...(19): siRNA sense strand
aaagggagcuaacauucua

SEQ ID NO: 122932 - RNA, 19 nt, Homo sapiens
  misc_RNA (1)...(19): siRNA sense strand
gaaguguuguguuguaaga

SEQ ID NO: 122933 - RNA, 19 nt, Homo sapiens
  misc_RNA (1)...(19): siRNA sense strand
aaaguuaccuguugcuauu

SEQ ID NO: 122934 - RNA, 19 nt, Homo sapiens
  misc_RNA (1)...(19): siRNA sense strand
uguuaacacuggugaauua

SEQ ID NO: 122935 - RNA, 19 nt, Homo sapiens
  misc_RNA (1)...(19): siRNA sense strand
gacuagcauuguucuauua

SEQ ID NO: 122936 - RNA, 19 nt, Homo sapiens
  misc_RNA (1)...(19): siRNA sense strand
uaccaaagccuauuaguaa

SEQ ID NO: 122937 - RNA, 19 nt, Homo sapiens
  misc_RNA (1)...(19): siRNA sense strand
gaggacacgucgcacauuu

SEQ ID NO: 122938 - RNA, 19 nt, Homo sapiens
  misc_RNA (1)...(19): siRNA sense strand
gaaauauacuacacugcaa

SEQ ID NO: 122939 - RNA, 19 nt, Homo sapiens
  misc_RNA (1)...(19): siRNA sense strand
ggauaauggucaugugaaa

SEQ ID NO: 122940 - RNA, 19 nt, Homo sapiens
  misc_RNA (1)...(19): siRNA sense strand
aaagaaagauguaccaaag

SEQ ID NO: 122941 - RNA, 19 nt, Homo sapiens
  misc_RNA (1)...(19): siRNA sense strand
ccagaaguguuguguugua

SEQ ID NO: 122942 - RNA, 19 nt, Homo sapiens
  misc_RNA (1)...(19): siRNA sense strand
ggagcuaacauucuauuaa

SEQ ID NO: 122943 - RNA, 19 nt, Homo sapiens
  misc_RNA (1)...(19): siRNA sense strand
gcaggaaauugucaucaga

SEQ ID NO: 122944 - RNA, 19 nt, Homo sapiens
  misc_RNA (1)...(19): siRNA sense strand
gauauuuggugccgaagaa

SEQ ID NO: 122945 - RNA, 19 nt, Homo sapiens
  misc_RNA (1)...(19): siRNA sense strand
agacaaauguuacucaugu

SEQ ID NO: 122946 - RNA, 19 nt, Homo sapiens
  misc_RNA (1)...(19): siRNA sense strand
cgagauaagcuuuggauuu

SEQ ID NO: 122947 - RNA, 19 nt, Homo sapiens
  misc_RNA (1)...(19): siRNA sense strand
ccuauaccauguccacuua

SEQ ID NO: 122948 - RNA, 19 nt, Homo sapiens
  misc_RNA (1)...(19): siRNA sense strand
ucuaaacacucaacucuga

SEQ ID NO: 122949 - RNA, 19 nt, Homo sapiens
  misc_RNA (1)...(19): siRNA sense strand
guaccaaagccuauuagua

SEQ ID NO: 122950 - RNA, 19 nt, Homo sapiens
  misc_RNA (1)...(19): siRNA sense strand
gagaagacuuugcaguugu

SEQ ID NO: 122951 - RNA, 19 nt, Homo sapiens
  misc_RNA (1)...(19): siRNA sense strand
ccacuuagaauguuugaaa

SEQ ID NO: 122952 - RNA, 19 nt, Homo sapiens
  misc_RNA (1)...(19): siRNA sense strand
gagcuaacauucuauuaac

SEQ ID NO: 122953 - RNA, 19 nt, Homo sapiens
  misc_RNA (1)...(19): siRNA sense strand
cgagauggcucauuauguc

SEQ ID NO: 122954 - RNA, 19 nt, Homo sapiens
  misc_RNA (1)...(19): siRNA sense strand
caccaaagccuaagucuau

SEQ ID NO: 122955 - RNA, 19 nt, Homo sapiens
  misc_RNA (1)...(19): siRNA sense strand
cuaaugagguaacacaaga

SEQ ID NO: 122956 - RNA, 19 nt, Homo sapiens
  misc_RNA (1)...(19): siRNA sense strand
gaaauggaaugagcuccuu

SEQ ID NO: 122957 - RNA, 19 nt, Homo sapiens
  misc_RNA (1)...(19): siRNA sense strand
acccaaauauuguugcuua

SEQ ID NO: 122958 - RNA, 19 nt, Homo sapiens
  misc_RNA (1)...(19): siRNA sense strand
cacaagaaauuucagauag

SEQ ID NO: 122959 - RNA, 19 nt, Homo sapiens
  misc_RNA (1)...(19): siRNA sense strand
gcucagagauaaccuuugg

SEQ ID NO: 122960 - RNA, 19 nt, Homo sapiens
  misc_RNA (1)...(19): siRNA sense strand
guagaaacgugagagaaga

SEQ ID NO: 122961 - RNA, 19 nt, Homo sapiens
  misc_RNA (1)...(19): siRNA sense strand
gauaaacccagauacaaga

SEQ ID NO: 122962 - RNA, 19 nt, Homo sapiens
  misc_RNA (1)...(19): siRNA sense strand
uaacccaacuggagagaga

SEQ ID NO: 122963 - RNA, 19 nt, Homo sapiens
  misc_RNA (1)...(19): siRNA sense strand
gccuaagucuaucuucaua

SEQ ID NO: 122964 - RNA, 19 nt, Homo sapiens
  misc_RNA (1)...(19): siRNA sense strand
aaacauggaaugcaaggua

SEQ ID NO: 122965 - RNA, 19 nt, Homo sapiens
  misc_RNA (1)...(19): siRNA sense strand
gaaaauggcacuuaccaaa

SEQ ID NO: 122966 - RNA, 19 nt, Homo sapiens
  misc_RNA (1)...(19): siRNA sense strand
gacaaauguuacucaugua

SEQ ID NO: 122967 - RNA, 19 nt, Homo sapiens
  misc_RNA (1)...(19): siRNA sense strand
gcuguuggauaaaguaaau

SEQ ID NO: 122968 - RNA, 19 nt, Homo sapiens
  misc_RNA (1)...(19): siRNA sense strand
ugagguaacacaagaaauu

SEQ ID NO: 122969 - RNA, 19 nt, Homo sapiens
  misc_RNA (1)...(19): siRNA sense strand
guaaacacccaaauauugu

SEQ ID NO: 122970 - RNA, 19 nt, Homo sapiens
  misc_RNA (1)...(19): siRNA sense strand
ggaaccaggagaagacuuu

SEQ ID NO: 122971 - RNA, 19 nt, Homo sapiens
  misc_RNA (1)...(19): siRNA sense strand
ccaguuaaauggugaacga

SEQ ID NO: 122972 - RNA, 19 nt, Homo sapiens
  misc_RNA (1)...(19): siRNA sense strand
agacagaaccacaucauga

SEQ ID NO: 122973 - RNA, 19 nt, Homo sapiens
  misc_RNA (1)...(19): siRNA sense strand
aaaguaggccaacugauaa

SEQ ID NO: 122974 - RNA, 19 nt, Homo sapiens
  misc_RNA (1)...(19): siRNA sense strand
gaaauugucaucagaacuc

SEQ ID NO: 122975 - RNA, 19 nt, Homo sapiens
  misc_RNA (1)...(19): siRNA sense strand
uguaaacacccaaauauug

SEQ ID NO: 122976 - RNA, 19 nt, Homo sapiens
  misc_RNA (1)...(19): siRNA sense strand
ggaaugcaagguagaaguu

SEQ ID NO: 122977 - RNA, 19 nt, Homo sapiens
  misc_RNA (1)...(19): siRNA sense strand
gaacucaccuuugauuucc

SEQ ID NO: 122978 - RNA, 19 nt, Homo sapiens
  misc_RNA (1)...(19): siRNA sense strand
aauaguaaaucuccaagga

SEQ ID NO: 122979 - RNA, 19 nt, Homo sapiens
  misc_RNA (1)...(19): siRNA sense strand
gaacaauugcuugcuauca

SEQ ID NO: 122980 - RNA, 19 nt, Homo sapiens
  misc_RNA (1)...(19): siRNA sense strand
gaacauagaggcacaaacc

SEQ ID NO: 122981 - RNA, 19 nt, Homo sapiens
  misc_RNA (1)...(19): siRNA sense strand
gcaaucgagcuguuggaua

SEQ ID NO: 122982 - RNA, 19 nt, Homo sapiens
  misc_RNA (1)...(19): siRNA sense strand
aaugagcuccuuccaguua

SEQ ID NO: 122983 - RNA, 19 nt, Homo sapiens
  misc_RNA (1)...(19): siRNA sense strand
caagaaauuucagauagca

SEQ ID NO: 122984 - RNA, 19 nt, Homo sapiens
  misc_RNA (1)...(19): siRNA sense strand
acagauaacagcuacaauu

SEQ ID NO: 122985 - RNA, 19 nt, Homo sapiens
  misc_RNA (1)...(19): siRNA sense strand
caaauucuaccucuucaug

SEQ ID NO: 122986 - RNA, 19 nt, Homo sapiens
  misc_RNA (1)...(19): siRNA sense strand
gauaagcuuuggauuugca

SEQ ID NO: 122987 - RNA, 19 nt, Homo sapiens
  misc_RNA (1)...(19): siRNA sense strand
agacuagcauuguucuauu

SEQ ID NO: 122988 - RNA, 19 nt, Homo sapiens
  misc_RNA (1)...(19): siRNA sense strand
gauguaccaaagccuauua

SEQ ID NO: 122989 - RNA, 19 nt, Homo sapiens
  misc_RNA (1)...(19): siRNA sense strand
acucaacucugaaagcaaa

SEQ ID NO: 122990 - RNA, 19 nt, Homo sapiens
  misc_RNA (1)...(19): siRNA sense strand
gaugaugaaucuaaacacu

SEQ ID NO: 122991 - RNA, 19 nt, Homo sapiens
  misc_RNA (1)...(19): siRNA sense strand
gcacagauaacagcuacaa

SEQ ID NO: 122992 - RNA, 19 nt, Homo sapiens
  misc_RNA (1)...(19): siRNA sense strand
gcacuucagacuagcauug

SEQ ID NO: 122993 - RNA, 19 nt, Homo sapiens
  misc_RNA (1)...(19): siRNA sense strand
ugaugaaucuaaacacuca

SEQ ID NO: 122994 - RNA, 19 nt, Homo sapiens
  misc_RNA (1)...(19): siRNA sense strand
uaacacuggugaauuagca

SEQ ID NO: 122995 - RNA, 19 nt, Homo sapiens
  misc_RNA (1)...(19): siRNA sense strand
gaacuucccgacagugaug

SEQ ID NO: 122996 - RNA, 19 nt, Homo sapiens
  misc_RNA (1)...(19): siRNA sense strand
gauaaccuuuggccaagug

SEQ ID NO: 122997 - RNA, 19 nt, Homo sapiens
  misc_RNA (1)...(19): siRNA sense strand
gcuucagccuccuauguuu

SEQ ID NO: 122998 - RNA, 19 nt, Homo sapiens
  misc_RNA (1)...(19): siRNA sense strand
gcacacaaacucccugaca

SEQ ID NO: 122999 - RNA, 19 nt, Homo sapiens
  misc_RNA (1)...(19): siRNA sense strand
caagacaaaugcaaaaguu

SEQ ID NO: 123000 - RNA, 19 nt, Homo sapiens
  misc_RNA (1)...(19): siRNA sense strand
uaaugggugucccuugaaa

SEQ ID NO: 123001 - RNA, 19 nt, Homo sapiens
  misc_RNA (1)...(19): siRNA sense strand
gcauaugggugcauguuuu

SEQ ID NO: 123002 - RNA, 19 nt, Homo sapiens
  misc_RNA (1)...(19): siRNA sense strand
uuuagaagaugaugaagga

SEQ ID NO: 123003 - RNA, 19 nt, Homo sapiens
  misc_RNA (1)...(19): siRNA sense strand
ccacauagaauucacucaa

SEQ ID NO: 123004 - RNA, 19 nt, Homo sapiens
  misc_RNA (1)...(19): siRNA sense strand
gagguaacacaagaaauuu

SEQ ID NO: 123005 - RNA, 19 nt, Homo sapiens
  misc_RNA (1)...(19): siRNA sense strand
cagaaguguuguguuguaa

SEQ ID NO: 123006 - RNA, 19 nt, Homo sapiens
  misc_RNA (1)...(19): siRNA sense strand
cauagaggcacaaaccuuu

SEQ ID NO: 123007 - RNA, 19 nt, Homo sapiens
  misc_RNA (1)...(19): siRNA sense strand
gaacgagauggcucauuau

SEQ ID NO: 123008 - RNA, 19 nt, Homo sapiens
  misc_RNA (1)...(19): siRNA sense strand
ggacugagcugaauacaua

SEQ ID NO: 123009 - RNA, 19 nt, Homo sapiens
  misc_RNA (1)...(19): siRNA sense strand
ggaaugagcuuucaauuga

SEQ ID NO: 123010 - RNA, 19 nt, Homo sapiens
  misc_RNA (1)...(19): siRNA sense strand
gaugauggauggacugaua

SEQ ID NO: 123011 - RNA, 19 nt, Homo sapiens
  misc_RNA (1)...(19): siRNA sense strand
gagcauaacuguggccaua

SEQ ID NO: 123012 - RNA, 19 nt, Homo sapiens
  misc_RNA (1)...(19): siRNA sense strand
ggacgagccuauucaagaa

SEQ ID NO: 123013 - RNA, 19 nt, Homo sapiens
  misc_RNA (1)...(19): siRNA sense strand
gcaagaaggccucagguaa

SEQ ID NO: 123014 - RNA, 19 nt, Homo sapiens
  misc_RNA (1)...(19): siRNA sense strand
gcacagggcccauaugguu

SEQ ID NO: 123015 - RNA, 19 nt, Homo sapiens
  misc_RNA (1)...(19): siRNA sense strand
gcauccaacuguuacauaa

SEQ ID NO: 123016 - RNA, 19 nt, Homo sapiens
  misc_RNA (1)...(19): siRNA sense strand
ggaacaaucugugaugaug

SEQ ID NO: 123017 - RNA, 19 nt, Homo sapiens
  misc_RNA (1)...(19): siRNA sense strand
ggaagaaauuggaguucaa

SEQ ID NO: 123018 - RNA, 19 nt, Homo sapiens
  misc_RNA (1)...(19): siRNA sense strand
gcauaacuguggccauaaa

SEQ ID NO: 123019 - RNA, 19 nt, Homo sapiens
  misc_RNA (1)...(19): siRNA sense strand
gagcaagaaccauggcuua

SEQ ID NO: 123020 - RNA, 19 nt, Homo sapiens
  misc_RNA (1)...(19): siRNA sense strand
gaaauuggaguucaacaga

SEQ ID NO: 123021 - RNA, 19 nt, Homo sapiens
  misc_RNA (1)...(19): siRNA sense strand
gaggaccacucauguguga

SEQ ID NO: 123022 - RNA, 19 nt, Homo sapiens
  misc_RNA (1)...(19): siRNA sense strand
caagaaccauggcuuacuu

SEQ ID NO: 123023 - RNA, 19 nt, Homo sapiens
  misc_RNA (1)...(19): siRNA sense strand
gcagcacacuguuucaaga

SEQ ID NO: 123024 - RNA, 19 nt, Homo sapiens
  misc_RNA (1)...(19): siRNA sense strand
gaagaugcaggaguuauuu

SEQ ID NO: 123025 - RNA, 19 nt, Homo sapiens
  misc_RNA (1)...(19): siRNA sense strand
caagcaagauauuggaaga

SEQ ID NO: 123026 - RNA, 19 nt, Homo sapiens
  misc_RNA (1)...(19): siRNA sense strand
gaaguggucggcuuugauu

SEQ ID NO: 123027 - RNA, 19 nt, Homo sapiens
  misc_RNA (1)...(19): siRNA sense strand
gggaaugagcuuucaauug

SEQ ID NO: 123028 - RNA, 19 nt, Homo sapiens
  misc_RNA (1)...(19): siRNA sense strand
gccauucccuuacuuccua

SEQ ID NO: 123029 - RNA, 19 nt, Homo sapiens
  misc_RNA (1)...(19): siRNA sense strand
ggagagagaggccacagaa

SEQ ID NO: 123030 - RNA, 19 nt, Homo sapiens
  misc_RNA (1)...(19): siRNA sense strand
acuaggagcuaugcuguua

SEQ ID NO: 123031 - RNA, 19 nt, Homo sapiens
  misc_RNA (1)...(19): siRNA sense strand
ccagauuucuucaguguuc

SEQ ID NO: 123032 - RNA, 19 nt, Homo sapiens
  misc_RNA (1)...(19): siRNA sense strand
gacgucagcugcucaggaa

SEQ ID NO: 123033 - RNA, 19 nt, Homo sapiens
  misc_RNA (1)...(19): siRNA sense strand
ggaacugucugugaugaug

SEQ ID NO: 123034 - RNA, 19 nt, Homo sapiens
  misc_RNA (1)...(19): siRNA sense strand
ccgcgaagauguuagcauu

SEQ ID NO: 123035 - RNA, 19 nt, Homo sapiens
  misc_RNA (1)...(19): siRNA sense strand
cagaggaguuugaggaaga

SEQ ID NO: 123036 - RNA, 19 nt, Homo sapiens
  misc_RNA (1)...(19): siRNA sense strand
caacagcacuaggagcuau

SEQ ID NO: 123037 - RNA, 19 nt, Homo sapiens
  misc_RNA (1)...(19): siRNA sense strand
gaagagcaaugugccagau

SEQ ID NO: 123038 - RNA, 19 nt, Homo sapiens
  misc_RNA (1)...(19): siRNA sense strand
gaaaaggaauagcaaaaca

SEQ ID NO: 123039 - RNA, 19 nt, Homo sapiens
  misc_RNA (1)...(19): siRNA sense strand
aaaccuccaugaacacaaa

SEQ ID NO: 123040 - RNA, 19 nt, Homo sapiens
  misc_RNA (1)...(19): siRNA sense strand
ugacauagcccugguuaga

SEQ ID NO: 123041 - RNA, 19 nt, Homo sapiens
  misc_RNA (1)...(19): siRNA sense strand
ggaugcagcugugaucugu

SEQ ID NO: 123042 - RNA, 19 nt, Homo sapiens
  misc_RNA (1)...(19): siRNA sense strand
acauagcccugguuagauu

SEQ ID NO: 123043 - RNA, 19 nt, Homo sapiens
  misc_RNA (1)...(19): siRNA sense strand
gaagucaucccauggagau

SEQ ID NO: 123044 - RNA, 19 nt, Homo sapiens
  misc_RNA (1)...(19): siRNA sense strand
caggaguuauuugugauua

SEQ ID NO: 123045 - RNA, 19 nt, Homo sapiens
  misc_RNA (1)...(19): siRNA sense strand
gaaagcacagggcccauau

SEQ ID NO: 123046 - RNA, 19 nt, Homo sapiens
  misc_RNA (1)...(19): siRNA sense strand
acaagcagccauucccuua

SEQ ID NO: 123047 - RNA, 19 nt, Homo sapiens
  misc_RNA (1)...(19): siRNA sense strand
ggaguuugaggaagaaauu

SEQ ID NO: 123048 - RNA, 19 nt, Homo sapiens
  misc_RNA (1)...(19): siRNA sense strand
gaaaauauacugcuuugug

SEQ ID NO: 123049 - RNA, 19 nt, Homo sapiens
  misc_RNA (1)...(19): siRNA sense strand
gagggucgcuuggagguau

SEQ ID NO: 123050 - RNA, 19 nt, Homo sapiens
  misc_RNA (1)...(19): siRNA sense strand
ccacugggaugauucugau

SEQ ID NO: 123051 - RNA, 19 nt, Homo sapiens
  misc_RNA (1)...(19): siRNA sense strand
aaccauggcuuacuuugga

SEQ ID NO: 123052 - RNA, 19 nt, Homo sapiens
  misc_RNA (1)...(19): siRNA sense strand
uaacuguggccauaaagaa

SEQ ID NO: 123053 - RNA, 19 nt, Homo sapiens
  misc_RNA (1)...(19): siRNA sense strand
gcccaguuauguuggauga

SEQ ID NO: 123054 - RNA, 19 nt, Homo sapiens
  misc_RNA (1)...(19): siRNA sense strand
ggauucuccugguguuuau

SEQ ID NO: 123055 - RNA, 19 nt, Homo sapiens
  misc_RNA (1)...(19): siRNA sense strand
gagucccucucaucuguuu

SEQ ID NO: 123056 - RNA, 19 nt, Homo sapiens
  misc_RNA (1)...(19): siRNA sense strand
cagugaagaugcaggaguu

SEQ ID NO: 123057 - RNA, 19 nt, Homo sapiens
  misc_RNA (1)...(19): siRNA sense strand
gaggacagcgccacaacuu

SEQ ID NO: 123058 - RNA, 19 nt, Homo sapiens
  misc_RNA (1)...(19): siRNA sense strand
gaaaaggacccauccaugu

SEQ ID NO: 123059 - RNA, 19 nt, Homo sapiens
  misc_RNA (1)...(19): siRNA sense strand
caguugggauuuaaauaug

SEQ ID NO: 123060 - RNA, 19 nt, Homo sapiens
  misc_RNA (1)...(19): siRNA sense strand
caacagauugugauucauc

SEQ ID NO: 123061 - RNA, 19 nt, Homo sapiens
  misc_RNA (1)...(19): siRNA sense strand
ggaguucaacagauuguga

SEQ ID NO: 123062 - RNA, 19 nt, Homo sapiens
  misc_RNA (1)...(19): siRNA sense strand
aagcauggcaucaggcaua

SEQ ID NO: 123063 - RNA, 19 nt, Homo sapiens
  misc_RNA (1)...(19): siRNA sense strand
cauggcaucaggcauauuu

SEQ ID NO: 123064 - RNA, 19 nt, Homo sapiens
  misc_RNA (1)...(19): siRNA sense strand
ggacagcgccacaacuuuu

SEQ ID NO: 123065 - RNA, 19 nt, Homo sapiens
  misc_RNA (1)...(19): siRNA sense strand
gaaggacgaguggagguuu

SEQ ID NO: 123066 - RNA, 19 nt, Homo sapiens
  misc_RNA (1)...(19): siRNA sense strand
gacaguugggauuuaaaua

SEQ ID NO: 123067 - RNA, 19 nt, Homo sapiens
  misc_RNA (1)...(19): siRNA sense strand
ugucgacaguugggauuua

SEQ ID NO: 123068 - RNA, 19 nt, Homo sapiens
  misc_RNA (1)...(19): siRNA sense strand
gcacugggaaugagcuuuc

SEQ ID NO: 123069 - RNA, 19 nt, Homo sapiens
  misc_RNA (1)...(19): siRNA sense strand
gcuguggagucaaggauuc

SEQ ID NO: 123070 - RNA, 19 nt, Homo sapiens
  misc_RNA (1)...(19): siRNA sense strand
ggguauggcuguggaguca

SEQ ID NO: 123071 - RNA, 19 nt, Homo sapiens
  misc_RNA (1)...(19): siRNA sense strand
gcggaucauuggugggaaa

SEQ ID NO: 123072 - RNA, 19 nt, Homo sapiens
  misc_RNA (1)...(19): siRNA sense strand
gaaugagcuuucaauugag

SEQ ID NO: 123073 - RNA, 19 nt, Homo sapiens
  misc_RNA (1)...(19): siRNA sense strand
ggaugaugccgaugcagaa

SEQ ID NO: 123074 - RNA, 19 nt, Homo sapiens
  misc_RNA (1)...(19): siRNA sense strand
aauuggaguucaacagauu

SEQ ID NO: 123075 - RNA, 19 nt, Homo sapiens
  misc_RNA (1)...(19): siRNA sense strand
gguuggagauuaucauacu

SEQ ID NO: 123076 - RNA, 19 nt, Homo sapiens
  misc_RNA (1)...(19): siRNA sense strand
ugaagaugcaggaguuauu

SEQ ID NO: 123077 - RNA, 19 nt, Homo sapiens
  misc_RNA (1)...(19): siRNA sense strand
gcgaagauguuagcauugc

SEQ ID NO: 123078 - RNA, 19 nt, Homo sapiens
  misc_RNA (1)...(19): siRNA sense strand
ggcaagaaggccucaggua

SEQ ID NO: 123079 - RNA, 19 nt, Homo sapiens
  misc_RNA (1)...(19): siRNA sense strand
gacccgaccgcagugauua

SEQ ID NO: 123080 - RNA, 19 nt, Homo sapiens
  misc_RNA (1)...(19): siRNA sense strand
ucagguaacaguaauaaag

SEQ ID NO: 123081 - RNA, 19 nt, Homo sapiens
  misc_RNA (1)...(19): siRNA sense strand
caauugagcaguguccaaa

SEQ ID NO: 123082 - RNA, 19 nt, Homo sapiens
  misc_RNA (1)...(19): siRNA sense strand
cgugcuagcccugauguua

SEQ ID NO: 123083 - RNA, 19 nt, Homo sapiens
  misc_RNA (1)...(19): siRNA sense strand
gagagagaggccacagaaa

SEQ ID NO: 123084 - RNA, 19 nt, Homo sapiens
  misc_RNA (1)...(19): siRNA sense strand
cggcagaagcggaucauug

SEQ ID NO: 123085 - RNA, 19 nt, Homo sapiens
  misc_RNA (1)...(19): siRNA sense strand
caagaaggccucagguaac

SEQ ID NO: 123086 - RNA, 19 nt, Homo sapiens
  misc_RNA (1)...(19): siRNA sense strand
gcaggaguuauuugugauu

SEQ ID NO: 123087 - RNA, 19 nt, Homo sapiens
  misc_RNA (1)...(19): siRNA sense strand
aagcaucugccaaccauuu

SEQ ID NO: 123088 - RNA, 19 nt, Homo sapiens
  misc_RNA (1)...(19): siRNA sense strand
gaauacauacgugguuugu

SEQ ID NO: 123089 - RNA, 19 nt, Homo sapiens
  misc_RNA (1)...(19): siRNA sense strand
gaugaccaaugggaugaug

SEQ ID NO: 123090 - RNA, 19 nt, Homo sapiens
  misc_RNA (1)...(19): siRNA sense strand
cagguaacaguaauaaaga

SEQ ID NO: 123091 - RNA, 19 nt, Homo sapiens
  misc_RNA (1)...(19): siRNA sense strand
gaagugcacaggaaaugag

SEQ ID NO: 123092 - RNA, 19 nt, Homo sapiens
  misc_RNA (1)...(19): siRNA sense strand
gaaccauggcuuacuuugg

SEQ ID NO: 123093 - RNA, 19 nt, Homo sapiens
  misc_RNA (1)...(19): siRNA sense strand
gauucuguccucaaugauu

SEQ ID NO: 123094 - RNA, 19 nt, Homo sapiens
  misc_RNA (1)...(19): siRNA sense strand
acaagcaucugccaaccau

SEQ ID NO: 123095 - RNA, 19 nt, Homo sapiens
  misc_RNA (1)...(19): siRNA sense strand
ccaguuauguuggaugaag

SEQ ID NO: 123096 - RNA, 19 nt, Homo sapiens
  misc_RNA (1)...(19): siRNA sense strand
ggccuuauucccauuuauu

SEQ ID NO: 123097 - RNA, 19 nt, Homo sapiens
  misc_RNA (1)...(19): siRNA sense strand
ucaagaacacuacaacaag

SEQ ID NO: 123098 - RNA, 19 nt, Homo sapiens
  misc_RNA (1)...(19): siRNA sense strand
guuuguggcuugagauuac

SEQ ID NO: 123099 - RNA, 19 nt, Homo sapiens
  misc_RNA (1)...(19): siRNA sense strand
aagaaggccucagguaaca

SEQ ID NO: 123100 - RNA, 19 nt, Homo sapiens
  misc_RNA (1)...(19): siRNA sense strand
augcaggaguuauuuguga

SEQ ID NO: 123101 - RNA, 19 nt, Homo sapiens
  misc_RNA (1)...(19): siRNA sense strand
caagauauuggaagacaca

SEQ ID NO: 123102 - RNA, 19 nt, Homo sapiens
  misc_RNA (1)...(19): siRNA sense strand
caggaaaggaaaccagauu

SEQ ID NO: 123103 - RNA, 19 nt, Homo sapiens
  misc_RNA (1)...(19): siRNA sense strand
aaccagauuucuucagugu

SEQ ID NO: 123104 - RNA, 19 nt, Homo sapiens
  misc_RNA (1)...(19): siRNA sense strand
agagcaaugugccagauuc

SEQ ID NO: 123105 - RNA, 19 nt, Homo sapiens
  misc_RNA (1)...(19): siRNA sense strand
ggcagacccugguguuucu

SEQ ID NO: 123106 - RNA, 19 nt, Homo sapiens
  misc_RNA (1)...(19): siRNA sense strand
guccuuggcugacuguauc

SEQ ID NO: 123107 - RNA, 19 nt, Homo sapiens
  misc_RNA (1)...(19): siRNA sense strand
uggauggacugauaaggau

SEQ ID NO: 123108 - RNA, 19 nt, Homo sapiens
  misc_RNA (1)...(19): siRNA sense strand
ggaagaaacuggcggaaug

SEQ ID NO: 123109 - RNA, 19 nt, Homo sapiens
  misc_RNA (1)...(19): siRNA sense strand
cgaaauggcuuaagucgaa

SEQ ID NO: 123110 - RNA, 19 nt, Homo sapiens
  misc_RNA (1)...(19): siRNA sense strand
caagaaaccugugugauga

SEQ ID NO: 123111 - RNA, 19 nt, Homo sapiens
  misc_RNA (1)...(19): siRNA sense strand
ugagauagcucgagagaau

SEQ ID NO: 123112 - RNA, 19 nt, Homo sapiens
  misc_RNA (1)...(19): siRNA sense strand
ggaaagagaacgaaucgaa

SEQ ID NO: 123113 - RNA, 19 nt, Homo sapiens
  misc_RNA (1)...(19): siRNA sense strand
aauaauagccuuccaauug

SEQ ID NO: 123114 - RNA, 19 nt, Homo sapiens
  misc_RNA (1)...(19): siRNA sense strand
ggccaagggugaauucuaa

SEQ ID NO: 123115 - RNA, 19 nt, Homo sapiens
  misc_RNA (1)...(19): siRNA sense strand
ggacguuacucaaaucguu

SEQ ID NO: 123116 - RNA, 19 nt, Homo sapiens
  misc_RNA (1)...(19): siRNA sense strand
gaagaagcauagacgaaau

SEQ ID NO: 123117 - RNA, 19 nt, Homo sapiens
  misc_RNA (1)...(19): siRNA sense strand
ggaaauccuuuacuucauc

SEQ ID NO: 123118 - RNA, 19 nt, Homo sapiens
  misc_RNA (1)...(19): siRNA sense strand
gaaacgaccucgacucacu

SEQ ID NO: 123119 - RNA, 19 nt, Homo sapiens
  misc_RNA (1)...(19): siRNA sense strand
cagaagcacaaguauauua

SEQ ID NO: 123120 - RNA, 19 nt, Homo sapiens
  misc_RNA (1)...(19): siRNA sense strand
cgaaagaacucuguuaaac

SEQ ID NO: 123121 - RNA, 19 nt, Homo sapiens
  misc_RNA (1)...(19): siRNA sense strand
ugacagcccuuccuauaau

SEQ ID NO: 123122 - RNA, 19 nt, Homo sapiens
  misc_RNA (1)...(19): siRNA sense strand
aaugaaagcccaagaaauu

SEQ ID NO: 123123 - RNA, 19 nt, Homo sapiens
  misc_RNA (1)...(19): siRNA sense strand
gauggacuuuggaauauga

SEQ ID NO: 123124 - RNA, 19 nt, Homo sapiens
  misc_RNA (1)...(19): siRNA sense strand
ccauauaccugcccugguu

SEQ ID NO: 123125 - RNA, 19 nt, Homo sapiens
  misc_RNA (1)...(19): siRNA sense strand
ccaaugaagaugaguuaua

SEQ ID NO: 123126 - RNA, 19 nt, Homo sapiens
  misc_RNA (1)...(19): siRNA sense strand
guauguagcucacguaggu

SEQ ID NO: 123127 - RNA, 19 nt, Homo sapiens
  misc_RNA (1)...(19): siRNA sense strand
cagggaaacuuuaccaaug

SEQ ID NO: 123128 - RNA, 19 nt, Homo sapiens
  misc_RNA (1)...(19): siRNA sense strand
ucaagaagcagaaggguuu

SEQ ID NO: 123129 - RNA, 19 nt, Homo sapiens
  misc_RNA (1)...(19): siRNA sense strand
guuagaaggagcacaguua

SEQ ID NO: 123130 - RNA, 19 nt, Homo sapiens
  misc_RNA (1)...(19): siRNA sense strand
caaaugaaagcccaagaaa

SEQ ID NO: 123131 - RNA, 19 nt, Homo sapiens
  misc_RNA (1)...(19): siRNA sense strand
caacaaacacugucaugga

SEQ ID NO: 123132 - RNA, 19 nt, Homo sapiens
  misc_RNA (1)...(19): siRNA sense strand
uguccaagguguagucaua

SEQ ID NO: 123133 - RNA, 19 nt, Homo sapiens
  misc_RNA (1)...(19): siRNA sense strand
gcacaguuauugaccagau

SEQ ID NO: 123134 - RNA, 19 nt, Homo sapiens
  misc_RNA (1)...(19): siRNA sense strand
gacagcccuuccuauaaua

SEQ ID NO: 123135 - RNA, 19 nt, Homo sapiens
  misc_RNA (1)...(19): siRNA sense strand
gaaauccuuuacuucauca

SEQ ID NO: 123136 - RNA, 19 nt, Homo sapiens
  misc_RNA (1)...(19): siRNA sense strand
gaaagaacucuguuaaacu

SEQ ID NO: 123137 - RNA, 19 nt, Homo sapiens
  misc_RNA (1)...(19): siRNA sense strand
aaagaacucuguuaaacuc

SEQ ID NO: 123138 - RNA, 19 nt, Homo sapiens
  misc_RNA (1)...(19): siRNA sense strand
gaacgaaucgaaggacuug

SEQ ID NO: 123139 - RNA, 19 nt, Homo sapiens
  misc_RNA (1)...(19): siRNA sense strand
caaugaagaugaguuauac

SEQ ID NO: 123140 - RNA, 19 nt, Homo sapiens
  misc_RNA (1)...(19): siRNA sense strand
ggacaaucagggaaacuuu

SEQ ID NO: 123141 - RNA, 19 nt, Homo sapiens
  misc_RNA (1)...(19): siRNA sense strand
ggacuuggugggaguguaa

SEQ ID NO: 123142 - RNA, 19 nt, Homo sapiens
  misc_RNA (1)...(19): siRNA sense strand
gacaaucagggaaacuuua

SEQ ID NO: 123143 - RNA, 19 nt, Homo sapiens
  misc_RNA (1)...(19): siRNA sense strand
gagcuaugauuucuucagu

SEQ ID NO: 123144 - RNA, 19 nt, Homo sapiens
  misc_RNA (1)...(19): siRNA sense strand
gcgaaagaacucuguuaaa

SEQ ID NO: 123145 - RNA, 19 nt, Homo sapiens
  misc_RNA (1)...(19): siRNA sense strand
gcauagacgaaauggcuua

SEQ ID NO: 123146 - RNA, 19 nt, Homo sapiens
  misc_RNA (1)...(19): siRNA sense strand
ucaagaaaccugugugaug

SEQ ID NO: 123147 - RNA, 19 nt, Homo sapiens
  misc_RNA (1)...(19): siRNA sense strand
gugauggacuuuggaauau

SEQ ID NO: 123148 - RNA, 19 nt, Homo sapiens
  misc_RNA (1)...(19): siRNA sense strand
gaauaauagccuuccaauu

SEQ ID NO: 123149 - RNA, 19 nt, Homo sapiens
  misc_RNA (1)...(19): siRNA sense strand
gaaggagcacaguuauuga

SEQ ID NO: 123150 - RNA, 19 nt, Homo sapiens
  misc_RNA (1)...(19): siRNA sense strand
aaggauacaugauucuuug

SEQ ID NO: 123151 - RNA, 19 nt, Homo sapiens
  misc_RNA (1)...(19): siRNA sense strand
ggaggacguuacucaaauc

SEQ ID NO: 123152 - RNA, 19 nt, Homo sapiens
  misc_RNA (1)...(19): siRNA sense strand
agauaacacuagugccaua

SEQ ID NO: 123153 - RNA, 19 nt, Homo sapiens
  misc_RNA (1)...(19): siRNA sense strand
gaaagaaccccuccaacaa

SEQ ID NO: 123154 - RNA, 19 nt, Homo sapiens
  misc_RNA (1)...(19): siRNA sense strand
gaacaagucuggggugaau

SEQ ID NO: 123155 - RNA, 19 nt, Homo sapiens
  misc_RNA (1)...(19): siRNA sense strand
gggaaacuuuaccaaugaa

SEQ ID NO: 123156 - RNA, 19 nt, Homo sapiens
  misc_RNA (1)...(19): siRNA sense strand
gaaacuuuaccaaugaaga

SEQ ID NO: 123157 - RNA, 19 nt, Homo sapiens
  misc_RNA (1)...(19): siRNA sense strand
ggaguguaaugaacaaguc

SEQ ID NO: 123158 - RNA, 19 nt, Homo sapiens
  misc_RNA (1)...(19): siRNA sense strand
gaaagcccaagaaauugaa

SEQ ID NO: 123159 - RNA, 19 nt, Homo sapiens
  misc_RNA (1)...(19): siRNA sense strand
agaaggagcacaguuauug

SEQ ID NO: 123160 - RNA, 19 nt, Homo sapiens
  misc_RNA (1)...(19): siRNA sense strand
agggaaacuuuaccaauga

SEQ ID NO: 123161 - RNA, 19 nt, Homo sapiens
  misc_RNA (1)...(19): siRNA sense strand
ccaaaugaaagcccaagaa

SEQ ID NO: 123162 - RNA, 19 nt, Homo sapiens
  misc_RNA (1)...(19): siRNA sense strand
guggagcuaugauuucuuc

SEQ ID NO: 123163 - RNA, 19 nt, Homo sapiens
  misc_RNA (1)...(19): siRNA sense strand
cagcgaaagaacucuguua

SEQ ID NO: 123164 - RNA, 19 nt, Homo sapiens
  misc_RNA (1)...(19): siRNA sense strand
ugaagaagcauagacgaaa

SEQ ID NO: 123165 - RNA, 19 nt, Homo sapiens
  misc_RNA (1)...(19): siRNA sense strand
gaccucgacucacucacaa

SEQ ID NO: 123166 - RNA, 19 nt, Homo sapiens
  misc_RNA (1)...(19): siRNA sense strand
ugaaagcccaagaaauuga

SEQ ID NO: 123167 - RNA, 19 nt, Homo sapiens
  misc_RNA (1)...(19): siRNA sense strand
cugcaucucuccagaagug

SEQ ID NO: 123168 - RNA, 19 nt, Homo sapiens
  misc_RNA (1)...(19): siRNA sense strand
agccagaacuucccaagga

SEQ ID NO: 123169 - RNA, 19 nt, Homo sapiens
  misc_RNA (1)...(19): siRNA sense strand
gaaccgacggcugaagaaa

SEQ ID NO: 123170 - RNA, 19 nt, Homo sapiens
  misc_RNA (1)...(19): siRNA sense strand
ggauacaugauucuuugaa

SEQ ID NO: 123171 - RNA, 19 nt, Homo sapiens
  misc_RNA (1)...(19): siRNA sense strand
gcuugugaaucgagcauug

SEQ ID NO: 123172 - RNA, 19 nt, Homo sapiens
  misc_RNA (1)...(19): siRNA sense strand
uagacgaaauggcuuaagu

SEQ ID NO: 123173 - RNA, 19 nt, Homo sapiens
  misc_RNA (1)...(19): siRNA sense strand
cggaauggccaaagacuau

SEQ ID NO: 123174 - RNA, 19 nt, Homo sapiens
  misc_RNA (1)...(19): siRNA sense strand
uggaggacguuacucaaau

SEQ ID NO: 123175 - RNA, 19 nt, Homo sapiens
  misc_RNA (1)...(19): siRNA sense strand
ccucagaagcacaaguaua

SEQ ID NO: 123176 - RNA, 19 nt, Homo sapiens
  misc_RNA (1)...(19): siRNA sense strand
gaauggccaaagacuauga

SEQ ID NO: 123177 - RNA, 19 nt, Homo sapiens
  misc_RNA (1)...(19): siRNA sense strand
uaccaaugaagaugaguua

SEQ ID NO: 123178 - RNA, 19 nt, Homo sapiens
  misc_RNA (1)...(19): siRNA sense strand
auaauagccuuccaauugg

SEQ ID NO: 123179 - RNA, 19 nt, Homo sapiens
  misc_RNA (1)...(19): siRNA sense strand
agugauggacuuuggaaua

SEQ ID NO: 123180 - RNA, 19 nt, Homo sapiens
  misc_RNA (1)...(19): siRNA sense strand
gaagaaaauugcgcuaaag

SEQ ID NO: 123181 - RNA, 19 nt, Homo sapiens
  misc_RNA (1)...(19): siRNA sense strand
ugaagaaaauugcgcuaaa

SEQ ID NO: 123182 - RNA, 19 nt, Homo sapiens
  misc_RNA (1)...(19): siRNA sense strand
cagaaccacuugaagaaaa

SEQ ID NO: 123183 - RNA, 19 nt, Homo sapiens
  misc_RNA (1)...(19): siRNA sense strand
ggagugauggacuuuggaa

SEQ ID NO: 123184 - RNA, 19 nt, Homo sapiens
  misc_RNA (1)...(19): siRNA sense strand
gaauucuaaggaccauaua

SEQ ID NO: 123185 - RNA, 19 nt, Homo sapiens
  misc_RNA (1)...(19): siRNA sense strand
gaccauaagccagaacuuc

SEQ ID NO: 123186 - RNA, 19 nt, Homo sapiens
  misc_RNA (1)...(19): siRNA sense strand
ccuacuaauucaacaaaca

SEQ ID NO: 123187 - RNA, 19 nt, Homo sapiens
  misc_RNA (1)...(19): siRNA sense strand
ggccuugugccuacuaauu

SEQ ID NO: 123188 - RNA, 19 nt, Homo sapiens
  misc_RNA (1)...(19): siRNA sense strand
acugacagcccuuccuaua

SEQ ID NO: 123189 - RNA, 19 nt, Homo sapiens
  misc_RNA (1)...(19): siRNA sense strand
aagaugaguuauaccugaa

SEQ ID NO: 123190 - RNA, 19 nt, Homo sapiens
  misc_RNA (1)...(19): siRNA sense strand
ugaaucguguaguuuggaa

SEQ ID NO: 123191 - RNA, 19 nt, Homo sapiens
  misc_RNA (1)...(19): siRNA sense strand
cccaagaaauugaaagaac

SEQ ID NO: 123192 - RNA, 19 nt, Homo sapiens
  misc_RNA (1)...(19): siRNA sense strand
caaggaaagagaacgaauc

SEQ ID NO: 123193 - RNA, 19 nt, Homo sapiens
  misc_RNA (1)...(19): siRNA sense strand
gcccugacuuuaaggauac

SEQ ID NO: 123194 - RNA, 19 nt, Homo sapiens
  misc_RNA (1)...(19): siRNA sense strand
gagaauguccaagguguag

SEQ ID NO: 123195 - RNA, 19 nt, Homo sapiens
  misc_RNA (1)...(19): siRNA sense strand
gcugagauagcucgagaga

SEQ ID NO: 123196 - RNA, 19 nt, Homo sapiens
  misc_RNA (1)...(19): siRNA sense strand
guagcaaugccuucucaga

SEQ ID NO: 123197 - RNA, 19 nt, Homo sapiens
  misc_RNA (1)...(19): siRNA sense strand
cucagaagcacaaguauau

SEQ ID NO: 123198 - RNA, 19 nt, Homo sapiens
  misc_RNA (1)...(19): siRNA sense strand
ggugauuuguggagcuaug

SEQ ID NO: 123199 - RNA, 19 nt, Homo sapiens
  misc_RNA (1)...(19): siRNA sense strand
aagagcacuuggugauuug

SEQ ID NO: 123200 - RNA, 19 nt, Homo sapiens
  misc_RNA (1)...(19): siRNA sense strand
gaagaaacuggcggaaugg

SEQ ID NO: 123201 - RNA, 19 nt, Homo sapiens
  misc_RNA (1)...(19): siRNA sense strand
ccagaaccacuugaagaaa

SEQ ID NO: 123202 - RNA, 19 nt, Homo sapiens
  misc_RNA (1)...(19): siRNA sense strand
ugaauucuaaggaccauau

SEQ ID NO: 123203 - RNA, 19 nt, Homo sapiens
  misc_RNA (1)...(19): siRNA sense strand
ugacugacagcccuuccua

SEQ ID NO: 123204 - RNA, 19 nt, Homo sapiens
  misc_RNA (1)...(19): siRNA sense strand
ccaaaaugcuugugaaucg

SEQ ID NO: 123205 - RNA, 19 nt, Homo sapiens
  misc_RNA (1)...(19): siRNA sense strand
aggaugacccgaaggauga

SEQ ID NO: 123206 - RNA, 19 nt, Homo sapiens
  misc_RNA (1)...(19): siRNA sense strand
gucaacuccuggccaaaug

SEQ ID NO: 123207 - RNA, 19 nt, Homo sapiens
  misc_RNA (1)...(19): siRNA sense strand
gcggaauggccaaagacua

SEQ ID NO: 123208 - RNA, 19 nt, Homo sapiens
  misc_RNA (1)...(19): siRNA sense strand
gcagauggaugguaucaua

SEQ ID NO: 123209 - RNA, 19 nt, Homo sapiens
  misc_RNA (1)...(19): siRNA sense strand
ggaaacagaugagaaagaa

SEQ ID NO: 123210 - RNA, 19 nt, Homo sapiens
  misc_RNA (1)...(19): siRNA sense strand
gagagaagauucgagauuu

SEQ ID NO: 123211 - RNA, 19 nt, Homo sapiens
  misc_RNA (1)...(19): siRNA sense strand
gaacggagauguguaucaa

SEQ ID NO: 123212 - RNA, 19 nt, Homo sapiens
  misc_RNA (1)...(19): siRNA sense strand
cagaaacgcuuguugaaug

SEQ ID NO: 123213 - RNA, 19 nt, Homo sapiens
  misc_RNA (1)...(19): siRNA sense strand
ggagauguguaucaagaaa

SEQ ID NO: 123214 - RNA, 19 nt, Homo sapiens
  misc_RNA (1)...(19): siRNA sense strand
gaaggugaaugccacagaa

SEQ ID NO: 123215 - RNA, 19 nt, Homo sapiens
  misc_RNA (1)...(19): siRNA sense strand
aagaaaggcuggcacguuu

SEQ ID NO: 123216 - RNA, 19 nt, Homo sapiens
  misc_RNA (1)...(19): siRNA sense strand
cuaaggcucuggaauauuc

SEQ ID NO: 123217 - RNA, 19 nt, Homo sapiens
  misc_RNA (1)...(19): siRNA sense strand
guucuaaggcucuggaaua

SEQ ID NO: 123218 - RNA, 19 nt, Homo sapiens
  misc_RNA (1)...(19): siRNA sense strand
ggagagaagauucgagauu

SEQ ID NO: 123219 - RNA, 19 nt, Homo sapiens
  misc_RNA (1)...(19): siRNA sense strand
gauggaaacagaugagaaa

SEQ ID NO: 123220 - RNA, 19 nt, Homo sapiens
  misc_RNA (1)...(19): siRNA sense strand
agaccugcguggauuguua

SEQ ID NO: 123221 - RNA, 19 nt, Homo sapiens
  misc_RNA (1)...(19): siRNA sense strand
gauucgagauuuggaguuu

SEQ ID NO: 123222 - RNA, 19 nt, Homo sapiens
  misc_RNA (1)...(19): siRNA sense strand
gaugccagaucccagauuc

SEQ ID NO: 123223 - RNA, 19 nt, Homo sapiens
  misc_RNA (1)...(19): siRNA sense strand
gcagaaacgcuuguugaau

SEQ ID NO: 123224 - RNA, 19 nt, Homo sapiens
  misc_RNA (1)...(19): siRNA sense strand
caagaaaggcuggcacguu

SEQ ID NO: 123225 - RNA, 19 nt, Homo sapiens
  misc_RNA (1)...(19): siRNA sense strand
cagcagaaacgcuuguuga

SEQ ID NO: 123226 - RNA, 19 nt, Homo sapiens
  misc_RNA (1)...(19): siRNA sense strand
agagaagauucgagauuug

SEQ ID NO: 123227 - RNA, 19 nt, Homo sapiens
  misc_RNA (1)...(19): siRNA sense strand
gaaaggcuggcacguuuag

SEQ ID NO: 123228 - RNA, 19 nt, Homo sapiens
  misc_RNA (1)...(19): siRNA sense strand
ugagaaagaaggcuugaga

SEQ ID NO: 123229 - RNA, 19 nt, Homo sapiens
  misc_RNA (1)...(19): siRNA sense strand
uggaagaccugcguggauu

SEQ ID NO: 123230 - RNA, 19 nt, Homo sapiens
  misc_RNA (1)...(19): siRNA sense strand
gaaugccacagaagaaaug

SEQ ID NO: 123231 - RNA, 19 nt, Homo sapiens
  misc_RNA (1)...(19): siRNA sense strand
gcacagagagaaggugaau

SEQ ID NO: 123232 - RNA, 19 nt, Homo sapiens
  misc_RNA (1)...(19): siRNA sense strand
aaugacaaauggacaccua

SEQ ID NO: 123233 - RNA, 19 nt, Homo sapiens
  misc_RNA (1)...(19): siRNA sense strand
uagagaugauggaaacaga

SEQ ID NO: 123234 - RNA, 19 nt, Homo sapiens
  misc_RNA (1)...(19): siRNA sense strand
ugaugcaagugacauguug

SEQ ID NO: 123235 - RNA, 19 nt, Homo sapiens
  misc_RNA (1)...(19): siRNA sense strand
ucagguaaguguguuaaca

SEQ ID NO: 123236 - RNA, 19 nt, Homo sapiens
  misc_RNA (1)...(19): siRNA sense strand
acggagauguguaucaaga

SEQ ID NO: 123237 - RNA, 19 nt, Homo sapiens
  misc_RNA (1)...(19): siRNA sense strand
ggugaaugccacagaagaa

SEQ ID NO: 123238 - RNA, 19 nt, Homo sapiens
  misc_RNA (1)...(19): siRNA sense strand
gaauauuccaaugggauuu

SEQ ID NO: 123239 - RNA, 19 nt, Homo sapiens
  misc_RNA (1)...(19): siRNA sense strand
ggaacggagauguguauca

SEQ ID NO: 123240 - RNA, 19 nt, Homo sapiens
  misc_RNA (1)...(19): siRNA sense strand
uaucauagcagguucuaag

SEQ ID NO: 123241 - RNA, 19 nt, Homo sapiens
  misc_RNA (1)...(19): siRNA sense strand
cugcguggauuguuagaga

SEQ ID NO: 123242 - RNA, 19 nt, Homo sapiens
  misc_RNA (1)...(19): siRNA sense strand
uggagcagauggaugguau

SEQ ID NO: 123243 - RNA, 19 nt, Homo sapiens
  misc_RNA (1)...(19): siRNA sense strand
agaaagaaggcuugagaug

SEQ ID NO: 123244 - RNA, 19 nt, Homo sapiens
  misc_RNA (1)...(19): siRNA sense strand
gagaugauggaaacagaug

SEQ ID NO: 123245 - RNA, 19 nt, Homo sapiens
  misc_RNA (1)...(19): siRNA sense strand
ggaagaccugcguggauug

SEQ ID NO: 123246 - RNA, 19 nt, Homo sapiens
  misc_RNA (1)...(19): siRNA sense strand
ugauaaagaaucccucguu

SEQ ID NO: 123247 - RNA, 19 nt, Homo sapiens
  misc_RNA (1)...(19): siRNA sense strand
gaugguaucauagcagguu

SEQ ID NO: 123248 - RNA, 19 nt, Homo sapiens
  misc_RNA (1)...(19): siRNA sense strand
gauggaugguaucauagca

SEQ ID NO: 123249 - RNA, 19 nt, Homo sapiens
  misc_RNA (1)...(19): siRNA sense strand
gagaaagaaggcuugagau

SEQ ID NO: 123250 - RNA, 19 nt, Homo sapiens
  misc_RNA (1)...(19): siRNA sense strand
gagcagauggaugguauca

SEQ ID NO: 123251 - RNA, 19 nt, Homo sapiens
  misc_RNA (1)...(19): siRNA sense strand
gaauggcuucagagucaaa

SEQ ID NO: 123252 - RNA, 19 nt, Homo sapiens
  misc_RNA (1)...(19): siRNA sense strand
agaaacgcuuguugaaugg

SEQ ID NO: 123253 - RNA, 19 nt, Homo sapiens
  misc_RNA (1)...(19): siRNA sense strand
agaaaggcuggcacguuua

SEQ ID NO: 123254 - RNA, 19 nt, Homo sapiens
  misc_RNA (1)...(19): siRNA sense strand
ccagaucccagauucaaca

SEQ ID NO: 123255 - RNA, 19 nt, Homo sapiens
  misc_RNA (1)...(19): siRNA sense strand
gcucagggagagaagauuc

SEQ ID NO: 123256 - RNA, 19 nt, Homo sapiens
  misc_RNA (1)...(19): siRNA sense strand
gagaagauucgagauuugg

SEQ ID NO: 123257 - RNA, 19 nt, Homo sapiens
  misc_RNA (1)...(19): siRNA sense strand
uguuagagaugauggaaac

SEQ ID NO: 123258 - RNA, 19 nt, Homo sapiens
  misc_RNA (1)...(19): siRNA sense strand
gugaaugccacagaagaaa

SEQ ID NO: 123259 - RNA, 19 nt, Homo sapiens
  misc_RNA (1)...(19): siRNA sense strand
gaagaccugcguggauugu

SEQ ID NO: 123260 - RNA, 19 nt, Homo sapiens
  misc_RNA (1)...(19): siRNA sense strand
ucucccaccucuccauuca

SEQ ID NO: 123261 - RNA, 19 nt, Homo sapiens
  misc_RNA (1)...(19): siRNA sense strand
ucccaccucuccauucaug

SEQ ID NO: 123262 - RNA, 19 nt, Homo sapiens
  misc_RNA (1)...(19): siRNA sense strand
gauuuggaguuuugucuug

SEQ ID NO: 123263 - RNA, 19 nt, Homo sapiens
  misc_RNA (1)...(19): siRNA sense strand
uggaaacagaugagaaaga

SEQ ID NO: 123264 - RNA, 19 nt, Homo sapiens
  misc_RNA (1)...(19): siRNA sense strand
acagagagaaggugaaugc

SEQ ID NO: 123265 - RNA, 19 nt, Homo sapiens
  misc_RNA (1)...(19): siRNA sense strand
caacagcagaaacgcuugu

SEQ ID NO: 123266 - RNA, 19 nt, Homo sapiens
  misc_RNA (1)...(19): siRNA sense strand
gaugagaaagaaggcuuga

SEQ ID NO: 123267 - RNA, 19 nt, Homo sapiens
  misc_RNA (1)...(19): siRNA sense strand
agguaaguguguuaacaga

SEQ ID NO: 123268 - RNA, 19 nt, Homo sapiens
  misc_RNA (1)...(19): siRNA sense strand
ugaaugccacagaagaaau

SEQ ID NO: 123269 - RNA, 19 nt, Homo sapiens
  misc_RNA (1)...(19): siRNA sense strand
uucuaaggcucuggaauau

SEQ ID NO: 123270 - RNA, 19 nt, Homo sapiens
  misc_RNA (1)...(19): siRNA sense strand
agauguguaucaagaaagg

SEQ ID NO: 123271 - RNA, 19 nt, Homo sapiens
  misc_RNA (1)...(19): siRNA sense strand
uggcuucagagucaaauga

SEQ ID NO: 123272 - RNA, 19 nt, Homo sapiens
  misc_RNA (1)...(19): siRNA sense strand
uugaagagcacagagagaa

SEQ ID NO: 123273 - RNA, 19 nt, Homo sapiens
  misc_RNA (1)...(19): siRNA sense strand
gcuggcacguuuagaaaau

SEQ ID NO: 123274 - RNA, 19 nt, Homo sapiens
  misc_RNA (1)...(19): siRNA sense strand
gcagauggaugguaucaua

SEQ ID NO: 123275 - RNA, 19 nt, Homo sapiens
  misc_RNA (1)...(19): siRNA sense strand
ggaaacagaugagaaagaa

SEQ ID NO: 123276 - RNA, 19 nt, Homo sapiens
  misc_RNA (1)...(19): siRNA sense strand
gagagaagauucgagauuu

SEQ ID NO: 123277 - RNA, 19 nt, Homo sapiens
  misc_RNA (1)...(19): siRNA sense strand
gaacggagauguguaucaa

SEQ ID NO: 123278 - RNA, 19 nt, Homo sapiens
  misc_RNA (1)...(19): siRNA sense strand
cagaaacgcuuguugaaug

SEQ ID NO: 123279 - RNA, 19 nt, Homo sapiens
  misc_RNA (1)...(19): siRNA sense strand
ggagauguguaucaagaaa

SEQ ID NO: 123280 - RNA, 19 nt, Homo sapiens
  misc_RNA (1)...(19): siRNA sense strand
gaaggugaaugccacagaa

SEQ ID NO: 123281 - RNA, 19 nt, Homo sapiens
  misc_RNA (1)...(19): siRNA sense strand
aagaaaggcuggcacguuu

SEQ ID NO: 123282 - RNA, 19 nt, Homo sapiens
  misc_RNA (1)...(19): siRNA sense strand
cuaaggcucuggaauauuc

SEQ ID NO: 123283 - RNA, 19 nt, Homo sapiens
  misc_RNA (1)...(19): siRNA sense strand
guucuaaggcucuggaaua

SEQ ID NO: 123284 - RNA, 19 nt, Homo sapiens
  misc_RNA (1)...(19): siRNA sense strand
ggagagaagauucgagauu

SEQ ID NO: 123285 - RNA, 19 nt, Homo sapiens
  misc_RNA (1)...(19): siRNA sense strand
gauggaaacagaugagaaa

SEQ ID NO: 123286 - RNA, 19 nt, Homo sapiens
  misc_RNA (1)...(19): siRNA sense strand
agaccugcguggauuguua

SEQ ID NO: 123287 - RNA, 19 nt, Homo sapiens
  misc_RNA (1)...(19): siRNA sense strand
gauucgagauuuggaguuu

SEQ ID NO: 123288 - RNA, 19 nt, Homo sapiens
  misc_RNA (1)...(19): siRNA sense strand
gaugccagaucccagauuc

SEQ ID NO: 123289 - RNA, 19 nt, Homo sapiens
  misc_RNA (1)...(19): siRNA sense strand
gcagaaacgcuuguugaau

SEQ ID NO: 123290 - RNA, 19 nt, Homo sapiens
  misc_RNA (1)...(19): siRNA sense strand
caagaaaggcuggcacguu

SEQ ID NO: 123291 - RNA, 19 nt, Homo sapiens
  misc_RNA (1)...(19): siRNA sense strand
cagcagaaacgcuuguuga

SEQ ID NO: 123292 - RNA, 19 nt, Homo sapiens
  misc_RNA (1)...(19): siRNA sense strand
agagaagauucgagauuug

SEQ ID NO: 123293 - RNA, 19 nt, Homo sapiens
  misc_RNA (1)...(19): siRNA sense strand
gaaaggcuggcacguuuag

SEQ ID NO: 123294 - RNA, 19 nt, Homo sapiens
  misc_RNA (1)...(19): siRNA sense strand
ugagaaagaaggcuugaga

SEQ ID NO: 123295 - RNA, 19 nt, Homo sapiens
  misc_RNA (1)...(19): siRNA sense strand
uggaagaccugcguggauu

SEQ ID NO: 123296 - RNA, 19 nt, Homo sapiens
  misc_RNA (1)...(19): siRNA sense strand
gaaugccacagaagaaaug

SEQ ID NO: 123297 - RNA, 19 nt, Homo sapiens
  misc_RNA (1)...(19): siRNA sense strand
gcacagagagaaggugaau

SEQ ID NO: 123298 - RNA, 19 nt, Homo sapiens
  misc_RNA (1)...(19): siRNA sense strand
aaugacaaauggacaccua

SEQ ID NO: 123299 - RNA, 19 nt, Homo sapiens
  misc_RNA (1)...(19): siRNA sense strand
uagagaugauggaaacaga

SEQ ID NO: 123300 - RNA, 19 nt, Homo sapiens
  misc_RNA (1)...(19): siRNA sense strand
ugaugcaagugacauguug

SEQ ID NO: 123301 - RNA, 19 nt, Homo sapiens
  misc_RNA (1)...(19): siRNA sense strand
ucagguaaguguguuaaca

SEQ ID NO: 123302 - RNA, 19 nt, Homo sapiens
  misc_RNA (1)...(19): siRNA sense strand
acggagauguguaucaaga

SEQ ID NO: 123303 - RNA, 19 nt, Homo sapiens
  misc_RNA (1)...(19): siRNA sense strand
ggugaaugccacagaagaa

SEQ ID NO: 123304 - RNA, 19 nt, Homo sapiens
  misc_RNA (1)...(19): siRNA sense strand
gaauauuccaaugggauuu

SEQ ID NO: 123305 - RNA, 19 nt, Homo sapiens
  misc_RNA (1)...(19): siRNA sense strand
ggaacggagauguguauca

SEQ ID NO: 123306 - RNA, 19 nt, Homo sapiens
  misc_RNA (1)...(19): siRNA sense strand
uaucauagcagguucuaag

SEQ ID NO: 123307 - RNA, 19 nt, Homo sapiens
  misc_RNA (1)...(19): siRNA sense strand
cugcguggauuguuagaga

SEQ ID NO: 123308 - RNA, 19 nt, Homo sapiens
  misc_RNA (1)...(19): siRNA sense strand
uggagcagauggaugguau

SEQ ID NO: 123309 - RNA, 19 nt, Homo sapiens
  misc_RNA (1)...(19): siRNA sense strand
agaaagaaggcuugagaug

SEQ ID NO: 123310 - RNA, 19 nt, Homo sapiens
  misc_RNA (1)...(19): siRNA sense strand
gagaugauggaaacagaug

SEQ ID NO: 123311 - RNA, 19 nt, Homo sapiens
  misc_RNA (1)...(19): siRNA sense strand
ggaagaccugcguggauug

SEQ ID NO: 123312 - RNA, 19 nt, Homo sapiens
  misc_RNA (1)...(19): siRNA sense strand
ugauaaagaaucccucguu

SEQ ID NO: 123313 - RNA, 19 nt, Homo sapiens
  misc_RNA (1)...(19): siRNA sense strand
gaugguaucauagcagguu

SEQ ID NO: 123314 - RNA, 19 nt, Homo sapiens
  misc_RNA (1)...(19): siRNA sense strand
gauggaugguaucauagca

SEQ ID NO: 123315 - RNA, 19 nt, Homo sapiens
  misc_RNA (1)...(19): siRNA sense strand
gagaaagaaggcuugagau

SEQ ID NO: 123316 - RNA, 19 nt, Homo sapiens
  misc_RNA (1)...(19): siRNA sense strand
gagcagauggaugguauca

SEQ ID NO: 123317 - RNA, 19 nt, Homo sapiens
  misc_RNA (1)...(19): siRNA sense strand
gaauggcuucagagucaaa

SEQ ID NO: 123318 - RNA, 19 nt, Homo sapiens
  misc_RNA (1)...(19): siRNA sense strand
agaaacgcuuguugaaugg

SEQ ID NO: 123319 - RNA, 19 nt, Homo sapiens
  misc_RNA (1)...(19): siRNA sense strand
agaaaggcuggcacguuua

SEQ ID NO: 123320 - RNA, 19 nt, Homo sapiens
  misc_RNA (1)...(19): siRNA sense strand
ccagaucccagauucaaca

SEQ ID NO: 123321 - RNA, 19 nt, Homo sapiens
  misc_RNA (1)...(19): siRNA sense strand
gcucagggagagaagauuc

SEQ ID NO: 123322 - RNA, 19 nt, Homo sapiens
  misc_RNA (1)...(19): siRNA sense strand
gagaagauucgagauuugg

SEQ ID NO: 123323 - RNA, 19 nt, Homo sapiens
  misc_RNA (1)...(19): siRNA sense strand
uguuagagaugauggaaac

SEQ ID NO: 123324 - RNA, 19 nt, Homo sapiens
  misc_RNA (1)...(19): siRNA sense strand
gugaaugccacagaagaaa

SEQ ID NO: 123325 - RNA, 19 nt, Homo sapiens
  misc_RNA (1)...(19): siRNA sense strand
gaagaccugcguggauugu

SEQ ID NO: 123326 - RNA, 19 nt, Homo sapiens
  misc_RNA (1)...(19): siRNA sense strand
ucucccaccucuccauuca

SEQ ID NO: 123327 - RNA, 19 nt, Homo sapiens
  misc_RNA (1)...(19): siRNA sense strand
ucccaccucuccauucaug

SEQ ID NO: 123328 - RNA, 19 nt, Homo sapiens
  misc_RNA (1)...(19): siRNA sense strand
gauuuggaguuuugucuug

SEQ ID NO: 123329 - RNA, 19 nt, Homo sapiens
  misc_RNA (1)...(19): siRNA sense strand
uggaaacagaugagaaaga

SEQ ID NO: 123330 - RNA, 19 nt, Homo sapiens
  misc_RNA (1)...(19): siRNA sense strand
acagagagaaggugaaugc

SEQ ID NO: 123331 - RNA, 19 nt, Homo sapiens
  misc_RNA (1)...(19): siRNA sense strand
caacagcagaaacgcuugu

SEQ ID NO: 123332 - RNA, 19 nt, Homo sapiens
  misc_RNA (1)...(19): siRNA sense strand
gaugagaaagaaggcuuga

SEQ ID NO: 123333 - RNA, 19 nt, Homo sapiens
  misc_RNA (1)...(19): siRNA sense strand
agguaaguguguuaacaga

SEQ ID NO: 123334 - RNA, 19 nt, Homo sapiens
  misc_RNA (1)...(19): siRNA sense strand
ugaaugccacagaagaaau

SEQ ID NO: 123335 - RNA, 19 nt, Homo sapiens
  misc_RNA (1)...(19): siRNA sense strand
uucuaaggcucuggaauau

SEQ ID NO: 123336 - RNA, 19 nt, Homo sapiens
  misc_RNA (1)...(19): siRNA sense strand
agauguguaucaagaaagg

SEQ ID NO: 123337 - RNA, 19 nt, Homo sapiens
  misc_RNA (1)...(19): siRNA sense strand
uggcuucagagucaaauga

SEQ ID NO: 123338 - RNA, 19 nt, Homo sapiens
  misc_RNA (1)...(19): siRNA sense strand
uugaagagcacagagagaa

SEQ ID NO: 123339 - RNA, 19 nt, Homo sapiens
  misc_RNA (1)...(19): siRNA sense strand
gcuggcacguuuagaaaau

SEQ ID NO: 123340 - RNA, 19 nt, Homo sapiens
  misc_RNA (1)...(19): siRNA sense strand
gaguuaagcugauaaauga

SEQ ID NO: 123341 - RNA, 19 nt, Homo sapiens
  misc_RNA (1)...(19): siRNA sense strand
ggacagaguuaagcugaua

SEQ ID NO: 123342 - RNA, 19 nt, Homo sapiens
  misc_RNA (1)...(19): siRNA sense strand
uuagagaacucaaccaaua

SEQ ID NO: 123343 - RNA, 19 nt, Homo sapiens
  misc_RNA (1)...(19): siRNA sense strand
acagcaagccuuuguauuu

SEQ ID NO: 123344 - RNA, 19 nt, Homo sapiens
  misc_RNA (1)...(19): siRNA sense strand
cgaacuauuuccuccagua

SEQ ID NO: 123345 - RNA, 19 nt, Homo sapiens
  misc_RNA (1)...(19): siRNA sense strand
cagcaagccuuuguauuug

SEQ ID NO: 123346 - RNA, 19 nt, Homo sapiens
  misc_RNA (1)...(19): siRNA sense strand
gcaagcuguuugucuuuga

SEQ ID NO: 123347 - RNA, 19 nt, Homo sapiens
  misc_RNA (1)...(19): siRNA sense strand
caaccgcaacgaacuauuu

SEQ ID NO: 123348 - RNA, 19 nt, Homo sapiens
  misc_RNA (1)...(19): siRNA sense strand
uaaacgaggucaguucaga

SEQ ID NO: 123349 - RNA, 19 nt, Homo sapiens
  misc_RNA (1)...(19): siRNA sense strand
agaggaagccugugagaaa

SEQ ID NO: 123350 - RNA, 19 nt, Homo sapiens
  misc_RNA (1)...(19): siRNA sense strand
gaacaugagcgagcgaguu

SEQ ID NO: 123351 - RNA, 19 nt, Homo sapiens
  misc_RNA (1)...(19): siRNA sense strand
gaagaggaagccugugaga

SEQ ID NO: 123352 - RNA, 19 nt, Homo sapiens
  misc_RNA (1)...(19): siRNA sense strand
aaaugcagcugccgaguca

SEQ ID NO: 123353 - RNA, 19 nt, Homo sapiens
  misc_RNA (1)...(19): siRNA sense strand
gaacuauuuccuccaguau

SEQ ID NO: 123354 - RNA, 19 nt, Homo sapiens
  misc_RNA (1)...(19): siRNA sense strand
ggaaguguuuguuggaaaa

SEQ ID NO: 123355 - RNA, 19 nt, Homo sapiens
  misc_RNA (1)...(19): siRNA sense strand
guauuuggccagaacauga

SEQ ID NO: 123356 - RNA, 19 nt, Homo sapiens
  misc_RNA (1)...(19): siRNA sense strand
acuauuuccuccaguauau

SEQ ID NO: 123357 - RNA, 19 nt, Homo sapiens
  misc_RNA (1)...(19): siRNA sense strand
agaguuaagcugauaaaug

SEQ ID NO: 123358 - RNA, 19 nt, Homo sapiens
  misc_RNA (1)...(19): siRNA sense strand
gcggaaguguuuguuggaa

SEQ ID NO: 123359 - RNA, 19 nt, Homo sapiens
  misc_RNA (1)...(19): siRNA sense strand
ggagagcaauguguuacag

SEQ ID NO: 123360 - RNA, 19 nt, Homo sapiens
  misc_RNA (1)...(19): siRNA sense strand
ccacacagcaagccuuugu

SEQ ID NO: 123361 - RNA, 19 nt, Homo sapiens
  misc_RNA (1)...(19): siRNA sense strand
cggaaguguuuguuggaaa

SEQ ID NO: 123362 - RNA, 19 nt, Homo sapiens
  misc_RNA (1)...(19): siRNA sense strand
ggagaaagagccccagaaa

SEQ ID NO: 123363 - RNA, 19 nt, Homo sapiens
  misc_RNA (1)...(19): siRNA sense strand
gcaauguguuacagaugca

SEQ ID NO: 123364 - RNA, 19 nt, Homo sapiens
  misc_RNA (1)...(19): siRNA sense strand
gaggaagccugugagaaaa

SEQ ID NO: 123365 - RNA, 19 nt, Homo sapiens
  misc_RNA (1)...(19): siRNA sense strand
gagcaauguguuacagaug

SEQ ID NO: 123366 - RNA, 19 nt, Homo sapiens
  misc_RNA (1)...(19): siRNA sense strand
gcucagacucaaugacaug

SEQ ID NO: 123367 - RNA, 19 nt, Homo sapiens
  misc_RNA (1)...(19): siRNA sense strand
guuaagcugauaaaugaga

SEQ ID NO: 123368 - RNA, 19 nt, Homo sapiens
  misc_RNA (1)...(19): siRNA sense strand
guccagcaaugccucugaa

SEQ ID NO: 123369 - RNA, 19 nt, Homo sapiens
  misc_RNA (1)...(19): siRNA sense strand
agagcaauguguuacagau

SEQ ID NO: 123370 - RNA, 19 nt, Homo sapiens
  misc_RNA (1)...(19): siRNA sense strand
acacagcaagccuuuguau

SEQ ID NO: 123371 - RNA, 19 nt, Homo sapiens
  misc_RNA (1)...(19): siRNA sense strand
gaugacggcacacuacagu

SEQ ID NO: 123372 - RNA, 19 nt, Homo sapiens
  misc_RNA (1)...(19): siRNA sense strand
gggcugcucagacucaaug

SEQ ID NO: 123373 - RNA, 19 nt, Homo sapiens
  misc_RNA (1)...(19): siRNA sense strand
gugcaagcuguuugucuuu

SEQ ID NO: 123374 - RNA, 19 nt, Homo sapiens
  misc_RNA (1)...(19): siRNA sense strand
cgacgccuccagcaacaaa

SEQ ID NO: 123375 - RNA, 19 nt, Homo sapiens
  misc_RNA (1)...(19): siRNA sense strand
gagagcaauguguuacaga

SEQ ID NO: 123376 - RNA, 19 nt, Homo sapiens
  misc_RNA (1)...(19): siRNA sense strand
aacaugagcgagcgaguuu

SEQ ID NO: 123377 - RNA, 19 nt, Homo sapiens
  misc_RNA (1)...(19): siRNA sense strand
uacaagcuccgcagccaaa

SEQ ID NO: 123378 - RNA, 19 nt, Homo sapiens
  misc_RNA (1)...(19): siRNA sense strand
ccagcaaugccucugaaga

SEQ ID NO: 123379 - RNA, 19 nt, Homo sapiens
  misc_RNA (1)...(19): siRNA sense strand
ggcggagagcaauguguua

SEQ ID NO: 123380 - RNA, 19 nt, Homo sapiens
  misc_RNA (1)...(19): siRNA sense strand
gagaaagagccccagaaaa

SEQ ID NO: 123381 - RNA, 19 nt, Homo sapiens
  misc_RNA (1)...(19): siRNA sense strand
guauuugggcagaacuuga

SEQ ID NO: 123382 - RNA, 19 nt, Homo sapiens
  misc_RNA (1)...(19): siRNA sense strand
agugcaagcuguuugucuu

SEQ ID NO: 123383 - RNA, 19 nt, Homo sapiens
  misc_RNA (1)...(19): siRNA sense strand
gggacagaguuaagcugau

SEQ ID NO: 123384 - RNA, 19 nt, Homo sapiens
  misc_RNA (1)...(19): siRNA sense strand
gacagaguuaagcugauaa

SEQ ID NO: 123385 - RNA, 19 nt, Homo sapiens
  misc_RNA (1)...(19): siRNA sense strand
guuuagagaacucaaccaa

SEQ ID NO: 123386 - RNA, 19 nt, Homo sapiens
  misc_RNA (1)...(19): siRNA sense strand
ggaggaggcggagagcaau

SEQ ID NO: 123387 - RNA, 19 nt, Homo sapiens
  misc_RNA (1)...(19): siRNA sense strand
ucagaugccaacagggaaa

SEQ ID NO: 123388 - RNA, 19 nt, Homo sapiens
  misc_RNA (1)...(19): siRNA sense strand
caagccagaagcccaagga

SEQ ID NO: 123389 - RNA, 19 nt, Homo sapiens
  misc_RNA (1)...(19): siRNA sense strand
gagaacucaaccaauagug

SEQ ID NO: 123390 - RNA, 19 nt, Homo sapiens
  misc_RNA (1)...(19): siRNA sense strand
cugaagaggaagccuguga

SEQ ID NO: 123391 - RNA, 19 nt, Homo sapiens
  misc_RNA (1)...(19): siRNA sense strand
aagccgacauggagaaugc

SEQ ID NO: 123392 - RNA, 19 nt, Homo sapiens
  misc_RNA (1)...(19): siRNA sense strand
uagagaacucaaccaauag

SEQ ID NO: 123393 - RNA, 19 nt, Homo sapiens
  misc_RNA (1)...(19): siRNA sense strand
gaguuaagcugauaaauga

SEQ ID NO: 123394 - RNA, 19 nt, Homo sapiens
  misc_RNA (1)...(19): siRNA sense strand
ggacagaguuaagcugaua

SEQ ID NO: 123395 - RNA, 19 nt, Homo sapiens
  misc_RNA (1)...(19): siRNA sense strand
uuagagaacucaaccaaua

SEQ ID NO: 123396 - RNA, 19 nt, Homo sapiens
  misc_RNA (1)...(19): siRNA sense strand
acagcaagccuuuguauuu

SEQ ID NO: 123397 - RNA, 19 nt, Homo sapiens
  misc_RNA (1)...(19): siRNA sense strand
cgaacuauuuccuccagua

SEQ ID NO: 123398 - RNA, 19 nt, Homo sapiens
  misc_RNA (1)...(19): siRNA sense strand
cagcaagccuuuguauuug

SEQ ID NO: 123399 - RNA, 19 nt, Homo sapiens
  misc_RNA (1)...(19): siRNA sense strand
gcaagcuguuugucuuuga

SEQ ID NO: 123400 - RNA, 19 nt, Homo sapiens
  misc_RNA (1)...(19): siRNA sense strand
caaccgcaacgaacuauuu

SEQ ID NO: 123401 - RNA, 19 nt, Homo sapiens
  misc_RNA (1)...(19): siRNA sense strand
uaaacgaggucaguucaga

SEQ ID NO: 123402 - RNA, 19 nt, Homo sapiens
  misc_RNA (1)...(19): siRNA sense strand
agaggaagccugugagaaa

SEQ ID NO: 123403 - RNA, 19 nt, Homo sapiens
  misc_RNA (1)...(19): siRNA sense strand
gaacaugagcgagcgaguu

SEQ ID NO: 123404 - RNA, 19 nt, Homo sapiens
  misc_RNA (1)...(19): siRNA sense strand
gaagaggaagccugugaga

SEQ ID NO: 123405 - RNA, 19 nt, Homo sapiens
  misc_RNA (1)...(19): siRNA sense strand
aaaugcagcugccgaguca

SEQ ID NO: 123406 - RNA, 19 nt, Homo sapiens
  misc_RNA (1)...(19): siRNA sense strand
gaacuauuuccuccaguau

SEQ ID NO: 123407 - RNA, 19 nt, Homo sapiens
  misc_RNA (1)...(19): siRNA sense strand
ggaaguguuuguuggaaaa

SEQ ID NO: 123408 - RNA, 19 nt, Homo sapiens
  misc_RNA (1)...(19): siRNA sense strand
guauuuggccagaacauga

SEQ ID NO: 123409 - RNA, 19 nt, Homo sapiens
  misc_RNA (1)...(19): siRNA sense strand
acuauuuccuccaguauau

SEQ ID NO: 123410 - RNA, 19 nt, Homo sapiens
  misc_RNA (1)...(19): siRNA sense strand
agaguuaagcugauaaaug

SEQ ID NO: 123411 - RNA, 19 nt, Homo sapiens
  misc_RNA (1)...(19): siRNA sense strand
gcggaaguguuuguuggaa

SEQ ID NO: 123412 - RNA, 19 nt, Homo sapiens
  misc_RNA (1)...(19): siRNA sense strand
ggagagcaauguguuacag

SEQ ID NO: 123413 - RNA, 19 nt, Homo sapiens
  misc_RNA (1)...(19): siRNA sense strand
ccacacagcaagccuuugu

SEQ ID NO: 123414 - RNA, 19 nt, Homo sapiens
  misc_RNA (1)...(19): siRNA sense strand
cggaaguguuuguuggaaa

SEQ ID NO: 123415 - RNA, 19 nt, Homo sapiens
  misc_RNA (1)...(19): siRNA sense strand
ggagaaagagccccagaaa

SEQ ID NO: 123416 - RNA, 19 nt, Homo sapiens
  misc_RNA (1)...(19): siRNA sense strand
gcaauguguuacagaugca

SEQ ID NO: 123417 - RNA, 19 nt, Homo sapiens
  misc_RNA (1)...(19): siRNA sense strand
gaggaagccugugagaaaa

SEQ ID NO: 123418 - RNA, 19 nt, Homo sapiens
  misc_RNA (1)...(19): siRNA sense strand
gagcaauguguuacagaug

SEQ ID NO: 123419 - RNA, 19 nt, Homo sapiens
  misc_RNA (1)...(19): siRNA sense strand
gcucagacucaaugacaug

SEQ ID NO: 123420 - RNA, 19 nt, Homo sapiens
  misc_RNA (1)...(19): siRNA sense strand
guuaagcugauaaaugaga

SEQ ID NO: 123421 - RNA, 19 nt, Homo sapiens
  misc_RNA (1)...(19): siRNA sense strand
guccagcaaugccucugaa

SEQ ID NO: 123422 - RNA, 19 nt, Homo sapiens
  misc_RNA (1)...(19): siRNA sense strand
agagcaauguguuacagau

SEQ ID NO: 123423 - RNA, 19 nt, Homo sapiens
  misc_RNA (1)...(19): siRNA sense strand
acacagcaagccuuuguau

SEQ ID NO: 123424 - RNA, 19 nt, Homo sapiens
  misc_RNA (1)...(19): siRNA sense strand
gaugacggcacacuacagu

SEQ ID NO: 123425 - RNA, 19 nt, Homo sapiens
  misc_RNA (1)...(19): siRNA sense strand
gggcugcucagacucaaug

SEQ ID NO: 123426 - RNA, 19 nt, Homo sapiens
  misc_RNA (1)...(19): siRNA sense strand
gugcaagcuguuugucuuu

SEQ ID NO: 123427 - RNA, 19 nt, Homo sapiens
  misc_RNA (1)...(19): siRNA sense strand
cgacgccuccagcaacaaa

SEQ ID NO: 123428 - RNA, 19 nt, Homo sapiens
  misc_RNA (1)...(19): siRNA sense strand
gagagcaauguguuacaga

SEQ ID NO: 123429 - RNA, 19 nt, Homo sapiens
  misc_RNA (1)...(19): siRNA sense strand
aacaugagcgagcgaguuu

SEQ ID NO: 123430 - RNA, 19 nt, Homo sapiens
  misc_RNA (1)...(19): siRNA sense strand
uacaagcuccgcagccaaa

SEQ ID NO: 123431 - RNA, 19 nt, Homo sapiens
  misc_RNA (1)...(19): siRNA sense strand
ccagcaaugccucugaaga

SEQ ID NO: 123432 - RNA, 19 nt, Homo sapiens
  misc_RNA (1)...(19): siRNA sense strand
ggcggagagcaauguguua

SEQ ID NO: 123433 - RNA, 19 nt, Homo sapiens
  misc_RNA (1)...(19): siRNA sense strand
gagaaagagccccagaaaa

SEQ ID NO: 123434 - RNA, 19 nt, Homo sapiens
  misc_RNA (1)...(19): siRNA sense strand
guauuugggcagaacuuga

SEQ ID NO: 123435 - RNA, 19 nt, Homo sapiens
  misc_RNA (1)...(19): siRNA sense strand
agugcaagcuguuugucuu

SEQ ID NO: 123436 - RNA, 19 nt, Homo sapiens
  misc_RNA (1)...(19): siRNA sense strand
gggacagaguuaagcugau

SEQ ID NO: 123437 - RNA, 19 nt, Homo sapiens
  misc_RNA (1)...(19): siRNA sense strand
gacagaguuaagcugauaa

SEQ ID NO: 123438 - RNA, 19 nt, Homo sapiens
  misc_RNA (1)...(19): siRNA sense strand
guuuagagaacucaaccaa

SEQ ID NO: 123439 - RNA, 19 nt, Homo sapiens
  misc_RNA (1)...(19): siRNA sense strand
ggaggaggcggagagcaau

SEQ ID NO: 123440 - RNA, 19 nt, Homo sapiens
  misc_RNA (1)...(19): siRNA sense strand
ucagaugccaacagggaaa

SEQ ID NO: 123441 - RNA, 19 nt, Homo sapiens
  misc_RNA (1)...(19): siRNA sense strand
caagccagaagcccaagga

SEQ ID NO: 123442 - RNA, 19 nt, Homo sapiens
  misc_RNA (1)...(19): siRNA sense strand
gagaacucaaccaauagug

SEQ ID NO: 123443 - RNA, 19 nt, Homo sapiens
  misc_RNA (1)...(19): siRNA sense strand
cugaagaggaagccuguga

SEQ ID NO: 123444 - RNA, 19 nt, Homo sapiens
  misc_RNA (1)...(19): siRNA sense strand
aagccgacauggagaaugc

SEQ ID NO: 123445 - RNA, 19 nt, Homo sapiens
  misc_RNA (1)...(19): siRNA sense strand
uagagaacucaaccaauag

SEQ ID NO: 123446 - RNA, 19 nt, Homo sapiens
  misc_RNA (1)...(19): siRNA sense strand
cgaacuauuuccuccagua

SEQ ID NO: 123447 - RNA, 19 nt, Homo sapiens
  misc_RNA (1)...(19): siRNA sense strand
caaccgcaacgaacuauuu

SEQ ID NO: 123448 - RNA, 19 nt, Homo sapiens
  misc_RNA (1)...(19): siRNA sense strand
gaacuauuuccuccaguau

SEQ ID NO: 123449 - RNA, 19 nt, Homo sapiens
  misc_RNA (1)...(19): siRNA sense strand
acuauuuccuccaguauau

SEQ ID NO: 123450 - RNA, 19 nt, Homo sapiens
  misc_RNA (1)...(19): siRNA sense strand
gaguuaagcugauaaauga

SEQ ID NO: 123451 - RNA, 19 nt, Homo sapiens
  misc_RNA (1)...(19): siRNA sense strand
ggacagaguuaagcugaua

SEQ ID NO: 123452 - RNA, 19 nt, Homo sapiens
  misc_RNA (1)...(19): siRNA sense strand
uuagagaacucaaccaaua

SEQ ID NO: 123453 - RNA, 19 nt, Homo sapiens
  misc_RNA (1)...(19): siRNA sense strand
acagcaagccuuuguauuu

SEQ ID NO: 123454 - RNA, 19 nt, Homo sapiens
  misc_RNA (1)...(19): siRNA sense strand
cgaacuauuuccuccagua

SEQ ID NO: 123455 - RNA, 19 nt, Homo sapiens
  misc_RNA (1)...(19): siRNA sense strand
cagcaagccuuuguauuug

SEQ ID NO: 123456 - RNA, 19 nt, Homo sapiens
  misc_RNA (1)...(19): siRNA sense strand
gcaagcuguuugucuuuga

SEQ ID NO: 123457 - RNA, 19 nt, Homo sapiens
  misc_RNA (1)...(19): siRNA sense strand
caaccgcaacgaacuauuu

SEQ ID NO: 123458 - RNA, 19 nt, Homo sapiens
  misc_RNA (1)...(19): siRNA sense strand
uaaacgaggucaguucaga

SEQ ID NO: 123459 - RNA, 19 nt, Homo sapiens
  misc_RNA (1)...(19): siRNA sense strand
agaggaagccugugagaaa

SEQ ID NO: 123460 - RNA, 19 nt, Homo sapiens
  misc_RNA (1)...(19): siRNA sense strand
gaacaugagcgagcgaguu

SEQ ID NO: 123461 - RNA, 19 nt, Homo sapiens
  misc_RNA (1)...(19): siRNA sense strand
gaagaggaagccugugaga

SEQ ID NO: 123462 - RNA, 19 nt, Homo sapiens
  misc_RNA (1)...(19): siRNA sense strand
aaaugcagcugccgaguca

SEQ ID NO: 123463 - RNA, 19 nt, Homo sapiens
  misc_RNA (1)...(19): siRNA sense strand
gaacuauuuccuccaguau

SEQ ID NO: 123464 - RNA, 19 nt, Homo sapiens
  misc_RNA (1)...(19): siRNA sense strand
ggaaguguuuguuggaaaa

SEQ ID NO: 123465 - RNA, 19 nt, Homo sapiens
  misc_RNA (1)...(19): siRNA sense strand
guauuuggccagaacauga

SEQ ID NO: 123466 - RNA, 19 nt, Homo sapiens
  misc_RNA (1)...(19): siRNA sense strand
acuauuuccuccaguauau

SEQ ID NO: 123467 - RNA, 19 nt, Homo sapiens
  misc_RNA (1)...(19): siRNA sense strand
agaguuaagcugauaaaug

SEQ ID NO: 123468 - RNA, 19 nt, Homo sapiens
  misc_RNA (1)...(19): siRNA sense strand
gcggaaguguuuguuggaa

SEQ ID NO: 123469 - RNA, 19 nt, Homo sapiens
  misc_RNA (1)...(19): siRNA sense strand
ggagagcaauguguuacag

SEQ ID NO: 123470 - RNA, 19 nt, Homo sapiens
  misc_RNA (1)...(19): siRNA sense strand
ccacacagcaagccuuugu

SEQ ID NO: 123471 - RNA, 19 nt, Homo sapiens
  misc_RNA (1)...(19): siRNA sense strand
cggaaguguuuguuggaaa

SEQ ID NO: 123472 - RNA, 19 nt, Homo sapiens
  misc_RNA (1)...(19): siRNA sense strand
ggagaaagagccccagaaa

SEQ ID NO: 123473 - RNA, 19 nt, Homo sapiens
  misc_RNA (1)...(19): siRNA sense strand
gcaauguguuacagaugca

SEQ ID NO: 123474 - RNA, 19 nt, Homo sapiens
  misc_RNA (1)...(19): siRNA sense strand
gaggaagccugugagaaaa

SEQ ID NO: 123475 - RNA, 19 nt, Homo sapiens
  misc_RNA (1)...(19): siRNA sense strand
gagcaauguguuacagaug

SEQ ID NO: 123476 - RNA, 19 nt, Homo sapiens
  misc_RNA (1)...(19): siRNA sense strand
gcucagacucaaugacaug

SEQ ID NO: 123477 - RNA, 19 nt, Homo sapiens
  misc_RNA (1)...(19): siRNA sense strand
guuaagcugauaaaugaga

SEQ ID NO: 123478 - RNA, 19 nt, Homo sapiens
  misc_RNA (1)...(19): siRNA sense strand
guccagcaaugccucugaa

SEQ ID NO: 123479 - RNA, 19 nt, Homo sapiens
  misc_RNA (1)...(19): siRNA sense strand
agagcaauguguuacagau

SEQ ID NO: 123480 - RNA, 19 nt, Homo sapiens
  misc_RNA (1)...(19): siRNA sense strand
acacagcaagccuuuguau

SEQ ID NO: 123481 - RNA, 19 nt, Homo sapiens
  misc_RNA (1)...(19): siRNA sense strand
gaugacggcacacuacagu

SEQ ID NO: 123482 - RNA, 19 nt, Homo sapiens
  misc_RNA (1)...(19): siRNA sense strand
gggcugcucagacucaaug

SEQ ID NO: 123483 - RNA, 19 nt, Homo sapiens
  misc_RNA (1)...(19): siRNA sense strand
gugcaagcuguuugucuuu

SEQ ID NO: 123484 - RNA, 19 nt, Homo sapiens
  misc_RNA (1)...(19): siRNA sense strand
cgacgccuccagcaacaaa

SEQ ID NO: 123485 - RNA, 19 nt, Homo sapiens
  misc_RNA (1)...(19): siRNA sense strand
gagagcaauguguuacaga

SEQ ID NO: 123486 - RNA, 19 nt, Homo sapiens
  misc_RNA (1)...(19): siRNA sense strand
aacaugagcgagcgaguuu

SEQ ID NO: 123487 - RNA, 19 nt, Homo sapiens
  misc_RNA (1)...(19): siRNA sense strand
uacaagcuccgcagccaaa

SEQ ID NO: 123488 - RNA, 19 nt, Homo sapiens
  misc_RNA (1)...(19): siRNA sense strand
ccagcaaugccucugaaga

SEQ ID NO: 123489 - RNA, 19 nt, Homo sapiens
  misc_RNA (1)...(19): siRNA sense strand
ggcggagagcaauguguua

SEQ ID NO: 123490 - RNA, 19 nt, Homo sapiens
  misc_RNA (1)...(19): siRNA sense strand
gagaaagagccccagaaaa

SEQ ID NO: 123491 - RNA, 19 nt, Homo sapiens
  misc_RNA (1)...(19): siRNA sense strand
guauuugggcagaacuuga

SEQ ID NO: 123492 - RNA, 19 nt, Homo sapiens
  misc_RNA (1)...(19): siRNA sense strand
agugcaagcuguuugucuu

SEQ ID NO: 123493 - RNA, 19 nt, Homo sapiens
  misc_RNA (1)...(19): siRNA sense strand
gggacagaguuaagcugau

SEQ ID NO: 123494 - RNA, 19 nt, Homo sapiens
  misc_RNA (1)...(19): siRNA sense strand
gacagaguuaagcugauaa

SEQ ID NO: 123495 - RNA, 19 nt, Homo sapiens
  misc_RNA (1)...(19): siRNA sense strand
guuuagagaacucaaccaa

SEQ ID NO: 123496 - RNA, 19 nt, Homo sapiens
  misc_RNA (1)...(19): siRNA sense strand
ggaggaggcggagagcaau

SEQ ID NO: 123497 - RNA, 19 nt, Homo sapiens
  misc_RNA (1)...(19): siRNA sense strand
ucagaugccaacagggaaa

SEQ ID NO: 123498 - RNA, 19 nt, Homo sapiens
  misc_RNA (1)...(19): siRNA sense strand
caagccagaagcccaagga

SEQ ID NO: 123499 - RNA, 19 nt, Homo sapiens
  misc_RNA (1)...(19): siRNA sense strand
gagaacucaaccaauagug

SEQ ID NO: 123500 - RNA, 19 nt, Homo sapiens
  misc_RNA (1)...(19): siRNA sense strand
cugaagaggaagccuguga

SEQ ID NO: 123501 - RNA, 19 nt, Homo sapiens
  misc_RNA (1)...(19): siRNA sense strand
aagccgacauggagaaugc

SEQ ID NO: 123502 - RNA, 19 nt, Homo sapiens
  misc_RNA (1)...(19): siRNA sense strand
uagagaacucaaccaauag

SEQ ID NO: 123503 - RNA, 19 nt, Homo sapiens
  misc_RNA (1)...(19): siRNA sense strand
gaagaaaucucugaacuua

SEQ ID NO: 123504 - RNA, 19 nt, Homo sapiens
  misc_RNA (1)...(19): siRNA sense strand
gaauagaacucaacagauu

SEQ ID NO: 123505 - RNA, 19 nt, Homo sapiens
  misc_RNA (1)...(19): siRNA sense strand
ggaauuaugugcuuaaaga

SEQ ID NO: 123506 - RNA, 19 nt, Homo sapiens
  misc_RNA (1)...(19): siRNA sense strand
gaucugaacuugaccaauu

SEQ ID NO: 123507 - RNA, 19 nt, Homo sapiens
  misc_RNA (1)...(19): siRNA sense strand
gaaagaaucugaggaagga

SEQ ID NO: 123508 - RNA, 19 nt, Homo sapiens
  misc_RNA (1)...(19): siRNA sense strand
gcacugaaaucuuuguuug

SEQ ID NO: 123509 - RNA, 19 nt, Homo sapiens
  misc_RNA (1)...(19): siRNA sense strand
gagagaaucuaccuccaua

SEQ ID NO: 123510 - RNA, 19 nt, Homo sapiens
  misc_RNA (1)...(19): siRNA sense strand
gaagugaugcccacgauua

SEQ ID NO: 123511 - RNA, 19 nt, Homo sapiens
  misc_RNA (1)...(19): siRNA sense strand
ggacaaagcaacaauuaaa

SEQ ID NO: 123512 - RNA, 19 nt, Homo sapiens
  misc_RNA (1)...(19): siRNA sense strand
caacuacacuuaaaggaaa

SEQ ID NO: 123513 - RNA, 19 nt, Homo sapiens
  misc_RNA (1)...(19): siRNA sense strand
gaagagagacauggaaaua

SEQ ID NO: 123514 - RNA, 19 nt, Homo sapiens
  misc_RNA (1)...(19): siRNA sense strand
ggagaaagauugcaguugu

SEQ ID NO: 123515 - RNA, 19 nt, Homo sapiens
  misc_RNA (1)...(19): siRNA sense strand
caugaaagaucacuaagaa

SEQ ID NO: 123516 - RNA, 19 nt, Homo sapiens
  misc_RNA (1)...(19): siRNA sense strand
cgaugaaacuagucaaaua

SEQ ID NO: 123517 - RNA, 19 nt, Homo sapiens
  misc_RNA (1)...(19): siRNA sense strand
gauggaaccuggacagaaa

SEQ ID NO: 123518 - RNA, 19 nt, Homo sapiens
  misc_RNA (1)...(19): siRNA sense strand
ggaaucaagucuucaauag

SEQ ID NO: 123519 - RNA, 19 nt, Homo sapiens
  misc_RNA (1)...(19): siRNA sense strand
ucaaggcacugaaaucuuu

SEQ ID NO: 123520 - RNA, 19 nt, Homo sapiens
  misc_RNA (1)...(19): siRNA sense strand
caagaaaggaucucauuaa

SEQ ID NO: 123521 - RNA, 19 nt, Homo sapiens
  misc_RNA (1)...(19): siRNA sense strand
aaugagaacuggcucuuua

SEQ ID NO: 123522 - RNA, 19 nt, Homo sapiens
  misc_RNA (1)...(19): siRNA sense strand
gaaucuaccuccauacaug

SEQ ID NO: 123523 - RNA, 19 nt, Homo sapiens
  misc_RNA (1)...(19): siRNA sense strand
gcaagaaaggaucucauua

SEQ ID NO: 123524 - RNA, 19 nt, Homo sapiens
  misc_RNA (1)...(19): siRNA sense strand
gcuuaaagagguugaauua

SEQ ID NO: 123525 - RNA, 19 nt, Homo sapiens
  misc_RNA (1)...(19): siRNA sense strand
gaacaaguuuacaauaugg

SEQ ID NO: 123526 - RNA, 19 nt, Homo sapiens
  misc_RNA (1)...(19): siRNA sense strand
ucaaagagcuaggcaaaga

SEQ ID NO: 123527 - RNA, 19 nt, Homo sapiens
  misc_RNA (1)...(19): siRNA sense strand
gugcauggcucacuuauag

SEQ ID NO: 123528 - RNA, 19 nt, Homo sapiens
  misc_RNA (1)...(19): siRNA sense strand
gaagaguggugccaucaug

SEQ ID NO: 123529 - RNA, 19 nt, Homo sapiens
  misc_RNA (1)...(19): siRNA sense strand
ugaaagggaucgucuucua

SEQ ID NO: 123530 - RNA, 19 nt, Homo sapiens
  misc_RNA (1)...(19): siRNA sense strand
ggauuuagguuaaccacaa

SEQ ID NO: 123531 - RNA, 19 nt, Homo sapiens
  misc_RNA (1)...(19): siRNA sense strand
gaagcaagccaacaugaaa

SEQ ID NO: 123532 - RNA, 19 nt, Homo sapiens
  misc_RNA (1)...(19): siRNA sense strand
gaucuucucucuccaagug

SEQ ID NO: 123533 - RNA, 19 nt, Homo sapiens
  misc_RNA (1)...(19): siRNA sense strand
agaacuggcucuuuaauug

SEQ ID NO: 123534 - RNA, 19 nt, Homo sapiens
  misc_RNA (1)...(19): siRNA sense strand
ggaauuugcugcacugaca

SEQ ID NO: 123535 - RNA, 19 nt, Homo sapiens
  misc_RNA (1)...(19): siRNA sense strand
aagaauggcugcucuagaa

SEQ ID NO: 123536 - RNA, 19 nt, Homo sapiens
  misc_RNA (1)...(19): siRNA sense strand
gaaagaucacuaagaauga

SEQ ID NO: 123537 - RNA, 19 nt, Homo sapiens
  misc_RNA (1)...(19): siRNA sense strand
gaggacaaagcaacaauua

SEQ ID NO: 123538 - RNA, 19 nt, Homo sapiens
  misc_RNA (1)...(19): siRNA sense strand
gagaagcguuuguccaaug

SEQ ID NO: 123539 - RNA, 19 nt, Homo sapiens
  misc_RNA (1)...(19): siRNA sense strand
ggagaugguuucccuaaca

SEQ ID NO: 123540 - RNA, 19 nt, Homo sapiens
  misc_RNA (1)...(19): siRNA sense strand
gaucacgaguggaauagaa

SEQ ID NO: 123541 - RNA, 19 nt, Homo sapiens
  misc_RNA (1)...(19): siRNA sense strand
gaaaggaucucauuaaaac

SEQ ID NO: 123542 - RNA, 19 nt, Homo sapiens
  misc_RNA (1)...(19): siRNA sense strand
agagagacauggaaauauu

SEQ ID NO: 123543 - RNA, 19 nt, Homo sapiens
  misc_RNA (1)...(19): siRNA sense strand
gaaaagaacuagaaagaag

SEQ ID NO: 123544 - RNA, 19 nt, Homo sapiens
  misc_RNA (1)...(19): siRNA sense strand
caauuggacuucgagaaua

SEQ ID NO: 123545 - RNA, 19 nt, Homo sapiens
  misc_RNA (1)...(19): siRNA sense strand
gacagaaaguccaugagaa

SEQ ID NO: 123546 - RNA, 19 nt, Homo sapiens
  misc_RNA (1)...(19): siRNA sense strand
caucaagacugcagagguu

SEQ ID NO: 123547 - RNA, 19 nt, Homo sapiens
  misc_RNA (1)...(19): siRNA sense strand
caucaugucugcuuuaucu

SEQ ID NO: 123548 - RNA, 19 nt, Homo sapiens
  misc_RNA (1)...(19): siRNA sense strand
ugagaaggaucgaagacua

SEQ ID NO: 123549 - RNA, 19 nt, Homo sapiens
  misc_RNA (1)...(19): siRNA sense strand
acacugaaaugucugauau

SEQ ID NO: 123550 - RNA, 19 nt, Homo sapiens
  misc_RNA (1)...(19): siRNA sense strand
ggaaagauuagcagaagaa

SEQ ID NO: 123551 - RNA, 19 nt, Homo sapiens
  misc_RNA (1)...(19): siRNA sense strand
gaacuuaaagcugaaagaa

SEQ ID NO: 123552 - RNA, 19 nt, Homo sapiens
  misc_RNA (1)...(19): siRNA sense strand
cgaacaaguuuacaauaug

SEQ ID NO: 123553 - RNA, 19 nt, Homo sapiens
  misc_RNA (1)...(19): siRNA sense strand
caagugaucugaggaaaca

SEQ ID NO: 123554 - RNA, 19 nt, Homo sapiens
  misc_RNA (1)...(19): siRNA sense strand
gaacuggcucuuuaauuga

SEQ ID NO: 123555 - RNA, 19 nt, Homo sapiens
  misc_RNA (1)...(19): siRNA sense strand
gaaaugaacaccaaguauc

SEQ ID NO: 123556 - RNA, 19 nt, Homo sapiens
  misc_RNA (1)...(19): siRNA sense strand
cagaagaaaugaacaccaa

SEQ ID NO: 123557 - RNA, 19 nt, Homo sapiens
  misc_RNA (1)...(19): siRNA sense strand
gaagaacguaugagacauu

SEQ ID NO: 123558 - RNA, 19 nt, Homo sapiens
  misc_RNA (1)...(19): siRNA sense strand
acacugagauccagagaga

SEQ ID NO: 123559 - RNA, 19 nt, Homo sapiens
  misc_RNA (1)...(19): siRNA sense strand
gaacguaugagacauuuag

SEQ ID NO: 123560 - RNA, 19 nt, Homo sapiens
  misc_RNA (1)...(19): siRNA sense strand
aaucaagucuucaauagga

SEQ ID NO: 123561 - RNA, 19 nt, Homo sapiens
  misc_RNA (1)...(19): siRNA sense strand
gaaaggcgacuggaugaaa

SEQ ID NO: 123562 - RNA, 19 nt, Homo sapiens
  misc_RNA (1)...(19): siRNA sense strand
gcugaaaccuugccugaag

SEQ ID NO: 123563 - RNA, 19 nt, Homo sapiens
  misc_RNA (1)...(19): siRNA sense strand
gaugacagagaaacaauuu

SEQ ID NO: 123564 - RNA, 19 nt, Homo sapiens
  misc_RNA (1)...(19): siRNA sense strand
caggaaagccucucacuug

SEQ ID NO: 123565 - RNA, 19 nt, Homo sapiens
  misc_RNA (1)...(19): siRNA sense strand
cgaaguaguuuaucugucu

SEQ ID NO: 123566 - RNA, 19 nt, Homo sapiens
  misc_RNA (1)...(19): siRNA sense strand
gcaauuggacuucgagaau

SEQ ID NO: 123567 - RNA, 19 nt, Homo sapiens
  misc_RNA (1)...(19): siRNA sense strand
gagguugaauuaugacaga

SEQ ID NO: 123568 - RNA, 19 nt, Homo sapiens
  misc_RNA (1)...(19): siRNA sense strand
gacuauuacuggagcauuu

SEQ ID NO: 123569 - RNA, 19 nt, Homo sapiens
  misc_RNA (1)...(19): siRNA sense strand
gaaagaagacgggaagcaa

SEQ ID NO: 123570 - RNA, 19 nt, Homo sapiens
  misc_RNA (1)...(19): siRNA sense strand
ccagguaccuccauuacug

SEQ ID NO: 123571 - RNA, 19 nt, Homo sapiens
  misc_RNA (1)...(19): siRNA sense strand
aaagaaaucaggcuaauuc

SEQ ID NO: 123572 - RNA, 19 nt, Homo sapiens
  misc_RNA (1)...(19): siRNA sense strand
ugaaagaucacuaagaaug

SEQ ID NO: 123573 - RNA, 19 nt, Homo sapiens
  misc_RNA (1)...(19): siRNA sense strand
aaacagacaguuacaagaa

SEQ ID NO: 123574 - RNA, 19 nt, Homo sapiens
  misc_RNA (1)...(19): siRNA sense strand
gagaaggaucgaagacuaa

SEQ ID NO: 123575 - RNA, 19 nt, Homo sapiens
  misc_RNA (1)...(19): siRNA sense strand
ugucugauauugaugauga

SEQ ID NO: 123576 - RNA, 19 nt, Homo sapiens
  misc_RNA (1)...(19): siRNA sense strand
guaauaagaagaccaagga

SEQ ID NO: 123577 - RNA, 19 nt, Homo sapiens
  misc_RNA (1)...(19): siRNA sense strand
gaaucaagaacuucaaaga

SEQ ID NO: 123578 - RNA, 19 nt, Homo sapiens
  misc_RNA (1)...(19): siRNA sense strand
agaaaggaaucaagucuuc

SEQ ID NO: 123579 - RNA, 19 nt, Homo sapiens
  misc_RNA (1)...(19): siRNA sense strand
ccagcuggauuuagguuaa

SEQ ID NO: 123580 - RNA, 19 nt, Homo sapiens
  misc_RNA (1)...(19): siRNA sense strand
cgacaugaaagaucacuaa

SEQ ID NO: 123581 - RNA, 19 nt, Homo sapiens
  misc_RNA (1)...(19): siRNA sense strand
ggaugaaagugaugacaag

SEQ ID NO: 123582 - RNA, 19 nt, Homo sapiens
  misc_RNA (1)...(19): siRNA sense strand
gagaaagauugcaguugug

SEQ ID NO: 123583 - RNA, 19 nt, Homo sapiens
  misc_RNA (1)...(19): siRNA sense strand
gagaugagccaaaggugaa

SEQ ID NO: 123584 - RNA, 19 nt, Homo sapiens
  misc_RNA (1)...(19): siRNA sense strand
gggaacaacuucuagaaaa

SEQ ID NO: 123585 - RNA, 19 nt, Homo sapiens
  misc_RNA (1)...(19): siRNA sense strand
guuauucgcuggauacaag

SEQ ID NO: 123586 - RNA, 19 nt, Homo sapiens
  misc_RNA (1)...(19): siRNA sense strand
gagcaaugaccgaguuauu

SEQ ID NO: 123587 - RNA, 19 nt, Homo sapiens
  misc_RNA (1)...(19): siRNA sense strand
gagaugguuucccuaacaa

SEQ ID NO: 123588 - RNA, 19 nt, Homo sapiens
  misc_RNA (1)...(19): siRNA sense strand
ugaagaagcucggagaaag

SEQ ID NO: 123589 - RNA, 19 nt, Homo sapiens
  misc_RNA (1)...(19): siRNA sense strand
gagaacuggcucuuuaauu

SEQ ID NO: 123590 - RNA, 19 nt, Homo sapiens
  misc_RNA (1)...(19): siRNA sense strand
ugaaauggcccagaugaaa

SEQ ID NO: 123591 - RNA, 19 nt, Homo sapiens
  misc_RNA (1)...(19): siRNA sense strand
gaagaaaggaaucaagucu

SEQ ID NO: 123592 - RNA, 19 nt, Homo sapiens
  misc_RNA (1)...(19): siRNA sense strand
gaacuggcucagagaauug

SEQ ID NO: 123593 - RNA, 19 nt, Homo sapiens
  misc_RNA (1)...(19): siRNA sense strand
ugaacuggcucagagaauu

SEQ ID NO: 123594 - RNA, 19 nt, Homo sapiens
  misc_RNA (1)...(19): siRNA sense strand
gaagauauggaagaaagaa

SEQ ID NO: 123595 - RNA, 19 nt, Homo sapiens
  misc_RNA (1)...(19): siRNA sense strand
aaaggaagauauggaagaa

SEQ ID NO: 123596 - RNA, 19 nt, Homo sapiens
  misc_RNA (1)...(19): siRNA sense strand
gcgaagagaugagccaaag

SEQ ID NO: 123597 - RNA, 19 nt, Homo sapiens
  misc_RNA (1)...(19): siRNA sense strand
gcaguuuccuccucgugaa

SEQ ID NO: 123598 - RNA, 19 nt, Homo sapiens
  misc_RNA (1)...(19): siRNA sense strand
gguagaugcaagaauguua

SEQ ID NO: 123599 - RNA, 19 nt, Homo sapiens
  misc_RNA (1)...(19): siRNA sense strand
aaacaucggagaaagauug

SEQ ID NO: 123600 - RNA, 19 nt, Homo sapiens
  misc_RNA (1)...(19): siRNA sense strand
ggaagcaagccaacaugaa

SEQ ID NO: 123601 - RNA, 19 nt, Homo sapiens
  misc_RNA (1)...(19): siRNA sense strand
uuagacaacuccacuguuc

SEQ ID NO: 123602 - RNA, 19 nt, Homo sapiens
  misc_RNA (1)...(19): siRNA sense strand
gaaagagaauacaauaacc

SEQ ID NO: 123603 - RNA, 19 nt, Homo sapiens
  misc_RNA (1)...(19): siRNA sense strand
ggaaagaacuggaaagaaa

SEQ ID NO: 123604 - RNA, 19 nt, Homo sapiens
  misc_RNA (1)...(19): siRNA sense strand
gaagaaagguuacgacaga

SEQ ID NO: 123605 - RNA, 19 nt, Homo sapiens
  misc_RNA (1)...(19): siRNA sense strand
gcacugaaguccuuauuug

SEQ ID NO: 123606 - RNA, 19 nt, Homo sapiens
  misc_RNA (1)...(19): siRNA sense strand
gagaauggcugcuuuggaa

SEQ ID NO: 123607 - RNA, 19 nt, Homo sapiens
  misc_RNA (1)...(19): siRNA sense strand
caucaaaucugaagaaaug

SEQ ID NO: 123608 - RNA, 19 nt, Homo sapiens
  misc_RNA (1)...(19): siRNA sense strand
gaaaagaucucaucaaauc

SEQ ID NO: 123609 - RNA, 19 nt, Homo sapiens
  misc_RNA (1)...(19): siRNA sense strand
ggaauuaugugccugagaa

SEQ ID NO: 123610 - RNA, 19 nt, Homo sapiens
  misc_RNA (1)...(19): siRNA sense strand
caauuggccuuaaagaaua

SEQ ID NO: 123611 - RNA, 19 nt, Homo sapiens
  misc_RNA (1)...(19): siRNA sense strand
ggaagaccuugcuaaagua

SEQ ID NO: 123612 - RNA, 19 nt, Homo sapiens
  misc_RNA (1)...(19): siRNA sense strand
gaacagagccaaaugaaag

SEQ ID NO: 123613 - RNA, 19 nt, Homo sapiens
  misc_RNA (1)...(19): siRNA sense strand
gaacgacacucgccuaugg

SEQ ID NO: 123614 - RNA, 19 nt, Homo sapiens
  misc_RNA (1)...(19): siRNA sense strand
ccacaaagcucuggaugaa

SEQ ID NO: 123615 - RNA, 19 nt, Homo sapiens
  misc_RNA (1)...(19): siRNA sense strand
caaagaagaugcagaugga

SEQ ID NO: 123616 - RNA, 19 nt, Homo sapiens
  misc_RNA (1)...(19): siRNA sense strand
gaagaaacacaacacgaua

SEQ ID NO: 123617 - RNA, 19 nt, Homo sapiens
  misc_RNA (1)...(19): siRNA sense strand
cuaaagaacucaauguaug

SEQ ID NO: 123618 - RNA, 19 nt, Homo sapiens
  misc_RNA (1)...(19): siRNA sense strand
gagaaucacuacucuugaa

SEQ ID NO: 123619 - RNA, 19 nt, Homo sapiens
  misc_RNA (1)...(19): siRNA sense strand
ggacauaaaccaugaacaa

SEQ ID NO: 123620 - RNA, 19 nt, Homo sapiens
  misc_RNA (1)...(19): siRNA sense strand
agaaauugcugaacugaaa

SEQ ID NO: 123621 - RNA, 19 nt, Homo sapiens
  misc_RNA (1)...(19): siRNA sense strand
gagcaaugaucgagugauu

SEQ ID NO: 123622 - RNA, 19 nt, Homo sapiens
  misc_RNA (1)...(19): siRNA sense strand
uaauugagcuccaagaaau

SEQ ID NO: 123623 - RNA, 19 nt, Homo sapiens
  misc_RNA (1)...(19): siRNA sense strand
gaagaaagucagagugaaa

SEQ ID NO: 123624 - RNA, 19 nt, Homo sapiens
  misc_RNA (1)...(19): siRNA sense strand
gagaagagguacgagauga

SEQ ID NO: 123625 - RNA, 19 nt, Homo sapiens
  misc_RNA (1)...(19): siRNA sense strand
gcaacgagauguccgugaa

SEQ ID NO: 123626 - RNA, 19 nt, Homo sapiens
  misc_RNA (1)...(19): siRNA sense strand
cauaaaccaugaacaagaa

SEQ ID NO: 123627 - RNA, 19 nt, Homo sapiens
  misc_RNA (1)...(19): siRNA sense strand
gggaacagcuccuugaaag

SEQ ID NO: 123628 - RNA, 19 nt, Homo sapiens
  misc_RNA (1)...(19): siRNA sense strand
caacauugaagaaagguua

SEQ ID NO: 123629 - RNA, 19 nt, Homo sapiens
  misc_RNA (1)...(19): siRNA sense strand
acaaagagcuaaugauucu

SEQ ID NO: 123630 - RNA, 19 nt, Homo sapiens
  misc_RNA (1)...(19): siRNA sense strand
ggagaagaaucaagaacug

SEQ ID NO: 123631 - RNA, 19 nt, Homo sapiens
  misc_RNA (1)...(19): siRNA sense strand
caaagaagcauuaggacaa

SEQ ID NO: 123632 - RNA, 19 nt, Homo sapiens
  misc_RNA (1)...(19): siRNA sense strand
gaaagucagagugaaauaa

SEQ ID NO: 123633 - RNA, 19 nt, Homo sapiens
  misc_RNA (1)...(19): siRNA sense strand
gaguagcacuugaaagaug

SEQ ID NO: 123634 - RNA, 19 nt, Homo sapiens
  misc_RNA (1)...(19): siRNA sense strand
ugaaagcacugaaguccuu

SEQ ID NO: 123635 - RNA, 19 nt, Homo sapiens
  misc_RNA (1)...(19): siRNA sense strand
caggaugccuugggacuua

SEQ ID NO: 123636 - RNA, 19 nt, Homo sapiens
  misc_RNA (1)...(19): siRNA sense strand
gagaagaaagucagaguga

SEQ ID NO: 123637 - RNA, 19 nt, Homo sapiens
  misc_RNA (1)...(19): siRNA sense strand
gugcaugaccucaaugaua

SEQ ID NO: 123638 - RNA, 19 nt, Homo sapiens
  misc_RNA (1)...(19): siRNA sense strand
gauagaagguuugaugaag

SEQ ID NO: 123639 - RNA, 19 nt, Homo sapiens
  misc_RNA (1)...(19): siRNA sense strand
ggaaagagaauuuaacaac

SEQ ID NO: 123640 - RNA, 19 nt, Homo sapiens
  misc_RNA (1)...(19): siRNA sense strand
ugcaugaccucaaugauaa

SEQ ID NO: 123641 - RNA, 19 nt, Homo sapiens
  misc_RNA (1)...(19): siRNA sense strand
cugaagaaaugaacacaaa

SEQ ID NO: 123642 - RNA, 19 nt, Homo sapiens
  misc_RNA (1)...(19): siRNA sense strand
gcaaacaaucuuauagaga

SEQ ID NO: 123643 - RNA, 19 nt, Homo sapiens
  misc_RNA (1)...(19): siRNA sense strand
ucgcagcacuuacuaaaga

SEQ ID NO: 123644 - RNA, 19 nt, Homo sapiens
  misc_RNA (1)...(19): siRNA sense strand
ggcauuaaguccuccauug

SEQ ID NO: 123645 - RNA, 19 nt, Homo sapiens
  misc_RNA (1)...(19): siRNA sense strand
ugaaagggaagaagaaauu

SEQ ID NO: 123646 - RNA, 19 nt, Homo sapiens
  misc_RNA (1)...(19): siRNA sense strand
gaacgugcccagcaagcua

SEQ ID NO: 123647 - RNA, 19 nt, Homo sapiens
  misc_RNA (1)...(19): siRNA sense strand
gaagagagaaucacuacuc

SEQ ID NO: 123648 - RNA, 19 nt, Homo sapiens
  misc_RNA (1)...(19): siRNA sense strand
acacaaagagcuaaugauu

SEQ ID NO: 123649 - RNA, 19 nt, Homo sapiens
  misc_RNA (1)...(19): siRNA sense strand
gcuagugucuuggcaaaug

SEQ ID NO: 123650 - RNA, 19 nt, Homo sapiens
  misc_RNA (1)...(19): siRNA sense strand
gcacuugaaagauguaguu

SEQ ID NO: 123651 - RNA, 19 nt, Homo sapiens
  misc_RNA (1)...(19): siRNA sense strand
aaaggacauucguggcuua

SEQ ID NO: 123652 - RNA, 19 nt, Homo sapiens
  misc_RNA (1)...(19): siRNA sense strand
gagcacuucuggccuuaga

SEQ ID NO: 123653 - RNA, 19 nt, Homo sapiens
  misc_RNA (1)...(19): siRNA sense strand
ucaauuggccuuaaagaau

SEQ ID NO: 123654 - RNA, 19 nt, Homo sapiens
  misc_RNA (1)...(19): siRNA sense strand
agacaaccauaaaguguga

SEQ ID NO: 123655 - RNA, 19 nt, Homo sapiens
  misc_RNA (1)...(19): siRNA sense strand
gauguaguuuguuagaaga

SEQ ID NO: 123656 - RNA, 19 nt, Homo sapiens
  misc_RNA (1)...(19): siRNA sense strand
cugagaagguuaaauuaug

SEQ ID NO: 123657 - RNA, 19 nt, Homo sapiens
  misc_RNA (1)...(19): siRNA sense strand
gguacgagaugacaagaca

SEQ ID NO: 123658 - RNA, 19 nt, Homo sapiens
  misc_RNA (1)...(19): siRNA sense strand
ugacgugucugauggugaa

SEQ ID NO: 123659 - RNA, 19 nt, Homo sapiens
  misc_RNA (1)...(19): siRNA sense strand
gcaguuagaagaaacacaa

SEQ ID NO: 123660 - RNA, 19 nt, Homo sapiens
  misc_RNA (1)...(19): siRNA sense strand
guaauugagcuccaagaaa

SEQ ID NO: 123661 - RNA, 19 nt, Homo sapiens
  misc_RNA (1)...(19): siRNA sense strand
gaagaaauugcugaacuga

SEQ ID NO: 123662 - RNA, 19 nt, Homo sapiens
  misc_RNA (1)...(19): siRNA sense strand
caaagaagaaaggcauuaa

SEQ ID NO: 123663 - RNA, 19 nt, Homo sapiens
  misc_RNA (1)...(19): siRNA sense strand
gaugacaagacaaccauaa

SEQ ID NO: 123664 - RNA, 19 nt, Homo sapiens
  misc_RNA (1)...(19): siRNA sense strand
gagagagacucaagaaacg

SEQ ID NO: 123665 - RNA, 19 nt, Homo sapiens
  misc_RNA (1)...(19): siRNA sense strand
gguacaaacucuuaaugag

SEQ ID NO: 123666 - RNA, 19 nt, Homo sapiens
  misc_RNA (1)...(19): siRNA sense strand
gaagaccuugcuaaaguaa

SEQ ID NO: 123667 - RNA, 19 nt, Homo sapiens
  misc_RNA (1)...(19): siRNA sense strand
aggaagaccuugcuaaagu

SEQ ID NO: 123668 - RNA, 19 nt, Homo sapiens
  misc_RNA (1)...(19): siRNA sense strand
caugagcggucucuuagga

SEQ ID NO: 123669 - RNA, 19 nt, Homo sapiens
  misc_RNA (1)...(19): siRNA sense strand
ggaagaagaaauugcugaa

SEQ ID NO: 123670 - RNA, 19 nt, Homo sapiens
  misc_RNA (1)...(19): siRNA sense strand
uggacaaacuggcaaagaa

SEQ ID NO: 123671 - RNA, 19 nt, Homo sapiens
  misc_RNA (1)...(19): siRNA sense strand
ccaaagaagaaaggcauua

SEQ ID NO: 123672 - RNA, 19 nt, Homo sapiens
  misc_RNA (1)...(19): siRNA sense strand
ggaacagagccaaaugaaa

SEQ ID NO: 123673 - RNA, 19 nt, Homo sapiens
  misc_RNA (1)...(19): siRNA sense strand
agaccuugcuaaaguaauu

SEQ ID NO: 123674 - RNA, 19 nt, Homo sapiens
  misc_RNA (1)...(19): siRNA sense strand
gaacugaaagcagaaagga

SEQ ID NO: 123675 - RNA, 19 nt, Homo sapiens
  misc_RNA (1)...(19): siRNA sense strand
gcagggaacagcuccuuga

SEQ ID NO: 123676 - RNA, 19 nt, Homo sapiens
  misc_RNA (1)...(19): siRNA sense strand
uaaaagacgugcuuguuug

SEQ ID NO: 123677 - RNA, 19 nt, Homo sapiens
  misc_RNA (1)...(19): siRNA sense strand
gcaaauaaagauucuaugc

SEQ ID NO: 123678 - RNA, 19 nt, Homo sapiens
  misc_RNA (1)...(19): siRNA sense strand
cuugaaagauguaguuugu

SEQ ID NO: 123679 - RNA, 19 nt, Homo sapiens
  misc_RNA (1)...(19): siRNA sense strand
acaccaggcugcuguuaga

SEQ ID NO: 123680 - RNA, 19 nt, Homo sapiens
  misc_RNA (1)...(19): siRNA sense strand
agagagcgauuacgaguag

SEQ ID NO: 123681 - RNA, 19 nt, Homo sapiens
  misc_RNA (1)...(19): siRNA sense strand
caagacaaccauaaagugu

SEQ ID NO: 123682 - RNA, 19 nt, Homo sapiens
  misc_RNA (1)...(19): siRNA sense strand
uagacaaucuuggucguuu

SEQ ID NO: 123683 - RNA, 19 nt, Homo sapiens
  misc_RNA (1)...(19): siRNA sense strand
aaacacaacacgauaagga

SEQ ID NO: 123684 - RNA, 19 nt, Homo sapiens
  misc_RNA (1)...(19): siRNA sense strand
ggcuucaacuucaucuuaa

SEQ ID NO: 123685 - RNA, 19 nt, Homo sapiens
  misc_RNA (1)...(19): siRNA sense strand
gagagacacggcaacauug

SEQ ID NO: 123686 - RNA, 19 nt, Homo sapiens
  misc_RNA (1)...(19): siRNA sense strand
caagaaaucauaaguaagc

SEQ ID NO: 123687 - RNA, 19 nt, Homo sapiens
  misc_RNA (1)...(19): siRNA sense strand
caagaaacgcuggccuuaa

SEQ ID NO: 123688 - RNA, 19 nt, Homo sapiens
  misc_RNA (1)...(19): siRNA sense strand
guuaaauuaugaccggaaa

SEQ ID NO: 123689 - RNA, 19 nt, Homo sapiens
  misc_RNA (1)...(19): siRNA sense strand
acuaagaggugcuucacuu

SEQ ID NO: 123690 - RNA, 19 nt, Homo sapiens
  misc_RNA (1)...(19): siRNA sense strand
cagcuuguccuaaacauug

SEQ ID NO: 123691 - RNA, 19 nt, Homo sapiens
  misc_RNA (1)...(19): siRNA sense strand
cgaagaacauaauaaacgu

SEQ ID NO: 123692 - RNA, 19 nt, Homo sapiens
  misc_RNA (1)...(19): siRNA sense strand
cgaggaagaccuugcuaaa

SEQ ID NO: 123693 - RNA, 19 nt, Homo sapiens
  misc_RNA (1)...(19): siRNA sense strand
gagcuaaugauucuuaaag

SEQ ID NO: 123694 - RNA, 19 nt, Homo sapiens
  misc_RNA (1)...(19): siRNA sense strand
gaaagggaagaagaaauug

SEQ ID NO: 123695 - RNA, 19 nt, Homo sapiens
  misc_RNA (1)...(19): siRNA sense strand
cgagagcccuucgguuaga

SEQ ID NO: 123696 - RNA, 19 nt, Homo sapiens
  misc_RNA (1)...(19): siRNA sense strand
cagcucaguugaccugcua

SEQ ID NO: 123697 - RNA, 19 nt, Homo sapiens
  misc_RNA (1)...(19): siRNA sense strand
ugaccucaaugauaaacuu

SEQ ID NO: 123698 - RNA, 19 nt, Homo sapiens
  misc_RNA (1)...(19): siRNA sense strand
ucaagaaacgcuggccuua

SEQ ID NO: 123699 - RNA, 19 nt, Homo sapiens
  misc_RNA (1)...(19): siRNA sense strand
uaaaguaauugagcuccaa

SEQ ID NO: 123700 - RNA, 19 nt, Homo sapiens
  misc_RNA (1)...(19): siRNA sense strand
ggaggaagcccggagacaa

SEQ ID NO: 123701 - RNA, 19 nt, Homo sapiens
  misc_RNA (1)...(19): siRNA sense strand
ggacauucguggcuuagcu

SEQ ID NO: 123702 - RNA, 19 nt, Homo sapiens
  misc_RNA (1)...(19): siRNA sense strand
gaagguuugaugaagauga

SEQ ID NO: 123703 - RNA, 19 nt, Homo sapiens
  misc_RNA (1)...(19): siRNA sense strand
ggaaagaacuggaaagaaa

SEQ ID NO: 123704 - RNA, 19 nt, Homo sapiens
  misc_RNA (1)...(19): siRNA sense strand
gaagaaagguuacgacaga

SEQ ID NO: 123705 - RNA, 19 nt, Homo sapiens
  misc_RNA (1)...(19): siRNA sense strand
gcacugaaguccuuauuug

SEQ ID NO: 123706 - RNA, 19 nt, Homo sapiens
  misc_RNA (1)...(19): siRNA sense strand
gagaauggcugcuuuggaa

SEQ ID NO: 123707 - RNA, 19 nt, Homo sapiens
  misc_RNA (1)...(19): siRNA sense strand
caucaaaucugaagaaaug

SEQ ID NO: 123708 - RNA, 19 nt, Homo sapiens
  misc_RNA (1)...(19): siRNA sense strand
gaaaagaucucaucaaauc

SEQ ID NO: 123709 - RNA, 19 nt, Homo sapiens
  misc_RNA (1)...(19): siRNA sense strand
ggaauuaugugccugagaa

SEQ ID NO: 123710 - RNA, 19 nt, Homo sapiens
  misc_RNA (1)...(19): siRNA sense strand
caauuggccuuaaagaaua

SEQ ID NO: 123711 - RNA, 19 nt, Homo sapiens
  misc_RNA (1)...(19): siRNA sense strand
ggaagaccuugcuaaagua

SEQ ID NO: 123712 - RNA, 19 nt, Homo sapiens
  misc_RNA (1)...(19): siRNA sense strand
gaacagagccaaaugaaag

SEQ ID NO: 123713 - RNA, 19 nt, Homo sapiens
  misc_RNA (1)...(19): siRNA sense strand
gaacgacacucgccuaugg

SEQ ID NO: 123714 - RNA, 19 nt, Homo sapiens
  misc_RNA (1)...(19): siRNA sense strand
ccacaaagcucuggaugaa

SEQ ID NO: 123715 - RNA, 19 nt, Homo sapiens
  misc_RNA (1)...(19): siRNA sense strand
caaagaagaugcagaugga

SEQ ID NO: 123716 - RNA, 19 nt, Homo sapiens
  misc_RNA (1)...(19): siRNA sense strand
gaagaaacacaacacgaua

SEQ ID NO: 123717 - RNA, 19 nt, Homo sapiens
  misc_RNA (1)...(19): siRNA sense strand
cuaaagaacucaauguaug

SEQ ID NO: 123718 - RNA, 19 nt, Homo sapiens
  misc_RNA (1)...(19): siRNA sense strand
gagaaucacuacucuugaa

SEQ ID NO: 123719 - RNA, 19 nt, Homo sapiens
  misc_RNA (1)...(19): siRNA sense strand
ggacauaaaccaugaacaa

SEQ ID NO: 123720 - RNA, 19 nt, Homo sapiens
  misc_RNA (1)...(19): siRNA sense strand
agaaauugcugaacugaaa

SEQ ID NO: 123721 - RNA, 19 nt, Homo sapiens
  misc_RNA (1)...(19): siRNA sense strand
gagcaaugaucgagugauu

SEQ ID NO: 123722 - RNA, 19 nt, Homo sapiens
  misc_RNA (1)...(19): siRNA sense strand
uaauugagcuccaagaaau

SEQ ID NO: 123723 - RNA, 19 nt, Homo sapiens
  misc_RNA (1)...(19): siRNA sense strand
gaagaaagucagagugaaa

SEQ ID NO: 123724 - RNA, 19 nt, Homo sapiens
  misc_RNA (1)...(19): siRNA sense strand
gagaagagguacgagauga

SEQ ID NO: 123725 - RNA, 19 nt, Homo sapiens
  misc_RNA (1)...(19): siRNA sense strand
gcaacgagauguccgugaa

SEQ ID NO: 123726 - RNA, 19 nt, Homo sapiens
  misc_RNA (1)...(19): siRNA sense strand
cauaaaccaugaacaagaa

SEQ ID NO: 123727 - RNA, 19 nt, Homo sapiens
  misc_RNA (1)...(19): siRNA sense strand
gggaacagcuccuugaaag

SEQ ID NO: 123728 - RNA, 19 nt, Homo sapiens
  misc_RNA (1)...(19): siRNA sense strand
caacauugaagaaagguua

SEQ ID NO: 123729 - RNA, 19 nt, Homo sapiens
  misc_RNA (1)...(19): siRNA sense strand
acaaagagcuaaugauucu

SEQ ID NO: 123730 - RNA, 19 nt, Homo sapiens
  misc_RNA (1)...(19): siRNA sense strand
ggagaagaaucaagaacug

SEQ ID NO: 123731 - RNA, 19 nt, Homo sapiens
  misc_RNA (1)...(19): siRNA sense strand
caaagaagcauuaggacaa

SEQ ID NO: 123732 - RNA, 19 nt, Homo sapiens
  misc_RNA (1)...(19): siRNA sense strand
gaaagucagagugaaauaa

SEQ ID NO: 123733 - RNA, 19 nt, Homo sapiens
  misc_RNA (1)...(19): siRNA sense strand
gaguagcacuugaaagaug

SEQ ID NO: 123734 - RNA, 19 nt, Homo sapiens
  misc_RNA (1)...(19): siRNA sense strand
ugaaagcacugaaguccuu

SEQ ID NO: 123735 - RNA, 19 nt, Homo sapiens
  misc_RNA (1)...(19): siRNA sense strand
caggaugccuugggacuua

SEQ ID NO: 123736 - RNA, 19 nt, Homo sapiens
  misc_RNA (1)...(19): siRNA sense strand
gagaagaaagucagaguga

SEQ ID NO: 123737 - RNA, 19 nt, Homo sapiens
  misc_RNA (1)...(19): siRNA sense strand
gugcaugaccucaaugaua

SEQ ID NO: 123738 - RNA, 19 nt, Homo sapiens
  misc_RNA (1)...(19): siRNA sense strand
gauagaagguuugaugaag

SEQ ID NO: 123739 - RNA, 19 nt, Homo sapiens
  misc_RNA (1)...(19): siRNA sense strand
ggaaagagaauuuaacaac

SEQ ID NO: 123740 - RNA, 19 nt, Homo sapiens
  misc_RNA (1)...(19): siRNA sense strand
ugcaugaccucaaugauaa

SEQ ID NO: 123741 - RNA, 19 nt, Homo sapiens
  misc_RNA (1)...(19): siRNA sense strand
cugaagaaaugaacacaaa

SEQ ID NO: 123742 - RNA, 19 nt, Homo sapiens
  misc_RNA (1)...(19): siRNA sense strand
gcaaacaaucuuauagaga

SEQ ID NO: 123743 - RNA, 19 nt, Homo sapiens
  misc_RNA (1)...(19): siRNA sense strand
ucgcagcacuuacuaaaga

SEQ ID NO: 123744 - RNA, 19 nt, Homo sapiens
  misc_RNA (1)...(19): siRNA sense strand
ggcauuaaguccuccauug

SEQ ID NO: 123745 - RNA, 19 nt, Homo sapiens
  misc_RNA (1)...(19): siRNA sense strand
ugaaagggaagaagaaauu

SEQ ID NO: 123746 - RNA, 19 nt, Homo sapiens
  misc_RNA (1)...(19): siRNA sense strand
gaacgugcccagcaagcua

SEQ ID NO: 123747 - RNA, 19 nt, Homo sapiens
  misc_RNA (1)...(19): siRNA sense strand
gaagagagaaucacuacuc

SEQ ID NO: 123748 - RNA, 19 nt, Homo sapiens
  misc_RNA (1)...(19): siRNA sense strand
acacaaagagcuaaugauu

SEQ ID NO: 123749 - RNA, 19 nt, Homo sapiens
  misc_RNA (1)...(19): siRNA sense strand
gcuagugucuuggcaaaug

SEQ ID NO: 123750 - RNA, 19 nt, Homo sapiens
  misc_RNA (1)...(19): siRNA sense strand
gcacuugaaagauguaguu

SEQ ID NO: 123751 - RNA, 19 nt, Homo sapiens
  misc_RNA (1)...(19): siRNA sense strand
aaaggacauucguggcuua

SEQ ID NO: 123752 - RNA, 19 nt, Homo sapiens
  misc_RNA (1)...(19): siRNA sense strand
gagcacuucuggccuuaga

SEQ ID NO: 123753 - RNA, 19 nt, Homo sapiens
  misc_RNA (1)...(19): siRNA sense strand
ucaauuggccuuaaagaau

SEQ ID NO: 123754 - RNA, 19 nt, Homo sapiens
  misc_RNA (1)...(19): siRNA sense strand
agacaaccauaaaguguga

SEQ ID NO: 123755 - RNA, 19 nt, Homo sapiens
  misc_RNA (1)...(19): siRNA sense strand
gauguaguuuguuagaaga

SEQ ID NO: 123756 - RNA, 19 nt, Homo sapiens
  misc_RNA (1)...(19): siRNA sense strand
cugagaagguuaaauuaug

SEQ ID NO: 123757 - RNA, 19 nt, Homo sapiens
  misc_RNA (1)...(19): siRNA sense strand
gguacgagaugacaagaca

SEQ ID NO: 123758 - RNA, 19 nt, Homo sapiens
  misc_RNA (1)...(19): siRNA sense strand
ugacgugucugauggugaa

SEQ ID NO: 123759 - RNA, 19 nt, Homo sapiens
  misc_RNA (1)...(19): siRNA sense strand
gcaguuagaagaaacacaa

SEQ ID NO: 123760 - RNA, 19 nt, Homo sapiens
  misc_RNA (1)...(19): siRNA sense strand
guaauugagcuccaagaaa

SEQ ID NO: 123761 - RNA, 19 nt, Homo sapiens
  misc_RNA (1)...(19): siRNA sense strand
gaagaaauugcugaacuga

SEQ ID NO: 123762 - RNA, 19 nt, Homo sapiens
  misc_RNA (1)...(19): siRNA sense strand
caaagaagaaaggcauuaa

SEQ ID NO: 123763 - RNA, 19 nt, Homo sapiens
  misc_RNA (1)...(19): siRNA sense strand
gaugacaagacaaccauaa

SEQ ID NO: 123764 - RNA, 19 nt, Homo sapiens
  misc_RNA (1)...(19): siRNA sense strand
gagagagacucaagaaacg

SEQ ID NO: 123765 - RNA, 19 nt, Homo sapiens
  misc_RNA (1)...(19): siRNA sense strand
gguacaaacucuuaaugag

SEQ ID NO: 123766 - RNA, 19 nt, Homo sapiens
  misc_RNA (1)...(19): siRNA sense strand
gaagaccuugcuaaaguaa

SEQ ID NO: 123767 - RNA, 19 nt, Homo sapiens
  misc_RNA (1)...(19): siRNA sense strand
aggaagaccuugcuaaagu

SEQ ID NO: 123768 - RNA, 19 nt, Homo sapiens
  misc_RNA (1)...(19): siRNA sense strand
caugagcggucucuuagga

SEQ ID NO: 123769 - RNA, 19 nt, Homo sapiens
  misc_RNA (1)...(19): siRNA sense strand
ggaagaagaaauugcugaa

SEQ ID NO: 123770 - RNA, 19 nt, Homo sapiens
  misc_RNA (1)...(19): siRNA sense strand
uggacaaacuggcaaagaa

SEQ ID NO: 123771 - RNA, 19 nt, Homo sapiens
  misc_RNA (1)...(19): siRNA sense strand
ccaaagaagaaaggcauua

SEQ ID NO: 123772 - RNA, 19 nt, Homo sapiens
  misc_RNA (1)...(19): siRNA sense strand
ggaacagagccaaaugaaa

SEQ ID NO: 123773 - RNA, 19 nt, Homo sapiens
  misc_RNA (1)...(19): siRNA sense strand
agaccuugcuaaaguaauu

SEQ ID NO: 123774 - RNA, 19 nt, Homo sapiens
  misc_RNA (1)...(19): siRNA sense strand
gaacugaaagcagaaagga

SEQ ID NO: 123775 - RNA, 19 nt, Homo sapiens
  misc_RNA (1)...(19): siRNA sense strand
gcagggaacagcuccuuga

SEQ ID NO: 123776 - RNA, 19 nt, Homo sapiens
  misc_RNA (1)...(19): siRNA sense strand
uaaaagacgugcuuguuug

SEQ ID NO: 123777 - RNA, 19 nt, Homo sapiens
  misc_RNA (1)...(19): siRNA sense strand
gcaaauaaagauucuaugc

SEQ ID NO: 123778 - RNA, 19 nt, Homo sapiens
  misc_RNA (1)...(19): siRNA sense strand
cuugaaagauguaguuugu

SEQ ID NO: 123779 - RNA, 19 nt, Homo sapiens
  misc_RNA (1)...(19): siRNA sense strand
acaccaggcugcuguuaga

SEQ ID NO: 123780 - RNA, 19 nt, Homo sapiens
  misc_RNA (1)...(19): siRNA sense strand
agagagcgauuacgaguag

SEQ ID NO: 123781 - RNA, 19 nt, Homo sapiens
  misc_RNA (1)...(19): siRNA sense strand
caagacaaccauaaagugu

SEQ ID NO: 123782 - RNA, 19 nt, Homo sapiens
  misc_RNA (1)...(19): siRNA sense strand
uagacaaucuuggucguuu

SEQ ID NO: 123783 - RNA, 19 nt, Homo sapiens
  misc_RNA (1)...(19): siRNA sense strand
aaacacaacacgauaagga

SEQ ID NO: 123784 - RNA, 19 nt, Homo sapiens
  misc_RNA (1)...(19): siRNA sense strand
ggcuucaacuucaucuuaa

SEQ ID NO: 123785 - RNA, 19 nt, Homo sapiens
  misc_RNA (1)...(19): siRNA sense strand
gagagacacggcaacauug

SEQ ID NO: 123786 - RNA, 19 nt, Homo sapiens
  misc_RNA (1)...(19): siRNA sense strand
caagaaaucauaaguaagc

SEQ ID NO: 123787 - RNA, 19 nt, Homo sapiens
  misc_RNA (1)...(19): siRNA sense strand
caagaaacgcuggccuuaa

SEQ ID NO: 123788 - RNA, 19 nt, Homo sapiens
  misc_RNA (1)...(19): siRNA sense strand
guuaaauuaugaccggaaa

SEQ ID NO: 123789 - RNA, 19 nt, Homo sapiens
  misc_RNA (1)...(19): siRNA sense strand
acuaagaggugcuucacuu

SEQ ID NO: 123790 - RNA, 19 nt, Homo sapiens
  misc_RNA (1)...(19): siRNA sense strand
cagcuuguccuaaacauug

SEQ ID NO: 123791 - RNA, 19 nt, Homo sapiens
  misc_RNA (1)...(19): siRNA sense strand
cgaagaacauaauaaacgu

SEQ ID NO: 123792 - RNA, 19 nt, Homo sapiens
  misc_RNA (1)...(19): siRNA sense strand
cgaggaagaccuugcuaaa

SEQ ID NO: 123793 - RNA, 19 nt, Homo sapiens
  misc_RNA (1)...(19): siRNA sense strand
gagcuaaugauucuuaaag

SEQ ID NO: 123794 - RNA, 19 nt, Homo sapiens
  misc_RNA (1)...(19): siRNA sense strand
gaaagggaagaagaaauug

SEQ ID NO: 123795 - RNA, 19 nt, Homo sapiens
  misc_RNA (1)...(19): siRNA sense strand
cgagagcccuucgguuaga

SEQ ID NO: 123796 - RNA, 19 nt, Homo sapiens
  misc_RNA (1)...(19): siRNA sense strand
cagcucaguugaccugcua

SEQ ID NO: 123797 - RNA, 19 nt, Homo sapiens
  misc_RNA (1)...(19): siRNA sense strand
ugaccucaaugauaaacuu

SEQ ID NO: 123798 - RNA, 19 nt, Homo sapiens
  misc_RNA (1)...(19): siRNA sense strand
ucaagaaacgcuggccuua

SEQ ID NO: 123799 - RNA, 19 nt, Homo sapiens
  misc_RNA (1)...(19): siRNA sense strand
uaaaguaauugagcuccaa

SEQ ID NO: 123800 - RNA, 19 nt, Homo sapiens
  misc_RNA (1)...(19): siRNA sense strand
ggaggaagcccggagacaa

SEQ ID NO: 123801 - RNA, 19 nt, Homo sapiens
  misc_RNA (1)...(19): siRNA sense strand
ggacauucguggcuuagcu

SEQ ID NO: 123802 - RNA, 19 nt, Homo sapiens
  misc_RNA (1)...(19): siRNA sense strand
gaagguuugaugaagauga

SEQ ID NO: 123803 - RNA, 19 nt, Homo sapiens
  misc_RNA (1)...(19): siRNA sense strand
gcacauuacuccuauauau

SEQ ID NO: 123804 - RNA, 19 nt, Homo sapiens
  misc_RNA (1)...(19): siRNA sense strand
gcaacagccuugaggaaua

SEQ ID NO: 123805 - RNA, 19 nt, Homo sapiens
  misc_RNA (1)...(19): siRNA sense strand
ugaaaucgaccacaaauua

SEQ ID NO: 123806 - RNA, 19 nt, Homo sapiens
  misc_RNA (1)...(19): siRNA sense strand
cagcaaaccuucaccaauu

SEQ ID NO: 123807 - RNA, 19 nt, Homo sapiens
  misc_RNA (1)...(19): siRNA sense strand
gaacgaauuggaugacuua

SEQ ID NO: 123808 - RNA, 19 nt, Homo sapiens
  misc_RNA (1)...(19): siRNA sense strand
gaacuuugaugcauacaga

SEQ ID NO: 123809 - RNA, 19 nt, Homo sapiens
  misc_RNA (1)...(19): siRNA sense strand
gaagaauguuggugggaua

SEQ ID NO: 123810 - RNA, 19 nt, Homo sapiens
  misc_RNA (1)...(19): siRNA sense strand
gaggaacucuuucuuucua

SEQ ID NO: 123811 - RNA, 19 nt, Homo sapiens
  misc_RNA (1)...(19): siRNA sense strand
cgaauuggaugacuuacua

SEQ ID NO: 123812 - RNA, 19 nt, Homo sapiens
  misc_RNA (1)...(19): siRNA sense strand
gaaguaagggagcuuguua

SEQ ID NO: 123813 - RNA, 19 nt, Homo sapiens
  misc_RNA (1)...(19): siRNA sense strand
caagaugacuccaacagaa

SEQ ID NO: 123814 - RNA, 19 nt, Homo sapiens
  misc_RNA (1)...(19): siRNA sense strand
caacagacgugccaaauac

SEQ ID NO: 123815 - RNA, 19 nt, Homo sapiens
  misc_RNA (1)...(19): siRNA sense strand
ggaagaagcucggaagcaa

SEQ ID NO: 123816 - RNA, 19 nt, Homo sapiens
  misc_RNA (1)...(19): siRNA sense strand
uaaacgaccuucuuauaga

SEQ ID NO: 123817 - RNA, 19 nt, Homo sapiens
  misc_RNA (1)...(19): siRNA sense strand
ucaagaaguucaacacaaa

SEQ ID NO: 123818 - RNA, 19 nt, Homo sapiens
  misc_RNA (1)...(19): siRNA sense strand
ggacugaaaucgaccacaa

SEQ ID NO: 123819 - RNA, 19 nt, Homo sapiens
  misc_RNA (1)...(19): siRNA sense strand
gagaagaguuaguucaguu

SEQ ID NO: 123820 - RNA, 19 nt, Homo sapiens
  misc_RNA (1)...(19): siRNA sense strand
gagcacagucuccuucuua

SEQ ID NO: 123821 - RNA, 19 nt, Homo sapiens
  misc_RNA (1)...(19): siRNA sense strand
gagaauggauaacgauaga

SEQ ID NO: 123822 - RNA, 19 nt, Homo sapiens
  misc_RNA (1)...(19): siRNA sense strand
gaacaaggaacccucuauu

SEQ ID NO: 123823 - RNA, 19 nt, Homo sapiens
  misc_RNA (1)...(19): siRNA sense strand
gaaguacccuuacauacca

SEQ ID NO: 123824 - RNA, 19 nt, Homo sapiens
  misc_RNA (1)...(19): siRNA sense strand
gcaagacgguggagaacug

SEQ ID NO: 123825 - RNA, 19 nt, Homo sapiens
  misc_RNA (1)...(19): siRNA sense strand
ccacuaaacgaccuucuua

SEQ ID NO: 123826 - RNA, 19 nt, Homo sapiens
  misc_RNA (1)...(19): siRNA sense strand
gcaaaggacuguucaugac

SEQ ID NO: 123827 - RNA, 19 nt, Homo sapiens
  misc_RNA (1)...(19): siRNA sense strand
gaauauggcacuagauguu

SEQ ID NO: 123828 - RNA, 19 nt, Homo sapiens
  misc_RNA (1)...(19): siRNA sense strand
gcacagguguaucagguau

SEQ ID NO: 123829 - RNA, 19 nt, Homo sapiens
  misc_RNA (1)...(19): siRNA sense strand
ggaguucuuuggaauuuau

SEQ ID NO: 123830 - RNA, 19 nt, Homo sapiens
  misc_RNA (1)...(19): siRNA sense strand
ggauaacgauagaguuguu

SEQ ID NO: 123831 - RNA, 19 nt, Homo sapiens
  misc_RNA (1)...(19): siRNA sense strand
gaugcucucucaaccuuaa

SEQ ID NO: 123832 - RNA, 19 nt, Homo sapiens
  misc_RNA (1)...(19): siRNA sense strand
gcuaugaagauccuuauuu

SEQ ID NO: 123833 - RNA, 19 nt, Homo sapiens
  misc_RNA (1)...(19): siRNA sense strand
gcagggaguuuccacaaca

SEQ ID NO: 123834 - RNA, 19 nt, Homo sapiens
  misc_RNA (1)...(19): siRNA sense strand
gaaaucgaccacaaauuau

SEQ ID NO: 123835 - RNA, 19 nt, Homo sapiens
  misc_RNA (1)...(19): siRNA sense strand
gcagcaguaugacauuuau

SEQ ID NO: 123836 - RNA, 19 nt, Homo sapiens
  misc_RNA (1)...(19): siRNA sense strand
caacagcuguauuauaguc

SEQ ID NO: 123837 - RNA, 19 nt, Homo sapiens
  misc_RNA (1)...(19): siRNA sense strand
uagagaagcuggugaacau

SEQ ID NO: 123838 - RNA, 19 nt, Homo sapiens
  misc_RNA (1)...(19): siRNA sense strand
caacagccuugaggaauau

SEQ ID NO: 123839 - RNA, 19 nt, Homo sapiens
  misc_RNA (1)...(19): siRNA sense strand
gcaaaccuucaccaauuua

SEQ ID NO: 123840 - RNA, 19 nt, Homo sapiens
  misc_RNA (1)...(19): siRNA sense strand
caucaacagcuguauuaua

SEQ ID NO: 123841 - RNA, 19 nt, Homo sapiens
  misc_RNA (1)...(19): siRNA sense strand
gagcaaggcagacaacaga

SEQ ID NO: 123842 - RNA, 19 nt, Homo sapiens
  misc_RNA (1)...(19): siRNA sense strand
gagaagcuggugaacauaa

SEQ ID NO: 123843 - RNA, 19 nt, Homo sapiens
  misc_RNA (1)...(19): siRNA sense strand
ccagucagcuagaaagaug

SEQ ID NO: 123844 - RNA, 19 nt, Homo sapiens
  misc_RNA (1)...(19): siRNA sense strand
acagacaucucuccaugaa

SEQ ID NO: 123845 - RNA, 19 nt, Homo sapiens
  misc_RNA (1)...(19): siRNA sense strand
ggagcgagaccgauucaaa

SEQ ID NO: 123846 - RNA, 19 nt, Homo sapiens
  misc_RNA (1)...(19): siRNA sense strand
gauggaauaacucuucuuu

SEQ ID NO: 123847 - RNA, 19 nt, Homo sapiens
  misc_RNA (1)...(19): siRNA sense strand
ugggauaccugccuuguug

SEQ ID NO: 123848 - RNA, 19 nt, Homo sapiens
  misc_RNA (1)...(19): siRNA sense strand
caggaguucuuuggaauuu

SEQ ID NO: 123849 - RNA, 19 nt, Homo sapiens
  misc_RNA (1)...(19): siRNA sense strand
agacaucucuccaugaaag

SEQ ID NO: 123850 - RNA, 19 nt, Homo sapiens
  misc_RNA (1)...(19): siRNA sense strand
caauuuacaucaguuccua

SEQ ID NO: 123851 - RNA, 19 nt, Homo sapiens
  misc_RNA (1)...(19): siRNA sense strand
aaagaggacuccgcaagaa

SEQ ID NO: 123852 - RNA, 19 nt, Homo sapiens
  misc_RNA (1)...(19): siRNA sense strand
gaauuuauccucaugugau

SEQ ID NO: 123853 - RNA, 19 nt, Homo sapiens
  misc_RNA (1)...(19): siRNA sense strand
gaucgcagacggcguugua

SEQ ID NO: 123854 - RNA, 19 nt, Homo sapiens
  misc_RNA (1)...(19): siRNA sense strand
uuacggaguuccuaugcua

SEQ ID NO: 123855 - RNA, 19 nt, Homo sapiens
  misc_RNA (1)...(19): siRNA sense strand
gagaagucauuuccuugga

SEQ ID NO: 123856 - RNA, 19 nt, Homo sapiens
  misc_RNA (1)...(19): siRNA sense strand
gguggaaucagaaccauuu

SEQ ID NO: 123857 - RNA, 19 nt, Homo sapiens
  misc_RNA (1)...(19): siRNA sense strand
cuacaggccuauacaauac

SEQ ID NO: 123858 - RNA, 19 nt, Homo sapiens
  misc_RNA (1)...(19): siRNA sense strand
uuacaggaguucuuuggaa

SEQ ID NO: 123859 - RNA, 19 nt, Homo sapiens
  misc_RNA (1)...(19): siRNA sense strand
gaagaagcucggaagcaaa

SEQ ID NO: 123860 - RNA, 19 nt, Homo sapiens
  misc_RNA (1)...(19): siRNA sense strand
cgaguucacuuuccagcuu

SEQ ID NO: 123861 - RNA, 19 nt, Homo sapiens
  misc_RNA (1)...(19): siRNA sense strand
caaagacucugagccaagu

SEQ ID NO: 123862 - RNA, 19 nt, Homo sapiens
  misc_RNA (1)...(19): siRNA sense strand
gcccaggucuugaauacau

SEQ ID NO: 123863 - RNA, 19 nt, Homo sapiens
  misc_RNA (1)...(19): siRNA sense strand
gcucugaacacaacagcua

SEQ ID NO: 123864 - RNA, 19 nt, Homo sapiens
  misc_RNA (1)...(19): siRNA sense strand
gaaguggaaaggcagauug

SEQ ID NO: 123865 - RNA, 19 nt, Homo sapiens
  misc_RNA (1)...(19): siRNA sense strand
ucaacagacgugccaaaua

SEQ ID NO: 123866 - RNA, 19 nt, Homo sapiens
  misc_RNA (1)...(19): siRNA sense strand
gcagucuccucauagcuau

SEQ ID NO: 123867 - RNA, 19 nt, Homo sapiens
  misc_RNA (1)...(19): siRNA sense strand
gagcgagaccgauucaaau

SEQ ID NO: 123868 - RNA, 19 nt, Homo sapiens
  misc_RNA (1)...(19): siRNA sense strand
gaaguuugcagcauauauc

SEQ ID NO: 123869 - RNA, 19 nt, Homo sapiens
  misc_RNA (1)...(19): siRNA sense strand
uagacucacuguuguaugu

SEQ ID NO: 123870 - RNA, 19 nt, Homo sapiens
  misc_RNA (1)...(19): siRNA sense strand
gcugguagacucacuguug

SEQ ID NO: 123871 - RNA, 19 nt, Homo sapiens
  misc_RNA (1)...(19): siRNA sense strand
gaugauggcaccacaagau

SEQ ID NO: 123872 - RNA, 19 nt, Homo sapiens
  misc_RNA (1)...(19): siRNA sense strand
ccuacaggccuauacaaua

SEQ ID NO: 123873 - RNA, 19 nt, Homo sapiens
  misc_RNA (1)...(19): siRNA sense strand
acagcagcauucauucaua

SEQ ID NO: 123874 - RNA, 19 nt, Homo sapiens
  misc_RNA (1)...(19): siRNA sense strand
acuaaacgaccuucuuaua

SEQ ID NO: 123875 - RNA, 19 nt, Homo sapiens
  misc_RNA (1)...(19): siRNA sense strand
gaccacaaauuauguagac

SEQ ID NO: 123876 - RNA, 19 nt, Homo sapiens
  misc_RNA (1)...(19): siRNA sense strand
ucacauccuuccuugucua

SEQ ID NO: 123877 - RNA, 19 nt, Homo sapiens
  misc_RNA (1)...(19): siRNA sense strand
ugaggaauauggcacuaga

SEQ ID NO: 123878 - RNA, 19 nt, Homo sapiens
  misc_RNA (1)...(19): siRNA sense strand
acaaggaacccucuauuca

SEQ ID NO: 123879 - RNA, 19 nt, Homo sapiens
  misc_RNA (1)...(19): siRNA sense strand
agccaccuaugcaguauua

SEQ ID NO: 123880 - RNA, 19 nt, Homo sapiens
  misc_RNA (1)...(19): siRNA sense strand
ggucuugaauacauuaugg

SEQ ID NO: 123881 - RNA, 19 nt, Homo sapiens
  misc_RNA (1)...(19): siRNA sense strand
gcauagagaagcuggugaa

SEQ ID NO: 123882 - RNA, 19 nt, Homo sapiens
  misc_RNA (1)...(19): siRNA sense strand
ggauggaguugguccuauc

SEQ ID NO: 123883 - RNA, 19 nt, Homo sapiens
  misc_RNA (1)...(19): siRNA sense strand
gaccacagccaccacuauu

SEQ ID NO: 123884 - RNA, 19 nt, Homo sapiens
  misc_RNA (1)...(19): siRNA sense strand
ucucccgacuugcacauua

SEQ ID NO: 123885 - RNA, 19 nt, Homo sapiens
  misc_RNA (1)...(19): siRNA sense strand
cagcagcaguaugacauuu

SEQ ID NO: 123886 - RNA, 19 nt, Homo sapiens
  misc_RNA (1)...(19): siRNA sense strand
cagcagcauucauucauag

SEQ ID NO: 123887 - RNA, 19 nt, Homo sapiens
  misc_RNA (1)...(19): siRNA sense strand
caccagcacuguuaggaau

SEQ ID NO: 123888 - RNA, 19 nt, Homo sapiens
  misc_RNA (1)...(19): siRNA sense strand
ggaaguuugcagcauauau

SEQ ID NO: 123889 - RNA, 19 nt, Homo sapiens
  misc_RNA (1)...(19): siRNA sense strand
uggaauaacucuucuuuug

SEQ ID NO: 123890 - RNA, 19 nt, Homo sapiens
  misc_RNA (1)...(19): siRNA sense strand
ggaauuuauccucauguga

SEQ ID NO: 123891 - RNA, 19 nt, Homo sapiens
  misc_RNA (1)...(19): siRNA sense strand
ggagcaggagcuucaguuu

SEQ ID NO: 123892 - RNA, 19 nt, Homo sapiens
  misc_RNA (1)...(19): siRNA sense strand
acagacagcagcauucauu

SEQ ID NO: 123893 - RNA, 19 nt, Homo sapiens
  misc_RNA (1)...(19): siRNA sense strand
cuaaacgaccuucuuauag

SEQ ID NO: 123894 - RNA, 19 nt, Homo sapiens
  misc_RNA (1)...(19): siRNA sense strand
uauuugcagucuccucaua

SEQ ID NO: 123895 - RNA, 19 nt, Homo sapiens
  misc_RNA (1)...(19): siRNA sense strand
aucaacagcuguauuauag

SEQ ID NO: 123896 - RNA, 19 nt, Homo sapiens
  misc_RNA (1)...(19): siRNA sense strand
gagaaaaucuauugaugca

SEQ ID NO: 123897 - RNA, 19 nt, Homo sapiens
  misc_RNA (1)...(19): siRNA sense strand
gauggagguguguagguua

SEQ ID NO: 123898 - RNA, 19 nt, Homo sapiens
  misc_RNA (1)...(19): siRNA sense strand
ugaguugccugaggucauu

SEQ ID NO: 123899 - RNA, 19 nt, Homo sapiens
  misc_RNA (1)...(19): siRNA sense strand
caauagacagcauucagaa

SEQ ID NO: 123900 - RNA, 19 nt, Homo sapiens
  misc_RNA (1)...(19): siRNA sense strand
cccaaacgcucagggauga

SEQ ID NO: 123901 - RNA, 19 nt, Homo sapiens
  misc_RNA (1)...(19): siRNA sense strand
gaucaacuaacaaccaugu

SEQ ID NO: 123902 - RNA, 19 nt, Homo sapiens
  misc_RNA (1)...(19): siRNA sense strand
aaggauggguggaaucaga

SEQ ID NO: 123903 - RNA, 19 nt, Homo sapiens
  misc_RNA (1)...(19): siRNA sense strand
aaaggaagaucccuaaaua

SEQ ID NO: 123904 - RNA, 19 nt, Homo sapiens
  misc_RNA (1)...(19): siRNA sense strand
gcacuggaaugaaugauuu

SEQ ID NO: 123905 - RNA, 19 nt, Homo sapiens
  misc_RNA (1)...(19): siRNA sense strand
gaccagacaucaagcuuua

SEQ ID NO: 123906 - RNA, 19 nt, Homo sapiens
  misc_RNA (1)...(19): siRNA sense strand
gaagaucccuaaauacguu

SEQ ID NO: 123907 - RNA, 19 nt, Homo sapiens
  misc_RNA (1)...(19): siRNA sense strand
gauaagaaguggcuuggaa

SEQ ID NO: 123908 - RNA, 19 nt, Homo sapiens
  misc_RNA (1)...(19): siRNA sense strand
gaaggaugcuauucugaaa

SEQ ID NO: 123909 - RNA, 19 nt, Homo sapiens
  misc_RNA (1)...(19): siRNA sense strand
gaaaggaaacucacuguug

SEQ ID NO: 123910 - RNA, 19 nt, Homo sapiens
  misc_RNA (1)...(19): siRNA sense strand
caagaaaguugccuaggaa

SEQ ID NO: 123911 - RNA, 19 nt, Homo sapiens
  misc_RNA (1)...(19): siRNA sense strand
gaaauacaauguggcauau

SEQ ID NO: 123912 - RNA, 19 nt, Homo sapiens
  misc_RNA (1)...(19): siRNA sense strand
gaacagauugccagucuuu

SEQ ID NO: 123913 - RNA, 19 nt, Homo sapiens
  misc_RNA (1)...(19): siRNA sense strand
guaaauguuucucagcuaa

SEQ ID NO: 123914 - RNA, 19 nt, Homo sapiens
  misc_RNA (1)...(19): siRNA sense strand
gcacuucucaacaaauuua

SEQ ID NO: 123915 - RNA, 19 nt, Homo sapiens
  misc_RNA (1)...(19): siRNA sense strand
agcagaagcucaacauuua

SEQ ID NO: 123916 - RNA, 19 nt, Homo sapiens
  misc_RNA (1)...(19): siRNA sense strand
gaaguuagauuacauuucc

SEQ ID NO: 123917 - RNA, 19 nt, Homo sapiens
  misc_RNA (1)...(19): siRNA sense strand
gaaacucacuguuggagau

SEQ ID NO: 123918 - RNA, 19 nt, Homo sapiens
  misc_RNA (1)...(19): siRNA sense strand
gaaaguugccuaggaaauu

SEQ ID NO: 123919 - RNA, 19 nt, Homo sapiens
  misc_RNA (1)...(19): siRNA sense strand
ccaguuggauggacacuaa

SEQ ID NO: 123920 - RNA, 19 nt, Homo sapiens
  misc_RNA (1)...(19): siRNA sense strand
gacauuaacuucaaucgau

SEQ ID NO: 123921 - RNA, 19 nt, Homo sapiens
  misc_RNA (1)...(19): siRNA sense strand
ucagaaaguuuggauagua

SEQ ID NO: 123922 - RNA, 19 nt, Homo sapiens
  misc_RNA (1)...(19): siRNA sense strand
gaaaggaagaucccuaaau

SEQ ID NO: 123923 - RNA, 19 nt, Homo sapiens
  misc_RNA (1)...(19): siRNA sense strand
cagaaaguuuggauaguaa

SEQ ID NO: 123924 - RNA, 19 nt, Homo sapiens
  misc_RNA (1)...(19): siRNA sense strand
gggauaagguacuugaaga

SEQ ID NO: 123925 - RNA, 19 nt, Homo sapiens
  misc_RNA (1)...(19): siRNA sense strand
ccagagcaguuuaguaaug

SEQ ID NO: 123926 - RNA, 19 nt, Homo sapiens
  misc_RNA (1)...(19): siRNA sense strand
gaugguaguuccucccaaa

SEQ ID NO: 123927 - RNA, 19 nt, Homo sapiens
  misc_RNA (1)...(19): siRNA sense strand
ucacugaggugcuggauca

SEQ ID NO: 123928 - RNA, 19 nt, Homo sapiens
  misc_RNA (1)...(19): siRNA sense strand
gaagguaccauagaagaaa

SEQ ID NO: 123929 - RNA, 19 nt, Homo sapiens
  misc_RNA (1)...(19): siRNA sense strand
caagagacgcugacauuga

SEQ ID NO: 123930 - RNA, 19 nt, Homo sapiens
  misc_RNA (1)...(19): siRNA sense strand
gcaagaagaaauccgcuuu

SEQ ID NO: 123931 - RNA, 19 nt, Homo sapiens
  misc_RNA (1)...(19): siRNA sense strand
gagaaguuccuaaaccuuu

SEQ ID NO: 123932 - RNA, 19 nt, Homo sapiens
  misc_RNA (1)...(19): siRNA sense strand
uagagacaaucaacaguuu

SEQ ID NO: 123933 - RNA, 19 nt, Homo sapiens
  misc_RNA (1)...(19): siRNA sense strand
ucuaagaaaugggacuuua

SEQ ID NO: 123934 - RNA, 19 nt, Homo sapiens
  misc_RNA (1)...(19): siRNA sense strand
ggauguggauaauucuaaa

SEQ ID NO: 123935 - RNA, 19 nt, Homo sapiens
  misc_RNA (1)...(19): siRNA sense strand
ggaagacugugcaaguugu

SEQ ID NO: 123936 - RNA, 19 nt, Homo sapiens
  misc_RNA (1)...(19): siRNA sense strand
agaauagaauccaugauga

SEQ ID NO: 123937 - RNA, 19 nt, Homo sapiens
  misc_RNA (1)...(19): siRNA sense strand
caagcuuuauccauucaua

SEQ ID NO: 123938 - RNA, 19 nt, Homo sapiens
  misc_RNA (1)...(19): siRNA sense strand
uuacgaagguaccauagaa

SEQ ID NO: 123939 - RNA, 19 nt, Homo sapiens
  misc_RNA (1)...(19): siRNA sense strand
ggaaaccggagaaacuuaa

SEQ ID NO: 123940 - RNA, 19 nt, Homo sapiens
  misc_RNA (1)...(19): siRNA sense strand
uaccagagcaguuuaguaa

SEQ ID NO: 123941 - RNA, 19 nt, Homo sapiens
  misc_RNA (1)...(19): siRNA sense strand
gaaaugcuaagaugaaauc

SEQ ID NO: 123942 - RNA, 19 nt, Homo sapiens
  misc_RNA (1)...(19): siRNA sense strand
uuacagcuuugaucgauuu

SEQ ID NO: 123943 - RNA, 19 nt, Homo sapiens
  misc_RNA (1)...(19): siRNA sense strand
ugaaauacaauguggcaua

SEQ ID NO: 123944 - RNA, 19 nt, Homo sapiens
  misc_RNA (1)...(19): siRNA sense strand
caagacagcggaaucagaa

SEQ ID NO: 123945 - RNA, 19 nt, Homo sapiens
  misc_RNA (1)...(19): siRNA sense strand
gaagaaugcagaaacuguu

SEQ ID NO: 123946 - RNA, 19 nt, Homo sapiens
  misc_RNA (1)...(19): siRNA sense strand
gcaguacagugaauacaca

SEQ ID NO: 123947 - RNA, 19 nt, Homo sapiens
  misc_RNA (1)...(19): siRNA sense strand
uaagggcggugaaguuaga

SEQ ID NO: 123948 - RNA, 19 nt, Homo sapiens
  misc_RNA (1)...(19): siRNA sense strand
ggaaacgguacucuacuaa

SEQ ID NO: 123949 - RNA, 19 nt, Homo sapiens
  misc_RNA (1)...(19): siRNA sense strand
acaagaaaguugccuagga

SEQ ID NO: 123950 - RNA, 19 nt, Homo sapiens
  misc_RNA (1)...(19): siRNA sense strand
agacugcacuucucaacaa

SEQ ID NO: 123951 - RNA, 19 nt, Homo sapiens
  misc_RNA (1)...(19): siRNA sense strand
gaauguagaaugcagaaau

SEQ ID NO: 123952 - RNA, 19 nt, Homo sapiens
  misc_RNA (1)...(19): siRNA sense strand
gcuaaacuaccuggaaaua

SEQ ID NO: 123953 - RNA, 19 nt, Homo sapiens
  misc_RNA (1)...(19): siRNA sense strand
ggagagagucgcacuggaa

SEQ ID NO: 123954 - RNA, 19 nt, Homo sapiens
  misc_RNA (1)...(19): siRNA sense strand
cgauggauguggauaauuc

SEQ ID NO: 123955 - RNA, 19 nt, Homo sapiens
  misc_RNA (1)...(19): siRNA sense strand
aagagacgcugacauugaa

SEQ ID NO: 123956 - RNA, 19 nt, Homo sapiens
  misc_RNA (1)...(19): siRNA sense strand
caauaccacuccugaaaca

SEQ ID NO: 123957 - RNA, 19 nt, Homo sapiens
  misc_RNA (1)...(19): siRNA sense strand
uaaaaugccuuguucagaa

SEQ ID NO: 123958 - RNA, 19 nt, Homo sapiens
  misc_RNA (1)...(19): siRNA sense strand
gaaaccaaacaucaaagaa

SEQ ID NO: 123959 - RNA, 19 nt, Homo sapiens
  misc_RNA (1)...(19): siRNA sense strand
ggaaaccaaacaucaaaga

SEQ ID NO: 123960 - RNA, 19 nt, Homo sapiens
  misc_RNA (1)...(19): siRNA sense strand
acaucaagcuuuauccauu

SEQ ID NO: 123961 - RNA, 19 nt, Homo sapiens
  misc_RNA (1)...(19): siRNA sense strand
caucgaugcucuucacuuc

SEQ ID NO: 123962 - RNA, 19 nt, Homo sapiens
  misc_RNA (1)...(19): siRNA sense strand
gcaugucacuuacgaaggu

SEQ ID NO: 123963 - RNA, 19 nt, Homo sapiens
  misc_RNA (1)...(19): siRNA sense strand
uagaauccaugaugaguuc

SEQ ID NO: 123964 - RNA, 19 nt, Homo sapiens
  misc_RNA (1)...(19): siRNA sense strand
gcacucugucugccaaaua

SEQ ID NO: 123965 - RNA, 19 nt, Homo sapiens
  misc_RNA (1)...(19): siRNA sense strand
ggaaagugaacccgaauca

SEQ ID NO: 123966 - RNA, 19 nt, Homo sapiens
  misc_RNA (1)...(19): siRNA sense strand
aagugaaccucaaacagua

SEQ ID NO: 123967 - RNA, 19 nt, Homo sapiens
  misc_RNA (1)...(19): siRNA sense strand
caugaugaguucuguacaa

SEQ ID NO: 123968 - RNA, 19 nt, Homo sapiens
  misc_RNA (1)...(19): siRNA sense strand
ccacgaagaugggagugaa

SEQ ID NO: 123969 - RNA, 19 nt, Homo sapiens
  misc_RNA (1)...(19): siRNA sense strand
ugaaacagaagaugaauca

SEQ ID NO: 123970 - RNA, 19 nt, Homo sapiens
  misc_RNA (1)...(19): siRNA sense strand
cagaagcucaacauuuaua

SEQ ID NO: 123971 - RNA, 19 nt, Homo sapiens
  misc_RNA (1)...(19): siRNA sense strand
gcaucagacugcagcaaug

SEQ ID NO: 123972 - RNA, 19 nt, Homo sapiens
  misc_RNA (1)...(19): siRNA sense strand
caucaagcuuuauccauuc

SEQ ID NO: 123973 - RNA, 19 nt, Homo sapiens
  misc_RNA (1)...(19): siRNA sense strand
ggaccagacaucaagcuuu

SEQ ID NO: 123974 - RNA, 19 nt, Homo sapiens
  misc_RNA (1)...(19): siRNA sense strand
gaauugaugagagacauuu

SEQ ID NO: 123975 - RNA, 19 nt, Homo sapiens
  misc_RNA (1)...(19): siRNA sense strand
gacgcuaccucgaucaguu

SEQ ID NO: 123976 - RNA, 19 nt, Homo sapiens
  misc_RNA (1)...(19): siRNA sense strand
cuacuggguuggugacauu

SEQ ID NO: 123977 - RNA, 19 nt, Homo sapiens
  misc_RNA (1)...(19): siRNA sense strand
gagggacguucaucaagga

SEQ ID NO: 123978 - RNA, 19 nt, Homo sapiens
  misc_RNA (1)...(19): siRNA sense strand
gccaauaccacuccugaaa

SEQ ID NO: 123979 - RNA, 19 nt, Homo sapiens
  misc_RNA (1)...(19): siRNA sense strand
gcucaacauuuauaucagu

SEQ ID NO: 123980 - RNA, 19 nt, Homo sapiens
  misc_RNA (1)...(19): siRNA sense strand
aagcagaagcucaacauuu

SEQ ID NO: 123981 - RNA, 19 nt, Homo sapiens
  misc_RNA (1)...(19): siRNA sense strand
gacaacaaauugauuagac

SEQ ID NO: 123982 - RNA, 19 nt, Homo sapiens
  misc_RNA (1)...(19): siRNA sense strand
caaguugucagcaagauga

SEQ ID NO: 123983 - RNA, 19 nt, Homo sapiens
  misc_RNA (1)...(19): siRNA sense strand
agcgagaugugguuuauuu

SEQ ID NO: 123984 - RNA, 19 nt, Homo sapiens
  misc_RNA (1)...(19): siRNA sense strand
gagagucgcacuggaauga

SEQ ID NO: 123985 - RNA, 19 nt, Homo sapiens
  misc_RNA (1)...(19): siRNA sense strand
gauggacacuaaaggaauc

SEQ ID NO: 123986 - RNA, 19 nt, Homo sapiens
  misc_RNA (1)...(19): siRNA sense strand
ggaaagugaaccucaaaca

SEQ ID NO: 123987 - RNA, 19 nt, Homo sapiens
  misc_RNA (1)...(19): siRNA sense strand
ucucacaacuguaaagcuu

SEQ ID NO: 123988 - RNA, 19 nt, Homo sapiens
  misc_RNA (1)...(19): siRNA sense strand
ugacacagauagugaagag

SEQ ID NO: 123989 - RNA, 19 nt, Homo sapiens
  misc_RNA (1)...(19): siRNA sense strand
gaauagagacaaucaacag

SEQ ID NO: 123990 - RNA, 19 nt, Homo sapiens
  misc_RNA (1)...(19): siRNA sense strand
agagaccgcugaccauuca

SEQ ID NO: 123991 - RNA, 19 nt, Homo sapiens
  misc_RNA (1)...(19): siRNA sense strand
ugagagacauuuacagcau

SEQ ID NO: 123992 - RNA, 19 nt, Homo sapiens
  misc_RNA (1)...(19): siRNA sense strand
cuaguuacccagacauuaa

SEQ ID NO: 123993 - RNA, 19 nt, Homo sapiens
  misc_RNA (1)...(19): siRNA sense strand
aaucggaguauucuaguua

SEQ ID NO: 123994 - RNA, 19 nt, Homo sapiens
  misc_RNA (1)...(19): siRNA sense strand
gacgaaaugcuaagaugaa

SEQ ID NO: 123995 - RNA, 19 nt, Homo sapiens
  misc_RNA (1)...(19): siRNA sense strand
uaagguacuugaagaagca

SEQ ID NO: 123996 - RNA, 19 nt, Homo sapiens
  misc_RNA (1)...(19): siRNA sense strand
gaacaagaagaugguaguu

SEQ ID NO: 123997 - RNA, 19 nt, Homo sapiens
  misc_RNA (1)...(19): siRNA sense strand
gcaaaugcaaagcagacua

SEQ ID NO: 123998 - RNA, 19 nt, Homo sapiens
  misc_RNA (1)...(19): siRNA sense strand
ggagacaaguccagguuuu

SEQ ID NO: 123999 - RNA, 19 nt, Homo sapiens
  misc_RNA (1)...(19): siRNA sense strand
caaagcagaggacagaaga

SEQ ID NO: 124000 - RNA, 19 nt, Homo sapiens
  misc_RNA (1)...(19): siRNA sense strand
uuucacggcucuucacuga

SEQ ID NO: 124001 - RNA, 19 nt, Homo sapiens
  misc_RNA (1)...(19): siRNA sense strand
gaucacaaugaaugucuaa

SEQ ID NO: 124002 - RNA, 19 nt, Homo sapiens
  misc_RNA (1)...(19): siRNA sense strand
ggaucacaaugaaugucua

SEQ ID NO: 124003 - RNA, 19 nt, Homo sapiens
  misc_RNA (1)...(19): siRNA sense strand
ggacagggaccucauauuu

SEQ ID NO: 124004 - RNA, 19 nt, Homo sapiens
  misc_RNA (1)...(19): siRNA sense strand
acacagggcuccuuuaauu

SEQ ID NO: 124005 - RNA, 19 nt, Homo sapiens
  misc_RNA (1)...(19): siRNA sense strand
uauaagggcuccuaccaua

SEQ ID NO: 124006 - RNA, 19 nt, Homo sapiens
  misc_RNA (1)...(19): siRNA sense strand
ggaagaaccuggccuaucg

SEQ ID NO: 124007 - RNA, 19 nt, Homo sapiens
  misc_RNA (1)...(19): siRNA sense strand
gcaccuggaugcgcuauaa

SEQ ID NO: 124008 - RNA, 19 nt, Homo sapiens
  misc_RNA (1)...(19): siRNA sense strand
gugcagcgcuuuauucuca

SEQ ID NO: 124009 - RNA, 19 nt, Homo sapiens
  misc_RNA (1)...(19): siRNA sense strand
cagauagacuuaaugaaga

SEQ ID NO: 124010 - RNA, 19 nt, Homo sapiens
  misc_RNA (1)...(19): siRNA sense strand
gcacaacucgaccuucuuu

SEQ ID NO: 124011 - RNA, 19 nt, Homo sapiens
  misc_RNA (1)...(19): siRNA sense strand
ggucacacguuacaugcua

SEQ ID NO: 124012 - RNA, 19 nt, Homo sapiens
  misc_RNA (1)...(19): siRNA sense strand
gggacugggucacacguua

SEQ ID NO: 124013 - RNA, 19 nt, Homo sapiens
  misc_RNA (1)...(19): siRNA sense strand
gaauguuggugcucuucua

SEQ ID NO: 124014 - RNA, 19 nt, Homo sapiens
  misc_RNA (1)...(19): siRNA sense strand
gaaaugaggagcagcacuu

SEQ ID NO: 124015 - RNA, 19 nt, Homo sapiens
  misc_RNA (1)...(19): siRNA sense strand
cgauauuggugguuucuuu

SEQ ID NO: 124016 - RNA, 19 nt, Homo sapiens
  misc_RNA (1)...(19): siRNA sense strand
ggagaacuguccgaaucua

SEQ ID NO: 124017 - RNA, 19 nt, Homo sapiens
  misc_RNA (1)...(19): siRNA sense strand
gggccugucuacaacguua

SEQ ID NO: 124018 - RNA, 19 nt, Homo sapiens
  misc_RNA (1)...(19): siRNA sense strand
gaacuguccgaaucuaauu

SEQ ID NO: 124019 - RNA, 19 nt, Homo sapiens
  misc_RNA (1)...(19): siRNA sense strand
gggcugaaaucaacgugaa

SEQ ID NO: 124020 - RNA, 19 nt, Homo sapiens
  misc_RNA (1)...(19): siRNA sense strand
ccacacagggcuccuuuaa

SEQ ID NO: 124021 - RNA, 19 nt, Homo sapiens
  misc_RNA (1)...(19): siRNA sense strand
cagcauugaugauguggaa

SEQ ID NO: 124022 - RNA, 19 nt, Homo sapiens
  misc_RNA (1)...(19): siRNA sense strand
ggacaguugugcggcauga

SEQ ID NO: 124023 - RNA, 19 nt, Homo sapiens
  misc_RNA (1)...(19): siRNA sense strand
caagguggauggucaacug

SEQ ID NO: 124024 - RNA, 19 nt, Homo sapiens
  misc_RNA (1)...(19): siRNA sense strand
ucuggaaacuucaccauug

SEQ ID NO: 124025 - RNA, 19 nt, Homo sapiens
  misc_RNA (1)...(19): siRNA sense strand
ggaucgaguucuccugcua

SEQ ID NO: 124026 - RNA, 19 nt, Homo sapiens
  misc_RNA (1)...(19): siRNA sense strand
ccacacaccuuuguauaag

SEQ ID NO: 124027 - RNA, 19 nt, Homo sapiens
  misc_RNA (1)...(19): siRNA sense strand
ccagauagacuuaaugaag

SEQ ID NO: 124028 - RNA, 19 nt, Homo sapiens
  misc_RNA (1)...(19): siRNA sense strand
gaaccgagcguggacaguu

SEQ ID NO: 124029 - RNA, 19 nt, Homo sapiens
  misc_RNA (1)...(19): siRNA sense strand
gaaaacuucuggaaacuuc

SEQ ID NO: 124030 - RNA, 19 nt, Homo sapiens
  misc_RNA (1)...(19): siRNA sense strand
gaccugcacuuccacuuca

SEQ ID NO: 124031 - RNA, 19 nt, Homo sapiens
  misc_RNA (1)...(19): siRNA sense strand
gcaccagucccuacgugua

SEQ ID NO: 124032 - RNA, 19 nt, Homo sapiens
  misc_RNA (1)...(19): siRNA sense strand
gaaccucacaguacacuca

SEQ ID NO: 124033 - RNA, 19 nt, Homo sapiens
  misc_RNA (1)...(19): siRNA sense strand
gcuccuaccauaccaauga

SEQ ID NO: 124034 - RNA, 19 nt, Homo sapiens
  misc_RNA (1)...(19): siRNA sense strand
cuacauggcugugcucauc

SEQ ID NO: 124035 - RNA, 19 nt, Homo sapiens
  misc_RNA (1)...(19): siRNA sense strand
cuacuaccaugaugaagga

SEQ ID NO: 124036 - RNA, 19 nt, Homo sapiens
  misc_RNA (1)...(19): siRNA sense strand
ggcugaaccuggacacuga

SEQ ID NO: 124037 - RNA, 19 nt, Homo sapiens
  misc_RNA (1)...(19): siRNA sense strand
gccacacaccuuuguauaa

SEQ ID NO: 124038 - RNA, 19 nt, Homo sapiens
  misc_RNA (1)...(19): siRNA sense strand
gggcacaacucgaccuucu

SEQ ID NO: 124039 - RNA, 19 nt, Homo sapiens
  misc_RNA (1)...(19): siRNA sense strand
guaccauccuggcagcaaa

SEQ ID NO: 124040 - RNA, 19 nt, Homo sapiens
  misc_RNA (1)...(19): siRNA sense strand
gcuaugccacgucuuguuu

SEQ ID NO: 124041 - RNA, 19 nt, Homo sapiens
  misc_RNA (1)...(19): siRNA sense strand
cuacgucaguuccuuuguu

SEQ ID NO: 124042 - RNA, 19 nt, Homo sapiens
  misc_RNA (1)...(19): siRNA sense strand
gauguggucuucgccuuug

SEQ ID NO: 124043 - RNA, 19 nt, Homo sapiens
  misc_RNA (1)...(19): siRNA sense strand
gaaccuggacacugagaug

SEQ ID NO: 124044 - RNA, 19 nt, Homo sapiens
  misc_RNA (1)...(19): siRNA sense strand
ggguggaacucaacacauc

SEQ ID NO: 124045 - RNA, 19 nt, Homo sapiens
  misc_RNA (1)...(19): siRNA sense strand
acagggaccucauauuucu

SEQ ID NO: 124046 - RNA, 19 nt, Homo sapiens
  misc_RNA (1)...(19): siRNA sense strand
gugcagcccuaacaugugu

SEQ ID NO: 124047 - RNA, 19 nt, Homo sapiens
  misc_RNA (1)...(19): siRNA sense strand
ggagcuaugccacgucuug

SEQ ID NO: 124048 - RNA, 19 nt, Homo sapiens
  misc_RNA (1)...(19): siRNA sense strand
gaaucuaauugcggagcua

SEQ ID NO: 124049 - RNA, 19 nt, Homo sapiens
  misc_RNA (1)...(19): siRNA sense strand
gagaacuguccgaaucuaa

SEQ ID NO: 124050 - RNA, 19 nt, Homo sapiens
  misc_RNA (1)...(19): siRNA sense strand
ggaugucuccuucuacuuc

SEQ ID NO: 124051 - RNA, 19 nt, Homo sapiens
  misc_RNA (1)...(19): siRNA sense strand
gaagccauuuguaguguac

SEQ ID NO: 124052 - RNA, 19 nt, Homo sapiens
  misc_RNA (1)...(19): siRNA sense strand
ggaaaaccaugcaguuauc

SEQ ID NO: 124053 - RNA, 19 nt, Homo sapiens
  misc_RNA (1)...(19): siRNA sense strand
ggucuucgccuuugaugug

SEQ ID NO: 124054 - RNA, 19 nt, Homo sapiens
  misc_RNA (1)...(19): siRNA sense strand
ggaauccugugaggcuuau

SEQ ID NO: 124055 - RNA, 19 nt, Homo sapiens
  misc_RNA (1)...(19): siRNA sense strand
gauacgaaccgcuccacuu

SEQ ID NO: 124056 - RNA, 19 nt, Homo sapiens
  misc_RNA (1)...(19): siRNA sense strand
gacagggaccucauauuuc

SEQ ID NO: 124057 - RNA, 19 nt, Homo sapiens
  misc_RNA (1)...(19): siRNA sense strand
gauggagacaggagucauu

SEQ ID NO: 124058 - RNA, 19 nt, Homo sapiens
  misc_RNA (1)...(19): siRNA sense strand
guggacaacucgagugaca

SEQ ID NO: 124059 - RNA, 19 nt, Homo sapiens
  misc_RNA (1)...(19): siRNA sense strand
gaguucuccugcuacaauu

SEQ ID NO: 124060 - RNA, 19 nt, Homo sapiens
  misc_RNA (1)...(19): siRNA sense strand
ugaagccauuuguagugua

SEQ ID NO: 124061 - RNA, 19 nt, Homo sapiens
  misc_RNA (1)...(19): siRNA sense strand
uacagcagcucccaaccaa

SEQ ID NO: 124062 - RNA, 19 nt, Homo sapiens
  misc_RNA (1)...(19): siRNA sense strand
gauauuggugguuucuuug

SEQ ID NO: 124063 - RNA, 19 nt, Homo sapiens
  misc_RNA (1)...(19): siRNA sense strand
gguccgggcugaaaucaac

SEQ ID NO: 124064 - RNA, 19 nt, Homo sapiens
  misc_RNA (1)...(19): siRNA sense strand
ggaucaccuucgaggguaa

SEQ ID NO: 124065 - RNA, 19 nt, Homo sapiens
  misc_RNA (1)...(19): siRNA sense strand
ccaaggcugcccacgagua

SEQ ID NO: 124066 - RNA, 19 nt, Homo sapiens
  misc_RNA (1)...(19): siRNA sense strand
ggacgcugcuaccagucuu

SEQ ID NO: 124067 - RNA, 19 nt, Homo sapiens
  misc_RNA (1)...(19): siRNA sense strand
cacguuacaugcuacucua

SEQ ID NO: 124068 - RNA, 19 nt, Homo sapiens
  misc_RNA (1)...(19): siRNA sense strand
caauaucacccguguuuac

SEQ ID NO: 124069 - RNA, 19 nt, Homo sapiens
  misc_RNA (1)...(19): siRNA sense strand
ggauguggucuucgccuuu

SEQ ID NO: 124070 - RNA, 19 nt, Homo sapiens
  misc_RNA (1)...(19): siRNA sense strand
cuggaaacuucaccauuga

SEQ ID NO: 124071 - RNA, 19 nt, Homo sapiens
  misc_RNA (1)...(19): siRNA sense strand
aggccgacauacucuauuu

SEQ ID NO: 124072 - RNA, 19 nt, Homo sapiens
  misc_RNA (1)...(19): siRNA sense strand
ggaguccaggucugaauga

SEQ ID NO: 124073 - RNA, 19 nt, Homo sapiens
  misc_RNA (1)...(19): siRNA sense strand
uggcugugcucaucaagga

SEQ ID NO: 124074 - RNA, 19 nt, Homo sapiens
  misc_RNA (1)...(19): siRNA sense strand
gaugucuccuucuacuuca

SEQ ID NO: 124075 - RNA, 19 nt, Homo sapiens
  misc_RNA (1)...(19): siRNA sense strand
gccaugaccugcacuucca

SEQ ID NO: 124076 - RNA, 19 nt, Homo sapiens
  misc_RNA (1)...(19): siRNA sense strand
agggagaacuguccgaauc

SEQ ID NO: 124077 - RNA, 19 nt, Homo sapiens
  misc_RNA (1)...(19): siRNA sense strand
gcugaggcccuucgaguuc

SEQ ID NO: 124078 - RNA, 19 nt, Homo sapiens
  misc_RNA (1)...(19): siRNA sense strand
gcguggagcgcuauagcua

SEQ ID NO: 124079 - RNA, 19 nt, Homo sapiens
  misc_RNA (1)...(19): siRNA sense strand
cgaguucuccugcuacaau

SEQ ID NO: 124080 - RNA, 19 nt, Homo sapiens
  misc_RNA (1)...(19): siRNA sense strand
ucagugcccuugccaaugc

SEQ ID NO: 124081 - RNA, 19 nt, Homo sapiens
  misc_RNA (1)...(19): siRNA sense strand
ggaaacuucaccauugauc

SEQ ID NO: 124082 - RNA, 19 nt, Homo sapiens
  misc_RNA (1)...(19): siRNA sense strand
caggcggaguccucaauga

SEQ ID NO: 124083 - RNA, 19 nt, Homo sapiens
  misc_RNA (1)...(19): siRNA sense strand
gccuggaugucuccuucua

SEQ ID NO: 124084 - RNA, 19 nt, Homo sapiens
  misc_RNA (1)...(19): siRNA sense strand
acccaugacugcugagcua

SEQ ID NO: 124085 - RNA, 19 nt, Homo sapiens
  misc_RNA (1)...(19): siRNA sense strand
caacguggcuccccucaag

SEQ ID NO: 124086 - RNA, 19 nt, Homo sapiens
  misc_RNA (1)...(19): siRNA sense strand
gaacccacgcggcaagauc

SEQ ID NO: 124087 - RNA, 19 nt, Homo sapiens
  misc_RNA (1)...(19): siRNA sense strand
guauuuagggcgugugaug

SEQ ID NO: 124088 - RNA, 19 nt, Homo sapiens
  misc_RNA (1)...(19): siRNA sense strand
ugugggaucugcagagcuu

SEQ ID NO: 124089 - RNA, 19 nt, Homo sapiens
  misc_RNA (1)...(19): siRNA sense strand
gguccucuuugauacaugu

SEQ ID NO: 124090 - RNA, 19 nt, Homo sapiens
  misc_RNA (1)...(19): siRNA sense strand
gccgaaagaagcuucaguu

SEQ ID NO: 124091 - RNA, 19 nt, Homo sapiens
  misc_RNA (1)...(19): siRNA sense strand
gcagcgcuuuauucucaau

SEQ ID NO: 124092 - RNA, 19 nt, Homo sapiens
  misc_RNA (1)...(19): siRNA sense strand
gcugcuggguaccgacuga

SEQ ID NO: 124093 - RNA, 19 nt, Homo sapiens
  misc_RNA (1)...(19): siRNA sense strand
ccucacaacuucguucaag

SEQ ID NO: 124094 - RNA, 19 nt, Homo sapiens
  misc_RNA (1)...(19): siRNA sense strand
aaccuggccuaucggcaua

SEQ ID NO: 124095 - RNA, 19 nt, Homo sapiens
  misc_RNA (1)...(19): siRNA sense strand
gcaaaaucaucgcuauaag

SEQ ID NO: 124096 - RNA, 19 nt, Homo sapiens
  misc_RNA (1)...(19): siRNA sense strand
ggacuacuucccacugaca

SEQ ID NO: 124097 - RNA, 19 nt, Homo sapiens
  misc_RNA (1)...(19): siRNA sense strand
ccgacugaaugacggcuuu

SEQ ID NO: 124098 - RNA, 19 nt, Homo sapiens
  misc_RNA (1)...(19): siRNA sense strand
ucaccgggcuucuccuuuu

SEQ ID NO: 124099 - RNA, 19 nt, Homo sapiens
  misc_RNA (1)...(19): siRNA sense strand
gaggucuccuucagcuuca

SEQ ID NO: 124100 - RNA, 19 nt, Homo sapiens
  misc_RNA (1)...(19): siRNA sense strand
ugccacgucuuguuucaga

SEQ ID NO: 124101 - RNA, 19 nt, Homo sapiens
  misc_RNA (1)...(19): siRNA sense strand
ggacagccaguuggacuca

SEQ ID NO: 124102 - RNA, 19 nt, Homo sapiens
  misc_RNA (1)...(19): siRNA sense strand
gcucuacgucaguuccuuu

SEQ ID NO: 124103 - RNA, 19 nt, Homo sapiens
  misc_RNA (1)...(19): siRNA sense strand
gaaaccagcugcuccuuga

SEQ ID NO: 124104 - RNA, 19 nt, Homo sapiens
  misc_RNA (1)...(19): siRNA sense strand
gaaaccagcaaccucuaua

SEQ ID NO: 124105 - RNA, 19 nt, Homo sapiens
  misc_RNA (1)...(19): siRNA sense strand
gaguucagcuucuggaaug

SEQ ID NO: 124106 - RNA, 19 nt, Homo sapiens
  misc_RNA (1)...(19): siRNA sense strand
gaagagaggcugggaugaa

SEQ ID NO: 124107 - RNA, 19 nt, Homo sapiens
  misc_RNA (1)...(19): siRNA sense strand
ccagcaaccucuauaagau

SEQ ID NO: 124108 - RNA, 19 nt, Homo sapiens
  misc_RNA (1)...(19): siRNA sense strand
gauccaguuucacaaugua

SEQ ID NO: 124109 - RNA, 19 nt, Homo sapiens
  misc_RNA (1)...(19): siRNA sense strand
ucuauaagauccaguuuca

SEQ ID NO: 124110 - RNA, 19 nt, Homo sapiens
  misc_RNA (1)...(19): siRNA sense strand
gaagggagcggacgcagau

SEQ ID NO: 124111 - RNA, 19 nt, Homo sapiens
  misc_RNA (1)...(19): siRNA sense strand
gcaacuggaacacguggua

SEQ ID NO: 124112 - RNA, 19 nt, Homo sapiens
  misc_RNA (1)...(19): siRNA sense strand
gaucucgccucugcaguga

SEQ ID NO: 124113 - RNA, 19 nt, Homo sapiens
  misc_RNA (1)...(19): siRNA sense strand
gaaaaugucuacuauacag

SEQ ID NO: 124114 - RNA, 19 nt, Homo sapiens
  misc_RNA (1)...(19): siRNA sense strand
caccaucucugggccuaua

SEQ ID NO: 124115 - RNA, 19 nt, Homo sapiens
  misc_RNA (1)...(19): siRNA sense strand
aagagaggcugggaugaaa

SEQ ID NO: 124116 - RNA, 19 nt, Homo sapiens
  misc_RNA (1)...(19): siRNA sense strand
ccacccugcuguccaagaa

SEQ ID NO: 124117 - RNA, 19 nt, Homo sapiens
  misc_RNA (1)...(19): siRNA sense strand
ggaugaaaaugucuacuau

SEQ ID NO: 124118 - RNA, 19 nt, Homo sapiens
  misc_RNA (1)...(19): siRNA sense strand
ggaaaccagcaaccucuau

SEQ ID NO: 124119 - RNA, 19 nt, Homo sapiens
  misc_RNA (1)...(19): siRNA sense strand
gggcucgggccaucaagua

SEQ ID NO: 124120 - RNA, 19 nt, Homo sapiens
  misc_RNA (1)...(19): siRNA sense strand
ucaaguaccggcaggagaa

SEQ ID NO: 124121 - RNA, 19 nt, Homo sapiens
  misc_RNA (1)...(19): siRNA sense strand
uauaagauccaguuucaca

SEQ ID NO: 124122 - RNA, 19 nt, Homo sapiens
  misc_RNA (1)...(19): siRNA sense strand
aaaccagcaaccucuauaa

SEQ ID NO: 124123 - RNA, 19 nt, Homo sapiens
  misc_RNA (1)...(19): siRNA sense strand
uaagauccaguuucacaau

SEQ ID NO: 124124 - RNA, 19 nt, Homo sapiens
  misc_RNA (1)...(19): siRNA sense strand
cacauggagucuaggauca

SEQ ID NO: 124125 - RNA, 19 nt, Homo sapiens
  misc_RNA (1)...(19): siRNA sense strand
gaugaggacuacccaugcu

SEQ ID NO: 124126 - RNA, 19 nt, Homo sapiens
  misc_RNA (1)...(19): siRNA sense strand
ggaagagaggcugggauga

SEQ ID NO: 124127 - RNA, 19 nt, Homo sapiens
  misc_RNA (1)...(19): siRNA sense strand
ccaagaaggaaaccagcaa

SEQ ID NO: 124128 - RNA, 19 nt, Homo sapiens
  misc_RNA (1)...(19): siRNA sense strand
gaaacgcugccuggaggaa

SEQ ID NO: 124129 - RNA, 19 nt, Homo sapiens
  misc_RNA (1)...(19): siRNA sense strand
caauguaaagccugaauac

SEQ ID NO: 124130 - RNA, 19 nt, Homo sapiens
  misc_RNA (1)...(19): siRNA sense strand
aagauccaguuucacaaug

SEQ ID NO: 124131 - RNA, 19 nt, Homo sapiens
  misc_RNA (1)...(19): siRNA sense strand
acaauguaaagccugaaua

SEQ ID NO: 124132 - RNA, 19 nt, Homo sapiens
  misc_RNA (1)...(19): siRNA sense strand
gcaccuguggcgauucuca

SEQ ID NO: 124133 - RNA, 19 nt, Homo sapiens
  misc_RNA (1)...(19): siRNA sense strand
cggcuucuucucacagaua

SEQ ID NO: 124134 - RNA, 19 nt, Homo sapiens
  misc_RNA (1)...(19): siRNA sense strand
gcccaagcuucaccuggau

SEQ ID NO: 124135 - RNA, 19 nt, Homo sapiens
  misc_RNA (1)...(19): siRNA sense strand
cgacacauggagucuagga

SEQ ID NO: 124136 - RNA, 19 nt, Homo sapiens
  misc_RNA (1)...(19): siRNA sense strand
agauccaguuucacaaugu

SEQ ID NO: 124137 - RNA, 19 nt, Homo sapiens
  misc_RNA (1)...(19): siRNA sense strand
ucuauuccaaggacaauga

SEQ ID NO: 124138 - RNA, 19 nt, Homo sapiens
  misc_RNA (1)...(19): siRNA sense strand
cagcaaccucuauaagauc

SEQ ID NO: 124139 - RNA, 19 nt, Homo sapiens
  misc_RNA (1)...(19): siRNA sense strand
ccaagcuucaccuggauga

SEQ ID NO: 124140 - RNA, 19 nt, Homo sapiens
  misc_RNA (1)...(19): siRNA sense strand
ucaccuggaugaggacuac

SEQ ID NO: 124141 - RNA, 19 nt, Homo sapiens
  misc_RNA (1)...(19): siRNA sense strand
gggaugaaaaugucuacua

SEQ ID NO: 124142 - RNA, 19 nt, Homo sapiens
  misc_RNA (1)...(19): siRNA sense strand
gugcaccuguggcgauucu

SEQ ID NO: 124143 - RNA, 19 nt, Homo sapiens
  misc_RNA (1)...(19): siRNA sense strand
gagccacagcccagaaugg

SEQ ID NO: 124144 - RNA, 19 nt, Homo sapiens
  misc_RNA (1)...(19): siRNA sense strand
guuccgcucccucuuuguu

SEQ ID NO: 124145 - RNA, 19 nt, Homo sapiens
  misc_RNA (1)...(19): siRNA sense strand
ggaaacaucauuaagaaga

SEQ ID NO: 124146 - RNA, 19 nt, Homo sapiens
  misc_RNA (1)...(19): siRNA sense strand
gcaauaaacccuacagcaa

SEQ ID NO: 124147 - RNA, 19 nt, Homo sapiens
  misc_RNA (1)...(19): siRNA sense strand
guacguggaugugguguuu

SEQ ID NO: 124148 - RNA, 19 nt, Homo sapiens
  misc_RNA (1)...(19): siRNA sense strand
caauaaacccuacagcaaa

SEQ ID NO: 124149 - RNA, 19 nt, Homo sapiens
  misc_RNA (1)...(19): siRNA sense strand
guacugggaaacaucauua

SEQ ID NO: 124150 - RNA, 19 nt, Homo sapiens
  misc_RNA (1)...(19): siRNA sense strand
ugggaaacaucauuaagaa

SEQ ID NO: 124151 - RNA, 19 nt, Homo sapiens
  misc_RNA (1)...(19): siRNA sense strand
gaggccagaucaccgauga

SEQ ID NO: 124152 - RNA, 19 nt, Homo sapiens
  misc_RNA (1)...(19): siRNA sense strand
ccacgagauugauaguauu

SEQ ID NO: 124153 - RNA, 19 nt, Homo sapiens
  misc_RNA (1)...(19): siRNA sense strand
gaccuuggccuaugauaau

SEQ ID NO: 124154 - RNA, 19 nt, Homo sapiens
  misc_RNA (1)...(19): siRNA sense strand
cauaaucgaaggucugaaa

SEQ ID NO: 124155 - RNA, 19 nt, Homo sapiens
  misc_RNA (1)...(19): siRNA sense strand
ccagaucaccgaugagaug

SEQ ID NO: 124156 - RNA, 19 nt, Homo sapiens
  misc_RNA (1)...(19): siRNA sense strand
cggaccagcucauggagaa

SEQ ID NO: 124157 - RNA, 19 nt, Homo sapiens
  misc_RNA (1)...(19): siRNA sense strand
ggagcuguuccacaagaua

SEQ ID NO: 124158 - RNA, 19 nt, Homo sapiens
  misc_RNA (1)...(19): siRNA sense strand
ugccggagcuguuccacaa

SEQ ID NO: 124159 - RNA, 19 nt, Homo sapiens
  misc_RNA (1)...(19): siRNA sense strand
uccacgagauugauaguau

SEQ ID NO: 124160 - RNA, 19 nt, Homo sapiens
  misc_RNA (1)...(19): siRNA sense strand
ccaggaagcacauaaucga

SEQ ID NO: 124161 - RNA, 19 nt, Homo sapiens
  misc_RNA (1)...(19): siRNA sense strand
gaagugguacugggaaaca

SEQ ID NO: 124162 - RNA, 19 nt, Homo sapiens
  misc_RNA (1)...(19): siRNA sense strand
ccuggugccugaggaauga

SEQ ID NO: 124163 - RNA, 19 nt, Homo sapiens
  misc_RNA (1)...(19): siRNA sense strand
ugaccuuggccuaugauaa

SEQ ID NO: 124164 - RNA, 19 nt, Homo sapiens
  misc_RNA (1)...(19): siRNA sense strand
ccggagcuguuccacaaga

SEQ ID NO: 124165 - RNA, 19 nt, Homo sapiens
  misc_RNA (1)...(19): siRNA sense strand
gcucaugaccuuggccuau

SEQ ID NO: 124166 - RNA, 19 nt, Homo sapiens
  misc_RNA (1)...(19): siRNA sense strand
ccucuggccuguggcauug

SEQ ID NO: 124167 - RNA, 19 nt, Homo sapiens
  misc_RNA (1)...(19): siRNA sense strand
gacugcagcuggaguacgu

SEQ ID NO: 124168 - RNA, 19 nt, Homo sapiens
  misc_RNA (1)...(19): siRNA sense strand
gagcuguuccacaagauag

SEQ ID NO: 124169 - RNA, 19 nt, Homo sapiens
  misc_RNA (1)...(19): siRNA sense strand
aauaaacccuacagcaaaa

SEQ ID NO: 124170 - RNA, 19 nt, Homo sapiens
  misc_RNA (1)...(19): siRNA sense strand
cgagauugauaguauuuug

SEQ ID NO: 124171 - RNA, 19 nt, Homo sapiens
  misc_RNA (1)...(19): siRNA sense strand
cacgagauugauaguauuu

SEQ ID NO: 124172 - RNA, 19 nt, Homo sapiens
  misc_RNA (1)...(19): siRNA sense strand
caucccacccuacucaaga

SEQ ID NO: 124173 - RNA, 19 nt, Homo sapiens
  misc_RNA (1)...(19): siRNA sense strand
accaguggcugaaggacaa

SEQ ID NO: 124174 - RNA, 19 nt, Homo sapiens
  misc_RNA (1)...(19): siRNA sense strand
cugggaaacaucauuaaga

SEQ ID NO: 124175 - RNA, 19 nt, Homo sapiens
  misc_RNA (1)...(19): siRNA sense strand
ggccagaucaccgaugaga

SEQ ID NO: 124176 - RNA, 19 nt, Homo sapiens
  misc_RNA (1)...(19): siRNA sense strand
auaauggcaucaaccucuu

SEQ ID NO: 124177 - RNA, 19 nt, Homo sapiens
  misc_RNA (1)...(19): siRNA sense strand
gguacugggaaacaucauu

SEQ ID NO: 124178 - RNA, 19 nt, Homo sapiens
  misc_RNA (1)...(19): siRNA sense strand
cugaagugguacugggaaa

SEQ ID NO: 124179 - RNA, 19 nt, Homo sapiens
  misc_RNA (1)...(19): siRNA sense strand
aaucgaaggucugaaagcu

SEQ ID NO: 124180 - RNA, 19 nt, Homo sapiens
  misc_RNA (1)...(19): siRNA sense strand
caggaagcacauaaucgaa

SEQ ID NO: 124181 - RNA, 19 nt, Homo sapiens
  misc_RNA (1)...(19): siRNA sense strand
cauuguuucuggcaaguac

SEQ ID NO: 124182 - RNA, 19 nt, Homo sapiens
  misc_RNA (1)...(19): siRNA sense strand
ggaaacaucauuaagaaga

SEQ ID NO: 124183 - RNA, 19 nt, Homo sapiens
  misc_RNA (1)...(19): siRNA sense strand
gcaauaaacccuacagcaa

SEQ ID NO: 124184 - RNA, 19 nt, Homo sapiens
  misc_RNA (1)...(19): siRNA sense strand
guacguggaugugguguuu

SEQ ID NO: 124185 - RNA, 19 nt, Homo sapiens
  misc_RNA (1)...(19): siRNA sense strand
caauaaacccuacagcaaa

SEQ ID NO: 124186 - RNA, 19 nt, Homo sapiens
  misc_RNA (1)...(19): siRNA sense strand
guacugggaaacaucauua

SEQ ID NO: 124187 - RNA, 19 nt, Homo sapiens
  misc_RNA (1)...(19): siRNA sense strand
ugggaaacaucauuaagaa

SEQ ID NO: 124188 - RNA, 19 nt, Homo sapiens
  misc_RNA (1)...(19): siRNA sense strand
gaggccagaucaccgauga

SEQ ID NO: 124189 - RNA, 19 nt, Homo sapiens
  misc_RNA (1)...(19): siRNA sense strand
ccacgagauugauaguauu

SEQ ID NO: 124190 - RNA, 19 nt, Homo sapiens
  misc_RNA (1)...(19): siRNA sense strand
gaccuuggccuaugauaau

SEQ ID NO: 124191 - RNA, 19 nt, Homo sapiens
  misc_RNA (1)...(19): siRNA sense strand
cauaaucgaaggucugaaa

SEQ ID NO: 124192 - RNA, 19 nt, Homo sapiens
  misc_RNA (1)...(19): siRNA sense strand
ccagaucaccgaugagaug

SEQ ID NO: 124193 - RNA, 19 nt, Homo sapiens
  misc_RNA (1)...(19): siRNA sense strand
cggaccagcucauggagaa

SEQ ID NO: 124194 - RNA, 19 nt, Homo sapiens
  misc_RNA (1)...(19): siRNA sense strand
ggagcuguuccacaagaua

SEQ ID NO: 124195 - RNA, 19 nt, Homo sapiens
  misc_RNA (1)...(19): siRNA sense strand
ugccggagcuguuccacaa

SEQ ID NO: 124196 - RNA, 19 nt, Homo sapiens
  misc_RNA (1)...(19): siRNA sense strand
uccacgagauugauaguau

SEQ ID NO: 124197 - RNA, 19 nt, Homo sapiens
  misc_RNA (1)...(19): siRNA sense strand
ccaggaagcacauaaucga

SEQ ID NO: 124198 - RNA, 19 nt, Homo sapiens
  misc_RNA (1)...(19): siRNA sense strand
gaagugguacugggaaaca

SEQ ID NO: 124199 - RNA, 19 nt, Homo sapiens
  misc_RNA (1)...(19): siRNA sense strand
ccuggugccugaggaauga

SEQ ID NO: 124200 - RNA, 19 nt, Homo sapiens
  misc_RNA (1)...(19): siRNA sense strand
ugaccuuggccuaugauaa

SEQ ID NO: 124201 - RNA, 19 nt, Homo sapiens
  misc_RNA (1)...(19): siRNA sense strand
ccggagcuguuccacaaga

SEQ ID NO: 124202 - RNA, 19 nt, Homo sapiens
  misc_RNA (1)...(19): siRNA sense strand
gcucaugaccuuggccuau

SEQ ID NO: 124203 - RNA, 19 nt, Homo sapiens
  misc_RNA (1)...(19): siRNA sense strand
ccucuggccuguggcauug

SEQ ID NO: 124204 - RNA, 19 nt, Homo sapiens
  misc_RNA (1)...(19): siRNA sense strand
gacugcagcuggaguacgu

SEQ ID NO: 124205 - RNA, 19 nt, Homo sapiens
  misc_RNA (1)...(19): siRNA sense strand
gagcuguuccacaagauag

SEQ ID NO: 124206 - RNA, 19 nt, Homo sapiens
  misc_RNA (1)...(19): siRNA sense strand
aauaaacccuacagcaaaa

SEQ ID NO: 124207 - RNA, 19 nt, Homo sapiens
  misc_RNA (1)...(19): siRNA sense strand
cgagauugauaguauuuug

SEQ ID NO: 124208 - RNA, 19 nt, Homo sapiens
  misc_RNA (1)...(19): siRNA sense strand
cacgagauugauaguauuu

SEQ ID NO: 124209 - RNA, 19 nt, Homo sapiens
  misc_RNA (1)...(19): siRNA sense strand
caucccacccuacucaaga

SEQ ID NO: 124210 - RNA, 19 nt, Homo sapiens
  misc_RNA (1)...(19): siRNA sense strand
accaguggcugaaggacaa

SEQ ID NO: 124211 - RNA, 19 nt, Homo sapiens
  misc_RNA (1)...(19): siRNA sense strand
cugggaaacaucauuaaga

SEQ ID NO: 124212 - RNA, 19 nt, Homo sapiens
  misc_RNA (1)...(19): siRNA sense strand
ggccagaucaccgaugaga

SEQ ID NO: 124213 - RNA, 19 nt, Homo sapiens
  misc_RNA (1)...(19): siRNA sense strand
auaauggcaucaaccucuu

SEQ ID NO: 124214 - RNA, 19 nt, Homo sapiens
  misc_RNA (1)...(19): siRNA sense strand
gguacugggaaacaucauu

SEQ ID NO: 124215 - RNA, 19 nt, Homo sapiens
  misc_RNA (1)...(19): siRNA sense strand
cugaagugguacugggaaa

SEQ ID NO: 124216 - RNA, 19 nt, Homo sapiens
  misc_RNA (1)...(19): siRNA sense strand
aaucgaaggucugaaagcu

SEQ ID NO: 124217 - RNA, 19 nt, Homo sapiens
  misc_RNA (1)...(19): siRNA sense strand
caggaagcacauaaucgaa

SEQ ID NO: 124218 - RNA, 19 nt, Homo sapiens
  misc_RNA (1)...(19): siRNA sense strand
cauuguuucuggcaaguac

SEQ ID NO: 124219 - RNA, 19 nt, Homo sapiens
  misc_RNA (1)...(19): siRNA sense strand
gcagauugguucauacuuu

SEQ ID NO: 124220 - RNA, 19 nt, Homo sapiens
  misc_RNA (1)...(19): siRNA sense strand
uggaacaacugaugucuua

SEQ ID NO: 124221 - RNA, 19 nt, Homo sapiens
  misc_RNA (1)...(19): siRNA sense strand
ggaaagugcugguaucuac

SEQ ID NO: 124222 - RNA, 19 nt, Homo sapiens
  misc_RNA (1)...(19): siRNA sense strand
gaacaucacccacgccuau

SEQ ID NO: 124223 - RNA, 19 nt, Homo sapiens
  misc_RNA (1)...(19): siRNA sense strand
gaucaccaauucuacauga

SEQ ID NO: 124224 - RNA, 19 nt, Homo sapiens
  misc_RNA (1)...(19): siRNA sense strand
guucagaccuuccuacgaa

SEQ ID NO: 124225 - RNA, 19 nt, Homo sapiens
  misc_RNA (1)...(19): siRNA sense strand
caacugaugucuuacuugu

SEQ ID NO: 124226 - RNA, 19 nt, Homo sapiens
  misc_RNA (1)...(19): siRNA sense strand
gaaaugggacccuucaaga

SEQ ID NO: 124227 - RNA, 19 nt, Homo sapiens
  misc_RNA (1)...(19): siRNA sense strand
ccacuuaggugacuaccaa

SEQ ID NO: 124228 - RNA, 19 nt, Homo sapiens
  misc_RNA (1)...(19): siRNA sense strand
gaagagaaguuggagcaau

SEQ ID NO: 124229 - RNA, 19 nt, Homo sapiens
  misc_RNA (1)...(19): siRNA sense strand
ucacagaccuggugcuuca

SEQ ID NO: 124230 - RNA, 19 nt, Homo sapiens
  misc_RNA (1)...(19): siRNA sense strand
gaugagcgauucuucuuca

SEQ ID NO: 124231 - RNA, 19 nt, Homo sapiens
  misc_RNA (1)...(19): siRNA sense strand
gggagcagauugguucaua

SEQ ID NO: 124232 - RNA, 19 nt, Homo sapiens
  misc_RNA (1)...(19): siRNA sense strand
gaaaaucccugaggaagaa

SEQ ID NO: 124233 - RNA, 19 nt, Homo sapiens
  misc_RNA (1)...(19): siRNA sense strand
gagcgauucuucuucaaug

SEQ ID NO: 124234 - RNA, 19 nt, Homo sapiens
  misc_RNA (1)...(19): siRNA sense strand
cagccuacauccaauauga

SEQ ID NO: 124235 - RNA, 19 nt, Homo sapiens
  misc_RNA (1)...(19): siRNA sense strand
ggaaaugucucagauuggu

SEQ ID NO: 124236 - RNA, 19 nt, Homo sapiens
  misc_RNA (1)...(19): siRNA sense strand
ucacccaccucuauacaaa

SEQ ID NO: 124237 - RNA, 19 nt, Homo sapiens
  misc_RNA (1)...(19): siRNA sense strand
ggagagcccuguacaugag

SEQ ID NO: 124238 - RNA, 19 nt, Homo sapiens
  misc_RNA (1)...(19): siRNA sense strand
gcaauuacuuccuaucacu

SEQ ID NO: 124239 - RNA, 19 nt, Homo sapiens
  misc_RNA (1)...(19): siRNA sense strand
gaaccuaggcugcuaugug

SEQ ID NO: 124240 - RNA, 19 nt, Homo sapiens
  misc_RNA (1)...(19): siRNA sense strand
gcacagaaggguucaguca

SEQ ID NO: 124241 - RNA, 19 nt, Homo sapiens
  misc_RNA (1)...(19): siRNA sense strand
caagugaccucccguacuc

SEQ ID NO: 124242 - RNA, 19 nt, Homo sapiens
  misc_RNA (1)...(19): siRNA sense strand
gcacuaggagaucggauuu

SEQ ID NO: 124243 - RNA, 19 nt, Homo sapiens
  misc_RNA (1)...(19): siRNA sense strand
ugaggucucuguuggacua

SEQ ID NO: 124244 - RNA, 19 nt, Homo sapiens
  misc_RNA (1)...(19): siRNA sense strand
gcccuuugcuuccaaguga

SEQ ID NO: 124245 - RNA, 19 nt, Homo sapiens
  misc_RNA (1)...(19): siRNA sense strand
gaauuuggauacagugucu

SEQ ID NO: 124246 - RNA, 19 nt, Homo sapiens
  misc_RNA (1)...(19): siRNA sense strand
uuagaacuauugccaguga

SEQ ID NO: 124247 - RNA, 19 nt, Homo sapiens
  misc_RNA (1)...(19): siRNA sense strand
cagauugguucauacuuug

SEQ ID NO: 124248 - RNA, 19 nt, Homo sapiens
  misc_RNA (1)...(19): siRNA sense strand
gcccaacgcugcccaacau

SEQ ID NO: 124249 - RNA, 19 nt, Homo sapiens
  misc_RNA (1)...(19): siRNA sense strand
ugucucaagucaucacuaa

SEQ ID NO: 124250 - RNA, 19 nt, Homo sapiens
  misc_RNA (1)...(19): siRNA sense strand
gcuaaaggaugggauucuu

SEQ ID NO: 124251 - RNA, 19 nt, Homo sapiens
  misc_RNA (1)...(19): siRNA sense strand
gcagcucugucuucaguuc

SEQ ID NO: 124252 - RNA, 19 nt, Homo sapiens
  misc_RNA (1)...(19): siRNA sense strand
ggagcuuccugcagcacua

SEQ ID NO: 124253 - RNA, 19 nt, Homo sapiens
  misc_RNA (1)...(19): siRNA sense strand
aaagacugcccaagcaaua

SEQ ID NO: 124254 - RNA, 19 nt, Homo sapiens
  misc_RNA (1)...(19): siRNA sense strand
gauacagugucuuacaaca

SEQ ID NO: 124255 - RNA, 19 nt, Homo sapiens
  misc_RNA (1)...(19): siRNA sense strand
gaaggaagaaguggugaga

SEQ ID NO: 124256 - RNA, 19 nt, Homo sapiens
  misc_RNA (1)...(19): siRNA sense strand
gucaucgccuuccagcuua

SEQ ID NO: 124257 - RNA, 19 nt, Homo sapiens
  misc_RNA (1)...(19): siRNA sense strand
ucagagagagagcccaaua

SEQ ID NO: 124258 - RNA, 19 nt, Homo sapiens
  misc_RNA (1)...(19): siRNA sense strand
caugggagcucuuccugau

SEQ ID NO: 124259 - RNA, 19 nt, Homo sapiens
  misc_RNA (1)...(19): siRNA sense strand
gagcucugcccauuggaua

SEQ ID NO: 124260 - RNA, 19 nt, Homo sapiens
  misc_RNA (1)...(19): siRNA sense strand
guucauacuuuggcaguga

SEQ ID NO: 124261 - RNA, 19 nt, Homo sapiens
  misc_RNA (1)...(19): siRNA sense strand
gggagagcccuguacauga

SEQ ID NO: 124262 - RNA, 19 nt, Homo sapiens
  misc_RNA (1)...(19): siRNA sense strand
aaugggacccuucaagaua

SEQ ID NO: 124263 - RNA, 19 nt, Homo sapiens
  misc_RNA (1)...(19): siRNA sense strand
gugacagccuggagagaaa

SEQ ID NO: 124264 - RNA, 19 nt, Homo sapiens
  misc_RNA (1)...(19): siRNA sense strand
cuacaacucuggagaacag

SEQ ID NO: 124265 - RNA, 19 nt, Homo sapiens
  misc_RNA (1)...(19): siRNA sense strand
cuggaaaugucucagauug

SEQ ID NO: 124266 - RNA, 19 nt, Homo sapiens
  misc_RNA (1)...(19): siRNA sense strand
guuuaucgcugcccuguag

SEQ ID NO: 124267 - RNA, 19 nt, Homo sapiens
  misc_RNA (1)...(19): siRNA sense strand
aagagaaguuggagcaaug

SEQ ID NO: 124268 - RNA, 19 nt, Homo sapiens
  misc_RNA (1)...(19): siRNA sense strand
uacagugucuuacaacaug

SEQ ID NO: 124269 - RNA, 19 nt, Homo sapiens
  misc_RNA (1)...(19): siRNA sense strand
ugucuucaguucugggaua

SEQ ID NO: 124270 - RNA, 19 nt, Homo sapiens
  misc_RNA (1)...(19): siRNA sense strand
caacacacaaacagacuga

SEQ ID NO: 124271 - RNA, 19 nt, Homo sapiens
  misc_RNA (1)...(19): siRNA sense strand
caagucaucacuaacaaug

SEQ ID NO: 124272 - RNA, 19 nt, Homo sapiens
  misc_RNA (1)...(19): siRNA sense strand
gaacaacugaugucuuacu

SEQ ID NO: 124273 - RNA, 19 nt, Homo sapiens
  misc_RNA (1)...(19): siRNA sense strand
gcuccucgauuuagacauc

SEQ ID NO: 124274 - RNA, 19 nt, Homo sapiens
  misc_RNA (1)...(19): siRNA sense strand
gaagcugaauuuggauaca

SEQ ID NO: 124275 - RNA, 19 nt, Homo sapiens
  misc_RNA (1)...(19): siRNA sense strand
gaagagccaaguucaaguc

SEQ ID NO: 124276 - RNA, 19 nt, Homo sapiens
  misc_RNA (1)...(19): siRNA sense strand
ggucucuguuggacuauug

SEQ ID NO: 124277 - RNA, 19 nt, Homo sapiens
  misc_RNA (1)...(19): siRNA sense strand
agagagagcccaauaaagg

SEQ ID NO: 124278 - RNA, 19 nt, Homo sapiens
  misc_RNA (1)...(19): siRNA sense strand
agagagagagcccaauaaa

SEQ ID NO: 124279 - RNA, 19 nt, Homo sapiens
  misc_RNA (1)...(19): siRNA sense strand
ggccuugacugugaccuuu

SEQ ID NO: 124280 - RNA, 19 nt, Homo sapiens
  misc_RNA (1)...(19): siRNA sense strand
caggacguguuuaugugua

SEQ ID NO: 124281 - RNA, 19 nt, Homo sapiens
  misc_RNA (1)...(19): siRNA sense strand
ggagcaauacucaguguca

SEQ ID NO: 124282 - RNA, 19 nt, Homo sapiens
  misc_RNA (1)...(19): siRNA sense strand
gaccucagccuacauccaa

SEQ ID NO: 124283 - RNA, 19 nt, Homo sapiens
  misc_RNA (1)...(19): siRNA sense strand
ucgcugggaucaccaauuc

SEQ ID NO: 124284 - RNA, 19 nt, Homo sapiens
  misc_RNA (1)...(19): siRNA sense strand
acagaaggguucagucagu

SEQ ID NO: 124285 - RNA, 19 nt, Homo sapiens
  misc_RNA (1)...(19): siRNA sense strand
ugaggcugguucacaauga

SEQ ID NO: 124286 - RNA, 19 nt, Homo sapiens
  misc_RNA (1)...(19): siRNA sense strand
caagaggcagucugucuga

SEQ ID NO: 124287 - RNA, 19 nt, Homo sapiens
  misc_RNA (1)...(19): siRNA sense strand
accagaagcugaauuugga

SEQ ID NO: 124288 - RNA, 19 nt, Homo sapiens
  misc_RNA (1)...(19): siRNA sense strand
gcugggaucaccaauucua

SEQ ID NO: 124289 - RNA, 19 nt, Homo sapiens
  misc_RNA (1)...(19): siRNA sense strand
ugaccuuucugcuagaguu

SEQ ID NO: 124290 - RNA, 19 nt, Homo sapiens
  misc_RNA (1)...(19): siRNA sense strand
gaaaaugcuuacaauacga

SEQ ID NO: 124291 - RNA, 19 nt, Homo sapiens
  misc_RNA (1)...(19): siRNA sense strand
gcacgugcagcauuugaug

SEQ ID NO: 124292 - RNA, 19 nt, Homo sapiens
  misc_RNA (1)...(19): siRNA sense strand
ccuuccagcuuaagaaaga

SEQ ID NO: 124293 - RNA, 19 nt, Homo sapiens
  misc_RNA (1)...(19): siRNA sense strand
gaaaggaaaaugcuuacaa

SEQ ID NO: 124294 - RNA, 19 nt, Homo sapiens
  misc_RNA (1)...(19): siRNA sense strand
ggauacagauagggaugga

SEQ ID NO: 124295 - RNA, 19 nt, Homo sapiens
  misc_RNA (1)...(19): siRNA sense strand
ugaagggucccaugcagaa

SEQ ID NO: 124296 - RNA, 19 nt, Homo sapiens
  misc_RNA (1)...(19): siRNA sense strand
gggcucacccaccucuaua

SEQ ID NO: 124297 - RNA, 19 nt, Homo sapiens
  misc_RNA (1)...(19): siRNA sense strand
ucccagcucuuuccugaga

SEQ ID NO: 124298 - RNA, 19 nt, Homo sapiens
  misc_RNA (1)...(19): siRNA sense strand
uauugaggcugguucacaa

SEQ ID NO: 124299 - RNA, 19 nt, Homo sapiens
  misc_RNA (1)...(19): siRNA sense strand
gggcaauuacuuccuauca

SEQ ID NO: 124300 - RNA, 19 nt, Homo sapiens
  misc_RNA (1)...(19): siRNA sense strand
gagagagagcccaauaaag

SEQ ID NO: 124301 - RNA, 19 nt, Homo sapiens
  misc_RNA (1)...(19): siRNA sense strand
cagagagagagcccaauaa

SEQ ID NO: 124302 - RNA, 19 nt, Homo sapiens
  misc_RNA (1)...(19): siRNA sense strand
gggaggcucugugcuaugg

SEQ ID NO: 124303 - RNA, 19 nt, Homo sapiens
  misc_RNA (1)...(19): siRNA sense strand
ccacucaucggcuaaagga

SEQ ID NO: 124304 - RNA, 19 nt, Homo sapiens
  misc_RNA (1)...(19): siRNA sense strand
cauuguggaugcacuagga

SEQ ID NO: 124305 - RNA, 19 nt, Homo sapiens
  misc_RNA (1)...(19): siRNA sense strand
uggcagcucugucuucagu

SEQ ID NO: 124306 - RNA, 19 nt, Homo sapiens
  misc_RNA (1)...(19): siRNA sense strand
agacugaaugggagcaaua

SEQ ID NO: 124307 - RNA, 19 nt, Homo sapiens
  misc_RNA (1)...(19): siRNA sense strand
ggaaaaugcuuacaauacg

SEQ ID NO: 124308 - RNA, 19 nt, Homo sapiens
  misc_RNA (1)...(19): siRNA sense strand
gaccuggugcuucaaguga

SEQ ID NO: 124309 - RNA, 19 nt, Homo sapiens
  misc_RNA (1)...(19): siRNA sense strand
agggagcacuguaccugua

SEQ ID NO: 124310 - RNA, 19 nt, Homo sapiens
  misc_RNA (1)...(19): siRNA sense strand
uggauacagugucuuacaa

SEQ ID NO: 124311 - RNA, 19 nt, Homo sapiens
  misc_RNA (1)...(19): siRNA sense strand
cuaccuggguuacucuguu

SEQ ID NO: 124312 - RNA, 19 nt, Homo sapiens
  misc_RNA (1)...(19): siRNA sense strand
gauaugugcccguguggau

SEQ ID NO: 124313 - RNA, 19 nt, Homo sapiens
  misc_RNA (1)...(19): siRNA sense strand
cugcuagaguuugaguuua

SEQ ID NO: 124314 - RNA, 19 nt, Homo sapiens
  misc_RNA (1)...(19): siRNA sense strand
ccuuuaaccuggaugaaca

SEQ ID NO: 124315 - RNA, 19 nt, Homo sapiens
  misc_RNA (1)...(19): siRNA sense strand
uaccuggguuacucuguuu

SEQ ID NO: 124316 - RNA, 19 nt, Homo sapiens
  misc_RNA (1)...(19): siRNA sense strand
cuucgucacucaccuguuc

SEQ ID NO: 124317 - RNA, 19 nt, Homo sapiens
  misc_RNA (1)...(19): siRNA sense strand
uuccugaucugaaccaaga

SEQ ID NO: 124318 - RNA, 19 nt, Homo sapiens
  misc_RNA (1)...(19): siRNA sense strand
gaugcucgguuuggcuuug

SEQ ID NO: 124319 - RNA, 19 nt, Homo sapiens
  misc_RNA (1)...(19): siRNA sense strand
gaagaacucugguggauuu

SEQ ID NO: 124320 - RNA, 19 nt, Homo sapiens
  misc_RNA (1)...(19): siRNA sense strand
ggaaguggauuuaaaguuu

SEQ ID NO: 124321 - RNA, 19 nt, Homo sapiens
  misc_RNA (1)...(19): siRNA sense strand
gaagaggccuugaaauauu

SEQ ID NO: 124322 - RNA, 19 nt, Homo sapiens
  misc_RNA (1)...(19): siRNA sense strand
gagcauaaauccucauaaa

SEQ ID NO: 124323 - RNA, 19 nt, Homo sapiens
  misc_RNA (1)...(19): siRNA sense strand
caagaaacguuuauuggua

SEQ ID NO: 124324 - RNA, 19 nt, Homo sapiens
  misc_RNA (1)...(19): siRNA sense strand
caacagacccugauuauga

SEQ ID NO: 124325 - RNA, 19 nt, Homo sapiens
  misc_RNA (1)...(19): siRNA sense strand
ccagaaauuuggacucuua

SEQ ID NO: 124326 - RNA, 19 nt, Homo sapiens
  misc_RNA (1)...(19): siRNA sense strand
gaccauagaccacaaguua

SEQ ID NO: 124327 - RNA, 19 nt, Homo sapiens
  misc_RNA (1)...(19): siRNA sense strand
gaacauggccugauagaag

SEQ ID NO: 124328 - RNA, 19 nt, Homo sapiens
  misc_RNA (1)...(19): siRNA sense strand
gaccaagucaguaguauua

SEQ ID NO: 124329 - RNA, 19 nt, Homo sapiens
  misc_RNA (1)...(19): siRNA sense strand
cauaguaacuccaggauau

SEQ ID NO: 124330 - RNA, 19 nt, Homo sapiens
  misc_RNA (1)...(19): siRNA sense strand
ggcauuaccucgccuauga

SEQ ID NO: 124331 - RNA, 19 nt, Homo sapiens
  misc_RNA (1)...(19): siRNA sense strand
ggaaguggccgcauuguug

SEQ ID NO: 124332 - RNA, 19 nt, Homo sapiens
  misc_RNA (1)...(19): siRNA sense strand
gagggaugcuucauuuaaa

SEQ ID NO: 124333 - RNA, 19 nt, Homo sapiens
  misc_RNA (1)...(19): siRNA sense strand
gaaguggauuuaaaguuug

SEQ ID NO: 124334 - RNA, 19 nt, Homo sapiens
  misc_RNA (1)...(19): siRNA sense strand
gaagauacgcugcaguuga

SEQ ID NO: 124335 - RNA, 19 nt, Homo sapiens
  misc_RNA (1)...(19): siRNA sense strand
cagaaggccuuugaagaua

SEQ ID NO: 124336 - RNA, 19 nt, Homo sapiens
  misc_RNA (1)...(19): siRNA sense strand
ccagaaugcuuaaacuuga

SEQ ID NO: 124337 - RNA, 19 nt, Homo sapiens
  misc_RNA (1)...(19): siRNA sense strand
gcugauggccagauauuua

SEQ ID NO: 124338 - RNA, 19 nt, Homo sapiens
  misc_RNA (1)...(19): siRNA sense strand
cgucaaauaucacgucauu

SEQ ID NO: 124339 - RNA, 19 nt, Homo sapiens
  misc_RNA (1)...(19): siRNA sense strand
agaaggaucccaaagaaua

SEQ ID NO: 124340 - RNA, 19 nt, Homo sapiens
  misc_RNA (1)...(19): siRNA sense strand
acgaagcucugaaguuaua

SEQ ID NO: 124341 - RNA, 19 nt, Homo sapiens
  misc_RNA (1)...(19): siRNA sense strand
uaaaugacuugcucuggaa

SEQ ID NO: 124342 - RNA, 19 nt, Homo sapiens
  misc_RNA (1)...(19): siRNA sense strand
uaucagcgguuuacuauag

SEQ ID NO: 124343 - RNA, 19 nt, Homo sapiens
  misc_RNA (1)...(19): siRNA sense strand
ucacuuggauugaagaaga

SEQ ID NO: 124344 - RNA, 19 nt, Homo sapiens
  misc_RNA (1)...(19): siRNA sense strand
guaaugaccuugcuguucu

SEQ ID NO: 124345 - RNA, 19 nt, Homo sapiens
  misc_RNA (1)...(19): siRNA sense strand
guucagcucuggacuguug

SEQ ID NO: 124346 - RNA, 19 nt, Homo sapiens
  misc_RNA (1)...(19): siRNA sense strand
ugagaaagcugagaaucaa

SEQ ID NO: 124347 - RNA, 19 nt, Homo sapiens
  misc_RNA (1)...(19): siRNA sense strand
guacuucccagaaugcuua

SEQ ID NO: 124348 - RNA, 19 nt, Homo sapiens
  misc_RNA (1)...(19): siRNA sense strand
ggauuuaaaguuugccuua

SEQ ID NO: 124349 - RNA, 19 nt, Homo sapiens
  misc_RNA (1)...(19): siRNA sense strand
caccuucucuggcuauuaa

SEQ ID NO: 124350 - RNA, 19 nt, Homo sapiens
  misc_RNA (1)...(19): siRNA sense strand
gcaccuaugacuuugauuu

SEQ ID NO: 124351 - RNA, 19 nt, Homo sapiens
  misc_RNA (1)...(19): siRNA sense strand
acagaaggaucccaaagaa

SEQ ID NO: 124352 - RNA, 19 nt, Homo sapiens
  misc_RNA (1)...(19): siRNA sense strand
gaaccgagaguuugcuuug

SEQ ID NO: 124353 - RNA, 19 nt, Homo sapiens
  misc_RNA (1)...(19): siRNA sense strand
ucacaacaguaccaggaua

SEQ ID NO: 124354 - RNA, 19 nt, Homo sapiens
  misc_RNA (1)...(19): siRNA sense strand
cugaagaggccuugaaaua

SEQ ID NO: 124355 - RNA, 19 nt, Homo sapiens
  misc_RNA (1)...(19): siRNA sense strand
gagguugcgucaaauauca

SEQ ID NO: 124356 - RNA, 19 nt, Homo sapiens
  misc_RNA (1)...(19): siRNA sense strand
aagaugagguuaagguaaa

SEQ ID NO: 124357 - RNA, 19 nt, Homo sapiens
  misc_RNA (1)...(19): siRNA sense strand
ccugagggaugcuucauuu

SEQ ID NO: 124358 - RNA, 19 nt, Homo sapiens
  misc_RNA (1)...(19): siRNA sense strand
ccaaagaucaacagaagaa

SEQ ID NO: 124359 - RNA, 19 nt, Homo sapiens
  misc_RNA (1)...(19): siRNA sense strand
ggagauaauucaagugacu

SEQ ID NO: 124360 - RNA, 19 nt, Homo sapiens
  misc_RNA (1)...(19): siRNA sense strand
ccugaaagaugaaguauac

SEQ ID NO: 124361 - RNA, 19 nt, Homo sapiens
  misc_RNA (1)...(19): siRNA sense strand
ucaccaagcucacaacagu

SEQ ID NO: 124362 - RNA, 19 nt, Homo sapiens
  misc_RNA (1)...(19): siRNA sense strand
ccuuagaacuccucauuug

SEQ ID NO: 124363 - RNA, 19 nt, Homo sapiens
  misc_RNA (1)...(19): siRNA sense strand
gaaaggucacuuccagaaa

SEQ ID NO: 124364 - RNA, 19 nt, Homo sapiens
  misc_RNA (1)...(19): siRNA sense strand
uaaauacugccuauccaua

SEQ ID NO: 124365 - RNA, 19 nt, Homo sapiens
  misc_RNA (1)...(19): siRNA sense strand
guggaaaccuucauuaaac

SEQ ID NO: 124366 - RNA, 19 nt, Homo sapiens
  misc_RNA (1)...(19): siRNA sense strand
ggaagugguuggacaaacu

SEQ ID NO: 124367 - RNA, 19 nt, Homo sapiens
  misc_RNA (1)...(19): siRNA sense strand
ggucugucauucaccauuu

SEQ ID NO: 124368 - RNA, 19 nt, Homo sapiens
  misc_RNA (1)...(19): siRNA sense strand
gaagaagcacagccucaaa

SEQ ID NO: 124369 - RNA, 19 nt, Homo sapiens
  misc_RNA (1)...(19): siRNA sense strand
gacaaauacuugaaacgau

SEQ ID NO: 124370 - RNA, 19 nt, Homo sapiens
  misc_RNA (1)...(19): siRNA sense strand
ggauggaaguggccgcauu

SEQ ID NO: 124371 - RNA, 19 nt, Homo sapiens
  misc_RNA (1)...(19): siRNA sense strand
ggugaaagcaaguuuauca

SEQ ID NO: 124372 - RNA, 19 nt, Homo sapiens
  misc_RNA (1)...(19): siRNA sense strand
caccaaagaucaacagaag

SEQ ID NO: 124373 - RNA, 19 nt, Homo sapiens
  misc_RNA (1)...(19): siRNA sense strand
gaaauuuggacucuuacuu

SEQ ID NO: 124374 - RNA, 19 nt, Homo sapiens
  misc_RNA (1)...(19): siRNA sense strand
aaaggucacuuccagaaau

SEQ ID NO: 124375 - RNA, 19 nt, Homo sapiens
  misc_RNA (1)...(19): siRNA sense strand
gaaggaucccaaagaauau

SEQ ID NO: 124376 - RNA, 19 nt, Homo sapiens
  misc_RNA (1)...(19): siRNA sense strand
ucacgucauuugcaguaua

SEQ ID NO: 124377 - RNA, 19 nt, Homo sapiens
  misc_RNA (1)...(19): siRNA sense strand
gaaaagagauacaaaaucc

SEQ ID NO: 124378 - RNA, 19 nt, Homo sapiens
  misc_RNA (1)...(19): siRNA sense strand
ugaaauauuugcugcaucu

SEQ ID NO: 124379 - RNA, 19 nt, Homo sapiens
  misc_RNA (1)...(19): siRNA sense strand
ccacaagaaacguuuauug

SEQ ID NO: 124380 - RNA, 19 nt, Homo sapiens
  misc_RNA (1)...(19): siRNA sense strand
ggaagagugugcccaggau

SEQ ID NO: 124381 - RNA, 19 nt, Homo sapiens
  misc_RNA (1)...(19): siRNA sense strand
ggguggaaguggauuuaaa

SEQ ID NO: 124382 - RNA, 19 nt, Homo sapiens
  misc_RNA (1)...(19): siRNA sense strand
gagcagaggaagcacauug

SEQ ID NO: 124383 - RNA, 19 nt, Homo sapiens
  misc_RNA (1)...(19): siRNA sense strand
gcaguuugauugcaucuac

SEQ ID NO: 124384 - RNA, 19 nt, Homo sapiens
  misc_RNA (1)...(19): siRNA sense strand
gcaaauguggaccugagua

SEQ ID NO: 124385 - RNA, 19 nt, Homo sapiens
  misc_RNA (1)...(19): siRNA sense strand
caugguagcugagaaguca

SEQ ID NO: 124386 - RNA, 19 nt, Homo sapiens
  misc_RNA (1)...(19): siRNA sense strand
uacacgagcuucaaggaaa

SEQ ID NO: 124387 - RNA, 19 nt, Homo sapiens
  misc_RNA (1)...(19): siRNA sense strand
ugcaguauaugaugaguuu

SEQ ID NO: 124388 - RNA, 19 nt, Homo sapiens
  misc_RNA (1)...(19): siRNA sense strand
acacuucccuuccuuaaag

SEQ ID NO: 124389 - RNA, 19 nt, Homo sapiens
  misc_RNA (1)...(19): siRNA sense strand
ccagcaggauauuguguuu

SEQ ID NO: 124390 - RNA, 19 nt, Homo sapiens
  misc_RNA (1)...(19): siRNA sense strand
cauggacacuuuacacuuc

SEQ ID NO: 124391 - RNA, 19 nt, Homo sapiens
  misc_RNA (1)...(19): siRNA sense strand
ugagugaaguggugcagaa

SEQ ID NO: 124392 - RNA, 19 nt, Homo sapiens
  misc_RNA (1)...(19): siRNA sense strand
guaccaggauaucagcauu

SEQ ID NO: 124393 - RNA, 19 nt, Homo sapiens
  misc_RNA (1)...(19): siRNA sense strand
aagaggccuugaaauauuu

SEQ ID NO: 124394 - RNA, 19 nt, Homo sapiens
  misc_RNA (1)...(19): siRNA sense strand
aagcaaaguuuauccuuca

SEQ ID NO: 124395 - RNA, 19 nt, Homo sapiens
  misc_RNA (1)...(19): siRNA sense strand
gcuauuaaaccauggaaga

SEQ ID NO: 124396 - RNA, 19 nt, Homo sapiens
  misc_RNA (1)...(19): siRNA sense strand
ucagcgagaucauccaaga

SEQ ID NO: 124397 - RNA, 19 nt, Homo sapiens
  misc_RNA (1)...(19): siRNA sense strand
cagacuggauauuauagaa

SEQ ID NO: 124398 - RNA, 19 nt, Homo sapiens
  misc_RNA (1)...(19): siRNA sense strand
ucugguagauguuaaugaa

SEQ ID NO: 124399 - RNA, 19 nt, Homo sapiens
  misc_RNA (1)...(19): siRNA sense strand
ugaagaggccuugaaauau

SEQ ID NO: 124400 - RNA, 19 nt, Homo sapiens
  misc_RNA (1)...(19): siRNA sense strand
ugagggaugcuucauuuaa

SEQ ID NO: 124401 - RNA, 19 nt, Homo sapiens
  misc_RNA (1)...(19): siRNA sense strand
gggaagagcaagauugugu

SEQ ID NO: 124402 - RNA, 19 nt, Homo sapiens
  misc_RNA (1)...(19): siRNA sense strand
caacguaaagccuuccauu

SEQ ID NO: 124403 - RNA, 19 nt, Homo sapiens
  misc_RNA (1)...(19): siRNA sense strand
ccuaagguguuucuuggaa

SEQ ID NO: 124404 - RNA, 19 nt, Homo sapiens
  misc_RNA (1)...(19): siRNA sense strand
gaaacuaggccuucucacu

SEQ ID NO: 124405 - RNA, 19 nt, Homo sapiens
  misc_RNA (1)...(19): siRNA sense strand
aaagcaaguuuaucacugu

SEQ ID NO: 124406 - RNA, 19 nt, Homo sapiens
  misc_RNA (1)...(19): siRNA sense strand
gaagcacagccucaaagaa

SEQ ID NO: 124407 - RNA, 19 nt, Homo sapiens
  misc_RNA (1)...(19): siRNA sense strand
aggcaggucuggaugauga

SEQ ID NO: 124408 - RNA, 19 nt, Homo sapiens
  misc_RNA (1)...(19): siRNA sense strand
ccucauaaauacugccuau

SEQ ID NO: 124409 - RNA, 19 nt, Homo sapiens
  misc_RNA (1)...(19): siRNA sense strand
gaccuugucugcgaugcua

SEQ ID NO: 124410 - RNA, 19 nt, Homo sapiens
  misc_RNA (1)...(19): siRNA sense strand
gaaacuaucacugguaucu

SEQ ID NO: 124411 - RNA, 19 nt, Homo sapiens
  misc_RNA (1)...(19): siRNA sense strand
ugagaugaguggcaaauac

SEQ ID NO: 124412 - RNA, 19 nt, Homo sapiens
  misc_RNA (1)...(19): siRNA sense strand
aaacuaggccuucucacuu

SEQ ID NO: 124413 - RNA, 19 nt, Homo sapiens
  misc_RNA (1)...(19): siRNA sense strand
gaccggagcgugggagaua

SEQ ID NO: 124414 - RNA, 19 nt, Homo sapiens
  misc_RNA (1)...(19): siRNA sense strand
gaauguguccuuggucuga

SEQ ID NO: 124415 - RNA, 19 nt, Homo sapiens
  misc_RNA (1)...(19): siRNA sense strand
ugaggcugguauacaaaua

SEQ ID NO: 124416 - RNA, 19 nt, Homo sapiens
  misc_RNA (1)...(19): siRNA sense strand
ccagugguaucucuguuau

SEQ ID NO: 124417 - RNA, 19 nt, Homo sapiens
  misc_RNA (1)...(19): siRNA sense strand
gcgguuuacuauagacaaa

SEQ ID NO: 124418 - RNA, 19 nt, Homo sapiens
  misc_RNA (1)...(19): siRNA sense strand
gaagaagaugucacgaaga

SEQ ID NO: 124419 - RNA, 19 nt, Homo sapiens
  misc_RNA (1)...(19): siRNA sense strand
gcacaaacacgaaugauuu

SEQ ID NO: 124420 - RNA, 19 nt, Homo sapiens
  misc_RNA (1)...(19): siRNA sense strand
gaauaugcaucuaaaguug

SEQ ID NO: 124421 - RNA, 19 nt, Homo sapiens
  misc_RNA (1)...(19): siRNA sense strand
gaagauuaccggcguguua

SEQ ID NO: 124422 - RNA, 19 nt, Homo sapiens
  misc_RNA (1)...(19): siRNA sense strand
cgaaugauuuccuuucuuu

SEQ ID NO: 124423 - RNA, 19 nt, Homo sapiens
  misc_RNA (1)...(19): siRNA sense strand
agaagaaacuggcagagua

SEQ ID NO: 124424 - RNA, 19 nt, Homo sapiens
  misc_RNA (1)...(19): siRNA sense strand
gaaccuuacuucauaccua

SEQ ID NO: 124425 - RNA, 19 nt, Homo sapiens
  misc_RNA (1)...(19): siRNA sense strand
gaacuuucuuuccugagua

SEQ ID NO: 124426 - RNA, 19 nt, Homo sapiens
  misc_RNA (1)...(19): siRNA sense strand
gcuacagacuggauauuaa

SEQ ID NO: 124427 - RNA, 19 nt, Homo sapiens
  misc_RNA (1)...(19): siRNA sense strand
gcagagagaucuugcuaag

SEQ ID NO: 124428 - RNA, 19 nt, Homo sapiens
  misc_RNA (1)...(19): siRNA sense strand
cuaauuagcccauauaaga

SEQ ID NO: 124429 - RNA, 19 nt, Homo sapiens
  misc_RNA (1)...(19): siRNA sense strand
caacacagcaauugaacua

SEQ ID NO: 124430 - RNA, 19 nt, Homo sapiens
  misc_RNA (1)...(19): siRNA sense strand
ugacguggaugaugaaaga

SEQ ID NO: 124431 - RNA, 19 nt, Homo sapiens
  misc_RNA (1)...(19): siRNA sense strand
gucuaaagauccuguuaua

SEQ ID NO: 124432 - RNA, 19 nt, Homo sapiens
  misc_RNA (1)...(19): siRNA sense strand
caaaccagaugaaccaaau

SEQ ID NO: 124433 - RNA, 19 nt, Homo sapiens
  misc_RNA (1)...(19): siRNA sense strand
cagaagaacugacaaacca

SEQ ID NO: 124434 - RNA, 19 nt, Homo sapiens
  misc_RNA (1)...(19): siRNA sense strand
gaacugacaaaccagauga

SEQ ID NO: 124435 - RNA, 19 nt, Homo sapiens
  misc_RNA (1)...(19): siRNA sense strand
gaagcuuugucaagauuug

SEQ ID NO: 124436 - RNA, 19 nt, Homo sapiens
  misc_RNA (1)...(19): siRNA sense strand
acacagcaauugaacuaaa

SEQ ID NO: 124437 - RNA, 19 nt, Homo sapiens
  misc_RNA (1)...(19): siRNA sense strand
gaagacuaauuagcccaua

SEQ ID NO: 124438 - RNA, 19 nt, Homo sapiens
  misc_RNA (1)...(19): siRNA sense strand
gaaauuacgagacuuugug

SEQ ID NO: 124439 - RNA, 19 nt, Homo sapiens
  misc_RNA (1)...(19): siRNA sense strand
guauacccaucaacucuuu

SEQ ID NO: 124440 - RNA, 19 nt, Homo sapiens
  misc_RNA (1)...(19): siRNA sense strand
cuagaaggguuuaugaaau

SEQ ID NO: 124441 - RNA, 19 nt, Homo sapiens
  misc_RNA (1)...(19): siRNA sense strand
ugaaacugcuagcuuuauu

SEQ ID NO: 124442 - RNA, 19 nt, Homo sapiens
  misc_RNA (1)...(19): siRNA sense strand
uauugaaacugcuagcuuu

SEQ ID NO: 124443 - RNA, 19 nt, Homo sapiens
  misc_RNA (1)...(19): siRNA sense strand
gcuagaaggguuuaugaaa

SEQ ID NO: 124444 - RNA, 19 nt, Homo sapiens
  misc_RNA (1)...(19): siRNA sense strand
caaugaagauauggcgaua

SEQ ID NO: 124445 - RNA, 19 nt, Homo sapiens
  misc_RNA (1)...(19): siRNA sense strand
guagaggcuuucgagaaua

SEQ ID NO: 124446 - RNA, 19 nt, Homo sapiens
  misc_RNA (1)...(19): siRNA sense strand
gucaagauuugcccuguuu

SEQ ID NO: 124447 - RNA, 19 nt, Homo sapiens
  misc_RNA (1)...(19): siRNA sense strand
gaugaaagauggcacuacu

SEQ ID NO: 124448 - RNA, 19 nt, Homo sapiens
  misc_RNA (1)...(19): siRNA sense strand
gaaacuggcagaguacaaa

SEQ ID NO: 124449 - RNA, 19 nt, Homo sapiens
  misc_RNA (1)...(19): siRNA sense strand
uuacaagggucuaaagauc

SEQ ID NO: 124450 - RNA, 19 nt, Homo sapiens
  misc_RNA (1)...(19): siRNA sense strand
cagaugaaccaaauagaaa

SEQ ID NO: 124451 - RNA, 19 nt, Homo sapiens
  misc_RNA (1)...(19): siRNA sense strand
gcugguagccugucaacaa

SEQ ID NO: 124452 - RNA, 19 nt, Homo sapiens
  misc_RNA (1)...(19): siRNA sense strand
gugaagcuuugucaagauu

SEQ ID NO: 124453 - RNA, 19 nt, Homo sapiens
  misc_RNA (1)...(19): siRNA sense strand
ugagugaugccgaacaaua

SEQ ID NO: 124454 - RNA, 19 nt, Homo sapiens
  misc_RNA (1)...(19): siRNA sense strand
aaacacgaaugauuuccuu

SEQ ID NO: 124455 - RNA, 19 nt, Homo sapiens
  misc_RNA (1)...(19): siRNA sense strand
gaaacugcuagcuuuauug

SEQ ID NO: 124456 - RNA, 19 nt, Homo sapiens
  misc_RNA (1)...(19): siRNA sense strand
ugagaacuuugacugugua

SEQ ID NO: 124457 - RNA, 19 nt, Homo sapiens
  misc_RNA (1)...(19): siRNA sense strand
ccagaugaaccaaauagaa

SEQ ID NO: 124458 - RNA, 19 nt, Homo sapiens
  misc_RNA (1)...(19): siRNA sense strand
cuacaguucuugauauuac

SEQ ID NO: 124459 - RNA, 19 nt, Homo sapiens
  misc_RNA (1)...(19): siRNA sense strand
uguagaggcuuucgagaau

SEQ ID NO: 124460 - RNA, 19 nt, Homo sapiens
  misc_RNA (1)...(19): siRNA sense strand
gaacuuugacuguguagag

SEQ ID NO: 124461 - RNA, 19 nt, Homo sapiens
  misc_RNA (1)...(19): siRNA sense strand
cugaagaucuugaaaauga

SEQ ID NO: 124462 - RNA, 19 nt, Homo sapiens
  misc_RNA (1)...(19): siRNA sense strand
gaacaauacagaagcuaca

SEQ ID NO: 124463 - RNA, 19 nt, Homo sapiens
  misc_RNA (1)...(19): siRNA sense strand
cuucauaccuacucaguuc

SEQ ID NO: 124464 - RNA, 19 nt, Homo sapiens
  misc_RNA (1)...(19): siRNA sense strand
gguagccugucaacaaugu

SEQ ID NO: 124465 - RNA, 19 nt, Homo sapiens
  misc_RNA (1)...(19): siRNA sense strand
uucggaaccuuacuucaua

SEQ ID NO: 124466 - RNA, 19 nt, Homo sapiens
  misc_RNA (1)...(19): siRNA sense strand
uagaggcuuucgagaauau

SEQ ID NO: 124467 - RNA, 19 nt, Homo sapiens
  misc_RNA (1)...(19): siRNA sense strand
ggaagagaguuuucaggaa

SEQ ID NO: 124468 - RNA, 19 nt, Homo sapiens
  misc_RNA (1)...(19): siRNA sense strand
cuaaagauccuguuauacu

SEQ ID NO: 124469 - RNA, 19 nt, Homo sapiens
  misc_RNA (1)...(19): siRNA sense strand
uuauugacguggaugauga

SEQ ID NO: 124470 - RNA, 19 nt, Homo sapiens
  misc_RNA (1)...(19): siRNA sense strand
aauguuccguguugaauau

SEQ ID NO: 124471 - RNA, 19 nt, Homo sapiens
  misc_RNA (1)...(19): siRNA sense strand
caugagugaugccgaacaa

SEQ ID NO: 124472 - RNA, 19 nt, Homo sapiens
  misc_RNA (1)...(19): siRNA sense strand
gauagaggcacaacagaag

SEQ ID NO: 124473 - RNA, 19 nt, Homo sapiens
  misc_RNA (1)...(19): siRNA sense strand
gaagaaacuggcagaguac

SEQ ID NO: 124474 - RNA, 19 nt, Homo sapiens
  misc_RNA (1)...(19): siRNA sense strand
agagugcaguggagaagaa

SEQ ID NO: 124475 - RNA, 19 nt, Homo sapiens
  misc_RNA (1)...(19): siRNA sense strand
cuacagacuggauauuaaa

SEQ ID NO: 124476 - RNA, 19 nt, Homo sapiens
  misc_RNA (1)...(19): siRNA sense strand
caauguuccguguugaaua

SEQ ID NO: 124477 - RNA, 19 nt, Homo sapiens
  misc_RNA (1)...(19): siRNA sense strand
aggaacuaguggaagauua

SEQ ID NO: 124478 - RNA, 19 nt, Homo sapiens
  misc_RNA (1)...(19): siRNA sense strand
gaccagaagaacugacaaa

SEQ ID NO: 124479 - RNA, 19 nt, Homo sapiens
  misc_RNA (1)...(19): siRNA sense strand
agacuaauuagcccauaua

SEQ ID NO: 124480 - RNA, 19 nt, Homo sapiens
  misc_RNA (1)...(19): siRNA sense strand
auauaaggcugacaugaca

SEQ ID NO: 124481 - RNA, 19 nt, Homo sapiens
  misc_RNA (1)...(19): siRNA sense strand
gaagcuacagacuggauau

SEQ ID NO: 124482 - RNA, 19 nt, Homo sapiens
  misc_RNA (1)...(19): siRNA sense strand
cauagauacuacacugaau

SEQ ID NO: 124483 - RNA, 19 nt, Homo sapiens
  misc_RNA (1)...(19): siRNA sense strand
cuacaugacagucuauaau

SEQ ID NO: 124484 - RNA, 19 nt, Homo sapiens
  misc_RNA (1)...(19): siRNA sense strand
aaacugcuagcuuuauuga

SEQ ID NO: 124485 - RNA, 19 nt, Homo sapiens
  misc_RNA (1)...(19): siRNA sense strand
ugaauuuccuacaguucuu

SEQ ID NO: 124486 - RNA, 19 nt, Homo sapiens
  misc_RNA (1)...(19): siRNA sense strand
uaacaccaacacagcaauu

SEQ ID NO: 124487 - RNA, 19 nt, Homo sapiens
  misc_RNA (1)...(19): siRNA sense strand
ugacaaaccagaugaacca

SEQ ID NO: 124488 - RNA, 19 nt, Homo sapiens
  misc_RNA (1)...(19): siRNA sense strand
augaagauauggcgauaga

SEQ ID NO: 124489 - RNA, 19 nt, Homo sapiens
  misc_RNA (1)...(19): siRNA sense strand
ccauggugcucaacuucuu

SEQ ID NO: 124490 - RNA, 19 nt, Homo sapiens
  misc_RNA (1)...(19): siRNA sense strand
gaaguauaauaaggaugga

SEQ ID NO: 124491 - RNA, 19 nt, Homo sapiens
  misc_RNA (1)...(19): siRNA sense strand
ggucuaaagauccuguuau

SEQ ID NO: 124492 - RNA, 19 nt, Homo sapiens
  misc_RNA (1)...(19): siRNA sense strand
cgauagaggcacaacagaa

SEQ ID NO: 124493 - RNA, 19 nt, Homo sapiens
  misc_RNA (1)...(19): siRNA sense strand
gcuacaugacagucuauaa

SEQ ID NO: 124494 - RNA, 19 nt, Homo sapiens
  misc_RNA (1)...(19): siRNA sense strand
ucgagaauaucaugaaagg

SEQ ID NO: 124495 - RNA, 19 nt, Homo sapiens
  misc_RNA (1)...(19): siRNA sense strand
caagccauucggaaccuua

SEQ ID NO: 124496 - RNA, 19 nt, Homo sapiens
  misc_RNA (1)...(19): siRNA sense strand
ggaacuaguggaagauuac

SEQ ID NO: 124497 - RNA, 19 nt, Homo sapiens
  misc_RNA (1)...(19): siRNA sense strand
gaacagcuggaagagaguu

SEQ ID NO: 124498 - RNA, 19 nt, Homo sapiens
  misc_RNA (1)...(19): siRNA sense strand
guaacugacaugagugaug

SEQ ID NO: 124499 - RNA, 19 nt, Homo sapiens
  misc_RNA (1)...(19): siRNA sense strand
gagaagaaacuggcagagu

SEQ ID NO: 124500 - RNA, 19 nt, Homo sapiens
  misc_RNA (1)...(19): siRNA sense strand
gagacuuugugcuugugaa

SEQ ID NO: 124501 - RNA, 19 nt, Homo sapiens
  misc_RNA (1)...(19): siRNA sense strand
ugaaauucuucgacuacug

SEQ ID NO: 124502 - RNA, 19 nt, Homo sapiens
  misc_RNA (1)...(19): siRNA sense strand
gggaugaugaaacugcuuu

SEQ ID NO: 124503 - RNA, 19 nt, Homo sapiens
  misc_RNA (1)...(19): siRNA sense strand
gaaccaaauagaaauaagc

SEQ ID NO: 124504 - RNA, 19 nt, Homo sapiens
  misc_RNA (1)...(19): siRNA sense strand
ucaaggccauggugcucaa

SEQ ID NO: 124505 - RNA, 19 nt, Homo sapiens
  misc_RNA (1)...(19): siRNA sense strand
gaagauccauccaaaagcu

SEQ ID NO: 124506 - RNA, 19 nt, Homo sapiens
  misc_RNA (1)...(19): siRNA sense strand
ucauagauacuacacugaa

SEQ ID NO: 124507 - RNA, 19 nt, Homo sapiens
  misc_RNA (1)...(19): siRNA sense strand
gauguugagggcaaaauua

SEQ ID NO: 124508 - RNA, 19 nt, Homo sapiens
  misc_RNA (1)...(19): siRNA sense strand
caacacgcuagaaggguuu

SEQ ID NO: 124509 - RNA, 19 nt, Homo sapiens
  misc_RNA (1)...(19): siRNA sense strand
uaggcuacaugacagucua

SEQ ID NO: 124510 - RNA, 19 nt, Homo sapiens
  misc_RNA (1)...(19): siRNA sense strand
uuaccggcguguuauugaa

SEQ ID NO: 124511 - RNA, 19 nt, Homo sapiens
  misc_RNA (1)...(19): siRNA sense strand
gacuaauuagcccauauaa

SEQ ID NO: 124512 - RNA, 19 nt, Homo sapiens
  misc_RNA (1)...(19): siRNA sense strand
acugguaacugacaugagu

SEQ ID NO: 124513 - RNA, 19 nt, Homo sapiens
  misc_RNA (1)...(19): siRNA sense strand
uaugugaaauuacgagacu

SEQ ID NO: 124514 - RNA, 19 nt, Homo sapiens
  misc_RNA (1)...(19): siRNA sense strand
caccaacacagcaauugaa

SEQ ID NO: 124515 - RNA, 19 nt, Homo sapiens
  misc_RNA (1)...(19): siRNA sense strand
gauuaccggcguguuauug

SEQ ID NO: 124516 - RNA, 19 nt, Homo sapiens
  misc_RNA (1)...(19): siRNA sense strand
uuggugcuauggagaaauu

SEQ ID NO: 124517 - RNA, 19 nt, Homo sapiens
  misc_RNA (1)...(19): siRNA sense strand
gauauauaaggcugacaug

SEQ ID NO: 124518 - RNA, 19 nt, Homo sapiens
  misc_RNA (1)...(19): siRNA sense strand
gagugaugccgaacaauac

SEQ ID NO: 124519 - RNA, 19 nt, Homo sapiens
  misc_RNA (1)...(19): siRNA sense strand
gaaaucaucuugcugacaa

SEQ ID NO: 124520 - RNA, 19 nt, Homo sapiens
  misc_RNA (1)...(19): siRNA sense strand
gaagagccaugaagaaagu

SEQ ID NO: 124521 - RNA, 19 nt, Homo sapiens
  misc_RNA (1)...(19): siRNA sense strand
gaaccuguguccuuugaga

SEQ ID NO: 124522 - RNA, 19 nt, Homo sapiens
  misc_RNA (1)...(19): siRNA sense strand
cgacggacgcuuuauauuu

SEQ ID NO: 124523 - RNA, 19 nt, Homo sapiens
  misc_RNA (1)...(19): siRNA sense strand
gaaaguacauguggauuuu

SEQ ID NO: 124524 - RNA, 19 nt, Homo sapiens
  misc_RNA (1)...(19): siRNA sense strand
gcacgacggacgcuuuaua

SEQ ID NO: 124525 - RNA, 19 nt, Homo sapiens
  misc_RNA (1)...(19): siRNA sense strand
gcaagaagagccaugaaga

SEQ ID NO: 124526 - RNA, 19 nt, Homo sapiens
  misc_RNA (1)...(19): siRNA sense strand
gaaacgcugucccaacugu

SEQ ID NO: 124527 - RNA, 19 nt, Homo sapiens
  misc_RNA (1)...(19): siRNA sense strand
guuagaagcugaggcaaga

SEQ ID NO: 124528 - RNA, 19 nt, Homo sapiens
  misc_RNA (1)...(19): siRNA sense strand
gcugggauauuaaugaugu

SEQ ID NO: 124529 - RNA, 19 nt, Homo sapiens
  misc_RNA (1)...(19): siRNA sense strand
ugacaacuguuauuccaau

SEQ ID NO: 124530 - RNA, 19 nt, Homo sapiens
  misc_RNA (1)...(19): siRNA sense strand
acaaugauaugcuucugaa

SEQ ID NO: 124531 - RNA, 19 nt, Homo sapiens
  misc_RNA (1)...(19): siRNA sense strand
ggagccaccugcagccaaa

SEQ ID NO: 124532 - RNA, 19 nt, Homo sapiens
  misc_RNA (1)...(19): siRNA sense strand
caagaagagccaugaagaa

SEQ ID NO: 124533 - RNA, 19 nt, Homo sapiens
  misc_RNA (1)...(19): siRNA sense strand
ccaggaaggcguccaauug

SEQ ID NO: 124534 - RNA, 19 nt, Homo sapiens
  misc_RNA (1)...(19): siRNA sense strand
uaguuacaguggacauuua

SEQ ID NO: 124535 - RNA, 19 nt, Homo sapiens
  misc_RNA (1)...(19): siRNA sense strand
gacggacgcuuuauauuuu

SEQ ID NO: 124536 - RNA, 19 nt, Homo sapiens
  misc_RNA (1)...(19): siRNA sense strand
aggaagaaaugacauacuu

SEQ ID NO: 124537 - RNA, 19 nt, Homo sapiens
  misc_RNA (1)...(19): siRNA sense strand
ccaugaagcucuaugaaaa

SEQ ID NO: 124538 - RNA, 19 nt, Homo sapiens
  misc_RNA (1)...(19): siRNA sense strand
ccugagaccugccaucugu

SEQ ID NO: 124539 - RNA, 19 nt, Homo sapiens
  misc_RNA (1)...(19): siRNA sense strand
ggaggaaucacagaucuga

SEQ ID NO: 124540 - RNA, 19 nt, Homo sapiens
  misc_RNA (1)...(19): siRNA sense strand
ccaauugccugguaguuac

SEQ ID NO: 124541 - RNA, 19 nt, Homo sapiens
  misc_RNA (1)...(19): siRNA sense strand
ggaagaaaugacauacuug

SEQ ID NO: 124542 - RNA, 19 nt, Homo sapiens
  misc_RNA (1)...(19): siRNA sense strand
gaucuacaagcguggagua

SEQ ID NO: 124543 - RNA, 19 nt, Homo sapiens
  misc_RNA (1)...(19): siRNA sense strand
ggccaaauccagcggguaa

SEQ ID NO: 124544 - RNA, 19 nt, Homo sapiens
  misc_RNA (1)...(19): siRNA sense strand
gcugacaacuguuauucca

SEQ ID NO: 124545 - RNA, 19 nt, Homo sapiens
  misc_RNA (1)...(19): siRNA sense strand
agaaaguacauguggauuu

SEQ ID NO: 124546 - RNA, 19 nt, Homo sapiens
  misc_RNA (1)...(19): siRNA sense strand
aauauucacugccaagcaa

SEQ ID NO: 124547 - RNA, 19 nt, Homo sapiens
  misc_RNA (1)...(19): siRNA sense strand
uaagcugggauauuaauga

SEQ ID NO: 124548 - RNA, 19 nt, Homo sapiens
  misc_RNA (1)...(19): siRNA sense strand
gacaacuguuauuccaauu

SEQ ID NO: 124549 - RNA, 19 nt, Homo sapiens
  misc_RNA (1)...(19): siRNA sense strand
cggaaacgcugucccaacu

SEQ ID NO: 124550 - RNA, 19 nt, Homo sapiens
  misc_RNA (1)...(19): siRNA sense strand
ugacauacuuggguuugga

SEQ ID NO: 124551 - RNA, 19 nt, Homo sapiens
  misc_RNA (1)...(19): siRNA sense strand
aagaagagccaugaagaaa

SEQ ID NO: 124552 - RNA, 19 nt, Homo sapiens
  misc_RNA (1)...(19): siRNA sense strand
gcaauaccaacaaccacaa

SEQ ID NO: 124553 - RNA, 19 nt, Homo sapiens
  misc_RNA (1)...(19): siRNA sense strand
ggaguggccagauuccuau

SEQ ID NO: 124554 - RNA, 19 nt, Homo sapiens
  misc_RNA (1)...(19): siRNA sense strand
guggacauuuaauagcuaa

SEQ ID NO: 124555 - RNA, 19 nt, Homo sapiens
  misc_RNA (1)...(19): siRNA sense strand
guaguuacaguggacauuu

SEQ ID NO: 124556 - RNA, 19 nt, Homo sapiens
  misc_RNA (1)...(19): siRNA sense strand
cuacaagcguggaguaaaa

SEQ ID NO: 124557 - RNA, 19 nt, Homo sapiens
  misc_RNA (1)...(19): siRNA sense strand
gagauauuaagcugggaua

SEQ ID NO: 124558 - RNA, 19 nt, Homo sapiens
  misc_RNA (1)...(19): siRNA sense strand
gagagcaugaucauccaaa

SEQ ID NO: 124559 - RNA, 19 nt, Homo sapiens
  misc_RNA (1)...(19): siRNA sense strand
caacaaugauaugcuucug

SEQ ID NO: 124560 - RNA, 19 nt, Homo sapiens
  misc_RNA (1)...(19): siRNA sense strand
caaagggagagcaugauca

SEQ ID NO: 124561 - RNA, 19 nt, Homo sapiens
  misc_RNA (1)...(19): siRNA sense strand
cagcggguaaucuuuauga

SEQ ID NO: 124562 - RNA, 19 nt, Homo sapiens
  misc_RNA (1)...(19): siRNA sense strand
caggggaguuuaccuuuaa

SEQ ID NO: 124563 - RNA, 19 nt, Homo sapiens
  misc_RNA (1)...(19): siRNA sense strand
cugcaacaaugauaugcuu

SEQ ID NO: 124564 - RNA, 19 nt, Homo sapiens
  misc_RNA (1)...(19): siRNA sense strand
uuggaucacugcaacaaug

SEQ ID NO: 124565 - RNA, 19 nt, Homo sapiens
  misc_RNA (1)...(19): siRNA sense strand
uaacagcuacguccagucu

SEQ ID NO: 124566 - RNA, 19 nt, Homo sapiens
  misc_RNA (1)...(19): siRNA sense strand
gaaucacagaucugacuga

SEQ ID NO: 124567 - RNA, 19 nt, Homo sapiens
  misc_RNA (1)...(19): siRNA sense strand
ccagaaaccaaguuagaag

SEQ ID NO: 124568 - RNA, 19 nt, Homo sapiens
  misc_RNA (1)...(19): siRNA sense strand
cugaaccuguguccuuuga

SEQ ID NO: 124569 - RNA, 19 nt, Homo sapiens
  misc_RNA (1)...(19): siRNA sense strand
gcauaccauucaccucaag

SEQ ID NO: 124570 - RNA, 19 nt, Homo sapiens
  misc_RNA (1)...(19): siRNA sense strand
gagaaaguacauguggauu

SEQ ID NO: 124571 - RNA, 19 nt, Homo sapiens
  misc_RNA (1)...(19): siRNA sense strand
ggacauuuaauagcuaaca

SEQ ID NO: 124572 - RNA, 19 nt, Homo sapiens
  misc_RNA (1)...(19): siRNA sense strand
gcgcaagaucuaccugaga

SEQ ID NO: 124573 - RNA, 19 nt, Homo sapiens
  misc_RNA (1)...(19): siRNA sense strand
uccaauugccugguaguua

SEQ ID NO: 124574 - RNA, 19 nt, Homo sapiens
  misc_RNA (1)...(19): siRNA sense strand
ucaggggaguuuaccuuua

SEQ ID NO: 124575 - RNA, 19 nt, Homo sapiens
  misc_RNA (1)...(19): siRNA sense strand
gaggcacgacggacgcuuu

SEQ ID NO: 124576 - RNA, 19 nt, Homo sapiens
  misc_RNA (1)...(19): siRNA sense strand
ggcguccaauugccuggua

SEQ ID NO: 124577 - RNA, 19 nt, Homo sapiens
  misc_RNA (1)...(19): siRNA sense strand
aagcugggauauuaaugau

SEQ ID NO: 124578 - RNA, 19 nt, Homo sapiens
  misc_RNA (1)...(19): siRNA sense strand
gcaacaaugauaugcuucu

SEQ ID NO: 124579 - RNA, 19 nt, Homo sapiens
  misc_RNA (1)...(19): siRNA sense strand
caagcaagagcagcaaaug

SEQ ID NO: 124580 - RNA, 19 nt, Homo sapiens
  misc_RNA (1)...(19): siRNA sense strand
ccuugcagcuucucuccuu

SEQ ID NO: 124581 - RNA, 19 nt, Homo sapiens
  misc_RNA (1)...(19): siRNA sense strand
guuauggucugggaggaau

SEQ ID NO: 124582 - RNA, 19 nt, Homo sapiens
  misc_RNA (1)...(19): siRNA sense strand
ucaucuugcugacaacugu

SEQ ID NO: 124583 - RNA, 19 nt, Homo sapiens
  misc_RNA (1)...(19): siRNA sense strand
cccaugaagcucuaugaaa

SEQ ID NO: 124584 - RNA, 19 nt, Homo sapiens
  misc_RNA (1)...(19): siRNA sense strand
gaccugccaucugugacaa

SEQ ID NO: 124585 - RNA, 19 nt, Homo sapiens
  misc_RNA (1)...(19): siRNA sense strand
gcucggaggacaagaaugc

SEQ ID NO: 124586 - RNA, 19 nt, Homo sapiens
  misc_RNA (1)...(19): siRNA sense strand
cuaacacuccucagcagaa

SEQ ID NO: 124587 - RNA, 19 nt, Homo sapiens
  misc_RNA (1)...(19): siRNA sense strand
aaccagaaaccaaguuaga

SEQ ID NO: 124588 - RNA, 19 nt, Homo sapiens
  misc_RNA (1)...(19): siRNA sense strand
gggagagcaugaucaucca

SEQ ID NO: 124589 - RNA, 19 nt, Homo sapiens
  misc_RNA (1)...(19): siRNA sense strand
gcagaagcagcagcggaaa

SEQ ID NO: 124590 - RNA, 19 nt, Homo sapiens
  misc_RNA (1)...(19): siRNA sense strand
ucacugcaacaaugauaug

SEQ ID NO: 124591 - RNA, 19 nt, Homo sapiens
  misc_RNA (1)...(19): siRNA sense strand
aaacucuucagaacccuuu

SEQ ID NO: 124592 - RNA, 19 nt, Homo sapiens
  misc_RNA (1)...(19): siRNA sense strand
caguggacauuuaauagcu

SEQ ID NO: 124593 - RNA, 19 nt, Homo sapiens
  misc_RNA (1)...(19): siRNA sense strand
ugagaccugccaucuguga

SEQ ID NO: 124594 - RNA, 19 nt, Homo sapiens
  misc_RNA (1)...(19): siRNA sense strand
agacaaagagauauuaagc

SEQ ID NO: 124595 - RNA, 19 nt, Homo sapiens
  misc_RNA (1)...(19): siRNA sense strand
gaggcaagaagagccauga

SEQ ID NO: 124596 - RNA, 19 nt, Homo sapiens
  misc_RNA (1)...(19): siRNA sense strand
cacgacggacgcuuuauau

SEQ ID NO: 124597 - RNA, 19 nt, Homo sapiens
  misc_RNA (1)...(19): siRNA sense strand
gccagauuccuaugccaaa

SEQ ID NO: 124598 - RNA, 19 nt, Homo sapiens
  misc_RNA (1)...(19): siRNA sense strand
ccaagcaagagcagcaaau

SEQ ID NO: 124599 - RNA, 19 nt, Homo sapiens
  misc_RNA (1)...(19): siRNA sense strand
agucaaagggagagcauga

SEQ ID NO: 124600 - RNA, 19 nt, Homo sapiens
  misc_RNA (1)...(19): siRNA sense strand
ccuguguccuuugagauga

SEQ ID NO: 124601 - RNA, 19 nt, Homo sapiens
  misc_RNA (1)...(19): siRNA sense strand
cguccagucuccugcauac

SEQ ID NO: 124602 - RNA, 19 nt, Homo sapiens
  misc_RNA (1)...(19): siRNA sense strand
ucaaagggagagcaugauc

SEQ ID NO: 124603 - RNA, 19 nt, Homo sapiens
  misc_RNA (1)...(19): siRNA sense strand
cuucugaaccuguguccuu

SEQ ID NO: 124604 - RNA, 19 nt, Homo sapiens
  misc_RNA (1)...(19): siRNA sense strand
cugaagacaaagagauauu

SEQ ID NO: 124605 - RNA, 19 nt, Homo sapiens
  misc_RNA (1)...(19): siRNA sense strand
gacaaagagauauuaagcu

SEQ ID NO: 124606 - RNA, 19 nt, Homo sapiens
  misc_RNA (1)...(19): siRNA sense strand
agagaaaguacauguggau

SEQ ID NO: 124607 - RNA, 19 nt, Homo sapiens
  misc_RNA (1)...(19): siRNA sense strand
uuccaggaguggccagauu

SEQ ID NO: 124608 - RNA, 19 nt, Homo sapiens
  misc_RNA (1)...(19): siRNA sense strand
aguggacauuuaauagcua

SEQ ID NO: 124609 - RNA, 19 nt, Homo sapiens
  misc_RNA (1)...(19): siRNA sense strand
uacaguggacauuuaauag

SEQ ID NO: 124610 - RNA, 19 nt, Homo sapiens
  misc_RNA (1)...(19): siRNA sense strand
caggugaaacacaaaguca

SEQ ID NO: 124611 - RNA, 19 nt, Homo sapiens
  misc_RNA (1)...(19): siRNA sense strand
gaagcugaggcaagaagag

SEQ ID NO: 124612 - RNA, 19 nt, Homo sapiens
  misc_RNA (1)...(19): siRNA sense strand
aaagggagagcaugaucau

SEQ ID NO: 124613 - RNA, 19 nt, Homo sapiens
  misc_RNA (1)...(19): siRNA sense strand
ggaaacgcugucccaacug

SEQ ID NO: 124614 - RNA, 19 nt, Homo sapiens
  misc_RNA (1)...(19): siRNA sense strand
ugaagagaaaguacaugug

SEQ ID NO: 124615 - RNA, 19 nt, Homo sapiens
  misc_RNA (1)...(19): siRNA sense strand
gcggguaaucuuuaugaag

SEQ ID NO: 124616 - RNA, 19 nt, Homo sapiens
  misc_RNA (1)...(19): siRNA sense strand
ggcaagaagagccaugaag

SEQ ID NO: 124617 - RNA, 19 nt, Homo sapiens
  misc_RNA (1)...(19): siRNA sense strand
ggauaaagauugaagaaga

SEQ ID NO: 124618 - RNA, 19 nt, Homo sapiens
  misc_RNA (1)...(19): siRNA sense strand
gcaaacaaaugcagaagga

SEQ ID NO: 124619 - RNA, 19 nt, Homo sapiens
  misc_RNA (1)...(19): siRNA sense strand
gggaaaggauaaagauuga

SEQ ID NO: 124620 - RNA, 19 nt, Homo sapiens
  misc_RNA (1)...(19): siRNA sense strand
gaagaagacuaugcgaaga

SEQ ID NO: 124621 - RNA, 19 nt, Homo sapiens
  misc_RNA (1)...(19): siRNA sense strand
gaaaacaccaucacaauaa

SEQ ID NO: 124622 - RNA, 19 nt, Homo sapiens
  misc_RNA (1)...(19): siRNA sense strand
agaaggaaaugucagaauu

SEQ ID NO: 124623 - RNA, 19 nt, Homo sapiens
  misc_RNA (1)...(19): siRNA sense strand
agaaagacaugaagaagug

SEQ ID NO: 124624 - RNA, 19 nt, Homo sapiens
  misc_RNA (1)...(19): siRNA sense strand
gaacuuccgugagaacuuc

SEQ ID NO: 124625 - RNA, 19 nt, Homo sapiens
  misc_RNA (1)...(19): siRNA sense strand
gaagugcgaccaccacauu

SEQ ID NO: 124626 - RNA, 19 nt, Homo sapiens
  misc_RNA (1)...(19): siRNA sense strand
agagagaccuggagaugaa

SEQ ID NO: 124627 - RNA, 19 nt, Homo sapiens
  misc_RNA (1)...(19): siRNA sense strand
ggaaaugucagaauucauc

SEQ ID NO: 124628 - RNA, 19 nt, Homo sapiens
  misc_RNA (1)...(19): siRNA sense strand
caaguucucugccaagcuu

SEQ ID NO: 124629 - RNA, 19 nt, Homo sapiens
  misc_RNA (1)...(19): siRNA sense strand
gaaggaaaugucagaauuc

SEQ ID NO: 124630 - RNA, 19 nt, Homo sapiens
  misc_RNA (1)...(19): siRNA sense strand
gugagaacuucaagaaaga

SEQ ID NO: 124631 - RNA, 19 nt, Homo sapiens
  misc_RNA (1)...(19): siRNA sense strand
ucacagagcggcagagaga

SEQ ID NO: 124632 - RNA, 19 nt, Homo sapiens
  misc_RNA (1)...(19): siRNA sense strand
ggaaaacaccaucacaaua

SEQ ID NO: 124633 - RNA, 19 nt, Homo sapiens
  misc_RNA (1)...(19): siRNA sense strand
gcuaagcucucucagaacu

SEQ ID NO: 124634 - RNA, 19 nt, Homo sapiens
  misc_RNA (1)...(19): siRNA sense strand
gauaaagauugaagaagac

SEQ ID NO: 124635 - RNA, 19 nt, Homo sapiens
  misc_RNA (1)...(19): siRNA sense strand
uggaucagcugcuucgaaa

SEQ ID NO: 124636 - RNA, 19 nt, Homo sapiens
  misc_RNA (1)...(19): siRNA sense strand
cgugagaacuucaagaaag

SEQ ID NO: 124637 - RNA, 19 nt, Homo sapiens
  misc_RNA (1)...(19): siRNA sense strand
gcagagagaccuggagaug

SEQ ID NO: 124638 - RNA, 19 nt, Homo sapiens
  misc_RNA (1)...(19): siRNA sense strand
aaacaaaugcagaaggaaa

SEQ ID NO: 124639 - RNA, 19 nt, Homo sapiens
  misc_RNA (1)...(19): siRNA sense strand
gcacaagacgggcaacauc

SEQ ID NO: 124640 - RNA, 19 nt, Homo sapiens
  misc_RNA (1)...(19): siRNA sense strand
acagacauguucaaccaaa

SEQ ID NO: 124641 - RNA, 19 nt, Homo sapiens
  misc_RNA (1)...(19): siRNA sense strand
gaaaggauaaagauugaag

SEQ ID NO: 124642 - RNA, 19 nt, Homo sapiens
  misc_RNA (1)...(19): siRNA sense strand
cugaugaacuuccgugaga

SEQ ID NO: 124643 - RNA, 19 nt, Homo sapiens
  misc_RNA (1)...(19): siRNA sense strand
gaacuucaagaaagacaug

SEQ ID NO: 124644 - RNA, 19 nt, Homo sapiens
  misc_RNA (1)...(19): siRNA sense strand
gaaguucaccucaaguucu

SEQ ID NO: 124645 - RNA, 19 nt, Homo sapiens
  misc_RNA (1)...(19): siRNA sense strand
ucaagaaagacaugaagaa

SEQ ID NO: 124646 - RNA, 19 nt, Homo sapiens
  misc_RNA (1)...(19): siRNA sense strand
cagaggaggacaucaagaa

SEQ ID NO: 124647 - RNA, 19 nt, Homo sapiens
  misc_RNA (1)...(19): siRNA sense strand
gaacuacugcuccagaaac

SEQ ID NO: 124648 - RNA, 19 nt, Homo sapiens
  misc_RNA (1)...(19): siRNA sense strand
aagcagaaguucaccucaa

SEQ ID NO: 124649 - RNA, 19 nt, Homo sapiens
  misc_RNA (1)...(19): siRNA sense strand
gaauucauccgggaaagga

SEQ ID NO: 124650 - RNA, 19 nt, Homo sapiens
  misc_RNA (1)...(19): siRNA sense strand
gcugaagggcaaacaaaug

SEQ ID NO: 124651 - RNA, 19 nt, Homo sapiens
  misc_RNA (1)...(19): siRNA sense strand
ggacgaagcagaaguucac

SEQ ID NO: 124652 - RNA, 19 nt, Homo sapiens
  misc_RNA (1)...(19): siRNA sense strand
cgggaaaggauaaagauug

SEQ ID NO: 124653 - RNA, 19 nt, Homo sapiens
  misc_RNA (1)...(19): siRNA sense strand
gagcuacugcgacuacuuc

SEQ ID NO: 124654 - RNA, 19 nt, Homo sapiens
  misc_RNA (1)...(19): siRNA sense strand
cagcugaagggcaaacaaa

SEQ ID NO: 124655 - RNA, 19 nt, Homo sapiens
  misc_RNA (1)...(19): siRNA sense strand
caaccaggcccaguccaaa

SEQ ID NO: 124656 - RNA, 19 nt, Homo sapiens
  misc_RNA (1)...(19): siRNA sense strand
caagaaagacaugaagaag

SEQ ID NO: 124657 - RNA, 19 nt, Homo sapiens
  misc_RNA (1)...(19): siRNA sense strand
aaggaaaugucagaauuca

SEQ ID NO: 124658 - RNA, 19 nt, Homo sapiens
  misc_RNA (1)...(19): siRNA sense strand
agacagaggaggacaucaa

SEQ ID NO: 124659 - RNA, 19 nt, Homo sapiens
  misc_RNA (1)...(19): siRNA sense strand
cagaaguucaccucaaguu

SEQ ID NO: 124660 - RNA, 19 nt, Homo sapiens
  misc_RNA (1)...(19): siRNA sense strand
caauaaacugugugacguu

SEQ ID NO: 124661 - RNA, 19 nt, Homo sapiens
  misc_RNA (1)...(19): siRNA sense strand
agaucaagcugagcaacaa

SEQ ID NO: 124662 - RNA, 19 nt, Homo sapiens
  misc_RNA (1)...(19): siRNA sense strand
gagaucaagcugagcaaca

SEQ ID NO: 124663 - RNA, 19 nt, Homo sapiens
  misc_RNA (1)...(19): siRNA sense strand
gggcccaggugaagaagag

SEQ ID NO: 124664 - RNA, 19 nt, Homo sapiens
  misc_RNA (1)...(19): siRNA sense strand
gacuacuucugggcugaua

SEQ ID NO: 124665 - RNA, 19 nt, Homo sapiens
  misc_RNA (1)...(19): siRNA sense strand
gcagaaggaaaugucagaa

SEQ ID NO: 124666 - RNA, 19 nt, Homo sapiens
  misc_RNA (1)...(19): siRNA sense strand
cagacacgaugccggaaca

SEQ ID NO: 124667 - RNA, 19 nt, Homo sapiens
  misc_RNA (1)...(19): siRNA sense strand
agacuaugcgaagaacuua

SEQ ID NO: 124668 - RNA, 19 nt, Homo sapiens
  misc_RNA (1)...(19): siRNA sense strand
guguggaucucuacaacca

SEQ ID NO: 124669 - RNA, 19 nt, Homo sapiens
  misc_RNA (1)...(19): siRNA sense strand
cagagagaccuggagauga

SEQ ID NO: 124670 - RNA, 19 nt, Homo sapiens
  misc_RNA (1)...(19): siRNA sense strand
cagaaggaaaugucagaau

SEQ ID NO: 124671 - RNA, 19 nt, Homo sapiens
  misc_RNA (1)...(19): siRNA sense strand
ccaccacauuggagcuaga

SEQ ID NO: 124672 - RNA, 19 nt, Homo sapiens
  misc_RNA (1)...(19): siRNA sense strand
ggaaaggauaaagauugaa

SEQ ID NO: 124673 - RNA, 19 nt, Homo sapiens
  misc_RNA (1)...(19): siRNA sense strand
aagaagacuaugcgaagaa

SEQ ID NO: 124674 - RNA, 19 nt, Homo sapiens
  misc_RNA (1)...(19): siRNA sense strand
guggagaggguagagauga

SEQ ID NO: 124675 - RNA, 19 nt, Homo sapiens
  misc_RNA (1)...(19): siRNA sense strand
ucagaauucauccgggaaa

SEQ ID NO: 124676 - RNA, 19 nt, Homo sapiens
  misc_RNA (1)...(19): siRNA sense strand
cauccgcccuguggacaug

SEQ ID NO: 124677 - RNA, 19 nt, Homo sapiens
  misc_RNA (1)...(19): siRNA sense strand
ccaccacauugccgaccuu

SEQ ID NO: 124678 - RNA, 19 nt, Homo sapiens
  misc_RNA (1)...(19): siRNA sense strand
ugaacuacugcuccagaaa

SEQ ID NO: 124679 - RNA, 19 nt, Homo sapiens
  misc_RNA (1)...(19): siRNA sense strand
aagaaagacaugaagaagu

SEQ ID NO: 124680 - RNA, 19 nt, Homo sapiens
  misc_RNA (1)...(19): siRNA sense strand
gcagaaguucaccucaagu

SEQ ID NO: 124681 - RNA, 19 nt, Homo sapiens
  misc_RNA (1)...(19): siRNA sense strand
ggagcuacugcgacuacuu

SEQ ID NO: 124682 - RNA, 19 nt, Homo sapiens
  misc_RNA (1)...(19): siRNA sense strand
ugaugaacuuccgugagaa

SEQ ID NO: 124683 - RNA, 19 nt, Homo sapiens
  misc_RNA (1)...(19): siRNA sense strand
cuguggacauggagaucua

SEQ ID NO: 124684 - RNA, 19 nt, Homo sapiens
  misc_RNA (1)...(19): siRNA sense strand
gcccguggaucagcugcuu

SEQ ID NO: 124685 - RNA, 19 nt, Homo sapiens
  misc_RNA (1)...(19): siRNA sense strand
caagacagaggaggacauc

SEQ ID NO: 124686 - RNA, 19 nt, Homo sapiens
  misc_RNA (1)...(19): siRNA sense strand
gaagagccuggcggacgaa

SEQ ID NO: 124687 - RNA, 19 nt, Homo sapiens
  misc_RNA (1)...(19): siRNA sense strand
caaacaaaugcagaaggaa

SEQ ID NO: 124688 - RNA, 19 nt, Homo sapiens
  misc_RNA (1)...(19): siRNA sense strand
caaaugcagaaggaaaugu

SEQ ID NO: 124689 - RNA, 19 nt, Homo sapiens
  misc_RNA (1)...(19): siRNA sense strand
guggaucagcugcuucgaa

SEQ ID NO: 124690 - RNA, 19 nt, Homo sapiens
  misc_RNA (1)...(19): siRNA sense strand
uugaacuacugcuccagaa

SEQ ID NO: 124691 - RNA, 19 nt, Homo sapiens
  misc_RNA (1)...(19): siRNA sense strand
gcuaugccucgguggagaa

SEQ ID NO: 124692 - RNA, 19 nt, Homo sapiens
  misc_RNA (1)...(19): siRNA sense strand
caccaucacaauaaacugu

SEQ ID NO: 124693 - RNA, 19 nt, Homo sapiens
  misc_RNA (1)...(19): siRNA sense strand
gacagaggaggacaucaag

SEQ ID NO: 124694 - RNA, 19 nt, Homo sapiens
  misc_RNA (1)...(19): siRNA sense strand
ggauaaagauugaagaaga

SEQ ID NO: 124695 - RNA, 19 nt, Homo sapiens
  misc_RNA (1)...(19): siRNA sense strand
gcaaacaaaugcagaagga

SEQ ID NO: 124696 - RNA, 19 nt, Homo sapiens
  misc_RNA (1)...(19): siRNA sense strand
gggaaaggauaaagauuga

SEQ ID NO: 124697 - RNA, 19 nt, Homo sapiens
  misc_RNA (1)...(19): siRNA sense strand
gaagaagacuaugcgaaga

SEQ ID NO: 124698 - RNA, 19 nt, Homo sapiens
  misc_RNA (1)...(19): siRNA sense strand
gaaaacaccaucacaauaa

SEQ ID NO: 124699 - RNA, 19 nt, Homo sapiens
  misc_RNA (1)...(19): siRNA sense strand
agaaggaaaugucagaauu

SEQ ID NO: 124700 - RNA, 19 nt, Homo sapiens
  misc_RNA (1)...(19): siRNA sense strand
agaaagacaugaagaagug

SEQ ID NO: 124701 - RNA, 19 nt, Homo sapiens
  misc_RNA (1)...(19): siRNA sense strand
gaacuuccgugagaacuuc

SEQ ID NO: 124702 - RNA, 19 nt, Homo sapiens
  misc_RNA (1)...(19): siRNA sense strand
gaagugcgaccaccacauu

SEQ ID NO: 124703 - RNA, 19 nt, Homo sapiens
  misc_RNA (1)...(19): siRNA sense strand
agagagaccuggagaugaa

SEQ ID NO: 124704 - RNA, 19 nt, Homo sapiens
  misc_RNA (1)...(19): siRNA sense strand
ggaaaugucagaauucauc

SEQ ID NO: 124705 - RNA, 19 nt, Homo sapiens
  misc_RNA (1)...(19): siRNA sense strand
caaguucucugccaagcuu

SEQ ID NO: 124706 - RNA, 19 nt, Homo sapiens
  misc_RNA (1)...(19): siRNA sense strand
gaaggaaaugucagaauuc

SEQ ID NO: 124707 - RNA, 19 nt, Homo sapiens
  misc_RNA (1)...(19): siRNA sense strand
gugagaacuucaagaaaga

SEQ ID NO: 124708 - RNA, 19 nt, Homo sapiens
  misc_RNA (1)...(19): siRNA sense strand
ucacagagcggcagagaga

SEQ ID NO: 124709 - RNA, 19 nt, Homo sapiens
  misc_RNA (1)...(19): siRNA sense strand
ggaaaacaccaucacaaua

SEQ ID NO: 124710 - RNA, 19 nt, Homo sapiens
  misc_RNA (1)...(19): siRNA sense strand
gcuaagcucucucagaacu

SEQ ID NO: 124711 - RNA, 19 nt, Homo sapiens
  misc_RNA (1)...(19): siRNA sense strand
gauaaagauugaagaagac

SEQ ID NO: 124712 - RNA, 19 nt, Homo sapiens
  misc_RNA (1)...(19): siRNA sense strand
uggaucagcugcuucgaaa

SEQ ID NO: 124713 - RNA, 19 nt, Homo sapiens
  misc_RNA (1)...(19): siRNA sense strand
cgugagaacuucaagaaag

SEQ ID NO: 124714 - RNA, 19 nt, Homo sapiens
  misc_RNA (1)...(19): siRNA sense strand
gcagagagaccuggagaug

SEQ ID NO: 124715 - RNA, 19 nt, Homo sapiens
  misc_RNA (1)...(19): siRNA sense strand
aaacaaaugcagaaggaaa

SEQ ID NO: 124716 - RNA, 19 nt, Homo sapiens
  misc_RNA (1)...(19): siRNA sense strand
gcacaagacgggcaacauc

SEQ ID NO: 124717 - RNA, 19 nt, Homo sapiens
  misc_RNA (1)...(19): siRNA sense strand
acagacauguucaaccaaa

SEQ ID NO: 124718 - RNA, 19 nt, Homo sapiens
  misc_RNA (1)...(19): siRNA sense strand
gaaaggauaaagauugaag

SEQ ID NO: 124719 - RNA, 19 nt, Homo sapiens
  misc_RNA (1)...(19): siRNA sense strand
cugaugaacuuccgugaga

SEQ ID NO: 124720 - RNA, 19 nt, Homo sapiens
  misc_RNA (1)...(19): siRNA sense strand
gaacuucaagaaagacaug

SEQ ID NO: 124721 - RNA, 19 nt, Homo sapiens
  misc_RNA (1)...(19): siRNA sense strand
gaaguucaccucaaguucu

SEQ ID NO: 124722 - RNA, 19 nt, Homo sapiens
  misc_RNA (1)...(19): siRNA sense strand
ucaagaaagacaugaagaa

SEQ ID NO: 124723 - RNA, 19 nt, Homo sapiens
  misc_RNA (1)...(19): siRNA sense strand
cagaggaggacaucaagaa

SEQ ID NO: 124724 - RNA, 19 nt, Homo sapiens
  misc_RNA (1)...(19): siRNA sense strand
gaacuacugcuccagaaac

SEQ ID NO: 124725 - RNA, 19 nt, Homo sapiens
  misc_RNA (1)...(19): siRNA sense strand
aagcagaaguucaccucaa

SEQ ID NO: 124726 - RNA, 19 nt, Homo sapiens
  misc_RNA (1)...(19): siRNA sense strand
gaauucauccgggaaagga

SEQ ID NO: 124727 - RNA, 19 nt, Homo sapiens
  misc_RNA (1)...(19): siRNA sense strand
gcugaagggcaaacaaaug

SEQ ID NO: 124728 - RNA, 19 nt, Homo sapiens
  misc_RNA (1)...(19): siRNA sense strand
ggacgaagcagaaguucac

SEQ ID NO: 124729 - RNA, 19 nt, Homo sapiens
  misc_RNA (1)...(19): siRNA sense strand
cgggaaaggauaaagauug

SEQ ID NO: 124730 - RNA, 19 nt, Homo sapiens
  misc_RNA (1)...(19): siRNA sense strand
gagcuacugcgacuacuuc

SEQ ID NO: 124731 - RNA, 19 nt, Homo sapiens
  misc_RNA (1)...(19): siRNA sense strand
cagcugaagggcaaacaaa

SEQ ID NO: 124732 - RNA, 19 nt, Homo sapiens
  misc_RNA (1)...(19): siRNA sense strand
caaccaggcccaguccaaa

SEQ ID NO: 124733 - RNA, 19 nt, Homo sapiens
  misc_RNA (1)...(19): siRNA sense strand
caagaaagacaugaagaag

SEQ ID NO: 124734 - RNA, 19 nt, Homo sapiens
  misc_RNA (1)...(19): siRNA sense strand
aaggaaaugucagaauuca

SEQ ID NO: 124735 - RNA, 19 nt, Homo sapiens
  misc_RNA (1)...(19): siRNA sense strand
agacagaggaggacaucaa

SEQ ID NO: 124736 - RNA, 19 nt, Homo sapiens
  misc_RNA (1)...(19): siRNA sense strand
cagaaguucaccucaaguu

SEQ ID NO: 124737 - RNA, 19 nt, Homo sapiens
  misc_RNA (1)...(19): siRNA sense strand
caauaaacugugugacguu

SEQ ID NO: 124738 - RNA, 19 nt, Homo sapiens
  misc_RNA (1)...(19): siRNA sense strand
agaucaagcugagcaacaa

SEQ ID NO: 124739 - RNA, 19 nt, Homo sapiens
  misc_RNA (1)...(19): siRNA sense strand
gagaucaagcugagcaaca

SEQ ID NO: 124740 - RNA, 19 nt, Homo sapiens
  misc_RNA (1)...(19): siRNA sense strand
gggcccaggugaagaagag

SEQ ID NO: 124741 - RNA, 19 nt, Homo sapiens
  misc_RNA (1)...(19): siRNA sense strand
gacuacuucugggcugaua

SEQ ID NO: 124742 - RNA, 19 nt, Homo sapiens
  misc_RNA (1)...(19): siRNA sense strand
gcagaaggaaaugucagaa

SEQ ID NO: 124743 - RNA, 19 nt, Homo sapiens
  misc_RNA (1)...(19): siRNA sense strand
cagacacgaugccggaaca

SEQ ID NO: 124744 - RNA, 19 nt, Homo sapiens
  misc_RNA (1)...(19): siRNA sense strand
agacuaugcgaagaacuua

SEQ ID NO: 124745 - RNA, 19 nt, Homo sapiens
  misc_RNA (1)...(19): siRNA sense strand
guguggaucucuacaacca

SEQ ID NO: 124746 - RNA, 19 nt, Homo sapiens
  misc_RNA (1)...(19): siRNA sense strand
cagagagaccuggagauga

SEQ ID NO: 124747 - RNA, 19 nt, Homo sapiens
  misc_RNA (1)...(19): siRNA sense strand
cagaaggaaaugucagaau

SEQ ID NO: 124748 - RNA, 19 nt, Homo sapiens
  misc_RNA (1)...(19): siRNA sense strand
ccaccacauuggagcuaga

SEQ ID NO: 124749 - RNA, 19 nt, Homo sapiens
  misc_RNA (1)...(19): siRNA sense strand
ggaaaggauaaagauugaa

SEQ ID NO: 124750 - RNA, 19 nt, Homo sapiens
  misc_RNA (1)...(19): siRNA sense strand
aagaagacuaugcgaagaa

SEQ ID NO: 124751 - RNA, 19 nt, Homo sapiens
  misc_RNA (1)...(19): siRNA sense strand
guggagaggguagagauga

SEQ ID NO: 124752 - RNA, 19 nt, Homo sapiens
  misc_RNA (1)...(19): siRNA sense strand
ucagaauucauccgggaaa

SEQ ID NO: 124753 - RNA, 19 nt, Homo sapiens
  misc_RNA (1)...(19): siRNA sense strand
cauccgcccuguggacaug

SEQ ID NO: 124754 - RNA, 19 nt, Homo sapiens
  misc_RNA (1)...(19): siRNA sense strand
ccaccacauugccgaccuu

SEQ ID NO: 124755 - RNA, 19 nt, Homo sapiens
  misc_RNA (1)...(19): siRNA sense strand
ugaacuacugcuccagaaa

SEQ ID NO: 124756 - RNA, 19 nt, Homo sapiens
  misc_RNA (1)...(19): siRNA sense strand
aagaaagacaugaagaagu

SEQ ID NO: 124757 - RNA, 19 nt, Homo sapiens
  misc_RNA (1)...(19): siRNA sense strand
gcagaaguucaccucaagu

SEQ ID NO: 124758 - RNA, 19 nt, Homo sapiens
  misc_RNA (1)...(19): siRNA sense strand
ggagcuacugcgacuacuu

SEQ ID NO: 124759 - RNA, 19 nt, Homo sapiens
  misc_RNA (1)...(19): siRNA sense strand
ugaugaacuuccgugagaa

SEQ ID NO: 124760 - RNA, 19 nt, Homo sapiens
  misc_RNA (1)...(19): siRNA sense strand
cuguggacauggagaucua

SEQ ID NO: 124761 - RNA, 19 nt, Homo sapiens
  misc_RNA (1)...(19): siRNA sense strand
gcccguggaucagcugcuu

SEQ ID NO: 124762 - RNA, 19 nt, Homo sapiens
  misc_RNA (1)...(19): siRNA sense strand
caagacagaggaggacauc

SEQ ID NO: 124763 - RNA, 19 nt, Homo sapiens
  misc_RNA (1)...(19): siRNA sense strand
gaagagccuggcggacgaa

SEQ ID NO: 124764 - RNA, 19 nt, Homo sapiens
  misc_RNA (1)...(19): siRNA sense strand
caaacaaaugcagaaggaa

SEQ ID NO: 124765 - RNA, 19 nt, Homo sapiens
  misc_RNA (1)...(19): siRNA sense strand
caaaugcagaaggaaaugu

SEQ ID NO: 124766 - RNA, 19 nt, Homo sapiens
  misc_RNA (1)...(19): siRNA sense strand
guggaucagcugcuucgaa

SEQ ID NO: 124767 - RNA, 19 nt, Homo sapiens
  misc_RNA (1)...(19): siRNA sense strand
uugaacuacugcuccagaa

SEQ ID NO: 124768 - RNA, 19 nt, Homo sapiens
  misc_RNA (1)...(19): siRNA sense strand
gcuaugccucgguggagaa

SEQ ID NO: 124769 - RNA, 19 nt, Homo sapiens
  misc_RNA (1)...(19): siRNA sense strand
caccaucacaauaaacugu

SEQ ID NO: 124770 - RNA, 19 nt, Homo sapiens
  misc_RNA (1)...(19): siRNA sense strand
gacagaggaggacaucaag

SEQ ID NO: 124771 - RNA, 19 nt, Homo sapiens
  misc_RNA (1)...(19): siRNA sense strand
gcacauugcugauuaccua

SEQ ID NO: 124772 - RNA, 19 nt, Homo sapiens
  misc_RNA (1)...(19): siRNA sense strand
ggacauaggcuacuucuug

SEQ ID NO: 124773 - RNA, 19 nt, Homo sapiens
  misc_RNA (1)...(19): siRNA sense strand
ggacaucuauaaugccaua

SEQ ID NO: 124774 - RNA, 19 nt, Homo sapiens
  misc_RNA (1)...(19): siRNA sense strand
caaaguggaugaaguauca

SEQ ID NO: 124775 - RNA, 19 nt, Homo sapiens
  misc_RNA (1)...(19): siRNA sense strand
ggacaaaguggaugaagua

SEQ ID NO: 124776 - RNA, 19 nt, Homo sapiens
  misc_RNA (1)...(19): siRNA sense strand
ucaaagaugccuuguauuu

SEQ ID NO: 124777 - RNA, 19 nt, Homo sapiens
  misc_RNA (1)...(19): siRNA sense strand
ucacacaacuuacaccauu

SEQ ID NO: 124778 - RNA, 19 nt, Homo sapiens
  misc_RNA (1)...(19): siRNA sense strand
cagaugggauugacucuuu

SEQ ID NO: 124779 - RNA, 19 nt, Homo sapiens
  misc_RNA (1)...(19): siRNA sense strand
caacaguggagaucucuua

SEQ ID NO: 124780 - RNA, 19 nt, Homo sapiens
  misc_RNA (1)...(19): siRNA sense strand
cugauuaccuaccuaguua

SEQ ID NO: 124781 - RNA, 19 nt, Homo sapiens
  misc_RNA (1)...(19): siRNA sense strand
ggagauguguggagacaau

SEQ ID NO: 124782 - RNA, 19 nt, Homo sapiens
  misc_RNA (1)...(19): siRNA sense strand
ugacugaggacaucuauaa

SEQ ID NO: 124783 - RNA, 19 nt, Homo sapiens
  misc_RNA (1)...(19): siRNA sense strand
gacauaggcuacuucuuga

SEQ ID NO: 124784 - RNA, 19 nt, Homo sapiens
  misc_RNA (1)...(19): siRNA sense strand
cgacagaguuggagauaca

SEQ ID NO: 124785 - RNA, 19 nt, Homo sapiens
  misc_RNA (1)...(19): siRNA sense strand
ugaaguugcugauacaguu

SEQ ID NO: 124786 - RNA, 19 nt, Homo sapiens
  misc_RNA (1)...(19): siRNA sense strand
ugaaggcaauauuggauuu

SEQ ID NO: 124787 - RNA, 19 nt, Homo sapiens
  misc_RNA (1)...(19): siRNA sense strand
gagauacugccaagccuua

SEQ ID NO: 124788 - RNA, 19 nt, Homo sapiens
  misc_RNA (1)...(19): siRNA sense strand
gaauacaggacaccauuga

SEQ ID NO: 124789 - RNA, 19 nt, Homo sapiens
  misc_RNA (1)...(19): siRNA sense strand
gaacugcuucgguauuuau

SEQ ID NO: 124790 - RNA, 19 nt, Homo sapiens
  misc_RNA (1)...(19): siRNA sense strand
aauaugauguggagaaaga

SEQ ID NO: 124791 - RNA, 19 nt, Homo sapiens
  misc_RNA (1)...(19): siRNA sense strand
aaagaugccuuguauuucu

SEQ ID NO: 124792 - RNA, 19 nt, Homo sapiens
  misc_RNA (1)...(19): siRNA sense strand
uaagaaaggagaccucuau

SEQ ID NO: 124793 - RNA, 19 nt, Homo sapiens
  misc_RNA (1)...(19): siRNA sense strand
ggagaccucuauuucaaca

SEQ ID NO: 124794 - RNA, 19 nt, Homo sapiens
  misc_RNA (1)...(19): siRNA sense strand
gaacuggccucacuuuugu

SEQ ID NO: 124795 - RNA, 19 nt, Homo sapiens
  misc_RNA (1)...(19): siRNA sense strand
ccacugaaguugcugauac

SEQ ID NO: 124796 - RNA, 19 nt, Homo sapiens
  misc_RNA (1)...(19): siRNA sense strand
caguggagaucucuuaaug

SEQ ID NO: 124797 - RNA, 19 nt, Homo sapiens
  misc_RNA (1)...(19): siRNA sense strand
gugaacugcuucgguauuu

SEQ ID NO: 124798 - RNA, 19 nt, Homo sapiens
  misc_RNA (1)...(19): siRNA sense strand
guauaucggugaacugcuu

SEQ ID NO: 124799 - RNA, 19 nt, Homo sapiens
  misc_RNA (1)...(19): siRNA sense strand
uaacccugcugucaucaaa

SEQ ID NO: 124800 - RNA, 19 nt, Homo sapiens
  misc_RNA (1)...(19): siRNA sense strand
gaaaccaaaugaccgugau

SEQ ID NO: 124801 - RNA, 19 nt, Homo sapiens
  misc_RNA (1)...(19): siRNA sense strand
agaguaaacuaccuacaga

SEQ ID NO: 124802 - RNA, 19 nt, Homo sapiens
  misc_RNA (1)...(19): siRNA sense strand
aaggagaccucuauuucaa

SEQ ID NO: 124803 - RNA, 19 nt, Homo sapiens
  misc_RNA (1)...(19): siRNA sense strand
gaaggcaauauuggauuua

SEQ ID NO: 124804 - RNA, 19 nt, Homo sapiens
  misc_RNA (1)...(19): siRNA sense strand
caacgucacugucauucag

SEQ ID NO: 124805 - RNA, 19 nt, Homo sapiens
  misc_RNA (1)...(19): siRNA sense strand
acaagcagcugucgaagag

SEQ ID NO: 124806 - RNA, 19 nt, Homo sapiens
  misc_RNA (1)...(19): siRNA sense strand
aaauggauauugcgucaga

SEQ ID NO: 124807 - RNA, 19 nt, Homo sapiens
  misc_RNA (1)...(19): siRNA sense strand
gaugaaguaucaacugaac

SEQ ID NO: 124808 - RNA, 19 nt, Homo sapiens
  misc_RNA (1)...(19): siRNA sense strand
guggagaucucuuaauggu

SEQ ID NO: 124809 - RNA, 19 nt, Homo sapiens
  misc_RNA (1)...(19): siRNA sense strand
ggcaauauuggauuuauga

SEQ ID NO: 124810 - RNA, 19 nt, Homo sapiens
  misc_RNA (1)...(19): siRNA sense strand
agaaaggagaccucuauuu

SEQ ID NO: 124811 - RNA, 19 nt, Homo sapiens
  misc_RNA (1)...(19): siRNA sense strand
caaaggcucagacagagaa

SEQ ID NO: 124812 - RNA, 19 nt, Homo sapiens
  misc_RNA (1)...(19): siRNA sense strand
gaggagauguguggagaca

SEQ ID NO: 124813 - RNA, 19 nt, Homo sapiens
  misc_RNA (1)...(19): siRNA sense strand
gaucaugagggucgcauug

SEQ ID NO: 124814 - RNA, 19 nt, Homo sapiens
  misc_RNA (1)...(19): siRNA sense strand
acacaacuuacaccauuua

SEQ ID NO: 124815 - RNA, 19 nt, Homo sapiens
  misc_RNA (1)...(19): siRNA sense strand
uggaugaaguaucaacuga

SEQ ID NO: 124816 - RNA, 19 nt, Homo sapiens
  misc_RNA (1)...(19): siRNA sense strand
aaacugagagaugucuuua

SEQ ID NO: 124817 - RNA, 19 nt, Homo sapiens
  misc_RNA (1)...(19): siRNA sense strand
gagaaaaguuggugcuguu

SEQ ID NO: 124818 - RNA, 19 nt, Homo sapiens
  misc_RNA (1)...(19): siRNA sense strand
ugaacugcuucgguauuua

SEQ ID NO: 124819 - RNA, 19 nt, Homo sapiens
  misc_RNA (1)...(19): siRNA sense strand
acuccugccuuauacauuu

SEQ ID NO: 124820 - RNA, 19 nt, Homo sapiens
  misc_RNA (1)...(19): siRNA sense strand
gaucacucaucagcgcaua

SEQ ID NO: 124821 - RNA, 19 nt, Homo sapiens
  misc_RNA (1)...(19): siRNA sense strand
caaagaugccuuguauuuc

SEQ ID NO: 124822 - RNA, 19 nt, Homo sapiens
  misc_RNA (1)...(19): siRNA sense strand
guucuaugcugccacugaa

SEQ ID NO: 124823 - RNA, 19 nt, Homo sapiens
  misc_RNA (1)...(19): siRNA sense strand
gaaccacaggucuuccaaa

SEQ ID NO: 124824 - RNA, 19 nt, Homo sapiens
  misc_RNA (1)...(19): siRNA sense strand
uauaaugccauaagugcua

SEQ ID NO: 124825 - RNA, 19 nt, Homo sapiens
  misc_RNA (1)...(19): siRNA sense strand
cgucagaguucccaaaggu

SEQ ID NO: 124826 - RNA, 19 nt, Homo sapiens
  misc_RNA (1)...(19): siRNA sense strand
gccauggcgugccucaauu

SEQ ID NO: 124827 - RNA, 19 nt, Homo sapiens
  misc_RNA (1)...(19): siRNA sense strand
cuauaucacucugcccuuu

SEQ ID NO: 124828 - RNA, 19 nt, Homo sapiens
  misc_RNA (1)...(19): siRNA sense strand
ugagaucacuggaacuuuu

SEQ ID NO: 124829 - RNA, 19 nt, Homo sapiens
  misc_RNA (1)...(19): siRNA sense strand
gcugauuaccuaccuaguu

SEQ ID NO: 124830 - RNA, 19 nt, Homo sapiens
  misc_RNA (1)...(19): siRNA sense strand
ggauauugcgucagaguuc

SEQ ID NO: 124831 - RNA, 19 nt, Homo sapiens
  misc_RNA (1)...(19): siRNA sense strand
uggcgugccucaauuacaa

SEQ ID NO: 124832 - RNA, 19 nt, Homo sapiens
  misc_RNA (1)...(19): siRNA sense strand
gaaaauacaacgucacugu

SEQ ID NO: 124833 - RNA, 19 nt, Homo sapiens
  misc_RNA (1)...(19): siRNA sense strand
guauggaacuggccucacu

SEQ ID NO: 124834 - RNA, 19 nt, Homo sapiens
  misc_RNA (1)...(19): siRNA sense strand
caagagauuuggggacaua

SEQ ID NO: 124835 - RNA, 19 nt, Homo sapiens
  misc_RNA (1)...(19): siRNA sense strand
aagcagccaugaucacuca

SEQ ID NO: 124836 - RNA, 19 nt, Homo sapiens
  misc_RNA (1)...(19): siRNA sense strand
ggcauucacggauguauug

SEQ ID NO: 124837 - RNA, 19 nt, Homo sapiens
  misc_RNA (1)...(19): siRNA sense strand
uaacacagaugggauugac

SEQ ID NO: 124838 - RNA, 19 nt, Homo sapiens
  misc_RNA (1)...(19): siRNA sense strand
caucuauaaugccauaagu

SEQ ID NO: 124839 - RNA, 19 nt, Homo sapiens
  misc_RNA (1)...(19): siRNA sense strand
gagugcaugugccagauca

SEQ ID NO: 124840 - RNA, 19 nt, Homo sapiens
  misc_RNA (1)...(19): siRNA sense strand
aaaggagaccucuauuuca

SEQ ID NO: 124841 - RNA, 19 nt, Homo sapiens
  misc_RNA (1)...(19): siRNA sense strand
acugagagaugucuuuaag

SEQ ID NO: 124842 - RNA, 19 nt, Homo sapiens
  misc_RNA (1)...(19): siRNA sense strand
gcaaaggcucagacagaga

SEQ ID NO: 124843 - RNA, 19 nt, Homo sapiens
  misc_RNA (1)...(19): siRNA sense strand
ugaccgugaucauaaagug

SEQ ID NO: 124844 - RNA, 19 nt, Homo sapiens
  misc_RNA (1)...(19): siRNA sense strand
ccauggcgugccucaauua

SEQ ID NO: 124845 - RNA, 19 nt, Homo sapiens
  misc_RNA (1)...(19): siRNA sense strand
acucuugccuugcggacua

SEQ ID NO: 124846 - RNA, 19 nt, Homo sapiens
  misc_RNA (1)...(19): siRNA sense strand
cacacaacuuacaccauuu

SEQ ID NO: 124847 - RNA, 19 nt, Homo sapiens
  misc_RNA (1)...(19): siRNA sense strand
ggaugaaguaucaacugaa

SEQ ID NO: 124848 - RNA, 19 nt, Homo sapiens
  misc_RNA (1)...(19): siRNA sense strand
ccuuguauuucuuggauga

SEQ ID NO: 124849 - RNA, 19 nt, Homo sapiens
  misc_RNA (1)...(19): siRNA sense strand
guccaagaaguaaauguuu

SEQ ID NO: 124850 - RNA, 19 nt, Homo sapiens
  misc_RNA (1)...(19): siRNA sense strand
gaaguugcugauacaguug

SEQ ID NO: 124851 - RNA, 19 nt, Homo sapiens
  misc_RNA (1)...(19): siRNA sense strand
uuaugcaacucaccacaga

SEQ ID NO: 124852 - RNA, 19 nt, Homo sapiens
  misc_RNA (1)...(19): siRNA sense strand
ggaacuggccucacuuuug

SEQ ID NO: 124853 - RNA, 19 nt, Homo sapiens
  misc_RNA (1)...(19): siRNA sense strand
ucauggaggucugaaguca

SEQ ID NO: 124854 - RNA, 19 nt, Homo sapiens
  misc_RNA (1)...(19): siRNA sense strand
gaaccucugcugcccauac

SEQ ID NO: 124855 - RNA, 19 nt, Homo sapiens
  misc_RNA (1)...(19): siRNA sense strand
caauuugucaagagauuug

SEQ ID NO: 124856 - RNA, 19 nt, Homo sapiens
  misc_RNA (1)...(19): siRNA sense strand
gaaccuaucccagagucau

SEQ ID NO: 124857 - RNA, 19 nt, Homo sapiens
  misc_RNA (1)...(19): siRNA sense strand
gauacugccaagccuuaaa

SEQ ID NO: 124858 - RNA, 19 nt, Homo sapiens
  misc_RNA (1)...(19): siRNA sense strand
ggugaacugcuucgguauu

SEQ ID NO: 124859 - RNA, 19 nt, Homo sapiens
  misc_RNA (1)...(19): siRNA sense strand
gauugaaggcagaugaugu

SEQ ID NO: 124860 - RNA, 19 nt, Homo sapiens
  misc_RNA (1)...(19): siRNA sense strand
caccacagaaaccaaauga

SEQ ID NO: 124861 - RNA, 19 nt, Homo sapiens
  misc_RNA (1)...(19): siRNA sense strand
gauuggcauucacggaugu

SEQ ID NO: 124862 - RNA, 19 nt, Homo sapiens
  misc_RNA (1)...(19): siRNA sense strand
uguaugugccuaugacuga

SEQ ID NO: 124863 - RNA, 19 nt, Homo sapiens
  misc_RNA (1)...(19): siRNA sense strand
aagcagcugucgaagagau

SEQ ID NO: 124864 - RNA, 19 nt, Homo sapiens
  misc_RNA (1)...(19): siRNA sense strand
gaguaaacuaccuacagaa

SEQ ID NO: 124865 - RNA, 19 nt, Homo sapiens
  misc_RNA (1)...(19): siRNA sense strand
gauguguggagacaauuug

SEQ ID NO: 124866 - RNA, 19 nt, Homo sapiens
  misc_RNA (1)...(19): siRNA sense strand
gaagaguaaacuaccuaca

SEQ ID NO: 124867 - RNA, 19 nt, Homo sapiens
  misc_RNA (1)...(19): siRNA sense strand
cugaggacaucuauaaugc

SEQ ID NO: 124868 - RNA, 19 nt, Homo sapiens
  misc_RNA (1)...(19): siRNA sense strand
aagaauacaggacaccauu

SEQ ID NO: 124869 - RNA, 19 nt, Homo sapiens
  misc_RNA (1)...(19): siRNA sense strand
uuaccuaccuaguuaugca

SEQ ID NO: 124870 - RNA, 19 nt, Homo sapiens
  misc_RNA (1)...(19): siRNA sense strand
aguaaacuaccuacagaaa

SEQ ID NO: 124871 - RNA, 19 nt, Homo sapiens
  misc_RNA (1)...(19): siRNA sense strand
ggaagcagauggaauuaaa

SEQ ID NO: 124872 - RNA, 19 nt, Homo sapiens
  misc_RNA (1)...(19): siRNA sense strand
gcaagaauguaaagauuug

SEQ ID NO: 124873 - RNA, 19 nt, Homo sapiens
  misc_RNA (1)...(19): siRNA sense strand
guacucuucucccauauua

SEQ ID NO: 124874 - RNA, 19 nt, Homo sapiens
  misc_RNA (1)...(19): siRNA sense strand
gcaaggagauuaugcucaa

SEQ ID NO: 124875 - RNA, 19 nt, Homo sapiens
  misc_RNA (1)...(19): siRNA sense strand
uaaacuagaucgauggaaa

SEQ ID NO: 124876 - RNA, 19 nt, Homo sapiens
  misc_RNA (1)...(19): siRNA sense strand
ggacgagacuuacccucua

SEQ ID NO: 124877 - RNA, 19 nt, Homo sapiens
  misc_RNA (1)...(19): siRNA sense strand
gcaacgaucuauccaauac

SEQ ID NO: 124878 - RNA, 19 nt, Homo sapiens
  misc_RNA (1)...(19): siRNA sense strand
gaaggcaccaucucuguuu

SEQ ID NO: 124879 - RNA, 19 nt, Homo sapiens
  misc_RNA (1)...(19): siRNA sense strand
caagacacaugcaaugaug

SEQ ID NO: 124880 - RNA, 19 nt, Homo sapiens
  misc_RNA (1)...(19): siRNA sense strand
gugcaagaauguaaagauu

SEQ ID NO: 124881 - RNA, 19 nt, Homo sapiens
  misc_RNA (1)...(19): siRNA sense strand
gaauuuaggaucuuguuga

SEQ ID NO: 124882 - RNA, 19 nt, Homo sapiens
  misc_RNA (1)...(19): siRNA sense strand
caccauaacucacaagaca

SEQ ID NO: 124883 - RNA, 19 nt, Homo sapiens
  misc_RNA (1)...(19): siRNA sense strand
aaccaaagauuguuuagug

SEQ ID NO: 124884 - RNA, 19 nt, Homo sapiens
  misc_RNA (1)...(19): siRNA sense strand
gcccugcacugucaccaua

SEQ ID NO: 124885 - RNA, 19 nt, Homo sapiens
  misc_RNA (1)...(19): siRNA sense strand
gagauuaugcucaagaaug

SEQ ID NO: 124886 - RNA, 19 nt, Homo sapiens
  misc_RNA (1)...(19): siRNA sense strand
guugaugacaugaagauua

SEQ ID NO: 124887 - RNA, 19 nt, Homo sapiens
  misc_RNA (1)...(19): siRNA sense strand
cuagaucgauggaaaguuc

SEQ ID NO: 124888 - RNA, 19 nt, Homo sapiens
  misc_RNA (1)...(19): siRNA sense strand
caagggcccugcacuguca

SEQ ID NO: 124889 - RNA, 19 nt, Homo sapiens
  misc_RNA (1)...(19): siRNA sense strand
gugcucagauucaaguaaa

SEQ ID NO: 124890 - RNA, 19 nt, Homo sapiens
  misc_RNA (1)...(19): siRNA sense strand
agauuaugcucaagaauga

SEQ ID NO: 124891 - RNA, 19 nt, Homo sapiens
  misc_RNA (1)...(19): siRNA sense strand
ggaaaguucaaguaacaaa

SEQ ID NO: 124892 - RNA, 19 nt, Homo sapiens
  misc_RNA (1)...(19): siRNA sense strand
aacccaagcuuugcgauua

SEQ ID NO: 124893 - RNA, 19 nt, Homo sapiens
  misc_RNA (1)...(19): siRNA sense strand
gcagauggaauuaaacuag

SEQ ID NO: 124894 - RNA, 19 nt, Homo sapiens
  misc_RNA (1)...(19): siRNA sense strand
ggacaggcacauacaguga

SEQ ID NO: 124895 - RNA, 19 nt, Homo sapiens
  misc_RNA (1)...(19): siRNA sense strand
caaagauuguuuagugcaa

SEQ ID NO: 124896 - RNA, 19 nt, Homo sapiens
  misc_RNA (1)...(19): siRNA sense strand
gagaacaaacagaugauga

SEQ ID NO: 124897 - RNA, 19 nt, Homo sapiens
  misc_RNA (1)...(19): siRNA sense strand
gaaggacuguugggagaau

SEQ ID NO: 124898 - RNA, 19 nt, Homo sapiens
  misc_RNA (1)...(19): siRNA sense strand
cccaaggaauucacaauga

SEQ ID NO: 124899 - RNA, 19 nt, Homo sapiens
  misc_RNA (1)...(19): siRNA sense strand
gaagauuaagggacaagaa

SEQ ID NO: 124900 - RNA, 19 nt, Homo sapiens
  misc_RNA (1)...(19): siRNA sense strand
ggaugcaguugaugacaug

SEQ ID NO: 124901 - RNA, 19 nt, Homo sapiens
  misc_RNA (1)...(19): siRNA sense strand
ucagaugcguaaagacaaa

SEQ ID NO: 124902 - RNA, 19 nt, Homo sapiens
  misc_RNA (1)...(19): siRNA sense strand
uuaaucagaugcguaaaga

SEQ ID NO: 124903 - RNA, 19 nt, Homo sapiens
  misc_RNA (1)...(19): siRNA sense strand
ggcgguggcugcagacuau

SEQ ID NO: 124904 - RNA, 19 nt, Homo sapiens
  misc_RNA (1)...(19): siRNA sense strand
cagcuuggaagguauuaua

SEQ ID NO: 124905 - RNA, 19 nt, Homo sapiens
  misc_RNA (1)...(19): siRNA sense strand
gaguagcacugcccagcuu

SEQ ID NO: 124906 - RNA, 19 nt, Homo sapiens
  misc_RNA (1)...(19): siRNA sense strand
cagauggaauuaaacuaga

SEQ ID NO: 124907 - RNA, 19 nt, Homo sapiens
  misc_RNA (1)...(19): siRNA sense strand
aaaguacauuccacaaguu

SEQ ID NO: 124908 - RNA, 19 nt, Homo sapiens
  misc_RNA (1)...(19): siRNA sense strand
gcaguggaccccauuaaua

SEQ ID NO: 124909 - RNA, 19 nt, Homo sapiens
  misc_RNA (1)...(19): siRNA sense strand
auauaaaggcgacugaaua

SEQ ID NO: 124910 - RNA, 19 nt, Homo sapiens
  misc_RNA (1)...(19): siRNA sense strand
ucuguacucuucucccaua

SEQ ID NO: 124911 - RNA, 19 nt, Homo sapiens
  misc_RNA (1)...(19): siRNA sense strand
uaucaaagcccuacaacuc

SEQ ID NO: 124912 - RNA, 19 nt, Homo sapiens
  misc_RNA (1)...(19): siRNA sense strand
gaagguauuauaguucuga

SEQ ID NO: 124913 - RNA, 19 nt, Homo sapiens
  misc_RNA (1)...(19): siRNA sense strand
ucucauggcucucaauuuu

SEQ ID NO: 124914 - RNA, 19 nt, Homo sapiens
  misc_RNA (1)...(19): siRNA sense strand
ggaauuaaacuagaucgau

SEQ ID NO: 124915 - RNA, 19 nt, Homo sapiens
  misc_RNA (1)...(19): siRNA sense strand
gauuacaggugcauuuggu

SEQ ID NO: 124916 - RNA, 19 nt, Homo sapiens
  misc_RNA (1)...(19): siRNA sense strand
gauauaaaggcgacugaau

SEQ ID NO: 124917 - RNA, 19 nt, Homo sapiens
  misc_RNA (1)...(19): siRNA sense strand
uuaauaaggcgguuuacuu

SEQ ID NO: 124918 - RNA, 19 nt, Homo sapiens
  misc_RNA (1)...(19): siRNA sense strand
ccauuaaucagaugcguaa

SEQ ID NO: 124919 - RNA, 19 nt, Homo sapiens
  misc_RNA (1)...(19): siRNA sense strand
gauggaaaguucaaguaac

SEQ ID NO: 124920 - RNA, 19 nt, Homo sapiens
  misc_RNA (1)...(19): siRNA sense strand
gaacaggcaacgaucuauc

SEQ ID NO: 124921 - RNA, 19 nt, Homo sapiens
  misc_RNA (1)...(19): siRNA sense strand
uuauucagcucgaguacuu

SEQ ID NO: 124922 - RNA, 19 nt, Homo sapiens
  misc_RNA (1)...(19): siRNA sense strand
ggacuguugggagaauuua

SEQ ID NO: 124923 - RNA, 19 nt, Homo sapiens
  misc_RNA (1)...(19): siRNA sense strand
gaacaaacagaugaugaca

SEQ ID NO: 124924 - RNA, 19 nt, Homo sapiens
  misc_RNA (1)...(19): siRNA sense strand
uaagaaaacccaaggaauu

SEQ ID NO: 124925 - RNA, 19 nt, Homo sapiens
  misc_RNA (1)...(19): siRNA sense strand
uuuaggaucuuguugaauc

SEQ ID NO: 124926 - RNA, 19 nt, Homo sapiens
  misc_RNA (1)...(19): siRNA sense strand
ucacaagacacaugcaaug

SEQ ID NO: 124927 - RNA, 19 nt, Homo sapiens
  misc_RNA (1)...(19): siRNA sense strand
ccacugugcucagauucaa

SEQ ID NO: 124928 - RNA, 19 nt, Homo sapiens
  misc_RNA (1)...(19): siRNA sense strand
cuuggaagguauuauaguu

SEQ ID NO: 124929 - RNA, 19 nt, Homo sapiens
  misc_RNA (1)...(19): siRNA sense strand
gcgguuuacuuauucuaug

SEQ ID NO: 124930 - RNA, 19 nt, Homo sapiens
  misc_RNA (1)...(19): siRNA sense strand
gaauaggacaggcacauac

SEQ ID NO: 124931 - RNA, 19 nt, Homo sapiens
  misc_RNA (1)...(19): siRNA sense strand
gggaacaggcaacgaucua

SEQ ID NO: 124932 - RNA, 19 nt, Homo sapiens
  misc_RNA (1)...(19): siRNA sense strand
cgauggaaaguucaaguaa

SEQ ID NO: 124933 - RNA, 19 nt, Homo sapiens
  misc_RNA (1)...(19): siRNA sense strand
gggagaauuuaggaucuug

SEQ ID NO: 124934 - RNA, 19 nt, Homo sapiens
  misc_RNA (1)...(19): siRNA sense strand
uaaaacuccuccuaucaaa

SEQ ID NO: 124935 - RNA, 19 nt, Homo sapiens
  misc_RNA (1)...(19): siRNA sense strand
aauggaagcagauggaauu

SEQ ID NO: 124936 - RNA, 19 nt, Homo sapiens
  misc_RNA (1)...(19): siRNA sense strand
uauaaaggcgacugaauag

SEQ ID NO: 124937 - RNA, 19 nt, Homo sapiens
  misc_RNA (1)...(19): siRNA sense strand
ggaucaagaagauauaaag

SEQ ID NO: 124938 - RNA, 19 nt, Homo sapiens
  misc_RNA (1)...(19): siRNA sense strand
gcacugucaccauaacuca

SEQ ID NO: 124939 - RNA, 19 nt, Homo sapiens
  misc_RNA (1)...(19): siRNA sense strand
cgaauaggacaggcacaua

SEQ ID NO: 124940 - RNA, 19 nt, Homo sapiens
  misc_RNA (1)...(19): siRNA sense strand
gagaauuuaggaucuuguu

SEQ ID NO: 124941 - RNA, 19 nt, Homo sapiens
  misc_RNA (1)...(19): siRNA sense strand
gguccuggaugcaguugau

SEQ ID NO: 124942 - RNA, 19 nt, Homo sapiens
  misc_RNA (1)...(19): siRNA sense strand
augaagugcuagccucuaa

SEQ ID NO: 124943 - RNA, 19 nt, Homo sapiens
  misc_RNA (1)...(19): siRNA sense strand
cuuauucuauggaaccaaa

SEQ ID NO: 124944 - RNA, 19 nt, Homo sapiens
  misc_RNA (1)...(19): siRNA sense strand
ggacgggcaccugaucuug

SEQ ID NO: 124945 - RNA, 19 nt, Homo sapiens
  misc_RNA (1)...(19): siRNA sense strand
gacgagacuuacccucuag

SEQ ID NO: 124946 - RNA, 19 nt, Homo sapiens
  misc_RNA (1)...(19): siRNA sense strand
uaauaauccuggccaacuc

SEQ ID NO: 124947 - RNA, 19 nt, Homo sapiens
  misc_RNA (1)...(19): siRNA sense strand
gaaccaaagauuguuuagu

SEQ ID NO: 124948 - RNA, 19 nt, Homo sapiens
  misc_RNA (1)...(19): siRNA sense strand
aggcaacgaucuauccaau

SEQ ID NO: 124949 - RNA, 19 nt, Homo sapiens
  misc_RNA (1)...(19): siRNA sense strand
caacccaagcuuugcgauu

SEQ ID NO: 124950 - RNA, 19 nt, Homo sapiens
  misc_RNA (1)...(19): siRNA sense strand
gcugucaacccaagcuuug

SEQ ID NO: 124951 - RNA, 19 nt, Homo sapiens
  misc_RNA (1)...(19): siRNA sense strand
ggcaacgaucuauccaaua

SEQ ID NO: 124952 - RNA, 19 nt, Homo sapiens
  misc_RNA (1)...(19): siRNA sense strand
agguuaugcuggagaaauu

SEQ ID NO: 124953 - RNA, 19 nt, Homo sapiens
  misc_RNA (1)...(19): siRNA sense strand
uaaucauuccaccaaguua

SEQ ID NO: 124954 - RNA, 19 nt, Homo sapiens
  misc_RNA (1)...(19): siRNA sense strand
ggagaacaaacagaugaug

SEQ ID NO: 124955 - RNA, 19 nt, Homo sapiens
  misc_RNA (1)...(19): siRNA sense strand
ggaagguauuauaguucug

SEQ ID NO: 124956 - RNA, 19 nt, Homo sapiens
  misc_RNA (1)...(19): siRNA sense strand
guuacuguaugguuugcaa

SEQ ID NO: 124957 - RNA, 19 nt, Homo sapiens
  misc_RNA (1)...(19): siRNA sense strand
gcucucauggcucucaauu

SEQ ID NO: 124958 - RNA, 19 nt, Homo sapiens
  misc_RNA (1)...(19): siRNA sense strand
ggaacaggcaacgaucuau

SEQ ID NO: 124959 - RNA, 19 nt, Homo sapiens
  misc_RNA (1)...(19): siRNA sense strand
aagauuaagggacaagaaa

SEQ ID NO: 124960 - RNA, 19 nt, Homo sapiens
  misc_RNA (1)...(19): siRNA sense strand
acucuucucccauauuauu

SEQ ID NO: 124961 - RNA, 19 nt, Homo sapiens
  misc_RNA (1)...(19): siRNA sense strand
gaucaagaagauauaaagg

SEQ ID NO: 124962 - RNA, 19 nt, Homo sapiens
  misc_RNA (1)...(19): siRNA sense strand
gcuaauccuuuucgaauag

SEQ ID NO: 124963 - RNA, 19 nt, Homo sapiens
  misc_RNA (1)...(19): siRNA sense strand
auggaaaguucaaguaaca

SEQ ID NO: 124964 - RNA, 19 nt, Homo sapiens
  misc_RNA (1)...(19): siRNA sense strand
aaucagaugcguaaagaca

SEQ ID NO: 124965 - RNA, 19 nt, Homo sapiens
  misc_RNA (1)...(19): siRNA sense strand
ugacgauggucugcuggaa

SEQ ID NO: 124966 - RNA, 19 nt, Homo sapiens
  misc_RNA (1)...(19): siRNA sense strand
aaaaguacauuccacaagu

SEQ ID NO: 124967 - RNA, 19 nt, Homo sapiens
  misc_RNA (1)...(19): siRNA sense strand
ccuaaucauuccaccaagu

SEQ ID NO: 124968 - RNA, 19 nt, Homo sapiens
  misc_RNA (1)...(19): siRNA sense strand
ucagcucgaguacuuguuu

SEQ ID NO: 124969 - RNA, 19 nt, Homo sapiens
  misc_RNA (1)...(19): siRNA sense strand
cuaaucauuccaccaaguu

SEQ ID NO: 124970 - RNA, 19 nt, Homo sapiens
  misc_RNA (1)...(19): siRNA sense strand
uggaagguauuauaguucu

SEQ ID NO: 124971 - RNA, 19 nt, Homo sapiens
  misc_RNA (1)...(19): siRNA sense strand
cagaaacccuagaguauua

SEQ ID NO: 124972 - RNA, 19 nt, Homo sapiens
  misc_RNA (1)...(19): siRNA sense strand
gaagugcucuguccugaaa

SEQ ID NO: 124973 - RNA, 19 nt, Homo sapiens
  misc_RNA (1)...(19): siRNA sense strand
ggaaggacaucauugaaga

SEQ ID NO: 124974 - RNA, 19 nt, Homo sapiens
  misc_RNA (1)...(19): siRNA sense strand
gcaggaagcucaucuugug

SEQ ID NO: 124975 - RNA, 19 nt, Homo sapiens
  misc_RNA (1)...(19): siRNA sense strand
gaagauaucccuggacuuu

SEQ ID NO: 124976 - RNA, 19 nt, Homo sapiens
  misc_RNA (1)...(19): siRNA sense strand
gaaaagaaauggaagauug

SEQ ID NO: 124977 - RNA, 19 nt, Homo sapiens
  misc_RNA (1)...(19): siRNA sense strand
gaaggaaaccuaccuguga

SEQ ID NO: 124978 - RNA, 19 nt, Homo sapiens
  misc_RNA (1)...(19): siRNA sense strand
caaggaagaugauacuuuc

SEQ ID NO: 124979 - RNA, 19 nt, Homo sapiens
  misc_RNA (1)...(19): siRNA sense strand
gaacaaagaagcucacagu

SEQ ID NO: 124980 - RNA, 19 nt, Homo sapiens
  misc_RNA (1)...(19): siRNA sense strand
gaucauagaacacacagaa

SEQ ID NO: 124981 - RNA, 19 nt, Homo sapiens
  misc_RNA (1)...(19): siRNA sense strand
ggagaaaugugucaugaac

SEQ ID NO: 124982 - RNA, 19 nt, Homo sapiens
  misc_RNA (1)...(19): siRNA sense strand
gaaagcaauucgucagauc

SEQ ID NO: 124983 - RNA, 19 nt, Homo sapiens
  misc_RNA (1)...(19): siRNA sense strand
gaacaacuauuuuggcauu

SEQ ID NO: 124984 - RNA, 19 nt, Homo sapiens
  misc_RNA (1)...(19): siRNA sense strand
gcacagaaccuacaagaac

SEQ ID NO: 124985 - RNA, 19 nt, Homo sapiens
  misc_RNA (1)...(19): siRNA sense strand
agauaucccuggacuuuaa

SEQ ID NO: 124986 - RNA, 19 nt, Homo sapiens
  misc_RNA (1)...(19): siRNA sense strand
ucucagggaugcacaauug

SEQ ID NO: 124987 - RNA, 19 nt, Homo sapiens
  misc_RNA (1)...(19): siRNA sense strand
ucagucgccuguuaauuaa

SEQ ID NO: 124988 - RNA, 19 nt, Homo sapiens
  misc_RNA (1)...(19): siRNA sense strand
cagcgaggauuccgaggua

SEQ ID NO: 124989 - RNA, 19 nt, Homo sapiens
  misc_RNA (1)...(19): siRNA sense strand
agaaaugugucaugaacaa

SEQ ID NO: 124990 - RNA, 19 nt, Homo sapiens
  misc_RNA (1)...(19): siRNA sense strand
ccaaacagaacaauucauu

SEQ ID NO: 124991 - RNA, 19 nt, Homo sapiens
  misc_RNA (1)...(19): siRNA sense strand
ggagugcucuugccgagau

SEQ ID NO: 124992 - RNA, 19 nt, Homo sapiens
  misc_RNA (1)...(19): siRNA sense strand
agucaucagucgccuguua

SEQ ID NO: 124993 - RNA, 19 nt, Homo sapiens
  misc_RNA (1)...(19): siRNA sense strand
ccaaggaagaugauacuuu

SEQ ID NO: 124994 - RNA, 19 nt, Homo sapiens
  misc_RNA (1)...(19): siRNA sense strand
ggugugaaguuccucagaa

SEQ ID NO: 124995 - RNA, 19 nt, Homo sapiens
  misc_RNA (1)...(19): siRNA sense strand
gaauugcuguccuuaacau

SEQ ID NO: 124996 - RNA, 19 nt, Homo sapiens
  misc_RNA (1)...(19): siRNA sense strand
ccaagauccuguacccaaa

SEQ ID NO: 124997 - RNA, 19 nt, Homo sapiens
  misc_RNA (1)...(19): siRNA sense strand
cgaggaggcugaagaugga

SEQ ID NO: 124998 - RNA, 19 nt, Homo sapiens
  misc_RNA (1)...(19): siRNA sense strand
gaaauggaagauuggauug

SEQ ID NO: 124999 - RNA, 19 nt, Homo sapiens
  misc_RNA (1)...(19): siRNA sense strand
ggaccacacuggccucgau

SEQ ID NO: 125000 - RNA, 19 nt, Homo sapiens
  misc_RNA (1)...(19): siRNA sense strand
ggcaaagucaaucauauuu

SEQ ID NO: 125001 - RNA, 19 nt, Homo sapiens
  misc_RNA (1)...(19): siRNA sense strand
ugaaagagaagcuggauuc

SEQ ID NO: 125002 - RNA, 19 nt, Homo sapiens
  misc_RNA (1)...(19): siRNA sense strand
gggaauugcuguccuuaac

SEQ ID NO: 125003 - RNA, 19 nt, Homo sapiens
  misc_RNA (1)...(19): siRNA sense strand
ccagaaguuugacacauuc

SEQ ID NO: 125004 - RNA, 19 nt, Homo sapiens
  misc_RNA (1)...(19): siRNA sense strand
ggcgaacgcuuuacuaugc

SEQ ID NO: 125005 - RNA, 19 nt, Homo sapiens
  misc_RNA (1)...(19): siRNA sense strand
gcgaugagcacccagagaa

SEQ ID NO: 125006 - RNA, 19 nt, Homo sapiens
  misc_RNA (1)...(19): siRNA sense strand
gguggagcgucauggcaua

SEQ ID NO: 125007 - RNA, 19 nt, Homo sapiens
  misc_RNA (1)...(19): siRNA sense strand
gaacagggagcacuuugag

SEQ ID NO: 125008 - RNA, 19 nt, Homo sapiens
  misc_RNA (1)...(19): siRNA sense strand
ccacccagauggaccaguu

SEQ ID NO: 125009 - RNA, 19 nt, Homo sapiens
  misc_RNA (1)...(19): siRNA sense strand
aagauuggauugcagcauu

SEQ ID NO: 125010 - RNA, 19 nt, Homo sapiens
  misc_RNA (1)...(19): siRNA sense strand
ggaaauggugaauaacuuc

SEQ ID NO: 125011 - RNA, 19 nt, Homo sapiens
  misc_RNA (1)...(19): siRNA sense strand
gaugugguauggaguucuu

SEQ ID NO: 125012 - RNA, 19 nt, Homo sapiens
  misc_RNA (1)...(19): siRNA sense strand
gaacgacuuggcccgagua

SEQ ID NO: 125013 - RNA, 19 nt, Homo sapiens
  misc_RNA (1)...(19): siRNA sense strand
ugcgaggugugcaaauuua

SEQ ID NO: 125014 - RNA, 19 nt, Homo sapiens
  misc_RNA (1)...(19): siRNA sense strand
uacagcagauucucuucua

SEQ ID NO: 125015 - RNA, 19 nt, Homo sapiens
  misc_RNA (1)...(19): siRNA sense strand
agauuggauugcagcauua

SEQ ID NO: 125016 - RNA, 19 nt, Homo sapiens
  misc_RNA (1)...(19): siRNA sense strand
ucacaguauccgagaaaua

SEQ ID NO: 125017 - RNA, 19 nt, Homo sapiens
  misc_RNA (1)...(19): siRNA sense strand
ccagaaacccuagaguauu

SEQ ID NO: 125018 - RNA, 19 nt, Homo sapiens
  misc_RNA (1)...(19): siRNA sense strand
gggaaggccuaugagaaga

SEQ ID NO: 125019 - RNA, 19 nt, Homo sapiens
  misc_RNA (1)...(19): siRNA sense strand
ugaaguuccucagaagauu

SEQ ID NO: 125020 - RNA, 19 nt, Homo sapiens
  misc_RNA (1)...(19): siRNA sense strand
caaccagggugugaaguuc

SEQ ID NO: 125021 - RNA, 19 nt, Homo sapiens
  misc_RNA (1)...(19): siRNA sense strand
cacagacacugaccagaga

SEQ ID NO: 125022 - RNA, 19 nt, Homo sapiens
  misc_RNA (1)...(19): siRNA sense strand
gaccagagacagggcauuu

SEQ ID NO: 125023 - RNA, 19 nt, Homo sapiens
  misc_RNA (1)...(19): siRNA sense strand
ccacggcucucaacagcau

SEQ ID NO: 125024 - RNA, 19 nt, Homo sapiens
  misc_RNA (1)...(19): siRNA sense strand
uggaaauggugaauaacuu

SEQ ID NO: 125025 - RNA, 19 nt, Homo sapiens
  misc_RNA (1)...(19): siRNA sense strand
acaagaaccuggagcaaaa

SEQ ID NO: 125026 - RNA, 19 nt, Homo sapiens
  misc_RNA (1)...(19): siRNA sense strand
ugaccaaacagaacaauuc

SEQ ID NO: 125027 - RNA, 19 nt, Homo sapiens
  misc_RNA (1)...(19): siRNA sense strand
cauuaaagacugugcagaa

SEQ ID NO: 125028 - RNA, 19 nt, Homo sapiens
  misc_RNA (1)...(19): siRNA sense strand
ccagagacagggcauuuga

SEQ ID NO: 125029 - RNA, 19 nt, Homo sapiens
  misc_RNA (1)...(19): siRNA sense strand
uccagaaguuugacacauu

SEQ ID NO: 125030 - RNA, 19 nt, Homo sapiens
  misc_RNA (1)...(19): siRNA sense strand
gcaauucgucagaucauag

SEQ ID NO: 125031 - RNA, 19 nt, Homo sapiens
  misc_RNA (1)...(19): siRNA sense strand
acaaagaagcucacaguag

SEQ ID NO: 125032 - RNA, 19 nt, Homo sapiens
  misc_RNA (1)...(19): siRNA sense strand
agaaauggaagauuggauu

SEQ ID NO: 125033 - RNA, 19 nt, Homo sapiens
  misc_RNA (1)...(19): siRNA sense strand
aucagucgccuguuaauua

SEQ ID NO: 125034 - RNA, 19 nt, Homo sapiens
  misc_RNA (1)...(19): siRNA sense strand
cgacuuggcccgaguacug

SEQ ID NO: 125035 - RNA, 19 nt, Homo sapiens
  misc_RNA (1)...(19): siRNA sense strand
ccacuuggccugugcaaag

SEQ ID NO: 125036 - RNA, 19 nt, Homo sapiens
  misc_RNA (1)...(19): siRNA sense strand
gcagaacagggagcacuuu

SEQ ID NO: 125037 - RNA, 19 nt, Homo sapiens
  misc_RNA (1)...(19): siRNA sense strand
gggaagacaagcagaagug

SEQ ID NO: 125038 - RNA, 19 nt, Homo sapiens
  misc_RNA (1)...(19): siRNA sense strand
uuucgcagcuccaucauuc

SEQ ID NO: 125039 - RNA, 19 nt, Homo sapiens
  misc_RNA (1)...(19): siRNA sense strand
cggccaaagugcucuguga

SEQ ID NO: 125040 - RNA, 19 nt, Homo sapiens
  misc_RNA (1)...(19): siRNA sense strand
gaucgggaaggacaucauu

SEQ ID NO: 125041 - RNA, 19 nt, Homo sapiens
  misc_RNA (1)...(19): siRNA sense strand
cagcauggaccacuucuca

SEQ ID NO: 125042 - RNA, 19 nt, Homo sapiens
  misc_RNA (1)...(19): siRNA sense strand
caccucggcuuacgguuau

SEQ ID NO: 125043 - RNA, 19 nt, Homo sapiens
  misc_RNA (1)...(19): siRNA sense strand
uccuggaaauggugaauaa

SEQ ID NO: 125044 - RNA, 19 nt, Homo sapiens
  misc_RNA (1)...(19): siRNA sense strand
gccaacagccugaagaaag

SEQ ID NO: 125045 - RNA, 19 nt, Homo sapiens
  misc_RNA (1)...(19): siRNA sense strand
gagagagccagcaccaaga

SEQ ID NO: 125046 - RNA, 19 nt, Homo sapiens
  misc_RNA (1)...(19): siRNA sense strand
gcacaagcccacuguuggu

SEQ ID NO: 125047 - RNA, 19 nt, Homo sapiens
  misc_RNA (1)...(19): siRNA sense strand
gauccuguguggcaucaag

SEQ ID NO: 125048 - RNA, 19 nt, Homo sapiens
  misc_RNA (1)...(19): siRNA sense strand
ggccgucucucgagucauc

SEQ ID NO: 125049 - RNA, 19 nt, Homo sapiens
  misc_RNA (1)...(19): siRNA sense strand
gcaggagccgaaccaagaa

SEQ ID NO: 125050 - RNA, 19 nt, Homo sapiens
  misc_RNA (1)...(19): siRNA sense strand
gagccaacagccugaagaa

SEQ ID NO: 125051 - RNA, 19 nt, Homo sapiens
  misc_RNA (1)...(19): siRNA sense strand
cagaggucauggccaagaa

SEQ ID NO: 125052 - RNA, 19 nt, Homo sapiens
  misc_RNA (1)...(19): siRNA sense strand
cggcaaagucaaucauauu

SEQ ID NO: 125053 - RNA, 19 nt, Homo sapiens
  misc_RNA (1)...(19): siRNA sense strand
acaccucggcuuacgguua

SEQ ID NO: 125054 - RNA, 19 nt, Homo sapiens
  misc_RNA (1)...(19): siRNA sense strand
gccucaaccuucauaaaca

SEQ ID NO: 125055 - RNA, 19 nt, Homo sapiens
  misc_RNA (1)...(19): siRNA sense strand
ccaaauguccgggcuggaa

SEQ ID NO: 125056 - RNA, 19 nt, Homo sapiens
  misc_RNA (1)...(19): siRNA sense strand
ccaacagccugaagaaagc

SEQ ID NO: 125057 - RNA, 19 nt, Homo sapiens
  misc_RNA (1)...(19): siRNA sense strand
gcagauucucuucuaugaa

SEQ ID NO: 125058 - RNA, 19 nt, Homo sapiens
  misc_RNA (1)...(19): siRNA sense strand
gcaaauuuaaggcccacaa

SEQ ID NO: 125059 - RNA, 19 nt, Homo sapiens
  misc_RNA (1)...(19): siRNA sense strand
ggaauugcuguccuuaaca

SEQ ID NO: 125060 - RNA, 19 nt, Homo sapiens
  misc_RNA (1)...(19): siRNA sense strand
gaccaaacagaacaauuca

SEQ ID NO: 125061 - RNA, 19 nt, Homo sapiens
  misc_RNA (1)...(19): siRNA sense strand
aaccagaaacccuagagua

SEQ ID NO: 125062 - RNA, 19 nt, Homo sapiens
  misc_RNA (1)...(19): siRNA sense strand
cagaagauucaaacagcua

SEQ ID NO: 125063 - RNA, 19 nt, Homo sapiens
  misc_RNA (1)...(19): siRNA sense strand
gaaguuccucagaagauuc

SEQ ID NO: 125064 - RNA, 19 nt, Homo sapiens
  misc_RNA (1)...(19): siRNA sense strand
ggacaaccagggugugaag

SEQ ID NO: 125065 - RNA, 19 nt, Homo sapiens
  misc_RNA (1)...(19): siRNA sense strand
gaaggacaucauugaagau

SEQ ID NO: 125066 - RNA, 19 nt, Homo sapiens
  misc_RNA (1)...(19): siRNA sense strand
cgacgaagagagugugaug

SEQ ID NO: 125067 - RNA, 19 nt, Homo sapiens
  misc_RNA (1)...(19): siRNA sense strand
ucagggaauugcuguccuu

SEQ ID NO: 125068 - RNA, 19 nt, Homo sapiens
  misc_RNA (1)...(19): siRNA sense strand
caaccuucauaaacagugu

SEQ ID NO: 125069 - RNA, 19 nt, Homo sapiens
  misc_RNA (1)...(19): siRNA sense strand
gauucaaacagcuacuaaa

SEQ ID NO: 125070 - RNA, 19 nt, Homo sapiens
  misc_RNA (1)...(19): siRNA sense strand
gaagaugcagaugggauug

SEQ ID NO: 125071 - RNA, 19 nt, Homo sapiens
  misc_RNA (1)...(19): siRNA sense strand
cagaaacccuagaguauua

SEQ ID NO: 125072 - RNA, 19 nt, Homo sapiens
  misc_RNA (1)...(19): siRNA sense strand
gaagugcucuguccugaaa

SEQ ID NO: 125073 - RNA, 19 nt, Homo sapiens
  misc_RNA (1)...(19): siRNA sense strand
ggaaggacaucauugaaga

SEQ ID NO: 125074 - RNA, 19 nt, Homo sapiens
  misc_RNA (1)...(19): siRNA sense strand
gcaggaagcucaucuugug

SEQ ID NO: 125075 - RNA, 19 nt, Homo sapiens
  misc_RNA (1)...(19): siRNA sense strand
gaagauaucccuggacuuu

SEQ ID NO: 125076 - RNA, 19 nt, Homo sapiens
  misc_RNA (1)...(19): siRNA sense strand
gaaaagaaauggaagauug

SEQ ID NO: 125077 - RNA, 19 nt, Homo sapiens
  misc_RNA (1)...(19): siRNA sense strand
gaaggaaaccuaccuguga

SEQ ID NO: 125078 - RNA, 19 nt, Homo sapiens
  misc_RNA (1)...(19): siRNA sense strand
caaggaagaugauacuuuc

SEQ ID NO: 125079 - RNA, 19 nt, Homo sapiens
  misc_RNA (1)...(19): siRNA sense strand
gaacaaagaagcucacagu

SEQ ID NO: 125080 - RNA, 19 nt, Homo sapiens
  misc_RNA (1)...(19): siRNA sense strand
gaucauagaacacacagaa

SEQ ID NO: 125081 - RNA, 19 nt, Homo sapiens
  misc_RNA (1)...(19): siRNA sense strand
ggagaaaugugucaugaac

SEQ ID NO: 125082 - RNA, 19 nt, Homo sapiens
  misc_RNA (1)...(19): siRNA sense strand
gaaagcaauucgucagauc

SEQ ID NO: 125083 - RNA, 19 nt, Homo sapiens
  misc_RNA (1)...(19): siRNA sense strand
gaacaacuauuuuggcauu

SEQ ID NO: 125084 - RNA, 19 nt, Homo sapiens
  misc_RNA (1)...(19): siRNA sense strand
gcacagaaccuacaagaac

SEQ ID NO: 125085 - RNA, 19 nt, Homo sapiens
  misc_RNA (1)...(19): siRNA sense strand
agauaucccuggacuuuaa

SEQ ID NO: 125086 - RNA, 19 nt, Homo sapiens
  misc_RNA (1)...(19): siRNA sense strand
ucucagggaugcacaauug

SEQ ID NO: 125087 - RNA, 19 nt, Homo sapiens
  misc_RNA (1)...(19): siRNA sense strand
ucagucgccuguuaauuaa

SEQ ID NO: 125088 - RNA, 19 nt, Homo sapiens
  misc_RNA (1)...(19): siRNA sense strand
cagcgaggauuccgaggua

SEQ ID NO: 125089 - RNA, 19 nt, Homo sapiens
  misc_RNA (1)...(19): siRNA sense strand
agaaaugugucaugaacaa

SEQ ID NO: 125090 - RNA, 19 nt, Homo sapiens
  misc_RNA (1)...(19): siRNA sense strand
ccaaacagaacaauucauu

SEQ ID NO: 125091 - RNA, 19 nt, Homo sapiens
  misc_RNA (1)...(19): siRNA sense strand
ggagugcucuugccgagau

SEQ ID NO: 125092 - RNA, 19 nt, Homo sapiens
  misc_RNA (1)...(19): siRNA sense strand
agucaucagucgccuguua

SEQ ID NO: 125093 - RNA, 19 nt, Homo sapiens
  misc_RNA (1)...(19): siRNA sense strand
ccaaggaagaugauacuuu

SEQ ID NO: 125094 - RNA, 19 nt, Homo sapiens
  misc_RNA (1)...(19): siRNA sense strand
ggugugaaguuccucagaa

SEQ ID NO: 125095 - RNA, 19 nt, Homo sapiens
  misc_RNA (1)...(19): siRNA sense strand
gaauugcuguccuuaacau

SEQ ID NO: 125096 - RNA, 19 nt, Homo sapiens
  misc_RNA (1)...(19): siRNA sense strand
ccaagauccuguacccaaa

SEQ ID NO: 125097 - RNA, 19 nt, Homo sapiens
  misc_RNA (1)...(19): siRNA sense strand
cgaggaggcugaagaugga

SEQ ID NO: 125098 - RNA, 19 nt, Homo sapiens
  misc_RNA (1)...(19): siRNA sense strand
gaaauggaagauuggauug

SEQ ID NO: 125099 - RNA, 19 nt, Homo sapiens
  misc_RNA (1)...(19): siRNA sense strand
ggaccacacuggccucgau

SEQ ID NO: 125100 - RNA, 19 nt, Homo sapiens
  misc_RNA (1)...(19): siRNA sense strand
ggcaaagucaaucauauuu

SEQ ID NO: 125101 - RNA, 19 nt, Homo sapiens
  misc_RNA (1)...(19): siRNA sense strand
ugaaagagaagcuggauuc

SEQ ID NO: 125102 - RNA, 19 nt, Homo sapiens
  misc_RNA (1)...(19): siRNA sense strand
gggaauugcuguccuuaac

SEQ ID NO: 125103 - RNA, 19 nt, Homo sapiens
  misc_RNA (1)...(19): siRNA sense strand
ccagaaguuugacacauuc

SEQ ID NO: 125104 - RNA, 19 nt, Homo sapiens
  misc_RNA (1)...(19): siRNA sense strand
ggcgaacgcuuuacuaugc

SEQ ID NO: 125105 - RNA, 19 nt, Homo sapiens
  misc_RNA (1)...(19): siRNA sense strand
gcgaugagcacccagagaa

SEQ ID NO: 125106 - RNA, 19 nt, Homo sapiens
  misc_RNA (1)...(19): siRNA sense strand
gguggagcgucauggcaua

SEQ ID NO: 125107 - RNA, 19 nt, Homo sapiens
  misc_RNA (1)...(19): siRNA sense strand
gaacagggagcacuuugag

SEQ ID NO: 125108 - RNA, 19 nt, Homo sapiens
  misc_RNA (1)...(19): siRNA sense strand
ccacccagauggaccaguu

SEQ ID NO: 125109 - RNA, 19 nt, Homo sapiens
  misc_RNA (1)...(19): siRNA sense strand
aagauuggauugcagcauu

SEQ ID NO: 125110 - RNA, 19 nt, Homo sapiens
  misc_RNA (1)...(19): siRNA sense strand
ggaaauggugaauaacuuc

SEQ ID NO: 125111 - RNA, 19 nt, Homo sapiens
  misc_RNA (1)...(19): siRNA sense strand
gaugugguauggaguucuu

SEQ ID NO: 125112 - RNA, 19 nt, Homo sapiens
  misc_RNA (1)...(19): siRNA sense strand
gaacgacuuggcccgagua

SEQ ID NO: 125113 - RNA, 19 nt, Homo sapiens
  misc_RNA (1)...(19): siRNA sense strand
ugcgaggugugcaaauuua

SEQ ID NO: 125114 - RNA, 19 nt, Homo sapiens
  misc_RNA (1)...(19): siRNA sense strand
uacagcagauucucuucua

SEQ ID NO: 125115 - RNA, 19 nt, Homo sapiens
  misc_RNA (1)...(19): siRNA sense strand
agauuggauugcagcauua

SEQ ID NO: 125116 - RNA, 19 nt, Homo sapiens
  misc_RNA (1)...(19): siRNA sense strand
ucacaguauccgagaaaua

SEQ ID NO: 125117 - RNA, 19 nt, Homo sapiens
  misc_RNA (1)...(19): siRNA sense strand
ccagaaacccuagaguauu

SEQ ID NO: 125118 - RNA, 19 nt, Homo sapiens
  misc_RNA (1)...(19): siRNA sense strand
gggaaggccuaugagaaga

SEQ ID NO: 125119 - RNA, 19 nt, Homo sapiens
  misc_RNA (1)...(19): siRNA sense strand
ugaaguuccucagaagauu

SEQ ID NO: 125120 - RNA, 19 nt, Homo sapiens
  misc_RNA (1)...(19): siRNA sense strand
caaccagggugugaaguuc

SEQ ID NO: 125121 - RNA, 19 nt, Homo sapiens
  misc_RNA (1)...(19): siRNA sense strand
cacagacacugaccagaga

SEQ ID NO: 125122 - RNA, 19 nt, Homo sapiens
  misc_RNA (1)...(19): siRNA sense strand
gaccagagacagggcauuu

SEQ ID NO: 125123 - RNA, 19 nt, Homo sapiens
  misc_RNA (1)...(19): siRNA sense strand
ccacggcucucaacagcau

SEQ ID NO: 125124 - RNA, 19 nt, Homo sapiens
  misc_RNA (1)...(19): siRNA sense strand
uggaaauggugaauaacuu

SEQ ID NO: 125125 - RNA, 19 nt, Homo sapiens
  misc_RNA (1)...(19): siRNA sense strand
acaagaaccuggagcaaaa

SEQ ID NO: 125126 - RNA, 19 nt, Homo sapiens
  misc_RNA (1)...(19): siRNA sense strand
ugaccaaacagaacaauuc

SEQ ID NO: 125127 - RNA, 19 nt, Homo sapiens
  misc_RNA (1)...(19): siRNA sense strand
cauuaaagacugugcagaa

SEQ ID NO: 125128 - RNA, 19 nt, Homo sapiens
  misc_RNA (1)...(19): siRNA sense strand
ccagagacagggcauuuga

SEQ ID NO: 125129 - RNA, 19 nt, Homo sapiens
  misc_RNA (1)...(19): siRNA sense strand
uccagaaguuugacacauu

SEQ ID NO: 125130 - RNA, 19 nt, Homo sapiens
  misc_RNA (1)...(19): siRNA sense strand
gcaauucgucagaucauag

SEQ ID NO: 125131 - RNA, 19 nt, Homo sapiens
  misc_RNA (1)...(19): siRNA sense strand
acaaagaagcucacaguag

SEQ ID NO: 125132 - RNA, 19 nt, Homo sapiens
  misc_RNA (1)...(19): siRNA sense strand
agaaauggaagauuggauu

SEQ ID NO: 125133 - RNA, 19 nt, Homo sapiens
  misc_RNA (1)...(19): siRNA sense strand
aucagucgccuguuaauua

SEQ ID NO: 125134 - RNA, 19 nt, Homo sapiens
  misc_RNA (1)...(19): siRNA sense strand
cgacuuggcccgaguacug

SEQ ID NO: 125135 - RNA, 19 nt, Homo sapiens
  misc_RNA (1)...(19): siRNA sense strand
ccacuuggccugugcaaag

SEQ ID NO: 125136 - RNA, 19 nt, Homo sapiens
  misc_RNA (1)...(19): siRNA sense strand
gcagaacagggagcacuuu

SEQ ID NO: 125137 - RNA, 19 nt, Homo sapiens
  misc_RNA (1)...(19): siRNA sense strand
gggaagacaagcagaagug

SEQ ID NO: 125138 - RNA, 19 nt, Homo sapiens
  misc_RNA (1)...(19): siRNA sense strand
uuucgcagcuccaucauuc

SEQ ID NO: 125139 - RNA, 19 nt, Homo sapiens
  misc_RNA (1)...(19): siRNA sense strand
cggccaaagugcucuguga

SEQ ID NO: 125140 - RNA, 19 nt, Homo sapiens
  misc_RNA (1)...(19): siRNA sense strand
gaucgggaaggacaucauu

SEQ ID NO: 125141 - RNA, 19 nt, Homo sapiens
  misc_RNA (1)...(19): siRNA sense strand
cagcauggaccacuucuca

SEQ ID NO: 125142 - RNA, 19 nt, Homo sapiens
  misc_RNA (1)...(19): siRNA sense strand
caccucggcuuacgguuau

SEQ ID NO: 125143 - RNA, 19 nt, Homo sapiens
  misc_RNA (1)...(19): siRNA sense strand
uccuggaaauggugaauaa

SEQ ID NO: 125144 - RNA, 19 nt, Homo sapiens
  misc_RNA (1)...(19): siRNA sense strand
gccaacagccugaagaaag

SEQ ID NO: 125145 - RNA, 19 nt, Homo sapiens
  misc_RNA (1)...(19): siRNA sense strand
gagagagccagcaccaaga

SEQ ID NO: 125146 - RNA, 19 nt, Homo sapiens
  misc_RNA (1)...(19): siRNA sense strand
gcacaagcccacuguuggu

SEQ ID NO: 125147 - RNA, 19 nt, Homo sapiens
  misc_RNA (1)...(19): siRNA sense strand
gauccuguguggcaucaag

SEQ ID NO: 125148 - RNA, 19 nt, Homo sapiens
  misc_RNA (1)...(19): siRNA sense strand
ggccgucucucgagucauc

SEQ ID NO: 125149 - RNA, 19 nt, Homo sapiens
  misc_RNA (1)...(19): siRNA sense strand
gcaggagccgaaccaagaa

SEQ ID NO: 125150 - RNA, 19 nt, Homo sapiens
  misc_RNA (1)...(19): siRNA sense strand
gagccaacagccugaagaa

SEQ ID NO: 125151 - RNA, 19 nt, Homo sapiens
  misc_RNA (1)...(19): siRNA sense strand
cagaggucauggccaagaa

SEQ ID NO: 125152 - RNA, 19 nt, Homo sapiens
  misc_RNA (1)...(19): siRNA sense strand
cggcaaagucaaucauauu

SEQ ID NO: 125153 - RNA, 19 nt, Homo sapiens
  misc_RNA (1)...(19): siRNA sense strand
acaccucggcuuacgguua

SEQ ID NO: 125154 - RNA, 19 nt, Homo sapiens
  misc_RNA (1)...(19): siRNA sense strand
gccucaaccuucauaaaca

SEQ ID NO: 125155 - RNA, 19 nt, Homo sapiens
  misc_RNA (1)...(19): siRNA sense strand
ccaaauguccgggcuggaa

SEQ ID NO: 125156 - RNA, 19 nt, Homo sapiens
  misc_RNA (1)...(19): siRNA sense strand
ccaacagccugaagaaagc

SEQ ID NO: 125157 - RNA, 19 nt, Homo sapiens
  misc_RNA (1)...(19): siRNA sense strand
gcagauucucuucuaugaa

SEQ ID NO: 125158 - RNA, 19 nt, Homo sapiens
  misc_RNA (1)...(19): siRNA sense strand
gcaaauuuaaggcccacaa

SEQ ID NO: 125159 - RNA, 19 nt, Homo sapiens
  misc_RNA (1)...(19): siRNA sense strand
ggaauugcuguccuuaaca

SEQ ID NO: 125160 - RNA, 19 nt, Homo sapiens
  misc_RNA (1)...(19): siRNA sense strand
gaccaaacagaacaauuca

SEQ ID NO: 125161 - RNA, 19 nt, Homo sapiens
  misc_RNA (1)...(19): siRNA sense strand
aaccagaaacccuagagua

SEQ ID NO: 125162 - RNA, 19 nt, Homo sapiens
  misc_RNA (1)...(19): siRNA sense strand
cagaagauucaaacagcua

SEQ ID NO: 125163 - RNA, 19 nt, Homo sapiens
  misc_RNA (1)...(19): siRNA sense strand
gaaguuccucagaagauuc

SEQ ID NO: 125164 - RNA, 19 nt, Homo sapiens
  misc_RNA (1)...(19): siRNA sense strand
ggacaaccagggugugaag

SEQ ID NO: 125165 - RNA, 19 nt, Homo sapiens
  misc_RNA (1)...(19): siRNA sense strand
gaaggacaucauugaagau

SEQ ID NO: 125166 - RNA, 19 nt, Homo sapiens
  misc_RNA (1)...(19): siRNA sense strand
cgacgaagagagugugaug

SEQ ID NO: 125167 - RNA, 19 nt, Homo sapiens
  misc_RNA (1)...(19): siRNA sense strand
ucagggaauugcuguccuu

SEQ ID NO: 125168 - RNA, 19 nt, Homo sapiens
  misc_RNA (1)...(19): siRNA sense strand
caaccuucauaaacagugu

SEQ ID NO: 125169 - RNA, 19 nt, Homo sapiens
  misc_RNA (1)...(19): siRNA sense strand
gauucaaacagcuacuaaa

SEQ ID NO: 125170 - RNA, 19 nt, Homo sapiens
  misc_RNA (1)...(19): siRNA sense strand
gaagaugcagaugggauug

SEQ ID NO: 125171 - RNA, 19 nt, Homo sapiens
  misc_RNA (1)...(19): siRNA sense strand
caaaggcaaucaugaagug

SEQ ID NO: 125172 - RNA, 19 nt, Homo sapiens
  misc_RNA (1)...(19): siRNA sense strand
cccaagaacuuuauucaug

SEQ ID NO: 125173 - RNA, 19 nt, Homo sapiens
  misc_RNA (1)...(19): siRNA sense strand
gaauagguguggaggcaau

SEQ ID NO: 125174 - RNA, 19 nt, Homo sapiens
  misc_RNA (1)...(19): siRNA sense strand
ucaaagguguggugacaga

SEQ ID NO: 125175 - RNA, 19 nt, Homo sapiens
  misc_RNA (1)...(19): siRNA sense strand
ggaggcaauuuccugaaga

SEQ ID NO: 125176 - RNA, 19 nt, Homo sapiens
  misc_RNA (1)...(19): siRNA sense strand
ucaacuaccugcacaccaa

SEQ ID NO: 125177 - RNA, 19 nt, Homo sapiens
  misc_RNA (1)...(19): siRNA sense strand
ccaaagucaucaagaaagu

SEQ ID NO: 125178 - RNA, 19 nt, Homo sapiens
  misc_RNA (1)...(19): siRNA sense strand
gagcugggcugugugaagu

SEQ ID NO: 125179 - RNA, 19 nt, Homo sapiens
  misc_RNA (1)...(19): siRNA sense strand
caucaaagguguggugaca

SEQ ID NO: 125180 - RNA, 19 nt, Homo sapiens
  misc_RNA (1)...(19): siRNA sense strand
gcuaugacccgcuggagaa

SEQ ID NO: 125181 - RNA, 19 nt, Homo sapiens
  misc_RNA (1)...(19): siRNA sense strand
gcuggcugcucaaguacua

SEQ ID NO: 125182 - RNA, 19 nt, Homo sapiens
  misc_RNA (1)...(19): siRNA sense strand
cacgcuggcugcucaagua

SEQ ID NO: 125183 - RNA, 19 nt, Homo sapiens
  misc_RNA (1)...(19): siRNA sense strand
gcuuugagaucacgguaga

SEQ ID NO: 125184 - RNA, 19 nt, Homo sapiens
  misc_RNA (1)...(19): siRNA sense strand
agacaaaggcaaucaugaa

SEQ ID NO: 125185 - RNA, 19 nt, Homo sapiens
  misc_RNA (1)...(19): siRNA sense strand
gagacaaaggcaaucauga

SEQ ID NO: 125186 - RNA, 19 nt, Homo sapiens
  misc_RNA (1)...(19): siRNA sense strand
cgggaggcauguccgauuu

SEQ ID NO: 125187 - RNA, 19 nt, Homo sapiens
  misc_RNA (1)...(19): siRNA sense strand
cauuaacccugacggcuau

SEQ ID NO: 125188 - RNA, 19 nt, Homo sapiens
  misc_RNA (1)...(19): siRNA sense strand
ggaggcauguccgauuuca

SEQ ID NO: 125189 - RNA, 19 nt, Homo sapiens
  misc_RNA (1)...(19): siRNA sense strand
ggagacaaaggcaaucaug

SEQ ID NO: 125190 - RNA, 19 nt, Homo sapiens
  misc_RNA (1)...(19): siRNA sense strand
ucaucuaccuagcccagua

SEQ ID NO: 125191 - RNA, 19 nt, Homo sapiens
  misc_RNA (1)...(19): siRNA sense strand
ugaaguggaugcagaccau

SEQ ID NO: 125192 - RNA, 19 nt, Homo sapiens
  misc_RNA (1)...(19): siRNA sense strand
gaucugaaccgaaauuucc

SEQ ID NO: 125193 - RNA, 19 nt, Homo sapiens
  misc_RNA (1)...(19): siRNA sense strand
gaagcucaucggcaacauu

SEQ ID NO: 125194 - RNA, 19 nt, Homo sapiens
  misc_RNA (1)...(19): siRNA sense strand
ccagguauccacauuguca

SEQ ID NO: 125195 - RNA, 19 nt, Homo sapiens
  misc_RNA (1)...(19): siRNA sense strand
aagguguggugacagauaa

SEQ ID NO: 125196 - RNA, 19 nt, Homo sapiens
  misc_RNA (1)...(19): siRNA sense strand
gcauguccgauuucaacua

SEQ ID NO: 125197 - RNA, 19 nt, Homo sapiens
  misc_RNA (1)...(19): siRNA sense strand
cacaccaacugcuuugaga

SEQ ID NO: 125198 - RNA, 19 nt, Homo sapiens
  misc_RNA (1)...(19): siRNA sense strand
cccaguaccugugcucuga

SEQ ID NO: 125199 - RNA, 19 nt, Homo sapiens
  misc_RNA (1)...(19): siRNA sense strand
ggaggcagaacgcgcagaa

SEQ ID NO: 125200 - RNA, 19 nt, Homo sapiens
  misc_RNA (1)...(19): siRNA sense strand
gacccaagaacuuuauuca

SEQ ID NO: 125201 - RNA, 19 nt, Homo sapiens
  misc_RNA (1)...(19): siRNA sense strand
aaagguguggugacagaua

SEQ ID NO: 125202 - RNA, 19 nt, Homo sapiens
  misc_RNA (1)...(19): siRNA sense strand
caccugcugcccuccauua

SEQ ID NO: 125203 - RNA, 19 nt, Homo sapiens
  misc_RNA (1)...(19): siRNA sense strand
acgccaaagucaucaagaa

SEQ ID NO: 125204 - RNA, 19 nt, Homo sapiens
  misc_RNA (1)...(19): siRNA sense strand
gaucucagucaaaggcauu

SEQ ID NO: 125205 - RNA, 19 nt, Homo sapiens
  misc_RNA (1)...(19): siRNA sense strand
guagagcugggcuguguga

SEQ ID NO: 125206 - RNA, 19 nt, Homo sapiens
  misc_RNA (1)...(19): siRNA sense strand
gcagcgaugccgccuacaa

SEQ ID NO: 125207 - RNA, 19 nt, Homo sapiens
  misc_RNA (1)...(19): siRNA sense strand
gacaaaggcaaucaugaag

SEQ ID NO: 125208 - RNA, 19 nt, Homo sapiens
  misc_RNA (1)...(19): siRNA sense strand
gcccggaucucagucaaag

SEQ ID NO: 125209 - RNA, 19 nt, Homo sapiens
  misc_RNA (1)...(19): siRNA sense strand
gaggcaauuuccugaagag

SEQ ID NO: 125210 - RNA, 19 nt, Homo sapiens
  misc_RNA (1)...(19): siRNA sense strand
gaaguggaugcagaccaua

SEQ ID NO: 125211 - RNA, 19 nt, Homo sapiens
  misc_RNA (1)...(19): siRNA sense strand
ggacccaagaacuuuauuc

SEQ ID NO: 125212 - RNA, 19 nt, Homo sapiens
  misc_RNA (1)...(19): siRNA sense strand
cgguagagcugggcugugu

SEQ ID NO: 125213 - RNA, 19 nt, Homo sapiens
  misc_RNA (1)...(19): siRNA sense strand
gaugcagaccauacccuuu

SEQ ID NO: 125214 - RNA, 19 nt, Homo sapiens
  misc_RNA (1)...(19): siRNA sense strand
ugauggagcccgaggugaa

SEQ ID NO: 125215 - RNA, 19 nt, Homo sapiens
  misc_RNA (1)...(19): siRNA sense strand
gcacaccaacugcuuugag

SEQ ID NO: 125216 - RNA, 19 nt, Homo sapiens
  misc_RNA (1)...(19): siRNA sense strand
cauguccgauuucaacuac

SEQ ID NO: 125217 - RNA, 19 nt, Homo sapiens
  misc_RNA (1)...(19): siRNA sense strand
gggagcugcuggucaucga

SEQ ID NO: 125218 - RNA, 19 nt, Homo sapiens
  misc_RNA (1)...(19): siRNA sense strand
ccgcugcugcugcuccuua

SEQ ID NO: 125219 - RNA, 19 nt, Homo sapiens
  misc_RNA (1)...(19): siRNA sense strand
acgagaagauguucaagcu

SEQ ID NO: 125220 - RNA, 19 nt, Homo sapiens
  misc_RNA (1)...(19): siRNA sense strand
ggacgagggcugcuaugac

SEQ ID NO: 125221 - RNA, 19 nt, Homo sapiens
  misc_RNA (1)...(19): siRNA sense strand
cgccaaagucaucaagaaa

SEQ ID NO: 125222 - RNA, 19 nt, Homo sapiens
  misc_RNA (1)...(19): siRNA sense strand
ggaggugccagcucuuugg

SEQ ID NO: 125223 - RNA, 19 nt, Homo sapiens
  misc_RNA (1)...(19): siRNA sense strand
gccaaagucaucaagaaag

SEQ ID NO: 125224 - RNA, 19 nt, Homo sapiens
  misc_RNA (1)...(19): siRNA sense strand
ggaucugaaccgaaauuuc

SEQ ID NO: 125225 - RNA, 19 nt, Homo sapiens
  misc_RNA (1)...(19): siRNA sense strand
ggacaggucggagaauagg

SEQ ID NO: 125226 - RNA, 19 nt, Homo sapiens
  misc_RNA (1)...(19): siRNA sense strand
auggacaggucggagaaua

SEQ ID NO: 125227 - RNA, 19 nt, Homo sapiens
  misc_RNA (1)...(19): siRNA sense strand
gcgaccuggugguguccua

SEQ ID NO: 125228 - RNA, 19 nt, Homo sapiens
  misc_RNA (1)...(19): siRNA sense strand
caucaagaaagucaucauc

SEQ ID NO: 125229 - RNA, 19 nt, Homo sapiens
  misc_RNA (1)...(19): siRNA sense strand
gcugggcugugugaaguuc

SEQ ID NO: 125230 - RNA, 19 nt, Homo sapiens
  misc_RNA (1)...(19): siRNA sense strand
gaggccagcuccgaguaca

SEQ ID NO: 125231 - RNA, 19 nt, Homo sapiens
  misc_RNA (1)...(19): siRNA sense strand
gagaggacgagggcugcua

SEQ ID NO: 125232 - RNA, 19 nt, Homo sapiens
  misc_RNA (1)...(19): siRNA sense strand
aaagucaucaagaaaguca

SEQ ID NO: 125233 - RNA, 19 nt, Homo sapiens
  misc_RNA (1)...(19): siRNA sense strand
ugacugccaccgcuacuuc

SEQ ID NO: 125234 - RNA, 19 nt, Homo sapiens
  misc_RNA (1)...(19): siRNA sense strand
gcucaucggcaacauucau

SEQ ID NO: 125235 - RNA, 19 nt, Homo sapiens
  misc_RNA (1)...(19): siRNA sense strand
gggaggugccagcucuuug

SEQ ID NO: 125236 - RNA, 19 nt, Homo sapiens
  misc_RNA (1)...(19): siRNA sense strand
gguauccacauugucauug

SEQ ID NO: 125237 - RNA, 19 nt, Homo sapiens
  misc_RNA (1)...(19): siRNA sense strand
ggacuucauucugcaaccu

SEQ ID NO: 125238 - RNA, 19 nt, Homo sapiens
  misc_RNA (1)...(19): siRNA sense strand
uggaggcaauuuccugaag

SEQ ID NO: 125239 - RNA, 19 nt, Homo sapiens
  misc_RNA (1)...(19): siRNA sense strand
gcucucagccagccuucau

SEQ ID NO: 125240 - RNA, 19 nt, Homo sapiens
  misc_RNA (1)...(19): siRNA sense strand
gauagaagauggugagauu

SEQ ID NO: 125241 - RNA, 19 nt, Homo sapiens
  misc_RNA (1)...(19): siRNA sense strand
gaaacaaaccauccaguua

SEQ ID NO: 125242 - RNA, 19 nt, Homo sapiens
  misc_RNA (1)...(19): siRNA sense strand
caaaccagcugaccucaau

SEQ ID NO: 125243 - RNA, 19 nt, Homo sapiens
  misc_RNA (1)...(19): siRNA sense strand
caaaugcacuuguggaaag

SEQ ID NO: 125244 - RNA, 19 nt, Homo sapiens
  misc_RNA (1)...(19): siRNA sense strand
gaaauacguucugcacaug

SEQ ID NO: 125245 - RNA, 19 nt, Homo sapiens
  misc_RNA (1)...(19): siRNA sense strand
cagcugaccucaauacaug

SEQ ID NO: 125246 - RNA, 19 nt, Homo sapiens
  misc_RNA (1)...(19): siRNA sense strand
uccgaaaccuggugaauaa

SEQ ID NO: 125247 - RNA, 19 nt, Homo sapiens
  misc_RNA (1)...(19): siRNA sense strand
gacaagaugcagaugaaua

SEQ ID NO: 125248 - RNA, 19 nt, Homo sapiens
  misc_RNA (1)...(19): siRNA sense strand
ggaaacaaaccauccaguu

SEQ ID NO: 125249 - RNA, 19 nt, Homo sapiens
  misc_RNA (1)...(19): siRNA sense strand
uaaagagaauggagccuau

SEQ ID NO: 125250 - RNA, 19 nt, Homo sapiens
  misc_RNA (1)...(19): siRNA sense strand
gaagaugauucaggaaaca

SEQ ID NO: 125251 - RNA, 19 nt, Homo sapiens
  misc_RNA (1)...(19): siRNA sense strand
gaauggagccuaugaugca

SEQ ID NO: 125252 - RNA, 19 nt, Homo sapiens
  misc_RNA (1)...(19): siRNA sense strand
aaacaaaccauccaguuau

SEQ ID NO: 125253 - RNA, 19 nt, Homo sapiens
  misc_RNA (1)...(19): siRNA sense strand
gcacaaguguauucaacca

SEQ ID NO: 125254 - RNA, 19 nt, Homo sapiens
  misc_RNA (1)...(19): siRNA sense strand
gaauuggcauccuuaagca

SEQ ID NO: 125255 - RNA, 19 nt, Homo sapiens
  misc_RNA (1)...(19): siRNA sense strand
cgaguuagcacaaguguau

SEQ ID NO: 125256 - RNA, 19 nt, Homo sapiens
  misc_RNA (1)...(19): siRNA sense strand
ggauaucuguaaagagaau

SEQ ID NO: 125257 - RNA, 19 nt, Homo sapiens
  misc_RNA (1)...(19): siRNA sense strand
gggaacuccuugcgaagaa

SEQ ID NO: 125258 - RNA, 19 nt, Homo sapiens
  misc_RNA (1)...(19): siRNA sense strand
uaacauugaucaggagaug

SEQ ID NO: 125259 - RNA, 19 nt, Homo sapiens
  misc_RNA (1)...(19): siRNA sense strand
caaugcauaccacgaguua

SEQ ID NO: 125260 - RNA, 19 nt, Homo sapiens
  misc_RNA (1)...(19): siRNA sense strand
auacugggcugaagaacuu

SEQ ID NO: 125261 - RNA, 19 nt, Homo sapiens
  misc_RNA (1)...(19): siRNA sense strand
uagacaagaugcagaugaa

SEQ ID NO: 125262 - RNA, 19 nt, Homo sapiens
  misc_RNA (1)...(19): siRNA sense strand
gauaugcaacagacacuuu

SEQ ID NO: 125263 - RNA, 19 nt, Homo sapiens
  misc_RNA (1)...(19): siRNA sense strand
gaaaccuggugaauaagca

SEQ ID NO: 125264 - RNA, 19 nt, Homo sapiens
  misc_RNA (1)...(19): siRNA sense strand
gagaauggagccuaugaug

SEQ ID NO: 125265 - RNA, 19 nt, Homo sapiens
  misc_RNA (1)...(19): siRNA sense strand
agaugcagaugaauacaaa

SEQ ID NO: 125266 - RNA, 19 nt, Homo sapiens
  misc_RNA (1)...(19): siRNA sense strand
gggcaaaugacacagcuuu

SEQ ID NO: 125267 - RNA, 19 nt, Homo sapiens
  misc_RNA (1)...(19): siRNA sense strand
ggucagucauaucauguug

SEQ ID NO: 125268 - RNA, 19 nt, Homo sapiens
  misc_RNA (1)...(19): siRNA sense strand
uacaacagcuaccaaaaua

SEQ ID NO: 125269 - RNA, 19 nt, Homo sapiens
  misc_RNA (1)...(19): siRNA sense strand
caacagcuaccaaaauaua

SEQ ID NO: 125270 - RNA, 19 nt, Homo sapiens
  misc_RNA (1)...(19): siRNA sense strand
gaguaugggcucacaagaa

SEQ ID NO: 125271 - RNA, 19 nt, Homo sapiens
  misc_RNA (1)...(19): siRNA sense strand
ggaauuggcauccuuaagc

SEQ ID NO: 125272 - RNA, 19 nt, Homo sapiens
  misc_RNA (1)...(19): siRNA sense strand
auggauaucuguaaagaga

SEQ ID NO: 125273 - RNA, 19 nt, Homo sapiens
  misc_RNA (1)...(19): siRNA sense strand
aacaaaccauccaguuauu

SEQ ID NO: 125274 - RNA, 19 nt, Homo sapiens
  misc_RNA (1)...(19): siRNA sense strand
ucgaaacgcuauucucaca

SEQ ID NO: 125275 - RNA, 19 nt, Homo sapiens
  misc_RNA (1)...(19): siRNA sense strand
gugaauaagcacagugaaa

SEQ ID NO: 125276 - RNA, 19 nt, Homo sapiens
  misc_RNA (1)...(19): siRNA sense strand
gccaucagcuaacaaaugc

SEQ ID NO: 125277 - RNA, 19 nt, Homo sapiens
  misc_RNA (1)...(19): siRNA sense strand
gaaggacgguauggucagu

SEQ ID NO: 125278 - RNA, 19 nt, Homo sapiens
  misc_RNA (1)...(19): siRNA sense strand
caaugcuugucaucucuuu

SEQ ID NO: 125279 - RNA, 19 nt, Homo sapiens
  misc_RNA (1)...(19): siRNA sense strand
ugauggauaucuguaaaga

SEQ ID NO: 125280 - RNA, 19 nt, Homo sapiens
  misc_RNA (1)...(19): siRNA sense strand
ucagucauaucauguugga

SEQ ID NO: 125281 - RNA, 19 nt, Homo sapiens
  misc_RNA (1)...(19): siRNA sense strand
gaaaccuucacucgcgaua

SEQ ID NO: 125282 - RNA, 19 nt, Homo sapiens
  misc_RNA (1)...(19): siRNA sense strand
caaauuguggguagauuca

SEQ ID NO: 125283 - RNA, 19 nt, Homo sapiens
  misc_RNA (1)...(19): siRNA sense strand
gaacaggcuauaacuacuc

SEQ ID NO: 125284 - RNA, 19 nt, Homo sapiens
  misc_RNA (1)...(19): siRNA sense strand
guggguagauucauuaagc

SEQ ID NO: 125285 - RNA, 19 nt, Homo sapiens
  misc_RNA (1)...(19): siRNA sense strand
gagcacauucgauaugcaa

SEQ ID NO: 125286 - RNA, 19 nt, Homo sapiens
  misc_RNA (1)...(19): siRNA sense strand
gaagugcauugagcuggau

SEQ ID NO: 125287 - RNA, 19 nt, Homo sapiens
  misc_RNA (1)...(19): siRNA sense strand
uugcaaguauuaaccagaa

SEQ ID NO: 125288 - RNA, 19 nt, Homo sapiens
  misc_RNA (1)...(19): siRNA sense strand
cgaagaacuuaucccaucu

SEQ ID NO: 125289 - RNA, 19 nt, Homo sapiens
  misc_RNA (1)...(19): siRNA sense strand
ggagggaugaucuauacug

SEQ ID NO: 125290 - RNA, 19 nt, Homo sapiens
  misc_RNA (1)...(19): siRNA sense strand
gggcuuugccaucagcuaa

SEQ ID NO: 125291 - RNA, 19 nt, Homo sapiens
  misc_RNA (1)...(19): siRNA sense strand
acagugaacccucaguuug

SEQ ID NO: 125292 - RNA, 19 nt, Homo sapiens
  misc_RNA (1)...(19): siRNA sense strand
acccagccaugcuucauaa

SEQ ID NO: 125293 - RNA, 19 nt, Homo sapiens
  misc_RNA (1)...(19): siRNA sense strand
uaucccaucuggacacugu

SEQ ID NO: 125294 - RNA, 19 nt, Homo sapiens
  misc_RNA (1)...(19): siRNA sense strand
gaucuauacugggcugaag

SEQ ID NO: 125295 - RNA, 19 nt, Homo sapiens
  misc_RNA (1)...(19): siRNA sense strand
cagccaugcuucauaacau

SEQ ID NO: 125296 - RNA, 19 nt, Homo sapiens
  misc_RNA (1)...(19): siRNA sense strand
gcuugucaucucuuuauaa

SEQ ID NO: 125297 - RNA, 19 nt, Homo sapiens
  misc_RNA (1)...(19): siRNA sense strand
uagcacaaguguauucaac

SEQ ID NO: 125298 - RNA, 19 nt, Homo sapiens
  misc_RNA (1)...(19): siRNA sense strand
gggcugaagaacuuugaaa

SEQ ID NO: 125299 - RNA, 19 nt, Homo sapiens
  misc_RNA (1)...(19): siRNA sense strand
aguaugggcucacaagaag

SEQ ID NO: 125300 - RNA, 19 nt, Homo sapiens
  misc_RNA (1)...(19): siRNA sense strand
agugaacccucaguuugua

SEQ ID NO: 125301 - RNA, 19 nt, Homo sapiens
  misc_RNA (1)...(19): siRNA sense strand
ggaggcagagaaauacguu

SEQ ID NO: 125302 - RNA, 19 nt, Homo sapiens
  misc_RNA (1)...(19): siRNA sense strand
auucagaggcuaacaaaga

SEQ ID NO: 125303 - RNA, 19 nt, Homo sapiens
  misc_RNA (1)...(19): siRNA sense strand
ucucacagguucagcucuu

SEQ ID NO: 125304 - RNA, 19 nt, Homo sapiens
  misc_RNA (1)...(19): siRNA sense strand
gcaaugcauaccacgaguu

SEQ ID NO: 125305 - RNA, 19 nt, Homo sapiens
  misc_RNA (1)...(19): siRNA sense strand
gcacauucgauaugcaaca

SEQ ID NO: 125306 - RNA, 19 nt, Homo sapiens
  misc_RNA (1)...(19): siRNA sense strand
gcccaguguuccugacuuc

SEQ ID NO: 125307 - RNA, 19 nt, Homo sapiens
  misc_RNA (1)...(19): siRNA sense strand
aagaagaugauucaggaaa

SEQ ID NO: 125308 - RNA, 19 nt, Homo sapiens
  misc_RNA (1)...(19): siRNA sense strand
caaguguauucaaccaaca

SEQ ID NO: 125309 - RNA, 19 nt, Homo sapiens
  misc_RNA (1)...(19): siRNA sense strand
ccauggcggucagucauau

SEQ ID NO: 125310 - RNA, 19 nt, Homo sapiens
  misc_RNA (1)...(19): siRNA sense strand
uaagcaagccauagacaag

SEQ ID NO: 125311 - RNA, 19 nt, Homo sapiens
  misc_RNA (1)...(19): siRNA sense strand
ggcggucagucauaucaug

SEQ ID NO: 125312 - RNA, 19 nt, Homo sapiens
  misc_RNA (1)...(19): siRNA sense strand
uaugaacaggcuauaacua

SEQ ID NO: 125313 - RNA, 19 nt, Homo sapiens
  misc_RNA (1)...(19): siRNA sense strand
gaagaacuuaucccaucug

SEQ ID NO: 125314 - RNA, 19 nt, Homo sapiens
  misc_RNA (1)...(19): siRNA sense strand
gcaagucgugugcaguugu

SEQ ID NO: 125315 - RNA, 19 nt, Homo sapiens
  misc_RNA (1)...(19): siRNA sense strand
ggcucuggauguacaagaa

SEQ ID NO: 125316 - RNA, 19 nt, Homo sapiens
  misc_RNA (1)...(19): siRNA sense strand
gugaacugaucaacaagag

SEQ ID NO: 125317 - RNA, 19 nt, Homo sapiens
  misc_RNA (1)...(19): siRNA sense strand
cacagugaacccucaguuu

SEQ ID NO: 125318 - RNA, 19 nt, Homo sapiens
  misc_RNA (1)...(19): siRNA sense strand
cucaggaggcagagaaaua

SEQ ID NO: 125319 - RNA, 19 nt, Homo sapiens
  misc_RNA (1)...(19): siRNA sense strand
aagaauauucagaggcuaa

SEQ ID NO: 125320 - RNA, 19 nt, Homo sapiens
  misc_RNA (1)...(19): siRNA sense strand
gcucggggcucuggaugua

SEQ ID NO: 125321 - RNA, 19 nt, Homo sapiens
  misc_RNA (1)...(19): siRNA sense strand
ggagcacauucgauaugca

SEQ ID NO: 125322 - RNA, 19 nt, Homo sapiens
  misc_RNA (1)...(19): siRNA sense strand
caaaccauccaguuauucu

SEQ ID NO: 125323 - RNA, 19 nt, Homo sapiens
  misc_RNA (1)...(19): siRNA sense strand
agaagaugauucaggaaac

SEQ ID NO: 125324 - RNA, 19 nt, Homo sapiens
  misc_RNA (1)...(19): siRNA sense strand
caagucgugugcaguuguc

SEQ ID NO: 125325 - RNA, 19 nt, Homo sapiens
  misc_RNA (1)...(19): siRNA sense strand
aauuguggguagauucauu

SEQ ID NO: 125326 - RNA, 19 nt, Homo sapiens
  misc_RNA (1)...(19): siRNA sense strand
ugaacaggcuauaacuacu

SEQ ID NO: 125327 - RNA, 19 nt, Homo sapiens
  misc_RNA (1)...(19): siRNA sense strand
gaucucugccagcuuuguu

SEQ ID NO: 125328 - RNA, 19 nt, Homo sapiens
  misc_RNA (1)...(19): siRNA sense strand
uauggagggaugaucuaua

SEQ ID NO: 125329 - RNA, 19 nt, Homo sapiens
  misc_RNA (1)...(19): siRNA sense strand
aggacgguauggucaguuu

SEQ ID NO: 125330 - RNA, 19 nt, Homo sapiens
  misc_RNA (1)...(19): siRNA sense strand
gcacaugauagaagauggu

SEQ ID NO: 125331 - RNA, 19 nt, Homo sapiens
  misc_RNA (1)...(19): siRNA sense strand
caguguuccugacuucgaa

SEQ ID NO: 125332 - RNA, 19 nt, Homo sapiens
  misc_RNA (1)...(19): siRNA sense strand
cuugucaucucuuuauaag

SEQ ID NO: 125333 - RNA, 19 nt, Homo sapiens
  misc_RNA (1)...(19): siRNA sense strand
ugacguggauaugauggau

SEQ ID NO: 125334 - RNA, 19 nt, Homo sapiens
  misc_RNA (1)...(19): siRNA sense strand
guacaacagcuaccaaaau

SEQ ID NO: 125335 - RNA, 19 nt, Homo sapiens
  misc_RNA (1)...(19): siRNA sense strand
gccauggcggucagucaua

SEQ ID NO: 125336 - RNA, 19 nt, Homo sapiens
  misc_RNA (1)...(19): siRNA sense strand
uaauaacccagccaugcuu

SEQ ID NO: 125337 - RNA, 19 nt, Homo sapiens
  misc_RNA (1)...(19): siRNA sense strand
gcucacaagaagaugauuc

SEQ ID NO: 125338 - RNA, 19 nt, Homo sapiens
  misc_RNA (1)...(19): siRNA sense strand
cagugaacccucaguuugu

SEQ ID NO: 125339 - RNA, 19 nt, Homo sapiens
  misc_RNA (1)...(19): siRNA sense strand
agccaugcuucauaacauu

SEQ ID NO: 125340 - RNA, 19 nt, Homo sapiens
  misc_RNA (1)...(19): siRNA sense strand
ggagauacagcucuagaua

SEQ ID NO: 125341 - RNA, 19 nt, Homo sapiens
  misc_RNA (1)...(19): siRNA sense strand
ggagaaggacccagagaaa

SEQ ID NO: 125342 - RNA, 19 nt, Homo sapiens
  misc_RNA (1)...(19): siRNA sense strand
gagauacagcucuagauaa

SEQ ID NO: 125343 - RNA, 19 nt, Homo sapiens
  misc_RNA (1)...(19): siRNA sense strand
ucaaaugcauugccaagga

SEQ ID NO: 125344 - RNA, 19 nt, Homo sapiens
  misc_RNA (1)...(19): siRNA sense strand
gugagcagaucaagaagaa

SEQ ID NO: 125345 - RNA, 19 nt, Homo sapiens
  misc_RNA (1)...(19): siRNA sense strand
gaaugaugccaaacucuuu

SEQ ID NO: 125346 - RNA, 19 nt, Homo sapiens
  misc_RNA (1)...(19): siRNA sense strand
auacagcucuagauaagaa

SEQ ID NO: 125347 - RNA, 19 nt, Homo sapiens
  misc_RNA (1)...(19): siRNA sense strand
aagaagaacuuugccaaga

SEQ ID NO: 125348 - RNA, 19 nt, Homo sapiens
  misc_RNA (1)...(19): siRNA sense strand
gaugaagacuccaaaauca

SEQ ID NO: 125349 - RNA, 19 nt, Homo sapiens
  misc_RNA (1)...(19): siRNA sense strand
ugagugagcagaucaagaa

SEQ ID NO: 125350 - RNA, 19 nt, Homo sapiens
  misc_RNA (1)...(19): siRNA sense strand
gaaggccgaguacgaguuu

SEQ ID NO: 125351 - RNA, 19 nt, Homo sapiens
  misc_RNA (1)...(19): siRNA sense strand
ugacgagaaugaugccaaa

SEQ ID NO: 125352 - RNA, 19 nt, Homo sapiens
  misc_RNA (1)...(19): siRNA sense strand
ggugcuggaugcugugaaa

SEQ ID NO: 125353 - RNA, 19 nt, Homo sapiens
  misc_RNA (1)...(19): siRNA sense strand
agauacagcucuagauaag

SEQ ID NO: 125354 - RNA, 19 nt, Homo sapiens
  misc_RNA (1)...(19): siRNA sense strand
ugucaucgccuacaucuug

SEQ ID NO: 125355 - RNA, 19 nt, Homo sapiens
  misc_RNA (1)...(19): siRNA sense strand
gaaggcagcauggagaaug

SEQ ID NO: 125356 - RNA, 19 nt, Homo sapiens
  misc_RNA (1)...(19): siRNA sense strand
gcgguuacccucccuucua

SEQ ID NO: 125357 - RNA, 19 nt, Homo sapiens
  misc_RNA (1)...(19): siRNA sense strand
ggagcucuuugaccguauu

SEQ ID NO: 125358 - RNA, 19 nt, Homo sapiens
  misc_RNA (1)...(19): siRNA sense strand
gaagcaggcggaggacauu

SEQ ID NO: 125359 - RNA, 19 nt, Homo sapiens
  misc_RNA (1)...(19): siRNA sense strand
cgagaaugaugccaaacuc

SEQ ID NO: 125360 - RNA, 19 nt, Homo sapiens
  misc_RNA (1)...(19): siRNA sense strand
gcagaucaagaagaacuuu

SEQ ID NO: 125361 - RNA, 19 nt, Homo sapiens
  misc_RNA (1)...(19): siRNA sense strand
gaagcugguggccaucaaa

SEQ ID NO: 125362 - RNA, 19 nt, Homo sapiens
  misc_RNA (1)...(19): siRNA sense strand
ggaggacauuagagacauc

SEQ ID NO: 125363 - RNA, 19 nt, Homo sapiens
  misc_RNA (1)...(19): siRNA sense strand
agaagaacuuugccaagag

SEQ ID NO: 125364 - RNA, 19 nt, Homo sapiens
  misc_RNA (1)...(19): siRNA sense strand
gauuucauccggcacuuga

SEQ ID NO: 125365 - RNA, 19 nt, Homo sapiens
  misc_RNA (1)...(19): siRNA sense strand
gagcagaucaagaagaacu

SEQ ID NO: 125366 - RNA, 19 nt, Homo sapiens
  misc_RNA (1)...(19): siRNA sense strand
cagcauggagaaugagauu

SEQ ID NO: 125367 - RNA, 19 nt, Homo sapiens
  misc_RNA (1)...(19): siRNA sense strand
ggaagcaggcggaggacau

SEQ ID NO: 125368 - RNA, 19 nt, Homo sapiens
  misc_RNA (1)...(19): siRNA sense strand
gcuggaugcugugaaauac

SEQ ID NO: 125369 - RNA, 19 nt, Homo sapiens
  misc_RNA (1)...(19): siRNA sense strand
ggccaccucuaccucauca

SEQ ID NO: 125370 - RNA, 19 nt, Homo sapiens
  misc_RNA (1)...(19): siRNA sense strand
gauccuggcagaagauaag

SEQ ID NO: 125371 - RNA, 19 nt, Homo sapiens
  misc_RNA (1)...(19): siRNA sense strand
aaucaugaucuccgacuuu

SEQ ID NO: 125372 - RNA, 19 nt, Homo sapiens
  misc_RNA (1)...(19): siRNA sense strand
cgguuacccucccuucuau

SEQ ID NO: 125373 - RNA, 19 nt, Homo sapiens
  misc_RNA (1)...(19): siRNA sense strand
aaggcagcauggagaauga

SEQ ID NO: 125374 - RNA, 19 nt, Homo sapiens
  misc_RNA (1)...(19): siRNA sense strand
gcaggcggaggacauuaga

SEQ ID NO: 125375 - RNA, 19 nt, Homo sapiens
  misc_RNA (1)...(19): siRNA sense strand
aagauaagaggacgcagaa

SEQ ID NO: 125376 - RNA, 19 nt, Homo sapiens
  misc_RNA (1)...(19): siRNA sense strand
gcaaggaaggcagcaugga

SEQ ID NO: 125377 - RNA, 19 nt, Homo sapiens
  misc_RNA (1)...(19): siRNA sense strand
ggcacuugauggagaagga

SEQ ID NO: 125378 - RNA, 19 nt, Homo sapiens
  misc_RNA (1)...(19): siRNA sense strand
ggacgacaucucugacucu

SEQ ID NO: 125379 - RNA, 19 nt, Homo sapiens
  misc_RNA (1)...(19): siRNA sense strand
guuacccucccuucuauga

SEQ ID NO: 125380 - RNA, 19 nt, Homo sapiens
  misc_RNA (1)...(19): siRNA sense strand
gcauggagaaugagauugc

SEQ ID NO: 125381 - RNA, 19 nt, Homo sapiens
  misc_RNA (1)...(19): siRNA sense strand
ugcaggagauacagcucua

SEQ ID NO: 125382 - RNA, 19 nt, Homo sapiens
  misc_RNA (1)...(19): siRNA sense strand
acaucuugcucugcgguua

SEQ ID NO: 125383 - RNA, 19 nt, Homo sapiens
  misc_RNA (1)...(19): siRNA sense strand
cccagaagcccuacagcaa

SEQ ID NO: 125384 - RNA, 19 nt, Homo sapiens
  misc_RNA (1)...(19): siRNA sense strand
acuacagccuggaugaaga

SEQ ID NO: 125385 - RNA, 19 nt, Homo sapiens
  misc_RNA (1)...(19): siRNA sense strand
guacuacagccuggaugaa

SEQ ID NO: 125386 - RNA, 19 nt, Homo sapiens
  misc_RNA (1)...(19): siRNA sense strand
gaucaagcaccccaacauu

SEQ ID NO: 125387 - RNA, 19 nt, Homo sapiens
  misc_RNA (1)...(19): siRNA sense strand
agaaugaugccaaacucuu

SEQ ID NO: 125388 - RNA, 19 nt, Homo sapiens
  misc_RNA (1)...(19): siRNA sense strand
ggaugaagacuccaaaauc

SEQ ID NO: 125389 - RNA, 19 nt, Homo sapiens
  misc_RNA (1)...(19): siRNA sense strand
gaggugauccuggcagaag

SEQ ID NO: 125390 - RNA, 19 nt, Homo sapiens
  misc_RNA (1)...(19): siRNA sense strand
gcggaggacauuagagaca

SEQ ID NO: 125391 - RNA, 19 nt, Homo sapiens
  misc_RNA (1)...(19): siRNA sense strand
ccaccucuaccucaucaug

SEQ ID NO: 125392 - RNA, 19 nt, Homo sapiens
  misc_RNA (1)...(19): siRNA sense strand
uugcagcacccauggauug

SEQ ID NO: 125393 - RNA, 19 nt, Homo sapiens
  misc_RNA (1)...(19): siRNA sense strand
gagaaggacccagagaaaa

SEQ ID NO: 125394 - RNA, 19 nt, Homo sapiens
  misc_RNA (1)...(19): siRNA sense strand
gagaaugaugccaaacucu

SEQ ID NO: 125395 - RNA, 19 nt, Homo sapiens
  misc_RNA (1)...(19): siRNA sense strand
gcaugaccugggcauugua

SEQ ID NO: 125396 - RNA, 19 nt, Homo sapiens
  misc_RNA (1)...(19): siRNA sense strand
gcucuuugaccguauugug

SEQ ID NO: 125397 - RNA, 19 nt, Homo sapiens
  misc_RNA (1)...(19): siRNA sense strand
caacauuguagcccuggau

SEQ ID NO: 125398 - RNA, 19 nt, Homo sapiens
  misc_RNA (1)...(19): siRNA sense strand
gauacagcucuagauaaga

SEQ ID NO: 125399 - RNA, 19 nt, Homo sapiens
  misc_RNA (1)...(19): siRNA sense strand
ugcaugaccugggcauugu

SEQ ID NO: 125400 - RNA, 19 nt, Homo sapiens
  misc_RNA (1)...(19): siRNA sense strand
ggaaggcagcauggagaau

SEQ ID NO: 125401 - RNA, 19 nt, Homo sapiens
  misc_RNA (1)...(19): siRNA sense strand
caggagauacagcucuaga

SEQ ID NO: 125402 - RNA, 19 nt, Homo sapiens
  misc_RNA (1)...(19): siRNA sense strand
ugcuggaugcugugaaaua

SEQ ID NO: 125403 - RNA, 19 nt, Homo sapiens
  misc_RNA (1)...(19): siRNA sense strand
uggagaaggacccagagaa

SEQ ID NO: 125404 - RNA, 19 nt, Homo sapiens
  misc_RNA (1)...(19): siRNA sense strand
ugacucugccaaagauuuc

SEQ ID NO: 125405 - RNA, 19 nt, Homo sapiens
  misc_RNA (1)...(19): siRNA sense strand
ucucugacucugccaaaga

SEQ ID NO: 125406 - RNA, 19 nt, Homo sapiens
  misc_RNA (1)...(19): siRNA sense strand
gcugguggccaucaaaugc

SEQ ID NO: 125407 - RNA, 19 nt, Homo sapiens
  misc_RNA (1)...(19): siRNA sense strand
agaagcugguggccaucaa

SEQ ID NO: 125408 - RNA, 19 nt, Homo sapiens
  misc_RNA (1)...(19): siRNA sense strand
gaagaaagcaaaccaagaa

SEQ ID NO: 125409 - RNA, 19 nt, Homo sapiens
  misc_RNA (1)...(19): siRNA sense strand
ggaaguagaaucagccuua

SEQ ID NO: 125410 - RNA, 19 nt, Homo sapiens
  misc_RNA (1)...(19): siRNA sense strand
ccacacaguucagcacuua

SEQ ID NO: 125411 - RNA, 19 nt, Homo sapiens
  misc_RNA (1)...(19): siRNA sense strand
gaugucagcuccaauaaag

SEQ ID NO: 125412 - RNA, 19 nt, Homo sapiens
  misc_RNA (1)...(19): siRNA sense strand
ccaaagaguugaagaccaa

SEQ ID NO: 125413 - RNA, 19 nt, Homo sapiens
  misc_RNA (1)...(19): siRNA sense strand
ggaugagguuccuggcuua

SEQ ID NO: 125414 - RNA, 19 nt, Homo sapiens
  misc_RNA (1)...(19): siRNA sense strand
gauguuggaugcucaagug

SEQ ID NO: 125415 - RNA, 19 nt, Homo sapiens
  misc_RNA (1)...(19): siRNA sense strand
ccaagagaaugaaccagaa

SEQ ID NO: 125416 - RNA, 19 nt, Homo sapiens
  misc_RNA (1)...(19): siRNA sense strand
caguagagauuauaaaguc

SEQ ID NO: 125417 - RNA, 19 nt, Homo sapiens
  misc_RNA (1)...(19): siRNA sense strand
gaagucagcagccgagaug

SEQ ID NO: 125418 - RNA, 19 nt, Homo sapiens
  misc_RNA (1)...(19): siRNA sense strand
gggcagagcaucaagacaa

SEQ ID NO: 125419 - RNA, 19 nt, Homo sapiens
  misc_RNA (1)...(19): siRNA sense strand
cgaacucacugcagaaugg

SEQ ID NO: 125420 - RNA, 19 nt, Homo sapiens
  misc_RNA (1)...(19): siRNA sense strand
gcuauagcagagaauaaua

SEQ ID NO: 125421 - RNA, 19 nt, Homo sapiens
  misc_RNA (1)...(19): siRNA sense strand
gagaugaacaagcagaaga

SEQ ID NO: 125422 - RNA, 19 nt, Homo sapiens
  misc_RNA (1)...(19): siRNA sense strand
ccacucagaagaaauaaau

SEQ ID NO: 125423 - RNA, 19 nt, Homo sapiens
  misc_RNA (1)...(19): siRNA sense strand
gaaucagccuuacaaacag

SEQ ID NO: 125424 - RNA, 19 nt, Homo sapiens
  misc_RNA (1)...(19): siRNA sense strand
agaaucagccuuacaaaca

SEQ ID NO: 125425 - RNA, 19 nt, Homo sapiens
  misc_RNA (1)...(19): siRNA sense strand
gaucacccacucagaagaa

SEQ ID NO: 125426 - RNA, 19 nt, Homo sapiens
  misc_RNA (1)...(19): siRNA sense strand
gcaaacagacccaguaucc

SEQ ID NO: 125427 - RNA, 19 nt, Homo sapiens
  misc_RNA (1)...(19): siRNA sense strand
gagcaccacagaaggguaa

SEQ ID NO: 125428 - RNA, 19 nt, Homo sapiens
  misc_RNA (1)...(19): siRNA sense strand
gaacuuggaacugcggauu

SEQ ID NO: 125429 - RNA, 19 nt, Homo sapiens
  misc_RNA (1)...(19): siRNA sense strand
gcaggaagccaaagaacca

SEQ ID NO: 125430 - RNA, 19 nt, Homo sapiens
  misc_RNA (1)...(19): siRNA sense strand
caacaagcaggaagccaaa

SEQ ID NO: 125431 - RNA, 19 nt, Homo sapiens
  misc_RNA (1)...(19): siRNA sense strand
cggauaauguggccacuuc

SEQ ID NO: 125432 - RNA, 19 nt, Homo sapiens
  misc_RNA (1)...(19): siRNA sense strand
ggcaagaauuccaaaggau

SEQ ID NO: 125433 - RNA, 19 nt, Homo sapiens
  misc_RNA (1)...(19): siRNA sense strand
cagcagcuauagcagagaa

SEQ ID NO: 125434 - RNA, 19 nt, Homo sapiens
  misc_RNA (1)...(19): siRNA sense strand
ugagguuccuggcuuauca

SEQ ID NO: 125435 - RNA, 19 nt, Homo sapiens
  misc_RNA (1)...(19): siRNA sense strand
ggcaccagcugcuaaaucu

SEQ ID NO: 125436 - RNA, 19 nt, Homo sapiens
  misc_RNA (1)...(19): siRNA sense strand
uuaaaggccugggaccaaa

SEQ ID NO: 125437 - RNA, 19 nt, Homo sapiens
  misc_RNA (1)...(19): siRNA sense strand
cagccgagaugaacaagca

SEQ ID NO: 125438 - RNA, 19 nt, Homo sapiens
  misc_RNA (1)...(19): siRNA sense strand
gauuauaaaguccaaggaa

SEQ ID NO: 125439 - RNA, 19 nt, Homo sapiens
  misc_RNA (1)...(19): siRNA sense strand
ccacuucagcugaccuuaa

SEQ ID NO: 125440 - RNA, 19 nt, Homo sapiens
  misc_RNA (1)...(19): siRNA sense strand
uaucagggcaguccgauga

SEQ ID NO: 125441 - RNA, 19 nt, Homo sapiens
  misc_RNA (1)...(19): siRNA sense strand
uggcaagaauuccaaagga

SEQ ID NO: 125442 - RNA, 19 nt, Homo sapiens
  misc_RNA (1)...(19): siRNA sense strand
gaaauaaaugggaaagacu

SEQ ID NO: 125443 - RNA, 19 nt, Homo sapiens
  misc_RNA (1)...(19): siRNA sense strand
aaaccaagaaccucucuga

SEQ ID NO: 125444 - RNA, 19 nt, Homo sapiens
  misc_RNA (1)...(19): siRNA sense strand
caaaagagaagaaagcaaa

SEQ ID NO: 125445 - RNA, 19 nt, Homo sapiens
  misc_RNA (1)...(19): siRNA sense strand
gaaguagaaucagccuuac

SEQ ID NO: 125446 - RNA, 19 nt, Homo sapiens
  misc_RNA (1)...(19): siRNA sense strand
aggagaaugugguguguga

SEQ ID NO: 125447 - RNA, 19 nt, Homo sapiens
  misc_RNA (1)...(19): siRNA sense strand
ggaggagaauguggugugu

SEQ ID NO: 125448 - RNA, 19 nt, Homo sapiens
  misc_RNA (1)...(19): siRNA sense strand
ggaaggcaccaaggagaaa

SEQ ID NO: 125449 - RNA, 19 nt, Homo sapiens
  misc_RNA (1)...(19): siRNA sense strand
gcccaaggacuccagcuuu

SEQ ID NO: 125450 - RNA, 19 nt, Homo sapiens
  misc_RNA (1)...(19): siRNA sense strand
ccacagaagcgaaacucaa

SEQ ID NO: 125451 - RNA, 19 nt, Homo sapiens
  misc_RNA (1)...(19): siRNA sense strand
caacgcgucugcucugaac

SEQ ID NO: 125452 - RNA, 19 nt, Homo sapiens
  misc_RNA (1)...(19): siRNA sense strand
gaagacacgggugcugaaa

SEQ ID NO: 125453 - RNA, 19 nt, Homo sapiens
  misc_RNA (1)...(19): siRNA sense strand
cuaacaaagcugaaacaaa

SEQ ID NO: 125454 - RNA, 19 nt, Homo sapiens
  misc_RNA (1)...(19): siRNA sense strand
gcagcuauagcagagaaua

SEQ ID NO: 125455 - RNA, 19 nt, Homo sapiens
  misc_RNA (1)...(19): siRNA sense strand
uauaaaguccaaggaagua

SEQ ID NO: 125456 - RNA, 19 nt, Homo sapiens
  misc_RNA (1)...(19): siRNA sense strand
caacaggagcaccacagaa

SEQ ID NO: 125457 - RNA, 19 nt, Homo sapiens
  misc_RNA (1)...(19): siRNA sense strand
gcagggaaggacauaguug

SEQ ID NO: 125458 - RNA, 19 nt, Homo sapiens
  misc_RNA (1)...(19): siRNA sense strand
gccagagccugaaccaaca

SEQ ID NO: 125459 - RNA, 19 nt, Homo sapiens
  misc_RNA (1)...(19): siRNA sense strand
gaccuuaagucagacaaag

SEQ ID NO: 125460 - RNA, 19 nt, Homo sapiens
  misc_RNA (1)...(19): siRNA sense strand
gaacugcggauugcucugu

SEQ ID NO: 125461 - RNA, 19 nt, Homo sapiens
  misc_RNA (1)...(19): siRNA sense strand
agaccaagccgcagauuca

SEQ ID NO: 125462 - RNA, 19 nt, Homo sapiens
  misc_RNA (1)...(19): siRNA sense strand
agaaauaaaugggaaagac

SEQ ID NO: 125463 - RNA, 19 nt, Homo sapiens
  misc_RNA (1)...(19): siRNA sense strand
cacagaagcgaaacucaaa

SEQ ID NO: 125464 - RNA, 19 nt, Homo sapiens
  misc_RNA (1)...(19): siRNA sense strand
aaccagaagcagagacuua

SEQ ID NO: 125465 - RNA, 19 nt, Homo sapiens
  misc_RNA (1)...(19): siRNA sense strand
gaugcucucucggccugua

SEQ ID NO: 125466 - RNA, 19 nt, Homo sapiens
  misc_RNA (1)...(19): siRNA sense strand
ugaacaagcagaagagcaa

SEQ ID NO: 125467 - RNA, 19 nt, Homo sapiens
  misc_RNA (1)...(19): siRNA sense strand
gcacacacaguccgugaca

SEQ ID NO: 125468 - RNA, 19 nt, Homo sapiens
  misc_RNA (1)...(19): siRNA sense strand
gauaauguggccacuucuu

SEQ ID NO: 125469 - RNA, 19 nt, Homo sapiens
  misc_RNA (1)...(19): siRNA sense strand
caucggaccaguuggcaaa

SEQ ID NO: 125470 - RNA, 19 nt, Homo sapiens
  misc_RNA (1)...(19): siRNA sense strand
aaacagacccaguauccau

SEQ ID NO: 125471 - RNA, 19 nt, Homo sapiens
  misc_RNA (1)...(19): siRNA sense strand
gaagagcaacaagcaggaa

SEQ ID NO: 125472 - RNA, 19 nt, Homo sapiens
  misc_RNA (1)...(19): siRNA sense strand
gaaagcaaaccaagaaccu

SEQ ID NO: 125473 - RNA, 19 nt, Homo sapiens
  misc_RNA (1)...(19): siRNA sense strand
gacaacgcgucugcucuga

SEQ ID NO: 125474 - RNA, 19 nt, Homo sapiens
  misc_RNA (1)...(19): siRNA sense strand
ccacaggugcggaggagaa

SEQ ID NO: 125475 - RNA, 19 nt, Homo sapiens
  misc_RNA (1)...(19): siRNA sense strand
cgaacaaagacccaaguga

SEQ ID NO: 125476 - RNA, 19 nt, Homo sapiens
  misc_RNA (1)...(19): siRNA sense strand
guuggaugcucaagugcaa

SEQ ID NO: 125477 - RNA, 19 nt, Homo sapiens
  misc_RNA (1)...(19): siRNA sense strand
acaucagacuccacagaaa

SEQ ID NO: 125478 - RNA, 19 nt, Homo sapiens
  misc_RNA (1)...(19): siRNA sense strand
gaagaaauaaaugggaaag

SEQ ID NO: 125479 - RNA, 19 nt, Homo sapiens
  misc_RNA (1)...(19): siRNA sense strand
ccaaggggcuggcaagaau

SEQ ID NO: 125480 - RNA, 19 nt, Homo sapiens
  misc_RNA (1)...(19): siRNA sense strand
cacccacucagaagaaaua

SEQ ID NO: 125481 - RNA, 19 nt, Homo sapiens
  misc_RNA (1)...(19): siRNA sense strand
aaacaucagacuccacaga

SEQ ID NO: 125482 - RNA, 19 nt, Homo sapiens
  misc_RNA (1)...(19): siRNA sense strand
cgaaggaaggcaccaagga

SEQ ID NO: 125483 - RNA, 19 nt, Homo sapiens
  misc_RNA (1)...(19): siRNA sense strand
caagcaggaagccaaagaa

SEQ ID NO: 125484 - RNA, 19 nt, Homo sapiens
  misc_RNA (1)...(19): siRNA sense strand
guagaaucagccuuacaaa

SEQ ID NO: 125485 - RNA, 19 nt, Homo sapiens
  misc_RNA (1)...(19): siRNA sense strand
gaauguggugugugaguca

SEQ ID NO: 125486 - RNA, 19 nt, Homo sapiens
  misc_RNA (1)...(19): siRNA sense strand
ugagucaccaguagagauu

SEQ ID NO: 125487 - RNA, 19 nt, Homo sapiens
  misc_RNA (1)...(19): siRNA sense strand
caagagggcagagcaucaa

SEQ ID NO: 125488 - RNA, 19 nt, Homo sapiens
  misc_RNA (1)...(19): siRNA sense strand
gagaauguggugugugagu

SEQ ID NO: 125489 - RNA, 19 nt, Homo sapiens
  misc_RNA (1)...(19): siRNA sense strand
gacuggagacugcaaagga

SEQ ID NO: 125490 - RNA, 19 nt, Homo sapiens
  misc_RNA (1)...(19): siRNA sense strand
uugaagaccaagagaauga

SEQ ID NO: 125491 - RNA, 19 nt, Homo sapiens
  misc_RNA (1)...(19): siRNA sense strand
agaagaaagcaaaccaaga

SEQ ID NO: 125492 - RNA, 19 nt, Homo sapiens
  misc_RNA (1)...(19): siRNA sense strand
aagcgaaacucaaaagaga

SEQ ID NO: 125493 - RNA, 19 nt, Homo sapiens
  misc_RNA (1)...(19): siRNA sense strand
ucaccaguagagauuauaa

SEQ ID NO: 125494 - RNA, 19 nt, Homo sapiens
  misc_RNA (1)...(19): siRNA sense strand
cagcuauagcagagaauaa

SEQ ID NO: 125495 - RNA, 19 nt, Homo sapiens
  misc_RNA (1)...(19): siRNA sense strand
cuugaugucagcuccaaua

SEQ ID NO: 125496 - RNA, 19 nt, Homo sapiens
  misc_RNA (1)...(19): siRNA sense strand
gggacaagcuccaaaagag

SEQ ID NO: 125497 - RNA, 19 nt, Homo sapiens
  misc_RNA (1)...(19): siRNA sense strand
cagggaaggacauaguuga

SEQ ID NO: 125498 - RNA, 19 nt, Homo sapiens
  misc_RNA (1)...(19): siRNA sense strand
ggcagagcaucaagacaag

SEQ ID NO: 125499 - RNA, 19 nt, Homo sapiens
  misc_RNA (1)...(19): siRNA sense strand
ccaagagggcagagcauca

SEQ ID NO: 125500 - RNA, 19 nt, Homo sapiens
  misc_RNA (1)...(19): siRNA sense strand
gaguugaagaccaagagaa

SEQ ID NO: 125501 - RNA, 19 nt, Homo sapiens
  misc_RNA (1)...(19): siRNA sense strand
gacuccagcugccaaacau

SEQ ID NO: 125502 - RNA, 19 nt, Homo sapiens
  misc_RNA (1)...(19): siRNA sense strand
ggaccucaacgaaggagau

SEQ ID NO: 125503 - RNA, 19 nt, Homo sapiens
  misc_RNA (1)...(19): siRNA sense strand
guccaaggaaguagaauca

SEQ ID NO: 125504 - RNA, 19 nt, Homo sapiens
  misc_RNA (1)...(19): siRNA sense strand
uaaaguccaaggaaguaga

SEQ ID NO: 125505 - RNA, 19 nt, Homo sapiens
  misc_RNA (1)...(19): siRNA sense strand
uaagugucaagacggauaa

SEQ ID NO: 125506 - RNA, 19 nt, Homo sapiens
  misc_RNA (1)...(19): siRNA sense strand
gauggcguuucucagacaa

SEQ ID NO: 125507 - RNA, 19 nt, Homo sapiens
  misc_RNA (1)...(19): siRNA sense strand
uacaaacaguggaccucaa

SEQ ID NO: 125508 - RNA, 19 nt, Homo sapiens
  misc_RNA (1)...(19): siRNA sense strand
gaaucuagcuugcaaauau

SEQ ID NO: 125509 - RNA, 19 nt, Homo sapiens
  misc_RNA (1)...(19): siRNA sense strand
gagaagaaauccuugcuaa

SEQ ID NO: 125510 - RNA, 19 nt, Homo sapiens
  misc_RNA (1)...(19): siRNA sense strand
guagaucucuguagaaaug

SEQ ID NO: 125511 - RNA, 19 nt, Homo sapiens
  misc_RNA (1)...(19): siRNA sense strand
gaugagacaagaacaauua

SEQ ID NO: 125512 - RNA, 19 nt, Homo sapiens
  misc_RNA (1)...(19): siRNA sense strand
gaguaaauguggagcauaa

SEQ ID NO: 125513 - RNA, 19 nt, Homo sapiens
  misc_RNA (1)...(19): siRNA sense strand
gaagaaauccuugcuaaug

SEQ ID NO: 125514 - RNA, 19 nt, Homo sapiens
  misc_RNA (1)...(19): siRNA sense strand
ugaaggaacucuuggugua

SEQ ID NO: 125515 - RNA, 19 nt, Homo sapiens
  misc_RNA (1)...(19): siRNA sense strand
gaaagacagcuuaaagaaa

SEQ ID NO: 125516 - RNA, 19 nt, Homo sapiens
  misc_RNA (1)...(19): siRNA sense strand
ggaaagacagcuuaaagaa

SEQ ID NO: 125517 - RNA, 19 nt, Homo sapiens
  misc_RNA (1)...(19): siRNA sense strand
ggcaagaaguuaugaaaug

SEQ ID NO: 125518 - RNA, 19 nt, Homo sapiens
  misc_RNA (1)...(19): siRNA sense strand
gcgaauuccugauauaguu

SEQ ID NO: 125519 - RNA, 19 nt, Homo sapiens
  misc_RNA (1)...(19): siRNA sense strand
ugaagucugucaaggaaua

SEQ ID NO: 125520 - RNA, 19 nt, Homo sapiens
  misc_RNA (1)...(19): siRNA sense strand
aaagacagcuuaaagaaag

SEQ ID NO: 125521 - RNA, 19 nt, Homo sapiens
  misc_RNA (1)...(19): siRNA sense strand
ucaaggaccucguauguca

SEQ ID NO: 125522 - RNA, 19 nt, Homo sapiens
  misc_RNA (1)...(19): siRNA sense strand
agagaaggguguucaguuu

SEQ ID NO: 125523 - RNA, 19 nt, Homo sapiens
  misc_RNA (1)...(19): siRNA sense strand
uaacaucuuuggaaacaga

SEQ ID NO: 125524 - RNA, 19 nt, Homo sapiens
  misc_RNA (1)...(19): siRNA sense strand
gcugaagucugucaaggaa

SEQ ID NO: 125525 - RNA, 19 nt, Homo sapiens
  misc_RNA (1)...(19): siRNA sense strand
gggaaaagguacccucuua

SEQ ID NO: 125526 - RNA, 19 nt, Homo sapiens
  misc_RNA (1)...(19): siRNA sense strand
caacaagcaguuucaguuu

SEQ ID NO: 125527 - RNA, 19 nt, Homo sapiens
  misc_RNA (1)...(19): siRNA sense strand
ggaguagccuguuuaagag

SEQ ID NO: 125528 - RNA, 19 nt, Homo sapiens
  misc_RNA (1)...(19): siRNA sense strand
caucaggcaugaagaagaa

SEQ ID NO: 125529 - RNA, 19 nt, Homo sapiens
  misc_RNA (1)...(19): siRNA sense strand
gacaagaguuggaaagaca

SEQ ID NO: 125530 - RNA, 19 nt, Homo sapiens
  misc_RNA (1)...(19): siRNA sense strand
ggcagaugaucgaguauuu

SEQ ID NO: 125531 - RNA, 19 nt, Homo sapiens
  misc_RNA (1)...(19): siRNA sense strand
gcaagaaguuaugaaaugg

SEQ ID NO: 125532 - RNA, 19 nt, Homo sapiens
  misc_RNA (1)...(19): siRNA sense strand
gaaagaauaacaagggaau

SEQ ID NO: 125533 - RNA, 19 nt, Homo sapiens
  misc_RNA (1)...(19): siRNA sense strand
guuauuugcugaccuaugu

SEQ ID NO: 125534 - RNA, 19 nt, Homo sapiens
  misc_RNA (1)...(19): siRNA sense strand
ugaggcagcugcuagagaa

SEQ ID NO: 125535 - RNA, 19 nt, Homo sapiens
  misc_RNA (1)...(19): siRNA sense strand
gcagggugacgcagacuua

SEQ ID NO: 125536 - RNA, 19 nt, Homo sapiens
  misc_RNA (1)...(19): siRNA sense strand
gcagaugaucgaguauuua

SEQ ID NO: 125537 - RNA, 19 nt, Homo sapiens
  misc_RNA (1)...(19): siRNA sense strand
ggagggagccugucacauc

SEQ ID NO: 125538 - RNA, 19 nt, Homo sapiens
  misc_RNA (1)...(19): siRNA sense strand
ggugguagaucucuguaga

SEQ ID NO: 125539 - RNA, 19 nt, Homo sapiens
  misc_RNA (1)...(19): siRNA sense strand
gaaagugguuauuguacag

SEQ ID NO: 125540 - RNA, 19 nt, Homo sapiens
  misc_RNA (1)...(19): siRNA sense strand
caaagaagcggcaagaagu

SEQ ID NO: 125541 - RNA, 19 nt, Homo sapiens
  misc_RNA (1)...(19): siRNA sense strand
uaaaggaaaguaucucuga

SEQ ID NO: 125542 - RNA, 19 nt, Homo sapiens
  misc_RNA (1)...(19): siRNA sense strand
gagggagccugucacauca

SEQ ID NO: 125543 - RNA, 19 nt, Homo sapiens
  misc_RNA (1)...(19): siRNA sense strand
gcaugaagaagaauaucua

SEQ ID NO: 125544 - RNA, 19 nt, Homo sapiens
  misc_RNA (1)...(19): siRNA sense strand
gaaggaacucuugguguaa

SEQ ID NO: 125545 - RNA, 19 nt, Homo sapiens
  misc_RNA (1)...(19): siRNA sense strand
agaggcagaugaucgagua

SEQ ID NO: 125546 - RNA, 19 nt, Homo sapiens
  misc_RNA (1)...(19): siRNA sense strand
gcucagggaaggaauguuu

SEQ ID NO: 125547 - RNA, 19 nt, Homo sapiens
  misc_RNA (1)...(19): siRNA sense strand
ugagcgaauuccugauaua

SEQ ID NO: 125548 - RNA, 19 nt, Homo sapiens
  misc_RNA (1)...(19): siRNA sense strand
gcuuguaucuacuucuauu

SEQ ID NO: 125549 - RNA, 19 nt, Homo sapiens
  misc_RNA (1)...(19): siRNA sense strand
ggacagagagguuauuugc

SEQ ID NO: 125550 - RNA, 19 nt, Homo sapiens
  misc_RNA (1)...(19): siRNA sense strand
ggaguucaguacuguagga

SEQ ID NO: 125551 - RNA, 19 nt, Homo sapiens
  misc_RNA (1)...(19): siRNA sense strand
uaagaagggccaaauugaa

SEQ ID NO: 125552 - RNA, 19 nt, Homo sapiens
  misc_RNA (1)...(19): siRNA sense strand
cgaauucucuggguugaug

SEQ ID NO: 125553 - RNA, 19 nt, Homo sapiens
  misc_RNA (1)...(19): siRNA sense strand
gaaguuaugaaauggaaug

SEQ ID NO: 125554 - RNA, 19 nt, Homo sapiens
  misc_RNA (1)...(19): siRNA sense strand
gauaauggacagagagguu

SEQ ID NO: 125555 - RNA, 19 nt, Homo sapiens
  misc_RNA (1)...(19): siRNA sense strand
caguagcuuucccuaauuu

SEQ ID NO: 125556 - RNA, 19 nt, Homo sapiens
  misc_RNA (1)...(19): siRNA sense strand
gcauaaaacuaccucuaaa

SEQ ID NO: 125557 - RNA, 19 nt, Homo sapiens
  misc_RNA (1)...(19): siRNA sense strand
gugcuuguaucuacuucua

SEQ ID NO: 125558 - RNA, 19 nt, Homo sapiens
  misc_RNA (1)...(19): siRNA sense strand
guuaugaaauggaauggau

SEQ ID NO: 125559 - RNA, 19 nt, Homo sapiens
  misc_RNA (1)...(19): siRNA sense strand
caaaauacccuuggaguaa

SEQ ID NO: 125560 - RNA, 19 nt, Homo sapiens
  misc_RNA (1)...(19): siRNA sense strand
ucaguagcuuucccuaauu

SEQ ID NO: 125561 - RNA, 19 nt, Homo sapiens
  misc_RNA (1)...(19): siRNA sense strand
ggaccuggugguucauaua

SEQ ID NO: 125562 - RNA, 19 nt, Homo sapiens
  misc_RNA (1)...(19): siRNA sense strand
guaggaggauggguaucua

SEQ ID NO: 125563 - RNA, 19 nt, Homo sapiens
  misc_RNA (1)...(19): siRNA sense strand
gaugauguaguuaagauug

SEQ ID NO: 125564 - RNA, 19 nt, Homo sapiens
  misc_RNA (1)...(19): siRNA sense strand
gagacuuggcuuuggaaua

SEQ ID NO: 125565 - RNA, 19 nt, Homo sapiens
  misc_RNA (1)...(19): siRNA sense strand
ggacaagaguuggaaagac

SEQ ID NO: 125566 - RNA, 19 nt, Homo sapiens
  misc_RNA (1)...(19): siRNA sense strand
gaagcaauggcuaaaggaa

SEQ ID NO: 125567 - RNA, 19 nt, Homo sapiens
  misc_RNA (1)...(19): siRNA sense strand
gcaaagagaaggguguuca

SEQ ID NO: 125568 - RNA, 19 nt, Homo sapiens
  misc_RNA (1)...(19): siRNA sense strand
agacuuggcuuuggaauac

SEQ ID NO: 125569 - RNA, 19 nt, Homo sapiens
  misc_RNA (1)...(19): siRNA sense strand
ccaaaaguauggcucagua

SEQ ID NO: 125570 - RNA, 19 nt, Homo sapiens
  misc_RNA (1)...(19): siRNA sense strand
ucuaaagcauccuuaaauc

SEQ ID NO: 125571 - RNA, 19 nt, Homo sapiens
  misc_RNA (1)...(19): siRNA sense strand
acaagggaaugcaaagaga

SEQ ID NO: 125572 - RNA, 19 nt, Homo sapiens
  misc_RNA (1)...(19): siRNA sense strand
guuggcagcuggagaagau

SEQ ID NO: 125573 - RNA, 19 nt, Homo sapiens
  misc_RNA (1)...(19): siRNA sense strand
gaccuggugguucauauaa

SEQ ID NO: 125574 - RNA, 19 nt, Homo sapiens
  misc_RNA (1)...(19): siRNA sense strand
ugauacaccuccuucuguu

SEQ ID NO: 125575 - RNA, 19 nt, Homo sapiens
  misc_RNA (1)...(19): siRNA sense strand
aggaguagccuguuuaaga

SEQ ID NO: 125576 - RNA, 19 nt, Homo sapiens
  misc_RNA (1)...(19): siRNA sense strand
ugaagaagaauaucuaugg

SEQ ID NO: 125577 - RNA, 19 nt, Homo sapiens
  misc_RNA (1)...(19): siRNA sense strand
gcagaugagacaagaacaa

SEQ ID NO: 125578 - RNA, 19 nt, Homo sapiens
  misc_RNA (1)...(19): siRNA sense strand
aaagcauccuuaaauccua

SEQ ID NO: 125579 - RNA, 19 nt, Homo sapiens
  misc_RNA (1)...(19): siRNA sense strand
guagccacauuacuguuug

SEQ ID NO: 125580 - RNA, 19 nt, Homo sapiens
  misc_RNA (1)...(19): siRNA sense strand
ccaaaucagcuaaguguag

SEQ ID NO: 125581 - RNA, 19 nt, Homo sapiens
  misc_RNA (1)...(19): siRNA sense strand
caaggaguagccuguuuaa

SEQ ID NO: 125582 - RNA, 19 nt, Homo sapiens
  misc_RNA (1)...(19): siRNA sense strand
acaaggaguagccuguuua

SEQ ID NO: 125583 - RNA, 19 nt, Homo sapiens
  misc_RNA (1)...(19): siRNA sense strand
caauaagaagggccaaauu

SEQ ID NO: 125584 - RNA, 19 nt, Homo sapiens
  misc_RNA (1)...(19): siRNA sense strand
cauaacaggacaagaguug

SEQ ID NO: 125585 - RNA, 19 nt, Homo sapiens
  misc_RNA (1)...(19): siRNA sense strand
gcauggguuuaccaacauu

SEQ ID NO: 125586 - RNA, 19 nt, Homo sapiens
  misc_RNA (1)...(19): siRNA sense strand
gcaaguuacggaagcaaug

SEQ ID NO: 125587 - RNA, 19 nt, Homo sapiens
  misc_RNA (1)...(19): siRNA sense strand
aagaaauccuugcuaaugg

SEQ ID NO: 125588 - RNA, 19 nt, Homo sapiens
  misc_RNA (1)...(19): siRNA sense strand
aauaagaagggccaaauug

SEQ ID NO: 125589 - RNA, 19 nt, Homo sapiens
  misc_RNA (1)...(19): siRNA sense strand
cuucaugaccuuaaagaaa

SEQ ID NO: 125590 - RNA, 19 nt, Homo sapiens
  misc_RNA (1)...(19): siRNA sense strand
ggguugaugagaacaauuu

SEQ ID NO: 125591 - RNA, 19 nt, Homo sapiens
  misc_RNA (1)...(19): siRNA sense strand
ccauggagugggcaaguua

SEQ ID NO: 125592 - RNA, 19 nt, Homo sapiens
  misc_RNA (1)...(19): siRNA sense strand
agaaauccuugcuaaugga

SEQ ID NO: 125593 - RNA, 19 nt, Homo sapiens
  misc_RNA (1)...(19): siRNA sense strand
gagaaggguguucaguuug

SEQ ID NO: 125594 - RNA, 19 nt, Homo sapiens
  misc_RNA (1)...(19): siRNA sense strand
gaauaacaagggaaugcaa

SEQ ID NO: 125595 - RNA, 19 nt, Homo sapiens
  misc_RNA (1)...(19): siRNA sense strand
ccaaagaagcggcaagaag

SEQ ID NO: 125596 - RNA, 19 nt, Homo sapiens
  misc_RNA (1)...(19): siRNA sense strand
agaaagugguuauuguaca

SEQ ID NO: 125597 - RNA, 19 nt, Homo sapiens
  misc_RNA (1)...(19): siRNA sense strand
acaacaagcaguuucaguu

SEQ ID NO: 125598 - RNA, 19 nt, Homo sapiens
  misc_RNA (1)...(19): siRNA sense strand
ugguagaucucuguagaaa

SEQ ID NO: 125599 - RNA, 19 nt, Homo sapiens
  misc_RNA (1)...(19): siRNA sense strand
uggcauggguuuaccaaca

SEQ ID NO: 125600 - RNA, 19 nt, Homo sapiens
  misc_RNA (1)...(19): siRNA sense strand
caugggaucugaaggaacu

SEQ ID NO: 125601 - RNA, 19 nt, Homo sapiens
  misc_RNA (1)...(19): siRNA sense strand
gaugaucgaguauuuagag

SEQ ID NO: 125602 - RNA, 19 nt, Homo sapiens
  misc_RNA (1)...(19): siRNA sense strand
cucaguagcuuucccuaau

SEQ ID NO: 125603 - RNA, 19 nt, Homo sapiens
  misc_RNA (1)...(19): siRNA sense strand
gaagaauaucuauggcaau

SEQ ID NO: 125604 - RNA, 19 nt, Homo sapiens
  misc_RNA (1)...(19): siRNA sense strand
agaagauaauggacagaga

SEQ ID NO: 125605 - RNA, 19 nt, Homo sapiens
  misc_RNA (1)...(19): siRNA sense strand
gggaggcucugaguaccaa

SEQ ID NO: 125606 - RNA, 19 nt, Homo sapiens
  misc_RNA (1)...(19): siRNA sense strand
gcucaguagcuuucccuaa

SEQ ID NO: 125607 - RNA, 19 nt, Homo sapiens
  misc_RNA (1)...(19): siRNA sense strand
ucgaggaccuggugguuca

SEQ ID NO: 125608 - RNA, 19 nt, Homo sapiens
  misc_RNA (1)...(19): siRNA sense strand
gaaccaagagucugaauuc

SEQ ID NO: 125609 - RNA, 19 nt, Homo sapiens
  misc_RNA (1)...(19): siRNA sense strand
ggguagagcuggaagacuu

SEQ ID NO: 125610 - RNA, 19 nt, Homo sapiens
  misc_RNA (1)...(19): siRNA sense strand
uggaagacuuuaaugguaa

SEQ ID NO: 125611 - RNA, 19 nt, Homo sapiens
  misc_RNA (1)...(19): siRNA sense strand
cuggaagacuuuaauggua

SEQ ID NO: 125612 - RNA, 19 nt, Homo sapiens
  misc_RNA (1)...(19): siRNA sense strand
ccacaaauauggcauugac

SEQ ID NO: 125613 - RNA, 19 nt, Homo sapiens
  misc_RNA (1)...(19): siRNA sense strand
ggugguaugcauccuguua

SEQ ID NO: 125614 - RNA, 19 nt, Homo sapiens
  misc_RNA (1)...(19): siRNA sense strand
gagaauuugcaccagcuua

SEQ ID NO: 125615 - RNA, 19 nt, Homo sapiens
  misc_RNA (1)...(19): siRNA sense strand
gcggcuggcugguguuuca

SEQ ID NO: 125616 - RNA, 19 nt, Homo sapiens
  misc_RNA (1)...(19): siRNA sense strand
ggaaccaagagucugaauu

SEQ ID NO: 125617 - RNA, 19 nt, Homo sapiens
  misc_RNA (1)...(19): siRNA sense strand
ggaggcccuuuaccaccua

SEQ ID NO: 125618 - RNA, 19 nt, Homo sapiens
  misc_RNA (1)...(19): siRNA sense strand
gaaacugccgggagcuguu

SEQ ID NO: 125619 - RNA, 19 nt, Homo sapiens
  misc_RNA (1)...(19): siRNA sense strand
ggaugguucuguggauuuc

SEQ ID NO: 125620 - RNA, 19 nt, Homo sapiens
  misc_RNA (1)...(19): siRNA sense strand
ggaagacuuuaaugguaac

SEQ ID NO: 125621 - RNA, 19 nt, Homo sapiens
  misc_RNA (1)...(19): siRNA sense strand
gcccacaaauauggcauug

SEQ ID NO: 125622 - RNA, 19 nt, Homo sapiens
  misc_RNA (1)...(19): siRNA sense strand
cuaugacgcugaccacgau

SEQ ID NO: 125623 - RNA, 19 nt, Homo sapiens
  misc_RNA (1)...(19): siRNA sense strand
gagcuggaagacuuuaaug

SEQ ID NO: 125624 - RNA, 19 nt, Homo sapiens
  misc_RNA (1)...(19): siRNA sense strand
ucggugagguagaccacua

SEQ ID NO: 125625 - RNA, 19 nt, Homo sapiens
  misc_RNA (1)...(19): siRNA sense strand
ccaggaugguucuguggau

SEQ ID NO: 125626 - RNA, 19 nt, Homo sapiens
  misc_RNA (1)...(19): siRNA sense strand
gaccacgauucaagcaaca

SEQ ID NO: 125627 - RNA, 19 nt, Homo sapiens
  misc_RNA (1)...(19): siRNA sense strand
ucccggagcuccaggaagu

SEQ ID NO: 125628 - RNA, 19 nt, Homo sapiens
  misc_RNA (1)...(19): siRNA sense strand
caggaugguucuguggauu

SEQ ID NO: 125629 - RNA, 19 nt, Homo sapiens
  misc_RNA (1)...(19): siRNA sense strand
gcuggaagacuuuaauggu

SEQ ID NO: 125630 - RNA, 19 nt, Homo sapiens
  misc_RNA (1)...(19): siRNA sense strand
gguagagcuggaagacuuu

SEQ ID NO: 125631 - RNA, 19 nt, Homo sapiens
  misc_RNA (1)...(19): siRNA sense strand
guagagcuggaagacuuua

SEQ ID NO: 125632 - RNA, 19 nt, Homo sapiens
  misc_RNA (1)...(19): siRNA sense strand
aauucuggcugggaaauga

SEQ ID NO: 125633 - RNA, 19 nt, Homo sapiens
  misc_RNA (1)...(19): siRNA sense strand
cacagugggaggcccuuua

SEQ ID NO: 125634 - RNA, 19 nt, Homo sapiens
  misc_RNA (1)...(19): siRNA sense strand
guggauuucuuccgcucuu

SEQ ID NO: 125635 - RNA, 19 nt, Homo sapiens
  misc_RNA (1)...(19): siRNA sense strand
aaaucucaauggucgcuau

SEQ ID NO: 125636 - RNA, 19 nt, Homo sapiens
  misc_RNA (1)...(19): siRNA sense strand
uguuaccgaucaaaucuca

SEQ ID NO: 125637 - RNA, 19 nt, Homo sapiens
  misc_RNA (1)...(19): siRNA sense strand
ccgaucaaaucucaauggu

SEQ ID NO: 125638 - RNA, 19 nt, Homo sapiens
  misc_RNA (1)...(19): siRNA sense strand
cacggugccuggugguaug

SEQ ID NO: 125639 - RNA, 19 nt, Homo sapiens
  misc_RNA (1)...(19): siRNA sense strand
ccgcaggguucggaugaug

SEQ ID NO: 125640 - RNA, 19 nt, Homo sapiens
  misc_RNA (1)...(19): siRNA sense strand
gaauucuggcugggaaaug

SEQ ID NO: 125641 - RNA, 19 nt, Homo sapiens
  misc_RNA (1)...(19): siRNA sense strand
ucucaauggucgcuaugca

SEQ ID NO: 125642 - RNA, 19 nt, Homo sapiens
  misc_RNA (1)...(19): siRNA sense strand
gaaccaagagucugaauuc

SEQ ID NO: 125643 - RNA, 19 nt, Homo sapiens
  misc_RNA (1)...(19): siRNA sense strand
ggguagagcuggaagacuu

SEQ ID NO: 125644 - RNA, 19 nt, Homo sapiens
  misc_RNA (1)...(19): siRNA sense strand
uggaagacuuuaaugguaa

SEQ ID NO: 125645 - RNA, 19 nt, Homo sapiens
  misc_RNA (1)...(19): siRNA sense strand
cuggaagacuuuaauggua

SEQ ID NO: 125646 - RNA, 19 nt, Homo sapiens
  misc_RNA (1)...(19): siRNA sense strand
ccacaaauauggcauugac

SEQ ID NO: 125647 - RNA, 19 nt, Homo sapiens
  misc_RNA (1)...(19): siRNA sense strand
ggugguaugcauccuguua

SEQ ID NO: 125648 - RNA, 19 nt, Homo sapiens
  misc_RNA (1)...(19): siRNA sense strand
gagaauuugcaccagcuua

SEQ ID NO: 125649 - RNA, 19 nt, Homo sapiens
  misc_RNA (1)...(19): siRNA sense strand
gcggcuggcugguguuuca

SEQ ID NO: 125650 - RNA, 19 nt, Homo sapiens
  misc_RNA (1)...(19): siRNA sense strand
ggaaccaagagucugaauu

SEQ ID NO: 125651 - RNA, 19 nt, Homo sapiens
  misc_RNA (1)...(19): siRNA sense strand
ggaggcccuuuaccaccua

SEQ ID NO: 125652 - RNA, 19 nt, Homo sapiens
  misc_RNA (1)...(19): siRNA sense strand
gaaacugccgggagcuguu

SEQ ID NO: 125653 - RNA, 19 nt, Homo sapiens
  misc_RNA (1)...(19): siRNA sense strand
ggaugguucuguggauuuc

SEQ ID NO: 125654 - RNA, 19 nt, Homo sapiens
  misc_RNA (1)...(19): siRNA sense strand
ggaagacuuuaaugguaac

SEQ ID NO: 125655 - RNA, 19 nt, Homo sapiens
  misc_RNA (1)...(19): siRNA sense strand
gcccacaaauauggcauug

SEQ ID NO: 125656 - RNA, 19 nt, Homo sapiens
  misc_RNA (1)...(19): siRNA sense strand
cuaugacgcugaccacgau

SEQ ID NO: 125657 - RNA, 19 nt, Homo sapiens
  misc_RNA (1)...(19): siRNA sense strand
gagcuggaagacuuuaaug

SEQ ID NO: 125658 - RNA, 19 nt, Homo sapiens
  misc_RNA (1)...(19): siRNA sense strand
ucggugagguagaccacua

SEQ ID NO: 125659 - RNA, 19 nt, Homo sapiens
  misc_RNA (1)...(19): siRNA sense strand
ccaggaugguucuguggau

SEQ ID NO: 125660 - RNA, 19 nt, Homo sapiens
  misc_RNA (1)...(19): siRNA sense strand
gaccacgauucaagcaaca

SEQ ID NO: 125661 - RNA, 19 nt, Homo sapiens
  misc_RNA (1)...(19): siRNA sense strand
ucccggagcuccaggaagu

SEQ ID NO: 125662 - RNA, 19 nt, Homo sapiens
  misc_RNA (1)...(19): siRNA sense strand
caggaugguucuguggauu

SEQ ID NO: 125663 - RNA, 19 nt, Homo sapiens
  misc_RNA (1)...(19): siRNA sense strand
gcuggaagacuuuaauggu

SEQ ID NO: 125664 - RNA, 19 nt, Homo sapiens
  misc_RNA (1)...(19): siRNA sense strand
gguagagcuggaagacuuu

SEQ ID NO: 125665 - RNA, 19 nt, Homo sapiens
  misc_RNA (1)...(19): siRNA sense strand
guagagcuggaagacuuua

SEQ ID NO: 125666 - RNA, 19 nt, Homo sapiens
  misc_RNA (1)...(19): siRNA sense strand
aauucuggcugggaaauga

SEQ ID NO: 125667 - RNA, 19 nt, Homo sapiens
  misc_RNA (1)...(19): siRNA sense strand
cacagugggaggcccuuua

SEQ ID NO: 125668 - RNA, 19 nt, Homo sapiens
  misc_RNA (1)...(19): siRNA sense strand
guggauuucuuccgcucuu

SEQ ID NO: 125669 - RNA, 19 nt, Homo sapiens
  misc_RNA (1)...(19): siRNA sense strand
aaaucucaauggucgcuau

SEQ ID NO: 125670 - RNA, 19 nt, Homo sapiens
  misc_RNA (1)...(19): siRNA sense strand
uguuaccgaucaaaucuca

SEQ ID NO: 125671 - RNA, 19 nt, Homo sapiens
  misc_RNA (1)...(19): siRNA sense strand
ccgaucaaaucucaauggu

SEQ ID NO: 125672 - RNA, 19 nt, Homo sapiens
  misc_RNA (1)...(19): siRNA sense strand
cacggugccuggugguaug

SEQ ID NO: 125673 - RNA, 19 nt, Homo sapiens
  misc_RNA (1)...(19): siRNA sense strand
ccgcaggguucggaugaug

SEQ ID NO: 125674 - RNA, 19 nt, Homo sapiens
  misc_RNA (1)...(19): siRNA sense strand
gaauucuggcugggaaaug

SEQ ID NO: 125675 - RNA, 19 nt, Homo sapiens
  misc_RNA (1)...(19): siRNA sense strand
ucucaauggucgcuaugca

SEQ ID NO: 125676 - RNA, 19 nt, Homo sapiens
  misc_RNA (1)...(19): siRNA sense strand
ggagaaaucuggcaucaua

SEQ ID NO: 125677 - RNA, 19 nt, Homo sapiens
  misc_RNA (1)...(19): siRNA sense strand
gaaacugaaugaaguaaug

SEQ ID NO: 125678 - RNA, 19 nt, Homo sapiens
  misc_RNA (1)...(19): siRNA sense strand
ggacaaagccaucaaggaa

SEQ ID NO: 125679 - RNA, 19 nt, Homo sapiens
  misc_RNA (1)...(19): siRNA sense strand
ggaauuagugguccaguua

SEQ ID NO: 125680 - RNA, 19 nt, Homo sapiens
  misc_RNA (1)...(19): siRNA sense strand
ggucguggauucacagaua

SEQ ID NO: 125681 - RNA, 19 nt, Homo sapiens
  misc_RNA (1)...(19): siRNA sense strand
ccaaagauguugugaggaa

SEQ ID NO: 125682 - RNA, 19 nt, Homo sapiens
  misc_RNA (1)...(19): siRNA sense strand
guaaagaaaucuacucaag

SEQ ID NO: 125683 - RNA, 19 nt, Homo sapiens
  misc_RNA (1)...(19): siRNA sense strand
gaagcaagccagccaagua

SEQ ID NO: 125684 - RNA, 19 nt, Homo sapiens
  misc_RNA (1)...(19): siRNA sense strand
ggagagcuauuucacagaa

SEQ ID NO: 125685 - RNA, 19 nt, Homo sapiens
  misc_RNA (1)...(19): siRNA sense strand
caaaggauaugcgaagaaa

SEQ ID NO: 125686 - RNA, 19 nt, Homo sapiens
  misc_RNA (1)...(19): siRNA sense strand
gcccgacucuuaauuguaa

SEQ ID NO: 125687 - RNA, 19 nt, Homo sapiens
  misc_RNA (1)...(19): siRNA sense strand
ccaaacauaguucagauua

SEQ ID NO: 125688 - RNA, 19 nt, Homo sapiens
  misc_RNA (1)...(19): siRNA sense strand
gcaggaggcuuggaaguau

SEQ ID NO: 125689 - RNA, 19 nt, Homo sapiens
  misc_RNA (1)...(19): siRNA sense strand
gaaugaagaugagaaacug

SEQ ID NO: 125690 - RNA, 19 nt, Homo sapiens
  misc_RNA (1)...(19): siRNA sense strand
ugaagcaggugauagaaga

SEQ ID NO: 125691 - RNA, 19 nt, Homo sapiens
  misc_RNA (1)...(19): siRNA sense strand
gcugggagcuggaauuagu

SEQ ID NO: 125692 - RNA, 19 nt, Homo sapiens
  misc_RNA (1)...(19): siRNA sense strand
gaggaagaguggagucaga

SEQ ID NO: 125693 - RNA, 19 nt, Homo sapiens
  misc_RNA (1)...(19): siRNA sense strand
ccaguuagagucuguguaa

SEQ ID NO: 125694 - RNA, 19 nt, Homo sapiens
  misc_RNA (1)...(19): siRNA sense strand
gcggcacugucacuuguua

SEQ ID NO: 125695 - RNA, 19 nt, Homo sapiens
  misc_RNA (1)...(19): siRNA sense strand
uagagucuguguaaagaaa

SEQ ID NO: 125696 - RNA, 19 nt, Homo sapiens
  misc_RNA (1)...(19): siRNA sense strand
gauaaaguagaucgacuaa

SEQ ID NO: 125697 - RNA, 19 nt, Homo sapiens
  misc_RNA (1)...(19): siRNA sense strand
caccgacgcccuacacuua

SEQ ID NO: 125698 - RNA, 19 nt, Homo sapiens
  misc_RNA (1)...(19): siRNA sense strand
gaaggcaucagaaggagaa

SEQ ID NO: 125699 - RNA, 19 nt, Homo sapiens
  misc_RNA (1)...(19): siRNA sense strand
ggaaugcaaacuccuaaga

SEQ ID NO: 125700 - RNA, 19 nt, Homo sapiens
  misc_RNA (1)...(19): siRNA sense strand
guuagagucuguguaaaga

SEQ ID NO: 125701 - RNA, 19 nt, Homo sapiens
  misc_RNA (1)...(19): siRNA sense strand
gcaaagaaggcaucagaag

SEQ ID NO: 125702 - RNA, 19 nt, Homo sapiens
  misc_RNA (1)...(19): siRNA sense strand
ccaccgaggcccuggauaa

SEQ ID NO: 125703 - RNA, 19 nt, Homo sapiens
  misc_RNA (1)...(19): siRNA sense strand
gcgcaaagaaggcaucaga

SEQ ID NO: 125704 - RNA, 19 nt, Homo sapiens
  misc_RNA (1)...(19): siRNA sense strand
ccaaguaacaaagcagaua

SEQ ID NO: 125705 - RNA, 19 nt, Homo sapiens
  misc_RNA (1)...(19): siRNA sense strand
gcaaaccacgucccacgaa

SEQ ID NO: 125706 - RNA, 19 nt, Homo sapiens
  misc_RNA (1)...(19): siRNA sense strand
gaugagaaacugaaugaag

SEQ ID NO: 125707 - RNA, 19 nt, Homo sapiens
  misc_RNA (1)...(19): siRNA sense strand
aaagaaggcaucagaagga

SEQ ID NO: 125708 - RNA, 19 nt, Homo sapiens
  misc_RNA (1)...(19): siRNA sense strand
caggaggcuuggaaguaua

SEQ ID NO: 125709 - RNA, 19 nt, Homo sapiens
  misc_RNA (1)...(19): siRNA sense strand
gaagaugagaaacugaaug

SEQ ID NO: 125710 - RNA, 19 nt, Homo sapiens
  misc_RNA (1)...(19): siRNA sense strand
gauaugcgaagaaagauca

SEQ ID NO: 125711 - RNA, 19 nt, Homo sapiens
  misc_RNA (1)...(19): siRNA sense strand
gacaaagccaucaaggaaa

SEQ ID NO: 125712 - RNA, 19 nt, Homo sapiens
  misc_RNA (1)...(19): siRNA sense strand
ccgaggcccuggauaaugu

SEQ ID NO: 125713 - RNA, 19 nt, Homo sapiens
  misc_RNA (1)...(19): siRNA sense strand
caccggcacuuuacagaga

SEQ ID NO: 125714 - RNA, 19 nt, Homo sapiens
  misc_RNA (1)...(19): siRNA sense strand
gcccuacacuuacaacaag

SEQ ID NO: 125715 - RNA, 19 nt, Homo sapiens
  misc_RNA (1)...(19): siRNA sense strand
uggcagaaauugugaagca

SEQ ID NO: 125716 - RNA, 19 nt, Homo sapiens
  misc_RNA (1)...(19): siRNA sense strand
ugcaaacuccuaagagaua

SEQ ID NO: 125717 - RNA, 19 nt, Homo sapiens
  misc_RNA (1)...(19): siRNA sense strand
ggaagcuccugaaggucaa

SEQ ID NO: 125718 - RNA, 19 nt, Homo sapiens
  misc_RNA (1)...(19): siRNA sense strand
aaugcaaacuccuaagaga

SEQ ID NO: 125719 - RNA, 19 nt, Homo sapiens
  misc_RNA (1)...(19): siRNA sense strand
gagccgaggauuccaaugu

SEQ ID NO: 125720 - RNA, 19 nt, Homo sapiens
  misc_RNA (1)...(19): siRNA sense strand
ggagagcgacauggacaaa

SEQ ID NO: 125721 - RNA, 19 nt, Homo sapiens
  misc_RNA (1)...(19): siRNA sense strand
caaaccacgucccacgaau

SEQ ID NO: 125722 - RNA, 19 nt, Homo sapiens
  misc_RNA (1)...(19): siRNA sense strand
gagagaaugaagaugagaa

SEQ ID NO: 125723 - RNA, 19 nt, Homo sapiens
  misc_RNA (1)...(19): siRNA sense strand
uggauucacagauaaagua

SEQ ID NO: 125724 - RNA, 19 nt, Homo sapiens
  misc_RNA (1)...(19): siRNA sense strand
gagaaacugaaugaaguaa

SEQ ID NO: 125725 - RNA, 19 nt, Homo sapiens
  misc_RNA (1)...(19): siRNA sense strand
gagguacgucugcacauga

SEQ ID NO: 125726 - RNA, 19 nt, Homo sapiens
  misc_RNA (1)...(19): siRNA sense strand
ggaaguauaaccgggaaug

SEQ ID NO: 125727 - RNA, 19 nt, Homo sapiens
  misc_RNA (1)...(19): siRNA sense strand
ugagaaacugaaugaagua

SEQ ID NO: 125728 - RNA, 19 nt, Homo sapiens
  misc_RNA (1)...(19): siRNA sense strand
ccagugaaguugugugacu

SEQ ID NO: 125729 - RNA, 19 nt, Homo sapiens
  misc_RNA (1)...(19): siRNA sense strand
aagcaagccagccaaguaa

SEQ ID NO: 125730 - RNA, 19 nt, Homo sapiens
  misc_RNA (1)...(19): siRNA sense strand
gccgaggauuccaauguug

SEQ ID NO: 125731 - RNA, 19 nt, Homo sapiens
  misc_RNA (1)...(19): siRNA sense strand
cugcucagcugaugaugga

SEQ ID NO: 125732 - RNA, 19 nt, Homo sapiens
  misc_RNA (1)...(19): siRNA sense strand
acaaagccaucaaggaaac

SEQ ID NO: 125733 - RNA, 19 nt, Homo sapiens
  misc_RNA (1)...(19): siRNA sense strand
gcaaacuccuaagagauac

SEQ ID NO: 125734 - RNA, 19 nt, Homo sapiens
  misc_RNA (1)...(19): siRNA sense strand
aagaugagaaacugaauga

SEQ ID NO: 125735 - RNA, 19 nt, Homo sapiens
  misc_RNA (1)...(19): siRNA sense strand
aaggauaugcgaagaaaga

SEQ ID NO: 125736 - RNA, 19 nt, Homo sapiens
  misc_RNA (1)...(19): siRNA sense strand
ccaaaggauaugcgaagaa

SEQ ID NO: 125737 - RNA, 19 nt, Homo sapiens
  misc_RNA (1)...(19): siRNA sense strand
guacuggaggcgcaaagaa

SEQ ID NO: 125738 - RNA, 19 nt, Homo sapiens
  misc_RNA (1)...(19): siRNA sense strand
guucaccccuuauuaugua

SEQ ID NO: 125739 - RNA, 19 nt, Homo sapiens
  misc_RNA (1)...(19): siRNA sense strand
gcaagccagccaaguaaca

SEQ ID NO: 125740 - RNA, 19 nt, Homo sapiens
  misc_RNA (1)...(19): siRNA sense strand
gaagaguggagucagaucu

SEQ ID NO: 125741 - RNA, 19 nt, Homo sapiens
  misc_RNA (1)...(19): siRNA sense strand
ggacaaggcagugguugca

SEQ ID NO: 125742 - RNA, 19 nt, Homo sapiens
  misc_RNA (1)...(19): siRNA sense strand
gauaaugugcugccuucug

SEQ ID NO: 125743 - RNA, 19 nt, Homo sapiens
  misc_RNA (1)...(19): siRNA sense strand
ggucaaaccggaggagaga

SEQ ID NO: 125744 - RNA, 19 nt, Homo sapiens
  misc_RNA (1)...(19): siRNA sense strand
agagauggccaaagauguu

SEQ ID NO: 125745 - RNA, 19 nt, Homo sapiens
  misc_RNA (1)...(19): siRNA sense strand
ccacacacccaaacauagu

SEQ ID NO: 125746 - RNA, 19 nt, Homo sapiens
  misc_RNA (1)...(19): siRNA sense strand
gaaugcaaacuccuaagag

SEQ ID NO: 125747 - RNA, 19 nt, Homo sapiens
  misc_RNA (1)...(19): siRNA sense strand
ugagguacgucugcacaug

SEQ ID NO: 125748 - RNA, 19 nt, Homo sapiens
  misc_RNA (1)...(19): siRNA sense strand
gacuaaaacuggcagaaau

SEQ ID NO: 125749 - RNA, 19 nt, Homo sapiens
  misc_RNA (1)...(19): siRNA sense strand
augagaaacugaaugaagu

SEQ ID NO: 125750 - RNA, 19 nt, Homo sapiens
  misc_RNA (1)...(19): siRNA sense strand
gaugugauugcucagugua

SEQ ID NO: 125751 - RNA, 19 nt, Homo sapiens
  misc_RNA (1)...(19): siRNA sense strand
gagaauggagccgaggauu

SEQ ID NO: 125752 - RNA, 19 nt, Homo sapiens
  misc_RNA (1)...(19): siRNA sense strand
aaacaccacagccggacua

SEQ ID NO: 125753 - RNA, 19 nt, Homo sapiens
  misc_RNA (1)...(19): siRNA sense strand
gagagcuauuucacagaau

SEQ ID NO: 125754 - RNA, 19 nt, Homo sapiens
  misc_RNA (1)...(19): siRNA sense strand
gucguggauucacagauaa

SEQ ID NO: 125755 - RNA, 19 nt, Homo sapiens
  misc_RNA (1)...(19): siRNA sense strand
ucagagauggccaaagaug

SEQ ID NO: 125756 - RNA, 19 nt, Homo sapiens
  misc_RNA (1)...(19): siRNA sense strand
caaguaacaaagcagauag

SEQ ID NO: 125757 - RNA, 19 nt, Homo sapiens
  misc_RNA (1)...(19): siRNA sense strand
gaucaugacaggcaguuuu

SEQ ID NO: 125758 - RNA, 19 nt, Homo sapiens
  misc_RNA (1)...(19): siRNA sense strand
aaggagaaaucuggcauca

SEQ ID NO: 125759 - RNA, 19 nt, Homo sapiens
  misc_RNA (1)...(19): siRNA sense strand
guugugugacuuuggauuu

SEQ ID NO: 125760 - RNA, 19 nt, Homo sapiens
  misc_RNA (1)...(19): siRNA sense strand
guuaaacauugcgcacaga

SEQ ID NO: 125761 - RNA, 19 nt, Homo sapiens
  misc_RNA (1)...(19): siRNA sense strand
gccggacuaucccaaagga

SEQ ID NO: 125762 - RNA, 19 nt, Homo sapiens
  misc_RNA (1)...(19): siRNA sense strand
ugugauugcucaguguauu

SEQ ID NO: 125763 - RNA, 19 nt, Homo sapiens
  misc_RNA (1)...(19): siRNA sense strand
ggcagugguugcaggaauc

SEQ ID NO: 125764 - RNA, 19 nt, Homo sapiens
  misc_RNA (1)...(19): siRNA sense strand
gaccaccccuggcucaauu

SEQ ID NO: 125765 - RNA, 19 nt, Homo sapiens
  misc_RNA (1)...(19): siRNA sense strand
gcgaagaaagaucaugaca

SEQ ID NO: 125766 - RNA, 19 nt, Homo sapiens
  misc_RNA (1)...(19): siRNA sense strand
gagucuguguaaagaaauc

SEQ ID NO: 125767 - RNA, 19 nt, Homo sapiens
  misc_RNA (1)...(19): siRNA sense strand
aaacuggcagaaauuguga

SEQ ID NO: 125768 - RNA, 19 nt, Homo sapiens
  misc_RNA (1)...(19): siRNA sense strand
agauaaaguagaucgacua

SEQ ID NO: 125769 - RNA, 19 nt, Homo sapiens
  misc_RNA (1)...(19): siRNA sense strand
agagaaugaagaugagaaa

SEQ ID NO: 125770 - RNA, 19 nt, Homo sapiens
  misc_RNA (1)...(19): siRNA sense strand
ugcuaacaguguccaguuu

SEQ ID NO: 125771 - RNA, 19 nt, Homo sapiens
  misc_RNA (1)...(19): siRNA sense strand
guauaaccgggaaugcaaa

SEQ ID NO: 125772 - RNA, 19 nt, Homo sapiens
  misc_RNA (1)...(19): siRNA sense strand
ugccacacacccaaacaua

SEQ ID NO: 125773 - RNA, 19 nt, Homo sapiens
  misc_RNA (1)...(19): siRNA sense strand
gagauggccaaagauguug

SEQ ID NO: 125774 - RNA, 19 nt, Homo sapiens
  misc_RNA (1)...(19): siRNA sense strand
gaauuagugguccaguuag

SEQ ID NO: 125775 - RNA, 19 nt, Homo sapiens
  misc_RNA (1)...(19): siRNA sense strand
gcuaacaguguccaguuuc

SEQ ID NO: 125776 - RNA, 19 nt, Homo sapiens
  misc_RNA (1)...(19): siRNA sense strand
ggagaaaucuggcaucaua

SEQ ID NO: 125777 - RNA, 19 nt, Homo sapiens
  misc_RNA (1)...(19): siRNA sense strand
gaaacugaaugaaguaaug

SEQ ID NO: 125778 - RNA, 19 nt, Homo sapiens
  misc_RNA (1)...(19): siRNA sense strand
ggacaaagccaucaaggaa

SEQ ID NO: 125779 - RNA, 19 nt, Homo sapiens
  misc_RNA (1)...(19): siRNA sense strand
ggaauuagugguccaguua

SEQ ID NO: 125780 - RNA, 19 nt, Homo sapiens
  misc_RNA (1)...(19): siRNA sense strand
ggucguggauucacagaua

SEQ ID NO: 125781 - RNA, 19 nt, Homo sapiens
  misc_RNA (1)...(19): siRNA sense strand
ccaaagauguugugaggaa

SEQ ID NO: 125782 - RNA, 19 nt, Homo sapiens
  misc_RNA (1)...(19): siRNA sense strand
guaaagaaaucuacucaag

SEQ ID NO: 125783 - RNA, 19 nt, Homo sapiens
  misc_RNA (1)...(19): siRNA sense strand
gaagcaagccagccaagua

SEQ ID NO: 125784 - RNA, 19 nt, Homo sapiens
  misc_RNA (1)...(19): siRNA sense strand
ggagagcuauuucacagaa

SEQ ID NO: 125785 - RNA, 19 nt, Homo sapiens
  misc_RNA (1)...(19): siRNA sense strand
caaaggauaugcgaagaaa

SEQ ID NO: 125786 - RNA, 19 nt, Homo sapiens
  misc_RNA (1)...(19): siRNA sense strand
gcccgacucuuaauuguaa

SEQ ID NO: 125787 - RNA, 19 nt, Homo sapiens
  misc_RNA (1)...(19): siRNA sense strand
ccaaacauaguucagauua

SEQ ID NO: 125788 - RNA, 19 nt, Homo sapiens
  misc_RNA (1)...(19): siRNA sense strand
gcaggaggcuuggaaguau

SEQ ID NO: 125789 - RNA, 19 nt, Homo sapiens
  misc_RNA (1)...(19): siRNA sense strand
gaaugaagaugagaaacug

SEQ ID NO: 125790 - RNA, 19 nt, Homo sapiens
  misc_RNA (1)...(19): siRNA sense strand
ugaagcaggugauagaaga

SEQ ID NO: 125791 - RNA, 19 nt, Homo sapiens
  misc_RNA (1)...(19): siRNA sense strand
gcugggagcuggaauuagu

SEQ ID NO: 125792 - RNA, 19 nt, Homo sapiens
  misc_RNA (1)...(19): siRNA sense strand
gaggaagaguggagucaga

SEQ ID NO: 125793 - RNA, 19 nt, Homo sapiens
  misc_RNA (1)...(19): siRNA sense strand
ccaguuagagucuguguaa

SEQ ID NO: 125794 - RNA, 19 nt, Homo sapiens
  misc_RNA (1)...(19): siRNA sense strand
gcggcacugucacuuguua

SEQ ID NO: 125795 - RNA, 19 nt, Homo sapiens
  misc_RNA (1)...(19): siRNA sense strand
uagagucuguguaaagaaa

SEQ ID NO: 125796 - RNA, 19 nt, Homo sapiens
  misc_RNA (1)...(19): siRNA sense strand
gauaaaguagaucgacuaa

SEQ ID NO: 125797 - RNA, 19 nt, Homo sapiens
  misc_RNA (1)...(19): siRNA sense strand
caccgacgcccuacacuua

SEQ ID NO: 125798 - RNA, 19 nt, Homo sapiens
  misc_RNA (1)...(19): siRNA sense strand
gaaggcaucagaaggagaa

SEQ ID NO: 125799 - RNA, 19 nt, Homo sapiens
  misc_RNA (1)...(19): siRNA sense strand
ggaaugcaaacuccuaaga

SEQ ID NO: 125800 - RNA, 19 nt, Homo sapiens
  misc_RNA (1)...(19): siRNA sense strand
guuagagucuguguaaaga

SEQ ID NO: 125801 - RNA, 19 nt, Homo sapiens
  misc_RNA (1)...(19): siRNA sense strand
gcaaagaaggcaucagaag

SEQ ID NO: 125802 - RNA, 19 nt, Homo sapiens
  misc_RNA (1)...(19): siRNA sense strand
ccaccgaggcccuggauaa

SEQ ID NO: 125803 - RNA, 19 nt, Homo sapiens
  misc_RNA (1)...(19): siRNA sense strand
gcgcaaagaaggcaucaga

SEQ ID NO: 125804 - RNA, 19 nt, Homo sapiens
  misc_RNA (1)...(19): siRNA sense strand
ccaaguaacaaagcagaua

SEQ ID NO: 125805 - RNA, 19 nt, Homo sapiens
  misc_RNA (1)...(19): siRNA sense strand
gcaaaccacgucccacgaa

SEQ ID NO: 125806 - RNA, 19 nt, Homo sapiens
  misc_RNA (1)...(19): siRNA sense strand
gaugagaaacugaaugaag

SEQ ID NO: 125807 - RNA, 19 nt, Homo sapiens
  misc_RNA (1)...(19): siRNA sense strand
aaagaaggcaucagaagga

SEQ ID NO: 125808 - RNA, 19 nt, Homo sapiens
  misc_RNA (1)...(19): siRNA sense strand
caggaggcuuggaaguaua

SEQ ID NO: 125809 - RNA, 19 nt, Homo sapiens
  misc_RNA (1)...(19): siRNA sense strand
gaagaugagaaacugaaug

SEQ ID NO: 125810 - RNA, 19 nt, Homo sapiens
  misc_RNA (1)...(19): siRNA sense strand
gauaugcgaagaaagauca

SEQ ID NO: 125811 - RNA, 19 nt, Homo sapiens
  misc_RNA (1)...(19): siRNA sense strand
gacaaagccaucaaggaaa

SEQ ID NO: 125812 - RNA, 19 nt, Homo sapiens
  misc_RNA (1)...(19): siRNA sense strand
ccgaggcccuggauaaugu

SEQ ID NO: 125813 - RNA, 19 nt, Homo sapiens
  misc_RNA (1)...(19): siRNA sense strand
caccggcacuuuacagaga

SEQ ID NO: 125814 - RNA, 19 nt, Homo sapiens
  misc_RNA (1)...(19): siRNA sense strand
gcccuacacuuacaacaag

SEQ ID NO: 125815 - RNA, 19 nt, Homo sapiens
  misc_RNA (1)...(19): siRNA sense strand
uggcagaaauugugaagca

SEQ ID NO: 125816 - RNA, 19 nt, Homo sapiens
  misc_RNA (1)...(19): siRNA sense strand
ugcaaacuccuaagagaua

SEQ ID NO: 125817 - RNA, 19 nt, Homo sapiens
  misc_RNA (1)...(19): siRNA sense strand
ggaagcuccugaaggucaa

SEQ ID NO: 125818 - RNA, 19 nt, Homo sapiens
  misc_RNA (1)...(19): siRNA sense strand
aaugcaaacuccuaagaga

SEQ ID NO: 125819 - RNA, 19 nt, Homo sapiens
  misc_RNA (1)...(19): siRNA sense strand
gagccgaggauuccaaugu

SEQ ID NO: 125820 - RNA, 19 nt, Homo sapiens
  misc_RNA (1)...(19): siRNA sense strand
ggagagcgacauggacaaa

SEQ ID NO: 125821 - RNA, 19 nt, Homo sapiens
  misc_RNA (1)...(19): siRNA sense strand
caaaccacgucccacgaau

SEQ ID NO: 125822 - RNA, 19 nt, Homo sapiens
  misc_RNA (1)...(19): siRNA sense strand
gagagaaugaagaugagaa

SEQ ID NO: 125823 - RNA, 19 nt, Homo sapiens
  misc_RNA (1)...(19): siRNA sense strand
uggauucacagauaaagua

SEQ ID NO: 125824 - RNA, 19 nt, Homo sapiens
  misc_RNA (1)...(19): siRNA sense strand
gagaaacugaaugaaguaa

SEQ ID NO: 125825 - RNA, 19 nt, Homo sapiens
  misc_RNA (1)...(19): siRNA sense strand
gagguacgucugcacauga

SEQ ID NO: 125826 - RNA, 19 nt, Homo sapiens
  misc_RNA (1)...(19): siRNA sense strand
ggaaguauaaccgggaaug

SEQ ID NO: 125827 - RNA, 19 nt, Homo sapiens
  misc_RNA (1)...(19): siRNA sense strand
ugagaaacugaaugaagua

SEQ ID NO: 125828 - RNA, 19 nt, Homo sapiens
  misc_RNA (1)...(19): siRNA sense strand
ccagugaaguugugugacu

SEQ ID NO: 125829 - RNA, 19 nt, Homo sapiens
  misc_RNA (1)...(19): siRNA sense strand
aagcaagccagccaaguaa

SEQ ID NO: 125830 - RNA, 19 nt, Homo sapiens
  misc_RNA (1)...(19): siRNA sense strand
gccgaggauuccaauguug

SEQ ID NO: 125831 - RNA, 19 nt, Homo sapiens
  misc_RNA (1)...(19): siRNA sense strand
cugcucagcugaugaugga

SEQ ID NO: 125832 - RNA, 19 nt, Homo sapiens
  misc_RNA (1)...(19): siRNA sense strand
acaaagccaucaaggaaac

SEQ ID NO: 125833 - RNA, 19 nt, Homo sapiens
  misc_RNA (1)...(19): siRNA sense strand
gcaaacuccuaagagauac

SEQ ID NO: 125834 - RNA, 19 nt, Homo sapiens
  misc_RNA (1)...(19): siRNA sense strand
aagaugagaaacugaauga

SEQ ID NO: 125835 - RNA, 19 nt, Homo sapiens
  misc_RNA (1)...(19): siRNA sense strand
aaggauaugcgaagaaaga

SEQ ID NO: 125836 - RNA, 19 nt, Homo sapiens
  misc_RNA (1)...(19): siRNA sense strand
ccaaaggauaugcgaagaa

SEQ ID NO: 125837 - RNA, 19 nt, Homo sapiens
  misc_RNA (1)...(19): siRNA sense strand
guacuggaggcgcaaagaa

SEQ ID NO: 125838 - RNA, 19 nt, Homo sapiens
  misc_RNA (1)...(19): siRNA sense strand
guucaccccuuauuaugua

SEQ ID NO: 125839 - RNA, 19 nt, Homo sapiens
  misc_RNA (1)...(19): siRNA sense strand
gcaagccagccaaguaaca

SEQ ID NO: 125840 - RNA, 19 nt, Homo sapiens
  misc_RNA (1)...(19): siRNA sense strand
gaagaguggagucagaucu

SEQ ID NO: 125841 - RNA, 19 nt, Homo sapiens
  misc_RNA (1)...(19): siRNA sense strand
ggacaaggcagugguugca

SEQ ID NO: 125842 - RNA, 19 nt, Homo sapiens
  misc_RNA (1)...(19): siRNA sense strand
gauaaugugcugccuucug

SEQ ID NO: 125843 - RNA, 19 nt, Homo sapiens
  misc_RNA (1)...(19): siRNA sense strand
ggucaaaccggaggagaga

SEQ ID NO: 125844 - RNA, 19 nt, Homo sapiens
  misc_RNA (1)...(19): siRNA sense strand
agagauggccaaagauguu

SEQ ID NO: 125845 - RNA, 19 nt, Homo sapiens
  misc_RNA (1)...(19): siRNA sense strand
ccacacacccaaacauagu

SEQ ID NO: 125846 - RNA, 19 nt, Homo sapiens
  misc_RNA (1)...(19): siRNA sense strand
gaaugcaaacuccuaagag

SEQ ID NO: 125847 - RNA, 19 nt, Homo sapiens
  misc_RNA (1)...(19): siRNA sense strand
ugagguacgucugcacaug

SEQ ID NO: 125848 - RNA, 19 nt, Homo sapiens
  misc_RNA (1)...(19): siRNA sense strand
gacuaaaacuggcagaaau

SEQ ID NO: 125849 - RNA, 19 nt, Homo sapiens
  misc_RNA (1)...(19): siRNA sense strand
augagaaacugaaugaagu

SEQ ID NO: 125850 - RNA, 19 nt, Homo sapiens
  misc_RNA (1)...(19): siRNA sense strand
gaugugauugcucagugua

SEQ ID NO: 125851 - RNA, 19 nt, Homo sapiens
  misc_RNA (1)...(19): siRNA sense strand
gagaauggagccgaggauu

SEQ ID NO: 125852 - RNA, 19 nt, Homo sapiens
  misc_RNA (1)...(19): siRNA sense strand
aaacaccacagccggacua

SEQ ID NO: 125853 - RNA, 19 nt, Homo sapiens
  misc_RNA (1)...(19): siRNA sense strand
gagagcuauuucacagaau

SEQ ID NO: 125854 - RNA, 19 nt, Homo sapiens
  misc_RNA (1)...(19): siRNA sense strand
gucguggauucacagauaa

SEQ ID NO: 125855 - RNA, 19 nt, Homo sapiens
  misc_RNA (1)...(19): siRNA sense strand
ucagagauggccaaagaug

SEQ ID NO: 125856 - RNA, 19 nt, Homo sapiens
  misc_RNA (1)...(19): siRNA sense strand
caaguaacaaagcagauag

SEQ ID NO: 125857 - RNA, 19 nt, Homo sapiens
  misc_RNA (1)...(19): siRNA sense strand
gaucaugacaggcaguuuu

SEQ ID NO: 125858 - RNA, 19 nt, Homo sapiens
  misc_RNA (1)...(19): siRNA sense strand
aaggagaaaucuggcauca

SEQ ID NO: 125859 - RNA, 19 nt, Homo sapiens
  misc_RNA (1)...(19): siRNA sense strand
guugugugacuuuggauuu

SEQ ID NO: 125860 - RNA, 19 nt, Homo sapiens
  misc_RNA (1)...(19): siRNA sense strand
guuaaacauugcgcacaga

SEQ ID NO: 125861 - RNA, 19 nt, Homo sapiens
  misc_RNA (1)...(19): siRNA sense strand
gccggacuaucccaaagga

SEQ ID NO: 125862 - RNA, 19 nt, Homo sapiens
  misc_RNA (1)...(19): siRNA sense strand
ugugauugcucaguguauu

SEQ ID NO: 125863 - RNA, 19 nt, Homo sapiens
  misc_RNA (1)...(19): siRNA sense strand
ggcagugguugcaggaauc

SEQ ID NO: 125864 - RNA, 19 nt, Homo sapiens
  misc_RNA (1)...(19): siRNA sense strand
gaccaccccuggcucaauu

SEQ ID NO: 125865 - RNA, 19 nt, Homo sapiens
  misc_RNA (1)...(19): siRNA sense strand
gcgaagaaagaucaugaca

SEQ ID NO: 125866 - RNA, 19 nt, Homo sapiens
  misc_RNA (1)...(19): siRNA sense strand
gagucuguguaaagaaauc

SEQ ID NO: 125867 - RNA, 19 nt, Homo sapiens
  misc_RNA (1)...(19): siRNA sense strand
aaacuggcagaaauuguga

SEQ ID NO: 125868 - RNA, 19 nt, Homo sapiens
  misc_RNA (1)...(19): siRNA sense strand
agauaaaguagaucgacua

SEQ ID NO: 125869 - RNA, 19 nt, Homo sapiens
  misc_RNA (1)...(19): siRNA sense strand
agagaaugaagaugagaaa

SEQ ID NO: 125870 - RNA, 19 nt, Homo sapiens
  misc_RNA (1)...(19): siRNA sense strand
ugcuaacaguguccaguuu

SEQ ID NO: 125871 - RNA, 19 nt, Homo sapiens
  misc_RNA (1)...(19): siRNA sense strand
guauaaccgggaaugcaaa

SEQ ID NO: 125872 - RNA, 19 nt, Homo sapiens
  misc_RNA (1)...(19): siRNA sense strand
ugccacacacccaaacaua

SEQ ID NO: 125873 - RNA, 19 nt, Homo sapiens
  misc_RNA (1)...(19): siRNA sense strand
gagauggccaaagauguug

SEQ ID NO: 125874 - RNA, 19 nt, Homo sapiens
  misc_RNA (1)...(19): siRNA sense strand
gaauuagugguccaguuag

SEQ ID NO: 125875 - RNA, 19 nt, Homo sapiens
  misc_RNA (1)...(19): siRNA sense strand
gcuaacaguguccaguuuc

SEQ ID NO: 125876 - RNA, 19 nt, Homo sapiens
  misc_RNA (1)...(19): siRNA sense strand
gcaaagaccucaaggauau

SEQ ID NO: 125877 - RNA, 19 nt, Homo sapiens
  misc_RNA (1)...(19): siRNA sense strand
ggagggacguggcccaauu

SEQ ID NO: 125878 - RNA, 19 nt, Homo sapiens
  misc_RNA (1)...(19): siRNA sense strand
ggaagagccugcgcaaaga

SEQ ID NO: 125879 - RNA, 19 nt, Homo sapiens
  misc_RNA (1)...(19): siRNA sense strand
gaaaggauccugcuugucu

SEQ ID NO: 125880 - RNA, 19 nt, Homo sapiens
  misc_RNA (1)...(19): siRNA sense strand
ucagggagccaacucauuu

SEQ ID NO: 125881 - RNA, 19 nt, Homo sapiens
  misc_RNA (1)...(19): siRNA sense strand
ucaaggauaugagggacua

SEQ ID NO: 125882 - RNA, 19 nt, Homo sapiens
  misc_RNA (1)...(19): siRNA sense strand
gagggacguggcccaauuu

SEQ ID NO: 125883 - RNA, 19 nt, Homo sapiens
  misc_RNA (1)...(19): siRNA sense strand
uuaaggaaggccugaguuu

SEQ ID NO: 125884 - RNA, 19 nt, Homo sapiens
  misc_RNA (1)...(19): siRNA sense strand
gaagagccugcgcaaagau

SEQ ID NO: 125885 - RNA, 19 nt, Homo sapiens
  misc_RNA (1)...(19): siRNA sense strand
ugcaaagaccucaaggaua

SEQ ID NO: 125886 - RNA, 19 nt, Homo sapiens
  misc_RNA (1)...(19): siRNA sense strand
ggauccugcuugucugugu

SEQ ID NO: 125887 - RNA, 19 nt, Homo sapiens
  misc_RNA (1)...(19): siRNA sense strand
uaaggaaggccugaguuug

SEQ ID NO: 125888 - RNA, 19 nt, Homo sapiens
  misc_RNA (1)...(19): siRNA sense strand
uggaagagccugcgcaaag

SEQ ID NO: 125889 - RNA, 19 nt, Homo sapiens
  misc_RNA (1)...(19): siRNA sense strand
gaaggccugaguuugcaaa

SEQ ID NO: 125890 - RNA, 19 nt, Homo sapiens
  misc_RNA (1)...(19): siRNA sense strand
ggccugaguuugcaaagac

SEQ ID NO: 125891 - RNA, 19 nt, Homo sapiens
  misc_RNA (1)...(19): siRNA sense strand
uugaaaggauccugcuugu

SEQ ID NO: 125892 - RNA, 19 nt, Homo sapiens
  misc_RNA (1)...(19): siRNA sense strand
ggauaugagggacuagagu

SEQ ID NO: 125893 - RNA, 19 nt, Homo sapiens
  misc_RNA (1)...(19): siRNA sense strand
guuaaggaaggccugaguu

SEQ ID NO: 125894 - RNA, 19 nt, Homo sapiens
  misc_RNA (1)...(19): siRNA sense strand
ucaauccugggugcuguua

SEQ ID NO: 125895 - RNA, 19 nt, Homo sapiens
  misc_RNA (1)...(19): siRNA sense strand
uugcaaagaccucaaggau

SEQ ID NO: 125896 - RNA, 19 nt, Homo sapiens
  misc_RNA (1)...(19): siRNA sense strand
aaagaccucaaggauauga

SEQ ID NO: 125897 - RNA, 19 nt, Homo sapiens
  misc_RNA (1)...(19): siRNA sense strand
gaaaggaucggcgcaauua

SEQ ID NO: 125898 - RNA, 19 nt, Homo sapiens
  misc_RNA (1)...(19): siRNA sense strand
gcaaggagaccuacaaauu

SEQ ID NO: 125899 - RNA, 19 nt, Homo sapiens
  misc_RNA (1)...(19): siRNA sense strand
ggaugcagcuuucggauga

SEQ ID NO: 125900 - RNA, 19 nt, Homo sapiens
  misc_RNA (1)...(19): siRNA sense strand
cgaaacaggucaagagaug

SEQ ID NO: 125901 - RNA, 19 nt, Homo sapiens
  misc_RNA (1)...(19): siRNA sense strand
gaacaucucaaacuuacaa

SEQ ID NO: 125902 - RNA, 19 nt, Homo sapiens
  misc_RNA (1)...(19): siRNA sense strand
caaggagaccuacaaauug

SEQ ID NO: 125903 - RNA, 19 nt, Homo sapiens
  misc_RNA (1)...(19): siRNA sense strand
gcacuaacaaaccuaauug

SEQ ID NO: 125904 - RNA, 19 nt, Homo sapiens
  misc_RNA (1)...(19): siRNA sense strand
aaagagacgugaccggauu

SEQ ID NO: 125905 - RNA, 19 nt, Homo sapiens
  misc_RNA (1)...(19): siRNA sense strand
gagauguucugcucagguu

SEQ ID NO: 125906 - RNA, 19 nt, Homo sapiens
  misc_RNA (1)...(19): siRNA sense strand
gugauggacuucaaggaaa

SEQ ID NO: 125907 - RNA, 19 nt, Homo sapiens
  misc_RNA (1)...(19): siRNA sense strand
ggacacagacaguggcuau

SEQ ID NO: 125908 - RNA, 19 nt, Homo sapiens
  misc_RNA (1)...(19): siRNA sense strand
cgucgacucuucugucuug

SEQ ID NO: 125909 - RNA, 19 nt, Homo sapiens
  misc_RNA (1)...(19): siRNA sense strand
gggaggugcuucaguaucu

SEQ ID NO: 125910 - RNA, 19 nt, Homo sapiens
  misc_RNA (1)...(19): siRNA sense strand
gagaaaggaucggcgcaau

SEQ ID NO: 125911 - RNA, 19 nt, Homo sapiens
  misc_RNA (1)...(19): siRNA sense strand
gcagagugguuuacaagcu

SEQ ID NO: 125912 - RNA, 19 nt, Homo sapiens
  misc_RNA (1)...(19): siRNA sense strand
gcucagguuuccagacaug

SEQ ID NO: 125913 - RNA, 19 nt, Homo sapiens
  misc_RNA (1)...(19): siRNA sense strand
agacccagcucccaaagug

SEQ ID NO: 125914 - RNA, 19 nt, Homo sapiens
  misc_RNA (1)...(19): siRNA sense strand
gaaggccauuucacuagca

SEQ ID NO: 125915 - RNA, 19 nt, Homo sapiens
  misc_RNA (1)...(19): siRNA sense strand
ccgaacaucucaaacuuac

SEQ ID NO: 125916 - RNA, 19 nt, Homo sapiens
  misc_RNA (1)...(19): siRNA sense strand
gaaagcacuaacaaaccua

SEQ ID NO: 125917 - RNA, 19 nt, Homo sapiens
  misc_RNA (1)...(19): siRNA sense strand
cccgggaggugcuucagua

SEQ ID NO: 125918 - RNA, 19 nt, Homo sapiens
  misc_RNA (1)...(19): siRNA sense strand
ccgcagcccucucuagcuu

SEQ ID NO: 125919 - RNA, 19 nt, Homo sapiens
  misc_RNA (1)...(19): siRNA sense strand
uaagcaagaguccgaagaa

SEQ ID NO: 125920 - RNA, 19 nt, Homo sapiens
  misc_RNA (1)...(19): siRNA sense strand
gcagcccucucuagcuuca

SEQ ID NO: 125921 - RNA, 19 nt, Homo sapiens
  misc_RNA (1)...(19): siRNA sense strand
cuaacaaaccuaauugauc

SEQ ID NO: 125922 - RNA, 19 nt, Homo sapiens
  misc_RNA (1)...(19): siRNA sense strand
ugaaagcacuaacaaaccu

SEQ ID NO: 125923 - RNA, 19 nt, Homo sapiens
  misc_RNA (1)...(19): siRNA sense strand
gaucggcgcaauuaagcaa

SEQ ID NO: 125924 - RNA, 19 nt, Homo sapiens
  misc_RNA (1)...(19): siRNA sense strand
agggagaaaugucgaaaca

SEQ ID NO: 125925 - RNA, 19 nt, Homo sapiens
  misc_RNA (1)...(19): siRNA sense strand
caucucaaacuuacaacuu

SEQ ID NO: 125926 - RNA, 19 nt, Homo sapiens
  misc_RNA (1)...(19): siRNA sense strand
gcccacauguaccaagugu

SEQ ID NO: 125927 - RNA, 19 nt, Homo sapiens
  misc_RNA (1)...(19): siRNA sense strand
ggugagcugucagggagaa

SEQ ID NO: 125928 - RNA, 19 nt, Homo sapiens
  misc_RNA (1)...(19): siRNA sense strand
cagcaaggagaccuacaaa

SEQ ID NO: 125929 - RNA, 19 nt, Homo sapiens
  misc_RNA (1)...(19): siRNA sense strand
ccucagugccagugcuaua

SEQ ID NO: 125930 - RNA, 19 nt, Homo sapiens
  misc_RNA (1)...(19): siRNA sense strand
gcugguaucccaccucagu

SEQ ID NO: 125931 - RNA, 19 nt, Homo sapiens
  misc_RNA (1)...(19): siRNA sense strand
aaggagaccuacaaauugc

SEQ ID NO: 125932 - RNA, 19 nt, Homo sapiens
  misc_RNA (1)...(19): siRNA sense strand
uccaagcucugaagccaau

SEQ ID NO: 125933 - RNA, 19 nt, Homo sapiens
  misc_RNA (1)...(19): siRNA sense strand
agaaaggaucggcgcaauu

SEQ ID NO: 125934 - RNA, 19 nt, Homo sapiens
  misc_RNA (1)...(19): siRNA sense strand
gacgugaccggauuaacga

SEQ ID NO: 125935 - RNA, 19 nt, Homo sapiens
  misc_RNA (1)...(19): siRNA sense strand
caacuuugggucacuugga

SEQ ID NO: 125936 - RNA, 19 nt, Homo sapiens
  misc_RNA (1)...(19): siRNA sense strand
acccgaacaucucaaacuu

SEQ ID NO: 125937 - RNA, 19 nt, Homo sapiens
  misc_RNA (1)...(19): siRNA sense strand
cacagacaguggcuaugga

SEQ ID NO: 125938 - RNA, 19 nt, Homo sapiens
  misc_RNA (1)...(19): siRNA sense strand
gauguucugcucagguuuc

SEQ ID NO: 125939 - RNA, 19 nt, Homo sapiens
  misc_RNA (1)...(19): siRNA sense strand
caugugaaagcacuaacaa

SEQ ID NO: 125940 - RNA, 19 nt, Homo sapiens
  misc_RNA (1)...(19): siRNA sense strand
cccgaacaucucaaacuua

SEQ ID NO: 125941 - RNA, 19 nt, Homo sapiens
  misc_RNA (1)...(19): siRNA sense strand
gcaugugaaagcacuaaca

SEQ ID NO: 125942 - RNA, 19 nt, Homo sapiens
  misc_RNA (1)...(19): siRNA sense strand
caguggcuauggaggagaa

SEQ ID NO: 125943 - RNA, 19 nt, Homo sapiens
  misc_RNA (1)...(19): siRNA sense strand
gaaacaggucaagagaugu

SEQ ID NO: 125944 - RNA, 19 nt, Homo sapiens
  misc_RNA (1)...(19): siRNA sense strand
gagcugucagggagaaaug

SEQ ID NO: 125945 - RNA, 19 nt, Homo sapiens
  misc_RNA (1)...(19): siRNA sense strand
gcagcuuucggaugaugaa

SEQ ID NO: 125946 - RNA, 19 nt, Homo sapiens
  misc_RNA (1)...(19): siRNA sense strand
cugcucagguuuccagaca

SEQ ID NO: 125947 - RNA, 19 nt, Homo sapiens
  misc_RNA (1)...(19): siRNA sense strand
gcaccggcucaucgagaaa

SEQ ID NO: 125948 - RNA, 19 nt, Homo sapiens
  misc_RNA (1)...(19): siRNA sense strand
aaacuuagaaaccaaagac

SEQ ID NO: 125949 - RNA, 19 nt, Homo sapiens
  misc_RNA (1)...(19): siRNA sense strand
ucgcccagcugaaggaucu

SEQ ID NO: 125950 - RNA, 19 nt, Homo sapiens
  misc_RNA (1)...(19): siRNA sense strand
uucaguaucuggccaagca

SEQ ID NO: 125951 - RNA, 19 nt, Homo sapiens
  misc_RNA (1)...(19): siRNA sense strand
ggaggugcuucaguaucug

SEQ ID NO: 125952 - RNA, 19 nt, Homo sapiens
  misc_RNA (1)...(19): siRNA sense strand
uuacaacuuugggucacuu

SEQ ID NO: 125953 - RNA, 19 nt, Homo sapiens
  misc_RNA (1)...(19): siRNA sense strand
caugaacccagacaagauc

SEQ ID NO: 125954 - RNA, 19 nt, Homo sapiens
  misc_RNA (1)...(19): siRNA sense strand
ucaugaacccagacaagau

SEQ ID NO: 125955 - RNA, 19 nt, Homo sapiens
  misc_RNA (1)...(19): siRNA sense strand
ggagcgaggacagcaagga

SEQ ID NO: 125956 - RNA, 19 nt, Homo sapiens
  misc_RNA (1)...(19): siRNA sense strand
agaaccggaugcagcuuuc

SEQ ID NO: 125957 - RNA, 19 nt, Homo sapiens
  misc_RNA (1)...(19): siRNA sense strand
gaccacggacgcagguuca

SEQ ID NO: 125958 - RNA, 19 nt, Homo sapiens
  misc_RNA (1)...(19): siRNA sense strand
gaacacucgggaccugaag

SEQ ID NO: 125959 - RNA, 19 nt, Homo sapiens
  misc_RNA (1)...(19): siRNA sense strand
aaagcacuaacaaaccuaa

SEQ ID NO: 125960 - RNA, 19 nt, Homo sapiens
  misc_RNA (1)...(19): siRNA sense strand
ugugaaagcacuaacaaac

SEQ ID NO: 125961 - RNA, 19 nt, Homo sapiens
  misc_RNA (1)...(19): siRNA sense strand
uucuugaacuuaccuugaa

SEQ ID NO: 125962 - RNA, 19 nt, Homo sapiens
  misc_RNA (1)...(19): siRNA sense strand
ggaugaugaaggccauuuc

SEQ ID NO: 125963 - RNA, 19 nt, Homo sapiens
  misc_RNA (1)...(19): siRNA sense strand
ccuuuaaacuuagaaacca

SEQ ID NO: 125964 - RNA, 19 nt, Homo sapiens
  misc_RNA (1)...(19): siRNA sense strand
ccugcagagugguuuacaa

SEQ ID NO: 125965 - RNA, 19 nt, Homo sapiens
  misc_RNA (1)...(19): siRNA sense strand
cgcaccggcucaucgagaa

SEQ ID NO: 125966 - RNA, 19 nt, Homo sapiens
  misc_RNA (1)...(19): siRNA sense strand
cuggagaagugcugguauc

SEQ ID NO: 125967 - RNA, 19 nt, Homo sapiens
  misc_RNA (1)...(19): siRNA sense strand
aaaggaucggcgcaauuaa

SEQ ID NO: 125968 - RNA, 19 nt, Homo sapiens
  misc_RNA (1)...(19): siRNA sense strand
aagagacgugaccggauua

SEQ ID NO: 125969 - RNA, 19 nt, Homo sapiens
  misc_RNA (1)...(19): siRNA sense strand
uaccaaguguacaagucaa

SEQ ID NO: 125970 - RNA, 19 nt, Homo sapiens
  misc_RNA (1)...(19): siRNA sense strand
ggagagacauccuauauuc

SEQ ID NO: 125971 - RNA, 19 nt, Homo sapiens
  misc_RNA (1)...(19): siRNA sense strand
gauaauaccagaccgauuu

SEQ ID NO: 125972 - RNA, 19 nt, Homo sapiens
  misc_RNA (1)...(19): siRNA sense strand
gaugcuacaugguuauaua

SEQ ID NO: 125973 - RNA, 19 nt, Homo sapiens
  misc_RNA (1)...(19): siRNA sense strand
caguauggcuuccuuaauu

SEQ ID NO: 125974 - RNA, 19 nt, Homo sapiens
  misc_RNA (1)...(19): siRNA sense strand
cagcauagauaaugaacuu

SEQ ID NO: 125975 - RNA, 19 nt, Homo sapiens
  misc_RNA (1)...(19): siRNA sense strand
gaaucaagaucagcaagaa

SEQ ID NO: 125976 - RNA, 19 nt, Homo sapiens
  misc_RNA (1)...(19): siRNA sense strand
guacagugaugaugacgaa

SEQ ID NO: 125977 - RNA, 19 nt, Homo sapiens
  misc_RNA (1)...(19): siRNA sense strand
gcaaugguuuacagauauu

SEQ ID NO: 125978 - RNA, 19 nt, Homo sapiens
  misc_RNA (1)...(19): siRNA sense strand
gucaaagaauuccuagaua

SEQ ID NO: 125979 - RNA, 19 nt, Homo sapiens
  misc_RNA (1)...(19): siRNA sense strand
uaaagaaggcaaugcagua

SEQ ID NO: 125980 - RNA, 19 nt, Homo sapiens
  misc_RNA (1)...(19): siRNA sense strand
gaccaaagagugcaucaaa

SEQ ID NO: 125981 - RNA, 19 nt, Homo sapiens
  misc_RNA (1)...(19): siRNA sense strand
gcuacaucaugaagcauua

SEQ ID NO: 125982 - RNA, 19 nt, Homo sapiens
  misc_RNA (1)...(19): siRNA sense strand
ggcaaugguuuacagauau

SEQ ID NO: 125983 - RNA, 19 nt, Homo sapiens
  misc_RNA (1)...(19): siRNA sense strand
uggcaaugguuuacagaua

SEQ ID NO: 125984 - RNA, 19 nt, Homo sapiens
  misc_RNA (1)...(19): siRNA sense strand
cgaaaucaauggagugaca

SEQ ID NO: 125985 - RNA, 19 nt, Homo sapiens
  misc_RNA (1)...(19): siRNA sense strand
guugcaagaucaauaagaa

SEQ ID NO: 125986 - RNA, 19 nt, Homo sapiens
  misc_RNA (1)...(19): siRNA sense strand
uuacacuucuugacuguuu

SEQ ID NO: 125987 - RNA, 19 nt, Homo sapiens
  misc_RNA (1)...(19): siRNA sense strand
ccaaagagugcaucaaaug

SEQ ID NO: 125988 - RNA, 19 nt, Homo sapiens
  misc_RNA (1)...(19): siRNA sense strand
gacacaaggugauagacuu

SEQ ID NO: 125989 - RNA, 19 nt, Homo sapiens
  misc_RNA (1)...(19): siRNA sense strand
guacauuauuucagcauag

SEQ ID NO: 125990 - RNA, 19 nt, Homo sapiens
  misc_RNA (1)...(19): siRNA sense strand
guuggaugcuacaugguua

SEQ ID NO: 125991 - RNA, 19 nt, Homo sapiens
  misc_RNA (1)...(19): siRNA sense strand
gcauagauaaugaacuuga

SEQ ID NO: 125992 - RNA, 19 nt, Homo sapiens
  misc_RNA (1)...(19): siRNA sense strand
aaagagugcaucaaaugua

SEQ ID NO: 125993 - RNA, 19 nt, Homo sapiens
  misc_RNA (1)...(19): siRNA sense strand
gaacuucuacgcagauuuu

SEQ ID NO: 125994 - RNA, 19 nt, Homo sapiens
  misc_RNA (1)...(19): siRNA sense strand
guugaugacauuuccauaa

SEQ ID NO: 125995 - RNA, 19 nt, Homo sapiens
  misc_RNA (1)...(19): siRNA sense strand
uuucagagaugcugccuau

SEQ ID NO: 125996 - RNA, 19 nt, Homo sapiens
  misc_RNA (1)...(19): siRNA sense strand
ggagugacacaaggugaua

SEQ ID NO: 125997 - RNA, 19 nt, Homo sapiens
  misc_RNA (1)...(19): siRNA sense strand
caaagaauuccuagauauc

SEQ ID NO: 125998 - RNA, 19 nt, Homo sapiens
  misc_RNA (1)...(19): siRNA sense strand
ucaccgaucgccuuuguuu

SEQ ID NO: 125999 - RNA, 19 nt, Homo sapiens
  misc_RNA (1)...(19): siRNA sense strand
caucaccgaucgccuuugu

SEQ ID NO: 126000 - RNA, 19 nt, Homo sapiens
  misc_RNA (1)...(19): siRNA sense strand
gaacuugaauaugagaacu

SEQ ID NO: 126001 - RNA, 19 nt, Homo sapiens
  misc_RNA (1)...(19): siRNA sense strand
cagagcagccuucuccaaa

SEQ ID NO: 126002 - RNA, 19 nt, Homo sapiens
  misc_RNA (1)...(19): siRNA sense strand
cagagaugcugccuaugga

SEQ ID NO: 126003 - RNA, 19 nt, Homo sapiens
  misc_RNA (1)...(19): siRNA sense strand
caaagagugcaucaaaugu

SEQ ID NO: 126004 - RNA, 19 nt, Homo sapiens
  misc_RNA (1)...(19): siRNA sense strand
uaaauggggucgagaauca

SEQ ID NO: 126005 - RNA, 19 nt, Homo sapiens
  misc_RNA (1)...(19): siRNA sense strand
gagcagccuucuccaaacu

SEQ ID NO: 126006 - RNA, 19 nt, Homo sapiens
  misc_RNA (1)...(19): siRNA sense strand
aguauggcuuccuuaauuu

SEQ ID NO: 126007 - RNA, 19 nt, Homo sapiens
  misc_RNA (1)...(19): siRNA sense strand
caacucauuuaaccuugau

SEQ ID NO: 126008 - RNA, 19 nt, Homo sapiens
  misc_RNA (1)...(19): siRNA sense strand
ccagaagaagcauauagaa

SEQ ID NO: 126009 - RNA, 19 nt, Homo sapiens
  misc_RNA (1)...(19): siRNA sense strand
cuauggaaguugcaauuuc

SEQ ID NO: 126010 - RNA, 19 nt, Homo sapiens
  misc_RNA (1)...(19): siRNA sense strand
gaaguugcaauuucuacau

SEQ ID NO: 126011 - RNA, 19 nt, Homo sapiens
  misc_RNA (1)...(19): siRNA sense strand
ggagaauggacaacacaga

SEQ ID NO: 126012 - RNA, 19 nt, Homo sapiens
  misc_RNA (1)...(19): siRNA sense strand
cagaagaagcauauagaau

SEQ ID NO: 126013 - RNA, 19 nt, Homo sapiens
  misc_RNA (1)...(19): siRNA sense strand
agaccuggcucggugauug

SEQ ID NO: 126014 - RNA, 19 nt, Homo sapiens
  misc_RNA (1)...(19): siRNA sense strand
agaaggcaaugcaguaugg

SEQ ID NO: 126015 - RNA, 19 nt, Homo sapiens
  misc_RNA (1)...(19): siRNA sense strand
gagacauccuauauuccuu

SEQ ID NO: 126016 - RNA, 19 nt, Homo sapiens
  misc_RNA (1)...(19): siRNA sense strand
gcagccuucuccaaacuuc

SEQ ID NO: 126017 - RNA, 19 nt, Homo sapiens
  misc_RNA (1)...(19): siRNA sense strand
gcaguauggcuuccuuaau

SEQ ID NO: 126018 - RNA, 19 nt, Homo sapiens
  misc_RNA (1)...(19): siRNA sense strand
uauauuccuuucagagaug

SEQ ID NO: 126019 - RNA, 19 nt, Homo sapiens
  misc_RNA (1)...(19): siRNA sense strand
uugcaaagcuggccuuggu

SEQ ID NO: 126020 - RNA, 19 nt, Homo sapiens
  misc_RNA (1)...(19): siRNA sense strand
uauggaaguugcaauuucu

SEQ ID NO: 126021 - RNA, 19 nt, Homo sapiens
  misc_RNA (1)...(19): siRNA sense strand
gaagacaauccaaaacaaa

SEQ ID NO: 126022 - RNA, 19 nt, Homo sapiens
  misc_RNA (1)...(19): siRNA sense strand
cuagauaucugugaaaaug

SEQ ID NO: 126023 - RNA, 19 nt, Homo sapiens
  misc_RNA (1)...(19): siRNA sense strand
cugaugccauugucaaaga

SEQ ID NO: 126024 - RNA, 19 nt, Homo sapiens
  misc_RNA (1)...(19): siRNA sense strand
gaugcugccuauggaaguu

SEQ ID NO: 126025 - RNA, 19 nt, Homo sapiens
  misc_RNA (1)...(19): siRNA sense strand
gcaggagaauggacaacac

SEQ ID NO: 126026 - RNA, 19 nt, Homo sapiens
  misc_RNA (1)...(19): siRNA sense strand
caaaugcugccuuccuugu

SEQ ID NO: 126027 - RNA, 19 nt, Homo sapiens
  misc_RNA (1)...(19): siRNA sense strand
ugucaaagaauuccuagau

SEQ ID NO: 126028 - RNA, 19 nt, Homo sapiens
  misc_RNA (1)...(19): siRNA sense strand
uaugaugccaaacgcuuua

SEQ ID NO: 126029 - RNA, 19 nt, Homo sapiens
  misc_RNA (1)...(19): siRNA sense strand
ucagagaugcugccuaugg

SEQ ID NO: 126030 - RNA, 19 nt, Homo sapiens
  misc_RNA (1)...(19): siRNA sense strand
ccugagacuuauauucaau

SEQ ID NO: 126031 - RNA, 19 nt, Homo sapiens
  misc_RNA (1)...(19): siRNA sense strand
ggauaauaccagaccgauu

SEQ ID NO: 126032 - RNA, 19 nt, Homo sapiens
  misc_RNA (1)...(19): siRNA sense strand
cagauauuguugcaagauc

SEQ ID NO: 126033 - RNA, 19 nt, Homo sapiens
  misc_RNA (1)...(19): siRNA sense strand
auaccagaccgauuuauug

SEQ ID NO: 126034 - RNA, 19 nt, Homo sapiens
  misc_RNA (1)...(19): siRNA sense strand
cuauauuccuuucagagau

SEQ ID NO: 126035 - RNA, 19 nt, Homo sapiens
  misc_RNA (1)...(19): siRNA sense strand
aaugcugccuuccuuguug

SEQ ID NO: 126036 - RNA, 19 nt, Homo sapiens
  misc_RNA (1)...(19): siRNA sense strand
ggaaguugcaauuucuaca

SEQ ID NO: 126037 - RNA, 19 nt, Homo sapiens
  misc_RNA (1)...(19): siRNA sense strand
gacagcagccgagaccauu

SEQ ID NO: 126038 - RNA, 19 nt, Homo sapiens
  misc_RNA (1)...(19): siRNA sense strand
cuguggaccucauucaaga

SEQ ID NO: 126039 - RNA, 19 nt, Homo sapiens
  misc_RNA (1)...(19): siRNA sense strand
gacgaaaucaauggaguga

SEQ ID NO: 126040 - RNA, 19 nt, Homo sapiens
  misc_RNA (1)...(19): siRNA sense strand
ucaaucuggcaaugguuua

SEQ ID NO: 126041 - RNA, 19 nt, Homo sapiens
  misc_RNA (1)...(19): siRNA sense strand
aagcagaagacaauccaaa

SEQ ID NO: 126042 - RNA, 19 nt, Homo sapiens
  misc_RNA (1)...(19): siRNA sense strand
cauuacacuucuugacugu

SEQ ID NO: 126043 - RNA, 19 nt, Homo sapiens
  misc_RNA (1)...(19): siRNA sense strand
gacauccuauauuccuuuc

SEQ ID NO: 126044 - RNA, 19 nt, Homo sapiens
  misc_RNA (1)...(19): siRNA sense strand
agacauccuauauuccuuu

SEQ ID NO: 126045 - RNA, 19 nt, Homo sapiens
  misc_RNA (1)...(19): siRNA sense strand
agauauuguugcaagauca

SEQ ID NO: 126046 - RNA, 19 nt, Homo sapiens
  misc_RNA (1)...(19): siRNA sense strand
ggucgagaaucaagaucag

SEQ ID NO: 126047 - RNA, 19 nt, Homo sapiens
  misc_RNA (1)...(19): siRNA sense strand
ucaugaagcauuacaggau

SEQ ID NO: 126048 - RNA, 19 nt, Homo sapiens
  misc_RNA (1)...(19): siRNA sense strand
gacaucaccgaucgccuuu

SEQ ID NO: 126049 - RNA, 19 nt, Homo sapiens
  misc_RNA (1)...(19): siRNA sense strand
aagagugcaucaaauguac

SEQ ID NO: 126050 - RNA, 19 nt, Homo sapiens
  misc_RNA (1)...(19): siRNA sense strand
cauccuauauuccuuucag

SEQ ID NO: 126051 - RNA, 19 nt, Homo sapiens
  misc_RNA (1)...(19): siRNA sense strand
ugagggugccauugcagua

SEQ ID NO: 126052 - RNA, 19 nt, Homo sapiens
  misc_RNA (1)...(19): siRNA sense strand
ucaccaugaucuuuucuuu

SEQ ID NO: 126053 - RNA, 19 nt, Homo sapiens
  misc_RNA (1)...(19): siRNA sense strand
aaagaaggcaaugcaguau

SEQ ID NO: 126054 - RNA, 19 nt, Homo sapiens
  misc_RNA (1)...(19): siRNA sense strand
gauauuguugcaagaucaa

SEQ ID NO: 126055 - RNA, 19 nt, Homo sapiens
  misc_RNA (1)...(19): siRNA sense strand
cagugaugaugacgaaauc

SEQ ID NO: 126056 - RNA, 19 nt, Homo sapiens
  misc_RNA (1)...(19): siRNA sense strand
auaauaccagaccgauuua

SEQ ID NO: 126057 - RNA, 19 nt, Homo sapiens
  misc_RNA (1)...(19): siRNA sense strand
gcagcuccacgcagcaaga

SEQ ID NO: 126058 - RNA, 19 nt, Homo sapiens
  misc_RNA (1)...(19): siRNA sense strand
gaaccguacagugaugaug

SEQ ID NO: 126059 - RNA, 19 nt, Homo sapiens
  misc_RNA (1)...(19): siRNA sense strand
cuacugaugccauugucaa

SEQ ID NO: 126060 - RNA, 19 nt, Homo sapiens
  misc_RNA (1)...(19): siRNA sense strand
uuggagagacauccuauau

SEQ ID NO: 126061 - RNA, 19 nt, Homo sapiens
  misc_RNA (1)...(19): siRNA sense strand
aagaauuccuagauaucug

SEQ ID NO: 126062 - RNA, 19 nt, Homo sapiens
  misc_RNA (1)...(19): siRNA sense strand
ugaugccauugucaaagaa

SEQ ID NO: 126063 - RNA, 19 nt, Homo sapiens
  misc_RNA (1)...(19): siRNA sense strand
accaaagagugcaucaaau

SEQ ID NO: 126064 - RNA, 19 nt, Homo sapiens
  misc_RNA (1)...(19): siRNA sense strand
ccuauauuccuuucagaga

SEQ ID NO: 126065 - RNA, 19 nt, Homo sapiens
  misc_RNA (1)...(19): siRNA sense strand
guuuacagauauuguugca

SEQ ID NO: 126066 - RNA, 19 nt, Homo sapiens
  misc_RNA (1)...(19): siRNA sense strand
uggagagacauccuauauu

SEQ ID NO: 126067 - RNA, 19 nt, Homo sapiens
  misc_RNA (1)...(19): siRNA sense strand
gccuauggaaguugcaauu

SEQ ID NO: 126068 - RNA, 19 nt, Homo sapiens
  misc_RNA (1)...(19): siRNA sense strand
guugcaauuucuacauuac

SEQ ID NO: 126069 - RNA, 19 nt, Homo sapiens
  misc_RNA (1)...(19): siRNA sense strand
agaagacaauccaaaacaa

SEQ ID NO: 126070 - RNA, 19 nt, Homo sapiens
  misc_RNA (1)...(19): siRNA sense strand
ggagagacauccuauauuc

SEQ ID NO: 126071 - RNA, 19 nt, Homo sapiens
  misc_RNA (1)...(19): siRNA sense strand
gauaauaccagaccgauuu

SEQ ID NO: 126072 - RNA, 19 nt, Homo sapiens
  misc_RNA (1)...(19): siRNA sense strand
gaugcuacaugguuauaua

SEQ ID NO: 126073 - RNA, 19 nt, Homo sapiens
  misc_RNA (1)...(19): siRNA sense strand
caguauggcuuccuuaauu

SEQ ID NO: 126074 - RNA, 19 nt, Homo sapiens
  misc_RNA (1)...(19): siRNA sense strand
cagcauagauaaugaacuu

SEQ ID NO: 126075 - RNA, 19 nt, Homo sapiens
  misc_RNA (1)...(19): siRNA sense strand
gaaucaagaucagcaagaa

SEQ ID NO: 126076 - RNA, 19 nt, Homo sapiens
  misc_RNA (1)...(19): siRNA sense strand
guacagugaugaugacgaa

SEQ ID NO: 126077 - RNA, 19 nt, Homo sapiens
  misc_RNA (1)...(19): siRNA sense strand
gcaaugguuuacagauauu

SEQ ID NO: 126078 - RNA, 19 nt, Homo sapiens
  misc_RNA (1)...(19): siRNA sense strand
gucaaagaauuccuagaua

SEQ ID NO: 126079 - RNA, 19 nt, Homo sapiens
  misc_RNA (1)...(19): siRNA sense strand
uaaagaaggcaaugcagua

SEQ ID NO: 126080 - RNA, 19 nt, Homo sapiens
  misc_RNA (1)...(19): siRNA sense strand
gaccaaagagugcaucaaa

SEQ ID NO: 126081 - RNA, 19 nt, Homo sapiens
  misc_RNA (1)...(19): siRNA sense strand
gcuacaucaugaagcauua

SEQ ID NO: 126082 - RNA, 19 nt, Homo sapiens
  misc_RNA (1)...(19): siRNA sense strand
ggcaaugguuuacagauau

SEQ ID NO: 126083 - RNA, 19 nt, Homo sapiens
  misc_RNA (1)...(19): siRNA sense strand
uggcaaugguuuacagaua

SEQ ID NO: 126084 - RNA, 19 nt, Homo sapiens
  misc_RNA (1)...(19): siRNA sense strand
cgaaaucaauggagugaca

SEQ ID NO: 126085 - RNA, 19 nt, Homo sapiens
  misc_RNA (1)...(19): siRNA sense strand
guugcaagaucaauaagaa

SEQ ID NO: 126086 - RNA, 19 nt, Homo sapiens
  misc_RNA (1)...(19): siRNA sense strand
uuacacuucuugacuguuu

SEQ ID NO: 126087 - RNA, 19 nt, Homo sapiens
  misc_RNA (1)...(19): siRNA sense strand
ccaaagagugcaucaaaug

SEQ ID NO: 126088 - RNA, 19 nt, Homo sapiens
  misc_RNA (1)...(19): siRNA sense strand
gacacaaggugauagacuu

SEQ ID NO: 126089 - RNA, 19 nt, Homo sapiens
  misc_RNA (1)...(19): siRNA sense strand
guacauuauuucagcauag

SEQ ID NO: 126090 - RNA, 19 nt, Homo sapiens
  misc_RNA (1)...(19): siRNA sense strand
guuggaugcuacaugguua

SEQ ID NO: 126091 - RNA, 19 nt, Homo sapiens
  misc_RNA (1)...(19): siRNA sense strand
gcauagauaaugaacuuga

SEQ ID NO: 126092 - RNA, 19 nt, Homo sapiens
  misc_RNA (1)...(19): siRNA sense strand
aaagagugcaucaaaugua

SEQ ID NO: 126093 - RNA, 19 nt, Homo sapiens
  misc_RNA (1)...(19): siRNA sense strand
gaacuucuacgcagauuuu

SEQ ID NO: 126094 - RNA, 19 nt, Homo sapiens
  misc_RNA (1)...(19): siRNA sense strand
guugaugacauuuccauaa

SEQ ID NO: 126095 - RNA, 19 nt, Homo sapiens
  misc_RNA (1)...(19): siRNA sense strand
uuucagagaugcugccuau

SEQ ID NO: 126096 - RNA, 19 nt, Homo sapiens
  misc_RNA (1)...(19): siRNA sense strand
ggagugacacaaggugaua

SEQ ID NO: 126097 - RNA, 19 nt, Homo sapiens
  misc_RNA (1)...(19): siRNA sense strand
caaagaauuccuagauauc

SEQ ID NO: 126098 - RNA, 19 nt, Homo sapiens
  misc_RNA (1)...(19): siRNA sense strand
ucaccgaucgccuuuguuu

SEQ ID NO: 126099 - RNA, 19 nt, Homo sapiens
  misc_RNA (1)...(19): siRNA sense strand
caucaccgaucgccuuugu

SEQ ID NO: 126100 - RNA, 19 nt, Homo sapiens
  misc_RNA (1)...(19): siRNA sense strand
gaacuugaauaugagaacu

SEQ ID NO: 126101 - RNA, 19 nt, Homo sapiens
  misc_RNA (1)...(19): siRNA sense strand
cagagcagccuucuccaaa

SEQ ID NO: 126102 - RNA, 19 nt, Homo sapiens
  misc_RNA (1)...(19): siRNA sense strand
cagagaugcugccuaugga

SEQ ID NO: 126103 - RNA, 19 nt, Homo sapiens
  misc_RNA (1)...(19): siRNA sense strand
caaagagugcaucaaaugu

SEQ ID NO: 126104 - RNA, 19 nt, Homo sapiens
  misc_RNA (1)...(19): siRNA sense strand
uaaauggggucgagaauca

SEQ ID NO: 126105 - RNA, 19 nt, Homo sapiens
  misc_RNA (1)...(19): siRNA sense strand
gagcagccuucuccaaacu

SEQ ID NO: 126106 - RNA, 19 nt, Homo sapiens
  misc_RNA (1)...(19): siRNA sense strand
aguauggcuuccuuaauuu

SEQ ID NO: 126107 - RNA, 19 nt, Homo sapiens
  misc_RNA (1)...(19): siRNA sense strand
caacucauuuaaccuugau

SEQ ID NO: 126108 - RNA, 19 nt, Homo sapiens
  misc_RNA (1)...(19): siRNA sense strand
ccagaagaagcauauagaa

SEQ ID NO: 126109 - RNA, 19 nt, Homo sapiens
  misc_RNA (1)...(19): siRNA sense strand
cuauggaaguugcaauuuc

SEQ ID NO: 126110 - RNA, 19 nt, Homo sapiens
  misc_RNA (1)...(19): siRNA sense strand
gaaguugcaauuucuacau

SEQ ID NO: 126111 - RNA, 19 nt, Homo sapiens
  misc_RNA (1)...(19): siRNA sense strand
ggagaauggacaacacaga

SEQ ID NO: 126112 - RNA, 19 nt, Homo sapiens
  misc_RNA (1)...(19): siRNA sense strand
cagaagaagcauauagaau

SEQ ID NO: 126113 - RNA, 19 nt, Homo sapiens
  misc_RNA (1)...(19): siRNA sense strand
agaccuggcucggugauug

SEQ ID NO: 126114 - RNA, 19 nt, Homo sapiens
  misc_RNA (1)...(19): siRNA sense strand
agaaggcaaugcaguaugg

SEQ ID NO: 126115 - RNA, 19 nt, Homo sapiens
  misc_RNA (1)...(19): siRNA sense strand
gagacauccuauauuccuu

SEQ ID NO: 126116 - RNA, 19 nt, Homo sapiens
  misc_RNA (1)...(19): siRNA sense strand
gcagccuucuccaaacuuc

SEQ ID NO: 126117 - RNA, 19 nt, Homo sapiens
  misc_RNA (1)...(19): siRNA sense strand
gcaguauggcuuccuuaau

SEQ ID NO: 126118 - RNA, 19 nt, Homo sapiens
  misc_RNA (1)...(19): siRNA sense strand
uauauuccuuucagagaug

SEQ ID NO: 126119 - RNA, 19 nt, Homo sapiens
  misc_RNA (1)...(19): siRNA sense strand
uugcaaagcuggccuuggu

SEQ ID NO: 126120 - RNA, 19 nt, Homo sapiens
  misc_RNA (1)...(19): siRNA sense strand
uauggaaguugcaauuucu

SEQ ID NO: 126121 - RNA, 19 nt, Homo sapiens
  misc_RNA (1)...(19): siRNA sense strand
gaagacaauccaaaacaaa

SEQ ID NO: 126122 - RNA, 19 nt, Homo sapiens
  misc_RNA (1)...(19): siRNA sense strand
cuagauaucugugaaaaug

SEQ ID NO: 126123 - RNA, 19 nt, Homo sapiens
  misc_RNA (1)...(19): siRNA sense strand
cugaugccauugucaaaga

SEQ ID NO: 126124 - RNA, 19 nt, Homo sapiens
  misc_RNA (1)...(19): siRNA sense strand
gaugcugccuauggaaguu

SEQ ID NO: 126125 - RNA, 19 nt, Homo sapiens
  misc_RNA (1)...(19): siRNA sense strand
gcaggagaauggacaacac

SEQ ID NO: 126126 - RNA, 19 nt, Homo sapiens
  misc_RNA (1)...(19): siRNA sense strand
caaaugcugccuuccuugu

SEQ ID NO: 126127 - RNA, 19 nt, Homo sapiens
  misc_RNA (1)...(19): siRNA sense strand
ugucaaagaauuccuagau

SEQ ID NO: 126128 - RNA, 19 nt, Homo sapiens
  misc_RNA (1)...(19): siRNA sense strand
uaugaugccaaacgcuuua

SEQ ID NO: 126129 - RNA, 19 nt, Homo sapiens
  misc_RNA (1)...(19): siRNA sense strand
ucagagaugcugccuaugg

SEQ ID NO: 126130 - RNA, 19 nt, Homo sapiens
  misc_RNA (1)...(19): siRNA sense strand
ccugagacuuauauucaau

SEQ ID NO: 126131 - RNA, 19 nt, Homo sapiens
  misc_RNA (1)...(19): siRNA sense strand
ggauaauaccagaccgauu

SEQ ID NO: 126132 - RNA, 19 nt, Homo sapiens
  misc_RNA (1)...(19): siRNA sense strand
cagauauuguugcaagauc

SEQ ID NO: 126133 - RNA, 19 nt, Homo sapiens
  misc_RNA (1)...(19): siRNA sense strand
auaccagaccgauuuauug

SEQ ID NO: 126134 - RNA, 19 nt, Homo sapiens
  misc_RNA (1)...(19): siRNA sense strand
cuauauuccuuucagagau

SEQ ID NO: 126135 - RNA, 19 nt, Homo sapiens
  misc_RNA (1)...(19): siRNA sense strand
aaugcugccuuccuuguug

SEQ ID NO: 126136 - RNA, 19 nt, Homo sapiens
  misc_RNA (1)...(19): siRNA sense strand
ggaaguugcaauuucuaca

SEQ ID NO: 126137 - RNA, 19 nt, Homo sapiens
  misc_RNA (1)...(19): siRNA sense strand
gacagcagccgagaccauu

SEQ ID NO: 126138 - RNA, 19 nt, Homo sapiens
  misc_RNA (1)...(19): siRNA sense strand
cuguggaccucauucaaga

SEQ ID NO: 126139 - RNA, 19 nt, Homo sapiens
  misc_RNA (1)...(19): siRNA sense strand
gacgaaaucaauggaguga

SEQ ID NO: 126140 - RNA, 19 nt, Homo sapiens
  misc_RNA (1)...(19): siRNA sense strand
ucaaucuggcaaugguuua

SEQ ID NO: 126141 - RNA, 19 nt, Homo sapiens
  misc_RNA (1)...(19): siRNA sense strand
aagcagaagacaauccaaa

SEQ ID NO: 126142 - RNA, 19 nt, Homo sapiens
  misc_RNA (1)...(19): siRNA sense strand
cauuacacuucuugacugu

SEQ ID NO: 126143 - RNA, 19 nt, Homo sapiens
  misc_RNA (1)...(19): siRNA sense strand
gacauccuauauuccuuuc

SEQ ID NO: 126144 - RNA, 19 nt, Homo sapiens
  misc_RNA (1)...(19): siRNA sense strand
agacauccuauauuccuuu

SEQ ID NO: 126145 - RNA, 19 nt, Homo sapiens
  misc_RNA (1)...(19): siRNA sense strand
agauauuguugcaagauca

SEQ ID NO: 126146 - RNA, 19 nt, Homo sapiens
  misc_RNA (1)...(19): siRNA sense strand
ggucgagaaucaagaucag

SEQ ID NO: 126147 - RNA, 19 nt, Homo sapiens
  misc_RNA (1)...(19): siRNA sense strand
ucaugaagcauuacaggau

SEQ ID NO: 126148 - RNA, 19 nt, Homo sapiens
  misc_RNA (1)...(19): siRNA sense strand
gacaucaccgaucgccuuu

SEQ ID NO: 126149 - RNA, 19 nt, Homo sapiens
  misc_RNA (1)...(19): siRNA sense strand
aagagugcaucaaauguac

SEQ ID NO: 126150 - RNA, 19 nt, Homo sapiens
  misc_RNA (1)...(19): siRNA sense strand
cauccuauauuccuuucag

SEQ ID NO: 126151 - RNA, 19 nt, Homo sapiens
  misc_RNA (1)...(19): siRNA sense strand
ugagggugccauugcagua

SEQ ID NO: 126152 - RNA, 19 nt, Homo sapiens
  misc_RNA (1)...(19): siRNA sense strand
ucaccaugaucuuuucuuu

SEQ ID NO: 126153 - RNA, 19 nt, Homo sapiens
  misc_RNA (1)...(19): siRNA sense strand
aaagaaggcaaugcaguau

SEQ ID NO: 126154 - RNA, 19 nt, Homo sapiens
  misc_RNA (1)...(19): siRNA sense strand
gauauuguugcaagaucaa

SEQ ID NO: 126155 - RNA, 19 nt, Homo sapiens
  misc_RNA (1)...(19): siRNA sense strand
cagugaugaugacgaaauc

SEQ ID NO: 126156 - RNA, 19 nt, Homo sapiens
  misc_RNA (1)...(19): siRNA sense strand
auaauaccagaccgauuua

SEQ ID NO: 126157 - RNA, 19 nt, Homo sapiens
  misc_RNA (1)...(19): siRNA sense strand
gcagcuccacgcagcaaga

SEQ ID NO: 126158 - RNA, 19 nt, Homo sapiens
  misc_RNA (1)...(19): siRNA sense strand
gaaccguacagugaugaug

SEQ ID NO: 126159 - RNA, 19 nt, Homo sapiens
  misc_RNA (1)...(19): siRNA sense strand
cuacugaugccauugucaa

SEQ ID NO: 126160 - RNA, 19 nt, Homo sapiens
  misc_RNA (1)...(19): siRNA sense strand
uuggagagacauccuauau

SEQ ID NO: 126161 - RNA, 19 nt, Homo sapiens
  misc_RNA (1)...(19): siRNA sense strand
aagaauuccuagauaucug

SEQ ID NO: 126162 - RNA, 19 nt, Homo sapiens
  misc_RNA (1)...(19): siRNA sense strand
ugaugccauugucaaagaa

SEQ ID NO: 126163 - RNA, 19 nt, Homo sapiens
  misc_RNA (1)...(19): siRNA sense strand
accaaagagugcaucaaau

SEQ ID NO: 126164 - RNA, 19 nt, Homo sapiens
  misc_RNA (1)...(19): siRNA sense strand
ccuauauuccuuucagaga

SEQ ID NO: 126165 - RNA, 19 nt, Homo sapiens
  misc_RNA (1)...(19): siRNA sense strand
guuuacagauauuguugca

SEQ ID NO: 126166 - RNA, 19 nt, Homo sapiens
  misc_RNA (1)...(19): siRNA sense strand
uggagagacauccuauauu

SEQ ID NO: 126167 - RNA, 19 nt, Homo sapiens
  misc_RNA (1)...(19): siRNA sense strand
gccuauggaaguugcaauu

SEQ ID NO: 126168 - RNA, 19 nt, Homo sapiens
  misc_RNA (1)...(19): siRNA sense strand
guugcaauuucuacauuac

SEQ ID NO: 126169 - RNA, 19 nt, Homo sapiens
  misc_RNA (1)...(19): siRNA sense strand
agaagacaauccaaaacaa

SEQ ID NO: 126170 - RNA, 19 nt, Homo sapiens
  misc_RNA (1)...(19): siRNA sense strand
ggagagacauccuauauuc

SEQ ID NO: 126171 - RNA, 19 nt, Homo sapiens
  misc_RNA (1)...(19): siRNA sense strand
gauaauaccagaccgauuu

SEQ ID NO: 126172 - RNA, 19 nt, Homo sapiens
  misc_RNA (1)...(19): siRNA sense strand
gaugcuacaugguuauaua

SEQ ID NO: 126173 - RNA, 19 nt, Homo sapiens
  misc_RNA (1)...(19): siRNA sense strand
caguauggcuuccuuaauu

SEQ ID NO: 126174 - RNA, 19 nt, Homo sapiens
  misc_RNA (1)...(19): siRNA sense strand
cagcauagauaaugaacuu

SEQ ID NO: 126175 - RNA, 19 nt, Homo sapiens
  misc_RNA (1)...(19): siRNA sense strand
gaaucaagaucagcaagaa

SEQ ID NO: 126176 - RNA, 19 nt, Homo sapiens
  misc_RNA (1)...(19): siRNA sense strand
guacagugaugaugacgaa

SEQ ID NO: 126177 - RNA, 19 nt, Homo sapiens
  misc_RNA (1)...(19): siRNA sense strand
gcaaugguuuacagauauu

SEQ ID NO: 126178 - RNA, 19 nt, Homo sapiens
  misc_RNA (1)...(19): siRNA sense strand
gucaaagaauuccuagaua

SEQ ID NO: 126179 - RNA, 19 nt, Homo sapiens
  misc_RNA (1)...(19): siRNA sense strand
uaaagaaggcaaugcagua

SEQ ID NO: 126180 - RNA, 19 nt, Homo sapiens
  misc_RNA (1)...(19): siRNA sense strand
gaccaaagagugcaucaaa

SEQ ID NO: 126181 - RNA, 19 nt, Homo sapiens
  misc_RNA (1)...(19): siRNA sense strand
gcuacaucaugaagcauua

SEQ ID NO: 126182 - RNA, 19 nt, Homo sapiens
  misc_RNA (1)...(19): siRNA sense strand
ggcaaugguuuacagauau

SEQ ID NO: 126183 - RNA, 19 nt, Homo sapiens
  misc_RNA (1)...(19): siRNA sense strand
uggcaaugguuuacagaua

SEQ ID NO: 126184 - RNA, 19 nt, Homo sapiens
  misc_RNA (1)...(19): siRNA sense strand
cgaaaucaauggagugaca

SEQ ID NO: 126185 - RNA, 19 nt, Homo sapiens
  misc_RNA (1)...(19): siRNA sense strand
guugcaagaucaauaagaa

SEQ ID NO: 126186 - RNA, 19 nt, Homo sapiens
  misc_RNA (1)...(19): siRNA sense strand
uuacacuucuugacuguuu

SEQ ID NO: 126187 - RNA, 19 nt, Homo sapiens
  misc_RNA (1)...(19): siRNA sense strand
ccaaagagugcaucaaaug

SEQ ID NO: 126188 - RNA, 19 nt, Homo sapiens
  misc_RNA (1)...(19): siRNA sense strand
gacacaaggugauagacuu

SEQ ID NO: 126189 - RNA, 19 nt, Homo sapiens
  misc_RNA (1)...(19): siRNA sense strand
guacauuauuucagcauag

SEQ ID NO: 126190 - RNA, 19 nt, Homo sapiens
  misc_RNA (1)...(19): siRNA sense strand
guuggaugcuacaugguua

SEQ ID NO: 126191 - RNA, 19 nt, Homo sapiens
  misc_RNA (1)...(19): siRNA sense strand
gcauagauaaugaacuuga

SEQ ID NO: 126192 - RNA, 19 nt, Homo sapiens
  misc_RNA (1)...(19): siRNA sense strand
aaagagugcaucaaaugua

SEQ ID NO: 126193 - RNA, 19 nt, Homo sapiens
  misc_RNA (1)...(19): siRNA sense strand
gaacuucuacgcagauuuu

SEQ ID NO: 126194 - RNA, 19 nt, Homo sapiens
  misc_RNA (1)...(19): siRNA sense strand
guugaugacauuuccauaa

SEQ ID NO: 126195 - RNA, 19 nt, Homo sapiens
  misc_RNA (1)...(19): siRNA sense strand
uuucagagaugcugccuau

SEQ ID NO: 126196 - RNA, 19 nt, Homo sapiens
  misc_RNA (1)...(19): siRNA sense strand
ggagugacacaaggugaua

SEQ ID NO: 126197 - RNA, 19 nt, Homo sapiens
  misc_RNA (1)...(19): siRNA sense strand
caaagaauuccuagauauc

SEQ ID NO: 126198 - RNA, 19 nt, Homo sapiens
  misc_RNA (1)...(19): siRNA sense strand
ucaccgaucgccuuuguuu

SEQ ID NO: 126199 - RNA, 19 nt, Homo sapiens
  misc_RNA (1)...(19): siRNA sense strand
caucaccgaucgccuuugu

SEQ ID NO: 126200 - RNA, 19 nt, Homo sapiens
  misc_RNA (1)...(19): siRNA sense strand
gaacuugaauaugagaacu

SEQ ID NO: 126201 - RNA, 19 nt, Homo sapiens
  misc_RNA (1)...(19): siRNA sense strand
cagagcagccuucuccaaa

SEQ ID NO: 126202 - RNA, 19 nt, Homo sapiens
  misc_RNA (1)...(19): siRNA sense strand
cagagaugcugccuaugga

SEQ ID NO: 126203 - RNA, 19 nt, Homo sapiens
  misc_RNA (1)...(19): siRNA sense strand
caaagagugcaucaaaugu

SEQ ID NO: 126204 - RNA, 19 nt, Homo sapiens
  misc_RNA (1)...(19): siRNA sense strand
uaaauggggucgagaauca

SEQ ID NO: 126205 - RNA, 19 nt, Homo sapiens
  misc_RNA (1)...(19): siRNA sense strand
gagcagccuucuccaaacu

SEQ ID NO: 126206 - RNA, 19 nt, Homo sapiens
  misc_RNA (1)...(19): siRNA sense strand
aguauggcuuccuuaauuu

SEQ ID NO: 126207 - RNA, 19 nt, Homo sapiens
  misc_RNA (1)...(19): siRNA sense strand
caacucauuuaaccuugau

SEQ ID NO: 126208 - RNA, 19 nt, Homo sapiens
  misc_RNA (1)...(19): siRNA sense strand
ccagaagaagcauauagaa

SEQ ID NO: 126209 - RNA, 19 nt, Homo sapiens
  misc_RNA (1)...(19): siRNA sense strand
cuauggaaguugcaauuuc

SEQ ID NO: 126210 - RNA, 19 nt, Homo sapiens
  misc_RNA (1)...(19): siRNA sense strand
gaaguugcaauuucuacau

SEQ ID NO: 126211 - RNA, 19 nt, Homo sapiens
  misc_RNA (1)...(19): siRNA sense strand
ggagaauggacaacacaga

SEQ ID NO: 126212 - RNA, 19 nt, Homo sapiens
  misc_RNA (1)...(19): siRNA sense strand
cagaagaagcauauagaau

SEQ ID NO: 126213 - RNA, 19 nt, Homo sapiens
  misc_RNA (1)...(19): siRNA sense strand
agaccuggcucggugauug

SEQ ID NO: 126214 - RNA, 19 nt, Homo sapiens
  misc_RNA (1)...(19): siRNA sense strand
agaaggcaaugcaguaugg

SEQ ID NO: 126215 - RNA, 19 nt, Homo sapiens
  misc_RNA (1)...(19): siRNA sense strand
gagacauccuauauuccuu

SEQ ID NO: 126216 - RNA, 19 nt, Homo sapiens
  misc_RNA (1)...(19): siRNA sense strand
gcagccuucuccaaacuuc

SEQ ID NO: 126217 - RNA, 19 nt, Homo sapiens
  misc_RNA (1)...(19): siRNA sense strand
gcaguauggcuuccuuaau

SEQ ID NO: 126218 - RNA, 19 nt, Homo sapiens
  misc_RNA (1)...(19): siRNA sense strand
uauauuccuuucagagaug

SEQ ID NO: 126219 - RNA, 19 nt, Homo sapiens
  misc_RNA (1)...(19): siRNA sense strand
uugcaaagcuggccuuggu

SEQ ID NO: 126220 - RNA, 19 nt, Homo sapiens
  misc_RNA (1)...(19): siRNA sense strand
uauggaaguugcaauuucu

SEQ ID NO: 126221 - RNA, 19 nt, Homo sapiens
  misc_RNA (1)...(19): siRNA sense strand
gaagacaauccaaaacaaa

SEQ ID NO: 126222 - RNA, 19 nt, Homo sapiens
  misc_RNA (1)...(19): siRNA sense strand
cuagauaucugugaaaaug

SEQ ID NO: 126223 - RNA, 19 nt, Homo sapiens
  misc_RNA (1)...(19): siRNA sense strand
cugaugccauugucaaaga

SEQ ID NO: 126224 - RNA, 19 nt, Homo sapiens
  misc_RNA (1)...(19): siRNA sense strand
gaugcugccuauggaaguu

SEQ ID NO: 126225 - RNA, 19 nt, Homo sapiens
  misc_RNA (1)...(19): siRNA sense strand
gcaggagaauggacaacac

SEQ ID NO: 126226 - RNA, 19 nt, Homo sapiens
  misc_RNA (1)...(19): siRNA sense strand
caaaugcugccuuccuugu

SEQ ID NO: 126227 - RNA, 19 nt, Homo sapiens
  misc_RNA (1)...(19): siRNA sense strand
ugucaaagaauuccuagau

SEQ ID NO: 126228 - RNA, 19 nt, Homo sapiens
  misc_RNA (1)...(19): siRNA sense strand
uaugaugccaaacgcuuua

SEQ ID NO: 126229 - RNA, 19 nt, Homo sapiens
  misc_RNA (1)...(19): siRNA sense strand
ucagagaugcugccuaugg

SEQ ID NO: 126230 - RNA, 19 nt, Homo sapiens
  misc_RNA (1)...(19): siRNA sense strand
ccugagacuuauauucaau

SEQ ID NO: 126231 - RNA, 19 nt, Homo sapiens
  misc_RNA (1)...(19): siRNA sense strand
ggauaauaccagaccgauu

SEQ ID NO: 126232 - RNA, 19 nt, Homo sapiens
  misc_RNA (1)...(19): siRNA sense strand
cagauauuguugcaagauc

SEQ ID NO: 126233 - RNA, 19 nt, Homo sapiens
  misc_RNA (1)...(19): siRNA sense strand
auaccagaccgauuuauug

SEQ ID NO: 126234 - RNA, 19 nt, Homo sapiens
  misc_RNA (1)...(19): siRNA sense strand
cuauauuccuuucagagau

SEQ ID NO: 126235 - RNA, 19 nt, Homo sapiens
  misc_RNA (1)...(19): siRNA sense strand
aaugcugccuuccuuguug

SEQ ID NO: 126236 - RNA, 19 nt, Homo sapiens
  misc_RNA (1)...(19): siRNA sense strand
ggaaguugcaauuucuaca

SEQ ID NO: 126237 - RNA, 19 nt, Homo sapiens
  misc_RNA (1)...(19): siRNA sense strand
gacagcagccgagaccauu

SEQ ID NO: 126238 - RNA, 19 nt, Homo sapiens
  misc_RNA (1)...(19): siRNA sense strand
cuguggaccucauucaaga

SEQ ID NO: 126239 - RNA, 19 nt, Homo sapiens
  misc_RNA (1)...(19): siRNA sense strand
gacgaaaucaauggaguga

SEQ ID NO: 126240 - RNA, 19 nt, Homo sapiens
  misc_RNA (1)...(19): siRNA sense strand
ucaaucuggcaaugguuua

SEQ ID NO: 126241 - RNA, 19 nt, Homo sapiens
  misc_RNA (1)...(19): siRNA sense strand
aagcagaagacaauccaaa

SEQ ID NO: 126242 - RNA, 19 nt, Homo sapiens
  misc_RNA (1)...(19): siRNA sense strand
cauuacacuucuugacugu

SEQ ID NO: 126243 - RNA, 19 nt, Homo sapiens
  misc_RNA (1)...(19): siRNA sense strand
gacauccuauauuccuuuc

SEQ ID NO: 126244 - RNA, 19 nt, Homo sapiens
  misc_RNA (1)...(19): siRNA sense strand
agacauccuauauuccuuu

SEQ ID NO: 126245 - RNA, 19 nt, Homo sapiens
  misc_RNA (1)...(19): siRNA sense strand
agauauuguugcaagauca

SEQ ID NO: 126246 - RNA, 19 nt, Homo sapiens
  misc_RNA (1)...(19): siRNA sense strand
ggucgagaaucaagaucag

SEQ ID NO: 126247 - RNA, 19 nt, Homo sapiens
  misc_RNA (1)...(19): siRNA sense strand
ucaugaagcauuacaggau

SEQ ID NO: 126248 - RNA, 19 nt, Homo sapiens
  misc_RNA (1)...(19): siRNA sense strand
gacaucaccgaucgccuuu

SEQ ID NO: 126249 - RNA, 19 nt, Homo sapiens
  misc_RNA (1)...(19): siRNA sense strand
aagagugcaucaaauguac

SEQ ID NO: 126250 - RNA, 19 nt, Homo sapiens
  misc_RNA (1)...(19): siRNA sense strand
cauccuauauuccuuucag

SEQ ID NO: 126251 - RNA, 19 nt, Homo sapiens
  misc_RNA (1)...(19): siRNA sense strand
ugagggugccauugcagua

SEQ ID NO: 126252 - RNA, 19 nt, Homo sapiens
  misc_RNA (1)...(19): siRNA sense strand
ucaccaugaucuuuucuuu

SEQ ID NO: 126253 - RNA, 19 nt, Homo sapiens
  misc_RNA (1)...(19): siRNA sense strand
aaagaaggcaaugcaguau

SEQ ID NO: 126254 - RNA, 19 nt, Homo sapiens
  misc_RNA (1)...(19): siRNA sense strand
gauauuguugcaagaucaa

SEQ ID NO: 126255 - RNA, 19 nt, Homo sapiens
  misc_RNA (1)...(19): siRNA sense strand
cagugaugaugacgaaauc

SEQ ID NO: 126256 - RNA, 19 nt, Homo sapiens
  misc_RNA (1)...(19): siRNA sense strand
auaauaccagaccgauuua

SEQ ID NO: 126257 - RNA, 19 nt, Homo sapiens
  misc_RNA (1)...(19): siRNA sense strand
gcagcuccacgcagcaaga

SEQ ID NO: 126258 - RNA, 19 nt, Homo sapiens
  misc_RNA (1)...(19): siRNA sense strand
gaaccguacagugaugaug

SEQ ID NO: 126259 - RNA, 19 nt, Homo sapiens
  misc_RNA (1)...(19): siRNA sense strand
cuacugaugccauugucaa

SEQ ID NO: 126260 - RNA, 19 nt, Homo sapiens
  misc_RNA (1)...(19): siRNA sense strand
uuggagagacauccuauau

SEQ ID NO: 126261 - RNA, 19 nt, Homo sapiens
  misc_RNA (1)...(19): siRNA sense strand
aagaauuccuagauaucug

SEQ ID NO: 126262 - RNA, 19 nt, Homo sapiens
  misc_RNA (1)...(19): siRNA sense strand
ugaugccauugucaaagaa

SEQ ID NO: 126263 - RNA, 19 nt, Homo sapiens
  misc_RNA (1)...(19): siRNA sense strand
accaaagagugcaucaaau

SEQ ID NO: 126264 - RNA, 19 nt, Homo sapiens
  misc_RNA (1)...(19): siRNA sense strand
ccuauauuccuuucagaga

SEQ ID NO: 126265 - RNA, 19 nt, Homo sapiens
  misc_RNA (1)...(19): siRNA sense strand
guuuacagauauuguugca

SEQ ID NO: 126266 - RNA, 19 nt, Homo sapiens
  misc_RNA (1)...(19): siRNA sense strand
uggagagacauccuauauu

SEQ ID NO: 126267 - RNA, 19 nt, Homo sapiens
  misc_RNA (1)...(19): siRNA sense strand
gccuauggaaguugcaauu

SEQ ID NO: 126268 - RNA, 19 nt, Homo sapiens
  misc_RNA (1)...(19): siRNA sense strand
guugcaauuucuacauuac

SEQ ID NO: 126269 - RNA, 19 nt, Homo sapiens
  misc_RNA (1)...(19): siRNA sense strand
agaagacaauccaaaacaa

SEQ ID NO: 126270 - RNA, 19 nt, Homo sapiens
  misc_RNA (1)...(19): siRNA sense strand
ggacauugauagccuguua

SEQ ID NO: 126271 - RNA, 19 nt, Homo sapiens
  misc_RNA (1)...(19): siRNA sense strand
gcaaugguguacagauauu

SEQ ID NO: 126272 - RNA, 19 nt, Homo sapiens
  misc_RNA (1)...(19): siRNA sense strand
caugaaagaucgguuauau

SEQ ID NO: 126273 - RNA, 19 nt, Homo sapiens
  misc_RNA (1)...(19): siRNA sense strand
agaaagggauuacaacaug

SEQ ID NO: 126274 - RNA, 19 nt, Homo sapiens
  misc_RNA (1)...(19): siRNA sense strand
cauuugauguggaugaaua

SEQ ID NO: 126275 - RNA, 19 nt, Homo sapiens
  misc_RNA (1)...(19): siRNA sense strand
guuuacacaugcugaaaua

SEQ ID NO: 126276 - RNA, 19 nt, Homo sapiens
  misc_RNA (1)...(19): siRNA sense strand
gauagccuguuauguaaug

SEQ ID NO: 126277 - RNA, 19 nt, Homo sapiens
  misc_RNA (1)...(19): siRNA sense strand
gagaaugguuauccucuuc

SEQ ID NO: 126278 - RNA, 19 nt, Homo sapiens
  misc_RNA (1)...(19): siRNA sense strand
gaagccuacuuuccuuauu

SEQ ID NO: 126279 - RNA, 19 nt, Homo sapiens
  misc_RNA (1)...(19): siRNA sense strand
ggaagaacagggacauuga

SEQ ID NO: 126280 - RNA, 19 nt, Homo sapiens
  misc_RNA (1)...(19): siRNA sense strand
gcugcaaacuaaacaagaa

SEQ ID NO: 126281 - RNA, 19 nt, Homo sapiens
  misc_RNA (1)...(19): siRNA sense strand
augaggagcuggucuauga

SEQ ID NO: 126282 - RNA, 19 nt, Homo sapiens
  misc_RNA (1)...(19): siRNA sense strand
uggcaaugguguacagaua

SEQ ID NO: 126283 - RNA, 19 nt, Homo sapiens
  misc_RNA (1)...(19): siRNA sense strand
cugcaaagcuggucuugga

SEQ ID NO: 126284 - RNA, 19 nt, Homo sapiens
  misc_RNA (1)...(19): siRNA sense strand
ccuaugcaguaaucuauuu

SEQ ID NO: 126285 - RNA, 19 nt, Homo sapiens
  misc_RNA (1)...(19): siRNA sense strand
ucauacaguuugucaagaa

SEQ ID NO: 126286 - RNA, 19 nt, Homo sapiens
  misc_RNA (1)...(19): siRNA sense strand
uaaagaagacaccagaaga

SEQ ID NO: 126287 - RNA, 19 nt, Homo sapiens
  misc_RNA (1)...(19): siRNA sense strand
uugauagccuguuauguaa

SEQ ID NO: 126288 - RNA, 19 nt, Homo sapiens
  misc_RNA (1)...(19): siRNA sense strand
gggauuacaacauggauuu

SEQ ID NO: 126289 - RNA, 19 nt, Homo sapiens
  misc_RNA (1)...(19): siRNA sense strand
ucaccauucucgacuguuu

SEQ ID NO: 126290 - RNA, 19 nt, Homo sapiens
  misc_RNA (1)...(19): siRNA sense strand
aagccuacuuuccuuauuu

SEQ ID NO: 126291 - RNA, 19 nt, Homo sapiens
  misc_RNA (1)...(19): siRNA sense strand
ugauguggaugaauaugaa

SEQ ID NO: 126292 - RNA, 19 nt, Homo sapiens
  misc_RNA (1)...(19): siRNA sense strand
gcacuaugaccucuucuuc

SEQ ID NO: 126293 - RNA, 19 nt, Homo sapiens
  misc_RNA (1)...(19): siRNA sense strand
aaagaagacaccagaagaa

SEQ ID NO: 126294 - RNA, 19 nt, Homo sapiens
  misc_RNA (1)...(19): siRNA sense strand
gcacaguaaauacccacua

SEQ ID NO: 126295 - RNA, 19 nt, Homo sapiens
  misc_RNA (1)...(19): siRNA sense strand
uaaugugacugcaguugug

SEQ ID NO: 126296 - RNA, 19 nt, Homo sapiens
  misc_RNA (1)...(19): siRNA sense strand
guucaugaaagaucgguua

SEQ ID NO: 126297 - RNA, 19 nt, Homo sapiens
  misc_RNA (1)...(19): siRNA sense strand
cacaguaaauacccacuau

SEQ ID NO: 126298 - RNA, 19 nt, Homo sapiens
  misc_RNA (1)...(19): siRNA sense strand
gaagaacagggacauugau

SEQ ID NO: 126299 - RNA, 19 nt, Homo sapiens
  misc_RNA (1)...(19): siRNA sense strand
auugauagccuguuaugua

SEQ ID NO: 126300 - RNA, 19 nt, Homo sapiens
  misc_RNA (1)...(19): siRNA sense strand
cauacaguuugucaagaaa

SEQ ID NO: 126301 - RNA, 19 nt, Homo sapiens
  misc_RNA (1)...(19): siRNA sense strand
gaacagggacauugauagc

SEQ ID NO: 126302 - RNA, 19 nt, Homo sapiens
  misc_RNA (1)...(19): siRNA sense strand
gaccucuucuucauagaug

SEQ ID NO: 126303 - RNA, 19 nt, Homo sapiens
  misc_RNA (1)...(19): siRNA sense strand
cuugugaguucaugaaaga

SEQ ID NO: 126304 - RNA, 19 nt, Homo sapiens
  misc_RNA (1)...(19): siRNA sense strand
gaggagcuggucuaugaaa

SEQ ID NO: 126305 - RNA, 19 nt, Homo sapiens
  misc_RNA (1)...(19): siRNA sense strand
uaaugaaacacuacagguu

SEQ ID NO: 126306 - RNA, 19 nt, Homo sapiens
  misc_RNA (1)...(19): siRNA sense strand
auucagggaugcuuccuuu

SEQ ID NO: 126307 - RNA, 19 nt, Homo sapiens
  misc_RNA (1)...(19): siRNA sense strand
aaacauggaacgauuugga

SEQ ID NO: 126308 - RNA, 19 nt, Homo sapiens
  misc_RNA (1)...(19): siRNA sense strand
gcacuuacaaucucaccau

SEQ ID NO: 126309 - RNA, 19 nt, Homo sapiens
  misc_RNA (1)...(19): siRNA sense strand
gaacauuaugagcgaguug

SEQ ID NO: 126310 - RNA, 19 nt, Homo sapiens
  misc_RNA (1)...(19): siRNA sense strand
ugagaaugguuauccucuu

SEQ ID NO: 126311 - RNA, 19 nt, Homo sapiens
  misc_RNA (1)...(19): siRNA sense strand
cacuacagguuuacacaug

SEQ ID NO: 126312 - RNA, 19 nt, Homo sapiens
  misc_RNA (1)...(19): siRNA sense strand
gaacuuggcaaugguguac

SEQ ID NO: 126313 - RNA, 19 nt, Homo sapiens
  misc_RNA (1)...(19): siRNA sense strand
cagggaugcuuccuuugga

SEQ ID NO: 126314 - RNA, 19 nt, Homo sapiens
  misc_RNA (1)...(19): siRNA sense strand
gagcuggucuaugaaaauu

SEQ ID NO: 126315 - RNA, 19 nt, Homo sapiens
  misc_RNA (1)...(19): siRNA sense strand
aagaacagggacauugaua

SEQ ID NO: 126316 - RNA, 19 nt, Homo sapiens
  misc_RNA (1)...(19): siRNA sense strand
gcaaaauugagaaugguua

SEQ ID NO: 126317 - RNA, 19 nt, Homo sapiens
  misc_RNA (1)...(19): siRNA sense strand
ccgcugaacuuggcaaugg

SEQ ID NO: 126318 - RNA, 19 nt, Homo sapiens
  misc_RNA (1)...(19): siRNA sense strand
cgagcacuaugaccucuuc

SEQ ID NO: 126319 - RNA, 19 nt, Homo sapiens
  misc_RNA (1)...(19): siRNA sense strand
aggcaaagcgcuucacaga

SEQ ID NO: 126320 - RNA, 19 nt, Homo sapiens
  misc_RNA (1)...(19): siRNA sense strand
caucgccguucacugcaaa

SEQ ID NO: 126321 - RNA, 19 nt, Homo sapiens
  misc_RNA (1)...(19): siRNA sense strand
uacaguuugucaagaaaga

SEQ ID NO: 126322 - RNA, 19 nt, Homo sapiens
  misc_RNA (1)...(19): siRNA sense strand
gcaguugugaggcuaaaca

SEQ ID NO: 126323 - RNA, 19 nt, Homo sapiens
  misc_RNA (1)...(19): siRNA sense strand
guggaugaauaugaacauu

SEQ ID NO: 126324 - RNA, 19 nt, Homo sapiens
  misc_RNA (1)...(19): siRNA sense strand
ccugaagccuacuuuccuu

SEQ ID NO: 126325 - RNA, 19 nt, Homo sapiens
  misc_RNA (1)...(19): siRNA sense strand
cuuacaaucucaccauucu

SEQ ID NO: 126326 - RNA, 19 nt, Homo sapiens
  misc_RNA (1)...(19): siRNA sense strand
uggccuagaugauaugucu

SEQ ID NO: 126327 - RNA, 19 nt, Homo sapiens
  misc_RNA (1)...(19): siRNA sense strand
ggcaaugguguacagauau

SEQ ID NO: 126328 - RNA, 19 nt, Homo sapiens
  misc_RNA (1)...(19): siRNA sense strand
cacaaaacauggaacgauu

SEQ ID NO: 126329 - RNA, 19 nt, Homo sapiens
  misc_RNA (1)...(19): siRNA sense strand
uuucuggccuagaugauau

SEQ ID NO: 126330 - RNA, 19 nt, Homo sapiens
  misc_RNA (1)...(19): siRNA sense strand
uccagugaaggaaguauua

SEQ ID NO: 126331 - RNA, 19 nt, Homo sapiens
  misc_RNA (1)...(19): siRNA sense strand
gacaacaucgugcgaaggu

SEQ ID NO: 126332 - RNA, 19 nt, Homo sapiens
  misc_RNA (1)...(19): siRNA sense strand
cagaaagggauuacaacau

SEQ ID NO: 126333 - RNA, 19 nt, Homo sapiens
  misc_RNA (1)...(19): siRNA sense strand
ucagaaagggauuacaaca

SEQ ID NO: 126334 - RNA, 19 nt, Homo sapiens
  misc_RNA (1)...(19): siRNA sense strand
gcacuccugucuggcucaa

SEQ ID NO: 126335 - RNA, 19 nt, Homo sapiens
  misc_RNA (1)...(19): siRNA sense strand
gcacacccagugacaacau

SEQ ID NO: 126336 - RNA, 19 nt, Homo sapiens
  misc_RNA (1)...(19): siRNA sense strand
gcuugugaguucaugaaag

SEQ ID NO: 126337 - RNA, 19 nt, Homo sapiens
  misc_RNA (1)...(19): siRNA sense strand
cugaacaucugugagaaca

SEQ ID NO: 126338 - RNA, 19 nt, Homo sapiens
  misc_RNA (1)...(19): siRNA sense strand
acacaugcugaaauaauug

SEQ ID NO: 126339 - RNA, 19 nt, Homo sapiens
  misc_RNA (1)...(19): siRNA sense strand
ccagugaaggaaguauuaa

SEQ ID NO: 126340 - RNA, 19 nt, Homo sapiens
  misc_RNA (1)...(19): siRNA sense strand
ucuauugguggaaaucuuu

SEQ ID NO: 126341 - RNA, 19 nt, Homo sapiens
  misc_RNA (1)...(19): siRNA sense strand
gcaaacuaaacaagaaacu

SEQ ID NO: 126342 - RNA, 19 nt, Homo sapiens
  misc_RNA (1)...(19): siRNA sense strand
gggcuugugaguucaugaa

SEQ ID NO: 126343 - RNA, 19 nt, Homo sapiens
  misc_RNA (1)...(19): siRNA sense strand
uggaagaacagggacauug

SEQ ID NO: 126344 - RNA, 19 nt, Homo sapiens
  misc_RNA (1)...(19): siRNA sense strand
uuaaagaagacaccagaag

SEQ ID NO: 126345 - RNA, 19 nt, Homo sapiens
  misc_RNA (1)...(19): siRNA sense strand
aaagauuuaugaggcaaag

SEQ ID NO: 126346 - RNA, 19 nt, Homo sapiens
  misc_RNA (1)...(19): siRNA sense strand
ucaugaaagaucgguuaua

SEQ ID NO: 126347 - RNA, 19 nt, Homo sapiens
  misc_RNA (1)...(19): siRNA sense strand
cacuuacaaucucaccauu

SEQ ID NO: 126348 - RNA, 19 nt, Homo sapiens
  misc_RNA (1)...(19): siRNA sense strand
aaucauacaguuugucaag

SEQ ID NO: 126349 - RNA, 19 nt, Homo sapiens
  misc_RNA (1)...(19): siRNA sense strand
aaucgaccauccagugaag

SEQ ID NO: 126350 - RNA, 19 nt, Homo sapiens
  misc_RNA (1)...(19): siRNA sense strand
ccggccaggcucuauuaua

SEQ ID NO: 126351 - RNA, 19 nt, Homo sapiens
  misc_RNA (1)...(19): siRNA sense strand
uugcuuggauuagaauaug

SEQ ID NO: 126352 - RNA, 19 nt, Homo sapiens
  misc_RNA (1)...(19): siRNA sense strand
ugaagccuacuuuccuuau

SEQ ID NO: 126353 - RNA, 19 nt, Homo sapiens
  misc_RNA (1)...(19): siRNA sense strand
cugaaauaauugcuuggau

SEQ ID NO: 126354 - RNA, 19 nt, Homo sapiens
  misc_RNA (1)...(19): siRNA sense strand
gaucgguuauauuuugcua

SEQ ID NO: 126355 - RNA, 19 nt, Homo sapiens
  misc_RNA (1)...(19): siRNA sense strand
cauaaugugacugcaguug

SEQ ID NO: 126356 - RNA, 19 nt, Homo sapiens
  misc_RNA (1)...(19): siRNA sense strand
gaaugguuauccucuucac

SEQ ID NO: 126357 - RNA, 19 nt, Homo sapiens
  misc_RNA (1)...(19): siRNA sense strand
gcugaaauaauugcuugga

SEQ ID NO: 126358 - RNA, 19 nt, Homo sapiens
  misc_RNA (1)...(19): siRNA sense strand
aaucggggcuugugaguuc

SEQ ID NO: 126359 - RNA, 19 nt, Homo sapiens
  misc_RNA (1)...(19): siRNA sense strand
gguuuacacaugcugaaau

SEQ ID NO: 126360 - RNA, 19 nt, Homo sapiens
  misc_RNA (1)...(19): siRNA sense strand
ggacauugauagccuguua

SEQ ID NO: 126361 - RNA, 19 nt, Homo sapiens
  misc_RNA (1)...(19): siRNA sense strand
gcaaugguguacagauauu

SEQ ID NO: 126362 - RNA, 19 nt, Homo sapiens
  misc_RNA (1)...(19): siRNA sense strand
caugaaagaucgguuauau

SEQ ID NO: 126363 - RNA, 19 nt, Homo sapiens
  misc_RNA (1)...(19): siRNA sense strand
agaaagggauuacaacaug

SEQ ID NO: 126364 - RNA, 19 nt, Homo sapiens
  misc_RNA (1)...(19): siRNA sense strand
cauuugauguggaugaaua

SEQ ID NO: 126365 - RNA, 19 nt, Homo sapiens
  misc_RNA (1)...(19): siRNA sense strand
guuuacacaugcugaaaua

SEQ ID NO: 126366 - RNA, 19 nt, Homo sapiens
  misc_RNA (1)...(19): siRNA sense strand
gauagccuguuauguaaug

SEQ ID NO: 126367 - RNA, 19 nt, Homo sapiens
  misc_RNA (1)...(19): siRNA sense strand
gagaaugguuauccucuuc

SEQ ID NO: 126368 - RNA, 19 nt, Homo sapiens
  misc_RNA (1)...(19): siRNA sense strand
gaagccuacuuuccuuauu

SEQ ID NO: 126369 - RNA, 19 nt, Homo sapiens
  misc_RNA (1)...(19): siRNA sense strand
ggaagaacagggacauuga

SEQ ID NO: 126370 - RNA, 19 nt, Homo sapiens
  misc_RNA (1)...(19): siRNA sense strand
gcugcaaacuaaacaagaa

SEQ ID NO: 126371 - RNA, 19 nt, Homo sapiens
  misc_RNA (1)...(19): siRNA sense strand
augaggagcuggucuauga

SEQ ID NO: 126372 - RNA, 19 nt, Homo sapiens
  misc_RNA (1)...(19): siRNA sense strand
uggcaaugguguacagaua

SEQ ID NO: 126373 - RNA, 19 nt, Homo sapiens
  misc_RNA (1)...(19): siRNA sense strand
cugcaaagcuggucuugga

SEQ ID NO: 126374 - RNA, 19 nt, Homo sapiens
  misc_RNA (1)...(19): siRNA sense strand
ccuaugcaguaaucuauuu

SEQ ID NO: 126375 - RNA, 19 nt, Homo sapiens
  misc_RNA (1)...(19): siRNA sense strand
ucauacaguuugucaagaa

SEQ ID NO: 126376 - RNA, 19 nt, Homo sapiens
  misc_RNA (1)...(19): siRNA sense strand
uaaagaagacaccagaaga

SEQ ID NO: 126377 - RNA, 19 nt, Homo sapiens
  misc_RNA (1)...(19): siRNA sense strand
uugauagccuguuauguaa

SEQ ID NO: 126378 - RNA, 19 nt, Homo sapiens
  misc_RNA (1)...(19): siRNA sense strand
gggauuacaacauggauuu

SEQ ID NO: 126379 - RNA, 19 nt, Homo sapiens
  misc_RNA (1)...(19): siRNA sense strand
ucaccauucucgacuguuu

SEQ ID NO: 126380 - RNA, 19 nt, Homo sapiens
  misc_RNA (1)...(19): siRNA sense strand
aagccuacuuuccuuauuu

SEQ ID NO: 126381 - RNA, 19 nt, Homo sapiens
  misc_RNA (1)...(19): siRNA sense strand
ugauguggaugaauaugaa

SEQ ID NO: 126382 - RNA, 19 nt, Homo sapiens
  misc_RNA (1)...(19): siRNA sense strand
gcacuaugaccucuucuuc

SEQ ID NO: 126383 - RNA, 19 nt, Homo sapiens
  misc_RNA (1)...(19): siRNA sense strand
aaagaagacaccagaagaa

SEQ ID NO: 126384 - RNA, 19 nt, Homo sapiens
  misc_RNA (1)...(19): siRNA sense strand
gcacaguaaauacccacua

SEQ ID NO: 126385 - RNA, 19 nt, Homo sapiens
  misc_RNA (1)...(19): siRNA sense strand
uaaugugacugcaguugug

SEQ ID NO: 126386 - RNA, 19 nt, Homo sapiens
  misc_RNA (1)...(19): siRNA sense strand
guucaugaaagaucgguua

SEQ ID NO: 126387 - RNA, 19 nt, Homo sapiens
  misc_RNA (1)...(19): siRNA sense strand
cacaguaaauacccacuau

SEQ ID NO: 126388 - RNA, 19 nt, Homo sapiens
  misc_RNA (1)...(19): siRNA sense strand
gaagaacagggacauugau

SEQ ID NO: 126389 - RNA, 19 nt, Homo sapiens
  misc_RNA (1)...(19): siRNA sense strand
auugauagccuguuaugua

SEQ ID NO: 126390 - RNA, 19 nt, Homo sapiens
  misc_RNA (1)...(19): siRNA sense strand
cauacaguuugucaagaaa

SEQ ID NO: 126391 - RNA, 19 nt, Homo sapiens
  misc_RNA (1)...(19): siRNA sense strand
gaacagggacauugauagc

SEQ ID NO: 126392 - RNA, 19 nt, Homo sapiens
  misc_RNA (1)...(19): siRNA sense strand
gaccucuucuucauagaug

SEQ ID NO: 126393 - RNA, 19 nt, Homo sapiens
  misc_RNA (1)...(19): siRNA sense strand
cuugugaguucaugaaaga

SEQ ID NO: 126394 - RNA, 19 nt, Homo sapiens
  misc_RNA (1)...(19): siRNA sense strand
gaggagcuggucuaugaaa

SEQ ID NO: 126395 - RNA, 19 nt, Homo sapiens
  misc_RNA (1)...(19): siRNA sense strand
uaaugaaacacuacagguu

SEQ ID NO: 126396 - RNA, 19 nt, Homo sapiens
  misc_RNA (1)...(19): siRNA sense strand
auucagggaugcuuccuuu

SEQ ID NO: 126397 - RNA, 19 nt, Homo sapiens
  misc_RNA (1)...(19): siRNA sense strand
aaacauggaacgauuugga

SEQ ID NO: 126398 - RNA, 19 nt, Homo sapiens
  misc_RNA (1)...(19): siRNA sense strand
gcacuuacaaucucaccau

SEQ ID NO: 126399 - RNA, 19 nt, Homo sapiens
  misc_RNA (1)...(19): siRNA sense strand
gaacauuaugagcgaguug

SEQ ID NO: 126400 - RNA, 19 nt, Homo sapiens
  misc_RNA (1)...(19): siRNA sense strand
ugagaaugguuauccucuu

SEQ ID NO: 126401 - RNA, 19 nt, Homo sapiens
  misc_RNA (1)...(19): siRNA sense strand
cacuacagguuuacacaug

SEQ ID NO: 126402 - RNA, 19 nt, Homo sapiens
  misc_RNA (1)...(19): siRNA sense strand
gaacuuggcaaugguguac

SEQ ID NO: 126403 - RNA, 19 nt, Homo sapiens
  misc_RNA (1)...(19): siRNA sense strand
cagggaugcuuccuuugga

SEQ ID NO: 126404 - RNA, 19 nt, Homo sapiens
  misc_RNA (1)...(19): siRNA sense strand
gagcuggucuaugaaaauu

SEQ ID NO: 126405 - RNA, 19 nt, Homo sapiens
  misc_RNA (1)...(19): siRNA sense strand
aagaacagggacauugaua

SEQ ID NO: 126406 - RNA, 19 nt, Homo sapiens
  misc_RNA (1)...(19): siRNA sense strand
gcaaaauugagaaugguua

SEQ ID NO: 126407 - RNA, 19 nt, Homo sapiens
  misc_RNA (1)...(19): siRNA sense strand
ccgcugaacuuggcaaugg

SEQ ID NO: 126408 - RNA, 19 nt, Homo sapiens
  misc_RNA (1)...(19): siRNA sense strand
cgagcacuaugaccucuuc

SEQ ID NO: 126409 - RNA, 19 nt, Homo sapiens
  misc_RNA (1)...(19): siRNA sense strand
aggcaaagcgcuucacaga

SEQ ID NO: 126410 - RNA, 19 nt, Homo sapiens
  misc_RNA (1)...(19): siRNA sense strand
caucgccguucacugcaaa

SEQ ID NO: 126411 - RNA, 19 nt, Homo sapiens
  misc_RNA (1)...(19): siRNA sense strand
uacaguuugucaagaaaga

SEQ ID NO: 126412 - RNA, 19 nt, Homo sapiens
  misc_RNA (1)...(19): siRNA sense strand
gcaguugugaggcuaaaca

SEQ ID NO: 126413 - RNA, 19 nt, Homo sapiens
  misc_RNA (1)...(19): siRNA sense strand
guggaugaauaugaacauu

SEQ ID NO: 126414 - RNA, 19 nt, Homo sapiens
  misc_RNA (1)...(19): siRNA sense strand
ccugaagccuacuuuccuu

SEQ ID NO: 126415 - RNA, 19 nt, Homo sapiens
  misc_RNA (1)...(19): siRNA sense strand
cuuacaaucucaccauucu

SEQ ID NO: 126416 - RNA, 19 nt, Homo sapiens
  misc_RNA (1)...(19): siRNA sense strand
uggccuagaugauaugucu

SEQ ID NO: 126417 - RNA, 19 nt, Homo sapiens
  misc_RNA (1)...(19): siRNA sense strand
ggcaaugguguacagauau

SEQ ID NO: 126418 - RNA, 19 nt, Homo sapiens
  misc_RNA (1)...(19): siRNA sense strand
cacaaaacauggaacgauu

SEQ ID NO: 126419 - RNA, 19 nt, Homo sapiens
  misc_RNA (1)...(19): siRNA sense strand
uuucuggccuagaugauau

SEQ ID NO: 126420 - RNA, 19 nt, Homo sapiens
  misc_RNA (1)...(19): siRNA sense strand
uccagugaaggaaguauua

SEQ ID NO: 126421 - RNA, 19 nt, Homo sapiens
  misc_RNA (1)...(19): siRNA sense strand
gacaacaucgugcgaaggu

SEQ ID NO: 126422 - RNA, 19 nt, Homo sapiens
  misc_RNA (1)...(19): siRNA sense strand
cagaaagggauuacaacau

SEQ ID NO: 126423 - RNA, 19 nt, Homo sapiens
  misc_RNA (1)...(19): siRNA sense strand
ucagaaagggauuacaaca

SEQ ID NO: 126424 - RNA, 19 nt, Homo sapiens
  misc_RNA (1)...(19): siRNA sense strand
gcacuccugucuggcucaa

SEQ ID NO: 126425 - RNA, 19 nt, Homo sapiens
  misc_RNA (1)...(19): siRNA sense strand
gcacacccagugacaacau

SEQ ID NO: 126426 - RNA, 19 nt, Homo sapiens
  misc_RNA (1)...(19): siRNA sense strand
gcuugugaguucaugaaag

SEQ ID NO: 126427 - RNA, 19 nt, Homo sapiens
  misc_RNA (1)...(19): siRNA sense strand
cugaacaucugugagaaca

SEQ ID NO: 126428 - RNA, 19 nt, Homo sapiens
  misc_RNA (1)...(19): siRNA sense strand
acacaugcugaaauaauug

SEQ ID NO: 126429 - RNA, 19 nt, Homo sapiens
  misc_RNA (1)...(19): siRNA sense strand
ccagugaaggaaguauuaa

SEQ ID NO: 126430 - RNA, 19 nt, Homo sapiens
  misc_RNA (1)...(19): siRNA sense strand
ucuauugguggaaaucuuu

SEQ ID NO: 126431 - RNA, 19 nt, Homo sapiens
  misc_RNA (1)...(19): siRNA sense strand
gcaaacuaaacaagaaacu

SEQ ID NO: 126432 - RNA, 19 nt, Homo sapiens
  misc_RNA (1)...(19): siRNA sense strand
gggcuugugaguucaugaa

SEQ ID NO: 126433 - RNA, 19 nt, Homo sapiens
  misc_RNA (1)...(19): siRNA sense strand
uggaagaacagggacauug

SEQ ID NO: 126434 - RNA, 19 nt, Homo sapiens
  misc_RNA (1)...(19): siRNA sense strand
uuaaagaagacaccagaag

SEQ ID NO: 126435 - RNA, 19 nt, Homo sapiens
  misc_RNA (1)...(19): siRNA sense strand
aaagauuuaugaggcaaag

SEQ ID NO: 126436 - RNA, 19 nt, Homo sapiens
  misc_RNA (1)...(19): siRNA sense strand
ucaugaaagaucgguuaua

SEQ ID NO: 126437 - RNA, 19 nt, Homo sapiens
  misc_RNA (1)...(19): siRNA sense strand
cacuuacaaucucaccauu

SEQ ID NO: 126438 - RNA, 19 nt, Homo sapiens
  misc_RNA (1)...(19): siRNA sense strand
aaucauacaguuugucaag

SEQ ID NO: 126439 - RNA, 19 nt, Homo sapiens
  misc_RNA (1)...(19): siRNA sense strand
aaucgaccauccagugaag

SEQ ID NO: 126440 - RNA, 19 nt, Homo sapiens
  misc_RNA (1)...(19): siRNA sense strand
ccggccaggcucuauuaua

SEQ ID NO: 126441 - RNA, 19 nt, Homo sapiens
  misc_RNA (1)...(19): siRNA sense strand
uugcuuggauuagaauaug

SEQ ID NO: 126442 - RNA, 19 nt, Homo sapiens
  misc_RNA (1)...(19): siRNA sense strand
ugaagccuacuuuccuuau

SEQ ID NO: 126443 - RNA, 19 nt, Homo sapiens
  misc_RNA (1)...(19): siRNA sense strand
cugaaauaauugcuuggau

SEQ ID NO: 126444 - RNA, 19 nt, Homo sapiens
  misc_RNA (1)...(19): siRNA sense strand
gaucgguuauauuuugcua

SEQ ID NO: 126445 - RNA, 19 nt, Homo sapiens
  misc_RNA (1)...(19): siRNA sense strand
cauaaugugacugcaguug

SEQ ID NO: 126446 - RNA, 19 nt, Homo sapiens
  misc_RNA (1)...(19): siRNA sense strand
gaaugguuauccucuucac

SEQ ID NO: 126447 - RNA, 19 nt, Homo sapiens
  misc_RNA (1)...(19): siRNA sense strand
gcugaaauaauugcuugga

SEQ ID NO: 126448 - RNA, 19 nt, Homo sapiens
  misc_RNA (1)...(19): siRNA sense strand
aaucggggcuugugaguuc

SEQ ID NO: 126449 - RNA, 19 nt, Homo sapiens
  misc_RNA (1)...(19): siRNA sense strand
gguuuacacaugcugaaau

SEQ ID NO: 126450 - RNA, 19 nt, Homo sapiens
  misc_RNA (1)...(19): siRNA sense strand
ggacauugauagccuguua

SEQ ID NO: 126451 - RNA, 19 nt, Homo sapiens
  misc_RNA (1)...(19): siRNA sense strand
gcaaugguguacagauauu

SEQ ID NO: 126452 - RNA, 19 nt, Homo sapiens
  misc_RNA (1)...(19): siRNA sense strand
caugaaagaucgguuauau

SEQ ID NO: 126453 - RNA, 19 nt, Homo sapiens
  misc_RNA (1)...(19): siRNA sense strand
agaaagggauuacaacaug

SEQ ID NO: 126454 - RNA, 19 nt, Homo sapiens
  misc_RNA (1)...(19): siRNA sense strand
cauuugauguggaugaaua

SEQ ID NO: 126455 - RNA, 19 nt, Homo sapiens
  misc_RNA (1)...(19): siRNA sense strand
guuuacacaugcugaaaua

SEQ ID NO: 126456 - RNA, 19 nt, Homo sapiens
  misc_RNA (1)...(19): siRNA sense strand
gauagccuguuauguaaug

SEQ ID NO: 126457 - RNA, 19 nt, Homo sapiens
  misc_RNA (1)...(19): siRNA sense strand
gagaaugguuauccucuuc

SEQ ID NO: 126458 - RNA, 19 nt, Homo sapiens
  misc_RNA (1)...(19): siRNA sense strand
gaagccuacuuuccuuauu

SEQ ID NO: 126459 - RNA, 19 nt, Homo sapiens
  misc_RNA (1)...(19): siRNA sense strand
ggaagaacagggacauuga

SEQ ID NO: 126460 - RNA, 19 nt, Homo sapiens
  misc_RNA (1)...(19): siRNA sense strand
gcugcaaacuaaacaagaa

SEQ ID NO: 126461 - RNA, 19 nt, Homo sapiens
  misc_RNA (1)...(19): siRNA sense strand
augaggagcuggucuauga

SEQ ID NO: 126462 - RNA, 19 nt, Homo sapiens
  misc_RNA (1)...(19): siRNA sense strand
uggcaaugguguacagaua

SEQ ID NO: 126463 - RNA, 19 nt, Homo sapiens
  misc_RNA (1)...(19): siRNA sense strand
cugcaaagcuggucuugga

SEQ ID NO: 126464 - RNA, 19 nt, Homo sapiens
  misc_RNA (1)...(19): siRNA sense strand
ccuaugcaguaaucuauuu

SEQ ID NO: 126465 - RNA, 19 nt, Homo sapiens
  misc_RNA (1)...(19): siRNA sense strand
ucauacaguuugucaagaa

SEQ ID NO: 126466 - RNA, 19 nt, Homo sapiens
  misc_RNA (1)...(19): siRNA sense strand
uaaagaagacaccagaaga

SEQ ID NO: 126467 - RNA, 19 nt, Homo sapiens
  misc_RNA (1)...(19): siRNA sense strand
uugauagccuguuauguaa

SEQ ID NO: 126468 - RNA, 19 nt, Homo sapiens
  misc_RNA (1)...(19): siRNA sense strand
gggauuacaacauggauuu

SEQ ID NO: 126469 - RNA, 19 nt, Homo sapiens
  misc_RNA (1)...(19): siRNA sense strand
ucaccauucucgacuguuu

SEQ ID NO: 126470 - RNA, 19 nt, Homo sapiens
  misc_RNA (1)...(19): siRNA sense strand
aagccuacuuuccuuauuu

SEQ ID NO: 126471 - RNA, 19 nt, Homo sapiens
  misc_RNA (1)...(19): siRNA sense strand
ugauguggaugaauaugaa

SEQ ID NO: 126472 - RNA, 19 nt, Homo sapiens
  misc_RNA (1)...(19): siRNA sense strand
gcacuaugaccucuucuuc

SEQ ID NO: 126473 - RNA, 19 nt, Homo sapiens
  misc_RNA (1)...(19): siRNA sense strand
aaagaagacaccagaagaa

SEQ ID NO: 126474 - RNA, 19 nt, Homo sapiens
  misc_RNA (1)...(19): siRNA sense strand
gcacaguaaauacccacua

SEQ ID NO: 126475 - RNA, 19 nt, Homo sapiens
  misc_RNA (1)...(19): siRNA sense strand
uaaugugacugcaguugug

SEQ ID NO: 126476 - RNA, 19 nt, Homo sapiens
  misc_RNA (1)...(19): siRNA sense strand
guucaugaaagaucgguua

SEQ ID NO: 126477 - RNA, 19 nt, Homo sapiens
  misc_RNA (1)...(19): siRNA sense strand
cacaguaaauacccacuau

SEQ ID NO: 126478 - RNA, 19 nt, Homo sapiens
  misc_RNA (1)...(19): siRNA sense strand
gaagaacagggacauugau

SEQ ID NO: 126479 - RNA, 19 nt, Homo sapiens
  misc_RNA (1)...(19): siRNA sense strand
auugauagccuguuaugua

SEQ ID NO: 126480 - RNA, 19 nt, Homo sapiens
  misc_RNA (1)...(19): siRNA sense strand
cauacaguuugucaagaaa

SEQ ID NO: 126481 - RNA, 19 nt, Homo sapiens
  misc_RNA (1)...(19): siRNA sense strand
gaacagggacauugauagc

SEQ ID NO: 126482 - RNA, 19 nt, Homo sapiens
  misc_RNA (1)...(19): siRNA sense strand
gaccucuucuucauagaug

SEQ ID NO: 126483 - RNA, 19 nt, Homo sapiens
  misc_RNA (1)...(19): siRNA sense strand
cuugugaguucaugaaaga

SEQ ID NO: 126484 - RNA, 19 nt, Homo sapiens
  misc_RNA (1)...(19): siRNA sense strand
gaggagcuggucuaugaaa

SEQ ID NO: 126485 - RNA, 19 nt, Homo sapiens
  misc_RNA (1)...(19): siRNA sense strand
uaaugaaacacuacagguu

SEQ ID NO: 126486 - RNA, 19 nt, Homo sapiens
  misc_RNA (1)...(19): siRNA sense strand
auucagggaugcuuccuuu

SEQ ID NO: 126487 - RNA, 19 nt, Homo sapiens
  misc_RNA (1)...(19): siRNA sense strand
aaacauggaacgauuugga

SEQ ID NO: 126488 - RNA, 19 nt, Homo sapiens
  misc_RNA (1)...(19): siRNA sense strand
gcacuuacaaucucaccau

SEQ ID NO: 126489 - RNA, 19 nt, Homo sapiens
  misc_RNA (1)...(19): siRNA sense strand
gaacauuaugagcgaguug

SEQ ID NO: 126490 - RNA, 19 nt, Homo sapiens
  misc_RNA (1)...(19): siRNA sense strand
ugagaaugguuauccucuu

SEQ ID NO: 126491 - RNA, 19 nt, Homo sapiens
  misc_RNA (1)...(19): siRNA sense strand
cacuacagguuuacacaug

SEQ ID NO: 126492 - RNA, 19 nt, Homo sapiens
  misc_RNA (1)...(19): siRNA sense strand
gaacuuggcaaugguguac

SEQ ID NO: 126493 - RNA, 19 nt, Homo sapiens
  misc_RNA (1)...(19): siRNA sense strand
cagggaugcuuccuuugga

SEQ ID NO: 126494 - RNA, 19 nt, Homo sapiens
  misc_RNA (1)...(19): siRNA sense strand
gagcuggucuaugaaaauu

SEQ ID NO: 126495 - RNA, 19 nt, Homo sapiens
  misc_RNA (1)...(19): siRNA sense strand
aagaacagggacauugaua

SEQ ID NO: 126496 - RNA, 19 nt, Homo sapiens
  misc_RNA (1)...(19): siRNA sense strand
gcaaaauugagaaugguua

SEQ ID NO: 126497 - RNA, 19 nt, Homo sapiens
  misc_RNA (1)...(19): siRNA sense strand
ccgcugaacuuggcaaugg

SEQ ID NO: 126498 - RNA, 19 nt, Homo sapiens
  misc_RNA (1)...(19): siRNA sense strand
cgagcacuaugaccucuuc

SEQ ID NO: 126499 - RNA, 19 nt, Homo sapiens
  misc_RNA (1)...(19): siRNA sense strand
aggcaaagcgcuucacaga

SEQ ID NO: 126500 - RNA, 19 nt, Homo sapiens
  misc_RNA (1)...(19): siRNA sense strand
caucgccguucacugcaaa

SEQ ID NO: 126501 - RNA, 19 nt, Homo sapiens
  misc_RNA (1)...(19): siRNA sense strand
uacaguuugucaagaaaga

SEQ ID NO: 126502 - RNA, 19 nt, Homo sapiens
  misc_RNA (1)...(19): siRNA sense strand
gcaguugugaggcuaaaca

SEQ ID NO: 126503 - RNA, 19 nt, Homo sapiens
  misc_RNA (1)...(19): siRNA sense strand
guggaugaauaugaacauu

SEQ ID NO: 126504 - RNA, 19 nt, Homo sapiens
  misc_RNA (1)...(19): siRNA sense strand
ccugaagccuacuuuccuu

SEQ ID NO: 126505 - RNA, 19 nt, Homo sapiens
  misc_RNA (1)...(19): siRNA sense strand
cuuacaaucucaccauucu

SEQ ID NO: 126506 - RNA, 19 nt, Homo sapiens
  misc_RNA (1)...(19): siRNA sense strand
uggccuagaugauaugucu

SEQ ID NO: 126507 - RNA, 19 nt, Homo sapiens
  misc_RNA (1)...(19): siRNA sense strand
ggcaaugguguacagauau

SEQ ID NO: 126508 - RNA, 19 nt, Homo sapiens
  misc_RNA (1)...(19): siRNA sense strand
cacaaaacauggaacgauu

SEQ ID NO: 126509 - RNA, 19 nt, Homo sapiens
  misc_RNA (1)...(19): siRNA sense strand
uuucuggccuagaugauau

SEQ ID NO: 126510 - RNA, 19 nt, Homo sapiens
  misc_RNA (1)...(19): siRNA sense strand
uccagugaaggaaguauua

SEQ ID NO: 126511 - RNA, 19 nt, Homo sapiens
  misc_RNA (1)...(19): siRNA sense strand
gacaacaucgugcgaaggu

SEQ ID NO: 126512 - RNA, 19 nt, Homo sapiens
  misc_RNA (1)...(19): siRNA sense strand
cagaaagggauuacaacau

SEQ ID NO: 126513 - RNA, 19 nt, Homo sapiens
  misc_RNA (1)...(19): siRNA sense strand
ucagaaagggauuacaaca

SEQ ID NO: 126514 - RNA, 19 nt, Homo sapiens
  misc_RNA (1)...(19): siRNA sense strand
gcacuccugucuggcucaa

SEQ ID NO: 126515 - RNA, 19 nt, Homo sapiens
  misc_RNA (1)...(19): siRNA sense strand
gcacacccagugacaacau

SEQ ID NO: 126516 - RNA, 19 nt, Homo sapiens
  misc_RNA (1)...(19): siRNA sense strand
gcuugugaguucaugaaag

SEQ ID NO: 126517 - RNA, 19 nt, Homo sapiens
  misc_RNA (1)...(19): siRNA sense strand
cugaacaucugugagaaca

SEQ ID NO: 126518 - RNA, 19 nt, Homo sapiens
  misc_RNA (1)...(19): siRNA sense strand
acacaugcugaaauaauug

SEQ ID NO: 126519 - RNA, 19 nt, Homo sapiens
  misc_RNA (1)...(19): siRNA sense strand
ccagugaaggaaguauuaa

SEQ ID NO: 126520 - RNA, 19 nt, Homo sapiens
  misc_RNA (1)...(19): siRNA sense strand
ucuauugguggaaaucuuu

SEQ ID NO: 126521 - RNA, 19 nt, Homo sapiens
  misc_RNA (1)...(19): siRNA sense strand
gcaaacuaaacaagaaacu

SEQ ID NO: 126522 - RNA, 19 nt, Homo sapiens
  misc_RNA (1)...(19): siRNA sense strand
gggcuugugaguucaugaa

SEQ ID NO: 126523 - RNA, 19 nt, Homo sapiens
  misc_RNA (1)...(19): siRNA sense strand
uggaagaacagggacauug

SEQ ID NO: 126524 - RNA, 19 nt, Homo sapiens
  misc_RNA (1)...(19): siRNA sense strand
uuaaagaagacaccagaag

SEQ ID NO: 126525 - RNA, 19 nt, Homo sapiens
  misc_RNA (1)...(19): siRNA sense strand
aaagauuuaugaggcaaag

SEQ ID NO: 126526 - RNA, 19 nt, Homo sapiens
  misc_RNA (1)...(19): siRNA sense strand
ucaugaaagaucgguuaua

SEQ ID NO: 126527 - RNA, 19 nt, Homo sapiens
  misc_RNA (1)...(19): siRNA sense strand
cacuuacaaucucaccauu

SEQ ID NO: 126528 - RNA, 19 nt, Homo sapiens
  misc_RNA (1)...(19): siRNA sense strand
aaucauacaguuugucaag

SEQ ID NO: 126529 - RNA, 19 nt, Homo sapiens
  misc_RNA (1)...(19): siRNA sense strand
aaucgaccauccagugaag

SEQ ID NO: 126530 - RNA, 19 nt, Homo sapiens
  misc_RNA (1)...(19): siRNA sense strand
ccggccaggcucuauuaua

SEQ ID NO: 126531 - RNA, 19 nt, Homo sapiens
  misc_RNA (1)...(19): siRNA sense strand
uugcuuggauuagaauaug

SEQ ID NO: 126532 - RNA, 19 nt, Homo sapiens
  misc_RNA (1)...(19): siRNA sense strand
ugaagccuacuuuccuuau

SEQ ID NO: 126533 - RNA, 19 nt, Homo sapiens
  misc_RNA (1)...(19): siRNA sense strand
cugaaauaauugcuuggau

SEQ ID NO: 126534 - RNA, 19 nt, Homo sapiens
  misc_RNA (1)...(19): siRNA sense strand
gaucgguuauauuuugcua

SEQ ID NO: 126535 - RNA, 19 nt, Homo sapiens
  misc_RNA (1)...(19): siRNA sense strand
cauaaugugacugcaguug

SEQ ID NO: 126536 - RNA, 19 nt, Homo sapiens
  misc_RNA (1)...(19): siRNA sense strand
gaaugguuauccucuucac

SEQ ID NO: 126537 - RNA, 19 nt, Homo sapiens
  misc_RNA (1)...(19): siRNA sense strand
gcugaaauaauugcuugga

SEQ ID NO: 126538 - RNA, 19 nt, Homo sapiens
  misc_RNA (1)...(19): siRNA sense strand
aaucggggcuugugaguuc

SEQ ID NO: 126539 - RNA, 19 nt, Homo sapiens
  misc_RNA (1)...(19): siRNA sense strand
gguuuacacaugcugaaau

SEQ ID NO: 126540 - RNA, 19 nt, Homo sapiens
  misc_RNA (1)...(19): siRNA sense strand
ggagguggcugagaucaca

SEQ ID NO: 126541 - RNA, 19 nt, Homo sapiens
  misc_RNA (1)...(19): siRNA sense strand
uggcugagaucacaaagca

SEQ ID NO: 126542 - RNA, 19 nt, Homo sapiens
  misc_RNA (1)...(19): siRNA sense strand
gaggacacccagagacaug

SEQ ID NO: 126543 - RNA, 19 nt, Homo sapiens
  misc_RNA (1)...(19): siRNA sense strand
ugucggaggagaacuguga

SEQ ID NO: 126544 - RNA, 19 nt, Homo sapiens
  misc_RNA (1)...(19): siRNA sense strand
gggcagaauggaaggaucu

SEQ ID NO: 126545 - RNA, 19 nt, Homo sapiens
  misc_RNA (1)...(19): siRNA sense strand
guacugccgcugcccaucu

SEQ ID NO: 126546 - RNA, 19 nt, Homo sapiens
  misc_RNA (1)...(19): siRNA sense strand
ggaagcagcccuacaacaa

SEQ ID NO: 126547 - RNA, 19 nt, Homo sapiens
  misc_RNA (1)...(19): siRNA sense strand
gcacaggaacuucauuauc

SEQ ID NO: 126548 - RNA, 19 nt, Homo sapiens
  misc_RNA (1)...(19): siRNA sense strand
acaacaaccugaagcacaa

SEQ ID NO: 126549 - RNA, 19 nt, Homo sapiens
  misc_RNA (1)...(19): siRNA sense strand
ggaaccaccuggagagcau

SEQ ID NO: 126550 - RNA, 19 nt, Homo sapiens
  misc_RNA (1)...(19): siRNA sense strand
gaacugcuguugggaacca

SEQ ID NO: 126551 - RNA, 19 nt, Homo sapiens
  misc_RNA (1)...(19): siRNA sense strand
gagauugucgcacugaaga

SEQ ID NO: 126552 - RNA, 19 nt, Homo sapiens
  misc_RNA (1)...(19): siRNA sense strand
ugaagaaggugcggaugga

SEQ ID NO: 126553 - RNA, 19 nt, Homo sapiens
  misc_RNA (1)...(19): siRNA sense strand
ggccuauggugucccagua

SEQ ID NO: 126554 - RNA, 19 nt, Homo sapiens
  misc_RNA (1)...(19): siRNA sense strand
ccugaagguuuccaacuug

SEQ ID NO: 126555 - RNA, 19 nt, Homo sapiens
  misc_RNA (1)...(19): siRNA sense strand
uccaguaucugcacaggaa

SEQ ID NO: 126556 - RNA, 19 nt, Homo sapiens
  misc_RNA (1)...(19): siRNA sense strand
cacaggaacuucauuaucc

SEQ ID NO: 126557 - RNA, 19 nt, Homo sapiens
  misc_RNA (1)...(19): siRNA sense strand
ccuauggugucccaguaaa

SEQ ID NO: 126558 - RNA, 19 nt, Homo sapiens
  misc_RNA (1)...(19): siRNA sense strand
cauguacgacccuaagaaa

SEQ ID NO: 126559 - RNA, 19 nt, Homo sapiens
  misc_RNA (1)...(19): siRNA sense strand
guuuccaacuugcucauga

SEQ ID NO: 126560 - RNA, 19 nt, Homo sapiens
  misc_RNA (1)...(19): siRNA sense strand
ggauggacaaggagaagga

SEQ ID NO: 126561 - RNA, 19 nt, Homo sapiens
  misc_RNA (1)...(19): siRNA sense strand
gaagcagcccuacaacaac

SEQ ID NO: 126562 - RNA, 19 nt, Homo sapiens
  misc_RNA (1)...(19): siRNA sense strand
ccaccagcaucgacaugug

SEQ ID NO: 126563 - RNA, 19 nt, Homo sapiens
  misc_RNA (1)...(19): siRNA sense strand
cugcacaggaacuucauua

SEQ ID NO: 126564 - RNA, 19 nt, Homo sapiens
  misc_RNA (1)...(19): siRNA sense strand
gaacaucguggagcugaag

SEQ ID NO: 126565 - RNA, 19 nt, Homo sapiens
  misc_RNA (1)...(19): siRNA sense strand
gaugagauugucgcacuga

SEQ ID NO: 126566 - RNA, 19 nt, Homo sapiens
  misc_RNA (1)...(19): siRNA sense strand
gggacacccagacagauga

SEQ ID NO: 126567 - RNA, 19 nt, Homo sapiens
  misc_RNA (1)...(19): siRNA sense strand
caaccugaagcacaaguuc

SEQ ID NO: 126568 - RNA, 19 nt, Homo sapiens
  misc_RNA (1)...(19): siRNA sense strand
cugcugcacuuccuguuca

SEQ ID NO: 126569 - RNA, 19 nt, Homo sapiens
  misc_RNA (1)...(19): siRNA sense strand
cgaacaucguggagcugaa

SEQ ID NO: 126570 - RNA, 19 nt, Homo sapiens
  misc_RNA (1)...(19): siRNA sense strand
gcacuuccuguucauguac

SEQ ID NO: 126571 - RNA, 19 nt, Homo sapiens
  misc_RNA (1)...(19): siRNA sense strand
cuuccgagauccaccagau

SEQ ID NO: 126572 - RNA, 19 nt, Homo sapiens
  misc_RNA (1)...(19): siRNA sense strand
ucauguacgacccuaagaa

SEQ ID NO: 126573 - RNA, 19 nt, Homo sapiens
  misc_RNA (1)...(19): siRNA sense strand
ugcacuuccuguucaugua

SEQ ID NO: 126574 - RNA, 19 nt, Homo sapiens
  misc_RNA (1)...(19): siRNA sense strand
caaggguugugugaagaca

SEQ ID NO: 126575 - RNA, 19 nt, Homo sapiens
  misc_RNA (1)...(19): siRNA sense strand
acaggaacuucauuaucca

SEQ ID NO: 126576 - RNA, 19 nt, Homo sapiens
  misc_RNA (1)...(19): siRNA sense strand
ccacgcagaccaccagcau

SEQ ID NO: 126577 - RNA, 19 nt, Homo sapiens
  misc_RNA (1)...(19): siRNA sense strand
ggaagcagcccuacaacaa

SEQ ID NO: 126578 - RNA, 19 nt, Homo sapiens
  misc_RNA (1)...(19): siRNA sense strand
gaucaguggugucugugaa

SEQ ID NO: 126579 - RNA, 19 nt, Homo sapiens
  misc_RNA (1)...(19): siRNA sense strand
gcacaggaacuucauuauc

SEQ ID NO: 126580 - RNA, 19 nt, Homo sapiens
  misc_RNA (1)...(19): siRNA sense strand
acaacaaccugaagcacaa

SEQ ID NO: 126581 - RNA, 19 nt, Homo sapiens
  misc_RNA (1)...(19): siRNA sense strand
ggaaccaccuggagagcau

SEQ ID NO: 126582 - RNA, 19 nt, Homo sapiens
  misc_RNA (1)...(19): siRNA sense strand
gaacugcuguugggaacca

SEQ ID NO: 126583 - RNA, 19 nt, Homo sapiens
  misc_RNA (1)...(19): siRNA sense strand
gagauugucgcacugaaga

SEQ ID NO: 126584 - RNA, 19 nt, Homo sapiens
  misc_RNA (1)...(19): siRNA sense strand
ugaagaaggugcggaugga

SEQ ID NO: 126585 - RNA, 19 nt, Homo sapiens
  misc_RNA (1)...(19): siRNA sense strand
ggccuauggugucccagua

SEQ ID NO: 126586 - RNA, 19 nt, Homo sapiens
  misc_RNA (1)...(19): siRNA sense strand
ccugaagguuuccaacuug

SEQ ID NO: 126587 - RNA, 19 nt, Homo sapiens
  misc_RNA (1)...(19): siRNA sense strand
uccaguaucugcacaggaa

SEQ ID NO: 126588 - RNA, 19 nt, Homo sapiens
  misc_RNA (1)...(19): siRNA sense strand
cacaggaacuucauuaucc

SEQ ID NO: 126589 - RNA, 19 nt, Homo sapiens
  misc_RNA (1)...(19): siRNA sense strand
ccuauggugucccaguaaa

SEQ ID NO: 126590 - RNA, 19 nt, Homo sapiens
  misc_RNA (1)...(19): siRNA sense strand
cauguacgacccuaagaaa

SEQ ID NO: 126591 - RNA, 19 nt, Homo sapiens
  misc_RNA (1)...(19): siRNA sense strand
guuuccaacuugcucauga

SEQ ID NO: 126592 - RNA, 19 nt, Homo sapiens
  misc_RNA (1)...(19): siRNA sense strand
ggauggacaaggagaagga

SEQ ID NO: 126593 - RNA, 19 nt, Homo sapiens
  misc_RNA (1)...(19): siRNA sense strand
gaagcagcccuacaacaac

SEQ ID NO: 126594 - RNA, 19 nt, Homo sapiens
  misc_RNA (1)...(19): siRNA sense strand
ccaccagcaucgacaugug

SEQ ID NO: 126595 - RNA, 19 nt, Homo sapiens
  misc_RNA (1)...(19): siRNA sense strand
cugcacaggaacuucauua

SEQ ID NO: 126596 - RNA, 19 nt, Homo sapiens
  misc_RNA (1)...(19): siRNA sense strand
gaacaucguggagcugaag

SEQ ID NO: 126597 - RNA, 19 nt, Homo sapiens
  misc_RNA (1)...(19): siRNA sense strand
gaugagauugucgcacuga

SEQ ID NO: 126598 - RNA, 19 nt, Homo sapiens
  misc_RNA (1)...(19): siRNA sense strand
gggacacccagacagauga

SEQ ID NO: 126599 - RNA, 19 nt, Homo sapiens
  misc_RNA (1)...(19): siRNA sense strand
caaccugaagcacaaguuc

SEQ ID NO: 126600 - RNA, 19 nt, Homo sapiens
  misc_RNA (1)...(19): siRNA sense strand
cugcugcacuuccuguuca

SEQ ID NO: 126601 - RNA, 19 nt, Homo sapiens
  misc_RNA (1)...(19): siRNA sense strand
cgaacaucguggagcugaa

SEQ ID NO: 126602 - RNA, 19 nt, Homo sapiens
  misc_RNA (1)...(19): siRNA sense strand
gcacuuccuguucauguac

SEQ ID NO: 126603 - RNA, 19 nt, Homo sapiens
  misc_RNA (1)...(19): siRNA sense strand
cuuccgagauccaccagau

SEQ ID NO: 126604 - RNA, 19 nt, Homo sapiens
  misc_RNA (1)...(19): siRNA sense strand
ucauguacgacccuaagaa

SEQ ID NO: 126605 - RNA, 19 nt, Homo sapiens
  misc_RNA (1)...(19): siRNA sense strand
ugcacuuccuguucaugua

SEQ ID NO: 126606 - RNA, 19 nt, Homo sapiens
  misc_RNA (1)...(19): siRNA sense strand
caaggguugugugaagaca

SEQ ID NO: 126607 - RNA, 19 nt, Homo sapiens
  misc_RNA (1)...(19): siRNA sense strand
acaggaacuucauuaucca

SEQ ID NO: 126608 - RNA, 19 nt, Homo sapiens
  misc_RNA (1)...(19): siRNA sense strand
ccacgcagaccaccagcau

SEQ ID NO: 126609 - RNA, 19 nt, Homo sapiens
  misc_RNA (1)...(19): siRNA sense strand
gcacaggaacuucauuauc

SEQ ID NO: 126610 - RNA, 19 nt, Homo sapiens
  misc_RNA (1)...(19): siRNA sense strand
ggaaccaccuggagagcau

SEQ ID NO: 126611 - RNA, 19 nt, Homo sapiens
  misc_RNA (1)...(19): siRNA sense strand
ccugaagguuuccaacuug

SEQ ID NO: 126612 - RNA, 19 nt, Homo sapiens
  misc_RNA (1)...(19): siRNA sense strand
uccaguaucugcacaggaa

SEQ ID NO: 126613 - RNA, 19 nt, Homo sapiens
  misc_RNA (1)...(19): siRNA sense strand
cacaggaacuucauuaucc

SEQ ID NO: 126614 - RNA, 19 nt, Homo sapiens
  misc_RNA (1)...(19): siRNA sense strand
guuuccaacuugcucauga

SEQ ID NO: 126615 - RNA, 19 nt, Homo sapiens
  misc_RNA (1)...(19): siRNA sense strand
gaacaucguggagcugaag

SEQ ID NO: 126616 - RNA, 19 nt, Homo sapiens
  misc_RNA (1)...(19): siRNA sense strand
cugcacaggaacuucauua

SEQ ID NO: 126617 - RNA, 19 nt, Homo sapiens
  misc_RNA (1)...(19): siRNA sense strand
cgaacaucguggagcugaa

SEQ ID NO: 126618 - RNA, 19 nt, Homo sapiens
  misc_RNA (1)...(19): siRNA sense strand
caaggguugugugaagaca

SEQ ID NO: 126619 - RNA, 19 nt, Homo sapiens
  misc_RNA (1)...(19): siRNA sense strand
acaggaacuucauuaucca

SEQ ID NO: 126620 - RNA, 19 nt, Homo sapiens
  misc_RNA (1)...(19): siRNA sense strand
gaaaggcgaugaucauaaa

SEQ ID NO: 126621 - RNA, 19 nt, Homo sapiens
  misc_RNA (1)...(19): siRNA sense strand
ggaaauauauucagggauu

SEQ ID NO: 126622 - RNA, 19 nt, Homo sapiens
  misc_RNA (1)...(19): siRNA sense strand
gagaauacgugaaggcaaa

SEQ ID NO: 126623 - RNA, 19 nt, Homo sapiens
  misc_RNA (1)...(19): siRNA sense strand
cagagaagauuaugugaaa

SEQ ID NO: 126624 - RNA, 19 nt, Homo sapiens
  misc_RNA (1)...(19): siRNA sense strand
gaaccaaucagacuauuug

SEQ ID NO: 126625 - RNA, 19 nt, Homo sapiens
  misc_RNA (1)...(19): siRNA sense strand
gaaggcaaaugaugcuuau

SEQ ID NO: 126626 - RNA, 19 nt, Homo sapiens
  misc_RNA (1)...(19): siRNA sense strand
gaaacucagcggaaauaua

SEQ ID NO: 126627 - RNA, 19 nt, Homo sapiens
  misc_RNA (1)...(19): siRNA sense strand
ggaguacaaugcacuguga

SEQ ID NO: 126628 - RNA, 19 nt, Homo sapiens
  misc_RNA (1)...(19): siRNA sense strand
ggaaaggcgaugaucauaa

SEQ ID NO: 126629 - RNA, 19 nt, Homo sapiens
  misc_RNA (1)...(19): siRNA sense strand
ccaaauguguggaguacaa

SEQ ID NO: 126630 - RNA, 19 nt, Homo sapiens
  misc_RNA (1)...(19): siRNA sense strand
caccacaauugaagaguua

SEQ ID NO: 126631 - RNA, 19 nt, Homo sapiens
  misc_RNA (1)...(19): siRNA sense strand
gaacagugcgacccagaaa

SEQ ID NO: 126632 - RNA, 19 nt, Homo sapiens
  misc_RNA (1)...(19): siRNA sense strand
aaacucagcggaaauauau

SEQ ID NO: 126633 - RNA, 19 nt, Homo sapiens
  misc_RNA (1)...(19): siRNA sense strand
gaaucuuccugcugauauu

SEQ ID NO: 126634 - RNA, 19 nt, Homo sapiens
  misc_RNA (1)...(19): siRNA sense strand
ugaaagauguggcuacaag

SEQ ID NO: 126635 - RNA, 19 nt, Homo sapiens
  misc_RNA (1)...(19): siRNA sense strand
gaaauauauucagggauug

SEQ ID NO: 126636 - RNA, 19 nt, Homo sapiens
  misc_RNA (1)...(19): siRNA sense strand
gaaagaggagaaccaauca

SEQ ID NO: 126637 - RNA, 19 nt, Homo sapiens
  misc_RNA (1)...(19): siRNA sense strand
gaucagcaguaccucaaug

SEQ ID NO: 126638 - RNA, 19 nt, Homo sapiens
  misc_RNA (1)...(19): siRNA sense strand
ggaagcauauuuugaaaga

SEQ ID NO: 126639 - RNA, 19 nt, Homo sapiens
  misc_RNA (1)...(19): siRNA sense strand
ugacgaaacucagcggaaa

SEQ ID NO: 126640 - RNA, 19 nt, Homo sapiens
  misc_RNA (1)...(19): siRNA sense strand
ggcaagaggucaucagaag

SEQ ID NO: 126641 - RNA, 19 nt, Homo sapiens
  misc_RNA (1)...(19): siRNA sense strand
gcuacaagauacagccaaa

SEQ ID NO: 126642 - RNA, 19 nt, Homo sapiens
  misc_RNA (1)...(19): siRNA sense strand
caaaugaugcuuaucuuca

SEQ ID NO: 126643 - RNA, 19 nt, Homo sapiens
  misc_RNA (1)...(19): siRNA sense strand
ccaaauuccugaaguuucu

SEQ ID NO: 126644 - RNA, 19 nt, Homo sapiens
  misc_RNA (1)...(19): siRNA sense strand
gaccagaaaccauuaacuu

SEQ ID NO: 126645 - RNA, 19 nt, Homo sapiens
  misc_RNA (1)...(19): siRNA sense strand
ggauugaagagguuaauga

SEQ ID NO: 126646 - RNA, 19 nt, Homo sapiens
  misc_RNA (1)...(19): siRNA sense strand
gaaagcagccuuggauaag

SEQ ID NO: 126647 - RNA, 19 nt, Homo sapiens
  misc_RNA (1)...(19): siRNA sense strand
ugaaagcagccuuggauaa

SEQ ID NO: 126648 - RNA, 19 nt, Homo sapiens
  misc_RNA (1)...(19): siRNA sense strand
gaaguuaacaagggauuga

SEQ ID NO: 126649 - RNA, 19 nt, Homo sapiens
  misc_RNA (1)...(19): siRNA sense strand
ucaccaaauuccugaaguu

SEQ ID NO: 126650 - RNA, 19 nt, Homo sapiens
  misc_RNA (1)...(19): siRNA sense strand
gcagagagaauacgugaag

SEQ ID NO: 126651 - RNA, 19 nt, Homo sapiens
  misc_RNA (1)...(19): siRNA sense strand
cuacagacccauccaaaug

SEQ ID NO: 126652 - RNA, 19 nt, Homo sapiens
  misc_RNA (1)...(19): siRNA sense strand
ggaggaccagaaaccauua

SEQ ID NO: 126653 - RNA, 19 nt, Homo sapiens
  misc_RNA (1)...(19): siRNA sense strand
agaauugaaugccagagaa

SEQ ID NO: 126654 - RNA, 19 nt, Homo sapiens
  misc_RNA (1)...(19): siRNA sense strand
ggacaucaucaccaaauuc

SEQ ID NO: 126655 - RNA, 19 nt, Homo sapiens
  misc_RNA (1)...(19): siRNA sense strand
aagaagaggaagcauauuu

SEQ ID NO: 126656 - RNA, 19 nt, Homo sapiens
  misc_RNA (1)...(19): siRNA sense strand
gagaaccaaucagacuauu

SEQ ID NO: 126657 - RNA, 19 nt, Homo sapiens
  misc_RNA (1)...(19): siRNA sense strand
ggagaaccaaucagacuau

SEQ ID NO: 126658 - RNA, 19 nt, Homo sapiens
  misc_RNA (1)...(19): siRNA sense strand
gcaaaugaugcuuaucuuc

SEQ ID NO: 126659 - RNA, 19 nt, Homo sapiens
  misc_RNA (1)...(19): siRNA sense strand
ccagaaaccauuaacuuca

SEQ ID NO: 126660 - RNA, 19 nt, Homo sapiens
  misc_RNA (1)...(19): siRNA sense strand
gcccaucggugucacuaug

SEQ ID NO: 126661 - RNA, 19 nt, Homo sapiens
  misc_RNA (1)...(19): siRNA sense strand
gaccgaguccuaccuaaga

SEQ ID NO: 126662 - RNA, 19 nt, Homo sapiens
  misc_RNA (1)...(19): siRNA sense strand
gggaaaggcgaugaucaua

SEQ ID NO: 126663 - RNA, 19 nt, Homo sapiens
  misc_RNA (1)...(19): siRNA sense strand
caagaggucaucagaagau

SEQ ID NO: 126664 - RNA, 19 nt, Homo sapiens
  misc_RNA (1)...(19): siRNA sense strand
ggcaaaugaugcuuaucuu

SEQ ID NO: 126665 - RNA, 19 nt, Homo sapiens
  misc_RNA (1)...(19): siRNA sense strand
cguuugggcuaaagaauug

SEQ ID NO: 126666 - RNA, 19 nt, Homo sapiens
  misc_RNA (1)...(19): siRNA sense strand
gaagacacacagaaugauc

SEQ ID NO: 126667 - RNA, 19 nt, Homo sapiens
  misc_RNA (1)...(19): siRNA sense strand
gaggucaucagaagauuga

SEQ ID NO: 126668 - RNA, 19 nt, Homo sapiens
  misc_RNA (1)...(19): siRNA sense strand
cagaaaccauuaacuucau

SEQ ID NO: 126669 - RNA, 19 nt, Homo sapiens
  misc_RNA (1)...(19): siRNA sense strand
ugaaggcaaaugaugcuua

SEQ ID NO: 126670 - RNA, 19 nt, Homo sapiens
  misc_RNA (1)...(19): siRNA sense strand
agaaacagaccgaguccua

SEQ ID NO: 126671 - RNA, 19 nt, Homo sapiens
  misc_RNA (1)...(19): siRNA sense strand
cagcaguaccucaaugaaa

SEQ ID NO: 126672 - RNA, 19 nt, Homo sapiens
  misc_RNA (1)...(19): siRNA sense strand
gaaagauguggcuacaaga

SEQ ID NO: 126673 - RNA, 19 nt, Homo sapiens
  misc_RNA (1)...(19): siRNA sense strand
gaggaagacacacagaaug

SEQ ID NO: 126674 - RNA, 19 nt, Homo sapiens
  misc_RNA (1)...(19): siRNA sense strand
gagaggaagacacacagaa

SEQ ID NO: 126675 - RNA, 19 nt, Homo sapiens
  misc_RNA (1)...(19): siRNA sense strand
gcaagaggucaucagaaga

SEQ ID NO: 126676 - RNA, 19 nt, Homo sapiens
  misc_RNA (1)...(19): siRNA sense strand
ggagaguccuuagggaaag

SEQ ID NO: 126677 - RNA, 19 nt, Homo sapiens
  misc_RNA (1)...(19): siRNA sense strand
aacaagggauugaggaaug

SEQ ID NO: 126678 - RNA, 19 nt, Homo sapiens
  misc_RNA (1)...(19): siRNA sense strand
gaggaaugauuugaaagca

SEQ ID NO: 126679 - RNA, 19 nt, Homo sapiens
  misc_RNA (1)...(19): siRNA sense strand
ugaaugccagagaagauua

SEQ ID NO: 126680 - RNA, 19 nt, Homo sapiens
  misc_RNA (1)...(19): siRNA sense strand
caucgaauccaguguuaga

SEQ ID NO: 126681 - RNA, 19 nt, Homo sapiens
  misc_RNA (1)...(19): siRNA sense strand
auaaagacauggacaucau

SEQ ID NO: 126682 - RNA, 19 nt, Homo sapiens
  misc_RNA (1)...(19): siRNA sense strand
uuggagagacugauuauga

SEQ ID NO: 126683 - RNA, 19 nt, Homo sapiens
  misc_RNA (1)...(19): siRNA sense strand
gaggaaaacaccacaauug

SEQ ID NO: 126684 - RNA, 19 nt, Homo sapiens
  misc_RNA (1)...(19): siRNA sense strand
aaagcagccuuggauaaga

SEQ ID NO: 126685 - RNA, 19 nt, Homo sapiens
  misc_RNA (1)...(19): siRNA sense strand
gauccucacaccagaaguu

SEQ ID NO: 126686 - RNA, 19 nt, Homo sapiens
  misc_RNA (1)...(19): siRNA sense strand
aucagaagauugagagaaa

SEQ ID NO: 126687 - RNA, 19 nt, Homo sapiens
  misc_RNA (1)...(19): siRNA sense strand
ucagauggccauuggaaau

SEQ ID NO: 126688 - RNA, 19 nt, Homo sapiens
  misc_RNA (1)...(19): siRNA sense strand
cugcugauauuaaagaauc

SEQ ID NO: 126689 - RNA, 19 nt, Homo sapiens
  misc_RNA (1)...(19): siRNA sense strand
acaccacaauugaagaguu

SEQ ID NO: 126690 - RNA, 19 nt, Homo sapiens
  misc_RNA (1)...(19): siRNA sense strand
ccauuaacuucaucgaauc

SEQ ID NO: 126691 - RNA, 19 nt, Homo sapiens
  misc_RNA (1)...(19): siRNA sense strand
ccagagaagauuaugugaa

SEQ ID NO: 126692 - RNA, 19 nt, Homo sapiens
  misc_RNA (1)...(19): siRNA sense strand
agcaguaccucaaugaaau

SEQ ID NO: 126693 - RNA, 19 nt, Homo sapiens
  misc_RNA (1)...(19): siRNA sense strand
ggagagacugauuaugaug

SEQ ID NO: 126694 - RNA, 19 nt, Homo sapiens
  misc_RNA (1)...(19): siRNA sense strand
agaaagaggagaaccaauc

SEQ ID NO: 126695 - RNA, 19 nt, Homo sapiens
  misc_RNA (1)...(19): siRNA sense strand
uggagagacugauuaugau

SEQ ID NO: 126696 - RNA, 19 nt, Homo sapiens
  misc_RNA (1)...(19): siRNA sense strand
gaggaagcauauuuugaaa

SEQ ID NO: 126697 - RNA, 19 nt, Homo sapiens
  misc_RNA (1)...(19): siRNA sense strand
ggaaaacaccacaauugaa

SEQ ID NO: 126698 - RNA, 19 nt, Homo sapiens
  misc_RNA (1)...(19): siRNA sense strand
acaagggauugaggaauga

SEQ ID NO: 126699 - RNA, 19 nt, Homo sapiens
  misc_RNA (1)...(19): siRNA sense strand
gaaaauagagauccucaca

SEQ ID NO: 126700 - RNA, 19 nt, Homo sapiens
  misc_RNA (1)...(19): siRNA sense strand
uaagauugaucagcaguac

SEQ ID NO: 126701 - RNA, 19 nt, Homo sapiens
  misc_RNA (1)...(19): siRNA sense strand
gaaaacaccacaauugaag

SEQ ID NO: 126702 - RNA, 19 nt, Homo sapiens
  misc_RNA (1)...(19): siRNA sense strand
accauuaacuucaucgaau

SEQ ID NO: 126703 - RNA, 19 nt, Homo sapiens
  misc_RNA (1)...(19): siRNA sense strand
gcgaugaucauaaagacau

SEQ ID NO: 126704 - RNA, 19 nt, Homo sapiens
  misc_RNA (1)...(19): siRNA sense strand
gaagaggaagcauauuuug

SEQ ID NO: 126705 - RNA, 19 nt, Homo sapiens
  misc_RNA (1)...(19): siRNA sense strand
aagauguggcuacaagaua

SEQ ID NO: 126706 - RNA, 19 nt, Homo sapiens
  misc_RNA (1)...(19): siRNA sense strand
gcguuugggcuaaagaauu

SEQ ID NO: 126707 - RNA, 19 nt, Homo sapiens
  misc_RNA (1)...(19): siRNA sense strand
caaaagaggaggaccagaa

SEQ ID NO: 126708 - RNA, 19 nt, Homo sapiens
  misc_RNA (1)...(19): siRNA sense strand
gaggagaaccaaucagacu

SEQ ID NO: 126709 - RNA, 19 nt, Homo sapiens
  misc_RNA (1)...(19): siRNA sense strand
ggauugaggaaugauuuga

SEQ ID NO: 126710 - RNA, 19 nt, Homo sapiens
  misc_RNA (1)...(19): siRNA sense strand
ggaaccugcugguggaaaa

SEQ ID NO: 126711 - RNA, 19 nt, Homo sapiens
  misc_RNA (1)...(19): siRNA sense strand
gauugaggaaugauuugaa

SEQ ID NO: 126712 - RNA, 19 nt, Homo sapiens
  misc_RNA (1)...(19): siRNA sense strand
agacugauuaugaugcuuu

SEQ ID NO: 126713 - RNA, 19 nt, Homo sapiens
  misc_RNA (1)...(19): siRNA sense strand
acauggacaucaucaccaa

SEQ ID NO: 126714 - RNA, 19 nt, Homo sapiens
  misc_RNA (1)...(19): siRNA sense strand
ggaagacacacagaaugau

SEQ ID NO: 126715 - RNA, 19 nt, Homo sapiens
  misc_RNA (1)...(19): siRNA sense strand
ggagaggaagacacacaga

SEQ ID NO: 126716 - RNA, 19 nt, Homo sapiens
  misc_RNA (1)...(19): siRNA sense strand
aggaagacacacagaauga

SEQ ID NO: 126717 - RNA, 19 nt, Homo sapiens
  misc_RNA (1)...(19): siRNA sense strand
cagaccgaguccuaccuaa

SEQ ID NO: 126718 - RNA, 19 nt, Homo sapiens
  misc_RNA (1)...(19): siRNA sense strand
gaaugccagagaagauuau

SEQ ID NO: 126719 - RNA, 19 nt, Homo sapiens
  misc_RNA (1)...(19): siRNA sense strand
caccaaauuccugaaguuu

SEQ ID NO: 126720 - RNA, 19 nt, Homo sapiens
  misc_RNA (1)...(19): siRNA sense strand
gaagagaaacugcaccuua

SEQ ID NO: 126721 - RNA, 19 nt, Homo sapiens
  misc_RNA (1)...(19): siRNA sense strand
gaagaggaguccaagauug

SEQ ID NO: 126722 - RNA, 19 nt, Homo sapiens
  misc_RNA (1)...(19): siRNA sense strand
gaagaauucuguugaaguc

SEQ ID NO: 126723 - RNA, 19 nt, Homo sapiens
  misc_RNA (1)...(19): siRNA sense strand
gaaggaggaugugaagaaa

SEQ ID NO: 126724 - RNA, 19 nt, Homo sapiens
  misc_RNA (1)...(19): siRNA sense strand
ggacuuugcugcugagguu

SEQ ID NO: 126725 - RNA, 19 nt, Homo sapiens
  misc_RNA (1)...(19): siRNA sense strand
gagcugaggugguaaagca

SEQ ID NO: 126726 - RNA, 19 nt, Homo sapiens
  misc_RNA (1)...(19): siRNA sense strand
ggaaggaggaugugaagaa

SEQ ID NO: 126727 - RNA, 19 nt, Homo sapiens
  misc_RNA (1)...(19): siRNA sense strand
aaaaguagaugcccaauuu

SEQ ID NO: 126728 - RNA, 19 nt, Homo sapiens
  misc_RNA (1)...(19): siRNA sense strand
caaaggcccugccaagaau

SEQ ID NO: 126729 - RNA, 19 nt, Homo sapiens
  misc_RNA (1)...(19): siRNA sense strand
gaaaugggguggaaacaaa

SEQ ID NO: 126730 - RNA, 19 nt, Homo sapiens
  misc_RNA (1)...(19): siRNA sense strand
ugaaggagauacugaagga

SEQ ID NO: 126731 - RNA, 19 nt, Homo sapiens
  misc_RNA (1)...(19): siRNA sense strand
ugaaggagcgggaacuuaa

SEQ ID NO: 126732 - RNA, 19 nt, Homo sapiens
  misc_RNA (1)...(19): siRNA sense strand
caggaaauguggagaacaa

SEQ ID NO: 126733 - RNA, 19 nt, Homo sapiens
  misc_RNA (1)...(19): siRNA sense strand
gcaaagaguacacacuaga

SEQ ID NO: 126734 - RNA, 19 nt, Homo sapiens
  misc_RNA (1)...(19): siRNA sense strand
ugucaaagauugcagacuu

SEQ ID NO: 126735 - RNA, 19 nt, Homo sapiens
  misc_RNA (1)...(19): siRNA sense strand
ccaaaggcccugccaagaa

SEQ ID NO: 126736 - RNA, 19 nt, Homo sapiens
  misc_RNA (1)...(19): siRNA sense strand
aagagaagcugaaggagau

SEQ ID NO: 126737 - RNA, 19 nt, Homo sapiens
  misc_RNA (1)...(19): siRNA sense strand
aagagaaacugcaccuuau

SEQ ID NO: 126738 - RNA, 19 nt, Homo sapiens
  misc_RNA (1)...(19): siRNA sense strand
cuggagaccugaagaauuc

SEQ ID NO: 126739 - RNA, 19 nt, Homo sapiens
  misc_RNA (1)...(19): siRNA sense strand
cagcaaagaguacacacua

SEQ ID NO: 126740 - RNA, 19 nt, Homo sapiens
  misc_RNA (1)...(19): siRNA sense strand
guugcaggcugacuucaaa

SEQ ID NO: 126741 - RNA, 19 nt, Homo sapiens
  misc_RNA (1)...(19): siRNA sense strand
gaaggagcgggaacuuaaa

SEQ ID NO: 126742 - RNA, 19 nt, Homo sapiens
  misc_RNA (1)...(19): siRNA sense strand
gggaagagaagcugaagga

SEQ ID NO: 126743 - RNA, 19 nt, Homo sapiens
  misc_RNA (1)...(19): siRNA sense strand
gagaaacugcaccuuauca

SEQ ID NO: 126744 - RNA, 19 nt, Homo sapiens
  misc_RNA (1)...(19): siRNA sense strand
gaaauguggagaacaaugg

SEQ ID NO: 126745 - RNA, 19 nt, Homo sapiens
  misc_RNA (1)...(19): siRNA sense strand
gaagcucaaguucaucaaa

SEQ ID NO: 126746 - RNA, 19 nt, Homo sapiens
  misc_RNA (1)...(19): siRNA sense strand
acgcauaccuggauaacau

SEQ ID NO: 126747 - RNA, 19 nt, Homo sapiens
  misc_RNA (1)...(19): siRNA sense strand
uggagaagcucaaguucau

SEQ ID NO: 126748 - RNA, 19 nt, Homo sapiens
  misc_RNA (1)...(19): siRNA sense strand
ggaaauguggagaacaaug

SEQ ID NO: 126749 - RNA, 19 nt, Homo sapiens
  misc_RNA (1)...(19): siRNA sense strand
gaaaagggccaaccagaug

SEQ ID NO: 126750 - RNA, 19 nt, Homo sapiens
  misc_RNA (1)...(19): siRNA sense strand
ggugugagguaacaauucu

SEQ ID NO: 126751 - RNA, 19 nt, Homo sapiens
  misc_RNA (1)...(19): siRNA sense strand
acaaguugcuggauccaau

SEQ ID NO: 126752 - RNA, 19 nt, Homo sapiens
  misc_RNA (1)...(19): siRNA sense strand
ccugaagaauucuguugaa

SEQ ID NO: 126753 - RNA, 19 nt, Homo sapiens
  misc_RNA (1)...(19): siRNA sense strand
ucccagcccugaagagaaa

SEQ ID NO: 126754 - RNA, 19 nt, Homo sapiens
  misc_RNA (1)...(19): siRNA sense strand
gagaagcucaaguucauca

SEQ ID NO: 126755 - RNA, 19 nt, Homo sapiens
  misc_RNA (1)...(19): siRNA sense strand
caugggaacuucuagaacu

SEQ ID NO: 126756 - RNA, 19 nt, Homo sapiens
  misc_RNA (1)...(19): siRNA sense strand
gauccuacgagaugagaaa

SEQ ID NO: 126757 - RNA, 19 nt, Homo sapiens
  misc_RNA (1)...(19): siRNA sense strand
gcacuuggcuauucaaaac

SEQ ID NO: 126758 - RNA, 19 nt, Homo sapiens
  misc_RNA (1)...(19): siRNA sense strand
ggcuggagcugagguggua

SEQ ID NO: 126759 - RNA, 19 nt, Homo sapiens
  misc_RNA (1)...(19): siRNA sense strand
ucacacagcacgauuccaa

SEQ ID NO: 126760 - RNA, 19 nt, Homo sapiens
  misc_RNA (1)...(19): siRNA sense strand
cgagucaguuacuaugaga

SEQ ID NO: 126761 - RNA, 19 nt, Homo sapiens
  misc_RNA (1)...(19): siRNA sense strand
aaaccaacuucaugaccaa

SEQ ID NO: 126762 - RNA, 19 nt, Homo sapiens
  misc_RNA (1)...(19): siRNA sense strand
ggugagcacguguuuguga

SEQ ID NO: 126763 - RNA, 19 nt, Homo sapiens
  misc_RNA (1)...(19): siRNA sense strand
acauguggcuuacuuugug

SEQ ID NO: 126764 - RNA, 19 nt, Homo sapiens
  misc_RNA (1)...(19): siRNA sense strand
cagaagaggaguccaagau

SEQ ID NO: 126765 - RNA, 19 nt, Homo sapiens
  misc_RNA (1)...(19): siRNA sense strand
gcauuggugugcccuugga

SEQ ID NO: 126766 - RNA, 19 nt, Homo sapiens
  misc_RNA (1)...(19): siRNA sense strand
gagaaugugaucaaagcaa

SEQ ID NO: 126767 - RNA, 19 nt, Homo sapiens
  misc_RNA (1)...(19): siRNA sense strand
ggcuuuggaugaagaguau

SEQ ID NO: 126768 - RNA, 19 nt, Homo sapiens
  misc_RNA (1)...(19): siRNA sense strand
gagcucaagcccaagaaga

SEQ ID NO: 126769 - RNA, 19 nt, Homo sapiens
  misc_RNA (1)...(19): siRNA sense strand
gugcccaugucaaagauug

SEQ ID NO: 126770 - RNA, 19 nt, Homo sapiens
  misc_RNA (1)...(19): siRNA sense strand
agaaugugaucaaagcaau

SEQ ID NO: 126771 - RNA, 19 nt, Homo sapiens
  misc_RNA (1)...(19): siRNA sense strand
ccucaaagcagaagccaau

SEQ ID NO: 126772 - RNA, 19 nt, Homo sapiens
  misc_RNA (1)...(19): siRNA sense strand
aagcaaaccaacuucauga

SEQ ID NO: 126773 - RNA, 19 nt, Homo sapiens
  misc_RNA (1)...(19): siRNA sense strand
gcuucugugugcuucuaua

SEQ ID NO: 126774 - RNA, 19 nt, Homo sapiens
  misc_RNA (1)...(19): siRNA sense strand
auaccuggauaacaugaaa

SEQ ID NO: 126775 - RNA, 19 nt, Homo sapiens
  misc_RNA (1)...(19): siRNA sense strand
gagcgggaacuuaaaauuu

SEQ ID NO: 126776 - RNA, 19 nt, Homo sapiens
  misc_RNA (1)...(19): siRNA sense strand
ucugaugaauccuaugguu

SEQ ID NO: 126777 - RNA, 19 nt, Homo sapiens
  misc_RNA (1)...(19): siRNA sense strand
caaagaguacacacuagau

SEQ ID NO: 126778 - RNA, 19 nt, Homo sapiens
  misc_RNA (1)...(19): siRNA sense strand
ugagcggccugguacaguu

SEQ ID NO: 126779 - RNA, 19 nt, Homo sapiens
  misc_RNA (1)...(19): siRNA sense strand
gcucaagcccaagaagaaa

SEQ ID NO: 126780 - RNA, 19 nt, Homo sapiens
  misc_RNA (1)...(19): siRNA sense strand
gugagcacguguuugugaa

SEQ ID NO: 126781 - RNA, 19 nt, Homo sapiens
  misc_RNA (1)...(19): siRNA sense strand
gauugcagacuucuuaaag

SEQ ID NO: 126782 - RNA, 19 nt, Homo sapiens
  misc_RNA (1)...(19): siRNA sense strand
gcauugaucagagaaagau

SEQ ID NO: 126783 - RNA, 19 nt, Homo sapiens
  misc_RNA (1)...(19): siRNA sense strand
gggcuccauuuccuguaaa

SEQ ID NO: 126784 - RNA, 19 nt, Homo sapiens
  misc_RNA (1)...(19): siRNA sense strand
caggcugacuucaaaauuu

SEQ ID NO: 126785 - RNA, 19 nt, Homo sapiens
  misc_RNA (1)...(19): siRNA sense strand
gucaaagauugcagacuuc

SEQ ID NO: 126786 - RNA, 19 nt, Homo sapiens
  misc_RNA (1)...(19): siRNA sense strand
aagaggaguccaagauuga

SEQ ID NO: 126787 - RNA, 19 nt, Homo sapiens
  misc_RNA (1)...(19): siRNA sense strand
agaagaggaguccaagauu

SEQ ID NO: 126788 - RNA, 19 nt, Homo sapiens
  misc_RNA (1)...(19): siRNA sense strand
gaccugaagaauucuguug

SEQ ID NO: 126789 - RNA, 19 nt, Homo sapiens
  misc_RNA (1)...(19): siRNA sense strand
aaaggcagggugugaggua

SEQ ID NO: 126790 - RNA, 19 nt, Homo sapiens
  misc_RNA (1)...(19): siRNA sense strand
gaagucgcacugaacaagu

SEQ ID NO: 126791 - RNA, 19 nt, Homo sapiens
  misc_RNA (1)...(19): siRNA sense strand
ugaccaagcugggcuccau

SEQ ID NO: 126792 - RNA, 19 nt, Homo sapiens
  misc_RNA (1)...(19): siRNA sense strand
cuacccagaucccucaaag

SEQ ID NO: 126793 - RNA, 19 nt, Homo sapiens
  misc_RNA (1)...(19): siRNA sense strand
ggagaagcacccagaugca

SEQ ID NO: 126794 - RNA, 19 nt, Homo sapiens
  misc_RNA (1)...(19): siRNA sense strand
aaucaucacuguggagaag

SEQ ID NO: 126795 - RNA, 19 nt, Homo sapiens
  misc_RNA (1)...(19): siRNA sense strand
caaaaugagcucuucagaa

SEQ ID NO: 126796 - RNA, 19 nt, Homo sapiens
  misc_RNA (1)...(19): siRNA sense strand
gccaaaggcccugccaaga

SEQ ID NO: 126797 - RNA, 19 nt, Homo sapiens
  misc_RNA (1)...(19): siRNA sense strand
ugaagaauucuguugaagu

SEQ ID NO: 126798 - RNA, 19 nt, Homo sapiens
  misc_RNA (1)...(19): siRNA sense strand
ccuacgagaugagaaaugg

SEQ ID NO: 126799 - RNA, 19 nt, Homo sapiens
  misc_RNA (1)...(19): siRNA sense strand
cuaugagaaugugaucaaa

SEQ ID NO: 126800 - RNA, 19 nt, Homo sapiens
  misc_RNA (1)...(19): siRNA sense strand
gaggagcucaagcccaaga

SEQ ID NO: 126801 - RNA, 19 nt, Homo sapiens
  misc_RNA (1)...(19): siRNA sense strand
aagcucaaguucaucaaag

SEQ ID NO: 126802 - RNA, 19 nt, Homo sapiens
  misc_RNA (1)...(19): siRNA sense strand
gaaugugaucaaagcaaug

SEQ ID NO: 126803 - RNA, 19 nt, Homo sapiens
  misc_RNA (1)...(19): siRNA sense strand
aaagaguacacacuagaug

SEQ ID NO: 126804 - RNA, 19 nt, Homo sapiens
  misc_RNA (1)...(19): siRNA sense strand
ccuggagaccugaagaauu

SEQ ID NO: 126805 - RNA, 19 nt, Homo sapiens
  misc_RNA (1)...(19): siRNA sense strand
gaugagaaaugggguggaa

SEQ ID NO: 126806 - RNA, 19 nt, Homo sapiens
  misc_RNA (1)...(19): siRNA sense strand
gacugcaggcuuuggauga

SEQ ID NO: 126807 - RNA, 19 nt, Homo sapiens
  misc_RNA (1)...(19): siRNA sense strand
ugggcuccauuuccuguaa

SEQ ID NO: 126808 - RNA, 19 nt, Homo sapiens
  misc_RNA (1)...(19): siRNA sense strand
ucaguuacuaugagaaugu

SEQ ID NO: 126809 - RNA, 19 nt, Homo sapiens
  misc_RNA (1)...(19): siRNA sense strand
cagccuguauguagagaag

SEQ ID NO: 126810 - RNA, 19 nt, Homo sapiens
  misc_RNA (1)...(19): siRNA sense strand
uuugcugaguggccucuua

SEQ ID NO: 126811 - RNA, 19 nt, Homo sapiens
  misc_RNA (1)...(19): siRNA sense strand
acacagcacgauuccaaga

SEQ ID NO: 126812 - RNA, 19 nt, Homo sapiens
  misc_RNA (1)...(19): siRNA sense strand
cuagauguguacagacucu

SEQ ID NO: 126813 - RNA, 19 nt, Homo sapiens
  misc_RNA (1)...(19): siRNA sense strand
ucaaaggcacugauuacca

SEQ ID NO: 126814 - RNA, 19 nt, Homo sapiens
  misc_RNA (1)...(19): siRNA sense strand
gaucggaaggaggauguga

SEQ ID NO: 126815 - RNA, 19 nt, Homo sapiens
  misc_RNA (1)...(19): siRNA sense strand
uaauaccccugcccugaaa

SEQ ID NO: 126816 - RNA, 19 nt, Homo sapiens
  misc_RNA (1)...(19): siRNA sense strand
aagucgcacugaacaaguu

SEQ ID NO: 126817 - RNA, 19 nt, Homo sapiens
  misc_RNA (1)...(19): siRNA sense strand
gcauaccuggauaacauga

SEQ ID NO: 126818 - RNA, 19 nt, Homo sapiens
  misc_RNA (1)...(19): siRNA sense strand
caaaacggguccaucugau

SEQ ID NO: 126819 - RNA, 19 nt, Homo sapiens
  misc_RNA (1)...(19): siRNA sense strand
gccuguauguagagaagau

SEQ ID NO: 126820 - RNA, 19 nt, Homo sapiens
  misc_RNA (1)...(19): siRNA sense strand
gcagauggauccuaauaga

SEQ ID NO: 126821 - RNA, 19 nt, Homo sapiens
  misc_RNA (1)...(19): siRNA sense strand
gccaagaucuccaacauga

SEQ ID NO: 126822 - RNA, 19 nt, Homo sapiens
  misc_RNA (1)...(19): siRNA sense strand
cauaaacguugguggauuu

SEQ ID NO: 126823 - RNA, 19 nt, Homo sapiens
  misc_RNA (1)...(19): siRNA sense strand
gauggauccuaauagaaua

SEQ ID NO: 126824 - RNA, 19 nt, Homo sapiens
  misc_RNA (1)...(19): siRNA sense strand
cagaguaucuucaacuaau

SEQ ID NO: 126825 - RNA, 19 nt, Homo sapiens
  misc_RNA (1)...(19): siRNA sense strand
ggaggaagcaccaaguauu

SEQ ID NO: 126826 - RNA, 19 nt, Homo sapiens
  misc_RNA (1)...(19): siRNA sense strand
ggcacucacugcauuuaua

SEQ ID NO: 126827 - RNA, 19 nt, Homo sapiens
  misc_RNA (1)...(19): siRNA sense strand
ggaauuacaacauaucguu

SEQ ID NO: 126828 - RNA, 19 nt, Homo sapiens
  misc_RNA (1)...(19): siRNA sense strand
agaccuagcuacagaguau

SEQ ID NO: 126829 - RNA, 19 nt, Homo sapiens
  misc_RNA (1)...(19): siRNA sense strand
gaauuaaacaggccuuuca

SEQ ID NO: 126830 - RNA, 19 nt, Homo sapiens
  misc_RNA (1)...(19): siRNA sense strand
gcacaucagagcagagaaa

SEQ ID NO: 126831 - RNA, 19 nt, Homo sapiens
  misc_RNA (1)...(19): siRNA sense strand
gcucaucucacuauuaaug

SEQ ID NO: 126832 - RNA, 19 nt, Homo sapiens
  misc_RNA (1)...(19): siRNA sense strand
caggagaccuagcuacaga

SEQ ID NO: 126833 - RNA, 19 nt, Homo sapiens
  misc_RNA (1)...(19): siRNA sense strand
gaggaagcaccaaguauug

SEQ ID NO: 126834 - RNA, 19 nt, Homo sapiens
  misc_RNA (1)...(19): siRNA sense strand
uugcucaucucacuauuaa

SEQ ID NO: 126835 - RNA, 19 nt, Homo sapiens
  misc_RNA (1)...(19): siRNA sense strand
caacaugacuuuuagcaau

SEQ ID NO: 126836 - RNA, 19 nt, Homo sapiens
  misc_RNA (1)...(19): siRNA sense strand
gguuagaucuggccaagag

SEQ ID NO: 126837 - RNA, 19 nt, Homo sapiens
  misc_RNA (1)...(19): siRNA sense strand
guggauggcucaugguuag

SEQ ID NO: 126838 - RNA, 19 nt, Homo sapiens
  misc_RNA (1)...(19): siRNA sense strand
gggccaagaucuccaacau

SEQ ID NO: 126839 - RNA, 19 nt, Homo sapiens
  misc_RNA (1)...(19): siRNA sense strand
uacagaguaucuucaacua

SEQ ID NO: 126840 - RNA, 19 nt, Homo sapiens
  misc_RNA (1)...(19): siRNA sense strand
ccauaaacguugguggauu

SEQ ID NO: 126841 - RNA, 19 nt, Homo sapiens
  misc_RNA (1)...(19): siRNA sense strand
gagaggaaaucagcaucga

SEQ ID NO: 126842 - RNA, 19 nt, Homo sapiens
  misc_RNA (1)...(19): siRNA sense strand
ggaucaggaugcaacauac

SEQ ID NO: 126843 - RNA, 19 nt, Homo sapiens
  misc_RNA (1)...(19): siRNA sense strand
gcacucacugcauuuauag

SEQ ID NO: 126844 - RNA, 19 nt, Homo sapiens
  misc_RNA (1)...(19): siRNA sense strand
guuacggucuggagaggaa

SEQ ID NO: 126845 - RNA, 19 nt, Homo sapiens
  misc_RNA (1)...(19): siRNA sense strand
uuaccuguaugccaacauu

SEQ ID NO: 126846 - RNA, 19 nt, Homo sapiens
  misc_RNA (1)...(19): siRNA sense strand
caacauacuuuggggcuuu

SEQ ID NO: 126847 - RNA, 19 nt, Homo sapiens
  misc_RNA (1)...(19): siRNA sense strand
gguggauggcucaugguua

SEQ ID NO: 126848 - RNA, 19 nt, Homo sapiens
  misc_RNA (1)...(19): siRNA sense strand
ccuaauagaauaucagaag

SEQ ID NO: 126849 - RNA, 19 nt, Homo sapiens
  misc_RNA (1)...(19): siRNA sense strand
cggaucaggaugcaacaua

SEQ ID NO: 126850 - RNA, 19 nt, Homo sapiens
  misc_RNA (1)...(19): siRNA sense strand
agauggcacucacugcauu

SEQ ID NO: 126851 - RNA, 19 nt, Homo sapiens
  misc_RNA (1)...(19): siRNA sense strand
aagugagucuguccucuug

SEQ ID NO: 126852 - RNA, 19 nt, Homo sapiens
  misc_RNA (1)...(19): siRNA sense strand
agauggauccuaauagaau

SEQ ID NO: 126853 - RNA, 19 nt, Homo sapiens
  misc_RNA (1)...(19): siRNA sense strand
ucaaggagcugugcaaaag

SEQ ID NO: 126854 - RNA, 19 nt, Homo sapiens
  misc_RNA (1)...(19): siRNA sense strand
cagauggauccuaauagaa

SEQ ID NO: 126855 - RNA, 19 nt, Homo sapiens
  misc_RNA (1)...(19): siRNA sense strand
ccugauucauguaggagaa

SEQ ID NO: 126856 - RNA, 19 nt, Homo sapiens
  misc_RNA (1)...(19): siRNA sense strand
ucaggaugcaacauacuuu

SEQ ID NO: 126857 - RNA, 19 nt, Homo sapiens
  misc_RNA (1)...(19): siRNA sense strand
aacauuugcuuucgacauc

SEQ ID NO: 126858 - RNA, 19 nt, Homo sapiens
  misc_RNA (1)...(19): siRNA sense strand
caacauuugcuuucgacau

SEQ ID NO: 126859 - RNA, 19 nt, Homo sapiens
  misc_RNA (1)...(19): siRNA sense strand
caagaucuccaacaugacu

SEQ ID NO: 126860 - RNA, 19 nt, Homo sapiens
  misc_RNA (1)...(19): siRNA sense strand
gagcagagaaagcgauggu

SEQ ID NO: 126861 - RNA, 19 nt, Homo sapiens
  misc_RNA (1)...(19): siRNA sense strand
agaguaucuucaacuaaug

SEQ ID NO: 126862 - RNA, 19 nt, Homo sapiens
  misc_RNA (1)...(19): siRNA sense strand
gagaauuaaacaggccuuu

SEQ ID NO: 126863 - RNA, 19 nt, Homo sapiens
  misc_RNA (1)...(19): siRNA sense strand
gauggcacucacugcauuu

SEQ ID NO: 126864 - RNA, 19 nt, Homo sapiens
  misc_RNA (1)...(19): siRNA sense strand
cuaaugguguacgucacua

SEQ ID NO: 126865 - RNA, 19 nt, Homo sapiens
  misc_RNA (1)...(19): siRNA sense strand
gcaaaaggaauuacaacau

SEQ ID NO: 126866 - RNA, 19 nt, Homo sapiens
  misc_RNA (1)...(19): siRNA sense strand
acagaguaucuucaacuaa

SEQ ID NO: 126867 - RNA, 19 nt, Homo sapiens
  misc_RNA (1)...(19): siRNA sense strand
gcaucaaaaucccaaguuc

SEQ ID NO: 126868 - RNA, 19 nt, Homo sapiens
  misc_RNA (1)...(19): siRNA sense strand
caaguucucauacccugau

SEQ ID NO: 126869 - RNA, 19 nt, Homo sapiens
  misc_RNA (1)...(19): siRNA sense strand
ggauccuaauagaauauca

SEQ ID NO: 126870 - RNA, 19 nt, Homo sapiens
  misc_RNA (1)...(19): siRNA sense strand
gauggcucaugguuagauc

SEQ ID NO: 126871 - RNA, 19 nt, Homo sapiens
  misc_RNA (1)...(19): siRNA sense strand
ccaucugguucccauaaag

SEQ ID NO: 126872 - RNA, 19 nt, Homo sapiens
  misc_RNA (1)...(19): siRNA sense strand
aaagugagucuguccucuu

SEQ ID NO: 126873 - RNA, 19 nt, Homo sapiens
  misc_RNA (1)...(19): siRNA sense strand
aaggaggaagcaccaagua

SEQ ID NO: 126874 - RNA, 19 nt, Homo sapiens
  misc_RNA (1)...(19): siRNA sense strand
gugagucuguccucuuggu

SEQ ID NO: 126875 - RNA, 19 nt, Homo sapiens
  misc_RNA (1)...(19): siRNA sense strand
aguucgagauauagauuga

SEQ ID NO: 126876 - RNA, 19 nt, Homo sapiens
  misc_RNA (1)...(19): siRNA sense strand
cuacagaguaucuucaacu

SEQ ID NO: 126877 - RNA, 19 nt, Homo sapiens
  misc_RNA (1)...(19): siRNA sense strand
cagcacaucagagcagaga

SEQ ID NO: 126878 - RNA, 19 nt, Homo sapiens
  misc_RNA (1)...(19): siRNA sense strand
caggaugcaacauacuuug

SEQ ID NO: 126879 - RNA, 19 nt, Homo sapiens
  misc_RNA (1)...(19): siRNA sense strand
gagaccuagcuacagagua

SEQ ID NO: 126880 - RNA, 19 nt, Homo sapiens
  misc_RNA (1)...(19): siRNA sense strand
ggagaccuagcuacagagu

SEQ ID NO: 126881 - RNA, 19 nt, Homo sapiens
  misc_RNA (1)...(19): siRNA sense strand
cccaucugguucccauaaa

SEQ ID NO: 126882 - RNA, 19 nt, Homo sapiens
  misc_RNA (1)...(19): siRNA sense strand
ggccaagaucuccaacaug

SEQ ID NO: 126883 - RNA, 19 nt, Homo sapiens
  misc_RNA (1)...(19): siRNA sense strand
ucauguaggagaauuaaac

SEQ ID NO: 126884 - RNA, 19 nt, Homo sapiens
  misc_RNA (1)...(19): siRNA sense strand
auaccugauucauguagga

SEQ ID NO: 126885 - RNA, 19 nt, Homo sapiens
  misc_RNA (1)...(19): siRNA sense strand
gccaagaucuccaacauga

SEQ ID NO: 126886 - RNA, 19 nt, Homo sapiens
  misc_RNA (1)...(19): siRNA sense strand
cauaaacguugguggauuu

SEQ ID NO: 126887 - RNA, 19 nt, Homo sapiens
  misc_RNA (1)...(19): siRNA sense strand
cagaguaucuucaacuaau

SEQ ID NO: 126888 - RNA, 19 nt, Homo sapiens
  misc_RNA (1)...(19): siRNA sense strand
ggaggaagcaccaaguauu

SEQ ID NO: 126889 - RNA, 19 nt, Homo sapiens
  misc_RNA (1)...(19): siRNA sense strand
ggcacucacugcauuuaua

SEQ ID NO: 126890 - RNA, 19 nt, Homo sapiens
  misc_RNA (1)...(19): siRNA sense strand
ggaauuacaacauaucguu

SEQ ID NO: 126891 - RNA, 19 nt, Homo sapiens
  misc_RNA (1)...(19): siRNA sense strand
agaccuagcuacagaguau

SEQ ID NO: 126892 - RNA, 19 nt, Homo sapiens
  misc_RNA (1)...(19): siRNA sense strand
gaauuaaacaggccuuuca

SEQ ID NO: 126893 - RNA, 19 nt, Homo sapiens
  misc_RNA (1)...(19): siRNA sense strand
gcacaucagagcagagaaa

SEQ ID NO: 126894 - RNA, 19 nt, Homo sapiens
  misc_RNA (1)...(19): siRNA sense strand
gcucaucucacuauuaaug

SEQ ID NO: 126895 - RNA, 19 nt, Homo sapiens
  misc_RNA (1)...(19): siRNA sense strand
caggagaccuagcuacaga

SEQ ID NO: 126896 - RNA, 19 nt, Homo sapiens
  misc_RNA (1)...(19): siRNA sense strand
gaggaagcaccaaguauug

SEQ ID NO: 126897 - RNA, 19 nt, Homo sapiens
  misc_RNA (1)...(19): siRNA sense strand
uugcucaucucacuauuaa

SEQ ID NO: 126898 - RNA, 19 nt, Homo sapiens
  misc_RNA (1)...(19): siRNA sense strand
caacaugacuuuuagcaau

SEQ ID NO: 126899 - RNA, 19 nt, Homo sapiens
  misc_RNA (1)...(19): siRNA sense strand
gguuagaucuggccaagag

SEQ ID NO: 126900 - RNA, 19 nt, Homo sapiens
  misc_RNA (1)...(19): siRNA sense strand
guggauggcucaugguuag

SEQ ID NO: 126901 - RNA, 19 nt, Homo sapiens
  misc_RNA (1)...(19): siRNA sense strand
gggccaagaucuccaacau

SEQ ID NO: 126902 - RNA, 19 nt, Homo sapiens
  misc_RNA (1)...(19): siRNA sense strand
uacagaguaucuucaacua

SEQ ID NO: 126903 - RNA, 19 nt, Homo sapiens
  misc_RNA (1)...(19): siRNA sense strand
ccauaaacguugguggauu

SEQ ID NO: 126904 - RNA, 19 nt, Homo sapiens
  misc_RNA (1)...(19): siRNA sense strand
gagaggaaaucagcaucga

SEQ ID NO: 126905 - RNA, 19 nt, Homo sapiens
  misc_RNA (1)...(19): siRNA sense strand
ggaucaggaugcaacauac

SEQ ID NO: 126906 - RNA, 19 nt, Homo sapiens
  misc_RNA (1)...(19): siRNA sense strand
gcacucacugcauuuauag

SEQ ID NO: 126907 - RNA, 19 nt, Homo sapiens
  misc_RNA (1)...(19): siRNA sense strand
guuacggucuggagaggaa

SEQ ID NO: 126908 - RNA, 19 nt, Homo sapiens
  misc_RNA (1)...(19): siRNA sense strand
uuaccuguaugccaacauu

SEQ ID NO: 126909 - RNA, 19 nt, Homo sapiens
  misc_RNA (1)...(19): siRNA sense strand
caacauacuuuggggcuuu

SEQ ID NO: 126910 - RNA, 19 nt, Homo sapiens
  misc_RNA (1)...(19): siRNA sense strand
gguggauggcucaugguua

SEQ ID NO: 126911 - RNA, 19 nt, Homo sapiens
  misc_RNA (1)...(19): siRNA sense strand
agauggcacucacugcauu

SEQ ID NO: 126912 - RNA, 19 nt, Homo sapiens
  misc_RNA (1)...(19): siRNA sense strand
cggaucaggaugcaacaua

SEQ ID NO: 126913 - RNA, 19 nt, Homo sapiens
  misc_RNA (1)...(19): siRNA sense strand
ccuaauagaauaucagaag

SEQ ID NO: 126914 - RNA, 19 nt, Homo sapiens
  misc_RNA (1)...(19): siRNA sense strand
aagugagucuguccucuug

SEQ ID NO: 126915 - RNA, 19 nt, Homo sapiens
  misc_RNA (1)...(19): siRNA sense strand
ucaaggagcugugcaaaag

SEQ ID NO: 126916 - RNA, 19 nt, Homo sapiens
  misc_RNA (1)...(19): siRNA sense strand
ccugauucauguaggagaa

SEQ ID NO: 126917 - RNA, 19 nt, Homo sapiens
  misc_RNA (1)...(19): siRNA sense strand
ucaggaugcaacauacuuu

SEQ ID NO: 126918 - RNA, 19 nt, Homo sapiens
  misc_RNA (1)...(19): siRNA sense strand
aacauuugcuuucgacauc

SEQ ID NO: 126919 - RNA, 19 nt, Homo sapiens
  misc_RNA (1)...(19): siRNA sense strand
caacauuugcuuucgacau

SEQ ID NO: 126920 - RNA, 19 nt, Homo sapiens
  misc_RNA (1)...(19): siRNA sense strand
caagaucuccaacaugacu

SEQ ID NO: 126921 - RNA, 19 nt, Homo sapiens
  misc_RNA (1)...(19): siRNA sense strand
gagcagagaaagcgauggu

SEQ ID NO: 126922 - RNA, 19 nt, Homo sapiens
  misc_RNA (1)...(19): siRNA sense strand
agaguaucuucaacuaaug

SEQ ID NO: 126923 - RNA, 19 nt, Homo sapiens
  misc_RNA (1)...(19): siRNA sense strand
gagaauuaaacaggccuuu

SEQ ID NO: 126924 - RNA, 19 nt, Homo sapiens
  misc_RNA (1)...(19): siRNA sense strand
cuaaugguguacgucacua

SEQ ID NO: 126925 - RNA, 19 nt, Homo sapiens
  misc_RNA (1)...(19): siRNA sense strand
gauggcacucacugcauuu

SEQ ID NO: 126926 - RNA, 19 nt, Homo sapiens
  misc_RNA (1)...(19): siRNA sense strand
gcaaaaggaauuacaacau

SEQ ID NO: 126927 - RNA, 19 nt, Homo sapiens
  misc_RNA (1)...(19): siRNA sense strand
acagaguaucuucaacuaa

SEQ ID NO: 126928 - RNA, 19 nt, Homo sapiens
  misc_RNA (1)...(19): siRNA sense strand
gcaucaaaaucccaaguuc

SEQ ID NO: 126929 - RNA, 19 nt, Homo sapiens
  misc_RNA (1)...(19): siRNA sense strand
ggauccuaauagaauauca

SEQ ID NO: 126930 - RNA, 19 nt, Homo sapiens
  misc_RNA (1)...(19): siRNA sense strand
caaguucucauacccugau

SEQ ID NO: 126931 - RNA, 19 nt, Homo sapiens
  misc_RNA (1)...(19): siRNA sense strand
gauggcucaugguuagauc

SEQ ID NO: 126932 - RNA, 19 nt, Homo sapiens
  misc_RNA (1)...(19): siRNA sense strand
ccaucugguucccauaaag

SEQ ID NO: 126933 - RNA, 19 nt, Homo sapiens
  misc_RNA (1)...(19): siRNA sense strand
aaagugagucuguccucuu

SEQ ID NO: 126934 - RNA, 19 nt, Homo sapiens
  misc_RNA (1)...(19): siRNA sense strand
aaggaggaagcaccaagua

SEQ ID NO: 126935 - RNA, 19 nt, Homo sapiens
  misc_RNA (1)...(19): siRNA sense strand
gugagucuguccucuuggu

SEQ ID NO: 126936 - RNA, 19 nt, Homo sapiens
  misc_RNA (1)...(19): siRNA sense strand
aguucgagauauagauuga

SEQ ID NO: 126937 - RNA, 19 nt, Homo sapiens
  misc_RNA (1)...(19): siRNA sense strand
cuacagaguaucuucaacu

SEQ ID NO: 126938 - RNA, 19 nt, Homo sapiens
  misc_RNA (1)...(19): siRNA sense strand
cagcacaucagagcagaga

SEQ ID NO: 126939 - RNA, 19 nt, Homo sapiens
  misc_RNA (1)...(19): siRNA sense strand
caggaugcaacauacuuug

SEQ ID NO: 126940 - RNA, 19 nt, Homo sapiens
  misc_RNA (1)...(19): siRNA sense strand
gagaccuagcuacagagua

SEQ ID NO: 126941 - RNA, 19 nt, Homo sapiens
  misc_RNA (1)...(19): siRNA sense strand
ggagaccuagcuacagagu

SEQ ID NO: 126942 - RNA, 19 nt, Homo sapiens
  misc_RNA (1)...(19): siRNA sense strand
cccaucugguucccauaaa

SEQ ID NO: 126943 - RNA, 19 nt, Homo sapiens
  misc_RNA (1)...(19): siRNA sense strand
ucauguaggagaauuaaac

SEQ ID NO: 126944 - RNA, 19 nt, Homo sapiens
  misc_RNA (1)...(19): siRNA sense strand
auaccugauucauguagga

SEQ ID NO: 126945 - RNA, 19 nt, Homo sapiens
  misc_RNA (1)...(19): siRNA sense strand
ggccaagaucuccaacaug

SEQ ID NO: 126946 - RNA, 19 nt, Homo sapiens
  misc_RNA (1)...(19): siRNA sense strand
cggagcaccuggucuauaa

SEQ ID NO: 126947 - RNA, 19 nt, Homo sapiens
  misc_RNA (1)...(19): siRNA sense strand
gcaacaagaacaacuuuga

SEQ ID NO: 126948 - RNA, 19 nt, Homo sapiens
  misc_RNA (1)...(19): siRNA sense strand
gcaagaguuucguuuaugg

SEQ ID NO: 126949 - RNA, 19 nt, Homo sapiens
  misc_RNA (1)...(19): siRNA sense strand
gaaaggcgccauccagugu

SEQ ID NO: 126950 - RNA, 19 nt, Homo sapiens
  misc_RNA (1)...(19): siRNA sense strand
ggaaggcaccuaccuguuc

SEQ ID NO: 126951 - RNA, 19 nt, Homo sapiens
  misc_RNA (1)...(19): siRNA sense strand
gaacaacuuugaggaagag

SEQ ID NO: 126952 - RNA, 19 nt, Homo sapiens
  misc_RNA (1)...(19): siRNA sense strand
caagaacaacuuugaggaa

SEQ ID NO: 126953 - RNA, 19 nt, Homo sapiens
  misc_RNA (1)...(19): siRNA sense strand
gggagggcuucaucaacua

SEQ ID NO: 126954 - RNA, 19 nt, Homo sapiens
  misc_RNA (1)...(19): siRNA sense strand
gcauagacuugaagguaca

SEQ ID NO: 126955 - RNA, 19 nt, Homo sapiens
  misc_RNA (1)...(19): siRNA sense strand
gggcaggcauagacuugaa

SEQ ID NO: 126956 - RNA, 19 nt, Homo sapiens
  misc_RNA (1)...(19): siRNA sense strand
ucacugugcuguccaccaa

SEQ ID NO: 126957 - RNA, 19 nt, Homo sapiens
  misc_RNA (1)...(19): siRNA sense strand
ccaccaagcagacagaaga

SEQ ID NO: 126958 - RNA, 19 nt, Homo sapiens
  misc_RNA (1)...(19): siRNA sense strand
acacaggacucugcaagga

SEQ ID NO: 126959 - RNA, 19 nt, Homo sapiens
  misc_RNA (1)...(19): siRNA sense strand
gcugcugcaucgacaguuu

SEQ ID NO: 126960 - RNA, 19 nt, Homo sapiens
  misc_RNA (1)...(19): siRNA sense strand
ggacacggccaacgucaca

SEQ ID NO: 126961 - RNA, 19 nt, Homo sapiens
  misc_RNA (1)...(19): siRNA sense strand
cugcaagaguuucguuuau

SEQ ID NO: 126962 - RNA, 19 nt, Homo sapiens
  misc_RNA (1)...(19): siRNA sense strand
caacaagaacaacuaccuu

SEQ ID NO: 126963 - RNA, 19 nt, Homo sapiens
  misc_RNA (1)...(19): siRNA sense strand
acaguuuccuggaguguga

SEQ ID NO: 126964 - RNA, 19 nt, Homo sapiens
  misc_RNA (1)...(19): siRNA sense strand
agaacaacuuugaggaaga

SEQ ID NO: 126965 - RNA, 19 nt, Homo sapiens
  misc_RNA (1)...(19): siRNA sense strand
ccaagcagacagaagacua

SEQ ID NO: 126966 - RNA, 19 nt, Homo sapiens
  misc_RNA (1)...(19): siRNA sense strand
ugguagccaucuuggguua

SEQ ID NO: 126967 - RNA, 19 nt, Homo sapiens
  misc_RNA (1)...(19): siRNA sense strand
ggagccgacugccugaaca

SEQ ID NO: 126968 - RNA, 19 nt, Homo sapiens
  misc_RNA (1)...(19): siRNA sense strand
acacggagcaccuggucua

SEQ ID NO: 126969 - RNA, 19 nt, Homo sapiens
  misc_RNA (1)...(19): siRNA sense strand
aggcauagacuugaaggua

SEQ ID NO: 126970 - RNA, 19 nt, Homo sapiens
  misc_RNA (1)...(19): siRNA sense strand
caguuccgcugcagcaaug

SEQ ID NO: 126971 - RNA, 19 nt, Homo sapiens
  misc_RNA (1)...(19): siRNA sense strand
ucaagaaccagagaaagga

SEQ ID NO: 126972 - RNA, 19 nt, Homo sapiens
  misc_RNA (1)...(19): siRNA sense strand
gcaccacccagaacugcaa

SEQ ID NO: 126973 - RNA, 19 nt, Homo sapiens
  misc_RNA (1)...(19): siRNA sense strand
caacaagaacaacuuugag

SEQ ID NO: 126974 - RNA, 19 nt, Homo sapiens
  misc_RNA (1)...(19): siRNA sense strand
acacggaugucaggguaga

SEQ ID NO: 126975 - RNA, 19 nt, Homo sapiens
  misc_RNA (1)...(19): siRNA sense strand
ggaggcugcuugggcaaca

SEQ ID NO: 126976 - RNA, 19 nt, Homo sapiens
  misc_RNA (1)...(19): siRNA sense strand
ugcaagaguuucguuuaug

SEQ ID NO: 126977 - RNA, 19 nt, Homo sapiens
  misc_RNA (1)...(19): siRNA sense strand
gcaacaagaacaacuaccu

SEQ ID NO: 126978 - RNA, 19 nt, Homo sapiens
  misc_RNA (1)...(19): siRNA sense strand
ucugcaagaguuucguuua

SEQ ID NO: 126979 - RNA, 19 nt, Homo sapiens
  misc_RNA (1)...(19): siRNA sense strand
ccagggagggcuucaucaa

SEQ ID NO: 126980 - RNA, 19 nt, Homo sapiens
  misc_RNA (1)...(19): siRNA sense strand
gcuccacugucuccacuac

SEQ ID NO: 126981 - RNA, 19 nt, Homo sapiens
  misc_RNA (1)...(19): siRNA sense strand
agcagugccucgagucuug

SEQ ID NO: 126982 - RNA, 19 nt, Homo sapiens
  misc_RNA (1)...(19): siRNA sense strand
uuaccuauggugguuguua

SEQ ID NO: 126983 - RNA, 19 nt, Homo sapiens
  misc_RNA (1)...(19): siRNA sense strand
gaucugcaagaguuucguu

SEQ ID NO: 126984 - RNA, 19 nt, Homo sapiens
  misc_RNA (1)...(19): siRNA sense strand
gagcuccagcgcauccauu

SEQ ID NO: 126985 - RNA, 19 nt, Homo sapiens
  misc_RNA (1)...(19): siRNA sense strand
ccgacugccugaacagcuu

SEQ ID NO: 126986 - RNA, 19 nt, Homo sapiens
  misc_RNA (1)...(19): siRNA sense strand
caagaguuucguuuaugga

SEQ ID NO: 126987 - RNA, 19 nt, Homo sapiens
  misc_RNA (1)...(19): siRNA sense strand
agggagggcuucaucaacu

SEQ ID NO: 126988 - RNA, 19 nt, Homo sapiens
  misc_RNA (1)...(19): siRNA sense strand
ugacagugacuagcucaga

SEQ ID NO: 126989 - RNA, 19 nt, Homo sapiens
  misc_RNA (1)...(19): siRNA sense strand
ccugucagcccacccaguu

SEQ ID NO: 126990 - RNA, 19 nt, Homo sapiens
  misc_RNA (1)...(19): siRNA sense strand
gaagguacaaccccaggaa

SEQ ID NO: 126991 - RNA, 19 nt, Homo sapiens
  misc_RNA (1)...(19): siRNA sense strand
gcuucgugcuggacaccaa

SEQ ID NO: 126992 - RNA, 19 nt, Homo sapiens
  misc_RNA (1)...(19): siRNA sense strand
cggagcaccuggucuauaa

SEQ ID NO: 126993 - RNA, 19 nt, Homo sapiens
  misc_RNA (1)...(19): siRNA sense strand
gcaacaagaacaacuuuga

SEQ ID NO: 126994 - RNA, 19 nt, Homo sapiens
  misc_RNA (1)...(19): siRNA sense strand
gcaagaguuucguuuaugg

SEQ ID NO: 126995 - RNA, 19 nt, Homo sapiens
  misc_RNA (1)...(19): siRNA sense strand
gaaaggcgccauccagugu

SEQ ID NO: 126996 - RNA, 19 nt, Homo sapiens
  misc_RNA (1)...(19): siRNA sense strand
ggaaggcaccuaccuguuc

SEQ ID NO: 126997 - RNA, 19 nt, Homo sapiens
  misc_RNA (1)...(19): siRNA sense strand
gaacaacuuugaggaagag

SEQ ID NO: 126998 - RNA, 19 nt, Homo sapiens
  misc_RNA (1)...(19): siRNA sense strand
caagaacaacuuugaggaa

SEQ ID NO: 126999 - RNA, 19 nt, Homo sapiens
  misc_RNA (1)...(19): siRNA sense strand
gggagggcuucaucaacua

SEQ ID NO: 127000 - RNA, 19 nt, Homo sapiens
  misc_RNA (1)...(19): siRNA sense strand
gcauagacuugaagguaca

SEQ ID NO: 127001 - RNA, 19 nt, Homo sapiens
  misc_RNA (1)...(19): siRNA sense strand
gggcaggcauagacuugaa

SEQ ID NO: 127002 - RNA, 19 nt, Homo sapiens
  misc_RNA (1)...(19): siRNA sense strand
ucacugugcuguccaccaa

SEQ ID NO: 127003 - RNA, 19 nt, Homo sapiens
  misc_RNA (1)...(19): siRNA sense strand
ccaccaagcagacagaaga

SEQ ID NO: 127004 - RNA, 19 nt, Homo sapiens
  misc_RNA (1)...(19): siRNA sense strand
acacaggacucugcaagga

SEQ ID NO: 127005 - RNA, 19 nt, Homo sapiens
  misc_RNA (1)...(19): siRNA sense strand
gcugcugcaucgacaguuu

SEQ ID NO: 127006 - RNA, 19 nt, Homo sapiens
  misc_RNA (1)...(19): siRNA sense strand
ggacacggccaacgucaca

SEQ ID NO: 127007 - RNA, 19 nt, Homo sapiens
  misc_RNA (1)...(19): siRNA sense strand
cugcaagaguuucguuuau

SEQ ID NO: 127008 - RNA, 19 nt, Homo sapiens
  misc_RNA (1)...(19): siRNA sense strand
caacaagaacaacuaccuu

SEQ ID NO: 127009 - RNA, 19 nt, Homo sapiens
  misc_RNA (1)...(19): siRNA sense strand
acaguuuccuggaguguga

SEQ ID NO: 127010 - RNA, 19 nt, Homo sapiens
  misc_RNA (1)...(19): siRNA sense strand
agaacaacuuugaggaaga

SEQ ID NO: 127011 - RNA, 19 nt, Homo sapiens
  misc_RNA (1)...(19): siRNA sense strand
ccaagcagacagaagacua

SEQ ID NO: 127012 - RNA, 19 nt, Homo sapiens
  misc_RNA (1)...(19): siRNA sense strand
ugguagccaucuuggguua

SEQ ID NO: 127013 - RNA, 19 nt, Homo sapiens
  misc_RNA (1)...(19): siRNA sense strand
ggagccgacugccugaaca

SEQ ID NO: 127014 - RNA, 19 nt, Homo sapiens
  misc_RNA (1)...(19): siRNA sense strand
acacggagcaccuggucua

SEQ ID NO: 127015 - RNA, 19 nt, Homo sapiens
  misc_RNA (1)...(19): siRNA sense strand
aggcauagacuugaaggua

SEQ ID NO: 127016 - RNA, 19 nt, Homo sapiens
  misc_RNA (1)...(19): siRNA sense strand
caguuccgcugcagcaaug

SEQ ID NO: 127017 - RNA, 19 nt, Homo sapiens
  misc_RNA (1)...(19): siRNA sense strand
ucaagaaccagagaaagga

SEQ ID NO: 127018 - RNA, 19 nt, Homo sapiens
  misc_RNA (1)...(19): siRNA sense strand
gcaccacccagaacugcaa

SEQ ID NO: 127019 - RNA, 19 nt, Homo sapiens
  misc_RNA (1)...(19): siRNA sense strand
caacaagaacaacuuugag

SEQ ID NO: 127020 - RNA, 19 nt, Homo sapiens
  misc_RNA (1)...(19): siRNA sense strand
acacggaugucaggguaga

SEQ ID NO: 127021 - RNA, 19 nt, Homo sapiens
  misc_RNA (1)...(19): siRNA sense strand
ggaggcugcuugggcaaca

SEQ ID NO: 127022 - RNA, 19 nt, Homo sapiens
  misc_RNA (1)...(19): siRNA sense strand
ugcaagaguuucguuuaug

SEQ ID NO: 127023 - RNA, 19 nt, Homo sapiens
  misc_RNA (1)...(19): siRNA sense strand
gcaacaagaacaacuaccu

SEQ ID NO: 127024 - RNA, 19 nt, Homo sapiens
  misc_RNA (1)...(19): siRNA sense strand
ucugcaagaguuucguuua

SEQ ID NO: 127025 - RNA, 19 nt, Homo sapiens
  misc_RNA (1)...(19): siRNA sense strand
ccagggagggcuucaucaa

SEQ ID NO: 127026 - RNA, 19 nt, Homo sapiens
  misc_RNA (1)...(19): siRNA sense strand
gcuccacugucuccacuac

SEQ ID NO: 127027 - RNA, 19 nt, Homo sapiens
  misc_RNA (1)...(19): siRNA sense strand
agcagugccucgagucuug

SEQ ID NO: 127028 - RNA, 19 nt, Homo sapiens
  misc_RNA (1)...(19): siRNA sense strand
uuaccuauggugguuguua

SEQ ID NO: 127029 - RNA, 19 nt, Homo sapiens
  misc_RNA (1)...(19): siRNA sense strand
gaucugcaagaguuucguu

SEQ ID NO: 127030 - RNA, 19 nt, Homo sapiens
  misc_RNA (1)...(19): siRNA sense strand
gagcuccagcgcauccauu

SEQ ID NO: 127031 - RNA, 19 nt, Homo sapiens
  misc_RNA (1)...(19): siRNA sense strand
ccgacugccugaacagcuu

SEQ ID NO: 127032 - RNA, 19 nt, Homo sapiens
  misc_RNA (1)...(19): siRNA sense strand
caagaguuucguuuaugga

SEQ ID NO: 127033 - RNA, 19 nt, Homo sapiens
  misc_RNA (1)...(19): siRNA sense strand
agggagggcuucaucaacu

SEQ ID NO: 127034 - RNA, 19 nt, Homo sapiens
  misc_RNA (1)...(19): siRNA sense strand
ugacagugacuagcucaga

SEQ ID NO: 127035 - RNA, 19 nt, Homo sapiens
  misc_RNA (1)...(19): siRNA sense strand
ccugucagcccacccaguu

SEQ ID NO: 127036 - RNA, 19 nt, Homo sapiens
  misc_RNA (1)...(19): siRNA sense strand
gaagguacaaccccaggaa

SEQ ID NO: 127037 - RNA, 19 nt, Homo sapiens
  misc_RNA (1)...(19): siRNA sense strand
gcuucgugcuggacaccaa

SEQ ID NO: 127038 - RNA, 19 nt, Homo sapiens
  misc_RNA (1)...(19): siRNA sense strand
ugacagaccuggccaagua

SEQ ID NO: 127039 - RNA, 19 nt, Homo sapiens
  misc_RNA (1)...(19): siRNA sense strand
gcacgacucuguuggaagu

SEQ ID NO: 127040 - RNA, 19 nt, Homo sapiens
  misc_RNA (1)...(19): siRNA sense strand
gcucggacuucaacaacua

SEQ ID NO: 127041 - RNA, 19 nt, Homo sapiens
  misc_RNA (1)...(19): siRNA sense strand
cuacguggcugcuguauac

SEQ ID NO: 127042 - RNA, 19 nt, Homo sapiens
  misc_RNA (1)...(19): siRNA sense strand
ccgcgugucugauuacaaa

SEQ ID NO: 127043 - RNA, 19 nt, Homo sapiens
  misc_RNA (1)...(19): siRNA sense strand
gggaaacccugcugauguc

SEQ ID NO: 127044 - RNA, 19 nt, Homo sapiens
  misc_RNA (1)...(19): siRNA sense strand
caucucagacuucuucaaa

SEQ ID NO: 127045 - RNA, 19 nt, Homo sapiens
  misc_RNA (1)...(19): siRNA sense strand
acacagaccggcucuauuc

SEQ ID NO: 127046 - RNA, 19 nt, Homo sapiens
  misc_RNA (1)...(19): siRNA sense strand
guacacagaccggcucuau

SEQ ID NO: 127047 - RNA, 19 nt, Homo sapiens
  misc_RNA (1)...(19): siRNA sense strand
cuacaucucagacuucuuc

SEQ ID NO: 127048 - RNA, 19 nt, Homo sapiens
  misc_RNA (1)...(19): siRNA sense strand
caacuacguggcugcugua

SEQ ID NO: 127049 - RNA, 19 nt, Homo sapiens
  misc_RNA (1)...(19): siRNA sense strand
caacugcucggucuaugug

SEQ ID NO: 127050 - RNA, 19 nt, Homo sapiens
  misc_RNA (1)...(19): siRNA sense strand
gaggccagguugucuuucu

SEQ ID NO: 127051 - RNA, 19 nt, Homo sapiens
  misc_RNA (1)...(19): siRNA sense strand
gccgugagccagucucuga

SEQ ID NO: 127052 - RNA, 19 nt, Homo sapiens
  misc_RNA (1)...(19): siRNA sense strand
ccacaaccacuauggauac

SEQ ID NO: 127053 - RNA, 19 nt, Homo sapiens
  misc_RNA (1)...(19): siRNA sense strand
gaaggaggaggagcuggaa

SEQ ID NO: 127054 - RNA, 19 nt, Homo sapiens
  misc_RNA (1)...(19): siRNA sense strand
cuggagcgauguccuuguu

SEQ ID NO: 127055 - RNA, 19 nt, Homo sapiens
  misc_RNA (1)...(19): siRNA sense strand
ucgggacacucuuccuuug

SEQ ID NO: 127056 - RNA, 19 nt, Homo sapiens
  misc_RNA (1)...(19): siRNA sense strand
gaccacaaccacuauggau

SEQ ID NO: 127057 - RNA, 19 nt, Homo sapiens
  misc_RNA (1)...(19): siRNA sense strand
gacccacaguccaguucuu

SEQ ID NO: 127058 - RNA, 19 nt, Homo sapiens
  misc_RNA (1)...(19): siRNA sense strand
gaccuggccaaguacauga

SEQ ID NO: 127059 - RNA, 19 nt, Homo sapiens
  misc_RNA (1)...(19): siRNA sense strand
ggucaacugcucggucuau

SEQ ID NO: 127060 - RNA, 19 nt, Homo sapiens
  misc_RNA (1)...(19): siRNA sense strand
ucucagacuucuucaaagc

SEQ ID NO: 127061 - RNA, 19 nt, Homo sapiens
  misc_RNA (1)...(19): siRNA sense strand
aagcccagccugucacuga

SEQ ID NO: 127062 - RNA, 19 nt, Homo sapiens
  misc_RNA (1)...(19): siRNA sense strand
ccacuggagcgauguccuu

SEQ ID NO: 127063 - RNA, 19 nt, Homo sapiens
  misc_RNA (1)...(19): siRNA sense strand
gggaagccuaccuggugua

SEQ ID NO: 127064 - RNA, 19 nt, Homo sapiens
  misc_RNA (1)...(19): siRNA sense strand
ggauguacugcaugguguu

SEQ ID NO: 127065 - RNA, 19 nt, Homo sapiens
  misc_RNA (1)...(19): siRNA sense strand
ugacagaccuggccaagua

SEQ ID NO: 127066 - RNA, 19 nt, Homo sapiens
  misc_RNA (1)...(19): siRNA sense strand
gcacgacucuguuggaagu

SEQ ID NO: 127067 - RNA, 19 nt, Homo sapiens
  misc_RNA (1)...(19): siRNA sense strand
gcucggacuucaacaacua

SEQ ID NO: 127068 - RNA, 19 nt, Homo sapiens
  misc_RNA (1)...(19): siRNA sense strand
cuacguggcugcuguauac

SEQ ID NO: 127069 - RNA, 19 nt, Homo sapiens
  misc_RNA (1)...(19): siRNA sense strand
ccgcgugucugauuacaaa

SEQ ID NO: 127070 - RNA, 19 nt, Homo sapiens
  misc_RNA (1)...(19): siRNA sense strand
gggaaacccugcugauguc

SEQ ID NO: 127071 - RNA, 19 nt, Homo sapiens
  misc_RNA (1)...(19): siRNA sense strand
caucucagacuucuucaaa

SEQ ID NO: 127072 - RNA, 19 nt, Homo sapiens
  misc_RNA (1)...(19): siRNA sense strand
acacagaccggcucuauuc

SEQ ID NO: 127073 - RNA, 19 nt, Homo sapiens
  misc_RNA (1)...(19): siRNA sense strand
guacacagaccggcucuau

SEQ ID NO: 127074 - RNA, 19 nt, Homo sapiens
  misc_RNA (1)...(19): siRNA sense strand
cuacaucucagacuucuuc

SEQ ID NO: 127075 - RNA, 19 nt, Homo sapiens
  misc_RNA (1)...(19): siRNA sense strand
caacuacguggcugcugua

SEQ ID NO: 127076 - RNA, 19 nt, Homo sapiens
  misc_RNA (1)...(19): siRNA sense strand
caacugcucggucuaugug

SEQ ID NO: 127077 - RNA, 19 nt, Homo sapiens
  misc_RNA (1)...(19): siRNA sense strand
gaggccagguugucuuucu

SEQ ID NO: 127078 - RNA, 19 nt, Homo sapiens
  misc_RNA (1)...(19): siRNA sense strand
gccgugagccagucucuga

SEQ ID NO: 127079 - RNA, 19 nt, Homo sapiens
  misc_RNA (1)...(19): siRNA sense strand
ccacaaccacuauggauac

SEQ ID NO: 127080 - RNA, 19 nt, Homo sapiens
  misc_RNA (1)...(19): siRNA sense strand
gaaggaggaggagcuggaa

SEQ ID NO: 127081 - RNA, 19 nt, Homo sapiens
  misc_RNA (1)...(19): siRNA sense strand
cuggagcgauguccuuguu

SEQ ID NO: 127082 - RNA, 19 nt, Homo sapiens
  misc_RNA (1)...(19): siRNA sense strand
ucgggacacucuuccuuug

SEQ ID NO: 127083 - RNA, 19 nt, Homo sapiens
  misc_RNA (1)...(19): siRNA sense strand
gaccacaaccacuauggau

SEQ ID NO: 127084 - RNA, 19 nt, Homo sapiens
  misc_RNA (1)...(19): siRNA sense strand
gacccacaguccaguucuu

SEQ ID NO: 127085 - RNA, 19 nt, Homo sapiens
  misc_RNA (1)...(19): siRNA sense strand
gaccuggccaaguacauga

SEQ ID NO: 127086 - RNA, 19 nt, Homo sapiens
  misc_RNA (1)...(19): siRNA sense strand
ggucaacugcucggucuau

SEQ ID NO: 127087 - RNA, 19 nt, Homo sapiens
  misc_RNA (1)...(19): siRNA sense strand
ucucagacuucuucaaagc

SEQ ID NO: 127088 - RNA, 19 nt, Homo sapiens
  misc_RNA (1)...(19): siRNA sense strand
aagcccagccugucacuga

SEQ ID NO: 127089 - RNA, 19 nt, Homo sapiens
  misc_RNA (1)...(19): siRNA sense strand
ccacuggagcgauguccuu

SEQ ID NO: 127090 - RNA, 19 nt, Homo sapiens
  misc_RNA (1)...(19): siRNA sense strand
gggaagccuaccuggugua

SEQ ID NO: 127091 - RNA, 19 nt, Homo sapiens
  misc_RNA (1)...(19): siRNA sense strand
ggauguacugcaugguguu

SEQ ID NO: 127092 - RNA, 19 nt, Homo sapiens
  misc_RNA (1)...(19): siRNA sense strand
ugacagaccuggccaagua

SEQ ID NO: 127093 - RNA, 19 nt, Homo sapiens
  misc_RNA (1)...(19): siRNA sense strand
gcacgacucuguuggaagu

SEQ ID NO: 127094 - RNA, 19 nt, Homo sapiens
  misc_RNA (1)...(19): siRNA sense strand
gcucggacuucaacaacua

SEQ ID NO: 127095 - RNA, 19 nt, Homo sapiens
  misc_RNA (1)...(19): siRNA sense strand
cuacguggcugcuguauac

SEQ ID NO: 127096 - RNA, 19 nt, Homo sapiens
  misc_RNA (1)...(19): siRNA sense strand
ccgcgugucugauuacaaa

SEQ ID NO: 127097 - RNA, 19 nt, Homo sapiens
  misc_RNA (1)...(19): siRNA sense strand
gggaaacccugcugauguc

SEQ ID NO: 127098 - RNA, 19 nt, Homo sapiens
  misc_RNA (1)...(19): siRNA sense strand
caucucagacuucuucaaa

SEQ ID NO: 127099 - RNA, 19 nt, Homo sapiens
  misc_RNA (1)...(19): siRNA sense strand
acacagaccggcucuauuc

SEQ ID NO: 127100 - RNA, 19 nt, Homo sapiens
  misc_RNA (1)...(19): siRNA sense strand
guacacagaccggcucuau

SEQ ID NO: 127101 - RNA, 19 nt, Homo sapiens
  misc_RNA (1)...(19): siRNA sense strand
cuacaucucagacuucuuc

SEQ ID NO: 127102 - RNA, 19 nt, Homo sapiens
  misc_RNA (1)...(19): siRNA sense strand
caacuacguggcugcugua

SEQ ID NO: 127103 - RNA, 19 nt, Homo sapiens
  misc_RNA (1)...(19): siRNA sense strand
caacugcucggucuaugug

SEQ ID NO: 127104 - RNA, 19 nt, Homo sapiens
  misc_RNA (1)...(19): siRNA sense strand
gaggccagguugucuuucu

SEQ ID NO: 127105 - RNA, 19 nt, Homo sapiens
  misc_RNA (1)...(19): siRNA sense strand
gccgugagccagucucuga

SEQ ID NO: 127106 - RNA, 19 nt, Homo sapiens
  misc_RNA (1)...(19): siRNA sense strand
ccacaaccacuauggauac

SEQ ID NO: 127107 - RNA, 19 nt, Homo sapiens
  misc_RNA (1)...(19): siRNA sense strand
gaaggaggaggagcuggaa

SEQ ID NO: 127108 - RNA, 19 nt, Homo sapiens
  misc_RNA (1)...(19): siRNA sense strand
cuggagcgauguccuuguu

SEQ ID NO: 127109 - RNA, 19 nt, Homo sapiens
  misc_RNA (1)...(19): siRNA sense strand
ucgggacacucuuccuuug

SEQ ID NO: 127110 - RNA, 19 nt, Homo sapiens
  misc_RNA (1)...(19): siRNA sense strand
gaccacaaccacuauggau

SEQ ID NO: 127111 - RNA, 19 nt, Homo sapiens
  misc_RNA (1)...(19): siRNA sense strand
gacccacaguccaguucuu

SEQ ID NO: 127112 - RNA, 19 nt, Homo sapiens
  misc_RNA (1)...(19): siRNA sense strand
gaccuggccaaguacauga

SEQ ID NO: 127113 - RNA, 19 nt, Homo sapiens
  misc_RNA (1)...(19): siRNA sense strand
ggucaacugcucggucuau

SEQ ID NO: 127114 - RNA, 19 nt, Homo sapiens
  misc_RNA (1)...(19): siRNA sense strand
ucucagacuucuucaaagc

SEQ ID NO: 127115 - RNA, 19 nt, Homo sapiens
  misc_RNA (1)...(19): siRNA sense strand
aagcccagccugucacuga

SEQ ID NO: 127116 - RNA, 19 nt, Homo sapiens
  misc_RNA (1)...(19): siRNA sense strand
ccacuggagcgauguccuu

SEQ ID NO: 127117 - RNA, 19 nt, Homo sapiens
  misc_RNA (1)...(19): siRNA sense strand
gggaagccuaccuggugua

SEQ ID NO: 127118 - RNA, 19 nt, Homo sapiens
  misc_RNA (1)...(19): siRNA sense strand
ggauguacugcaugguguu

SEQ ID NO: 127119 - RNA, 19 nt, Homo sapiens
  misc_RNA (1)...(19): siRNA sense strand
ggaaagaacugccauuaaa

SEQ ID NO: 127120 - RNA, 19 nt, Homo sapiens
  misc_RNA (1)...(19): siRNA sense strand
gaacagugauggagguaua

SEQ ID NO: 127121 - RNA, 19 nt, Homo sapiens
  misc_RNA (1)...(19): siRNA sense strand
gagaagagauagaagaauu

SEQ ID NO: 127122 - RNA, 19 nt, Homo sapiens
  misc_RNA (1)...(19): siRNA sense strand
ugaacaaguugcagaauua

SEQ ID NO: 127123 - RNA, 19 nt, Homo sapiens
  misc_RNA (1)...(19): siRNA sense strand
ccaaagaguuaaagaauga

SEQ ID NO: 127124 - RNA, 19 nt, Homo sapiens
  misc_RNA (1)...(19): siRNA sense strand
aaagaaggcucauauauuc

SEQ ID NO: 127125 - RNA, 19 nt, Homo sapiens
  misc_RNA (1)...(19): siRNA sense strand
gaaaaggacucuaugauug

SEQ ID NO: 127126 - RNA, 19 nt, Homo sapiens
  misc_RNA (1)...(19): siRNA sense strand
gcagcagguuucuacauua

SEQ ID NO: 127127 - RNA, 19 nt, Homo sapiens
  misc_RNA (1)...(19): siRNA sense strand
gcaaagagaauuucauaga

SEQ ID NO: 127128 - RNA, 19 nt, Homo sapiens
  misc_RNA (1)...(19): siRNA sense strand
aaaugucacucuucuguua

SEQ ID NO: 127129 - RNA, 19 nt, Homo sapiens
  misc_RNA (1)...(19): siRNA sense strand
gcucauauauucaacguau

SEQ ID NO: 127130 - RNA, 19 nt, Homo sapiens
  misc_RNA (1)...(19): siRNA sense strand
gaaaggcagccauuuguuu

SEQ ID NO: 127131 - RNA, 19 nt, Homo sapiens
  misc_RNA (1)...(19): siRNA sense strand
ggagagaccgagacuauaa

SEQ ID NO: 127132 - RNA, 19 nt, Homo sapiens
  misc_RNA (1)...(19): siRNA sense strand
ggaagccaauuuacagaaa

SEQ ID NO: 127133 - RNA, 19 nt, Homo sapiens
  misc_RNA (1)...(19): siRNA sense strand
ccaaacaucuggcacaaau

SEQ ID NO: 127134 - RNA, 19 nt, Homo sapiens
  misc_RNA (1)...(19): siRNA sense strand
gaaguuauacguaaugaug

SEQ ID NO: 127135 - RNA, 19 nt, Homo sapiens
  misc_RNA (1)...(19): siRNA sense strand
ccagggaaguuauacguaa

SEQ ID NO: 127136 - RNA, 19 nt, Homo sapiens
  misc_RNA (1)...(19): siRNA sense strand
gcaccaauauucuuucaca

SEQ ID NO: 127137 - RNA, 19 nt, Homo sapiens
  misc_RNA (1)...(19): siRNA sense strand
gaacuugaagguguuauaa

SEQ ID NO: 127138 - RNA, 19 nt, Homo sapiens
  misc_RNA (1)...(19): siRNA sense strand
uaugaaaucuucccaaaca

SEQ ID NO: 127139 - RNA, 19 nt, Homo sapiens
  misc_RNA (1)...(19): siRNA sense strand
ugaagaagaagaagaagua

SEQ ID NO: 127140 - RNA, 19 nt, Homo sapiens
  misc_RNA (1)...(19): siRNA sense strand
cagcuggauucaucuaaua

SEQ ID NO: 127141 - RNA, 19 nt, Homo sapiens
  misc_RNA (1)...(19): siRNA sense strand
gcacaaagaccaguauaau

SEQ ID NO: 127142 - RNA, 19 nt, Homo sapiens
  misc_RNA (1)...(19): siRNA sense strand
gcucucaaaucauuaucua

SEQ ID NO: 127143 - RNA, 19 nt, Homo sapiens
  misc_RNA (1)...(19): siRNA sense strand
gaggaaagaacugccauua

SEQ ID NO: 127144 - RNA, 19 nt, Homo sapiens
  misc_RNA (1)...(19): siRNA sense strand
cagaagaaauugguagauu

SEQ ID NO: 127145 - RNA, 19 nt, Homo sapiens
  misc_RNA (1)...(19): siRNA sense strand
caagacagagugaagauuu

SEQ ID NO: 127146 - RNA, 19 nt, Homo sapiens
  misc_RNA (1)...(19): siRNA sense strand
gcuaagcaauugucccauu

SEQ ID NO: 127147 - RNA, 19 nt, Homo sapiens
  misc_RNA (1)...(19): siRNA sense strand
cagcagguuucuacauuaa

SEQ ID NO: 127148 - RNA, 19 nt, Homo sapiens
  misc_RNA (1)...(19): siRNA sense strand
caaagagaauuucauagag

SEQ ID NO: 127149 - RNA, 19 nt, Homo sapiens
  misc_RNA (1)...(19): siRNA sense strand
gcaaacaugaguuguauuc

SEQ ID NO: 127150 - RNA, 19 nt, Homo sapiens
  misc_RNA (1)...(19): siRNA sense strand
ggaagacugucagcauuau

SEQ ID NO: 127151 - RNA, 19 nt, Homo sapiens
  misc_RNA (1)...(19): siRNA sense strand
gcgcugugcuguucucuau

SEQ ID NO: 127152 - RNA, 19 nt, Homo sapiens
  misc_RNA (1)...(19): siRNA sense strand
ggaugaggaugaugaaagu

SEQ ID NO: 127153 - RNA, 19 nt, Homo sapiens
  misc_RNA (1)...(19): siRNA sense strand
agaauaaacucaaggaucu

SEQ ID NO: 127154 - RNA, 19 nt, Homo sapiens
  misc_RNA (1)...(19): siRNA sense strand
gaauuaaggcagcagguuu

SEQ ID NO: 127155 - RNA, 19 nt, Homo sapiens
  misc_RNA (1)...(19): siRNA sense strand
caacagugcaccaauauuc

SEQ ID NO: 127156 - RNA, 19 nt, Homo sapiens
  misc_RNA (1)...(19): siRNA sense strand
ucacucuucuguuaucuuu

SEQ ID NO: 127157 - RNA, 19 nt, Homo sapiens
  misc_RNA (1)...(19): siRNA sense strand
aacaggaacuggcaacuuu

SEQ ID NO: 127158 - RNA, 19 nt, Homo sapiens
  misc_RNA (1)...(19): siRNA sense strand
agaagaaauugguagauug

SEQ ID NO: 127159 - RNA, 19 nt, Homo sapiens
  misc_RNA (1)...(19): siRNA sense strand
gaacagcaugacaauauug

SEQ ID NO: 127160 - RNA, 19 nt, Homo sapiens
  misc_RNA (1)...(19): siRNA sense strand
gaagaggauuggcaaagag

SEQ ID NO: 127161 - RNA, 19 nt, Homo sapiens
  misc_RNA (1)...(19): siRNA sense strand
gugcuguucucuauuguuu

SEQ ID NO: 127162 - RNA, 19 nt, Homo sapiens
  misc_RNA (1)...(19): siRNA sense strand
aaacagaucguucagauuc

SEQ ID NO: 127163 - RNA, 19 nt, Homo sapiens
  misc_RNA (1)...(19): siRNA sense strand
gaacaaguugcagaauuaa

SEQ ID NO: 127164 - RNA, 19 nt, Homo sapiens
  misc_RNA (1)...(19): siRNA sense strand
guaccuggcuaagcaauug

SEQ ID NO: 127165 - RNA, 19 nt, Homo sapiens
  misc_RNA (1)...(19): siRNA sense strand
caaucuacaucuaaugcua

SEQ ID NO: 127166 - RNA, 19 nt, Homo sapiens
  misc_RNA (1)...(19): siRNA sense strand
aacaacaacuccaaucaaa

SEQ ID NO: 127167 - RNA, 19 nt, Homo sapiens
  misc_RNA (1)...(19): siRNA sense strand
agaagaggaugaacuugaa

SEQ ID NO: 127168 - RNA, 19 nt, Homo sapiens
  misc_RNA (1)...(19): siRNA sense strand
gaacagucuucagcaauag

SEQ ID NO: 127169 - RNA, 19 nt, Homo sapiens
  misc_RNA (1)...(19): siRNA sense strand
ggcagcagguuucuacauu

SEQ ID NO: 127170 - RNA, 19 nt, Homo sapiens
  misc_RNA (1)...(19): siRNA sense strand
guuauuauguggagguuug

SEQ ID NO: 127171 - RNA, 19 nt, Homo sapiens
  misc_RNA (1)...(19): siRNA sense strand
gcugugcuguucucuauug

SEQ ID NO: 127172 - RNA, 19 nt, Homo sapiens
  misc_RNA (1)...(19): siRNA sense strand
uagaacagcaugacaauau

SEQ ID NO: 127173 - RNA, 19 nt, Homo sapiens
  misc_RNA (1)...(19): siRNA sense strand
acaaacagaucguucagau

SEQ ID NO: 127174 - RNA, 19 nt, Homo sapiens
  misc_RNA (1)...(19): siRNA sense strand
gaccaaagaguuaaagaau

SEQ ID NO: 127175 - RNA, 19 nt, Homo sapiens
  misc_RNA (1)...(19): siRNA sense strand
acaaacaagaguuggauua

SEQ ID NO: 127176 - RNA, 19 nt, Homo sapiens
  misc_RNA (1)...(19): siRNA sense strand
gcugauauccugacugaga

SEQ ID NO: 127177 - RNA, 19 nt, Homo sapiens
  misc_RNA (1)...(19): siRNA sense strand
gaaagugaccaaucuacau

SEQ ID NO: 127178 - RNA, 19 nt, Homo sapiens
  misc_RNA (1)...(19): siRNA sense strand
gcacuaacaagaagcaaug

SEQ ID NO: 127179 - RNA, 19 nt, Homo sapiens
  misc_RNA (1)...(19): siRNA sense strand
gagagacuacuggacauua

SEQ ID NO: 127180 - RNA, 19 nt, Homo sapiens
  misc_RNA (1)...(19): siRNA sense strand
gaaagaacugccauuaaag

SEQ ID NO: 127181 - RNA, 19 nt, Homo sapiens
  misc_RNA (1)...(19): siRNA sense strand
acaagagaccaaagaguua

SEQ ID NO: 127182 - RNA, 19 nt, Homo sapiens
  misc_RNA (1)...(19): siRNA sense strand
gcaucaagguucuuacagu

SEQ ID NO: 127183 - RNA, 19 nt, Homo sapiens
  misc_RNA (1)...(19): siRNA sense strand
uaagaaauaccgcuuggaa

SEQ ID NO: 127184 - RNA, 19 nt, Homo sapiens
  misc_RNA (1)...(19): siRNA sense strand
uagcaaacaugaguuguau

SEQ ID NO: 127185 - RNA, 19 nt, Homo sapiens
  misc_RNA (1)...(19): siRNA sense strand
cuucaacagugcaccaaua

SEQ ID NO: 127186 - RNA, 19 nt, Homo sapiens
  misc_RNA (1)...(19): siRNA sense strand
gcccaugcguugcaagaaa

SEQ ID NO: 127187 - RNA, 19 nt, Homo sapiens
  misc_RNA (1)...(19): siRNA sense strand
gcacagaaagugaccaauc

SEQ ID NO: 127188 - RNA, 19 nt, Homo sapiens
  misc_RNA (1)...(19): siRNA sense strand
gaagaagaaguagaagaaa

SEQ ID NO: 127189 - RNA, 19 nt, Homo sapiens
  misc_RNA (1)...(19): siRNA sense strand
gcagcuggauucaucuaau

SEQ ID NO: 127190 - RNA, 19 nt, Homo sapiens
  misc_RNA (1)...(19): siRNA sense strand
gaaggaagacugucagcau

SEQ ID NO: 127191 - RNA, 19 nt, Homo sapiens
  misc_RNA (1)...(19): siRNA sense strand
ucaccaaacuacagacaga

SEQ ID NO: 127192 - RNA, 19 nt, Homo sapiens
  misc_RNA (1)...(19): siRNA sense strand
gcacaaaugaacagucuuc

SEQ ID NO: 127193 - RNA, 19 nt, Homo sapiens
  misc_RNA (1)...(19): siRNA sense strand
guauaguaguugaagauug

SEQ ID NO: 127194 - RNA, 19 nt, Homo sapiens
  misc_RNA (1)...(19): siRNA sense strand
uagagauucugaacaaguu

SEQ ID NO: 127195 - RNA, 19 nt, Homo sapiens
  misc_RNA (1)...(19): siRNA sense strand
ugauggagguauaguaguu

SEQ ID NO: 127196 - RNA, 19 nt, Homo sapiens
  misc_RNA (1)...(19): siRNA sense strand
aaacaucuggcacaaauga

SEQ ID NO: 127197 - RNA, 19 nt, Homo sapiens
  misc_RNA (1)...(19): siRNA sense strand
ugacugagaccauaaauac

SEQ ID NO: 127198 - RNA, 19 nt, Homo sapiens
  misc_RNA (1)...(19): siRNA sense strand
uuaaagagcagcuggauuc

SEQ ID NO: 127199 - RNA, 19 nt, Homo sapiens
  misc_RNA (1)...(19): siRNA sense strand
ggaaguggguauacaagcu

SEQ ID NO: 127200 - RNA, 19 nt, Homo sapiens
  misc_RNA (1)...(19): siRNA sense strand
aguuucagcuggccaguua

SEQ ID NO: 127201 - RNA, 19 nt, Homo sapiens
  misc_RNA (1)...(19): siRNA sense strand
agaagaagaagaaguagaa

SEQ ID NO: 127202 - RNA, 19 nt, Homo sapiens
  misc_RNA (1)...(19): siRNA sense strand
gaaguggguauacaagcua

SEQ ID NO: 127203 - RNA, 19 nt, Homo sapiens
  misc_RNA (1)...(19): siRNA sense strand
ccucaggugcaacaaauua

SEQ ID NO: 127204 - RNA, 19 nt, Homo sapiens
  misc_RNA (1)...(19): siRNA sense strand
agaagaagaaguagaagaa

SEQ ID NO: 127205 - RNA, 19 nt, Homo sapiens
  misc_RNA (1)...(19): siRNA sense strand
caagcuauggaacaucuua

SEQ ID NO: 127206 - RNA, 19 nt, Homo sapiens
  misc_RNA (1)...(19): siRNA sense strand
gcaauuguaguacuucuca

SEQ ID NO: 127207 - RNA, 19 nt, Homo sapiens
  misc_RNA (1)...(19): siRNA sense strand
ggaguuugauuuccauguc

SEQ ID NO: 127208 - RNA, 19 nt, Homo sapiens
  misc_RNA (1)...(19): siRNA sense strand
ugaccaaucuacaucuaau

SEQ ID NO: 127209 - RNA, 19 nt, Homo sapiens
  misc_RNA (1)...(19): siRNA sense strand
aaagaacugccauuaaaga

SEQ ID NO: 127210 - RNA, 19 nt, Homo sapiens
  misc_RNA (1)...(19): siRNA sense strand
agaagaggauuggcaaaga

SEQ ID NO: 127211 - RNA, 19 nt, Homo sapiens
  misc_RNA (1)...(19): siRNA sense strand
auucgaggcugccaaguaa

SEQ ID NO: 127212 - RNA, 19 nt, Homo sapiens
  misc_RNA (1)...(19): siRNA sense strand
caagauugauggacuuacu

SEQ ID NO: 127213 - RNA, 19 nt, Homo sapiens
  misc_RNA (1)...(19): siRNA sense strand
aaggaagacugucagcauu

SEQ ID NO: 127214 - RNA, 19 nt, Homo sapiens
  misc_RNA (1)...(19): siRNA sense strand
cugaacaaguugcagaauu

SEQ ID NO: 127215 - RNA, 19 nt, Homo sapiens
  misc_RNA (1)...(19): siRNA sense strand
acaaagaccaguauaaucu

SEQ ID NO: 127216 - RNA, 19 nt, Homo sapiens
  misc_RNA (1)...(19): siRNA sense strand
agaacagcaugacaauauu

SEQ ID NO: 127217 - RNA, 19 nt, Homo sapiens
  misc_RNA (1)...(19): siRNA sense strand
cuaaggcuauuuauaaguc

SEQ ID NO: 127218 - RNA, 19 nt, Homo sapiens
  misc_RNA (1)...(19): siRNA sense strand
uggcaaagagaauuucaua

SEQ ID NO: 127219 - RNA, 19 nt, Homo sapiens
  misc_RNA (1)...(19): siRNA sense strand
gagccaagccuuccuguuu

SEQ ID NO: 127220 - RNA, 19 nt, Homo sapiens
  misc_RNA (1)...(19): siRNA sense strand
ccucaacgcuuugggaaga

SEQ ID NO: 127221 - RNA, 19 nt, Homo sapiens
  misc_RNA (1)...(19): siRNA sense strand
ccagagguuuggcagaaau

SEQ ID NO: 127222 - RNA, 19 nt, Homo sapiens
  misc_RNA (1)...(19): siRNA sense strand
gccaagccuuccuguuuca

SEQ ID NO: 127223 - RNA, 19 nt, Homo sapiens
  misc_RNA (1)...(19): siRNA sense strand
gggcugaauucccaguucu

SEQ ID NO: 127224 - RNA, 19 nt, Homo sapiens
  misc_RNA (1)...(19): siRNA sense strand
cugggucacuguugcacua

SEQ ID NO: 127225 - RNA, 19 nt, Homo sapiens
  misc_RNA (1)...(19): siRNA sense strand
gugcugcugcuguuaauag

SEQ ID NO: 127226 - RNA, 19 nt, Homo sapiens
  misc_RNA (1)...(19): siRNA sense strand
agccaagccuuccuguuuc

SEQ ID NO: 127227 - RNA, 19 nt, Homo sapiens
  misc_RNA (1)...(19): siRNA sense strand
cagagguuuggcagaaaua

SEQ ID NO: 127228 - RNA, 19 nt, Homo sapiens
  misc_RNA (1)...(19): siRNA sense strand
ggagccaagccuuccuguu

SEQ ID NO: 127229 - RNA, 19 nt, Homo sapiens
  misc_RNA (1)...(19): siRNA sense strand
caggaggccagcaggaaga

SEQ ID NO: 127230 - RNA, 19 nt, Homo sapiens
  misc_RNA (1)...(19): siRNA sense strand
caacaucuaugauuggaau

SEQ ID NO: 127231 - RNA, 19 nt, Homo sapiens
  misc_RNA (1)...(19): siRNA sense strand
caucugggccuccgccuuu

SEQ ID NO: 127232 - RNA, 19 nt, Homo sapiens
  misc_RNA (1)...(19): siRNA sense strand
gcacaggcggcuacacaga

SEQ ID NO: 127233 - RNA, 19 nt, Homo sapiens
  misc_RNA (1)...(19): siRNA sense strand
gaaccggaugccaguguuu

SEQ ID NO: 127234 - RNA, 19 nt, Homo sapiens
  misc_RNA (1)...(19): siRNA sense strand
gagggacgccacugcugua

SEQ ID NO: 127235 - RNA, 19 nt, Homo sapiens
  misc_RNA (1)...(19): siRNA sense strand
ugcaacaggugaucgagaa

SEQ ID NO: 127236 - RNA, 19 nt, Homo sapiens
  misc_RNA (1)...(19): siRNA sense strand
gcgggaaccacgugaaaug

SEQ ID NO: 127237 - RNA, 19 nt, Homo sapiens
  misc_RNA (1)...(19): siRNA sense strand
ggaaagugcaacaggugau

SEQ ID NO: 127238 - RNA, 19 nt, Homo sapiens
  misc_RNA (1)...(19): siRNA sense strand
gaaagugcaacaggugauc

SEQ ID NO: 127239 - RNA, 19 nt, Homo sapiens
  misc_RNA (1)...(19): siRNA sense strand
caucuaugauuggaaugga

SEQ ID NO: 127240 - RNA, 19 nt, Homo sapiens
  misc_RNA (1)...(19): siRNA sense strand
ugaaccggaugccaguguu

SEQ ID NO: 127241 - RNA, 19 nt, Homo sapiens
  misc_RNA (1)...(19): siRNA sense strand
cagcacaggcggcuacaca

SEQ ID NO: 127242 - RNA, 19 nt, Homo sapiens
  misc_RNA (1)...(19): siRNA sense strand
uuacccagccugcagaaga

SEQ ID NO: 127243 - RNA, 19 nt, Homo sapiens
  misc_RNA (1)...(19): siRNA sense strand
gagcgugacguggacauca

SEQ ID NO: 127244 - RNA, 19 nt, Homo sapiens
  misc_RNA (1)...(19): siRNA sense strand
acguggacaucaacaucua

SEQ ID NO: 127245 - RNA, 19 nt, Homo sapiens
  misc_RNA (1)...(19): siRNA sense strand
gcccugggauaccggaaag

SEQ ID NO: 127246 - RNA, 19 nt, Homo sapiens
  misc_RNA (1)...(19): siRNA sense strand
ugacguggacaucaacauc

SEQ ID NO: 127247 - RNA, 19 nt, Homo sapiens
  misc_RNA (1)...(19): siRNA sense strand
acaggcggcuacacagaca

SEQ ID NO: 127248 - RNA, 19 nt, Homo sapiens
  misc_RNA (1)...(19): siRNA sense strand
ggagaggaggcugcagaug

SEQ ID NO: 127249 - RNA, 19 nt, Homo sapiens
  misc_RNA (1)...(19): siRNA sense strand
caacaucuaugauuggaau

SEQ ID NO: 127250 - RNA, 19 nt, Homo sapiens
  misc_RNA (1)...(19): siRNA sense strand
caucugggccuccgccuuu

SEQ ID NO: 127251 - RNA, 19 nt, Homo sapiens
  misc_RNA (1)...(19): siRNA sense strand
gcacaggcggcuacacaga

SEQ ID NO: 127252 - RNA, 19 nt, Homo sapiens
  misc_RNA (1)...(19): siRNA sense strand
gaaccggaugccaguguuu

SEQ ID NO: 127253 - RNA, 19 nt, Homo sapiens
  misc_RNA (1)...(19): siRNA sense strand
gagggacgccacugcugua

SEQ ID NO: 127254 - RNA, 19 nt, Homo sapiens
  misc_RNA (1)...(19): siRNA sense strand
ugcaacaggugaucgagaa

SEQ ID NO: 127255 - RNA, 19 nt, Homo sapiens
  misc_RNA (1)...(19): siRNA sense strand
gcgggaaccacgugaaaug

SEQ ID NO: 127256 - RNA, 19 nt, Homo sapiens
  misc_RNA (1)...(19): siRNA sense strand
ggaaagugcaacaggugau

SEQ ID NO: 127257 - RNA, 19 nt, Homo sapiens
  misc_RNA (1)...(19): siRNA sense strand
gaaagugcaacaggugauc

SEQ ID NO: 127258 - RNA, 19 nt, Homo sapiens
  misc_RNA (1)...(19): siRNA sense strand
caucuaugauuggaaugga

SEQ ID NO: 127259 - RNA, 19 nt, Homo sapiens
  misc_RNA (1)...(19): siRNA sense strand
ugaaccggaugccaguguu

SEQ ID NO: 127260 - RNA, 19 nt, Homo sapiens
  misc_RNA (1)...(19): siRNA sense strand
cagcacaggcggcuacaca

SEQ ID NO: 127261 - RNA, 19 nt, Homo sapiens
  misc_RNA (1)...(19): siRNA sense strand
uuacccagccugcagaaga

SEQ ID NO: 127262 - RNA, 19 nt, Homo sapiens
  misc_RNA (1)...(19): siRNA sense strand
gagcgugacguggacauca

SEQ ID NO: 127263 - RNA, 19 nt, Homo sapiens
  misc_RNA (1)...(19): siRNA sense strand
acguggacaucaacaucua

SEQ ID NO: 127264 - RNA, 19 nt, Homo sapiens
  misc_RNA (1)...(19): siRNA sense strand
gcccugggauaccggaaag

SEQ ID NO: 127265 - RNA, 19 nt, Homo sapiens
  misc_RNA (1)...(19): siRNA sense strand
ugacguggacaucaacauc

SEQ ID NO: 127266 - RNA, 19 nt, Homo sapiens
  misc_RNA (1)...(19): siRNA sense strand
acaggcggcuacacagaca

SEQ ID NO: 127267 - RNA, 19 nt, Homo sapiens
  misc_RNA (1)...(19): siRNA sense strand
ggagaggaggcugcagaug

SEQ ID NO: 127268 - RNA, 19 nt, Homo sapiens
  misc_RNA (1)...(19): siRNA sense strand
gcagagugcuucccaguga

SEQ ID NO: 127269 - RNA, 19 nt, Homo sapiens
  misc_RNA (1)...(19): siRNA sense strand
ggagagauuucaugaggaa

SEQ ID NO: 127270 - RNA, 19 nt, Homo sapiens
  misc_RNA (1)...(19): siRNA sense strand
cagcaaagccguucucuug

SEQ ID NO: 127271 - RNA, 19 nt, Homo sapiens
  misc_RNA (1)...(19): siRNA sense strand
caacaugaacgaugccaua

SEQ ID NO: 127272 - RNA, 19 nt, Homo sapiens
  misc_RNA (1)...(19): siRNA sense strand
caugaacgaugccauauuc

SEQ ID NO: 127273 - RNA, 19 nt, Homo sapiens
  misc_RNA (1)...(19): siRNA sense strand
cuagaugcauccagugaaa

SEQ ID NO: 127274 - RNA, 19 nt, Homo sapiens
  misc_RNA (1)...(19): siRNA sense strand
cacagcaggugacaacuga

SEQ ID NO: 127275 - RNA, 19 nt, Homo sapiens
  misc_RNA (1)...(19): siRNA sense strand
ggccagacacggcauuaaa

SEQ ID NO: 127276 - RNA, 19 nt, Homo sapiens
  misc_RNA (1)...(19): siRNA sense strand
ccgauugguuccaucauau

SEQ ID NO: 127277 - RNA, 19 nt, Homo sapiens
  misc_RNA (1)...(19): siRNA sense strand
ggugagagagcacuucaga

SEQ ID NO: 127278 - RNA, 19 nt, Homo sapiens
  misc_RNA (1)...(19): siRNA sense strand
gagauuucaugaggaacuu

SEQ ID NO: 127279 - RNA, 19 nt, Homo sapiens
  misc_RNA (1)...(19): siRNA sense strand
agagagcacuucagaacca

SEQ ID NO: 127280 - RNA, 19 nt, Homo sapiens
  misc_RNA (1)...(19): siRNA sense strand
uccgauugguuccaucaua

SEQ ID NO: 127281 - RNA, 19 nt, Homo sapiens
  misc_RNA (1)...(19): siRNA sense strand
ggguggcuuuggcgcuuua

SEQ ID NO: 127282 - RNA, 19 nt, Homo sapiens
  misc_RNA (1)...(19): siRNA sense strand
ggacuucuacgagcagaug

SEQ ID NO: 127283 - RNA, 19 nt, Homo sapiens
  misc_RNA (1)...(19): siRNA sense strand
ccauagguuugccggaaga

SEQ ID NO: 127284 - RNA, 19 nt, Homo sapiens
  misc_RNA (1)...(19): siRNA sense strand
uugguuccaucauaucuuu

SEQ ID NO: 127285 - RNA, 19 nt, Homo sapiens
  misc_RNA (1)...(19): siRNA sense strand
ugagagagcacuucagaac

SEQ ID NO: 127286 - RNA, 19 nt, Homo sapiens
  misc_RNA (1)...(19): siRNA sense strand
ucacugagcccugcguguu

SEQ ID NO: 127287 - RNA, 19 nt, Homo sapiens
  misc_RNA (1)...(19): siRNA sense strand
gcagagguuguguggaguu

SEQ ID NO: 127288 - RNA, 19 nt, Homo sapiens
  misc_RNA (1)...(19): siRNA sense strand
ggguggugcugacacugaa

SEQ ID NO: 127289 - RNA, 19 nt, Homo sapiens
  misc_RNA (1)...(19): siRNA sense strand
gaaggagaagauugacauc

SEQ ID NO: 127290 - RNA, 19 nt, Homo sapiens
  misc_RNA (1)...(19): siRNA sense strand
caaguccuuugcacacauc

SEQ ID NO: 127291 - RNA, 19 nt, Homo sapiens
  misc_RNA (1)...(19): siRNA sense strand
gagcaguucugugcguuuu

SEQ ID NO: 127292 - RNA, 19 nt, Homo sapiens
  misc_RNA (1)...(19): siRNA sense strand
ggagcaguucugugcguuu

SEQ ID NO: 127293 - RNA, 19 nt, Homo sapiens
  misc_RNA (1)...(19): siRNA sense strand
ugaaggagaagauugacau

SEQ ID NO: 127294 - RNA, 19 nt, Homo sapiens
  misc_RNA (1)...(19): siRNA sense strand
aggcacugaugcaggagua

SEQ ID NO: 127295 - RNA, 19 nt, Homo sapiens
  misc_RNA (1)...(19): siRNA sense strand
cagagugcuucccagugaa

SEQ ID NO: 127296 - RNA, 19 nt, Homo sapiens
  misc_RNA (1)...(19): siRNA sense strand
gcuagaugcauccagugaa

SEQ ID NO: 127297 - RNA, 19 nt, Homo sapiens
  misc_RNA (1)...(19): siRNA sense strand
gagcacuucagaaccauag

SEQ ID NO: 127298 - RNA, 19 nt, Homo sapiens
  misc_RNA (1)...(19): siRNA sense strand
acacugaaggagaagauug

SEQ ID NO: 127299 - RNA, 19 nt, Homo sapiens
  misc_RNA (1)...(19): siRNA sense strand
gagguuguguggaguucag

SEQ ID NO: 127300 - RNA, 19 nt, Homo sapiens
  misc_RNA (1)...(19): siRNA sense strand
gagcggcagccaugcuuca

SEQ ID NO: 127301 - RNA, 19 nt, Homo sapiens
  misc_RNA (1)...(19): siRNA sense strand
gggcauguccacccucuac

SEQ ID NO: 127302 - RNA, 19 nt, Homo sapiens
  misc_RNA (1)...(19): siRNA sense strand
ccacagcaggugacaacug

SEQ ID NO: 127303 - RNA, 19 nt, Homo sapiens
  misc_RNA (1)...(19): siRNA sense strand
gaagaggguggugcugaca

SEQ ID NO: 127304 - RNA, 19 nt, Homo sapiens
  misc_RNA (1)...(19): siRNA sense strand
gcagggcauucggagagau

SEQ ID NO: 127305 - RNA, 19 nt, Homo sapiens
  misc_RNA (1)...(19): siRNA sense strand
ccgccgagcagguuuacaa

SEQ ID NO: 127306 - RNA, 19 nt, Homo sapiens
  misc_RNA (1)...(19): siRNA sense strand
gcacuucagaaccauaggu

SEQ ID NO: 127307 - RNA, 19 nt, Homo sapiens
  misc_RNA (1)...(19): siRNA sense strand
gcauguccacccucuacga

SEQ ID NO: 127308 - RNA, 19 nt, Homo sapiens
  misc_RNA (1)...(19): siRNA sense strand
ccacaacaaguccuuugca

SEQ ID NO: 127309 - RNA, 19 nt, Homo sapiens
  misc_RNA (1)...(19): siRNA sense strand
ucgagaaggccaaggacuu

SEQ ID NO: 127310 - RNA, 19 nt, Homo sapiens
  misc_RNA (1)...(19): siRNA sense strand
gagagcacuucagaaccau

SEQ ID NO: 127311 - RNA, 19 nt, Homo sapiens
  misc_RNA (1)...(19): siRNA sense strand
cggcugaccgugcugaugu

SEQ ID NO: 127312 - RNA, 19 nt, Homo sapiens
  misc_RNA (1)...(19): siRNA sense strand
acaaguccuuugcacacau

SEQ ID NO: 127313 - RNA, 19 nt, Homo sapiens
  misc_RNA (1)...(19): siRNA sense strand
gcacugaugcaggaguaca

SEQ ID NO: 127314 - RNA, 19 nt, Homo sapiens
  misc_RNA (1)...(19): siRNA sense strand
gaacugaccucccaggaua

SEQ ID NO: 127315 - RNA, 19 nt, Homo sapiens
  misc_RNA (1)...(19): siRNA sense strand
ggaagaugcugaagaguuu

SEQ ID NO: 127316 - RNA, 19 nt, Homo sapiens
  misc_RNA (1)...(19): siRNA sense strand
gaagagacauaugaugaua

SEQ ID NO: 127317 - RNA, 19 nt, Homo sapiens
  misc_RNA (1)...(19): siRNA sense strand
gcgaagagauuccaagaaa

SEQ ID NO: 127318 - RNA, 19 nt, Homo sapiens
  misc_RNA (1)...(19): siRNA sense strand
ggacagcucugaugauaau

SEQ ID NO: 127319 - RNA, 19 nt, Homo sapiens
  misc_RNA (1)...(19): siRNA sense strand
gaucauaguuucuuuggau

SEQ ID NO: 127320 - RNA, 19 nt, Homo sapiens
  misc_RNA (1)...(19): siRNA sense strand
gaucugagcuccuuaacca

SEQ ID NO: 127321 - RNA, 19 nt, Homo sapiens
  misc_RNA (1)...(19): siRNA sense strand
gaagagauuccaagaaaga

SEQ ID NO: 127322 - RNA, 19 nt, Homo sapiens
  misc_RNA (1)...(19): siRNA sense strand
caggacagcucugaugaua

SEQ ID NO: 127323 - RNA, 19 nt, Homo sapiens
  misc_RNA (1)...(19): siRNA sense strand
gcaaggaguauaacaugua

SEQ ID NO: 127324 - RNA, 19 nt, Homo sapiens
  misc_RNA (1)...(19): siRNA sense strand
gcagaagguuugcggaaug

SEQ ID NO: 127325 - RNA, 19 nt, Homo sapiens
  misc_RNA (1)...(19): siRNA sense strand
cagaagcgaugguguguug

SEQ ID NO: 127326 - RNA, 19 nt, Homo sapiens
  misc_RNA (1)...(19): siRNA sense strand
ucacagagaccauauucua

SEQ ID NO: 127327 - RNA, 19 nt, Homo sapiens
  misc_RNA (1)...(19): siRNA sense strand
ggagaaagaagaagaagau

SEQ ID NO: 127328 - RNA, 19 nt, Homo sapiens
  misc_RNA (1)...(19): siRNA sense strand
aagcaaagaucauaguuuc

SEQ ID NO: 127329 - RNA, 19 nt, Homo sapiens
  misc_RNA (1)...(19): siRNA sense strand
ugaagagcaugaucuagaa

SEQ ID NO: 127330 - RNA, 19 nt, Homo sapiens
  misc_RNA (1)...(19): siRNA sense strand
caaggaguauaacauguau

SEQ ID NO: 127331 - RNA, 19 nt, Homo sapiens
  misc_RNA (1)...(19): siRNA sense strand
ggacaggacagcucugaug

SEQ ID NO: 127332 - RNA, 19 nt, Homo sapiens
  misc_RNA (1)...(19): siRNA sense strand
gaacagccucguugggauu

SEQ ID NO: 127333 - RNA, 19 nt, Homo sapiens
  misc_RNA (1)...(19): siRNA sense strand
gagacuggguggaucaaau

SEQ ID NO: 127334 - RNA, 19 nt, Homo sapiens
  misc_RNA (1)...(19): siRNA sense strand
aaaaggagcucaagaacuu

SEQ ID NO: 127335 - RNA, 19 nt, Homo sapiens
  misc_RNA (1)...(19): siRNA sense strand
gagcaaggaguauaacaug

SEQ ID NO: 127336 - RNA, 19 nt, Homo sapiens
  misc_RNA (1)...(19): siRNA sense strand
gggaauggaagacaucgua

SEQ ID NO: 127337 - RNA, 19 nt, Homo sapiens
  misc_RNA (1)...(19): siRNA sense strand
uaugaagucuugccagaug

SEQ ID NO: 127338 - RNA, 19 nt, Homo sapiens
  misc_RNA (1)...(19): siRNA sense strand
gaguagacuaugccaguua

SEQ ID NO: 127339 - RNA, 19 nt, Homo sapiens
  misc_RNA (1)...(19): siRNA sense strand
gaccucauccguauucuga

SEQ ID NO: 127340 - RNA, 19 nt, Homo sapiens
  misc_RNA (1)...(19): siRNA sense strand
gaucacagagaccauauuc

SEQ ID NO: 127341 - RNA, 19 nt, Homo sapiens
  misc_RNA (1)...(19): siRNA sense strand
ggaguagacuaugccaguu

SEQ ID NO: 127342 - RNA, 19 nt, Homo sapiens
  misc_RNA (1)...(19): siRNA sense strand
gaauggaagacaucguaaa

SEQ ID NO: 127343 - RNA, 19 nt, Homo sapiens
  misc_RNA (1)...(19): siRNA sense strand
ccuuaaccauuccauauga

SEQ ID NO: 127344 - RNA, 19 nt, Homo sapiens
  misc_RNA (1)...(19): siRNA sense strand
cuacagaggagaaagaaga

SEQ ID NO: 127345 - RNA, 19 nt, Homo sapiens
  misc_RNA (1)...(19): siRNA sense strand
aagaagagacauaugauga

SEQ ID NO: 127346 - RNA, 19 nt, Homo sapiens
  misc_RNA (1)...(19): siRNA sense strand
aaggauacuuggagaagaa

SEQ ID NO: 127347 - RNA, 19 nt, Homo sapiens
  misc_RNA (1)...(19): siRNA sense strand
ucaaagccagguacuauug

SEQ ID NO: 127348 - RNA, 19 nt, Homo sapiens
  misc_RNA (1)...(19): siRNA sense strand
gugcagacccacuaucuug

SEQ ID NO: 127349 - RNA, 19 nt, Homo sapiens
  misc_RNA (1)...(19): siRNA sense strand
gaauccugcuuugaacuga

SEQ ID NO: 127350 - RNA, 19 nt, Homo sapiens
  misc_RNA (1)...(19): siRNA sense strand
ggaauggaagacaucguaa

SEQ ID NO: 127351 - RNA, 19 nt, Homo sapiens
  misc_RNA (1)...(19): siRNA sense strand
cagaagguuugcggaauga

SEQ ID NO: 127352 - RNA, 19 nt, Homo sapiens
  misc_RNA (1)...(19): siRNA sense strand
cagaugaacuguccuucca

SEQ ID NO: 127353 - RNA, 19 nt, Homo sapiens
  misc_RNA (1)...(19): siRNA sense strand
ugaagaggaugaggaggaa

SEQ ID NO: 127354 - RNA, 19 nt, Homo sapiens
  misc_RNA (1)...(19): siRNA sense strand
gagaaagaagaagaagaua

SEQ ID NO: 127355 - RNA, 19 nt, Homo sapiens
  misc_RNA (1)...(19): siRNA sense strand
ugaaguggaagaaagauga

SEQ ID NO: 127356 - RNA, 19 nt, Homo sapiens
  misc_RNA (1)...(19): siRNA sense strand
agacuggguggaucaaaua

SEQ ID NO: 127357 - RNA, 19 nt, Homo sapiens
  misc_RNA (1)...(19): siRNA sense strand
ggaugaggaggaagaagaa

SEQ ID NO: 127358 - RNA, 19 nt, Homo sapiens
  misc_RNA (1)...(19): siRNA sense strand
gaagguuugcggaaugaga

SEQ ID NO: 127359 - RNA, 19 nt, Homo sapiens
  misc_RNA (1)...(19): siRNA sense strand
cgaagagauuccaagaaag

SEQ ID NO: 127360 - RNA, 19 nt, Homo sapiens
  misc_RNA (1)...(19): siRNA sense strand
ucucaccacugccuuugaa

SEQ ID NO: 127361 - RNA, 19 nt, Homo sapiens
  misc_RNA (1)...(19): siRNA sense strand
gaaaaggaguagacuaugc

SEQ ID NO: 127362 - RNA, 19 nt, Homo sapiens
  misc_RNA (1)...(19): siRNA sense strand
gacaggacagcucugauga

SEQ ID NO: 127363 - RNA, 19 nt, Homo sapiens
  misc_RNA (1)...(19): siRNA sense strand
cuacuaugcuaaugagaag

SEQ ID NO: 127364 - RNA, 19 nt, Homo sapiens
  misc_RNA (1)...(19): siRNA sense strand
aaucacagcgggacucuug

SEQ ID NO: 127365 - RNA, 19 nt, Homo sapiens
  misc_RNA (1)...(19): siRNA sense strand
gcgcagcuaugaguuuaca

SEQ ID NO: 127366 - RNA, 19 nt, Homo sapiens
  misc_RNA (1)...(19): siRNA sense strand
aggcgcagcuaugaguuua

SEQ ID NO: 127367 - RNA, 19 nt, Homo sapiens
  misc_RNA (1)...(19): siRNA sense strand
ggguggaucaaauaaguuu

SEQ ID NO: 127368 - RNA, 19 nt, Homo sapiens
  misc_RNA (1)...(19): siRNA sense strand
ggauuguuccaaaggagua

SEQ ID NO: 127369 - RNA, 19 nt, Homo sapiens
  misc_RNA (1)...(19): siRNA sense strand
aaucaaagccagguacuau

SEQ ID NO: 127370 - RNA, 19 nt, Homo sapiens
  misc_RNA (1)...(19): siRNA sense strand
gaagagcaagcagcccaaa

SEQ ID NO: 127371 - RNA, 19 nt, Homo sapiens
  misc_RNA (1)...(19): siRNA sense strand
ccuggaagaugcugaagag

SEQ ID NO: 127372 - RNA, 19 nt, Homo sapiens
  misc_RNA (1)...(19): siRNA sense strand
ggcagaagguuugcggaau

SEQ ID NO: 127373 - RNA, 19 nt, Homo sapiens
  misc_RNA (1)...(19): siRNA sense strand
uaccagggccuaugggauu

SEQ ID NO: 127374 - RNA, 19 nt, Homo sapiens
  misc_RNA (1)...(19): siRNA sense strand
gaggucucuucuacuacua

SEQ ID NO: 127375 - RNA, 19 nt, Homo sapiens
  misc_RNA (1)...(19): siRNA sense strand
cuacuacuaugcuaaugag

SEQ ID NO: 127376 - RNA, 19 nt, Homo sapiens
  misc_RNA (1)...(19): siRNA sense strand
cuacggggcuuucagcaaa

SEQ ID NO: 127377 - RNA, 19 nt, Homo sapiens
  misc_RNA (1)...(19): siRNA sense strand
uggaagaugcugaagaguu

SEQ ID NO: 127378 - RNA, 19 nt, Homo sapiens
  misc_RNA (1)...(19): siRNA sense strand
gccagguacuauugggauu

SEQ ID NO: 127379 - RNA, 19 nt, Homo sapiens
  misc_RNA (1)...(19): siRNA sense strand
aaagaagagacauaugaug

SEQ ID NO: 127380 - RNA, 19 nt, Homo sapiens
  misc_RNA (1)...(19): siRNA sense strand
cagaggagaaagaagaaga

SEQ ID NO: 127381 - RNA, 19 nt, Homo sapiens
  misc_RNA (1)...(19): siRNA sense strand
gagaaccucagcgcuguug

SEQ ID NO: 127382 - RNA, 19 nt, Homo sapiens
  misc_RNA (1)...(19): siRNA sense strand
gaaccucagcgcuguugca

SEQ ID NO: 127383 - RNA, 19 nt, Homo sapiens
  misc_RNA (1)...(19): siRNA sense strand
ggugaccucauccguauuc

SEQ ID NO: 127384 - RNA, 19 nt, Homo sapiens
  misc_RNA (1)...(19): siRNA sense strand
agaacuugauaacguaauc

SEQ ID NO: 127385 - RNA, 19 nt, Homo sapiens
  misc_RNA (1)...(19): siRNA sense strand
ggucucuucuacuacuaug

SEQ ID NO: 127386 - RNA, 19 nt, Homo sapiens
  misc_RNA (1)...(19): siRNA sense strand
uccguuggcuccuggaaga

SEQ ID NO: 127387 - RNA, 19 nt, Homo sapiens
  misc_RNA (1)...(19): siRNA sense strand
gaaaagcaaagaucauagu

SEQ ID NO: 127388 - RNA, 19 nt, Homo sapiens
  misc_RNA (1)...(19): siRNA sense strand
ggggugaccucauccguau

SEQ ID NO: 127389 - RNA, 19 nt, Homo sapiens
  misc_RNA (1)...(19): siRNA sense strand
uaaccauuccauaugaaga

SEQ ID NO: 127390 - RNA, 19 nt, Homo sapiens
  misc_RNA (1)...(19): siRNA sense strand
cuggguggaucaaauaagu

SEQ ID NO: 127391 - RNA, 19 nt, Homo sapiens
  misc_RNA (1)...(19): siRNA sense strand
gaagcgaugguguguuguc

SEQ ID NO: 127392 - RNA, 19 nt, Homo sapiens
  misc_RNA (1)...(19): siRNA sense strand
ucugagcuccuuaaccauu

SEQ ID NO: 127393 - RNA, 19 nt, Homo sapiens
  misc_RNA (1)...(19): siRNA sense strand
gaagagcaugaucuagaag

SEQ ID NO: 127394 - RNA, 19 nt, Homo sapiens
  misc_RNA (1)...(19): siRNA sense strand
gcuccuuaaccauuccaua

SEQ ID NO: 127395 - RNA, 19 nt, Homo sapiens
  misc_RNA (1)...(19): siRNA sense strand
ugucagauuaucaggauga

SEQ ID NO: 127396 - RNA, 19 nt, Homo sapiens
  misc_RNA (1)...(19): siRNA sense strand
cuuaaccauuccauaugaa

SEQ ID NO: 127397 - RNA, 19 nt, Homo sapiens
  misc_RNA (1)...(19): siRNA sense strand
ccaagaaagaauccugcuu

SEQ ID NO: 127398 - RNA, 19 nt, Homo sapiens
  misc_RNA (1)...(19): siRNA sense strand
augaagagcaugaucuaga

SEQ ID NO: 127399 - RNA, 19 nt, Homo sapiens
  misc_RNA (1)...(19): siRNA sense strand
gggcuuucagcaaaucaaa

SEQ ID NO: 127400 - RNA, 19 nt, Homo sapiens
  misc_RNA (1)...(19): siRNA sense strand
agaagagacauaugaugau

SEQ ID NO: 127401 - RNA, 19 nt, Homo sapiens
  misc_RNA (1)...(19): siRNA sense strand
ucauuaagggcuacagugu

SEQ ID NO: 127402 - RNA, 19 nt, Homo sapiens
  misc_RNA (1)...(19): siRNA sense strand
ccagguacuauugggauuu

SEQ ID NO: 127403 - RNA, 19 nt, Homo sapiens
  misc_RNA (1)...(19): siRNA sense strand
ggaucacagagaccauauu

SEQ ID NO: 127404 - RNA, 19 nt, Homo sapiens
  misc_RNA (1)...(19): siRNA sense strand
uaacguaaucaagcaagga

SEQ ID NO: 127405 - RNA, 19 nt, Homo sapiens
  misc_RNA (1)...(19): siRNA sense strand
uagacuaugccaguuacua

SEQ ID NO: 127406 - RNA, 19 nt, Homo sapiens
  misc_RNA (1)...(19): siRNA sense strand
gguuuugacuccccaaguu

SEQ ID NO: 127407 - RNA, 19 nt, Homo sapiens
  misc_RNA (1)...(19): siRNA sense strand
ggaucaaauaaguuucuug

SEQ ID NO: 127408 - RNA, 19 nt, Homo sapiens
  misc_RNA (1)...(19): siRNA sense strand
gaguuuacagcuacuaguc

SEQ ID NO: 127409 - RNA, 19 nt, Homo sapiens
  misc_RNA (1)...(19): siRNA sense strand
gaagaaaagcaaagaucau

SEQ ID NO: 127410 - RNA, 19 nt, Homo sapiens
  misc_RNA (1)...(19): siRNA sense strand
guaucucaccacugccuuu

SEQ ID NO: 127411 - RNA, 19 nt, Homo sapiens
  misc_RNA (1)...(19): siRNA sense strand
gaugaggaggaagaagaaa

SEQ ID NO: 127412 - RNA, 19 nt, Homo sapiens
  misc_RNA (1)...(19): siRNA sense strand
uuugucagauuaucaggau

SEQ ID NO: 127413 - RNA, 19 nt, Homo sapiens
  misc_RNA (1)...(19): siRNA sense strand
agaggagaaagaagaagaa

SEQ ID NO: 127414 - RNA, 19 nt, Homo sapiens
  misc_RNA (1)...(19): siRNA sense strand
gcacagaacuucccagaug

SEQ ID NO: 127415 - RNA, 19 nt, Homo sapiens
  misc_RNA (1)...(19): siRNA sense strand
gaagaaucaucgugacuuu

SEQ ID NO: 127416 - RNA, 19 nt, Homo sapiens
  misc_RNA (1)...(19): siRNA sense strand
cauaguagaugaaagagua

SEQ ID NO: 127417 - RNA, 19 nt, Homo sapiens
  misc_RNA (1)...(19): siRNA sense strand
ugaagaagcuuauauugug

SEQ ID NO: 127418 - RNA, 19 nt, Homo sapiens
  misc_RNA (1)...(19): siRNA sense strand
gaucacaaccucaucauaa

SEQ ID NO: 127419 - RNA, 19 nt, Homo sapiens
  misc_RNA (1)...(19): siRNA sense strand
ggaggaugcuggcccauaa

SEQ ID NO: 127420 - RNA, 19 nt, Homo sapiens
  misc_RNA (1)...(19): siRNA sense strand
gaagugagcauugagauuu

SEQ ID NO: 127421 - RNA, 19 nt, Homo sapiens
  misc_RNA (1)...(19): siRNA sense strand
gaagaagcuuauauuguga

SEQ ID NO: 127422 - RNA, 19 nt, Homo sapiens
  misc_RNA (1)...(19): siRNA sense strand
gaaaugggaagacaugaaa

SEQ ID NO: 127423 - RNA, 19 nt, Homo sapiens
  misc_RNA (1)...(19): siRNA sense strand
gaugaccucucugaguuua

SEQ ID NO: 127424 - RNA, 19 nt, Homo sapiens
  misc_RNA (1)...(19): siRNA sense strand
cagcagaagggcaguauua

SEQ ID NO: 127425 - RNA, 19 nt, Homo sapiens
  misc_RNA (1)...(19): siRNA sense strand
gaagaaaugggaagacaug

SEQ ID NO: 127426 - RNA, 19 nt, Homo sapiens
  misc_RNA (1)...(19): siRNA sense strand
ucucugauacugcaaauua

SEQ ID NO: 127427 - RNA, 19 nt, Homo sapiens
  misc_RNA (1)...(19): siRNA sense strand
gaaccuaaggcucuucauu

SEQ ID NO: 127428 - RNA, 19 nt, Homo sapiens
  misc_RNA (1)...(19): siRNA sense strand
ggaaaauacugcucaagaa

SEQ ID NO: 127429 - RNA, 19 nt, Homo sapiens
  misc_RNA (1)...(19): siRNA sense strand
gaacaucaaggcagcaaga

SEQ ID NO: 127430 - RNA, 19 nt, Homo sapiens
  misc_RNA (1)...(19): siRNA sense strand
gaagacauuugagcaggaa

SEQ ID NO: 127431 - RNA, 19 nt, Homo sapiens
  misc_RNA (1)...(19): siRNA sense strand
cgaaauguaugugacugua

SEQ ID NO: 127432 - RNA, 19 nt, Homo sapiens
  misc_RNA (1)...(19): siRNA sense strand
ccagaucuauuucaagugu

SEQ ID NO: 127433 - RNA, 19 nt, Homo sapiens
  misc_RNA (1)...(19): siRNA sense strand
ccacauaguagaugaaaga

SEQ ID NO: 127434 - RNA, 19 nt, Homo sapiens
  misc_RNA (1)...(19): siRNA sense strand
ucagaaggaccacauagua

SEQ ID NO: 127435 - RNA, 19 nt, Homo sapiens
  misc_RNA (1)...(19): siRNA sense strand
cauaauugaucccguugaa

SEQ ID NO: 127436 - RNA, 19 nt, Homo sapiens
  misc_RNA (1)...(19): siRNA sense strand
aagaugaccucucugaguu

SEQ ID NO: 127437 - RNA, 19 nt, Homo sapiens
  misc_RNA (1)...(19): siRNA sense strand
cagaugauguugcucucua

SEQ ID NO: 127438 - RNA, 19 nt, Homo sapiens
  misc_RNA (1)...(19): siRNA sense strand
ggaaagauuuagccugaac

SEQ ID NO: 127439 - RNA, 19 nt, Homo sapiens
  misc_RNA (1)...(19): siRNA sense strand
gaccaacucuccaauucug

SEQ ID NO: 127440 - RNA, 19 nt, Homo sapiens
  misc_RNA (1)...(19): siRNA sense strand
gaugaaagaguagaugaaa

SEQ ID NO: 127441 - RNA, 19 nt, Homo sapiens
  misc_RNA (1)...(19): siRNA sense strand
cagagaaccucagcaccua

SEQ ID NO: 127442 - RNA, 19 nt, Homo sapiens
  misc_RNA (1)...(19): siRNA sense strand
ccacccagaucuauuucaa

SEQ ID NO: 127443 - RNA, 19 nt, Homo sapiens
  misc_RNA (1)...(19): siRNA sense strand
gagagucuacgaaauguau

SEQ ID NO: 127444 - RNA, 19 nt, Homo sapiens
  misc_RNA (1)...(19): siRNA sense strand
ggaagugucuuuggaacag

SEQ ID NO: 127445 - RNA, 19 nt, Homo sapiens
  misc_RNA (1)...(19): siRNA sense strand
ggaagugagcauugagauu

SEQ ID NO: 127446 - RNA, 19 nt, Homo sapiens
  misc_RNA (1)...(19): siRNA sense strand
ggacgaggguaucagaaac

SEQ ID NO: 127447 - RNA, 19 nt, Homo sapiens
  misc_RNA (1)...(19): siRNA sense strand
ugaauuacuuugccaccaa

SEQ ID NO: 127448 - RNA, 19 nt, Homo sapiens
  misc_RNA (1)...(19): siRNA sense strand
gaguggaucucaaagaaac

SEQ ID NO: 127449 - RNA, 19 nt, Homo sapiens
  misc_RNA (1)...(19): siRNA sense strand
uggaguggaucucaaagaa

SEQ ID NO: 127450 - RNA, 19 nt, Homo sapiens
  misc_RNA (1)...(19): siRNA sense strand
ggcuaaauaucaggaaauu

SEQ ID NO: 127451 - RNA, 19 nt, Homo sapiens
  misc_RNA (1)...(19): siRNA sense strand
cgcccaagaugaugacuuu

SEQ ID NO: 127452 - RNA, 19 nt, Homo sapiens
  misc_RNA (1)...(19): siRNA sense strand
uccaagaacugcacugaug

SEQ ID NO: 127453 - RNA, 19 nt, Homo sapiens
  misc_RNA (1)...(19): siRNA sense strand
caagggagagucuacgaaa

SEQ ID NO: 127454 - RNA, 19 nt, Homo sapiens
  misc_RNA (1)...(19): siRNA sense strand
caguggagcugguuugcaa

SEQ ID NO: 127455 - RNA, 19 nt, Homo sapiens
  misc_RNA (1)...(19): siRNA sense strand
gaaacuuccggucucauug

SEQ ID NO: 127456 - RNA, 19 nt, Homo sapiens
  misc_RNA (1)...(19): siRNA sense strand
cuaaggcucuucauuuuaa

SEQ ID NO: 127457 - RNA, 19 nt, Homo sapiens
  misc_RNA (1)...(19): siRNA sense strand
uaauugaucccguugaaga

SEQ ID NO: 127458 - RNA, 19 nt, Homo sapiens
  misc_RNA (1)...(19): siRNA sense strand
cugugaaccuguacuguaa

SEQ ID NO: 127459 - RNA, 19 nt, Homo sapiens
  misc_RNA (1)...(19): siRNA sense strand
gauuuagccugaacacagu

SEQ ID NO: 127460 - RNA, 19 nt, Homo sapiens
  misc_RNA (1)...(19): siRNA sense strand
uggcugagguggaaugguu

SEQ ID NO: 127461 - RNA, 19 nt, Homo sapiens
  misc_RNA (1)...(19): siRNA sense strand
gaugaaacuuccggucuca

SEQ ID NO: 127462 - RNA, 19 nt, Homo sapiens
  misc_RNA (1)...(19): siRNA sense strand
ggaagaaucaucgugacuu

SEQ ID NO: 127463 - RNA, 19 nt, Homo sapiens
  misc_RNA (1)...(19): siRNA sense strand
caaauugcuggcuaaauau

SEQ ID NO: 127464 - RNA, 19 nt, Homo sapiens
  misc_RNA (1)...(19): siRNA sense strand
caagaugaccucucugagu

SEQ ID NO: 127465 - RNA, 19 nt, Homo sapiens
  misc_RNA (1)...(19): siRNA sense strand
gaaccuguacuguaaagca

SEQ ID NO: 127466 - RNA, 19 nt, Homo sapiens
  misc_RNA (1)...(19): siRNA sense strand
cagcaucccucucccuauc

SEQ ID NO: 127467 - RNA, 19 nt, Homo sapiens
  misc_RNA (1)...(19): siRNA sense strand
ggaguggaucucaaagaaa

SEQ ID NO: 127468 - RNA, 19 nt, Homo sapiens
  misc_RNA (1)...(19): siRNA sense strand
uaucagaaacguacaagga

SEQ ID NO: 127469 - RNA, 19 nt, Homo sapiens
  misc_RNA (1)...(19): siRNA sense strand
gaaggcguaugugcgcauu

SEQ ID NO: 127470 - RNA, 19 nt, Homo sapiens
  misc_RNA (1)...(19): siRNA sense strand
acagguacuugaauuacuu

SEQ ID NO: 127471 - RNA, 19 nt, Homo sapiens
  misc_RNA (1)...(19): siRNA sense strand
ggcgaucucuguaguugug

SEQ ID NO: 127472 - RNA, 19 nt, Homo sapiens
  misc_RNA (1)...(19): siRNA sense strand
ugauguugcucucuauguu

SEQ ID NO: 127473 - RNA, 19 nt, Homo sapiens
  misc_RNA (1)...(19): siRNA sense strand
cagauauuauugacucuuc

SEQ ID NO: 127474 - RNA, 19 nt, Homo sapiens
  misc_RNA (1)...(19): siRNA sense strand
gaaccuacuggcaucgauu

SEQ ID NO: 127475 - RNA, 19 nt, Homo sapiens
  misc_RNA (1)...(19): siRNA sense strand
gaacacaguggagcugguu

SEQ ID NO: 127476 - RNA, 19 nt, Homo sapiens
  misc_RNA (1)...(19): siRNA sense strand
ggaugacucucagacacuu

SEQ ID NO: 127477 - RNA, 19 nt, Homo sapiens
  misc_RNA (1)...(19): siRNA sense strand
gggagagucuacgaaaugu

SEQ ID NO: 127478 - RNA, 19 nt, Homo sapiens
  misc_RNA (1)...(19): siRNA sense strand
ugauagcagugaucguuug

SEQ ID NO: 127479 - RNA, 19 nt, Homo sapiens
  misc_RNA (1)...(19): siRNA sense strand
aaccuaaggcucuucauuu

SEQ ID NO: 127480 - RNA, 19 nt, Homo sapiens
  misc_RNA (1)...(19): siRNA sense strand
guuguggccuuguuugugu

SEQ ID NO: 127481 - RNA, 19 nt, Homo sapiens
  misc_RNA (1)...(19): siRNA sense strand
gaaggaccacauaguagau

SEQ ID NO: 127482 - RNA, 19 nt, Homo sapiens
  misc_RNA (1)...(19): siRNA sense strand
guacacaggaaagaaacua

SEQ ID NO: 127483 - RNA, 19 nt, Homo sapiens
  misc_RNA (1)...(19): siRNA sense strand
agaaucaucgugacuuuga

SEQ ID NO: 127484 - RNA, 19 nt, Homo sapiens
  misc_RNA (1)...(19): siRNA sense strand
cagcccaacuggcguaauc

SEQ ID NO: 127485 - RNA, 19 nt, Homo sapiens
  misc_RNA (1)...(19): siRNA sense strand
caccuucacucuggaaaga

SEQ ID NO: 127486 - RNA, 19 nt, Homo sapiens
  misc_RNA (1)...(19): siRNA sense strand
caucaaggcagcaagacaa

SEQ ID NO: 127487 - RNA, 19 nt, Homo sapiens
  misc_RNA (1)...(19): siRNA sense strand
cugagccucugccacauuu

SEQ ID NO: 127488 - RNA, 19 nt, Homo sapiens
  misc_RNA (1)...(19): siRNA sense strand
ggacagguacuugaauuac

SEQ ID NO: 127489 - RNA, 19 nt, Homo sapiens
  misc_RNA (1)...(19): siRNA sense strand
ucucugaguuuacguccaa

SEQ ID NO: 127490 - RNA, 19 nt, Homo sapiens
  misc_RNA (1)...(19): siRNA sense strand
caaguguaauagugaaugg

SEQ ID NO: 127491 - RNA, 19 nt, Homo sapiens
  misc_RNA (1)...(19): siRNA sense strand
ggaaccuacuggcaucgau

SEQ ID NO: 127492 - RNA, 19 nt, Homo sapiens
  misc_RNA (1)...(19): siRNA sense strand
ggacagcuccuagaagaac

SEQ ID NO: 127493 - RNA, 19 nt, Homo sapiens
  misc_RNA (1)...(19): siRNA sense strand
ggacauuccaccaccaaag

SEQ ID NO: 127494 - RNA, 19 nt, Homo sapiens
  misc_RNA (1)...(19): siRNA sense strand
aauagccuguacuacguua

SEQ ID NO: 127495 - RNA, 19 nt, Homo sapiens
  misc_RNA (1)...(19): siRNA sense strand
gaaagaguagaugaaacuu

SEQ ID NO: 127496 - RNA, 19 nt, Homo sapiens
  misc_RNA (1)...(19): siRNA sense strand
gacagguacuugaauuacu

SEQ ID NO: 127497 - RNA, 19 nt, Homo sapiens
  misc_RNA (1)...(19): siRNA sense strand
ccugugaaccuguacugua

SEQ ID NO: 127498 - RNA, 19 nt, Homo sapiens
  misc_RNA (1)...(19): siRNA sense strand
ugaaacuuccggucucauu

SEQ ID NO: 127499 - RNA, 19 nt, Homo sapiens
  misc_RNA (1)...(19): siRNA sense strand
ugaaagaguagaugaaacu

SEQ ID NO: 127500 - RNA, 19 nt, Homo sapiens
  misc_RNA (1)...(19): siRNA sense strand
cuggacagguacuugaauu

SEQ ID NO: 127501 - RNA, 19 nt, Homo sapiens
  misc_RNA (1)...(19): siRNA sense strand
ggaaggagaagggcagauc

SEQ ID NO: 127502 - RNA, 19 nt, Homo sapiens
  misc_RNA (1)...(19): siRNA sense strand
ggagagucuacgaaaugua

SEQ ID NO: 127503 - RNA, 19 nt, Homo sapiens
  misc_RNA (1)...(19): siRNA sense strand
gauguugcucucuauguug

SEQ ID NO: 127504 - RNA, 19 nt, Homo sapiens
  misc_RNA (1)...(19): siRNA sense strand
caacugccacugucauagu

SEQ ID NO: 127505 - RNA, 19 nt, Homo sapiens
  misc_RNA (1)...(19): siRNA sense strand
gaagaaccagagucuagca

SEQ ID NO: 127506 - RNA, 19 nt, Homo sapiens
  misc_RNA (1)...(19): siRNA sense strand
caaggcagcaagacaagau

SEQ ID NO: 127507 - RNA, 19 nt, Homo sapiens
  misc_RNA (1)...(19): siRNA sense strand
gcacugaugggcuuugcau

SEQ ID NO: 127508 - RNA, 19 nt, Homo sapiens
  misc_RNA (1)...(19): siRNA sense strand
agaaggaccacauaguaga

SEQ ID NO: 127509 - RNA, 19 nt, Homo sapiens
  misc_RNA (1)...(19): siRNA sense strand
ccaaugaccaacucuccaa

SEQ ID NO: 127510 - RNA, 19 nt, Homo sapiens
  misc_RNA (1)...(19): siRNA sense strand
cagaaggaccacauaguag

SEQ ID NO: 127511 - RNA, 19 nt, Homo sapiens
  misc_RNA (1)...(19): siRNA sense strand
ggaguggucuguguguaac

SEQ ID NO: 127512 - RNA, 19 nt, Homo sapiens
  misc_RNA (1)...(19): siRNA sense strand
gagguggaaugguugaaaa

SEQ ID NO: 127513 - RNA, 19 nt, Homo sapiens
  misc_RNA (1)...(19): siRNA sense strand
ugccacauuuccuuauuga

SEQ ID NO: 127514 - RNA, 19 nt, Homo sapiens
  misc_RNA (1)...(19): siRNA sense strand
guagagacccuccggauua

SEQ ID NO: 127515 - RNA, 19 nt, Homo sapiens
  misc_RNA (1)...(19): siRNA sense strand
gaucguggcccuucaauuu

SEQ ID NO: 127516 - RNA, 19 nt, Homo sapiens
  misc_RNA (1)...(19): siRNA sense strand
cagaguauauggagugaua

SEQ ID NO: 127517 - RNA, 19 nt, Homo sapiens
  misc_RNA (1)...(19): siRNA sense strand
gcagaagccuggaacucua

SEQ ID NO: 127518 - RNA, 19 nt, Homo sapiens
  misc_RNA (1)...(19): siRNA sense strand
gacaauacauggacuaugg

SEQ ID NO: 127519 - RNA, 19 nt, Homo sapiens
  misc_RNA (1)...(19): siRNA sense strand
ugacguaauucacucguuu

SEQ ID NO: 127520 - RNA, 19 nt, Homo sapiens
  misc_RNA (1)...(19): siRNA sense strand
gcgcucaacucccagaaga

SEQ ID NO: 127521 - RNA, 19 nt, Homo sapiens
  misc_RNA (1)...(19): siRNA sense strand
auacuggccugacguaauu

SEQ ID NO: 127522 - RNA, 19 nt, Homo sapiens
  misc_RNA (1)...(19): siRNA sense strand
acagacaauuggucagaua

SEQ ID NO: 127523 - RNA, 19 nt, Homo sapiens
  misc_RNA (1)...(19): siRNA sense strand
gacaauuggucagauagaa

SEQ ID NO: 127524 - RNA, 19 nt, Homo sapiens
  misc_RNA (1)...(19): siRNA sense strand
aaccauccaucaauuacua

SEQ ID NO: 127525 - RNA, 19 nt, Homo sapiens
  misc_RNA (1)...(19): siRNA sense strand
gaggaaguacagacaauug

SEQ ID NO: 127526 - RNA, 19 nt, Homo sapiens
  misc_RNA (1)...(19): siRNA sense strand
gaacugugccucacuaagc

SEQ ID NO: 127527 - RNA, 19 nt, Homo sapiens
  misc_RNA (1)...(19): siRNA sense strand
ugacaaccaugaguggaaa

SEQ ID NO: 127528 - RNA, 19 nt, Homo sapiens
  misc_RNA (1)...(19): siRNA sense strand
cauggacuauggcccgaua

SEQ ID NO: 127529 - RNA, 19 nt, Homo sapiens
  misc_RNA (1)...(19): siRNA sense strand
acagggagcuggaccucaa

SEQ ID NO: 127530 - RNA, 19 nt, Homo sapiens
  misc_RNA (1)...(19): siRNA sense strand
ucaacagugugcuucuaaa

SEQ ID NO: 127531 - RNA, 19 nt, Homo sapiens
  misc_RNA (1)...(19): siRNA sense strand
gacaagcgccugcgugaca

SEQ ID NO: 127532 - RNA, 19 nt, Homo sapiens
  misc_RNA (1)...(19): siRNA sense strand
ucaacucccagaagaagua

SEQ ID NO: 127533 - RNA, 19 nt, Homo sapiens
  misc_RNA (1)...(19): siRNA sense strand
guacagacaauuggucaga

SEQ ID NO: 127534 - RNA, 19 nt, Homo sapiens
  misc_RNA (1)...(19): siRNA sense strand
agugaaggauguaauagau

SEQ ID NO: 127535 - RNA, 19 nt, Homo sapiens
  misc_RNA (1)...(19): siRNA sense strand
auagaacugugccucacua

SEQ ID NO: 127536 - RNA, 19 nt, Homo sapiens
  misc_RNA (1)...(19): siRNA sense strand
caucaauuacuaccaaguu

SEQ ID NO: 127537 - RNA, 19 nt, Homo sapiens
  misc_RNA (1)...(19): siRNA sense strand
gauaaaaccauccaucaau

SEQ ID NO: 127538 - RNA, 19 nt, Homo sapiens
  misc_RNA (1)...(19): siRNA sense strand
ccucaacagugugcuucua

SEQ ID NO: 127539 - RNA, 19 nt, Homo sapiens
  misc_RNA (1)...(19): siRNA sense strand
aagccaggaugaggaagua

SEQ ID NO: 127540 - RNA, 19 nt, Homo sapiens
  misc_RNA (1)...(19): siRNA sense strand
acagugugcuucuaaaauu

SEQ ID NO: 127541 - RNA, 19 nt, Homo sapiens
  misc_RNA (1)...(19): siRNA sense strand
acuaccaaguugcagauuu

SEQ ID NO: 127542 - RNA, 19 nt, Homo sapiens
  misc_RNA (1)...(19): siRNA sense strand
ccggauuacuggacaauac

SEQ ID NO: 127543 - RNA, 19 nt, Homo sapiens
  misc_RNA (1)...(19): siRNA sense strand
cuaccaaguugcagauuuu

SEQ ID NO: 127544 - RNA, 19 nt, Homo sapiens
  misc_RNA (1)...(19): siRNA sense strand
gcgagaaaauucaaaacga

SEQ ID NO: 127545 - RNA, 19 nt, Homo sapiens
  misc_RNA (1)...(19): siRNA sense strand
aagaaguacuuuggcagaa

SEQ ID NO: 127546 - RNA, 19 nt, Homo sapiens
  misc_RNA (1)...(19): siRNA sense strand
ggacaauacauggacuaug

SEQ ID NO: 127547 - RNA, 19 nt, Homo sapiens
  misc_RNA (1)...(19): siRNA sense strand
ggucugagagucugugaag

SEQ ID NO: 127548 - RNA, 19 nt, Homo sapiens
  misc_RNA (1)...(19): siRNA sense strand
ugagacaguaugcgagaaa

SEQ ID NO: 127549 - RNA, 19 nt, Homo sapiens
  misc_RNA (1)...(19): siRNA sense strand
gaugaggaaguacagacaa

SEQ ID NO: 127550 - RNA, 19 nt, Homo sapiens
  misc_RNA (1)...(19): siRNA sense strand
ggaaguacagacaauuggu

SEQ ID NO: 127551 - RNA, 19 nt, Homo sapiens
  misc_RNA (1)...(19): siRNA sense strand
cgauaaaagugaaggaugu

SEQ ID NO: 127552 - RNA, 19 nt, Homo sapiens
  misc_RNA (1)...(19): siRNA sense strand
gaagucuggcuggcaaaug

SEQ ID NO: 127553 - RNA, 19 nt, Homo sapiens
  misc_RNA (1)...(19): siRNA sense strand
ggagcuggaccucaacagu

SEQ ID NO: 127554 - RNA, 19 nt, Homo sapiens
  misc_RNA (1)...(19): siRNA sense strand
gccagaguauauggaguga

SEQ ID NO: 127555 - RNA, 19 nt, Homo sapiens
  misc_RNA (1)...(19): siRNA sense strand
cauacuggccugacguaau

SEQ ID NO: 127556 - RNA, 19 nt, Homo sapiens
  misc_RNA (1)...(19): siRNA sense strand
gugacaaccaugaguggaa

SEQ ID NO: 127557 - RNA, 19 nt, Homo sapiens
  misc_RNA (1)...(19): siRNA sense strand
ggaugaggaaguacagaca

SEQ ID NO: 127558 - RNA, 19 nt, Homo sapiens
  misc_RNA (1)...(19): siRNA sense strand
gcucaacucccagaagaag

SEQ ID NO: 127559 - RNA, 19 nt, Homo sapiens
  misc_RNA (1)...(19): siRNA sense strand
cugagagucugugaagaug

SEQ ID NO: 127560 - RNA, 19 nt, Homo sapiens
  misc_RNA (1)...(19): siRNA sense strand
agaaguacuuuggcagaag

SEQ ID NO: 127561 - RNA, 19 nt, Homo sapiens
  misc_RNA (1)...(19): siRNA sense strand
ggaagucuggcuggcaaau

SEQ ID NO: 127562 - RNA, 19 nt, Homo sapiens
  misc_RNA (1)...(19): siRNA sense strand
ggcagaagccuggaacucu

SEQ ID NO: 127563 - RNA, 19 nt, Homo sapiens
  misc_RNA (1)...(19): siRNA sense strand
caacagugugcuucuaaaa

SEQ ID NO: 127564 - RNA, 19 nt, Homo sapiens
  misc_RNA (1)...(19): siRNA sense strand
ggaccucaacagugugcuu

SEQ ID NO: 127565 - RNA, 19 nt, Homo sapiens
  misc_RNA (1)...(19): siRNA sense strand
uagagacccuccggauuac

SEQ ID NO: 127566 - RNA, 19 nt, Homo sapiens
  misc_RNA (1)...(19): siRNA sense strand
ggcauacuggccugacgua

SEQ ID NO: 127567 - RNA, 19 nt, Homo sapiens
  misc_RNA (1)...(19): siRNA sense strand
ucugagagucugugaagau

SEQ ID NO: 127568 - RNA, 19 nt, Homo sapiens
  misc_RNA (1)...(19): siRNA sense strand
ugaggaaguacagacaauu

SEQ ID NO: 127569 - RNA, 19 nt, Homo sapiens
  misc_RNA (1)...(19): siRNA sense strand
ccaaguugcagauuuuaaa

SEQ ID NO: 127570 - RNA, 19 nt, Homo sapiens
  misc_RNA (1)...(19): siRNA sense strand
gagacccuccggauuacug

SEQ ID NO: 127571 - RNA, 19 nt, Homo sapiens
  misc_RNA (1)...(19): siRNA sense strand
uguagagacccuccggauu

SEQ ID NO: 127572 - RNA, 19 nt, Homo sapiens
  misc_RNA (1)...(19): siRNA sense strand
gcauacuggccugacguaa

SEQ ID NO: 127573 - RNA, 19 nt, Homo sapiens
  misc_RNA (1)...(19): siRNA sense strand
ucguggcccuucaauuuag

SEQ ID NO: 127574 - RNA, 19 nt, Homo sapiens
  misc_RNA (1)...(19): siRNA sense strand
gagaaagacuaguuuauga

SEQ ID NO: 127575 - RNA, 19 nt, Homo sapiens
  misc_RNA (1)...(19): siRNA sense strand
gacaauacgugaugccuuu

SEQ ID NO: 127576 - RNA, 19 nt, Homo sapiens
  misc_RNA (1)...(19): siRNA sense strand
ccaccuugcucaacuauga

SEQ ID NO: 127577 - RNA, 19 nt, Homo sapiens
  misc_RNA (1)...(19): siRNA sense strand
ggagaaagacuaguuuaug

SEQ ID NO: 127578 - RNA, 19 nt, Homo sapiens
  misc_RNA (1)...(19): siRNA sense strand
gaaagacuaguuuaugaga

SEQ ID NO: 127579 - RNA, 19 nt, Homo sapiens
  misc_RNA (1)...(19): siRNA sense strand
caagguggaucuggaugua

SEQ ID NO: 127580 - RNA, 19 nt, Homo sapiens
  misc_RNA (1)...(19): siRNA sense strand
ggacauagaccagaugauc

SEQ ID NO: 127581 - RNA, 19 nt, Homo sapiens
  misc_RNA (1)...(19): siRNA sense strand
gggcuucucucacaacuag

SEQ ID NO: 127582 - RNA, 19 nt, Homo sapiens
  misc_RNA (1)...(19): siRNA sense strand
aagaguaccuggacauaga

SEQ ID NO: 127583 - RNA, 19 nt, Homo sapiens
  misc_RNA (1)...(19): siRNA sense strand
gaccauugcuggaaaggau

SEQ ID NO: 127584 - RNA, 19 nt, Homo sapiens
  misc_RNA (1)...(19): siRNA sense strand
ggaagcugcuggagaugga

SEQ ID NO: 127585 - RNA, 19 nt, Homo sapiens
  misc_RNA (1)...(19): siRNA sense strand
gcucaacuaugacuaugug

SEQ ID NO: 127586 - RNA, 19 nt, Homo sapiens
  misc_RNA (1)...(19): siRNA sense strand
gacggaaccuggugacaau

SEQ ID NO: 127587 - RNA, 19 nt, Homo sapiens
  misc_RNA (1)...(19): siRNA sense strand
gcuuggagcugcuagugaa

SEQ ID NO: 127588 - RNA, 19 nt, Homo sapiens
  misc_RNA (1)...(19): siRNA sense strand
ggauuucagugacuucauc

SEQ ID NO: 127589 - RNA, 19 nt, Homo sapiens
  misc_RNA (1)...(19): siRNA sense strand
uagcaggacuggagaacug

SEQ ID NO: 127590 - RNA, 19 nt, Homo sapiens
  misc_RNA (1)...(19): siRNA sense strand
ucagugacuucaucaacaa

SEQ ID NO: 127591 - RNA, 19 nt, Homo sapiens
  misc_RNA (1)...(19): siRNA sense strand
ggacggaaccuggugacaa

SEQ ID NO: 127592 - RNA, 19 nt, Homo sapiens
  misc_RNA (1)...(19): siRNA sense strand
caaggagaaagacuaguuu

SEQ ID NO: 127593 - RNA, 19 nt, Homo sapiens
  misc_RNA (1)...(19): siRNA sense strand
gguuuggccucuacuacaa

SEQ ID NO: 127594 - RNA, 19 nt, Homo sapiens
  misc_RNA (1)...(19): siRNA sense strand
ccacagcgcccacuucaag

SEQ ID NO: 127595 - RNA, 19 nt, Homo sapiens
  misc_RNA (1)...(19): siRNA sense strand
ccaaggagaaagacuaguu

SEQ ID NO: 127596 - RNA, 19 nt, Homo sapiens
  misc_RNA (1)...(19): siRNA sense strand
ucagaucuauguccaccuu

SEQ ID NO: 127597 - RNA, 19 nt, Homo sapiens
  misc_RNA (1)...(19): siRNA sense strand
gcauuccucuuuggugcua

SEQ ID NO: 127598 - RNA, 19 nt, Homo sapiens
  misc_RNA (1)...(19): siRNA sense strand
ccgaggauauggucuuugu

SEQ ID NO: 127599 - RNA, 19 nt, Homo sapiens
  misc_RNA (1)...(19): siRNA sense strand
ggccagagccagcuguuug

SEQ ID NO: 127600 - RNA, 19 nt, Homo sapiens
  misc_RNA (1)...(19): siRNA sense strand
gaacggcgugggcuucuuc

SEQ ID NO: 127601 - RNA, 19 nt, Homo sapiens
  misc_RNA (1)...(19): siRNA sense strand
cuauguggauggaggcuuu

SEQ ID NO: 127602 - RNA, 19 nt, Homo sapiens
  misc_RNA (1)...(19): siRNA sense strand
gcugugaugcgcuuucuga

SEQ ID NO: 127603 - RNA, 19 nt, Homo sapiens
  misc_RNA (1)...(19): siRNA sense strand
ggaaguacgggaaccaagu

SEQ ID NO: 127604 - RNA, 19 nt, Homo sapiens
  misc_RNA (1)...(19): siRNA sense strand
ccaagaguaccuggacaua

SEQ ID NO: 127605 - RNA, 19 nt, Homo sapiens
  misc_RNA (1)...(19): siRNA sense strand
gaaguacgggaaccaagug

SEQ ID NO: 127606 - RNA, 19 nt, Homo sapiens
  misc_RNA (1)...(19): siRNA sense strand
gcaaugacgacccgcuaug

SEQ ID NO: 127607 - RNA, 19 nt, Homo sapiens
  misc_RNA (1)...(19): siRNA sense strand
gagagccgcugccccaaaa

SEQ ID NO: 127608 - RNA, 19 nt, Homo sapiens
  misc_RNA (1)...(19): siRNA sense strand
acuguggacuuucuccuuu

SEQ ID NO: 127609 - RNA, 19 nt, Homo sapiens
  misc_RNA (1)...(19): siRNA sense strand
ggccgaggauauggucuuu

SEQ ID NO: 127610 - RNA, 19 nt, Homo sapiens
  misc_RNA (1)...(19): siRNA sense strand
cagcucggcauuccucuuu

SEQ ID NO: 127611 - RNA, 19 nt, Homo sapiens
  misc_RNA (1)...(19): siRNA sense strand
guacgggaaccaaguguca

SEQ ID NO: 127612 - RNA, 19 nt, Homo sapiens
  misc_RNA (1)...(19): siRNA sense strand
cgacaccacucagaucucu

SEQ ID NO: 127613 - RNA, 19 nt, Homo sapiens
  misc_RNA (1)...(19): siRNA sense strand
ggacuauccagaagguguu

SEQ ID NO: 127614 - RNA, 19 nt, Homo sapiens
  misc_RNA (1)...(19): siRNA sense strand
ggccauagaaauacgauuc

SEQ ID NO: 127615 - RNA, 19 nt, Homo sapiens
  misc_RNA (1)...(19): siRNA sense strand
gcuuuggcaugggcaagua

SEQ ID NO: 127616 - RNA, 19 nt, Homo sapiens
  misc_RNA (1)...(19): siRNA sense strand
ccuccucacuguggacuuu

SEQ ID NO: 127617 - RNA, 19 nt, Homo sapiens
  misc_RNA (1)...(19): siRNA sense strand
aaggagaaagacuaguuua

SEQ ID NO: 127618 - RNA, 19 nt, Homo sapiens
  misc_RNA (1)...(19): siRNA sense strand
ucucuacucgcacuacuuu

SEQ ID NO: 127619 - RNA, 19 nt, Homo sapiens
  misc_RNA (1)...(19): siRNA sense strand
cccaguagcagcagcguuu

SEQ ID NO: 127620 - RNA, 19 nt, Homo sapiens
  misc_RNA (1)...(19): siRNA sense strand
gcaaccacagcaacaagug

SEQ ID NO: 127621 - RNA, 19 nt, Homo sapiens
  misc_RNA (1)...(19): siRNA sense strand
cccggaagcugcuggagau

SEQ ID NO: 127622 - RNA, 19 nt, Homo sapiens
  misc_RNA (1)...(19): siRNA sense strand
ugagauaagccuccaagag

SEQ ID NO: 127623 - RNA, 19 nt, Homo sapiens
  misc_RNA (1)...(19): siRNA sense strand
ggaacggcgugggcuucuu

SEQ ID NO: 127624 - RNA, 19 nt, Homo sapiens
  misc_RNA (1)...(19): siRNA sense strand
ggucugggccgaggauaug

SEQ ID NO: 127625 - RNA, 19 nt, Homo sapiens
  misc_RNA (1)...(19): siRNA sense strand
gcucggcauuccucuuugg

SEQ ID NO: 127626 - RNA, 19 nt, Homo sapiens
  misc_RNA (1)...(19): siRNA sense strand
gcagcagcguuuucaauca

SEQ ID NO: 127627 - RNA, 19 nt, Homo sapiens
  misc_RNA (1)...(19): siRNA sense strand
ggagcugacggcugugaug

SEQ ID NO: 127628 - RNA, 19 nt, Homo sapiens
  misc_RNA (1)...(19): siRNA sense strand
caagaguaccuggacauag

SEQ ID NO: 127629 - RNA, 19 nt, Homo sapiens
  misc_RNA (1)...(19): siRNA sense strand
gugcugaucccagacaaug

SEQ ID NO: 127630 - RNA, 19 nt, Homo sapiens
  misc_RNA (1)...(19): siRNA sense strand
ccagccagcuuccccauug

SEQ ID NO: 127631 - RNA, 19 nt, Homo sapiens
  misc_RNA (1)...(19): siRNA sense strand
ggugacagcugguuuucug

SEQ ID NO: 127632 - RNA, 19 nt, Homo sapiens
  misc_RNA (1)...(19): siRNA sense strand
gugcuggucgucagaucua

SEQ ID NO: 127633 - RNA, 19 nt, Homo sapiens
  misc_RNA (1)...(19): siRNA sense strand
ggacuggcacuuccuuuug

SEQ ID NO: 127634 - RNA, 19 nt, Homo sapiens
  misc_RNA (1)...(19): siRNA sense strand
gaggaggagcccaguagca

SEQ ID NO: 127635 - RNA, 19 nt, Homo sapiens
  misc_RNA (1)...(19): siRNA sense strand
gaucucuacucgcacuacu

SEQ ID NO: 127636 - RNA, 19 nt, Homo sapiens
  misc_RNA (1)...(19): siRNA sense strand
ccaccugguuuggccucua

SEQ ID NO: 127637 - RNA, 19 nt, Homo sapiens
  misc_RNA (1)...(19): siRNA sense strand
caaugacgacccgcuaugu

SEQ ID NO: 127638 - RNA, 19 nt, Homo sapiens
  misc_RNA (1)...(19): siRNA sense strand
uguccaccuugcucaacua

SEQ ID NO: 127639 - RNA, 19 nt, Homo sapiens
  misc_RNA (1)...(19): siRNA sense strand
ggaaccuggugacaaugac

SEQ ID NO: 127640 - RNA, 19 nt, Homo sapiens
  misc_RNA (1)...(19): siRNA sense strand
gaaauuccccagcagcaau

SEQ ID NO: 127641 - RNA, 19 nt, Homo sapiens
  misc_RNA (1)...(19): siRNA sense strand
gcauucaguggcccaagga

SEQ ID NO: 127642 - RNA, 19 nt, Homo sapiens
  misc_RNA (1)...(19): siRNA sense strand
cggaaccuggugacaauga

SEQ ID NO: 127643 - RNA, 19 nt, Homo sapiens
  misc_RNA (1)...(19): siRNA sense strand
ugagaccauugcuggaaag

SEQ ID NO: 127644 - RNA, 19 nt, Homo sapiens
  misc_RNA (1)...(19): siRNA sense strand
caucuuugccuugguuugu

SEQ ID NO: 127645 - RNA, 19 nt, Homo sapiens
  misc_RNA (1)...(19): siRNA sense strand
uaaagacagucauggguua

SEQ ID NO: 127646 - RNA, 19 nt, Homo sapiens
  misc_RNA (1)...(19): siRNA sense strand
gaaaucugcccuuuaaauu

SEQ ID NO: 127647 - RNA, 19 nt, Homo sapiens
  misc_RNA (1)...(19): siRNA sense strand
gaagagaacgcccagauca

SEQ ID NO: 127648 - RNA, 19 nt, Homo sapiens
  misc_RNA (1)...(19): siRNA sense strand
gcacgcagcugcuuguagu

SEQ ID NO: 127649 - RNA, 19 nt, Homo sapiens
  misc_RNA (1)...(19): siRNA sense strand
ggaaaucugcccuuuaaau

SEQ ID NO: 127650 - RNA, 19 nt, Homo sapiens
  misc_RNA (1)...(19): siRNA sense strand
gauggaggauaaagugaaa

SEQ ID NO: 127651 - RNA, 19 nt, Homo sapiens
  misc_RNA (1)...(19): siRNA sense strand
gccaucaagugucaauuaa

SEQ ID NO: 127652 - RNA, 19 nt, Homo sapiens
  misc_RNA (1)...(19): siRNA sense strand
ugaccaagauucugaggaa

SEQ ID NO: 127653 - RNA, 19 nt, Homo sapiens
  misc_RNA (1)...(19): siRNA sense strand
gggacaauaucaacaauag

SEQ ID NO: 127654 - RNA, 19 nt, Homo sapiens
  misc_RNA (1)...(19): siRNA sense strand
cggaagagcuggagaaagg

SEQ ID NO: 127655 - RNA, 19 nt, Homo sapiens
  misc_RNA (1)...(19): siRNA sense strand
gggcaagccuaucguccua

SEQ ID NO: 127656 - RNA, 19 nt, Homo sapiens
  misc_RNA (1)...(19): siRNA sense strand
ccaaaguccugaucacugu

SEQ ID NO: 127657 - RNA, 19 nt, Homo sapiens
  misc_RNA (1)...(19): siRNA sense strand
cagauacgcuauucaguuc

SEQ ID NO: 127658 - RNA, 19 nt, Homo sapiens
  misc_RNA (1)...(19): siRNA sense strand
uaagggacauuaacgacaa

SEQ ID NO: 127659 - RNA, 19 nt, Homo sapiens
  misc_RNA (1)...(19): siRNA sense strand
cgacaaugcgccuuacuuu

SEQ ID NO: 127660 - RNA, 19 nt, Homo sapiens
  misc_RNA (1)...(19): siRNA sense strand
gaagugcaagcaauggaua

SEQ ID NO: 127661 - RNA, 19 nt, Homo sapiens
  misc_RNA (1)...(19): siRNA sense strand
ggccaucaagugucaauua

SEQ ID NO: 127662 - RNA, 19 nt, Homo sapiens
  misc_RNA (1)...(19): siRNA sense strand
gaacaaucccagaggaguu

SEQ ID NO: 127663 - RNA, 19 nt, Homo sapiens
  misc_RNA (1)...(19): siRNA sense strand
uaaaugaccaagauucuga

SEQ ID NO: 127664 - RNA, 19 nt, Homo sapiens
  misc_RNA (1)...(19): siRNA sense strand
gcuauucaguuccggaaga

SEQ ID NO: 127665 - RNA, 19 nt, Homo sapiens
  misc_RNA (1)...(19): siRNA sense strand
guuccuagcuacaacauca

SEQ ID NO: 127666 - RNA, 19 nt, Homo sapiens
  misc_RNA (1)...(19): siRNA sense strand
gacauuaauugcccuuuua

SEQ ID NO: 127667 - RNA, 19 nt, Homo sapiens
  misc_RNA (1)...(19): siRNA sense strand
gagaugcgguucccucuac

SEQ ID NO: 127668 - RNA, 19 nt, Homo sapiens
  misc_RNA (1)...(19): siRNA sense strand
aaacucauaucucgcugaa

SEQ ID NO: 127669 - RNA, 19 nt, Homo sapiens
  misc_RNA (1)...(19): siRNA sense strand
ccagauacgcuauucaguu

SEQ ID NO: 127670 - RNA, 19 nt, Homo sapiens
  misc_RNA (1)...(19): siRNA sense strand
ggugaucuguuucauccaa

SEQ ID NO: 127671 - RNA, 19 nt, Homo sapiens
  misc_RNA (1)...(19): siRNA sense strand
gcacccagauacgcuauuc

SEQ ID NO: 127672 - RNA, 19 nt, Homo sapiens
  misc_RNA (1)...(19): siRNA sense strand
ccgcuuauaucccagagaa

SEQ ID NO: 127673 - RNA, 19 nt, Homo sapiens
  misc_RNA (1)...(19): siRNA sense strand
aaucugcccuuuaaauuag

SEQ ID NO: 127674 - RNA, 19 nt, Homo sapiens
  misc_RNA (1)...(19): siRNA sense strand
ggacauuaauugcccuuuu

SEQ ID NO: 127675 - RNA, 19 nt, Homo sapiens
  misc_RNA (1)...(19): siRNA sense strand
guagaaguaagggacauua

SEQ ID NO: 127676 - RNA, 19 nt, Homo sapiens
  misc_RNA (1)...(19): siRNA sense strand
gcccaacuaugcagacaug

SEQ ID NO: 127677 - RNA, 19 nt, Homo sapiens
  misc_RNA (1)...(19): siRNA sense strand
gaguuucccucgucucugu

SEQ ID NO: 127678 - RNA, 19 nt, Homo sapiens
  misc_RNA (1)...(19): siRNA sense strand
gaacgacaaugccccagaa

SEQ ID NO: 127679 - RNA, 19 nt, Homo sapiens
  misc_RNA (1)...(19): siRNA sense strand
ggacagagacgcgcucaag

SEQ ID NO: 127680 - RNA, 19 nt, Homo sapiens
  misc_RNA (1)...(19): siRNA sense strand
uggaguagaaguagaagua

SEQ ID NO: 127681 - RNA, 19 nt, Homo sapiens
  misc_RNA (1)...(19): siRNA sense strand
caauggauaaugcaggaua

SEQ ID NO: 127682 - RNA, 19 nt, Homo sapiens
  misc_RNA (1)...(19): siRNA sense strand
gaccggaugcacccagaua

SEQ ID NO: 127683 - RNA, 19 nt, Homo sapiens
  misc_RNA (1)...(19): siRNA sense strand
agacagucauggguuaauu

SEQ ID NO: 127684 - RNA, 19 nt, Homo sapiens
  misc_RNA (1)...(19): siRNA sense strand
ggaguagaaguagaaguaa

SEQ ID NO: 127685 - RNA, 19 nt, Homo sapiens
  misc_RNA (1)...(19): siRNA sense strand
gagcccugcuggacagaga

SEQ ID NO: 127686 - RNA, 19 nt, Homo sapiens
  misc_RNA (1)...(19): siRNA sense strand
gaguagaaguagaaguaag

SEQ ID NO: 127687 - RNA, 19 nt, Homo sapiens
  misc_RNA (1)...(19): siRNA sense strand
gcggaagagucaccugauc

SEQ ID NO: 127688 - RNA, 19 nt, Homo sapiens
  misc_RNA (1)...(19): siRNA sense strand
agaacgcccagaucacuua

SEQ ID NO: 127689 - RNA, 19 nt, Homo sapiens
  misc_RNA (1)...(19): siRNA sense strand
gaccaagauucugaggaaa

SEQ ID NO: 127690 - RNA, 19 nt, Homo sapiens
  misc_RNA (1)...(19): siRNA sense strand
ucgugaaagugaauuagaa

SEQ ID NO: 127691 - RNA, 19 nt, Homo sapiens
  misc_RNA (1)...(19): siRNA sense strand
cuuauucccuggcugagaa

SEQ ID NO: 127692 - RNA, 19 nt, Homo sapiens
  misc_RNA (1)...(19): siRNA sense strand
gaaguaagggacauuaacg

SEQ ID NO: 127693 - RNA, 19 nt, Homo sapiens
  misc_RNA (1)...(19): siRNA sense strand
gucaggugauucgguauuu

SEQ ID NO: 127694 - RNA, 19 nt, Homo sapiens
  misc_RNA (1)...(19): siRNA sense strand
gauggaagugcaagcaaug

SEQ ID NO: 127695 - RNA, 19 nt, Homo sapiens
  misc_RNA (1)...(19): siRNA sense strand
uaccgacccugacgaagga

SEQ ID NO: 127696 - RNA, 19 nt, Homo sapiens
  misc_RNA (1)...(19): siRNA sense strand
gagccgacgguaguaagua

SEQ ID NO: 127697 - RNA, 19 nt, Homo sapiens
  misc_RNA (1)...(19): siRNA sense strand
gugauucgguauuuucuaa

SEQ ID NO: 127698 - RNA, 19 nt, Homo sapiens
  misc_RNA (1)...(19): siRNA sense strand
gauaaugcaggauauucug

SEQ ID NO: 127699 - RNA, 19 nt, Homo sapiens
  misc_RNA (1)...(19): siRNA sense strand
ggauaaugcaggauauucu

SEQ ID NO: 127700 - RNA, 19 nt, Homo sapiens
  misc_RNA (1)...(19): siRNA sense strand
gacaaugcgccuuacuuuc

SEQ ID NO: 127701 - RNA, 19 nt, Homo sapiens
  misc_RNA (1)...(19): siRNA sense strand
ggaagugcaagcaauggau

SEQ ID NO: 127702 - RNA, 19 nt, Homo sapiens
  misc_RNA (1)...(19): siRNA sense strand
gguauuccuuccgguaugu

SEQ ID NO: 127703 - RNA, 19 nt, Homo sapiens
  misc_RNA (1)...(19): siRNA sense strand
acauucugauggaggauaa

SEQ ID NO: 127704 - RNA, 19 nt, Homo sapiens
  misc_RNA (1)...(19): siRNA sense strand
ccacgaggagucaggauuc

SEQ ID NO: 127705 - RNA, 19 nt, Homo sapiens
  misc_RNA (1)...(19): siRNA sense strand
uauauggaguagaaguaga

SEQ ID NO: 127706 - RNA, 19 nt, Homo sapiens
  misc_RNA (1)...(19): siRNA sense strand
uuaacgacaaugcgccuua

SEQ ID NO: 127707 - RNA, 19 nt, Homo sapiens
  misc_RNA (1)...(19): siRNA sense strand
gacagucauggguuaauug

SEQ ID NO: 127708 - RNA, 19 nt, Homo sapiens
  misc_RNA (1)...(19): siRNA sense strand
gagaacgcccagaucacuu

SEQ ID NO: 127709 - RNA, 19 nt, Homo sapiens
  misc_RNA (1)...(19): siRNA sense strand
guaauucagggacaauauc

SEQ ID NO: 127710 - RNA, 19 nt, Homo sapiens
  misc_RNA (1)...(19): siRNA sense strand
ucaaugcggaagugaggua

SEQ ID NO: 127711 - RNA, 19 nt, Homo sapiens
  misc_RNA (1)...(19): siRNA sense strand
gaaaaugcagccacugaga

SEQ ID NO: 127712 - RNA, 19 nt, Homo sapiens
  misc_RNA (1)...(19): siRNA sense strand
uagaaguaagggacauuaa

SEQ ID NO: 127713 - RNA, 19 nt, Homo sapiens
  misc_RNA (1)...(19): siRNA sense strand
acgcccagaucacuuauuc

SEQ ID NO: 127714 - RNA, 19 nt, Homo sapiens
  misc_RNA (1)...(19): siRNA sense strand
agagguaggacgcagcuuu

SEQ ID NO: 127715 - RNA, 19 nt, Homo sapiens
  misc_RNA (1)...(19): siRNA sense strand
cagggacaauaucaacaau

SEQ ID NO: 127716 - RNA, 19 nt, Homo sapiens
  misc_RNA (1)...(19): siRNA sense strand
gagguauuccuuccgguau

SEQ ID NO: 127717 - RNA, 19 nt, Homo sapiens
  misc_RNA (1)...(19): siRNA sense strand
ucagggacaauaucaacaa

SEQ ID NO: 127718 - RNA, 19 nt, Homo sapiens
  misc_RNA (1)...(19): siRNA sense strand
gcugagcuccuucgacuac

SEQ ID NO: 127719 - RNA, 19 nt, Homo sapiens
  misc_RNA (1)...(19): siRNA sense strand
agauggaagugcaagcaau

SEQ ID NO: 127720 - RNA, 19 nt, Homo sapiens
  misc_RNA (1)...(19): siRNA sense strand
cguccuacguguccaucaa

SEQ ID NO: 127721 - RNA, 19 nt, Homo sapiens
  misc_RNA (1)...(19): siRNA sense strand
gaacgcccagaucacuuau

SEQ ID NO: 127722 - RNA, 19 nt, Homo sapiens
  misc_RNA (1)...(19): siRNA sense strand
gugaagagaacgcccagau

SEQ ID NO: 127723 - RNA, 19 nt, Homo sapiens
  misc_RNA (1)...(19): siRNA sense strand
uaguuuagucacagacaua

SEQ ID NO: 127724 - RNA, 19 nt, Homo sapiens
  misc_RNA (1)...(19): siRNA sense strand
guaaaugaccaagauucug

SEQ ID NO: 127725 - RNA, 19 nt, Homo sapiens
  misc_RNA (1)...(19): siRNA sense strand
cgugaaagugaauuagaaa

SEQ ID NO: 127726 - RNA, 19 nt, Homo sapiens
  misc_RNA (1)...(19): siRNA sense strand
uguaugcgcugagcuccuu

SEQ ID NO: 127727 - RNA, 19 nt, Homo sapiens
  misc_RNA (1)...(19): siRNA sense strand
gagccaaaguccugaucac

SEQ ID NO: 127728 - RNA, 19 nt, Homo sapiens
  misc_RNA (1)...(19): siRNA sense strand
uaacgacaaugcgccuuac

SEQ ID NO: 127729 - RNA, 19 nt, Homo sapiens
  misc_RNA (1)...(19): siRNA sense strand
gcaguuccgagacuugcaa

SEQ ID NO: 127730 - RNA, 19 nt, Homo sapiens
  misc_RNA (1)...(19): siRNA sense strand
gcuuauaucccagagaaca

SEQ ID NO: 127731 - RNA, 19 nt, Homo sapiens
  misc_RNA (1)...(19): siRNA sense strand
ggccuccuauuccgcuuau

SEQ ID NO: 127732 - RNA, 19 nt, Homo sapiens
  misc_RNA (1)...(19): siRNA sense strand
ccacggaaacucauaucuc

SEQ ID NO: 127733 - RNA, 19 nt, Homo sapiens
  misc_RNA (1)...(19): siRNA sense strand
ccaucaagugucaauuaaa

SEQ ID NO: 127734 - RNA, 19 nt, Homo sapiens
  misc_RNA (1)...(19): siRNA sense strand
acaaugcgccuuacuuucg

SEQ ID NO: 127735 - RNA, 19 nt, Homo sapiens
  misc_RNA (1)...(19): siRNA sense strand
aggcuuuccugcagaccua

SEQ ID NO: 127736 - RNA, 19 nt, Homo sapiens
  misc_RNA (1)...(19): siRNA sense strand
aauggauaaugcaggauau

SEQ ID NO: 127737 - RNA, 19 nt, Homo sapiens
  misc_RNA (1)...(19): siRNA sense strand
uaauucagggacaauauca

SEQ ID NO: 127738 - RNA, 19 nt, Homo sapiens
  misc_RNA (1)...(19): siRNA sense strand
aaaugcagccacugagaug

SEQ ID NO: 127739 - RNA, 19 nt, Homo sapiens
  misc_RNA (1)...(19): siRNA sense strand
gcagcugcuuguagucaac

SEQ ID NO: 127740 - RNA, 19 nt, Homo sapiens
  misc_RNA (1)...(19): siRNA sense strand
aaauggagccgacgguagu

SEQ ID NO: 127741 - RNA, 19 nt, Homo sapiens
  misc_RNA (1)...(19): siRNA sense strand
caaugcgccuuacuuucgu

SEQ ID NO: 127742 - RNA, 19 nt, Homo sapiens
  misc_RNA (1)...(19): siRNA sense strand
gacauucugauggaggaua

SEQ ID NO: 127743 - RNA, 19 nt, Homo sapiens
  misc_RNA (1)...(19): siRNA sense strand
gcaagcaauggauaaugca

SEQ ID NO: 127744 - RNA, 19 nt, Homo sapiens
  misc_RNA (1)...(19): siRNA sense strand
aaaucuagacauucugaug

SEQ ID NO: 127745 - RNA, 19 nt, Homo sapiens
  misc_RNA (1)...(19): siRNA sense strand
uaaagacagucauggguua

SEQ ID NO: 127746 - RNA, 19 nt, Homo sapiens
  misc_RNA (1)...(19): siRNA sense strand
gaaaucugcccuuuaaauu

SEQ ID NO: 127747 - RNA, 19 nt, Homo sapiens
  misc_RNA (1)...(19): siRNA sense strand
gaagagaacgcccagauca

SEQ ID NO: 127748 - RNA, 19 nt, Homo sapiens
  misc_RNA (1)...(19): siRNA sense strand
gcacgcagcugcuuguagu

SEQ ID NO: 127749 - RNA, 19 nt, Homo sapiens
  misc_RNA (1)...(19): siRNA sense strand
ggaaaucugcccuuuaaau

SEQ ID NO: 127750 - RNA, 19 nt, Homo sapiens
  misc_RNA (1)...(19): siRNA sense strand
gauggaggauaaagugaaa

SEQ ID NO: 127751 - RNA, 19 nt, Homo sapiens
  misc_RNA (1)...(19): siRNA sense strand
gccaucaagugucaauuaa

SEQ ID NO: 127752 - RNA, 19 nt, Homo sapiens
  misc_RNA (1)...(19): siRNA sense strand
ugaccaagauucugaggaa

SEQ ID NO: 127753 - RNA, 19 nt, Homo sapiens
  misc_RNA (1)...(19): siRNA sense strand
gggacaauaucaacaauag

SEQ ID NO: 127754 - RNA, 19 nt, Homo sapiens
  misc_RNA (1)...(19): siRNA sense strand
cggaagagcuggagaaagg

SEQ ID NO: 127755 - RNA, 19 nt, Homo sapiens
  misc_RNA (1)...(19): siRNA sense strand
gggcaagccuaucguccua

SEQ ID NO: 127756 - RNA, 19 nt, Homo sapiens
  misc_RNA (1)...(19): siRNA sense strand
ccaaaguccugaucacugu

SEQ ID NO: 127757 - RNA, 19 nt, Homo sapiens
  misc_RNA (1)...(19): siRNA sense strand
cagauacgcuauucaguuc

SEQ ID NO: 127758 - RNA, 19 nt, Homo sapiens
  misc_RNA (1)...(19): siRNA sense strand
uaagggacauuaacgacaa

SEQ ID NO: 127759 - RNA, 19 nt, Homo sapiens
  misc_RNA (1)...(19): siRNA sense strand
cgacaaugcgccuuacuuu

SEQ ID NO: 127760 - RNA, 19 nt, Homo sapiens
  misc_RNA (1)...(19): siRNA sense strand
gaagugcaagcaauggaua

SEQ ID NO: 127761 - RNA, 19 nt, Homo sapiens
  misc_RNA (1)...(19): siRNA sense strand
ggccaucaagugucaauua

SEQ ID NO: 127762 - RNA, 19 nt, Homo sapiens
  misc_RNA (1)...(19): siRNA sense strand
gaacaaucccagaggaguu

SEQ ID NO: 127763 - RNA, 19 nt, Homo sapiens
  misc_RNA (1)...(19): siRNA sense strand
uaaaugaccaagauucuga

SEQ ID NO: 127764 - RNA, 19 nt, Homo sapiens
  misc_RNA (1)...(19): siRNA sense strand
gcuauucaguuccggaaga

SEQ ID NO: 127765 - RNA, 19 nt, Homo sapiens
  misc_RNA (1)...(19): siRNA sense strand
guuccuagcuacaacauca

SEQ ID NO: 127766 - RNA, 19 nt, Homo sapiens
  misc_RNA (1)...(19): siRNA sense strand
gacauuaauugcccuuuua

SEQ ID NO: 127767 - RNA, 19 nt, Homo sapiens
  misc_RNA (1)...(19): siRNA sense strand
gagaugcgguucccucuac

SEQ ID NO: 127768 - RNA, 19 nt, Homo sapiens
  misc_RNA (1)...(19): siRNA sense strand
aaacucauaucucgcugaa

SEQ ID NO: 127769 - RNA, 19 nt, Homo sapiens
  misc_RNA (1)...(19): siRNA sense strand
ccagauacgcuauucaguu

SEQ ID NO: 127770 - RNA, 19 nt, Homo sapiens
  misc_RNA (1)...(19): siRNA sense strand
ggugaucuguuucauccaa

SEQ ID NO: 127771 - RNA, 19 nt, Homo sapiens
  misc_RNA (1)...(19): siRNA sense strand
gcacccagauacgcuauuc

SEQ ID NO: 127772 - RNA, 19 nt, Homo sapiens
  misc_RNA (1)...(19): siRNA sense strand
ccgcuuauaucccagagaa

SEQ ID NO: 127773 - RNA, 19 nt, Homo sapiens
  misc_RNA (1)...(19): siRNA sense strand
aaucugcccuuuaaauuag

SEQ ID NO: 127774 - RNA, 19 nt, Homo sapiens
  misc_RNA (1)...(19): siRNA sense strand
ggacauuaauugcccuuuu

SEQ ID NO: 127775 - RNA, 19 nt, Homo sapiens
  misc_RNA (1)...(19): siRNA sense strand
guagaaguaagggacauua

SEQ ID NO: 127776 - RNA, 19 nt, Homo sapiens
  misc_RNA (1)...(19): siRNA sense strand
gcccaacuaugcagacaug

SEQ ID NO: 127777 - RNA, 19 nt, Homo sapiens
  misc_RNA (1)...(19): siRNA sense strand
gaguuucccucgucucugu

SEQ ID NO: 127778 - RNA, 19 nt, Homo sapiens
  misc_RNA (1)...(19): siRNA sense strand
gaacgacaaugccccagaa

SEQ ID NO: 127779 - RNA, 19 nt, Homo sapiens
  misc_RNA (1)...(19): siRNA sense strand
ggacagagacgcgcucaag

SEQ ID NO: 127780 - RNA, 19 nt, Homo sapiens
  misc_RNA (1)...(19): siRNA sense strand
uggaguagaaguagaagua

SEQ ID NO: 127781 - RNA, 19 nt, Homo sapiens
  misc_RNA (1)...(19): siRNA sense strand
caauggauaaugcaggaua

SEQ ID NO: 127782 - RNA, 19 nt, Homo sapiens
  misc_RNA (1)...(19): siRNA sense strand
gaccggaugcacccagaua

SEQ ID NO: 127783 - RNA, 19 nt, Homo sapiens
  misc_RNA (1)...(19): siRNA sense strand
agacagucauggguuaauu

SEQ ID NO: 127784 - RNA, 19 nt, Homo sapiens
  misc_RNA (1)...(19): siRNA sense strand
ggaguagaaguagaaguaa

SEQ ID NO: 127785 - RNA, 19 nt, Homo sapiens
  misc_RNA (1)...(19): siRNA sense strand
gagcccugcuggacagaga

SEQ ID NO: 127786 - RNA, 19 nt, Homo sapiens
  misc_RNA (1)...(19): siRNA sense strand
gaguagaaguagaaguaag

SEQ ID NO: 127787 - RNA, 19 nt, Homo sapiens
  misc_RNA (1)...(19): siRNA sense strand
gcggaagagucaccugauc

SEQ ID NO: 127788 - RNA, 19 nt, Homo sapiens
  misc_RNA (1)...(19): siRNA sense strand
agaacgcccagaucacuua

SEQ ID NO: 127789 - RNA, 19 nt, Homo sapiens
  misc_RNA (1)...(19): siRNA sense strand
gaccaagauucugaggaaa

SEQ ID NO: 127790 - RNA, 19 nt, Homo sapiens
  misc_RNA (1)...(19): siRNA sense strand
ucgugaaagugaauuagaa

SEQ ID NO: 127791 - RNA, 19 nt, Homo sapiens
  misc_RNA (1)...(19): siRNA sense strand
cuuauucccuggcugagaa

SEQ ID NO: 127792 - RNA, 19 nt, Homo sapiens
  misc_RNA (1)...(19): siRNA sense strand
gaaguaagggacauuaacg

SEQ ID NO: 127793 - RNA, 19 nt, Homo sapiens
  misc_RNA (1)...(19): siRNA sense strand
gucaggugauucgguauuu

SEQ ID NO: 127794 - RNA, 19 nt, Homo sapiens
  misc_RNA (1)...(19): siRNA sense strand
gauggaagugcaagcaaug

SEQ ID NO: 127795 - RNA, 19 nt, Homo sapiens
  misc_RNA (1)...(19): siRNA sense strand
uaccgacccugacgaagga

SEQ ID NO: 127796 - RNA, 19 nt, Homo sapiens
  misc_RNA (1)...(19): siRNA sense strand
gagccgacgguaguaagua

SEQ ID NO: 127797 - RNA, 19 nt, Homo sapiens
  misc_RNA (1)...(19): siRNA sense strand
gugauucgguauuuucuaa

SEQ ID NO: 127798 - RNA, 19 nt, Homo sapiens
  misc_RNA (1)...(19): siRNA sense strand
gauaaugcaggauauucug

SEQ ID NO: 127799 - RNA, 19 nt, Homo sapiens
  misc_RNA (1)...(19): siRNA sense strand
ggauaaugcaggauauucu

SEQ ID NO: 127800 - RNA, 19 nt, Homo sapiens
  misc_RNA (1)...(19): siRNA sense strand
gacaaugcgccuuacuuuc

SEQ ID NO: 127801 - RNA, 19 nt, Homo sapiens
  misc_RNA (1)...(19): siRNA sense strand
ggaagugcaagcaauggau

SEQ ID NO: 127802 - RNA, 19 nt, Homo sapiens
  misc_RNA (1)...(19): siRNA sense strand
gguauuccuuccgguaugu

SEQ ID NO: 127803 - RNA, 19 nt, Homo sapiens
  misc_RNA (1)...(19): siRNA sense strand
acauucugauggaggauaa

SEQ ID NO: 127804 - RNA, 19 nt, Homo sapiens
  misc_RNA (1)...(19): siRNA sense strand
ccacgaggagucaggauuc

SEQ ID NO: 127805 - RNA, 19 nt, Homo sapiens
  misc_RNA (1)...(19): siRNA sense strand
uauauggaguagaaguaga

SEQ ID NO: 127806 - RNA, 19 nt, Homo sapiens
  misc_RNA (1)...(19): siRNA sense strand
uuaacgacaaugcgccuua

SEQ ID NO: 127807 - RNA, 19 nt, Homo sapiens
  misc_RNA (1)...(19): siRNA sense strand
gacagucauggguuaauug

SEQ ID NO: 127808 - RNA, 19 nt, Homo sapiens
  misc_RNA (1)...(19): siRNA sense strand
gagaacgcccagaucacuu

SEQ ID NO: 127809 - RNA, 19 nt, Homo sapiens
  misc_RNA (1)...(19): siRNA sense strand
guaauucagggacaauauc

SEQ ID NO: 127810 - RNA, 19 nt, Homo sapiens
  misc_RNA (1)...(19): siRNA sense strand
ucaaugcggaagugaggua

SEQ ID NO: 127811 - RNA, 19 nt, Homo sapiens
  misc_RNA (1)...(19): siRNA sense strand
gaaaaugcagccacugaga

SEQ ID NO: 127812 - RNA, 19 nt, Homo sapiens
  misc_RNA (1)...(19): siRNA sense strand
uagaaguaagggacauuaa

SEQ ID NO: 127813 - RNA, 19 nt, Homo sapiens
  misc_RNA (1)...(19): siRNA sense strand
acgcccagaucacuuauuc

SEQ ID NO: 127814 - RNA, 19 nt, Homo sapiens
  misc_RNA (1)...(19): siRNA sense strand
agagguaggacgcagcuuu

SEQ ID NO: 127815 - RNA, 19 nt, Homo sapiens
  misc_RNA (1)...(19): siRNA sense strand
cagggacaauaucaacaau

SEQ ID NO: 127816 - RNA, 19 nt, Homo sapiens
  misc_RNA (1)...(19): siRNA sense strand
gagguauuccuuccgguau

SEQ ID NO: 127817 - RNA, 19 nt, Homo sapiens
  misc_RNA (1)...(19): siRNA sense strand
ucagggacaauaucaacaa

SEQ ID NO: 127818 - RNA, 19 nt, Homo sapiens
  misc_RNA (1)...(19): siRNA sense strand
gcugagcuccuucgacuac

SEQ ID NO: 127819 - RNA, 19 nt, Homo sapiens
  misc_RNA (1)...(19): siRNA sense strand
agauggaagugcaagcaau

SEQ ID NO: 127820 - RNA, 19 nt, Homo sapiens
  misc_RNA (1)...(19): siRNA sense strand
cguccuacguguccaucaa

SEQ ID NO: 127821 - RNA, 19 nt, Homo sapiens
  misc_RNA (1)...(19): siRNA sense strand
gaacgcccagaucacuuau

SEQ ID NO: 127822 - RNA, 19 nt, Homo sapiens
  misc_RNA (1)...(19): siRNA sense strand
gugaagagaacgcccagau

SEQ ID NO: 127823 - RNA, 19 nt, Homo sapiens
  misc_RNA (1)...(19): siRNA sense strand
uaguuuagucacagacaua

SEQ ID NO: 127824 - RNA, 19 nt, Homo sapiens
  misc_RNA (1)...(19): siRNA sense strand
guaaaugaccaagauucug

SEQ ID NO: 127825 - RNA, 19 nt, Homo sapiens
  misc_RNA (1)...(19): siRNA sense strand
cgugaaagugaauuagaaa

SEQ ID NO: 127826 - RNA, 19 nt, Homo sapiens
  misc_RNA (1)...(19): siRNA sense strand
uguaugcgcugagcuccuu

SEQ ID NO: 127827 - RNA, 19 nt, Homo sapiens
  misc_RNA (1)...(19): siRNA sense strand
gagccaaaguccugaucac

SEQ ID NO: 127828 - RNA, 19 nt, Homo sapiens
  misc_RNA (1)...(19): siRNA sense strand
uaacgacaaugcgccuuac

SEQ ID NO: 127829 - RNA, 19 nt, Homo sapiens
  misc_RNA (1)...(19): siRNA sense strand
gcaguuccgagacuugcaa

SEQ ID NO: 127830 - RNA, 19 nt, Homo sapiens
  misc_RNA (1)...(19): siRNA sense strand
gcuuauaucccagagaaca

SEQ ID NO: 127831 - RNA, 19 nt, Homo sapiens
  misc_RNA (1)...(19): siRNA sense strand
ggccuccuauuccgcuuau

SEQ ID NO: 127832 - RNA, 19 nt, Homo sapiens
  misc_RNA (1)...(19): siRNA sense strand
ccacggaaacucauaucuc

SEQ ID NO: 127833 - RNA, 19 nt, Homo sapiens
  misc_RNA (1)...(19): siRNA sense strand
ccaucaagugucaauuaaa

SEQ ID NO: 127834 - RNA, 19 nt, Homo sapiens
  misc_RNA (1)...(19): siRNA sense strand
acaaugcgccuuacuuucg

SEQ ID NO: 127835 - RNA, 19 nt, Homo sapiens
  misc_RNA (1)...(19): siRNA sense strand
aggcuuuccugcagaccua

SEQ ID NO: 127836 - RNA, 19 nt, Homo sapiens
  misc_RNA (1)...(19): siRNA sense strand
aauggauaaugcaggauau

SEQ ID NO: 127837 - RNA, 19 nt, Homo sapiens
  misc_RNA (1)...(19): siRNA sense strand
uaauucagggacaauauca

SEQ ID NO: 127838 - RNA, 19 nt, Homo sapiens
  misc_RNA (1)...(19): siRNA sense strand
aaaugcagccacugagaug

SEQ ID NO: 127839 - RNA, 19 nt, Homo sapiens
  misc_RNA (1)...(19): siRNA sense strand
gcagcugcuuguagucaac

SEQ ID NO: 127840 - RNA, 19 nt, Homo sapiens
  misc_RNA (1)...(19): siRNA sense strand
aaauggagccgacgguagu

SEQ ID NO: 127841 - RNA, 19 nt, Homo sapiens
  misc_RNA (1)...(19): siRNA sense strand
caaugcgccuuacuuucgu

SEQ ID NO: 127842 - RNA, 19 nt, Homo sapiens
  misc_RNA (1)...(19): siRNA sense strand
gacauucugauggaggaua

SEQ ID NO: 127843 - RNA, 19 nt, Homo sapiens
  misc_RNA (1)...(19): siRNA sense strand
gcaagcaauggauaaugca

SEQ ID NO: 127844 - RNA, 19 nt, Homo sapiens
  misc_RNA (1)...(19): siRNA sense strand
aaaucuagacauucugaug

SEQ ID NO: 127845 - RNA, 19 nt, Homo sapiens
  misc_RNA (1)...(19): siRNA sense strand
gcaacacacugcagaauua

SEQ ID NO: 127846 - RNA, 19 nt, Homo sapiens
  misc_RNA (1)...(19): siRNA sense strand
gaaaucagauggcaguaaa

SEQ ID NO: 127847 - RNA, 19 nt, Homo sapiens
  misc_RNA (1)...(19): siRNA sense strand
gaaagacggaguuuaauuu

SEQ ID NO: 127848 - RNA, 19 nt, Homo sapiens
  misc_RNA (1)...(19): siRNA sense strand
gcagaaauccuaccacuug

SEQ ID NO: 127849 - RNA, 19 nt, Homo sapiens
  misc_RNA (1)...(19): siRNA sense strand
gaagacaccuuuggacaga

SEQ ID NO: 127850 - RNA, 19 nt, Homo sapiens
  misc_RNA (1)...(19): siRNA sense strand
gcucugcgcucuucgauau

SEQ ID NO: 127851 - RNA, 19 nt, Homo sapiens
  misc_RNA (1)...(19): siRNA sense strand
ggaaagacggaguuuaauu

SEQ ID NO: 127852 - RNA, 19 nt, Homo sapiens
  misc_RNA (1)...(19): siRNA sense strand
gaacacauauugcuuugcu

SEQ ID NO: 127853 - RNA, 19 nt, Homo sapiens
  misc_RNA (1)...(19): siRNA sense strand
ggacuuugccuuauuccua

SEQ ID NO: 127854 - RNA, 19 nt, Homo sapiens
  misc_RNA (1)...(19): siRNA sense strand
gaaggugauguuccauuua

SEQ ID NO: 127855 - RNA, 19 nt, Homo sapiens
  misc_RNA (1)...(19): siRNA sense strand
caggaaagacggaguuuaa

SEQ ID NO: 127856 - RNA, 19 nt, Homo sapiens
  misc_RNA (1)...(19): siRNA sense strand
ugacugaugccaaugauaa

SEQ ID NO: 127857 - RNA, 19 nt, Homo sapiens
  misc_RNA (1)...(19): siRNA sense strand
aauuugaccugaacucuaa

SEQ ID NO: 127858 - RNA, 19 nt, Homo sapiens
  misc_RNA (1)...(19): siRNA sense strand
gaauccagaguacaauaua

SEQ ID NO: 127859 - RNA, 19 nt, Homo sapiens
  misc_RNA (1)...(19): siRNA sense strand
aaggugauguuccauuuaa

SEQ ID NO: 127860 - RNA, 19 nt, Homo sapiens
  misc_RNA (1)...(19): siRNA sense strand
gcaguugaguucaggacaa

SEQ ID NO: 127861 - RNA, 19 nt, Homo sapiens
  misc_RNA (1)...(19): siRNA sense strand
guaaauacccugagauggu

SEQ ID NO: 127862 - RNA, 19 nt, Homo sapiens
  misc_RNA (1)...(19): siRNA sense strand
gaggagauaugcgggaaga

SEQ ID NO: 127863 - RNA, 19 nt, Homo sapiens
  misc_RNA (1)...(19): siRNA sense strand
gagcugggaacacauauug

SEQ ID NO: 127864 - RNA, 19 nt, Homo sapiens
  misc_RNA (1)...(19): siRNA sense strand
gggaacacauauugcuuug

SEQ ID NO: 127865 - RNA, 19 nt, Homo sapiens
  misc_RNA (1)...(19): siRNA sense strand
guagugagcaguugaguuc

SEQ ID NO: 127866 - RNA, 19 nt, Homo sapiens
  misc_RNA (1)...(19): siRNA sense strand
caaaguccgugacaaggau

SEQ ID NO: 127867 - RNA, 19 nt, Homo sapiens
  misc_RNA (1)...(19): siRNA sense strand
ggagguagaagucauagau

SEQ ID NO: 127868 - RNA, 19 nt, Homo sapiens
  misc_RNA (1)...(19): siRNA sense strand
ggagaucgaggacauuaau

SEQ ID NO: 127869 - RNA, 19 nt, Homo sapiens
  misc_RNA (1)...(19): siRNA sense strand
gagaaaagcagaaauccua

SEQ ID NO: 127870 - RNA, 19 nt, Homo sapiens
  misc_RNA (1)...(19): siRNA sense strand
uggcacacgauuuauauua

SEQ ID NO: 127871 - RNA, 19 nt, Homo sapiens
  misc_RNA (1)...(19): siRNA sense strand
ugauaaugcuccaguguuc

SEQ ID NO: 127872 - RNA, 19 nt, Homo sapiens
  misc_RNA (1)...(19): siRNA sense strand
gcacacgauuuauauuagg

SEQ ID NO: 127873 - RNA, 19 nt, Homo sapiens
  misc_RNA (1)...(19): siRNA sense strand
cagccuggcacacgauuua

SEQ ID NO: 127874 - RNA, 19 nt, Homo sapiens
  misc_RNA (1)...(19): siRNA sense strand
aggcugagcugcaguuuua

SEQ ID NO: 127875 - RNA, 19 nt, Homo sapiens
  misc_RNA (1)...(19): siRNA sense strand
gcaaugcacaguggaggua

SEQ ID NO: 127876 - RNA, 19 nt, Homo sapiens
  misc_RNA (1)...(19): siRNA sense strand
cagaaauccuaccacuuga

SEQ ID NO: 127877 - RNA, 19 nt, Homo sapiens
  misc_RNA (1)...(19): siRNA sense strand
uaaauuggaaggugauguu

SEQ ID NO: 127878 - RNA, 19 nt, Homo sapiens
  misc_RNA (1)...(19): siRNA sense strand
ucacagucuuccuauauag

SEQ ID NO: 127879 - RNA, 19 nt, Homo sapiens
  misc_RNA (1)...(19): siRNA sense strand
ggcacacgauuuauauuag

SEQ ID NO: 127880 - RNA, 19 nt, Homo sapiens
  misc_RNA (1)...(19): siRNA sense strand
gaguucaggacaagacaua

SEQ ID NO: 127881 - RNA, 19 nt, Homo sapiens
  misc_RNA (1)...(19): siRNA sense strand
gagccucuauuucacaagu

SEQ ID NO: 127882 - RNA, 19 nt, Homo sapiens
  misc_RNA (1)...(19): siRNA sense strand
ggcaguaaauacccugaga

SEQ ID NO: 127883 - RNA, 19 nt, Homo sapiens
  misc_RNA (1)...(19): siRNA sense strand
ggauauugguagcaacaca

SEQ ID NO: 127884 - RNA, 19 nt, Homo sapiens
  misc_RNA (1)...(19): siRNA sense strand
ggccuuauuuccacuuugu

SEQ ID NO: 127885 - RNA, 19 nt, Homo sapiens
  misc_RNA (1)...(19): siRNA sense strand
ggacgguggaggaaugauu

SEQ ID NO: 127886 - RNA, 19 nt, Homo sapiens
  misc_RNA (1)...(19): siRNA sense strand
gcacagauacacguucuag

SEQ ID NO: 127887 - RNA, 19 nt, Homo sapiens
  misc_RNA (1)...(19): siRNA sense strand
gaacuuuuaucacgugaau

SEQ ID NO: 127888 - RNA, 19 nt, Homo sapiens
  misc_RNA (1)...(19): siRNA sense strand
gcgagcagaauccagagua

SEQ ID NO: 127889 - RNA, 19 nt, Homo sapiens
  misc_RNA (1)...(19): siRNA sense strand
gacaaggauuccagacaca

SEQ ID NO: 127890 - RNA, 19 nt, Homo sapiens
  misc_RNA (1)...(19): siRNA sense strand
cuagccagaucacccaauu

SEQ ID NO: 127891 - RNA, 19 nt, Homo sapiens
  misc_RNA (1)...(19): siRNA sense strand
aaucagauggcaguaaaua

SEQ ID NO: 127892 - RNA, 19 nt, Homo sapiens
  misc_RNA (1)...(19): siRNA sense strand
cagauacacguucuaguga

SEQ ID NO: 127893 - RNA, 19 nt, Homo sapiens
  misc_RNA (1)...(19): siRNA sense strand
caauuugaccugaacucua

SEQ ID NO: 127894 - RNA, 19 nt, Homo sapiens
  misc_RNA (1)...(19): siRNA sense strand
ucaguucggagaagccuua

SEQ ID NO: 127895 - RNA, 19 nt, Homo sapiens
  misc_RNA (1)...(19): siRNA sense strand
ccaacggccaagucucuua

SEQ ID NO: 127896 - RNA, 19 nt, Homo sapiens
  misc_RNA (1)...(19): siRNA sense strand
cucacagucuuccuauaua

SEQ ID NO: 127897 - RNA, 19 nt, Homo sapiens
  misc_RNA (1)...(19): siRNA sense strand
cuugugcucuggaauuuga

SEQ ID NO: 127898 - RNA, 19 nt, Homo sapiens
  misc_RNA (1)...(19): siRNA sense strand
cagaauccagaguacaaua

SEQ ID NO: 127899 - RNA, 19 nt, Homo sapiens
  misc_RNA (1)...(19): siRNA sense strand
ucucuacccaaccuaauua

SEQ ID NO: 127900 - RNA, 19 nt, Homo sapiens
  misc_RNA (1)...(19): siRNA sense strand
ucaaugccgagauuacuuu

SEQ ID NO: 127901 - RNA, 19 nt, Homo sapiens
  misc_RNA (1)...(19): siRNA sense strand
guauacagggugagccuuu

SEQ ID NO: 127902 - RNA, 19 nt, Homo sapiens
  misc_RNA (1)...(19): siRNA sense strand
ugaauugacuucccaucag

SEQ ID NO: 127903 - RNA, 19 nt, Homo sapiens
  misc_RNA (1)...(19): siRNA sense strand
cguauaaauuagugacaga

SEQ ID NO: 127904 - RNA, 19 nt, Homo sapiens
  misc_RNA (1)...(19): siRNA sense strand
gcucaaaguccgugacaag

SEQ ID NO: 127905 - RNA, 19 nt, Homo sapiens
  misc_RNA (1)...(19): siRNA sense strand
gggugucaaugccgagauu

SEQ ID NO: 127906 - RNA, 19 nt, Homo sapiens
  misc_RNA (1)...(19): siRNA sense strand
agacauacuuugcggugau

SEQ ID NO: 127907 - RNA, 19 nt, Homo sapiens
  misc_RNA (1)...(19): siRNA sense strand
cagccuggucucuguguua

SEQ ID NO: 127908 - RNA, 19 nt, Homo sapiens
  misc_RNA (1)...(19): siRNA sense strand
gcaucacccugcacauugg

SEQ ID NO: 127909 - RNA, 19 nt, Homo sapiens
  misc_RNA (1)...(19): siRNA sense strand
guucagcguccaggaguua

SEQ ID NO: 127910 - RNA, 19 nt, Homo sapiens
  misc_RNA (1)...(19): siRNA sense strand
cagugaagcuagccagauc

SEQ ID NO: 127911 - RNA, 19 nt, Homo sapiens
  misc_RNA (1)...(19): siRNA sense strand
acccugagaugguauugaa

SEQ ID NO: 127912 - RNA, 19 nt, Homo sapiens
  misc_RNA (1)...(19): siRNA sense strand
gacauacuuugcggugauu

SEQ ID NO: 127913 - RNA, 19 nt, Homo sapiens
  misc_RNA (1)...(19): siRNA sense strand
acagauacacguucuagug

SEQ ID NO: 127914 - RNA, 19 nt, Homo sapiens
  misc_RNA (1)...(19): siRNA sense strand
guggagaucgaggacauua

SEQ ID NO: 127915 - RNA, 19 nt, Homo sapiens
  misc_RNA (1)...(19): siRNA sense strand
cuucaagaaacacguauaa

SEQ ID NO: 127916 - RNA, 19 nt, Homo sapiens
  misc_RNA (1)...(19): siRNA sense strand
cagacacaauggagaagug

SEQ ID NO: 127917 - RNA, 19 nt, Homo sapiens
  misc_RNA (1)...(19): siRNA sense strand
gucaaagaauauuccauag

SEQ ID NO: 127918 - RNA, 19 nt, Homo sapiens
  misc_RNA (1)...(19): siRNA sense strand
uuaaugaccacacgccaaa

SEQ ID NO: 127919 - RNA, 19 nt, Homo sapiens
  misc_RNA (1)...(19): siRNA sense strand
cauccuacguguccauaag

SEQ ID NO: 127920 - RNA, 19 nt, Homo sapiens
  misc_RNA (1)...(19): siRNA sense strand
agcgggagcugucauccua

SEQ ID NO: 127921 - RNA, 19 nt, Homo sapiens
  misc_RNA (1)...(19): siRNA sense strand
ucucacagucuuccuauau

SEQ ID NO: 127922 - RNA, 19 nt, Homo sapiens
  misc_RNA (1)...(19): siRNA sense strand
cagcaucacccugcacauu

SEQ ID NO: 127923 - RNA, 19 nt, Homo sapiens
  misc_RNA (1)...(19): siRNA sense strand
gcacaguggagguagaagu

SEQ ID NO: 127924 - RNA, 19 nt, Homo sapiens
  misc_RNA (1)...(19): siRNA sense strand
ucuagugacugaugccaau

SEQ ID NO: 127925 - RNA, 19 nt, Homo sapiens
  misc_RNA (1)...(19): siRNA sense strand
gauacacguucuagugacu

SEQ ID NO: 127926 - RNA, 19 nt, Homo sapiens
  misc_RNA (1)...(19): siRNA sense strand
aauccuaccacuugacuuu

SEQ ID NO: 127927 - RNA, 19 nt, Homo sapiens
  misc_RNA (1)...(19): siRNA sense strand
ggagauaugcgggaagaag

SEQ ID NO: 127928 - RNA, 19 nt, Homo sapiens
  misc_RNA (1)...(19): siRNA sense strand
caacucagucccagugauc

SEQ ID NO: 127929 - RNA, 19 nt, Homo sapiens
  misc_RNA (1)...(19): siRNA sense strand
gaaauccuaccacuugacu

SEQ ID NO: 127930 - RNA, 19 nt, Homo sapiens
  misc_RNA (1)...(19): siRNA sense strand
gacggaguuuaauuuccua

SEQ ID NO: 127931 - RNA, 19 nt, Homo sapiens
  misc_RNA (1)...(19): siRNA sense strand
gcagaauuaccaacucagu

SEQ ID NO: 127932 - RNA, 19 nt, Homo sapiens
  misc_RNA (1)...(19): siRNA sense strand
gcaagggacgguggaggaa

SEQ ID NO: 127933 - RNA, 19 nt, Homo sapiens
  misc_RNA (1)...(19): siRNA sense strand
cagcuugugcucuggaauu

SEQ ID NO: 127934 - RNA, 19 nt, Homo sapiens
  misc_RNA (1)...(19): siRNA sense strand
agacaccuuuggacagaga

SEQ ID NO: 127935 - RNA, 19 nt, Homo sapiens
  misc_RNA (1)...(19): siRNA sense strand
guucggagaagccuuacuu

SEQ ID NO: 127936 - RNA, 19 nt, Homo sapiens
  misc_RNA (1)...(19): siRNA sense strand
ccuggucucuguguuaaau

SEQ ID NO: 127937 - RNA, 19 nt, Homo sapiens
  misc_RNA (1)...(19): siRNA sense strand
ggacgaccgcaacgacaau

SEQ ID NO: 127938 - RNA, 19 nt, Homo sapiens
  misc_RNA (1)...(19): siRNA sense strand
aguguucagucaagacgua

SEQ ID NO: 127939 - RNA, 19 nt, Homo sapiens
  misc_RNA (1)...(19): siRNA sense strand
aaagacggaguuuaauuuc

SEQ ID NO: 127940 - RNA, 19 nt, Homo sapiens
  misc_RNA (1)...(19): siRNA sense strand
uaaauccgaauccgugguu

SEQ ID NO: 127941 - RNA, 19 nt, Homo sapiens
  misc_RNA (1)...(19): siRNA sense strand
gccuggagccucuauuuca

SEQ ID NO: 127942 - RNA, 19 nt, Homo sapiens
  misc_RNA (1)...(19): siRNA sense strand
ucaaaguccgugacaagga

SEQ ID NO: 127943 - RNA, 19 nt, Homo sapiens
  misc_RNA (1)...(19): siRNA sense strand
gugaauugacuucccauca

SEQ ID NO: 127944 - RNA, 19 nt, Homo sapiens
  misc_RNA (1)...(19): siRNA sense strand
aggaggugcugccggauau

SEQ ID NO: 127945 - RNA, 19 nt, Homo sapiens
  misc_RNA (1)...(19): siRNA sense strand
gcaacacacugcagaauua

SEQ ID NO: 127946 - RNA, 19 nt, Homo sapiens
  misc_RNA (1)...(19): siRNA sense strand
gaaaucagauggcaguaaa

SEQ ID NO: 127947 - RNA, 19 nt, Homo sapiens
  misc_RNA (1)...(19): siRNA sense strand
gaaagacggaguuuaauuu

SEQ ID NO: 127948 - RNA, 19 nt, Homo sapiens
  misc_RNA (1)...(19): siRNA sense strand
gcagaaauccuaccacuug

SEQ ID NO: 127949 - RNA, 19 nt, Homo sapiens
  misc_RNA (1)...(19): siRNA sense strand
gaagacaccuuuggacaga

SEQ ID NO: 127950 - RNA, 19 nt, Homo sapiens
  misc_RNA (1)...(19): siRNA sense strand
gcucugcgcucuucgauau

SEQ ID NO: 127951 - RNA, 19 nt, Homo sapiens
  misc_RNA (1)...(19): siRNA sense strand
ggaaagacggaguuuaauu

SEQ ID NO: 127952 - RNA, 19 nt, Homo sapiens
  misc_RNA (1)...(19): siRNA sense strand
gaacacauauugcuuugcu

SEQ ID NO: 127953 - RNA, 19 nt, Homo sapiens
  misc_RNA (1)...(19): siRNA sense strand
ggacuuugccuuauuccua

SEQ ID NO: 127954 - RNA, 19 nt, Homo sapiens
  misc_RNA (1)...(19): siRNA sense strand
gaaggugauguuccauuua

SEQ ID NO: 127955 - RNA, 19 nt, Homo sapiens
  misc_RNA (1)...(19): siRNA sense strand
caggaaagacggaguuuaa

SEQ ID NO: 127956 - RNA, 19 nt, Homo sapiens
  misc_RNA (1)...(19): siRNA sense strand
ugacugaugccaaugauaa

SEQ ID NO: 127957 - RNA, 19 nt, Homo sapiens
  misc_RNA (1)...(19): siRNA sense strand
aauuugaccugaacucuaa

SEQ ID NO: 127958 - RNA, 19 nt, Homo sapiens
  misc_RNA (1)...(19): siRNA sense strand
gaauccagaguacaauaua

SEQ ID NO: 127959 - RNA, 19 nt, Homo sapiens
  misc_RNA (1)...(19): siRNA sense strand
aaggugauguuccauuuaa

SEQ ID NO: 127960 - RNA, 19 nt, Homo sapiens
  misc_RNA (1)...(19): siRNA sense strand
gcaguugaguucaggacaa

SEQ ID NO: 127961 - RNA, 19 nt, Homo sapiens
  misc_RNA (1)...(19): siRNA sense strand
guaaauacccugagauggu

SEQ ID NO: 127962 - RNA, 19 nt, Homo sapiens
  misc_RNA (1)...(19): siRNA sense strand
gaggagauaugcgggaaga

SEQ ID NO: 127963 - RNA, 19 nt, Homo sapiens
  misc_RNA (1)...(19): siRNA sense strand
gagcugggaacacauauug

SEQ ID NO: 127964 - RNA, 19 nt, Homo sapiens
  misc_RNA (1)...(19): siRNA sense strand
gggaacacauauugcuuug

SEQ ID NO: 127965 - RNA, 19 nt, Homo sapiens
  misc_RNA (1)...(19): siRNA sense strand
guagugagcaguugaguuc

SEQ ID NO: 127966 - RNA, 19 nt, Homo sapiens
  misc_RNA (1)...(19): siRNA sense strand
caaaguccgugacaaggau

SEQ ID NO: 127967 - RNA, 19 nt, Homo sapiens
  misc_RNA (1)...(19): siRNA sense strand
ggagguagaagucauagau

SEQ ID NO: 127968 - RNA, 19 nt, Homo sapiens
  misc_RNA (1)...(19): siRNA sense strand
ggagaucgaggacauuaau

SEQ ID NO: 127969 - RNA, 19 nt, Homo sapiens
  misc_RNA (1)...(19): siRNA sense strand
gagaaaagcagaaauccua

SEQ ID NO: 127970 - RNA, 19 nt, Homo sapiens
  misc_RNA (1)...(19): siRNA sense strand
uggcacacgauuuauauua

SEQ ID NO: 127971 - RNA, 19 nt, Homo sapiens
  misc_RNA (1)...(19): siRNA sense strand
ugauaaugcuccaguguuc

SEQ ID NO: 127972 - RNA, 19 nt, Homo sapiens
  misc_RNA (1)...(19): siRNA sense strand
gcacacgauuuauauuagg

SEQ ID NO: 127973 - RNA, 19 nt, Homo sapiens
  misc_RNA (1)...(19): siRNA sense strand
cagccuggcacacgauuua

SEQ ID NO: 127974 - RNA, 19 nt, Homo sapiens
  misc_RNA (1)...(19): siRNA sense strand
aggcugagcugcaguuuua

SEQ ID NO: 127975 - RNA, 19 nt, Homo sapiens
  misc_RNA (1)...(19): siRNA sense strand
gcaaugcacaguggaggua

SEQ ID NO: 127976 - RNA, 19 nt, Homo sapiens
  misc_RNA (1)...(19): siRNA sense strand
cagaaauccuaccacuuga

SEQ ID NO: 127977 - RNA, 19 nt, Homo sapiens
  misc_RNA (1)...(19): siRNA sense strand
uaaauuggaaggugauguu

SEQ ID NO: 127978 - RNA, 19 nt, Homo sapiens
  misc_RNA (1)...(19): siRNA sense strand
ucacagucuuccuauauag

SEQ ID NO: 127979 - RNA, 19 nt, Homo sapiens
  misc_RNA (1)...(19): siRNA sense strand
ggcacacgauuuauauuag

SEQ ID NO: 127980 - RNA, 19 nt, Homo sapiens
  misc_RNA (1)...(19): siRNA sense strand
gaguucaggacaagacaua

SEQ ID NO: 127981 - RNA, 19 nt, Homo sapiens
  misc_RNA (1)...(19): siRNA sense strand
gagccucuauuucacaagu

SEQ ID NO: 127982 - RNA, 19 nt, Homo sapiens
  misc_RNA (1)...(19): siRNA sense strand
ggcaguaaauacccugaga

SEQ ID NO: 127983 - RNA, 19 nt, Homo sapiens
  misc_RNA (1)...(19): siRNA sense strand
ggauauugguagcaacaca

SEQ ID NO: 127984 - RNA, 19 nt, Homo sapiens
  misc_RNA (1)...(19): siRNA sense strand
ggccuuauuuccacuuugu

SEQ ID NO: 127985 - RNA, 19 nt, Homo sapiens
  misc_RNA (1)...(19): siRNA sense strand
ggacgguggaggaaugauu

SEQ ID NO: 127986 - RNA, 19 nt, Homo sapiens
  misc_RNA (1)...(19): siRNA sense strand
gcacagauacacguucuag

SEQ ID NO: 127987 - RNA, 19 nt, Homo sapiens
  misc_RNA (1)...(19): siRNA sense strand
gaacuuuuaucacgugaau

SEQ ID NO: 127988 - RNA, 19 nt, Homo sapiens
  misc_RNA (1)...(19): siRNA sense strand
gcgagcagaauccagagua

SEQ ID NO: 127989 - RNA, 19 nt, Homo sapiens
  misc_RNA (1)...(19): siRNA sense strand
gacaaggauuccagacaca

SEQ ID NO: 127990 - RNA, 19 nt, Homo sapiens
  misc_RNA (1)...(19): siRNA sense strand
cuagccagaucacccaauu

SEQ ID NO: 127991 - RNA, 19 nt, Homo sapiens
  misc_RNA (1)...(19): siRNA sense strand
aaucagauggcaguaaaua

SEQ ID NO: 127992 - RNA, 19 nt, Homo sapiens
  misc_RNA (1)...(19): siRNA sense strand
cagauacacguucuaguga

SEQ ID NO: 127993 - RNA, 19 nt, Homo sapiens
  misc_RNA (1)...(19): siRNA sense strand
caauuugaccugaacucua

SEQ ID NO: 127994 - RNA, 19 nt, Homo sapiens
  misc_RNA (1)...(19): siRNA sense strand
ucaguucggagaagccuua

SEQ ID NO: 127995 - RNA, 19 nt, Homo sapiens
  misc_RNA (1)...(19): siRNA sense strand
ccaacggccaagucucuua

SEQ ID NO: 127996 - RNA, 19 nt, Homo sapiens
  misc_RNA (1)...(19): siRNA sense strand
cucacagucuuccuauaua

SEQ ID NO: 127997 - RNA, 19 nt, Homo sapiens
  misc_RNA (1)...(19): siRNA sense strand
cuugugcucuggaauuuga

SEQ ID NO: 127998 - RNA, 19 nt, Homo sapiens
  misc_RNA (1)...(19): siRNA sense strand
cagaauccagaguacaaua

SEQ ID NO: 127999 - RNA, 19 nt, Homo sapiens
  misc_RNA (1)...(19): siRNA sense strand
ucucuacccaaccuaauua

SEQ ID NO: 128000 - RNA, 19 nt, Homo sapiens
  misc_RNA (1)...(19): siRNA sense strand
ucaaugccgagauuacuuu

SEQ ID NO: 128001 - RNA, 19 nt, Homo sapiens
  misc_RNA (1)...(19): siRNA sense strand
guauacagggugagccuuu

SEQ ID NO: 128002 - RNA, 19 nt, Homo sapiens
  misc_RNA (1)...(19): siRNA sense strand
ugaauugacuucccaucag

SEQ ID NO: 128003 - RNA, 19 nt, Homo sapiens
  misc_RNA (1)...(19): siRNA sense strand
cguauaaauuagugacaga

SEQ ID NO: 128004 - RNA, 19 nt, Homo sapiens
  misc_RNA (1)...(19): siRNA sense strand
gcucaaaguccgugacaag

SEQ ID NO: 128005 - RNA, 19 nt, Homo sapiens
  misc_RNA (1)...(19): siRNA sense strand
gggugucaaugccgagauu

SEQ ID NO: 128006 - RNA, 19 nt, Homo sapiens
  misc_RNA (1)...(19): siRNA sense strand
agacauacuuugcggugau

SEQ ID NO: 128007 - RNA, 19 nt, Homo sapiens
  misc_RNA (1)...(19): siRNA sense strand
cagccuggucucuguguua

SEQ ID NO: 128008 - RNA, 19 nt, Homo sapiens
  misc_RNA (1)...(19): siRNA sense strand
gcaucacccugcacauugg

SEQ ID NO: 128009 - RNA, 19 nt, Homo sapiens
  misc_RNA (1)...(19): siRNA sense strand
guucagcguccaggaguua

SEQ ID NO: 128010 - RNA, 19 nt, Homo sapiens
  misc_RNA (1)...(19): siRNA sense strand
cagugaagcuagccagauc

SEQ ID NO: 128011 - RNA, 19 nt, Homo sapiens
  misc_RNA (1)...(19): siRNA sense strand
acccugagaugguauugaa

SEQ ID NO: 128012 - RNA, 19 nt, Homo sapiens
  misc_RNA (1)...(19): siRNA sense strand
gacauacuuugcggugauu

SEQ ID NO: 128013 - RNA, 19 nt, Homo sapiens
  misc_RNA (1)...(19): siRNA sense strand
acagauacacguucuagug

SEQ ID NO: 128014 - RNA, 19 nt, Homo sapiens
  misc_RNA (1)...(19): siRNA sense strand
guggagaucgaggacauua

SEQ ID NO: 128015 - RNA, 19 nt, Homo sapiens
  misc_RNA (1)...(19): siRNA sense strand
cuucaagaaacacguauaa

SEQ ID NO: 128016 - RNA, 19 nt, Homo sapiens
  misc_RNA (1)...(19): siRNA sense strand
cagacacaauggagaagug

SEQ ID NO: 128017 - RNA, 19 nt, Homo sapiens
  misc_RNA (1)...(19): siRNA sense strand
gucaaagaauauuccauag

SEQ ID NO: 128018 - RNA, 19 nt, Homo sapiens
  misc_RNA (1)...(19): siRNA sense strand
uuaaugaccacacgccaaa

SEQ ID NO: 128019 - RNA, 19 nt, Homo sapiens
  misc_RNA (1)...(19): siRNA sense strand
cauccuacguguccauaag

SEQ ID NO: 128020 - RNA, 19 nt, Homo sapiens
  misc_RNA (1)...(19): siRNA sense strand
agcgggagcugucauccua

SEQ ID NO: 128021 - RNA, 19 nt, Homo sapiens
  misc_RNA (1)...(19): siRNA sense strand
ucucacagucuuccuauau

SEQ ID NO: 128022 - RNA, 19 nt, Homo sapiens
  misc_RNA (1)...(19): siRNA sense strand
cagcaucacccugcacauu

SEQ ID NO: 128023 - RNA, 19 nt, Homo sapiens
  misc_RNA (1)...(19): siRNA sense strand
gcacaguggagguagaagu

SEQ ID NO: 128024 - RNA, 19 nt, Homo sapiens
  misc_RNA (1)...(19): siRNA sense strand
ucuagugacugaugccaau

SEQ ID NO: 128025 - RNA, 19 nt, Homo sapiens
  misc_RNA (1)...(19): siRNA sense strand
gauacacguucuagugacu

SEQ ID NO: 128026 - RNA, 19 nt, Homo sapiens
  misc_RNA (1)...(19): siRNA sense strand
aauccuaccacuugacuuu

SEQ ID NO: 128027 - RNA, 19 nt, Homo sapiens
  misc_RNA (1)...(19): siRNA sense strand
ggagauaugcgggaagaag

SEQ ID NO: 128028 - RNA, 19 nt, Homo sapiens
  misc_RNA (1)...(19): siRNA sense strand
caacucagucccagugauc

SEQ ID NO: 128029 - RNA, 19 nt, Homo sapiens
  misc_RNA (1)...(19): siRNA sense strand
gaaauccuaccacuugacu

SEQ ID NO: 128030 - RNA, 19 nt, Homo sapiens
  misc_RNA (1)...(19): siRNA sense strand
gacggaguuuaauuuccua

SEQ ID NO: 128031 - RNA, 19 nt, Homo sapiens
  misc_RNA (1)...(19): siRNA sense strand
gcagaauuaccaacucagu

SEQ ID NO: 128032 - RNA, 19 nt, Homo sapiens
  misc_RNA (1)...(19): siRNA sense strand
gcaagggacgguggaggaa

SEQ ID NO: 128033 - RNA, 19 nt, Homo sapiens
  misc_RNA (1)...(19): siRNA sense strand
cagcuugugcucuggaauu

SEQ ID NO: 128034 - RNA, 19 nt, Homo sapiens
  misc_RNA (1)...(19): siRNA sense strand
agacaccuuuggacagaga

SEQ ID NO: 128035 - RNA, 19 nt, Homo sapiens
  misc_RNA (1)...(19): siRNA sense strand
guucggagaagccuuacuu

SEQ ID NO: 128036 - RNA, 19 nt, Homo sapiens
  misc_RNA (1)...(19): siRNA sense strand
ccuggucucuguguuaaau

SEQ ID NO: 128037 - RNA, 19 nt, Homo sapiens
  misc_RNA (1)...(19): siRNA sense strand
ggacgaccgcaacgacaau

SEQ ID NO: 128038 - RNA, 19 nt, Homo sapiens
  misc_RNA (1)...(19): siRNA sense strand
aguguucagucaagacgua

SEQ ID NO: 128039 - RNA, 19 nt, Homo sapiens
  misc_RNA (1)...(19): siRNA sense strand
aaagacggaguuuaauuuc

SEQ ID NO: 128040 - RNA, 19 nt, Homo sapiens
  misc_RNA (1)...(19): siRNA sense strand
uaaauccgaauccgugguu

SEQ ID NO: 128041 - RNA, 19 nt, Homo sapiens
  misc_RNA (1)...(19): siRNA sense strand
gccuggagccucuauuuca

SEQ ID NO: 128042 - RNA, 19 nt, Homo sapiens
  misc_RNA (1)...(19): siRNA sense strand
ucaaaguccgugacaagga

SEQ ID NO: 128043 - RNA, 19 nt, Homo sapiens
  misc_RNA (1)...(19): siRNA sense strand
gugaauugacuucccauca

SEQ ID NO: 128044 - RNA, 19 nt, Homo sapiens
  misc_RNA (1)...(19): siRNA sense strand
aggaggugcugccggauau

SEQ ID NO: 128045 - RNA, 19 nt, Homo sapiens
  misc_RNA (1)...(19): siRNA sense strand
gcacagaccuggccauuga

SEQ ID NO: 128046 - RNA, 19 nt, Homo sapiens
  misc_RNA (1)...(19): siRNA sense strand
gcacuacuguggacucuua

SEQ ID NO: 128047 - RNA, 19 nt, Homo sapiens
  misc_RNA (1)...(19): siRNA sense strand
gagaaccgcucacacuaua

SEQ ID NO: 128048 - RNA, 19 nt, Homo sapiens
  misc_RNA (1)...(19): siRNA sense strand
gggcucaccuccucaguua

SEQ ID NO: 128049 - RNA, 19 nt, Homo sapiens
  misc_RNA (1)...(19): siRNA sense strand
ugacaacccuccucaguuu

SEQ ID NO: 128050 - RNA, 19 nt, Homo sapiens
  misc_RNA (1)...(19): siRNA sense strand
ggaguaugcugccaguaua

SEQ ID NO: 128051 - RNA, 19 nt, Homo sapiens
  misc_RNA (1)...(19): siRNA sense strand
acacggagcugcacaucua

SEQ ID NO: 128052 - RNA, 19 nt, Homo sapiens
  misc_RNA (1)...(19): siRNA sense strand
gcuugaaccucuagacuuu

SEQ ID NO: 128053 - RNA, 19 nt, Homo sapiens
  misc_RNA (1)...(19): siRNA sense strand
gggcgacucuccuaccaua

SEQ ID NO: 128054 - RNA, 19 nt, Homo sapiens
  misc_RNA (1)...(19): siRNA sense strand
gcaccugccuucucacaga

SEQ ID NO: 128055 - RNA, 19 nt, Homo sapiens
  misc_RNA (1)...(19): siRNA sense strand
ccagaggacuuucuacaau

SEQ ID NO: 128056 - RNA, 19 nt, Homo sapiens
  misc_RNA (1)...(19): siRNA sense strand
gccgauggcuucaguguug

SEQ ID NO: 128057 - RNA, 19 nt, Homo sapiens
  misc_RNA (1)...(19): siRNA sense strand
ccaauggucaggucacuua

SEQ ID NO: 128058 - RNA, 19 nt, Homo sapiens
  misc_RNA (1)...(19): siRNA sense strand
gcacgucacugaugucaac

SEQ ID NO: 128059 - RNA, 19 nt, Homo sapiens
  misc_RNA (1)...(19): siRNA sense strand
caauugagguccaggaugu

SEQ ID NO: 128060 - RNA, 19 nt, Homo sapiens
  misc_RNA (1)...(19): siRNA sense strand
ugcaagaugugaaugauaa

SEQ ID NO: 128061 - RNA, 19 nt, Homo sapiens
  misc_RNA (1)...(19): siRNA sense strand
caggaucccuucaguguug

SEQ ID NO: 128062 - RNA, 19 nt, Homo sapiens
  misc_RNA (1)...(19): siRNA sense strand
gaucguguccucuucauug

SEQ ID NO: 128063 - RNA, 19 nt, Homo sapiens
  misc_RNA (1)...(19): siRNA sense strand
ggaugaagcucggccaugu

SEQ ID NO: 128064 - RNA, 19 nt, Homo sapiens
  misc_RNA (1)...(19): siRNA sense strand
ggagagggaugccuauaac

SEQ ID NO: 128065 - RNA, 19 nt, Homo sapiens
  misc_RNA (1)...(19): siRNA sense strand
ggaggcgucucuagcgaaa

SEQ ID NO: 128066 - RNA, 19 nt, Homo sapiens
  misc_RNA (1)...(19): siRNA sense strand
gaacacuggugacgacucu

SEQ ID NO: 128067 - RNA, 19 nt, Homo sapiens
  misc_RNA (1)...(19): siRNA sense strand
gagcaacuacaguauguuu

SEQ ID NO: 128068 - RNA, 19 nt, Homo sapiens
  misc_RNA (1)...(19): siRNA sense strand
ucaaguccaugguauaugu

SEQ ID NO: 128069 - RNA, 19 nt, Homo sapiens
  misc_RNA (1)...(19): siRNA sense strand
ggacucuucucccuagaug

SEQ ID NO: 128070 - RNA, 19 nt, Homo sapiens
  misc_RNA (1)...(19): siRNA sense strand
ggaugaguaugacccugua

SEQ ID NO: 128071 - RNA, 19 nt, Homo sapiens
  misc_RNA (1)...(19): siRNA sense strand
acaacgagcugagcacgua

SEQ ID NO: 128072 - RNA, 19 nt, Homo sapiens
  misc_RNA (1)...(19): siRNA sense strand
gagagaaccgcucacacua

SEQ ID NO: 128073 - RNA, 19 nt, Homo sapiens
  misc_RNA (1)...(19): siRNA sense strand
ccaaugggcaguugcagua

SEQ ID NO: 128074 - RNA, 19 nt, Homo sapiens
  misc_RNA (1)...(19): siRNA sense strand
cgacucagguguuaacagu

SEQ ID NO: 128075 - RNA, 19 nt, Homo sapiens
  misc_RNA (1)...(19): siRNA sense strand
ccacaccacccauauuuga

SEQ ID NO: 128076 - RNA, 19 nt, Homo sapiens
  misc_RNA (1)...(19): siRNA sense strand
uugaaagccugacacagua

SEQ ID NO: 128077 - RNA, 19 nt, Homo sapiens
  misc_RNA (1)...(19): siRNA sense strand
caaugcaccugccuucuca

SEQ ID NO: 128078 - RNA, 19 nt, Homo sapiens
  misc_RNA (1)...(19): siRNA sense strand
gucagaagaugcguuauug

SEQ ID NO: 128079 - RNA, 19 nt, Homo sapiens
  misc_RNA (1)...(19): siRNA sense strand
agaaggagcugggcauugu

SEQ ID NO: 128080 - RNA, 19 nt, Homo sapiens
  misc_RNA (1)...(19): siRNA sense strand
gccagugucuucacagaga

SEQ ID NO: 128081 - RNA, 19 nt, Homo sapiens
  misc_RNA (1)...(19): siRNA sense strand
ccacuggugugaucauugu

SEQ ID NO: 128082 - RNA, 19 nt, Homo sapiens
  misc_RNA (1)...(19): siRNA sense strand
gaaccgcucacacuauaug

SEQ ID NO: 128083 - RNA, 19 nt, Homo sapiens
  misc_RNA (1)...(19): siRNA sense strand
gcuagugacuggagaggau

SEQ ID NO: 128084 - RNA, 19 nt, Homo sapiens
  misc_RNA (1)...(19): siRNA sense strand
ugaccaugcuccagccuuu

SEQ ID NO: 128085 - RNA, 19 nt, Homo sapiens
  misc_RNA (1)...(19): siRNA sense strand
gcgaguggcugacaucaac

SEQ ID NO: 128086 - RNA, 19 nt, Homo sapiens
  misc_RNA (1)...(19): siRNA sense strand
gagaucaaccugacagugu

SEQ ID NO: 128087 - RNA, 19 nt, Homo sapiens
  misc_RNA (1)...(19): siRNA sense strand
ugcaacagcugucugaaga

SEQ ID NO: 128088 - RNA, 19 nt, Homo sapiens
  misc_RNA (1)...(19): siRNA sense strand
cagaggacuuucuacaaug

SEQ ID NO: 128089 - RNA, 19 nt, Homo sapiens
  misc_RNA (1)...(19): siRNA sense strand
gagggaugccuauaacuug

SEQ ID NO: 128090 - RNA, 19 nt, Homo sapiens
  misc_RNA (1)...(19): siRNA sense strand
cgugagaucugggcugaaa

SEQ ID NO: 128091 - RNA, 19 nt, Homo sapiens
  misc_RNA (1)...(19): siRNA sense strand
ugacagugguggccucaga

SEQ ID NO: 128092 - RNA, 19 nt, Homo sapiens
  misc_RNA (1)...(19): siRNA sense strand
caaggcagcccuccucgaa

SEQ ID NO: 128093 - RNA, 19 nt, Homo sapiens
  misc_RNA (1)...(19): siRNA sense strand
gggccucccuauacaggua

SEQ ID NO: 128094 - RNA, 19 nt, Homo sapiens
  misc_RNA (1)...(19): siRNA sense strand
ugacacugcuggacaucaa

SEQ ID NO: 128095 - RNA, 19 nt, Homo sapiens
  misc_RNA (1)...(19): siRNA sense strand
cgacaaugcaccugccuuu

SEQ ID NO: 128096 - RNA, 19 nt, Homo sapiens
  misc_RNA (1)...(19): siRNA sense strand
caaccagaaugaacacagu

SEQ ID NO: 128097 - RNA, 19 nt, Homo sapiens
  misc_RNA (1)...(19): siRNA sense strand
ccgauggccugguucugua

SEQ ID NO: 128098 - RNA, 19 nt, Homo sapiens
  misc_RNA (1)...(19): siRNA sense strand
ggcaccagcuuuccacuuc

SEQ ID NO: 128099 - RNA, 19 nt, Homo sapiens
  misc_RNA (1)...(19): siRNA sense strand
ggaggagccuuugccuuca

SEQ ID NO: 128100 - RNA, 19 nt, Homo sapiens
  misc_RNA (1)...(19): siRNA sense strand
cagcuccucucauguacuu

SEQ ID NO: 128101 - RNA, 19 nt, Homo sapiens
  misc_RNA (1)...(19): siRNA sense strand
gcaagaugccaacgacaau

SEQ ID NO: 128102 - RNA, 19 nt, Homo sapiens
  misc_RNA (1)...(19): siRNA sense strand
gacaaucagcccuccauga

SEQ ID NO: 128103 - RNA, 19 nt, Homo sapiens
  misc_RNA (1)...(19): siRNA sense strand
gcgagugcccuuugacuau

SEQ ID NO: 128104 - RNA, 19 nt, Homo sapiens
  misc_RNA (1)...(19): siRNA sense strand
gaaccucuagacuuugaaa

SEQ ID NO: 128105 - RNA, 19 nt, Homo sapiens
  misc_RNA (1)...(19): siRNA sense strand
ggacccaucaggagccuuu

SEQ ID NO: 128106 - RNA, 19 nt, Homo sapiens
  misc_RNA (1)...(19): siRNA sense strand
gaguggcuguggaggauga

SEQ ID NO: 128107 - RNA, 19 nt, Homo sapiens
  misc_RNA (1)...(19): siRNA sense strand
ggaguacagcguccucuug

SEQ ID NO: 128108 - RNA, 19 nt, Homo sapiens
  misc_RNA (1)...(19): siRNA sense strand
gggaguaugcugccaguau

SEQ ID NO: 128109 - RNA, 19 nt, Homo sapiens
  misc_RNA (1)...(19): siRNA sense strand
ugaguaugacccuguauuu

SEQ ID NO: 128110 - RNA, 19 nt, Homo sapiens
  misc_RNA (1)...(19): siRNA sense strand
gcacugaacagcucaacag

SEQ ID NO: 128111 - RNA, 19 nt, Homo sapiens
  misc_RNA (1)...(19): siRNA sense strand
uaucaggacuguugcaaac

SEQ ID NO: 128112 - RNA, 19 nt, Homo sapiens
  misc_RNA (1)...(19): siRNA sense strand
gcucguugcucgcaucucu

SEQ ID NO: 128113 - RNA, 19 nt, Homo sapiens
  misc_RNA (1)...(19): siRNA sense strand
ucgcucggcucaaggauga

SEQ ID NO: 128114 - RNA, 19 nt, Homo sapiens
  misc_RNA (1)...(19): siRNA sense strand
ggaggcggaugaccuggau

SEQ ID NO: 128115 - RNA, 19 nt, Homo sapiens
  misc_RNA (1)...(19): siRNA sense strand
gagaacagugucccagcua

SEQ ID NO: 128116 - RNA, 19 nt, Homo sapiens
  misc_RNA (1)...(19): siRNA sense strand
agaucaaccugacagugua

SEQ ID NO: 128117 - RNA, 19 nt, Homo sapiens
  misc_RNA (1)...(19): siRNA sense strand
ggccauguacggcuuauga

SEQ ID NO: 128118 - RNA, 19 nt, Homo sapiens
  misc_RNA (1)...(19): siRNA sense strand
caagacagcgucaucuauc

SEQ ID NO: 128119 - RNA, 19 nt, Homo sapiens
  misc_RNA (1)...(19): siRNA sense strand
ucaucuaucuggugugugu

SEQ ID NO: 128120 - RNA, 19 nt, Homo sapiens
  misc_RNA (1)...(19): siRNA sense strand
ccucugagcaccucuauca

SEQ ID NO: 128121 - RNA, 19 nt, Homo sapiens
  misc_RNA (1)...(19): siRNA sense strand
guaugacccuguauuucug

SEQ ID NO: 128122 - RNA, 19 nt, Homo sapiens
  misc_RNA (1)...(19): siRNA sense strand
gagaaguggagccagcuuu

SEQ ID NO: 128123 - RNA, 19 nt, Homo sapiens
  misc_RNA (1)...(19): siRNA sense strand
cggcagcuccucucaugua

SEQ ID NO: 128124 - RNA, 19 nt, Homo sapiens
  misc_RNA (1)...(19): siRNA sense strand
ggacucccaucuauacacu

SEQ ID NO: 128125 - RNA, 19 nt, Homo sapiens
  misc_RNA (1)...(19): siRNA sense strand
acaaugcaccugccuuuga

SEQ ID NO: 128126 - RNA, 19 nt, Homo sapiens
  misc_RNA (1)...(19): siRNA sense strand
gagaugccaaugacaauca

SEQ ID NO: 128127 - RNA, 19 nt, Homo sapiens
  misc_RNA (1)...(19): siRNA sense strand
gaugaugagauccgcauga

SEQ ID NO: 128128 - RNA, 19 nt, Homo sapiens
  misc_RNA (1)...(19): siRNA sense strand
guuauugggcucagagauu

SEQ ID NO: 128129 - RNA, 19 nt, Homo sapiens
  misc_RNA (1)...(19): siRNA sense strand
uaccugagcauacagcuuu

SEQ ID NO: 128130 - RNA, 19 nt, Homo sapiens
  misc_RNA (1)...(19): siRNA sense strand
gagaggaacaggaggagau

SEQ ID NO: 128131 - RNA, 19 nt, Homo sapiens
  misc_RNA (1)...(19): siRNA sense strand
ccaauggacgucugaccua

SEQ ID NO: 128132 - RNA, 19 nt, Homo sapiens
  misc_RNA (1)...(19): siRNA sense strand
gcccaggaauuguacauac

SEQ ID NO: 128133 - RNA, 19 nt, Homo sapiens
  misc_RNA (1)...(19): siRNA sense strand
uggaugaugugaaugacaa

SEQ ID NO: 128134 - RNA, 19 nt, Homo sapiens
  misc_RNA (1)...(19): siRNA sense strand
ccaagacagcgucaucuau

SEQ ID NO: 128135 - RNA, 19 nt, Homo sapiens
  misc_RNA (1)...(19): siRNA sense strand
ugaccacucugcaugcaau

SEQ ID NO: 128136 - RNA, 19 nt, Homo sapiens
  misc_RNA (1)...(19): siRNA sense strand
guacagcccgugucuugga

SEQ ID NO: 128137 - RNA, 19 nt, Homo sapiens
  misc_RNA (1)...(19): siRNA sense strand
cagcgugggccgagucuuu

SEQ ID NO: 128138 - RNA, 19 nt, Homo sapiens
  misc_RNA (1)...(19): siRNA sense strand
ugaagacacgguauugcua

SEQ ID NO: 128139 - RNA, 19 nt, Homo sapiens
  misc_RNA (1)...(19): siRNA sense strand
gcugcuggaugaugugaau

SEQ ID NO: 128140 - RNA, 19 nt, Homo sapiens
  misc_RNA (1)...(19): siRNA sense strand
cauuuggccuccucuccua

SEQ ID NO: 128141 - RNA, 19 nt, Homo sapiens
  misc_RNA (1)...(19): siRNA sense strand
gcugauggccacagacaga

SEQ ID NO: 128142 - RNA, 19 nt, Homo sapiens
  misc_RNA (1)...(19): siRNA sense strand
gcaccucuaucaccagacu

SEQ ID NO: 128143 - RNA, 19 nt, Homo sapiens
  misc_RNA (1)...(19): siRNA sense strand
gaccucaaccugcuauuag

SEQ ID NO: 128144 - RNA, 19 nt, Homo sapiens
  misc_RNA (1)...(19): siRNA sense strand
ugaccucaaccugcuauua

SEQ ID NO: 128145 - RNA, 19 nt, Homo sapiens
  misc_RNA (1)...(19): siRNA sense strand
gcaccuggcugcacuauua

SEQ ID NO: 128146 - RNA, 19 nt, Homo sapiens
  misc_RNA (1)...(19): siRNA sense strand
ccagaagacugcagacuuu

SEQ ID NO: 128147 - RNA, 19 nt, Homo sapiens
  misc_RNA (1)...(19): siRNA sense strand
gcuggaaucuugcccauuu

SEQ ID NO: 128148 - RNA, 19 nt, Homo sapiens
  misc_RNA (1)...(19): siRNA sense strand
ggacagagagggacugauu

SEQ ID NO: 128149 - RNA, 19 nt, Homo sapiens
  misc_RNA (1)...(19): siRNA sense strand
gaacagcucuggguagaag

SEQ ID NO: 128150 - RNA, 19 nt, Homo sapiens
  misc_RNA (1)...(19): siRNA sense strand
ccagagacauuguggcaaa

SEQ ID NO: 128151 - RNA, 19 nt, Homo sapiens
  misc_RNA (1)...(19): siRNA sense strand
gcaacuggcuacagggaau

SEQ ID NO: 128152 - RNA, 19 nt, Homo sapiens
  misc_RNA (1)...(19): siRNA sense strand
ccucauggcugcccucguu

SEQ ID NO: 128153 - RNA, 19 nt, Homo sapiens
  misc_RNA (1)...(19): siRNA sense strand
guacucacauccaucaaca

SEQ ID NO: 128154 - RNA, 19 nt, Homo sapiens
  misc_RNA (1)...(19): siRNA sense strand
ggaacucuuugguaucaug

SEQ ID NO: 128155 - RNA, 19 nt, Homo sapiens
  misc_RNA (1)...(19): siRNA sense strand
ggaagcugguggacagaga

SEQ ID NO: 128156 - RNA, 19 nt, Homo sapiens
  misc_RNA (1)...(19): siRNA sense strand
ucacauccaucaacaacau

SEQ ID NO: 128157 - RNA, 19 nt, Homo sapiens
  misc_RNA (1)...(19): siRNA sense strand
cacuuugacuucauuguaa

SEQ ID NO: 128158 - RNA, 19 nt, Homo sapiens
  misc_RNA (1)...(19): siRNA sense strand
gcucagcccuuggaguuug

SEQ ID NO: 128159 - RNA, 19 nt, Homo sapiens
  misc_RNA (1)...(19): siRNA sense strand
gggaaguccugggauuuga

SEQ ID NO: 128160 - RNA, 19 nt, Homo sapiens
  misc_RNA (1)...(19): siRNA sense strand
ccacuuugacuucauugua

SEQ ID NO: 128161 - RNA, 19 nt, Homo sapiens
  misc_RNA (1)...(19): siRNA sense strand
gaugacaguggaacucuuu

SEQ ID NO: 128162 - RNA, 19 nt, Homo sapiens
  misc_RNA (1)...(19): siRNA sense strand
caguggaacucuuugguau

SEQ ID NO: 128163 - RNA, 19 nt, Homo sapiens
  misc_RNA (1)...(19): siRNA sense strand
gugguuggcugcaccuuug

SEQ ID NO: 128164 - RNA, 19 nt, Homo sapiens
  misc_RNA (1)...(19): siRNA sense strand
ccaguaaaguccaaguauc

SEQ ID NO: 128165 - RNA, 19 nt, Homo sapiens
  misc_RNA (1)...(19): siRNA sense strand
guggaacucuuugguauca

SEQ ID NO: 128166 - RNA, 19 nt, Homo sapiens
  misc_RNA (1)...(19): siRNA sense strand
cggcguggaugacguauuc

SEQ ID NO: 128167 - RNA, 19 nt, Homo sapiens
  misc_RNA (1)...(19): siRNA sense strand
gcaggcaggcucccaaugu

SEQ ID NO: 128168 - RNA, 19 nt, Homo sapiens
  misc_RNA (1)...(19): siRNA sense strand
gaccuccacugcccaccua

SEQ ID NO: 128169 - RNA, 19 nt, Homo sapiens
  misc_RNA (1)...(19): siRNA sense strand
ggaaugauugagcagauga

SEQ ID NO: 128170 - RNA, 19 nt, Homo sapiens
  misc_RNA (1)...(19): siRNA sense strand
cugaauggcugcacgacaa

SEQ ID NO: 128171 - RNA, 19 nt, Homo sapiens
  misc_RNA (1)...(19): siRNA sense strand
ugauugagcagaugauuga

SEQ ID NO: 128172 - RNA, 19 nt, Homo sapiens
  misc_RNA (1)...(19): siRNA sense strand
cuggacggcuggccucaua

SEQ ID NO: 128173 - RNA, 19 nt, Homo sapiens
  misc_RNA (1)...(19): siRNA sense strand
gccaggagcugcauuacac

SEQ ID NO: 128174 - RNA, 19 nt, Homo sapiens
  misc_RNA (1)...(19): siRNA sense strand
gaugugcucugcugcuucu

SEQ ID NO: 128175 - RNA, 19 nt, Homo sapiens
  misc_RNA (1)...(19): siRNA sense strand
cgccagaggugauacagau

SEQ ID NO: 128176 - RNA, 19 nt, Homo sapiens
  misc_RNA (1)...(19): siRNA sense strand
gaagacugcagacuuugug

SEQ ID NO: 128177 - RNA, 19 nt, Homo sapiens
  misc_RNA (1)...(19): siRNA sense strand
cacccgagcucuucuacau

SEQ ID NO: 128178 - RNA, 19 nt, Homo sapiens
  misc_RNA (1)...(19): siRNA sense strand
uaugggaaguccugggauu

SEQ ID NO: 128179 - RNA, 19 nt, Homo sapiens
  misc_RNA (1)...(19): siRNA sense strand
cagcucagcccuuggaguu

SEQ ID NO: 128180 - RNA, 19 nt, Homo sapiens
  misc_RNA (1)...(19): siRNA sense strand
gcgcccagcucagguacuu

SEQ ID NO: 128181 - RNA, 19 nt, Homo sapiens
  misc_RNA (1)...(19): siRNA sense strand
ggucuccgcauggccauua

SEQ ID NO: 128182 - RNA, 19 nt, Homo sapiens
  misc_RNA (1)...(19): siRNA sense strand
gagacauuguggcaaagug

SEQ ID NO: 128183 - RNA, 19 nt, Homo sapiens
  misc_RNA (1)...(19): siRNA sense strand
caguaaaguccaaguauca

SEQ ID NO: 128184 - RNA, 19 nt, Homo sapiens
  misc_RNA (1)...(19): siRNA sense strand
gaugcgggauccagagaca

SEQ ID NO: 128185 - RNA, 19 nt, Homo sapiens
  misc_RNA (1)...(19): siRNA sense strand
gcacuggcaggaggaauug

SEQ ID NO: 128186 - RNA, 19 nt, Homo sapiens
  misc_RNA (1)...(19): siRNA sense strand
caaggaaagcccagagauc

SEQ ID NO: 128187 - RNA, 19 nt, Homo sapiens
  misc_RNA (1)...(19): siRNA sense strand
gcgcuucaguucccucaag

SEQ ID NO: 128188 - RNA, 19 nt, Homo sapiens
  misc_RNA (1)...(19): siRNA sense strand
uggaacagcucuggguaga

SEQ ID NO: 128189 - RNA, 19 nt, Homo sapiens
  misc_RNA (1)...(19): siRNA sense strand
ccucacaggccaacuucua

SEQ ID NO: 128190 - RNA, 19 nt, Homo sapiens
  misc_RNA (1)...(19): siRNA sense strand
ugccacaguucaagccuuu

SEQ ID NO: 128191 - RNA, 19 nt, Homo sapiens
  misc_RNA (1)...(19): siRNA sense strand
gugacuaucagacacauga

SEQ ID NO: 128192 - RNA, 19 nt, Homo sapiens
  misc_RNA (1)...(19): siRNA sense strand
uugagcagaugauugagaa

SEQ ID NO: 128193 - RNA, 19 nt, Homo sapiens
  misc_RNA (1)...(19): siRNA sense strand
guccaaguaucacucuaug

SEQ ID NO: 128194 - RNA, 19 nt, Homo sapiens
  misc_RNA (1)...(19): siRNA sense strand
ggaaguccugggauuugaa

SEQ ID NO: 128195 - RNA, 19 nt, Homo sapiens
  misc_RNA (1)...(19): siRNA sense strand
gaggcuaucugcucaugcu

SEQ ID NO: 128196 - RNA, 19 nt, Homo sapiens
  misc_RNA (1)...(19): siRNA sense strand
ggaguuccccuuauugaaa

SEQ ID NO: 128197 - RNA, 19 nt, Homo sapiens
  misc_RNA (1)...(19): siRNA sense strand
gaacaaaaucugcuacaag

SEQ ID NO: 128198 - RNA, 19 nt, Homo sapiens
  misc_RNA (1)...(19): siRNA sense strand
ccaccacccuggaugacau

SEQ ID NO: 128199 - RNA, 19 nt, Homo sapiens
  misc_RNA (1)...(19): siRNA sense strand
ugagccaggagcugcauua

SEQ ID NO: 128200 - RNA, 19 nt, Homo sapiens
  misc_RNA (1)...(19): siRNA sense strand
cauuguaagguacuucuuu

SEQ ID NO: 128201 - RNA, 19 nt, Homo sapiens
  misc_RNA (1)...(19): siRNA sense strand
ccuacaagcugcucaucca

SEQ ID NO: 128202 - RNA, 19 nt, Homo sapiens
  misc_RNA (1)...(19): siRNA sense strand
gcucuuuggugcucuucug

SEQ ID NO: 128203 - RNA, 19 nt, Homo sapiens
  misc_RNA (1)...(19): siRNA sense strand
gggaggcuaucugcucaug

SEQ ID NO: 128204 - RNA, 19 nt, Homo sapiens
  misc_RNA (1)...(19): siRNA sense strand
gccaguaaaguccaaguau

SEQ ID NO: 128205 - RNA, 19 nt, Homo sapiens
  misc_RNA (1)...(19): siRNA sense strand
gcuugcugguucccacuuu

SEQ ID NO: 128206 - RNA, 19 nt, Homo sapiens
  misc_RNA (1)...(19): siRNA sense strand
caggcaggcucccaaugug

SEQ ID NO: 128207 - RNA, 19 nt, Homo sapiens
  misc_RNA (1)...(19): siRNA sense strand
uccgggagcugcuagacaa

SEQ ID NO: 128208 - RNA, 19 nt, Homo sapiens
  misc_RNA (1)...(19): siRNA sense strand
gcucugcucaggugauuca

SEQ ID NO: 128209 - RNA, 19 nt, Homo sapiens
  misc_RNA (1)...(19): siRNA sense strand
acaguggaacucuuuggua

SEQ ID NO: 128210 - RNA, 19 nt, Homo sapiens
  misc_RNA (1)...(19): siRNA sense strand
uggcuucucccacaaauuc

SEQ ID NO: 128211 - RNA, 19 nt, Homo sapiens
  misc_RNA (1)...(19): siRNA sense strand
cacucuggcuucgugcuua

SEQ ID NO: 128212 - RNA, 19 nt, Homo sapiens
  misc_RNA (1)...(19): siRNA sense strand
gcaucacccgccacucgua

SEQ ID NO: 128213 - RNA, 19 nt, Homo sapiens
  misc_RNA (1)...(19): siRNA sense strand
gaucugcaccagcgcuuca

SEQ ID NO: 128214 - RNA, 19 nt, Homo sapiens
  misc_RNA (1)...(19): siRNA sense strand
caaaaucugcuacaaguca

SEQ ID NO: 128215 - RNA, 19 nt, Homo sapiens
  misc_RNA (1)...(19): siRNA sense strand
gggcaccagugucguacuc

SEQ ID NO: 128216 - RNA, 19 nt, Homo sapiens
  misc_RNA (1)...(19): siRNA sense strand
gaguuccccuuauugaaaa

SEQ ID NO: 128217 - RNA, 19 nt, Homo sapiens
  misc_RNA (1)...(19): siRNA sense strand
ccuuggaguuugcccaguu

SEQ ID NO: 128218 - RNA, 19 nt, Homo sapiens
  misc_RNA (1)...(19): siRNA sense strand
gacaguaccagugggcauu

SEQ ID NO: 128219 - RNA, 19 nt, Homo sapiens
  misc_RNA (1)...(19): siRNA sense strand
uaucagacacaugacauug

SEQ ID NO: 128220 - RNA, 19 nt, Homo sapiens
  misc_RNA (1)...(19): siRNA sense strand
gaugauugagaagcuguuu

SEQ ID NO: 128221 - RNA, 19 nt, Homo sapiens
  misc_RNA (1)...(19): siRNA sense strand
ucuuugguaucauggguuu

SEQ ID NO: 128222 - RNA, 19 nt, Homo sapiens
  misc_RNA (1)...(19): siRNA sense strand
cugcucaggugauucagau

SEQ ID NO: 128223 - RNA, 19 nt, Homo sapiens
  misc_RNA (1)...(19): siRNA sense strand
ccucacacccgaagcacuu

SEQ ID NO: 128224 - RNA, 19 nt, Homo sapiens
  misc_RNA (1)...(19): siRNA sense strand
ccagaggugauacagaugu

SEQ ID NO: 128225 - RNA, 19 nt, Homo sapiens
  misc_RNA (1)...(19): siRNA sense strand
gaggagcugggucccuuug

SEQ ID NO: 128226 - RNA, 19 nt, Homo sapiens
  misc_RNA (1)...(19): siRNA sense strand
ggaggagcugggucccuuu

SEQ ID NO: 128227 - RNA, 19 nt, Homo sapiens
  misc_RNA (1)...(19): siRNA sense strand
ugugcccgcuggaaucuug

SEQ ID NO: 128228 - RNA, 19 nt, Homo sapiens
  misc_RNA (1)...(19): siRNA sense strand
auuguaagguacuucuuug

SEQ ID NO: 128229 - RNA, 19 nt, Homo sapiens
  misc_RNA (1)...(19): siRNA sense strand
ggacggcuggccucauagu

SEQ ID NO: 128230 - RNA, 19 nt, Homo sapiens
  misc_RNA (1)...(19): siRNA sense strand
ggaacagcucuggguagaa

SEQ ID NO: 128231 - RNA, 19 nt, Homo sapiens
  misc_RNA (1)...(19): siRNA sense strand
cuucuuggcucugggaauc

SEQ ID NO: 128232 - RNA, 19 nt, Homo sapiens
  misc_RNA (1)...(19): siRNA sense strand
ugggaggcauggccagaga

SEQ ID NO: 128233 - RNA, 19 nt, Homo sapiens
  misc_RNA (1)...(19): siRNA sense strand
cauggcuucucccacaaau

SEQ ID NO: 128234 - RNA, 19 nt, Homo sapiens
  misc_RNA (1)...(19): siRNA sense strand
gccauggcuucucccacaa

SEQ ID NO: 128235 - RNA, 19 nt, Homo sapiens
  misc_RNA (1)...(19): siRNA sense strand
cugcaugcguucucugaag

SEQ ID NO: 128236 - RNA, 19 nt, Homo sapiens
  misc_RNA (1)...(19): siRNA sense strand
gaacgcuucccagcagauc

SEQ ID NO: 128237 - RNA, 19 nt, Homo sapiens
  misc_RNA (1)...(19): siRNA sense strand
uggccauuauugagacaaa

SEQ ID NO: 128238 - RNA, 19 nt, Homo sapiens
  misc_RNA (1)...(19): siRNA sense strand
aacaaaaucugcuacaagu

SEQ ID NO: 128239 - RNA, 19 nt, Homo sapiens
  misc_RNA (1)...(19): siRNA sense strand
gugcucugcugcuccucaa

SEQ ID NO: 128240 - RNA, 19 nt, Homo sapiens
  misc_RNA (1)...(19): siRNA sense strand
aauggcugcacgacaaaua

SEQ ID NO: 128241 - RNA, 19 nt, Homo sapiens
  misc_RNA (1)...(19): siRNA sense strand
gacagagagggacugauuc

SEQ ID NO: 128242 - RNA, 19 nt, Homo sapiens
  misc_RNA (1)...(19): siRNA sense strand
ugaauggcugcacgacaaa

SEQ ID NO: 128243 - RNA, 19 nt, Homo sapiens
  misc_RNA (1)...(19): siRNA sense strand
ugaugacaguggaacucuu

SEQ ID NO: 128244 - RNA, 19 nt, Homo sapiens
  misc_RNA (1)...(19): siRNA sense strand
cugcguggccuccagaaga

SEQ ID NO: 128245 - RNA, 19 nt, Homo sapiens
  misc_RNA (1)...(19): siRNA sense strand
gagcaaaggccacguauca

SEQ ID NO: 128246 - RNA, 19 nt, Homo sapiens
  misc_RNA (1)...(19): siRNA sense strand
acgaacagcugaugaauga

SEQ ID NO: 128247 - RNA, 19 nt, Homo sapiens
  misc_RNA (1)...(19): siRNA sense strand
ggaaggcccugcaggugaa

SEQ ID NO: 128248 - RNA, 19 nt, Homo sapiens
  misc_RNA (1)...(19): siRNA sense strand
ggucgccucuucuguguuu

SEQ ID NO: 128249 - RNA, 19 nt, Homo sapiens
  misc_RNA (1)...(19): siRNA sense strand
gaacuggcccaaugcaaug

SEQ ID NO: 128250 - RNA, 19 nt, Homo sapiens
  misc_RNA (1)...(19): siRNA sense strand
ccaaggacgucaacaucuu

SEQ ID NO: 128251 - RNA, 19 nt, Homo sapiens
  misc_RNA (1)...(19): siRNA sense strand
ccacaaagccauuaagaag

SEQ ID NO: 128252 - RNA, 19 nt, Homo sapiens
  misc_RNA (1)...(19): siRNA sense strand
gaacagcugaugaaugagu

SEQ ID NO: 128253 - RNA, 19 nt, Homo sapiens
  misc_RNA (1)...(19): siRNA sense strand
ggaaccagaccuucaacaa

SEQ ID NO: 128254 - RNA, 19 nt, Homo sapiens
  misc_RNA (1)...(19): siRNA sense strand
ggaagaaggccaugaagac

SEQ ID NO: 128255 - RNA, 19 nt, Homo sapiens
  misc_RNA (1)...(19): siRNA sense strand
ucaagcagaucgggaagaa

SEQ ID NO: 128256 - RNA, 19 nt, Homo sapiens
  misc_RNA (1)...(19): siRNA sense strand
ggaacuggcccaaugcaau

SEQ ID NO: 128257 - RNA, 19 nt, Homo sapiens
  misc_RNA (1)...(19): siRNA sense strand
gcaaaggccacguaucaag

SEQ ID NO: 128258 - RNA, 19 nt, Homo sapiens
  misc_RNA (1)...(19): siRNA sense strand
gaagaaggccaugaagaca

SEQ ID NO: 128259 - RNA, 19 nt, Homo sapiens
  misc_RNA (1)...(19): siRNA sense strand
gaaguccacaaagccauua

SEQ ID NO: 128260 - RNA, 19 nt, Homo sapiens
  misc_RNA (1)...(19): siRNA sense strand
gucaacaucuucagcuuuc

SEQ ID NO: 128261 - RNA, 19 nt, Homo sapiens
  misc_RNA (1)...(19): siRNA sense strand
gaucccacccuucguauuc

SEQ ID NO: 128262 - RNA, 19 nt, Homo sapiens
  misc_RNA (1)...(19): siRNA sense strand
acaacgaccucaucaagca

SEQ ID NO: 128263 - RNA, 19 nt, Homo sapiens
  misc_RNA (1)...(19): siRNA sense strand
gcaguuccuuaccaagaga

SEQ ID NO: 128264 - RNA, 19 nt, Homo sapiens
  misc_RNA (1)...(19): siRNA sense strand
gaaccagaccuucaacaac

SEQ ID NO: 128265 - RNA, 19 nt, Homo sapiens
  misc_RNA (1)...(19): siRNA sense strand
gcacagucaucuucaucgu

SEQ ID NO: 128266 - RNA, 19 nt, Homo sapiens
  misc_RNA (1)...(19): siRNA sense strand
cagaucacgugcacaguca

SEQ ID NO: 128267 - RNA, 19 nt, Homo sapiens
  misc_RNA (1)...(19): siRNA sense strand
gggaagaaggccaugaaga

SEQ ID NO: 128268 - RNA, 19 nt, Homo sapiens
  misc_RNA (1)...(19): siRNA sense strand
ggaaguccacaaagccauu

SEQ ID NO: 128269 - RNA, 19 nt, Homo sapiens
  misc_RNA (1)...(19): siRNA sense strand
agacuagggcaguuccuua

SEQ ID NO: 128270 - RNA, 19 nt, Homo sapiens
  misc_RNA (1)...(19): siRNA sense strand
ccaagaaggaagagaccua

SEQ ID NO: 128271 - RNA, 19 nt, Homo sapiens
  misc_RNA (1)...(19): siRNA sense strand
ccaagagacuagggcaguu

SEQ ID NO: 128272 - RNA, 19 nt, Homo sapiens
  misc_RNA (1)...(19): siRNA sense strand
gggcaguuccuuaccaaga

SEQ ID NO: 128273 - RNA, 19 nt, Homo sapiens
  misc_RNA (1)...(19): siRNA sense strand
ggacuaccacccacucauc

SEQ ID NO: 128274 - RNA, 19 nt, Homo sapiens
  misc_RNA (1)...(19): siRNA sense strand
gagcauguuuguggaaguc

SEQ ID NO: 128275 - RNA, 19 nt, Homo sapiens
  misc_RNA (1)...(19): siRNA sense strand
uccuagaggugguaucuga

SEQ ID NO: 128276 - RNA, 19 nt, Homo sapiens
  misc_RNA (1)...(19): siRNA sense strand
ccucggccaucaucuucua

SEQ ID NO: 128277 - RNA, 19 nt, Homo sapiens
  misc_RNA (1)...(19): siRNA sense strand
gaggagcaaaggccacgua

SEQ ID NO: 128278 - RNA, 19 nt, Homo sapiens
  misc_RNA (1)...(19): siRNA sense strand
ccaacuaccacgcccugua

SEQ ID NO: 128279 - RNA, 19 nt, Homo sapiens
  misc_RNA (1)...(19): siRNA sense strand
ggaaggugagcauguuugu

SEQ ID NO: 128280 - RNA, 19 nt, Homo sapiens
  misc_RNA (1)...(19): siRNA sense strand
aaccagaccuucaacaacu

SEQ ID NO: 128281 - RNA, 19 nt, Homo sapiens
  misc_RNA (1)...(19): siRNA sense strand
gaaggaagagaccuacaac

SEQ ID NO: 128282 - RNA, 19 nt, Homo sapiens
  misc_RNA (1)...(19): siRNA sense strand
ggacgugccaagagacuag

SEQ ID NO: 128283 - RNA, 19 nt, Homo sapiens
  misc_RNA (1)...(19): siRNA sense strand
gaagcugcaucugcucaag

SEQ ID NO: 128284 - RNA, 19 nt, Homo sapiens
  misc_RNA (1)...(19): siRNA sense strand
cggcuucggugacuuugug

SEQ ID NO: 128285 - RNA, 19 nt, Homo sapiens
  misc_RNA (1)...(19): siRNA sense strand
cuacaacgaccucaucaag

SEQ ID NO: 128286 - RNA, 19 nt, Homo sapiens
  misc_RNA (1)...(19): siRNA sense strand
agaaggccaugaagacaag

SEQ ID NO: 128287 - RNA, 19 nt, Homo sapiens
  misc_RNA (1)...(19): siRNA sense strand
gaccgucauuaccaccauu

SEQ ID NO: 128288 - RNA, 19 nt, Homo sapiens
  misc_RNA (1)...(19): siRNA sense strand
caacaucuucagcuuucuu

SEQ ID NO: 128289 - RNA, 19 nt, Homo sapiens
  misc_RNA (1)...(19): siRNA sense strand
ucauuaccaccauuggaua

SEQ ID NO: 128290 - RNA, 19 nt, Homo sapiens
  misc_RNA (1)...(19): siRNA sense strand
ucguggagcucuggaucua

SEQ ID NO: 128291 - RNA, 19 nt, Homo sapiens
  misc_RNA (1)...(19): siRNA sense strand
caacuaccacgcccuguac

SEQ ID NO: 128292 - RNA, 19 nt, Homo sapiens
  misc_RNA (1)...(19): siRNA sense strand
ggcaguuccuuaccaagag

SEQ ID NO: 128293 - RNA, 19 nt, Homo sapiens
  misc_RNA (1)...(19): siRNA sense strand
caucggcuucggugacuuu

SEQ ID NO: 128294 - RNA, 19 nt, Homo sapiens
  misc_RNA (1)...(19): siRNA sense strand
agaaggaagagaccuacaa

SEQ ID NO: 128295 - RNA, 19 nt, Homo sapiens
  misc_RNA (1)...(19): siRNA sense strand
ggacaggguguggccauca

SEQ ID NO: 128296 - RNA, 19 nt, Homo sapiens
  misc_RNA (1)...(19): siRNA sense strand
cgucaacaucuucagcuuu

SEQ ID NO: 128297 - RNA, 19 nt, Homo sapiens
  misc_RNA (1)...(19): siRNA sense strand
ucacagggaaccagaccuu

SEQ ID NO: 128298 - RNA, 19 nt, Homo sapiens
  misc_RNA (1)...(19): siRNA sense strand
caaggacgucaacaucuuc

SEQ ID NO: 128299 - RNA, 19 nt, Homo sapiens
  misc_RNA (1)...(19): siRNA sense strand
gaugaaugaguacaacaag

SEQ ID NO: 128300 - RNA, 19 nt, Homo sapiens
  misc_RNA (1)...(19): siRNA sense strand
aacagcugaugaaugagua

SEQ ID NO: 128301 - RNA, 19 nt, Homo sapiens
  misc_RNA (1)...(19): siRNA sense strand
uggaggagccacacuggaa

SEQ ID NO: 128302 - RNA, 19 nt, Homo sapiens
  misc_RNA (1)...(19): siRNA sense strand
aggaagagaccuacaacga

SEQ ID NO: 128303 - RNA, 19 nt, Homo sapiens
  misc_RNA (1)...(19): siRNA sense strand
gcagcgaccgucauuacca

SEQ ID NO: 128304 - RNA, 19 nt, Homo sapiens
  misc_RNA (1)...(19): siRNA sense strand
aggagggccuggacaagau

SEQ ID NO: 128305 - RNA, 19 nt, Homo sapiens
  misc_RNA (1)...(19): siRNA sense strand
gcaauguggcucccaagac

SEQ ID NO: 128306 - RNA, 19 nt, Homo sapiens
  misc_RNA (1)...(19): siRNA sense strand
uagggcaguuccuuaccaa

SEQ ID NO: 128307 - RNA, 19 nt, Homo sapiens
  misc_RNA (1)...(19): siRNA sense strand
gcugaugaaugaguacaac

SEQ ID NO: 128308 - RNA, 19 nt, Homo sapiens
  misc_RNA (1)...(19): siRNA sense strand
ucaccagcacugagucuga

SEQ ID NO: 128309 - RNA, 19 nt, Homo sapiens
  misc_RNA (1)...(19): siRNA sense strand
guggagcucuggaucuacu

SEQ ID NO: 128310 - RNA, 19 nt, Homo sapiens
  misc_RNA (1)...(19): siRNA sense strand
cacagacacugaggagcaa

SEQ ID NO: 128311 - RNA, 19 nt, Homo sapiens
  misc_RNA (1)...(19): siRNA sense strand
caagauccuagagguggua

SEQ ID NO: 128312 - RNA, 19 nt, Homo sapiens
  misc_RNA (1)...(19): siRNA sense strand
gauccuagaggugguaucu

SEQ ID NO: 128313 - RNA, 19 nt, Homo sapiens
  misc_RNA (1)...(19): siRNA sense strand
aacuggaacuggcccaaug

SEQ ID NO: 128314 - RNA, 19 nt, Homo sapiens
  misc_RNA (1)...(19): siRNA sense strand
guccacaaagccauuaaga

SEQ ID NO: 128315 - RNA, 19 nt, Homo sapiens
  misc_RNA (1)...(19): siRNA sense strand
gaccuacaacgaccucauc

SEQ ID NO: 128316 - RNA, 19 nt, Homo sapiens
  misc_RNA (1)...(19): siRNA sense strand
ugaugaaugaguacaacaa

SEQ ID NO: 128317 - RNA, 19 nt, Homo sapiens
  misc_RNA (1)...(19): siRNA sense strand
cagggaaccagaccuucaa

SEQ ID NO: 128318 - RNA, 19 nt, Homo sapiens
  misc_RNA (1)...(19): siRNA sense strand
aagaaggccaugaagacaa

SEQ ID NO: 128319 - RNA, 19 nt, Homo sapiens
  misc_RNA (1)...(19): siRNA sense strand
gaaggugagcauguuugug

SEQ ID NO: 128320 - RNA, 19 nt, Homo sapiens
  misc_RNA (1)...(19): siRNA sense strand
acuggaaggugagcauguu

SEQ ID NO: 128321 - RNA, 19 nt, Homo sapiens
  misc_RNA (1)...(19): siRNA sense strand
caagagacuagggcaguuc

SEQ ID NO: 128322 - RNA, 19 nt, Homo sapiens
  misc_RNA (1)...(19): siRNA sense strand
acacacagaagcugcaucu

SEQ ID NO: 128323 - RNA, 19 nt, Homo sapiens
  misc_RNA (1)...(19): siRNA sense strand
ggagcucuggaucuacuug

SEQ ID NO: 128324 - RNA, 19 nt, Homo sapiens
  misc_RNA (1)...(19): siRNA sense strand
ucguauucauggugacuga

SEQ ID NO: 128325 - RNA, 19 nt, Homo sapiens
  misc_RNA (1)...(19): siRNA sense strand
gaucacgugcacagucauc

SEQ ID NO: 128326 - RNA, 19 nt, Homo sapiens
  misc_RNA (1)...(19): siRNA sense strand
ggaaauggcucccugaucu

SEQ ID NO: 128327 - RNA, 19 nt, Homo sapiens
  misc_RNA (1)...(19): siRNA sense strand
gaccagugcugcccuguuu

SEQ ID NO: 128328 - RNA, 19 nt, Homo sapiens
  misc_RNA (1)...(19): siRNA sense strand
agaaugagcucuuccugaa

SEQ ID NO: 128329 - RNA, 19 nt, Homo sapiens
  misc_RNA (1)...(19): siRNA sense strand
gacgaacggugaucuguga

SEQ ID NO: 128330 - RNA, 19 nt, Homo sapiens
  misc_RNA (1)...(19): siRNA sense strand
gcgcaucaguggacacauu

SEQ ID NO: 128331 - RNA, 19 nt, Homo sapiens
  misc_RNA (1)...(19): siRNA sense strand
ggagagggcugcuauuuug

SEQ ID NO: 128332 - RNA, 19 nt, Homo sapiens
  misc_RNA (1)...(19): siRNA sense strand
caauggcaguguccuguuu

SEQ ID NO: 128333 - RNA, 19 nt, Homo sapiens
  misc_RNA (1)...(19): siRNA sense strand
ggagagaugagcuguauca

SEQ ID NO: 128334 - RNA, 19 nt, Homo sapiens
  misc_RNA (1)...(19): siRNA sense strand
gaaauggcucccugaucua

SEQ ID NO: 128335 - RNA, 19 nt, Homo sapiens
  misc_RNA (1)...(19): siRNA sense strand
ggcauggccucccugauga

SEQ ID NO: 128336 - RNA, 19 nt, Homo sapiens
  misc_RNA (1)...(19): siRNA sense strand
gggcagugguucccagaga

SEQ ID NO: 128337 - RNA, 19 nt, Homo sapiens
  misc_RNA (1)...(19): siRNA sense strand
cuggagaggugcacuguga

SEQ ID NO: 128338 - RNA, 19 nt, Homo sapiens
  misc_RNA (1)...(19): siRNA sense strand
acugucaccugcacuauga

SEQ ID NO: 128339 - RNA, 19 nt, Homo sapiens
  misc_RNA (1)...(19): siRNA sense strand
gacacucacucacccuuca

SEQ ID NO: 128340 - RNA, 19 nt, Homo sapiens
  misc_RNA (1)...(19): siRNA sense strand
gaacuucaggccaaugucu

SEQ ID NO: 128341 - RNA, 19 nt, Homo sapiens
  misc_RNA (1)...(19): siRNA sense strand
caggagagggcugcuauuu

SEQ ID NO: 128342 - RNA, 19 nt, Homo sapiens
  misc_RNA (1)...(19): siRNA sense strand
ccaugacacuggagaccaa

SEQ ID NO: 128343 - RNA, 19 nt, Homo sapiens
  misc_RNA (1)...(19): siRNA sense strand
ccagagaccagaacugauc

SEQ ID NO: 128344 - RNA, 19 nt, Homo sapiens
  misc_RNA (1)...(19): siRNA sense strand
ugagaaacaagaugucaga

SEQ ID NO: 128345 - RNA, 19 nt, Homo sapiens
  misc_RNA (1)...(19): siRNA sense strand
ggagaggugcacugugaga

SEQ ID NO: 128346 - RNA, 19 nt, Homo sapiens
  misc_RNA (1)...(19): siRNA sense strand
gcaucacccugcucacucu

SEQ ID NO: 128347 - RNA, 19 nt, Homo sapiens
  misc_RNA (1)...(19): siRNA sense strand
gagcugcgacguccugcaa

SEQ ID NO: 128348 - RNA, 19 nt, Homo sapiens
  misc_RNA (1)...(19): siRNA sense strand
uguaucaccugcagaugug

SEQ ID NO: 128349 - RNA, 19 nt, Homo sapiens
  misc_RNA (1)...(19): siRNA sense strand
gcauguggcacuugugaca

SEQ ID NO: 128350 - RNA, 19 nt, Homo sapiens
  misc_RNA (1)...(19): siRNA sense strand
gagaacuucaggccaaugu

SEQ ID NO: 128351 - RNA, 19 nt, Homo sapiens
  misc_RNA (1)...(19): siRNA sense strand
gcgacguccugcaaagugu

SEQ ID NO: 128352 - RNA, 19 nt, Homo sapiens
  misc_RNA (1)...(19): siRNA sense strand
gacccgcucugcucacucu

SEQ ID NO: 128353 - RNA, 19 nt, Homo sapiens
  misc_RNA (1)...(19): siRNA sense strand
uuggagagaugagcuguau

SEQ ID NO: 128354 - RNA, 19 nt, Homo sapiens
  misc_RNA (1)...(19): siRNA sense strand
uuaauuaagugugcugucu

SEQ ID NO: 128355 - RNA, 19 nt, Homo sapiens
  misc_RNA (1)...(19): siRNA sense strand
gccucacgcugcuaggaaa

SEQ ID NO: 128356 - RNA, 19 nt, Homo sapiens
  misc_RNA (1)...(19): siRNA sense strand
agaaacaagaugucagaga

SEQ ID NO: 128357 - RNA, 19 nt, Homo sapiens
  misc_RNA (1)...(19): siRNA sense strand
ggagggaucagcgcacugu

SEQ ID NO: 128358 - RNA, 19 nt, Homo sapiens
  misc_RNA (1)...(19): siRNA sense strand
gagggcaggugcacauagc

SEQ ID NO: 128359 - RNA, 19 nt, Homo sapiens
  misc_RNA (1)...(19): siRNA sense strand
ugagcgggaugacuguuca

SEQ ID NO: 128360 - RNA, 19 nt, Homo sapiens
  misc_RNA (1)...(19): siRNA sense strand
gcgagaacuucaggccaau

SEQ ID NO: 128361 - RNA, 19 nt, Homo sapiens
  misc_RNA (1)...(19): siRNA sense strand
caaugucucagcccaggaa

SEQ ID NO: 128362 - RNA, 19 nt, Homo sapiens
  misc_RNA (1)...(19): siRNA sense strand
gcugcgacguccugcaaag

SEQ ID NO: 128363 - RNA, 19 nt, Homo sapiens
  misc_RNA (1)...(19): siRNA sense strand
agggucagcugcaagaaca

SEQ ID NO: 128364 - RNA, 19 nt, Homo sapiens
  misc_RNA (1)...(19): siRNA sense strand
aacaagaugucagagacuu

SEQ ID NO: 128365 - RNA, 19 nt, Homo sapiens
  misc_RNA (1)...(19): siRNA sense strand
gagacgaacggugaucugu

SEQ ID NO: 128366 - RNA, 19 nt, Homo sapiens
  misc_RNA (1)...(19): siRNA sense strand
gagaggugcacugugagaa

SEQ ID NO: 128367 - RNA, 19 nt, Homo sapiens
  misc_RNA (1)...(19): siRNA sense strand
gccuggcuuuccuuggaua

SEQ ID NO: 128368 - RNA, 19 nt, Homo sapiens
  misc_RNA (1)...(19): siRNA sense strand
ggcggcugcugaagggauu

SEQ ID NO: 128369 - RNA, 19 nt, Homo sapiens
  misc_RNA (1)...(19): siRNA sense strand
gcucagaacaaggcacugu

SEQ ID NO: 128370 - RNA, 19 nt, Homo sapiens
  misc_RNA (1)...(19): siRNA sense strand
acgccuggcuuuccuugga

SEQ ID NO: 128371 - RNA, 19 nt, Homo sapiens
  misc_RNA (1)...(19): siRNA sense strand
ccggagcaucgcaguuaua

SEQ ID NO: 128372 - RNA, 19 nt, Homo sapiens
  misc_RNA (1)...(19): siRNA sense strand
gugccauccugacucuaga

SEQ ID NO: 128373 - RNA, 19 nt, Homo sapiens
  misc_RNA (1)...(19): siRNA sense strand
acccggagcaucgcaguua

SEQ ID NO: 128374 - RNA, 19 nt, Homo sapiens
  misc_RNA (1)...(19): siRNA sense strand
gcccugagaaacaagaugu

SEQ ID NO: 128375 - RNA, 19 nt, Homo sapiens
  misc_RNA (1)...(19): siRNA sense strand
ucagaacaaggcacuguca

SEQ ID NO: 128376 - RNA, 19 nt, Homo sapiens
  misc_RNA (1)...(19): siRNA sense strand
cccaggguguggugaagga

SEQ ID NO: 128377 - RNA, 19 nt, Homo sapiens
  misc_RNA (1)...(19): siRNA sense strand
gcucuagccuccgcuucuc

SEQ ID NO: 128378 - RNA, 19 nt, Homo sapiens
  misc_RNA (1)...(19): siRNA sense strand
caauggcaguguccuguuu

SEQ ID NO: 128379 - RNA, 19 nt, Homo sapiens
  misc_RNA (1)...(19): siRNA sense strand
gacacucacucacccuuca

SEQ ID NO: 128380 - RNA, 19 nt, Homo sapiens
  misc_RNA (1)...(19): siRNA sense strand
gaacuucaggccaaugucu

SEQ ID NO: 128381 - RNA, 19 nt, Homo sapiens
  misc_RNA (1)...(19): siRNA sense strand
gcaucacccugcucacucu

SEQ ID NO: 128382 - RNA, 19 nt, Homo sapiens
  misc_RNA (1)...(19): siRNA sense strand
gcauguggcacuugugaca

SEQ ID NO: 128383 - RNA, 19 nt, Homo sapiens
  misc_RNA (1)...(19): siRNA sense strand
gagaacuucaggccaaugu

SEQ ID NO: 128384 - RNA, 19 nt, Homo sapiens
  misc_RNA (1)...(19): siRNA sense strand
gcgagaacuucaggccaau

SEQ ID NO: 128385 - RNA, 19 nt, Homo sapiens
  misc_RNA (1)...(19): siRNA sense strand
caaugucucagcccaggaa

SEQ ID NO: 128386 - RNA, 19 nt, Homo sapiens
  misc_RNA (1)...(19): siRNA sense strand
agggucagcugcaagaaca

SEQ ID NO: 128387 - RNA, 19 nt, Homo sapiens
  misc_RNA (1)...(19): siRNA sense strand
ccggagcaucgcaguuaua

SEQ ID NO: 128388 - RNA, 19 nt, Homo sapiens
  misc_RNA (1)...(19): siRNA sense strand
gugccauccugacucuaga

SEQ ID NO: 128389 - RNA, 19 nt, Homo sapiens
  misc_RNA (1)...(19): siRNA sense strand
acccggagcaucgcaguua

SEQ ID NO: 128390 - RNA, 19 nt, Homo sapiens
  misc_RNA (1)...(19): siRNA sense strand
gcucuagccuccgcuucuc

SEQ ID NO: 128391 - RNA, 19 nt, Homo sapiens
  misc_RNA (1)...(19): siRNA sense strand
gaacaaaggucacagauca

SEQ ID NO: 128392 - RNA, 19 nt, Homo sapiens
  misc_RNA (1)...(19): siRNA sense strand
aaacugaccuugguuauua

SEQ ID NO: 128393 - RNA, 19 nt, Homo sapiens
  misc_RNA (1)...(19): siRNA sense strand
aaagagagguugaaaggua

SEQ ID NO: 128394 - RNA, 19 nt, Homo sapiens
  misc_RNA (1)...(19): siRNA sense strand
gaaaucaagcucuuaauga

SEQ ID NO: 128395 - RNA, 19 nt, Homo sapiens
  misc_RNA (1)...(19): siRNA sense strand
gaaauucagugcuccagaa

SEQ ID NO: 128396 - RNA, 19 nt, Homo sapiens
  misc_RNA (1)...(19): siRNA sense strand
ggauuugccucucgagaua

SEQ ID NO: 128397 - RNA, 19 nt, Homo sapiens
  misc_RNA (1)...(19): siRNA sense strand
gcagguugcucuagacaaa

SEQ ID NO: 128398 - RNA, 19 nt, Homo sapiens
  misc_RNA (1)...(19): siRNA sense strand
gaaaggugauggcguuaga

SEQ ID NO: 128399 - RNA, 19 nt, Homo sapiens
  misc_RNA (1)...(19): siRNA sense strand
gauauugccugguuugaug

SEQ ID NO: 128400 - RNA, 19 nt, Homo sapiens
  misc_RNA (1)...(19): siRNA sense strand
ggugaucucugcaguugua

SEQ ID NO: 128401 - RNA, 19 nt, Homo sapiens
  misc_RNA (1)...(19): siRNA sense strand
ggaaaugacagcucuggua

SEQ ID NO: 128402 - RNA, 19 nt, Homo sapiens
  misc_RNA (1)...(19): siRNA sense strand
gaaauagggugguuugacu

SEQ ID NO: 128403 - RNA, 19 nt, Homo sapiens
  misc_RNA (1)...(19): siRNA sense strand
caaaugaagcccucaguaa

SEQ ID NO: 128404 - RNA, 19 nt, Homo sapiens
  misc_RNA (1)...(19): siRNA sense strand
gacauucgcucucuuaaca

SEQ ID NO: 128405 - RNA, 19 nt, Homo sapiens
  misc_RNA (1)...(19): siRNA sense strand
gauaagaaaucaagguuac

SEQ ID NO: 128406 - RNA, 19 nt, Homo sapiens
  misc_RNA (1)...(19): siRNA sense strand
ccaaagaaauucccaugga

SEQ ID NO: 128407 - RNA, 19 nt, Homo sapiens
  misc_RNA (1)...(19): siRNA sense strand
gcacgaaccuccauuagcu

SEQ ID NO: 128408 - RNA, 19 nt, Homo sapiens
  misc_RNA (1)...(19): siRNA sense strand
cagagaagaugcaacaaug

SEQ ID NO: 128409 - RNA, 19 nt, Homo sapiens
  misc_RNA (1)...(19): siRNA sense strand
gaucauugccuucuccuuu

SEQ ID NO: 128410 - RNA, 19 nt, Homo sapiens
  misc_RNA (1)...(19): siRNA sense strand
ccucagcucuggacaauga

SEQ ID NO: 128411 - RNA, 19 nt, Homo sapiens
  misc_RNA (1)...(19): siRNA sense strand
uaaaugaccucaacauggu

SEQ ID NO: 128412 - RNA, 19 nt, Homo sapiens
  misc_RNA (1)...(19): siRNA sense strand
ugacuacgacguugaguua

SEQ ID NO: 128413 - RNA, 19 nt, Homo sapiens
  misc_RNA (1)...(19): siRNA sense strand
ggauaugccuuugcuaaau

SEQ ID NO: 128414 - RNA, 19 nt, Homo sapiens
  misc_RNA (1)...(19): siRNA sense strand
ccaagucucagcuuucuua

SEQ ID NO: 128415 - RNA, 19 nt, Homo sapiens
  misc_RNA (1)...(19): siRNA sense strand
gaacaucgagagcgaaaug

SEQ ID NO: 128416 - RNA, 19 nt, Homo sapiens
  misc_RNA (1)...(19): siRNA sense strand
caagacagccauucagaaa

SEQ ID NO: 128417 - RNA, 19 nt, Homo sapiens
  misc_RNA (1)...(19): siRNA sense strand
gaccagaggugaagauucu

SEQ ID NO: 128418 - RNA, 19 nt, Homo sapiens
  misc_RNA (1)...(19): siRNA sense strand
ugccauagcugaccaaaug

SEQ ID NO: 128419 - RNA, 19 nt, Homo sapiens
  misc_RNA (1)...(19): siRNA sense strand
ggaaaucaagcucuuaaug

SEQ ID NO: 128420 - RNA, 19 nt, Homo sapiens
  misc_RNA (1)...(19): siRNA sense strand
ggagacaacaccaaagaaa

SEQ ID NO: 128421 - RNA, 19 nt, Homo sapiens
  misc_RNA (1)...(19): siRNA sense strand
gcacuagcauucagcuguu

SEQ ID NO: 128422 - RNA, 19 nt, Homo sapiens
  misc_RNA (1)...(19): siRNA sense strand
cauaaaggaugcaacugaa

SEQ ID NO: 128423 - RNA, 19 nt, Homo sapiens
  misc_RNA (1)...(19): siRNA sense strand
aauaucagcugcacgcuuu

SEQ ID NO: 128424 - RNA, 19 nt, Homo sapiens
  misc_RNA (1)...(19): siRNA sense strand
agagggagcuaccaggaua

SEQ ID NO: 128425 - RNA, 19 nt, Homo sapiens
  misc_RNA (1)...(19): siRNA sense strand
gagaggagaaugaugguuu

SEQ ID NO: 128426 - RNA, 19 nt, Homo sapiens
  misc_RNA (1)...(19): siRNA sense strand
gaaccuccauuagcuguug

SEQ ID NO: 128427 - RNA, 19 nt, Homo sapiens
  misc_RNA (1)...(19): siRNA sense strand
ccagagcccucauccgaaa

SEQ ID NO: 128428 - RNA, 19 nt, Homo sapiens
  misc_RNA (1)...(19): siRNA sense strand
gaugagugguggccagaaa

SEQ ID NO: 128429 - RNA, 19 nt, Homo sapiens
  misc_RNA (1)...(19): siRNA sense strand
ccagagaaauaugaaacua

SEQ ID NO: 128430 - RNA, 19 nt, Homo sapiens
  misc_RNA (1)...(19): siRNA sense strand
uuaggaggauucugaaauu

SEQ ID NO: 128431 - RNA, 19 nt, Homo sapiens
  misc_RNA (1)...(19): siRNA sense strand
ugggacagauuacaaauga

SEQ ID NO: 128432 - RNA, 19 nt, Homo sapiens
  misc_RNA (1)...(19): siRNA sense strand
gaucaaauuugccaguuac

SEQ ID NO: 128433 - RNA, 19 nt, Homo sapiens
  misc_RNA (1)...(19): siRNA sense strand
gcucaaacauuggaauugu

SEQ ID NO: 128434 - RNA, 19 nt, Homo sapiens
  misc_RNA (1)...(19): siRNA sense strand
aaauagcccuggagcauug

SEQ ID NO: 128435 - RNA, 19 nt, Homo sapiens
  misc_RNA (1)...(19): siRNA sense strand
ggagcuaccaggauaguuu

SEQ ID NO: 128436 - RNA, 19 nt, Homo sapiens
  misc_RNA (1)...(19): siRNA sense strand
ggaaaagcaugugugaaua

SEQ ID NO: 128437 - RNA, 19 nt, Homo sapiens
  misc_RNA (1)...(19): siRNA sense strand
aggcucagcugcaugauuu

SEQ ID NO: 128438 - RNA, 19 nt, Homo sapiens
  misc_RNA (1)...(19): siRNA sense strand
gagauggugggacagauua

SEQ ID NO: 128439 - RNA, 19 nt, Homo sapiens
  misc_RNA (1)...(19): siRNA sense strand
aaggaaagguguuuacuuc

SEQ ID NO: 128440 - RNA, 19 nt, Homo sapiens
  misc_RNA (1)...(19): siRNA sense strand
ggaaagagggacccaugaa

SEQ ID NO: 128441 - RNA, 19 nt, Homo sapiens
  misc_RNA (1)...(19): siRNA sense strand
caaguuggaucgaaucaag

SEQ ID NO: 128442 - RNA, 19 nt, Homo sapiens
  misc_RNA (1)...(19): siRNA sense strand
gaaacugaccuugguuauu

SEQ ID NO: 128443 - RNA, 19 nt, Homo sapiens
  misc_RNA (1)...(19): siRNA sense strand
uggaauugcugucgcagua

SEQ ID NO: 128444 - RNA, 19 nt, Homo sapiens
  misc_RNA (1)...(19): siRNA sense strand
gaacaugacaaauggaaca

SEQ ID NO: 128445 - RNA, 19 nt, Homo sapiens
  misc_RNA (1)...(19): siRNA sense strand
agaguuggcuucuuucaau

SEQ ID NO: 128446 - RNA, 19 nt, Homo sapiens
  misc_RNA (1)...(19): siRNA sense strand
gagaaacaacgcauugcua

SEQ ID NO: 128447 - RNA, 19 nt, Homo sapiens
  misc_RNA (1)...(19): siRNA sense strand
gaaauagcccuggagcauu

SEQ ID NO: 128448 - RNA, 19 nt, Homo sapiens
  misc_RNA (1)...(19): siRNA sense strand
gauaugccuuugcuaaauc

SEQ ID NO: 128449 - RNA, 19 nt, Homo sapiens
  misc_RNA (1)...(19): siRNA sense strand
gaaaucaagguuacaagau

SEQ ID NO: 128450 - RNA, 19 nt, Homo sapiens
  misc_RNA (1)...(19): siRNA sense strand
agagcgaaaugaucaaauu

SEQ ID NO: 128451 - RNA, 19 nt, Homo sapiens
  misc_RNA (1)...(19): siRNA sense strand
aaacaacgcauugcuauug

SEQ ID NO: 128452 - RNA, 19 nt, Homo sapiens
  misc_RNA (1)...(19): siRNA sense strand
caugaagaauuacuggaaa

SEQ ID NO: 128453 - RNA, 19 nt, Homo sapiens
  misc_RNA (1)...(19): siRNA sense strand
ugcaagaagugcugaguaa

SEQ ID NO: 128454 - RNA, 19 nt, Homo sapiens
  misc_RNA (1)...(19): siRNA sense strand
gcaaugccucuccuuguuu

SEQ ID NO: 128455 - RNA, 19 nt, Homo sapiens
  misc_RNA (1)...(19): siRNA sense strand
guaggagcuuuaaaucuug

SEQ ID NO: 128456 - RNA, 19 nt, Homo sapiens
  misc_RNA (1)...(19): siRNA sense strand
aguaggagcuuuaaaucuu

SEQ ID NO: 128457 - RNA, 19 nt, Homo sapiens
  misc_RNA (1)...(19): siRNA sense strand
ugagaacaguggcugcuuu

SEQ ID NO: 128458 - RNA, 19 nt, Homo sapiens
  misc_RNA (1)...(19): siRNA sense strand
gugaauaacaccauuguau

SEQ ID NO: 128459 - RNA, 19 nt, Homo sapiens
  misc_RNA (1)...(19): siRNA sense strand
ggauaucauugcugucaug

SEQ ID NO: 128460 - RNA, 19 nt, Homo sapiens
  misc_RNA (1)...(19): siRNA sense strand
ccagaacgcggauaucauu

SEQ ID NO: 128461 - RNA, 19 nt, Homo sapiens
  misc_RNA (1)...(19): siRNA sense strand
gaaacaacgcauugcuauu

SEQ ID NO: 128462 - RNA, 19 nt, Homo sapiens
  misc_RNA (1)...(19): siRNA sense strand
ccaaucaguguauacaaua

SEQ ID NO: 128463 - RNA, 19 nt, Homo sapiens
  misc_RNA (1)...(19): siRNA sense strand
caagaagugcugaguaaga

SEQ ID NO: 128464 - RNA, 19 nt, Homo sapiens
  misc_RNA (1)...(19): siRNA sense strand
gaaggaggaggccagauga

SEQ ID NO: 128465 - RNA, 19 nt, Homo sapiens
  misc_RNA (1)...(19): siRNA sense strand
guacagcacugcaacucau

SEQ ID NO: 128466 - RNA, 19 nt, Homo sapiens
  misc_RNA (1)...(19): siRNA sense strand
caaauuugccaguuacuau

SEQ ID NO: 128467 - RNA, 19 nt, Homo sapiens
  misc_RNA (1)...(19): siRNA sense strand
ugaucaaauuugccaguua

SEQ ID NO: 128468 - RNA, 19 nt, Homo sapiens
  misc_RNA (1)...(19): siRNA sense strand
acaagauucucugaugaua

SEQ ID NO: 128469 - RNA, 19 nt, Homo sapiens
  misc_RNA (1)...(19): siRNA sense strand
cguuagaguuggcuucuuu

SEQ ID NO: 128470 - RNA, 19 nt, Homo sapiens
  misc_RNA (1)...(19): siRNA sense strand
agacaacaccaaagaaauu

SEQ ID NO: 128471 - RNA, 19 nt, Homo sapiens
  misc_RNA (1)...(19): siRNA sense strand
gagcuaccaggauaguuua

SEQ ID NO: 128472 - RNA, 19 nt, Homo sapiens
  misc_RNA (1)...(19): siRNA sense strand
gaaagguguuuacuucacu

SEQ ID NO: 128473 - RNA, 19 nt, Homo sapiens
  misc_RNA (1)...(19): siRNA sense strand
agaagaugguuacaaguug

SEQ ID NO: 128474 - RNA, 19 nt, Homo sapiens
  misc_RNA (1)...(19): siRNA sense strand
guuacaagaugagaagaaa

SEQ ID NO: 128475 - RNA, 19 nt, Homo sapiens
  misc_RNA (1)...(19): siRNA sense strand
gcaaugggcuguguaucuc

SEQ ID NO: 128476 - RNA, 19 nt, Homo sapiens
  misc_RNA (1)...(19): siRNA sense strand
uccauuagcuguuguagau

SEQ ID NO: 128477 - RNA, 19 nt, Homo sapiens
  misc_RNA (1)...(19): siRNA sense strand
ugccgcagcucgucagaua

SEQ ID NO: 128478 - RNA, 19 nt, Homo sapiens
  misc_RNA (1)...(19): siRNA sense strand
ggucagagcugcagauacc

SEQ ID NO: 128479 - RNA, 19 nt, Homo sapiens
  misc_RNA (1)...(19): siRNA sense strand
gcagagaagaugcaacaau

SEQ ID NO: 128480 - RNA, 19 nt, Homo sapiens
  misc_RNA (1)...(19): siRNA sense strand
ggugguggcugaugaaguc

SEQ ID NO: 128481 - RNA, 19 nt, Homo sapiens
  misc_RNA (1)...(19): siRNA sense strand
gcugaaggccuaugccaaa

SEQ ID NO: 128482 - RNA, 19 nt, Homo sapiens
  misc_RNA (1)...(19): siRNA sense strand
aauacaagauucucugaug

SEQ ID NO: 128483 - RNA, 19 nt, Homo sapiens
  misc_RNA (1)...(19): siRNA sense strand
cgaccugacucgcaaguuc

SEQ ID NO: 128484 - RNA, 19 nt, Homo sapiens
  misc_RNA (1)...(19): siRNA sense strand
aaaucaagguuacaagaug

SEQ ID NO: 128485 - RNA, 19 nt, Homo sapiens
  misc_RNA (1)...(19): siRNA sense strand
ggaaagguguuuacuucac

SEQ ID NO: 128486 - RNA, 19 nt, Homo sapiens
  misc_RNA (1)...(19): siRNA sense strand
gcaagagccaguucuguuc

SEQ ID NO: 128487 - RNA, 19 nt, Homo sapiens
  misc_RNA (1)...(19): siRNA sense strand
caucugugguuuccuguug

SEQ ID NO: 128488 - RNA, 19 nt, Homo sapiens
  misc_RNA (1)...(19): siRNA sense strand
uugaagcacuugagacuga

SEQ ID NO: 128489 - RNA, 19 nt, Homo sapiens
  misc_RNA (1)...(19): siRNA sense strand
aagaauuacuggaaaggaa

SEQ ID NO: 128490 - RNA, 19 nt, Homo sapiens
  misc_RNA (1)...(19): siRNA sense strand
gaaggccuaugccaaagca

SEQ ID NO: 128491 - RNA, 19 nt, Homo sapiens
  misc_RNA (1)...(19): siRNA sense strand
ggaacuugcuccauuguuu

SEQ ID NO: 128492 - RNA, 19 nt, Homo sapiens
  misc_RNA (1)...(19): siRNA sense strand
cuaaagcgauucuuguaua

SEQ ID NO: 128493 - RNA, 19 nt, Homo sapiens
  misc_RNA (1)...(19): siRNA sense strand
uggaguaccuguuauuaaa

SEQ ID NO: 128494 - RNA, 19 nt, Homo sapiens
  misc_RNA (1)...(19): siRNA sense strand
gaagcaaacuuggacuuuc

SEQ ID NO: 128495 - RNA, 19 nt, Homo sapiens
  misc_RNA (1)...(19): siRNA sense strand
gauggaguaccuguuauua

SEQ ID NO: 128496 - RNA, 19 nt, Homo sapiens
  misc_RNA (1)...(19): siRNA sense strand
ggaagcaaacuuggacuuu

SEQ ID NO: 128497 - RNA, 19 nt, Homo sapiens
  misc_RNA (1)...(19): siRNA sense strand
gaacuugcuccauuguuug

SEQ ID NO: 128498 - RNA, 19 nt, Homo sapiens
  misc_RNA (1)...(19): siRNA sense strand
aaaggaacuugcuccauug

SEQ ID NO: 128499 - RNA, 19 nt, Homo sapiens
  misc_RNA (1)...(19): siRNA sense strand
agagauggaguaccuguua

SEQ ID NO: 128500 - RNA, 19 nt, Homo sapiens
  misc_RNA (1)...(19): siRNA sense strand
gagauggaguaccuguuau

SEQ ID NO: 128501 - RNA, 19 nt, Homo sapiens
  misc_RNA (1)...(19): siRNA sense strand
uuugcgaccugguuucuua

SEQ ID NO: 128502 - RNA, 19 nt, Homo sapiens
  misc_RNA (1)...(19): siRNA sense strand
ccaggugguucaauuuaau

SEQ ID NO: 128503 - RNA, 19 nt, Homo sapiens
  misc_RNA (1)...(19): siRNA sense strand
cggaugaccuaaagcgauu

SEQ ID NO: 128504 - RNA, 19 nt, Homo sapiens
  misc_RNA (1)...(19): siRNA sense strand
aaaaggaacuugcuccauu

SEQ ID NO: 128505 - RNA, 19 nt, Homo sapiens
  misc_RNA (1)...(19): siRNA sense strand
gaguaccuguuauuaaagu

SEQ ID NO: 128506 - RNA, 19 nt, Homo sapiens
  misc_RNA (1)...(19): siRNA sense strand
uaaaguggcaaaugacaau

SEQ ID NO: 128507 - RNA, 19 nt, Homo sapiens
  misc_RNA (1)...(19): siRNA sense strand
gugguucaauuuaaucguu

SEQ ID NO: 128508 - RNA, 19 nt, Homo sapiens
  misc_RNA (1)...(19): siRNA sense strand
uaccuuugguggugaguuu

SEQ ID NO: 128509 - RNA, 19 nt, Homo sapiens
  misc_RNA (1)...(19): siRNA sense strand
cagcagcagugccaauaca

SEQ ID NO: 128510 - RNA, 19 nt, Homo sapiens
  misc_RNA (1)...(19): siRNA sense strand
cuaauugucagccuagaaa

SEQ ID NO: 128511 - RNA, 19 nt, Homo sapiens
  misc_RNA (1)...(19): siRNA sense strand
gaagggcuccaugccauug

SEQ ID NO: 128512 - RNA, 19 nt, Homo sapiens
  misc_RNA (1)...(19): siRNA sense strand
aaaguuaccaaguguugaa

SEQ ID NO: 128513 - RNA, 19 nt, Homo sapiens
  misc_RNA (1)...(19): siRNA sense strand
gaccuaaagcgauucuugu

SEQ ID NO: 128514 - RNA, 19 nt, Homo sapiens
  misc_RNA (1)...(19): siRNA sense strand
caacagaccaaggaagcaa

SEQ ID NO: 128515 - RNA, 19 nt, Homo sapiens
  misc_RNA (1)...(19): siRNA sense strand
ugaccuaaagcgauucuug

SEQ ID NO: 128516 - RNA, 19 nt, Homo sapiens
  misc_RNA (1)...(19): siRNA sense strand
gccagcagcagugccaaua

SEQ ID NO: 128517 - RNA, 19 nt, Homo sapiens
  misc_RNA (1)...(19): siRNA sense strand
uugaagaacugagacaagu

SEQ ID NO: 128518 - RNA, 19 nt, Homo sapiens
  misc_RNA (1)...(19): siRNA sense strand
agauagagauggaguaccu

SEQ ID NO: 128519 - RNA, 19 nt, Homo sapiens
  misc_RNA (1)...(19): siRNA sense strand
ggaguaccuguuauuaaag

SEQ ID NO: 128520 - RNA, 19 nt, Homo sapiens
  misc_RNA (1)...(19): siRNA sense strand
ccuaaagcgauucuuguau

SEQ ID NO: 128521 - RNA, 19 nt, Homo sapiens
  misc_RNA (1)...(19): siRNA sense strand
gccauuguugugucagaua

SEQ ID NO: 128522 - RNA, 19 nt, Homo sapiens
  misc_RNA (1)...(19): siRNA sense strand
uuuaaucguuuaccuuugg

SEQ ID NO: 128523 - RNA, 19 nt, Homo sapiens
  misc_RNA (1)...(19): siRNA sense strand
ccauuguugugucagauag

SEQ ID NO: 128524 - RNA, 19 nt, Homo sapiens
  misc_RNA (1)...(19): siRNA sense strand
guuauuaaaguggcaaaug

SEQ ID NO: 128525 - RNA, 19 nt, Homo sapiens
  misc_RNA (1)...(19): siRNA sense strand
ccugguuucuuauccacuu

SEQ ID NO: 128526 - RNA, 19 nt, Homo sapiens
  misc_RNA (1)...(19): siRNA sense strand
cgaccugguuucuuaucca

SEQ ID NO: 128527 - RNA, 19 nt, Homo sapiens
  misc_RNA (1)...(19): siRNA sense strand
aauacaggacuaauuguca

SEQ ID NO: 128528 - RNA, 19 nt, Homo sapiens
  misc_RNA (1)...(19): siRNA sense strand
gagcuucgacugccucuuc

SEQ ID NO: 128529 - RNA, 19 nt, Homo sapiens
  misc_RNA (1)...(19): siRNA sense strand
gagcauccgcgugcacuuu

SEQ ID NO: 128530 - RNA, 19 nt, Homo sapiens
  misc_RNA (1)...(19): siRNA sense strand
gcgacuaccugagcuccuu

SEQ ID NO: 128531 - RNA, 19 nt, Homo sapiens
  misc_RNA (1)...(19): siRNA sense strand
gaaccuuccuccucuuccu

SEQ ID NO: 128532 - RNA, 19 nt, Homo sapiens
  misc_RNA (1)...(19): siRNA sense strand
ccagaaccuuccuccucuu

SEQ ID NO: 128533 - RNA, 19 nt, Homo sapiens
  misc_RNA (1)...(19): siRNA sense strand
gacacgcacuuccgcacau

SEQ ID NO: 128534 - RNA, 19 nt, Homo sapiens
  misc_RNA (1)...(19): siRNA sense strand
ccagguggcagccgacaau

SEQ ID NO: 128535 - RNA, 19 nt, Homo sapiens
  misc_RNA (1)...(19): siRNA sense strand
gcauccgcgugcacuuuca

SEQ ID NO: 128536 - RNA, 19 nt, Homo sapiens
  misc_RNA (1)...(19): siRNA sense strand
acacgcacuuccgcacauu

SEQ ID NO: 128537 - RNA, 19 nt, Homo sapiens
  misc_RNA (1)...(19): siRNA sense strand
ggacgccugcggauucuac

SEQ ID NO: 128538 - RNA, 19 nt, Homo sapiens
  misc_RNA (1)...(19): siRNA sense strand
uccguucgcacgccgauua

SEQ ID NO: 128539 - RNA, 19 nt, Homo sapiens
  misc_RNA (1)...(19): siRNA sense strand
gguggcagccgacaaugca

SEQ ID NO: 128540 - RNA, 19 nt, Homo sapiens
  misc_RNA (1)...(19): siRNA sense strand
gaaggaauuugacaagaag

SEQ ID NO: 128541 - RNA, 19 nt, Homo sapiens
  misc_RNA (1)...(19): siRNA sense strand
ggacaugucggaagagaug

SEQ ID NO: 128542 - RNA, 19 nt, Homo sapiens
  misc_RNA (1)...(19): siRNA sense strand
ccaaacacuucaucuacuu

SEQ ID NO: 128543 - RNA, 19 nt, Homo sapiens
  misc_RNA (1)...(19): siRNA sense strand
agaaggaauuugacaagaa

SEQ ID NO: 128544 - RNA, 19 nt, Homo sapiens
  misc_RNA (1)...(19): siRNA sense strand
caacauagagaaggacauu

SEQ ID NO: 128545 - RNA, 19 nt, Homo sapiens
  misc_RNA (1)...(19): siRNA sense strand
ggacauugcggcucauauc

SEQ ID NO: 128546 - RNA, 19 nt, Homo sapiens
  misc_RNA (1)...(19): siRNA sense strand
aaaccaaacacuucaucua

SEQ ID NO: 128547 - RNA, 19 nt, Homo sapiens
  misc_RNA (1)...(19): siRNA sense strand
caagaaggaauuugacaag

SEQ ID NO: 128548 - RNA, 19 nt, Homo sapiens
  misc_RNA (1)...(19): siRNA sense strand
gcucauaucaagaaggaau

SEQ ID NO: 128549 - RNA, 19 nt, Homo sapiens
  misc_RNA (1)...(19): siRNA sense strand
cggcucauaucaagaagga

SEQ ID NO: 128550 - RNA, 19 nt, Homo sapiens
  misc_RNA (1)...(19): siRNA sense strand
ccgaaaggccgugaucaaa

SEQ ID NO: 128551 - RNA, 19 nt, Homo sapiens
  misc_RNA (1)...(19): siRNA sense strand
aagaaggaauuugacaaga

SEQ ID NO: 128552 - RNA, 19 nt, Homo sapiens
  misc_RNA (1)...(19): siRNA sense strand
caaguggccauucuucugu

SEQ ID NO: 128553 - RNA, 19 nt, Homo sapiens
  misc_RNA (1)...(19): siRNA sense strand
gcggacaugucggaagaga

SEQ ID NO: 128554 - RNA, 19 nt, Homo sapiens
  misc_RNA (1)...(19): siRNA sense strand
gaaaccaaacacuucaucu

SEQ ID NO: 128555 - RNA, 19 nt, Homo sapiens
  misc_RNA (1)...(19): siRNA sense strand
ccauucuucuguucaaauc

SEQ ID NO: 128556 - RNA, 19 nt, Homo sapiens
  misc_RNA (1)...(19): siRNA sense strand
cuacucaggcgcuggagaa

SEQ ID NO: 128557 - RNA, 19 nt, Homo sapiens
  misc_RNA (1)...(19): siRNA sense strand
ccaaguggccauucuucug

SEQ ID NO: 128558 - RNA, 19 nt, Homo sapiens
  misc_RNA (1)...(19): siRNA sense strand
gacauugcggcucauauca

SEQ ID NO: 128559 - RNA, 19 nt, Homo sapiens
  misc_RNA (1)...(19): siRNA sense strand
cauugcggcucauaucaag

SEQ ID NO: 128560 - RNA, 19 nt, Homo sapiens
  misc_RNA (1)...(19): siRNA sense strand
gaauuugacaagaaguaca

SEQ ID NO: 128561 - RNA, 19 nt, Homo sapiens
  misc_RNA (1)...(19): siRNA sense strand
cacaugaaaccaaacacuu

SEQ ID NO: 128562 - RNA, 19 nt, Homo sapiens
  misc_RNA (1)...(19): siRNA sense strand
ggccauucuucuguucaaa

SEQ ID NO: 128563 - RNA, 19 nt, Homo sapiens
  misc_RNA (1)...(19): siRNA sense strand
cgaaaggccgugaucaaaa

SEQ ID NO: 128564 - RNA, 19 nt, Homo sapiens
  misc_RNA (1)...(19): siRNA sense strand
ugacacaugaaaccaaaca

SEQ ID NO: 128565 - RNA, 19 nt, Homo sapiens
  misc_RNA (1)...(19): siRNA sense strand
acaugaaaccaaacacuuc

SEQ ID NO: 128566 - RNA, 19 nt, Homo sapiens
  misc_RNA (1)...(19): siRNA sense strand
augcggacaugucggaaga

SEQ ID NO: 128567 - RNA, 19 nt, Homo sapiens
  misc_RNA (1)...(19): siRNA sense strand
caaacacuucaucuacuuc

SEQ ID NO: 128568 - RNA, 19 nt, Homo sapiens
  misc_RNA (1)...(19): siRNA sense strand
ggaauuugacaagaaguac

SEQ ID NO: 128569 - RNA, 19 nt, Homo sapiens
  misc_RNA (1)...(19): siRNA sense strand
gaaggacauugcggcucau

SEQ ID NO: 128570 - RNA, 19 nt, Homo sapiens
  misc_RNA (1)...(19): siRNA sense strand
uacaaucccaccuggcauu

SEQ ID NO: 128571 - RNA, 19 nt, Homo sapiens
  misc_RNA (1)...(19): siRNA sense strand
ccacaaaggugcugaggaa

SEQ ID NO: 128572 - RNA, 19 nt, Homo sapiens
  misc_RNA (1)...(19): siRNA sense strand
gacauaagguggccaaguu

SEQ ID NO: 128573 - RNA, 19 nt, Homo sapiens
  misc_RNA (1)...(19): siRNA sense strand
ggaagcagguggcccagaa

SEQ ID NO: 128574 - RNA, 19 nt, Homo sapiens
  misc_RNA (1)...(19): siRNA sense strand
gcaguguucucccaggaua

SEQ ID NO: 128575 - RNA, 19 nt, Homo sapiens
  misc_RNA (1)...(19): siRNA sense strand
caaguccacuggcucgaua

SEQ ID NO: 128576 - RNA, 19 nt, Homo sapiens
  misc_RNA (1)...(19): siRNA sense strand
gaaagaacuuccacuucgu

SEQ ID NO: 128577 - RNA, 19 nt, Homo sapiens
  misc_RNA (1)...(19): siRNA sense strand
cagcggaacucaucgacuu

SEQ ID NO: 128578 - RNA, 19 nt, Homo sapiens
  misc_RNA (1)...(19): siRNA sense strand
gcaacgugguccuauggaa

SEQ ID NO: 128579 - RNA, 19 nt, Homo sapiens
  misc_RNA (1)...(19): siRNA sense strand
gcggccaucucgcccuuua

SEQ ID NO: 128580 - RNA, 19 nt, Homo sapiens
  misc_RNA (1)...(19): siRNA sense strand
ggaaagagugggaccugaa

SEQ ID NO: 128581 - RNA, 19 nt, Homo sapiens
  misc_RNA (1)...(19): siRNA sense strand
gagcaccucuguggcauca

SEQ ID NO: 128582 - RNA, 19 nt, Homo sapiens
  misc_RNA (1)...(19): siRNA sense strand
ggccaacgagcccgucuua

SEQ ID NO: 128583 - RNA, 19 nt, Homo sapiens
  misc_RNA (1)...(19): siRNA sense strand
cuucuucucugcagugauu

SEQ ID NO: 128584 - RNA, 19 nt, Homo sapiens
  misc_RNA (1)...(19): siRNA sense strand
ucaaacaccuguggaagca

SEQ ID NO: 128585 - RNA, 19 nt, Homo sapiens
  misc_RNA (1)...(19): siRNA sense strand
caaaggugcugaggaaugc

SEQ ID NO: 128586 - RNA, 19 nt, Homo sapiens
  misc_RNA (1)...(19): siRNA sense strand
ggagcacagucggaucaaa

SEQ ID NO: 128587 - RNA, 19 nt, Homo sapiens
  misc_RNA (1)...(19): siRNA sense strand
ggccuguacugucugugua

SEQ ID NO: 128588 - RNA, 19 nt, Homo sapiens
  misc_RNA (1)...(19): siRNA sense strand
gcacaccuccucccugaag

SEQ ID NO: 128589 - RNA, 19 nt, Homo sapiens
  misc_RNA (1)...(19): siRNA sense strand
gccggcaacuucuacauca

SEQ ID NO: 128590 - RNA, 19 nt, Homo sapiens
  misc_RNA (1)...(19): siRNA sense strand
ccaaguccuuugcccguau

SEQ ID NO: 128591 - RNA, 19 nt, Homo sapiens
  misc_RNA (1)...(19): siRNA sense strand
gggcccagaucuuccugaa

SEQ ID NO: 128592 - RNA, 19 nt, Homo sapiens
  misc_RNA (1)...(19): siRNA sense strand
gaaagagugggaccugaag

SEQ ID NO: 128593 - RNA, 19 nt, Homo sapiens
  misc_RNA (1)...(19): siRNA sense strand
gcagugugcccaccuucaa

SEQ ID NO: 128594 - RNA, 19 nt, Homo sapiens
  misc_RNA (1)...(19): siRNA sense strand
ugagcgagaugcccugcaa

SEQ ID NO: 128595 - RNA, 19 nt, Homo sapiens
  misc_RNA (1)...(19): siRNA sense strand
ggacgugcaguaccaagug

SEQ ID NO: 128596 - RNA, 19 nt, Homo sapiens
  misc_RNA (1)...(19): siRNA sense strand
cgaguacgguggccagaag

SEQ ID NO: 128597 - RNA, 19 nt, Homo sapiens
  misc_RNA (1)...(19): siRNA sense strand
gcaccucuguggcaucaac

SEQ ID NO: 128598 - RNA, 19 nt, Homo sapiens
  misc_RNA (1)...(19): siRNA sense strand
gaggagcacagucggauca

SEQ ID NO: 128599 - RNA, 19 nt, Homo sapiens
  misc_RNA (1)...(19): siRNA sense strand
gagcacagucggaucaaag

SEQ ID NO: 128600 - RNA, 19 nt, Homo sapiens
  misc_RNA (1)...(19): siRNA sense strand
gcugagauccucgccaaga

SEQ ID NO: 128601 - RNA, 19 nt, Homo sapiens
  misc_RNA (1)...(19): siRNA sense strand
ggacauaagguggccaagu

SEQ ID NO: 128602 - RNA, 19 nt, Homo sapiens
  misc_RNA (1)...(19): siRNA sense strand
gaaugcugccggcaacuuc

SEQ ID NO: 128603 - RNA, 19 nt, Homo sapiens
  misc_RNA (1)...(19): siRNA sense strand
ggaacucaucgacuucuuc

SEQ ID NO: 128604 - RNA, 19 nt, Homo sapiens
  misc_RNA (1)...(19): siRNA sense strand
ugacagcaccaccagcuau

SEQ ID NO: 128605 - RNA, 19 nt, Homo sapiens
  misc_RNA (1)...(19): siRNA sense strand
uaccaagugucgccuuuua

SEQ ID NO: 128606 - RNA, 19 nt, Homo sapiens
  misc_RNA (1)...(19): siRNA sense strand
ccaacaucauccaguuugu

SEQ ID NO: 128607 - RNA, 19 nt, Homo sapiens
  misc_RNA (1)...(19): siRNA sense strand
ccgguucaaugccaaguau

SEQ ID NO: 128608 - RNA, 19 nt, Homo sapiens
  misc_RNA (1)...(19): siRNA sense strand
agugggaccugaagccuau

SEQ ID NO: 128609 - RNA, 19 nt, Homo sapiens
  misc_RNA (1)...(19): siRNA sense strand
ucaucaaggagacacauaa

SEQ ID NO: 128610 - RNA, 19 nt, Homo sapiens
  misc_RNA (1)...(19): siRNA sense strand
acaaaggugcugaggaaug

SEQ ID NO: 128611 - RNA, 19 nt, Homo sapiens
  misc_RNA (1)...(19): siRNA sense strand
ggaaugcugccggcaacuu

SEQ ID NO: 128612 - RNA, 19 nt, Homo sapiens
  misc_RNA (1)...(19): siRNA sense strand
gaucuucgggccuguacug

SEQ ID NO: 128613 - RNA, 19 nt, Homo sapiens
  misc_RNA (1)...(19): siRNA sense strand
ccucaggagcccaucauga

SEQ ID NO: 128614 - RNA, 19 nt, Homo sapiens
  misc_RNA (1)...(19): siRNA sense strand
cgccgcaggucaucaagga

SEQ ID NO: 128615 - RNA, 19 nt, Homo sapiens
  misc_RNA (1)...(19): siRNA sense strand
ccaucucgcccuuuaacuu

SEQ ID NO: 128616 - RNA, 19 nt, Homo sapiens
  misc_RNA (1)...(19): siRNA sense strand
cccuuuaacuucacugcaa

SEQ ID NO: 128617 - RNA, 19 nt, Homo sapiens
  misc_RNA (1)...(19): siRNA sense strand
caucucgcccuuuaacuuc

SEQ ID NO: 128618 - RNA, 19 nt, Homo sapiens
  misc_RNA (1)...(19): siRNA sense strand
gacgugcaguaccaagugu

SEQ ID NO: 128619 - RNA, 19 nt, Homo sapiens
  misc_RNA (1)...(19): siRNA sense strand
ggagaucuucgggccugua

SEQ ID NO: 128620 - RNA, 19 nt, Homo sapiens
  misc_RNA (1)...(19): siRNA sense strand
gcacagucggaucaaagug

SEQ ID NO: 128621 - RNA, 19 nt, Homo sapiens
  misc_RNA (1)...(19): siRNA sense strand
caacaucauccaguuugug

SEQ ID NO: 128622 - RNA, 19 nt, Homo sapiens
  misc_RNA (1)...(19): siRNA sense strand
cucaggagcccaucaugaa

SEQ ID NO: 128623 - RNA, 19 nt, Homo sapiens
  misc_RNA (1)...(19): siRNA sense strand
gagccucuggaaccaauga

SEQ ID NO: 128624 - RNA, 19 nt, Homo sapiens
  misc_RNA (1)...(19): siRNA sense strand
ccaacgagcccgucuuagc

SEQ ID NO: 128625 - RNA, 19 nt, Homo sapiens
  misc_RNA (1)...(19): siRNA sense strand
gagcccgucuuagccuuca

SEQ ID NO: 128626 - RNA, 19 nt, Homo sapiens
  misc_RNA (1)...(19): siRNA sense strand
guggccaaguucuguuaug

SEQ ID NO: 128627 - RNA, 19 nt, Homo sapiens
  misc_RNA (1)...(19): siRNA sense strand
ggagcuacgcguacaugca

SEQ ID NO: 128628 - RNA, 19 nt, Homo sapiens
  misc_RNA (1)...(19): siRNA sense strand
ccgagccucuggaaccaau

SEQ ID NO: 128629 - RNA, 19 nt, Homo sapiens
  misc_RNA (1)...(19): siRNA sense strand
uaagguggccaaguucugu

SEQ ID NO: 128630 - RNA, 19 nt, Homo sapiens
  misc_RNA (1)...(19): siRNA sense strand
ccugaaggcggcagacaug

SEQ ID NO: 128631 - RNA, 19 nt, Homo sapiens
  misc_RNA (1)...(19): siRNA sense strand
ugacuccgugggcuacuuu

SEQ ID NO: 128632 - RNA, 19 nt, Homo sapiens
  misc_RNA (1)...(19): siRNA sense strand
aguaccaagugucgccuuu

SEQ ID NO: 128633 - RNA, 19 nt, Homo sapiens
  misc_RNA (1)...(19): siRNA sense strand
gggcaacgugguccuaugg

SEQ ID NO: 128634 - RNA, 19 nt, Homo sapiens
  misc_RNA (1)...(19): siRNA sense strand
gacagcaccaccagcuaug

SEQ ID NO: 128635 - RNA, 19 nt, Homo sapiens
  misc_RNA (1)...(19): siRNA sense strand
gagcgagaugcccugcaaa

SEQ ID NO: 128636 - RNA, 19 nt, Homo sapiens
  misc_RNA (1)...(19): siRNA sense strand
cuucgggccuguacugucu

SEQ ID NO: 128637 - RNA, 19 nt, Homo sapiens
  misc_RNA (1)...(19): siRNA sense strand
caaguccuuugcccguauc

SEQ ID NO: 128638 - RNA, 19 nt, Homo sapiens
  misc_RNA (1)...(19): siRNA sense strand
ccgcucagccuucgaguac

SEQ ID NO: 128639 - RNA, 19 nt, Homo sapiens
  misc_RNA (1)...(19): siRNA sense strand
ccacaaaggugcugaggaa

SEQ ID NO: 128640 - RNA, 19 nt, Homo sapiens
  misc_RNA (1)...(19): siRNA sense strand
gacauaagguggccaaguu

SEQ ID NO: 128641 - RNA, 19 nt, Homo sapiens
  misc_RNA (1)...(19): siRNA sense strand
ggaagcagguggcccagaa

SEQ ID NO: 128642 - RNA, 19 nt, Homo sapiens
  misc_RNA (1)...(19): siRNA sense strand
gcaguguucucccaggaua

SEQ ID NO: 128643 - RNA, 19 nt, Homo sapiens
  misc_RNA (1)...(19): siRNA sense strand
caaguccacuggcucgaua

SEQ ID NO: 128644 - RNA, 19 nt, Homo sapiens
  misc_RNA (1)...(19): siRNA sense strand
gaaagaacuuccacuucgu

SEQ ID NO: 128645 - RNA, 19 nt, Homo sapiens
  misc_RNA (1)...(19): siRNA sense strand
cagcggaacucaucgacuu

SEQ ID NO: 128646 - RNA, 19 nt, Homo sapiens
  misc_RNA (1)...(19): siRNA sense strand
gcaacgugguccuauggaa

SEQ ID NO: 128647 - RNA, 19 nt, Homo sapiens
  misc_RNA (1)...(19): siRNA sense strand
gcggccaucucgcccuuua

SEQ ID NO: 128648 - RNA, 19 nt, Homo sapiens
  misc_RNA (1)...(19): siRNA sense strand
ggaaagagugggaccugaa

SEQ ID NO: 128649 - RNA, 19 nt, Homo sapiens
  misc_RNA (1)...(19): siRNA sense strand
gagcaccucuguggcauca

SEQ ID NO: 128650 - RNA, 19 nt, Homo sapiens
  misc_RNA (1)...(19): siRNA sense strand
ggccaacgagcccgucuua

SEQ ID NO: 128651 - RNA, 19 nt, Homo sapiens
  misc_RNA (1)...(19): siRNA sense strand
cuucuucucugcagugauu

SEQ ID NO: 128652 - RNA, 19 nt, Homo sapiens
  misc_RNA (1)...(19): siRNA sense strand
ucaaacaccuguggaagca

SEQ ID NO: 128653 - RNA, 19 nt, Homo sapiens
  misc_RNA (1)...(19): siRNA sense strand
caaaggugcugaggaaugc

SEQ ID NO: 128654 - RNA, 19 nt, Homo sapiens
  misc_RNA (1)...(19): siRNA sense strand
ggagcacagucggaucaaa

SEQ ID NO: 128655 - RNA, 19 nt, Homo sapiens
  misc_RNA (1)...(19): siRNA sense strand
ggccuguacugucugugua

SEQ ID NO: 128656 - RNA, 19 nt, Homo sapiens
  misc_RNA (1)...(19): siRNA sense strand
gcacaccuccucccugaag

SEQ ID NO: 128657 - RNA, 19 nt, Homo sapiens
  misc_RNA (1)...(19): siRNA sense strand
gccggcaacuucuacauca

SEQ ID NO: 128658 - RNA, 19 nt, Homo sapiens
  misc_RNA (1)...(19): siRNA sense strand
ccaaguccuuugcccguau

SEQ ID NO: 128659 - RNA, 19 nt, Homo sapiens
  misc_RNA (1)...(19): siRNA sense strand
gggcccagaucuuccugaa

SEQ ID NO: 128660 - RNA, 19 nt, Homo sapiens
  misc_RNA (1)...(19): siRNA sense strand
gaaagagugggaccugaag

SEQ ID NO: 128661 - RNA, 19 nt, Homo sapiens
  misc_RNA (1)...(19): siRNA sense strand
gcagugugcccaccuucaa

SEQ ID NO: 128662 - RNA, 19 nt, Homo sapiens
  misc_RNA (1)...(19): siRNA sense strand
ugagcgagaugcccugcaa

SEQ ID NO: 128663 - RNA, 19 nt, Homo sapiens
  misc_RNA (1)...(19): siRNA sense strand
ggacgugcaguaccaagug

SEQ ID NO: 128664 - RNA, 19 nt, Homo sapiens
  misc_RNA (1)...(19): siRNA sense strand
cgaguacgguggccagaag

SEQ ID NO: 128665 - RNA, 19 nt, Homo sapiens
  misc_RNA (1)...(19): siRNA sense strand
gcaccucuguggcaucaac

SEQ ID NO: 128666 - RNA, 19 nt, Homo sapiens
  misc_RNA (1)...(19): siRNA sense strand
gaggagcacagucggauca

SEQ ID NO: 128667 - RNA, 19 nt, Homo sapiens
  misc_RNA (1)...(19): siRNA sense strand
gagcacagucggaucaaag

SEQ ID NO: 128668 - RNA, 19 nt, Homo sapiens
  misc_RNA (1)...(19): siRNA sense strand
gcugagauccucgccaaga

SEQ ID NO: 128669 - RNA, 19 nt, Homo sapiens
  misc_RNA (1)...(19): siRNA sense strand
ggacauaagguggccaagu

SEQ ID NO: 128670 - RNA, 19 nt, Homo sapiens
  misc_RNA (1)...(19): siRNA sense strand
gaaugcugccggcaacuuc

SEQ ID NO: 128671 - RNA, 19 nt, Homo sapiens
  misc_RNA (1)...(19): siRNA sense strand
ggaacucaucgacuucuuc

SEQ ID NO: 128672 - RNA, 19 nt, Homo sapiens
  misc_RNA (1)...(19): siRNA sense strand
ugacagcaccaccagcuau

SEQ ID NO: 128673 - RNA, 19 nt, Homo sapiens
  misc_RNA (1)...(19): siRNA sense strand
uaccaagugucgccuuuua

SEQ ID NO: 128674 - RNA, 19 nt, Homo sapiens
  misc_RNA (1)...(19): siRNA sense strand
ccaacaucauccaguuugu

SEQ ID NO: 128675 - RNA, 19 nt, Homo sapiens
  misc_RNA (1)...(19): siRNA sense strand
ccgguucaaugccaaguau

SEQ ID NO: 128676 - RNA, 19 nt, Homo sapiens
  misc_RNA (1)...(19): siRNA sense strand
agugggaccugaagccuau

SEQ ID NO: 128677 - RNA, 19 nt, Homo sapiens
  misc_RNA (1)...(19): siRNA sense strand
ucaucaaggagacacauaa

SEQ ID NO: 128678 - RNA, 19 nt, Homo sapiens
  misc_RNA (1)...(19): siRNA sense strand
acaaaggugcugaggaaug

SEQ ID NO: 128679 - RNA, 19 nt, Homo sapiens
  misc_RNA (1)...(19): siRNA sense strand
ggaaugcugccggcaacuu

SEQ ID NO: 128680 - RNA, 19 nt, Homo sapiens
  misc_RNA (1)...(19): siRNA sense strand
gaucuucgggccuguacug

SEQ ID NO: 128681 - RNA, 19 nt, Homo sapiens
  misc_RNA (1)...(19): siRNA sense strand
ccucaggagcccaucauga

SEQ ID NO: 128682 - RNA, 19 nt, Homo sapiens
  misc_RNA (1)...(19): siRNA sense strand
cgccgcaggucaucaagga

SEQ ID NO: 128683 - RNA, 19 nt, Homo sapiens
  misc_RNA (1)...(19): siRNA sense strand
ccaucucgcccuuuaacuu

SEQ ID NO: 128684 - RNA, 19 nt, Homo sapiens
  misc_RNA (1)...(19): siRNA sense strand
cccuuuaacuucacugcaa

SEQ ID NO: 128685 - RNA, 19 nt, Homo sapiens
  misc_RNA (1)...(19): siRNA sense strand
caucucgcccuuuaacuuc

SEQ ID NO: 128686 - RNA, 19 nt, Homo sapiens
  misc_RNA (1)...(19): siRNA sense strand
gacgugcaguaccaagugu

SEQ ID NO: 128687 - RNA, 19 nt, Homo sapiens
  misc_RNA (1)...(19): siRNA sense strand
ggagaucuucgggccugua

SEQ ID NO: 128688 - RNA, 19 nt, Homo sapiens
  misc_RNA (1)...(19): siRNA sense strand
gcacagucggaucaaagug

SEQ ID NO: 128689 - RNA, 19 nt, Homo sapiens
  misc_RNA (1)...(19): siRNA sense strand
caacaucauccaguuugug

SEQ ID NO: 128690 - RNA, 19 nt, Homo sapiens
  misc_RNA (1)...(19): siRNA sense strand
cucaggagcccaucaugaa

SEQ ID NO: 128691 - RNA, 19 nt, Homo sapiens
  misc_RNA (1)...(19): siRNA sense strand
gagccucuggaaccaauga

SEQ ID NO: 128692 - RNA, 19 nt, Homo sapiens
  misc_RNA (1)...(19): siRNA sense strand
ccaacgagcccgucuuagc

SEQ ID NO: 128693 - RNA, 19 nt, Homo sapiens
  misc_RNA (1)...(19): siRNA sense strand
gagcccgucuuagccuuca

SEQ ID NO: 128694 - RNA, 19 nt, Homo sapiens
  misc_RNA (1)...(19): siRNA sense strand
guggccaaguucuguuaug

SEQ ID NO: 128695 - RNA, 19 nt, Homo sapiens
  misc_RNA (1)...(19): siRNA sense strand
ggagcuacgcguacaugca

SEQ ID NO: 128696 - RNA, 19 nt, Homo sapiens
  misc_RNA (1)...(19): siRNA sense strand
ccgagccucuggaaccaau

SEQ ID NO: 128697 - RNA, 19 nt, Homo sapiens
  misc_RNA (1)...(19): siRNA sense strand
uaagguggccaaguucugu

SEQ ID NO: 128698 - RNA, 19 nt, Homo sapiens
  misc_RNA (1)...(19): siRNA sense strand
ccugaaggcggcagacaug

SEQ ID NO: 128699 - RNA, 19 nt, Homo sapiens
  misc_RNA (1)...(19): siRNA sense strand
ugacuccgugggcuacuuu

SEQ ID NO: 128700 - RNA, 19 nt, Homo sapiens
  misc_RNA (1)...(19): siRNA sense strand
aguaccaagugucgccuuu

SEQ ID NO: 128701 - RNA, 19 nt, Homo sapiens
  misc_RNA (1)...(19): siRNA sense strand
gggcaacgugguccuaugg

SEQ ID NO: 128702 - RNA, 19 nt, Homo sapiens
  misc_RNA (1)...(19): siRNA sense strand
gacagcaccaccagcuaug

SEQ ID NO: 128703 - RNA, 19 nt, Homo sapiens
  misc_RNA (1)...(19): siRNA sense strand
gagcgagaugcccugcaaa

SEQ ID NO: 128704 - RNA, 19 nt, Homo sapiens
  misc_RNA (1)...(19): siRNA sense strand
cuucgggccuguacugucu

SEQ ID NO: 128705 - RNA, 19 nt, Homo sapiens
  misc_RNA (1)...(19): siRNA sense strand
caaguccuuugcccguauc

SEQ ID NO: 128706 - RNA, 19 nt, Homo sapiens
  misc_RNA (1)...(19): siRNA sense strand
ccgcucagccuucgaguac

SEQ ID NO: 128707 - RNA, 19 nt, Homo sapiens
  misc_RNA (1)...(19): siRNA sense strand
ucaaggagcucuucgaguu

SEQ ID NO: 128708 - RNA, 19 nt, Homo sapiens
  misc_RNA (1)...(19): siRNA sense strand
caacacagccgcuccaugu

SEQ ID NO: 128709 - RNA, 19 nt, Homo sapiens
  misc_RNA (1)...(19): siRNA sense strand
guacaucaacaucgacuuu

SEQ ID NO: 128710 - RNA, 19 nt, Homo sapiens
  misc_RNA (1)...(19): siRNA sense strand
ggucuccgcucuccgacua

SEQ ID NO: 128711 - RNA, 19 nt, Homo sapiens
  misc_RNA (1)...(19): siRNA sense strand
gcagaagcauggccacaag

SEQ ID NO: 128712 - RNA, 19 nt, Homo sapiens
  misc_RNA (1)...(19): siRNA sense strand
cugccucgcuggaugaaua

SEQ ID NO: 128713 - RNA, 19 nt, Homo sapiens
  misc_RNA (1)...(19): siRNA sense strand
aaaugucucucucaggaaa

SEQ ID NO: 128714 - RNA, 19 nt, Homo sapiens
  misc_RNA (1)...(19): siRNA sense strand
gcgaguacaucaacaucga

SEQ ID NO: 128715 - RNA, 19 nt, Homo sapiens
  misc_RNA (1)...(19): siRNA sense strand
agaauggucucaacuacau

SEQ ID NO: 128716 - RNA, 19 nt, Homo sapiens
  misc_RNA (1)...(19): siRNA sense strand
caacucggccuccguggaa

SEQ ID NO: 128717 - RNA, 19 nt, Homo sapiens
  misc_RNA (1)...(19): siRNA sense strand
ggacagcuucuucuucauc

SEQ ID NO: 128718 - RNA, 19 nt, Homo sapiens
  misc_RNA (1)...(19): siRNA sense strand
ucggacagcuucuucuuca

SEQ ID NO: 128719 - RNA, 19 nt, Homo sapiens
  misc_RNA (1)...(19): siRNA sense strand
ccagaauggucucaacuac

SEQ ID NO: 128720 - RNA, 19 nt, Homo sapiens
  misc_RNA (1)...(19): siRNA sense strand
caacaccuacgccagcauu

SEQ ID NO: 128721 - RNA, 19 nt, Homo sapiens
  misc_RNA (1)...(19): siRNA sense strand
guacuacgagagcgagaaa

SEQ ID NO: 128722 - RNA, 19 nt, Homo sapiens
  misc_RNA (1)...(19): siRNA sense strand
gcaacacgcccgaguccau

SEQ ID NO: 128723 - RNA, 19 nt, Homo sapiens
  misc_RNA (1)...(19): siRNA sense strand
ggaggccaccaucgugaaa

SEQ ID NO: 128724 - RNA, 19 nt, Homo sapiens
  misc_RNA (1)...(19): siRNA sense strand
ucaacuacaucgccaucga

SEQ ID NO: 128725 - RNA, 19 nt, Homo sapiens
  misc_RNA (1)...(19): siRNA sense strand
gaccaguacgugcucauga

SEQ ID NO: 128726 - RNA, 19 nt, Homo sapiens
  misc_RNA (1)...(19): siRNA sense strand
ggaugaauacacccugaug

SEQ ID NO: 128727 - RNA, 19 nt, Homo sapiens
  misc_RNA (1)...(19): siRNA sense strand
cuacaugaaccucgacuuc

SEQ ID NO: 128728 - RNA, 19 nt, Homo sapiens
  misc_RNA (1)...(19): siRNA sense strand
ccaugaaggcgcucaagga

SEQ ID NO: 128729 - RNA, 19 nt, Homo sapiens
  misc_RNA (1)...(19): siRNA sense strand
caacaacaacaacaacaac

SEQ ID NO: 128730 - RNA, 19 nt, Homo sapiens
  misc_RNA (1)...(19): siRNA sense strand
caacaacaacaacaacaac

SEQ ID NO: 128731 - RNA, 19 nt, Homo sapiens
  misc_RNA (1)...(19): siRNA sense strand
caacaacaacaacaacaac

SEQ ID NO: 128732 - RNA, 19 nt, Homo sapiens
  misc_RNA (1)...(19): siRNA sense strand
cgccagcauugacuucuug

SEQ ID NO: 128733 - RNA, 19 nt, Homo sapiens
  misc_RNA (1)...(19): siRNA sense strand
ucaacaacaacaacaacaa

SEQ ID NO: 128734 - RNA, 19 nt, Homo sapiens
  misc_RNA (1)...(19): siRNA sense strand
caggagcgacgacuacaug

SEQ ID NO: 128735 - RNA, 19 nt, Homo sapiens
  misc_RNA (1)...(19): siRNA sense strand
ccagaggacuacggagaca

SEQ ID NO: 128736 - RNA, 19 nt, Homo sapiens
  misc_RNA (1)...(19): siRNA sense strand
gaucgcccaugcgcagaga

SEQ ID NO: 128737 - RNA, 19 nt, Homo sapiens
  misc_RNA (1)...(19): siRNA sense strand
cgaggacaguggguacaug

SEQ ID NO: 128738 - RNA, 19 nt, Homo sapiens
  misc_RNA (1)...(19): siRNA sense strand
caaggagcucuucgaguuc

SEQ ID NO: 128739 - RNA, 19 nt, Homo sapiens
  misc_RNA (1)...(19): siRNA sense strand
cuacggagacaucgagauc

SEQ ID NO: 128740 - RNA, 19 nt, Homo sapiens
  misc_RNA (1)...(19): siRNA sense strand
ggcagacgacggcuacaug

SEQ ID NO: 128741 - RNA, 19 nt, Homo sapiens
  misc_RNA (1)...(19): siRNA sense strand
acaacaacaacaacaacaa

SEQ ID NO: 128742 - RNA, 19 nt, Homo sapiens
  misc_RNA (1)...(19): siRNA sense strand
acaacaacaacaacaacaa

SEQ ID NO: 128743 - RNA, 19 nt, Homo sapiens
  misc_RNA (1)...(19): siRNA sense strand
ugaucgcccucuacaccaa

SEQ ID NO: 128744 - RNA, 19 nt, Homo sapiens
  misc_RNA (1)...(19): siRNA sense strand
cuucuugucccaccacuug

SEQ ID NO: 128745 - RNA, 19 nt, Homo sapiens
  misc_RNA (1)...(19): siRNA sense strand
cagaauggucucaacuaca

SEQ ID NO: 128746 - RNA, 19 nt, Homo sapiens
  misc_RNA (1)...(19): siRNA sense strand
acaccaaggacgaguacuu

SEQ ID NO: 128747 - RNA, 19 nt, Homo sapiens
  misc_RNA (1)...(19): siRNA sense strand
gccccaaccucaacaacaa

SEQ ID NO: 128748 - RNA, 19 nt, Homo sapiens
  misc_RNA (1)...(19): siRNA sense strand
ccacucggacagcuucuuc

SEQ ID NO: 128749 - RNA, 19 nt, Homo sapiens
  misc_RNA (1)...(19): siRNA sense strand
ggacaaaucagaaagcuua

SEQ ID NO: 128750 - RNA, 19 nt, Homo sapiens
  misc_RNA (1)...(19): siRNA sense strand
ucaaguggaugaaguuauu

SEQ ID NO: 128751 - RNA, 19 nt, Homo sapiens
  misc_RNA (1)...(19): siRNA sense strand
caacagauccaaacaacuu

SEQ ID NO: 128752 - RNA, 19 nt, Homo sapiens
  misc_RNA (1)...(19): siRNA sense strand
ggagagacuagaugaacua

SEQ ID NO: 128753 - RNA, 19 nt, Homo sapiens
  misc_RNA (1)...(19): siRNA sense strand
gagacuagaugaacuacag

SEQ ID NO: 128754 - RNA, 19 nt, Homo sapiens
  misc_RNA (1)...(19): siRNA sense strand
uuaagcauguucagaauca

SEQ ID NO: 128755 - RNA, 19 nt, Homo sapiens
  misc_RNA (1)...(19): siRNA sense strand
caacuucgaaggcaaaugu

SEQ ID NO: 128756 - RNA, 19 nt, Homo sapiens
  misc_RNA (1)...(19): siRNA sense strand
uagaugaacuacaggacaa

SEQ ID NO: 128757 - RNA, 19 nt, Homo sapiens
  misc_RNA (1)...(19): siRNA sense strand
gggaccaucuggaccaaga

SEQ ID NO: 128758 - RNA, 19 nt, Homo sapiens
  misc_RNA (1)...(19): siRNA sense strand
caaaugugguggcguggau

SEQ ID NO: 128759 - RNA, 19 nt, Homo sapiens
  misc_RNA (1)...(19): siRNA sense strand
uggaugaaguuauugaugu

SEQ ID NO: 128760 - RNA, 19 nt, Homo sapiens
  misc_RNA (1)...(19): siRNA sense strand
gaaucaaguggaugaaguu

SEQ ID NO: 128761 - RNA, 19 nt, Homo sapiens
  misc_RNA (1)...(19): siRNA sense strand
ggaugaaguuauugauguc

SEQ ID NO: 128762 - RNA, 19 nt, Homo sapiens
  misc_RNA (1)...(19): siRNA sense strand
caugaaauaccguacuuga

SEQ ID NO: 128763 - RNA, 19 nt, Homo sapiens
  misc_RNA (1)...(19): siRNA sense strand
caaugaugaugaugucaca

SEQ ID NO: 128764 - RNA, 19 nt, Homo sapiens
  misc_RNA (1)...(19): siRNA sense strand
agaaucaaguggaugaagu

SEQ ID NO: 128765 - RNA, 19 nt, Homo sapiens
  misc_RNA (1)...(19): siRNA sense strand
cuacaggacaaaucagaaa

SEQ ID NO: 128766 - RNA, 19 nt, Homo sapiens
  misc_RNA (1)...(19): siRNA sense strand
ccaccucaaugaugaugau

SEQ ID NO: 128767 - RNA, 19 nt, Homo sapiens
  misc_RNA (1)...(19): siRNA sense strand
aaacaacuucgaaggcaaa

SEQ ID NO: 128768 - RNA, 19 nt, Homo sapiens
  misc_RNA (1)...(19): siRNA sense strand
ugaaguuauugaugucaug

SEQ ID NO: 128769 - RNA, 19 nt, Homo sapiens
  misc_RNA (1)...(19): siRNA sense strand
gucaugaaauaccguacuu

SEQ ID NO: 128770 - RNA, 19 nt, Homo sapiens
  misc_RNA (1)...(19): siRNA sense strand
uggaagaugauucagauga

SEQ ID NO: 128771 - RNA, 19 nt, Homo sapiens
  misc_RNA (1)...(19): siRNA sense strand
gggagagacuagaugaacu

SEQ ID NO: 128772 - RNA, 19 nt, Homo sapiens
  misc_RNA (1)...(19): siRNA sense strand
caucauggcuuugguugcu

SEQ ID NO: 128773 - RNA, 19 nt, Homo sapiens
  misc_RNA (1)...(19): siRNA sense strand
ugaacuacaggacaaauca

SEQ ID NO: 128774 - RNA, 19 nt, Homo sapiens
  misc_RNA (1)...(19): siRNA sense strand
caaaauaaaagccaucaug

SEQ ID NO: 128775 - RNA, 19 nt, Homo sapiens
  misc_RNA (1)...(19): siRNA sense strand
uggcguggaugcaaaauaa

SEQ ID NO: 128776 - RNA, 19 nt, Homo sapiens
  misc_RNA (1)...(19): siRNA sense strand
ccucaaugaugaugauguc

SEQ ID NO: 128777 - RNA, 19 nt, Homo sapiens
  misc_RNA (1)...(19): siRNA sense strand
uuuggaagaugauucagau

SEQ ID NO: 128778 - RNA, 19 nt, Homo sapiens
  misc_RNA (1)...(19): siRNA sense strand
caaaucagaaagcuuaucg

SEQ ID NO: 128779 - RNA, 19 nt, Homo sapiens
  misc_RNA (1)...(19): siRNA sense strand
gugguggcguggaugcaaa

SEQ ID NO: 128780 - RNA, 19 nt, Homo sapiens
  misc_RNA (1)...(19): siRNA sense strand
gauaaugcaacagcuuuua

SEQ ID NO: 128781 - RNA, 19 nt, Homo sapiens
  misc_RNA (1)...(19): siRNA sense strand
cggauaaugcaacagcuuu

SEQ ID NO: 128782 - RNA, 19 nt, Homo sapiens
  misc_RNA (1)...(19): siRNA sense strand
caagauuuggaccuagaaa

SEQ ID NO: 128783 - RNA, 19 nt, Homo sapiens
  misc_RNA (1)...(19): siRNA sense strand
gaugaugaugucacagguu

SEQ ID NO: 128784 - RNA, 19 nt, Homo sapiens
  misc_RNA (1)...(19): siRNA sense strand
uuaagcgccaccucaauga

SEQ ID NO: 128785 - RNA, 19 nt, Homo sapiens
  misc_RNA (1)...(19): siRNA sense strand
uggcuuugguugcugcuau

SEQ ID NO: 128786 - RNA, 19 nt, Homo sapiens
  misc_RNA (1)...(19): siRNA sense strand
uagcaacagauccaaacaa

SEQ ID NO: 128787 - RNA, 19 nt, Homo sapiens
  misc_RNA (1)...(19): siRNA sense strand
aaucaaguggaugaaguua

SEQ ID NO: 128788 - RNA, 19 nt, Homo sapiens
  misc_RNA (1)...(19): siRNA sense strand
aaggagaaaucuuuuggaa

SEQ ID NO: 128789 - RNA, 19 nt, Homo sapiens
  misc_RNA (1)...(19): siRNA sense strand
guggaugaaguuauugaug

SEQ ID NO: 128790 - RNA, 19 nt, Homo sapiens
  misc_RNA (1)...(19): siRNA sense strand
agaugaagaagaggacuuu

SEQ ID NO: 128791 - RNA, 19 nt, Homo sapiens
  misc_RNA (1)...(19): siRNA sense strand
gaacuacaggacaaaucag

SEQ ID NO: 128792 - RNA, 19 nt, Homo sapiens
  misc_RNA (1)...(19): siRNA sense strand
ggaccuagaaaugauaaaa

SEQ ID NO: 128793 - RNA, 19 nt, Homo sapiens
  misc_RNA (1)...(19): siRNA sense strand
gaugaacuacaggacaaau

SEQ ID NO: 128794 - RNA, 19 nt, Homo sapiens
  misc_RNA (1)...(19): siRNA sense strand
gaagagcaguugucugaga

SEQ ID NO: 128795 - RNA, 19 nt, Homo sapiens
  misc_RNA (1)...(19): siRNA sense strand
ggaucaagcuggagaguga

SEQ ID NO: 128796 - RNA, 19 nt, Homo sapiens
  misc_RNA (1)...(19): siRNA sense strand
ggaucgagcuggacauuga

SEQ ID NO: 128797 - RNA, 19 nt, Homo sapiens
  misc_RNA (1)...(19): siRNA sense strand
agaacgagauugccacaua

SEQ ID NO: 128798 - RNA, 19 nt, Homo sapiens
  misc_RNA (1)...(19): siRNA sense strand
ccaugaaguuccugaauga

SEQ ID NO: 128799 - RNA, 19 nt, Homo sapiens
  misc_RNA (1)...(19): siRNA sense strand
cgcagaagcuccuggauga

SEQ ID NO: 128800 - RNA, 19 nt, Homo sapiens
  misc_RNA (1)...(19): siRNA sense strand
gaacgagauugccacauac

SEQ ID NO: 128801 - RNA, 19 nt, Homo sapiens
  misc_RNA (1)...(19): siRNA sense strand
ucgaggagcuccagcagaa

SEQ ID NO: 128802 - RNA, 19 nt, Homo sapiens
  misc_RNA (1)...(19): siRNA sense strand
gagaaugccaggcugauug

SEQ ID NO: 128803 - RNA, 19 nt, Homo sapiens
  misc_RNA (1)...(19): siRNA sense strand
gcuggcugcugaugacuuu

SEQ ID NO: 128804 - RNA, 19 nt, Homo sapiens
  misc_RNA (1)...(19): siRNA sense strand
agaaggagaccaugaaguu

SEQ ID NO: 128805 - RNA, 19 nt, Homo sapiens
  misc_RNA (1)...(19): siRNA sense strand
gaagcuggcugcugaugac

SEQ ID NO: 128806 - RNA, 19 nt, Homo sapiens
  misc_RNA (1)...(19): siRNA sense strand
uggaagagcaguugucuga

SEQ ID NO: 128807 - RNA, 19 nt, Homo sapiens
  misc_RNA (1)...(19): siRNA sense strand
uaaagauucugaggaguca

SEQ ID NO: 128808 - RNA, 19 nt, Homo sapiens
  misc_RNA (1)...(19): siRNA sense strand
ggacauugagcccaccauu

SEQ ID NO: 128809 - RNA, 19 nt, Homo sapiens
  misc_RNA (1)...(19): siRNA sense strand
gagcaggaaguaaagauuc

SEQ ID NO: 128810 - RNA, 19 nt, Homo sapiens
  misc_RNA (1)...(19): siRNA sense strand
acauugagcccaccauuga

SEQ ID NO: 128811 - RNA, 19 nt, Homo sapiens
  misc_RNA (1)...(19): siRNA sense strand
cagaugcagagccucauua

SEQ ID NO: 128812 - RNA, 19 nt, Homo sapiens
  misc_RNA (1)...(19): siRNA sense strand
gcagaacucccugugugaa

SEQ ID NO: 128813 - RNA, 19 nt, Homo sapiens
  misc_RNA (1)...(19): siRNA sense strand
gaaggagaccaugaaguuc

SEQ ID NO: 128814 - RNA, 19 nt, Homo sapiens
  misc_RNA (1)...(19): siRNA sense strand
gagccucauuagcaacuug

SEQ ID NO: 128815 - RNA, 19 nt, Homo sapiens
  misc_RNA (1)...(19): siRNA sense strand
gaggagcuccagcagaaga

SEQ ID NO: 128816 - RNA, 19 nt, Homo sapiens
  misc_RNA (1)...(19): siRNA sense strand
ccacauaccggaaccuuac

SEQ ID NO: 128817 - RNA, 19 nt, Homo sapiens
  misc_RNA (1)...(19): siRNA sense strand
caggcugauuguacaaauu

SEQ ID NO: 128818 - RNA, 19 nt, Homo sapiens
  misc_RNA (1)...(19): siRNA sense strand
gaaggacugucugcagaac

SEQ ID NO: 128819 - RNA, 19 nt, Homo sapiens
  misc_RNA (1)...(19): siRNA sense strand
caaccacgagcaggaagua

SEQ ID NO: 128820 - RNA, 19 nt, Homo sapiens
  misc_RNA (1)...(19): siRNA sense strand
gggagaugcgggcucagua

SEQ ID NO: 128821 - RNA, 19 nt, Homo sapiens
  misc_RNA (1)...(19): siRNA sense strand
gacauugagcccaccauug

SEQ ID NO: 128822 - RNA, 19 nt, Homo sapiens
  misc_RNA (1)...(19): siRNA sense strand
ccaggcugauuguacaaau

SEQ ID NO: 128823 - RNA, 19 nt, Homo sapiens
  misc_RNA (1)...(19): siRNA sense strand
ugaauggccaugagaagga

SEQ ID NO: 128824 - RNA, 19 nt, Homo sapiens
  misc_RNA (1)...(19): siRNA sense strand
gagaaggagaccaugaagu

SEQ ID NO: 128825 - RNA, 19 nt, Homo sapiens
  misc_RNA (1)...(19): siRNA sense strand
gagcaaccacgagcaggaa

SEQ ID NO: 128826 - RNA, 19 nt, Homo sapiens
  misc_RNA (1)...(19): siRNA sense strand
gaccaugaaguuccugaau

SEQ ID NO: 128827 - RNA, 19 nt, Homo sapiens
  misc_RNA (1)...(19): siRNA sense strand
gggagaaguuccggaucga

SEQ ID NO: 128828 - RNA, 19 nt, Homo sapiens
  misc_RNA (1)...(19): siRNA sense strand
gaaccuuacuccccugcaa

SEQ ID NO: 128829 - RNA, 19 nt, Homo sapiens
  misc_RNA (1)...(19): siRNA sense strand
accaugaaguuccugaaug

SEQ ID NO: 128830 - RNA, 19 nt, Homo sapiens
  misc_RNA (1)...(19): siRNA sense strand
gccacauaccggaaccuua

SEQ ID NO: 128831 - RNA, 19 nt, Homo sapiens
  misc_RNA (1)...(19): siRNA sense strand
cgagcaggaaguaaagauu

SEQ ID NO: 128832 - RNA, 19 nt, Homo sapiens
  misc_RNA (1)...(19): siRNA sense strand
ucacauucccggcaacauc

SEQ ID NO: 128833 - RNA, 19 nt, Homo sapiens
  misc_RNA (1)...(19): siRNA sense strand
cgaagcuggcugcugauga

SEQ ID NO: 128834 - RNA, 19 nt, Homo sapiens
  misc_RNA (1)...(19): siRNA sense strand
aagagcaguugucugagau

SEQ ID NO: 128835 - RNA, 19 nt, Homo sapiens
  misc_RNA (1)...(19): siRNA sense strand
ugcagagccucauuagcaa

SEQ ID NO: 128836 - RNA, 19 nt, Homo sapiens
  misc_RNA (1)...(19): siRNA sense strand
ggagaccaaccaccaggau

SEQ ID NO: 128837 - RNA, 19 nt, Homo sapiens
  misc_RNA (1)...(19): siRNA sense strand
ggagaugcgggcucaguac

SEQ ID NO: 128838 - RNA, 19 nt, Homo sapiens
  misc_RNA (1)...(19): siRNA sense strand
augcagagccucauuagca

SEQ ID NO: 128839 - RNA, 19 nt, Homo sapiens
  misc_RNA (1)...(19): siRNA sense strand
agagugagcgcucccuuca

SEQ ID NO: 128840 - RNA, 19 nt, Homo sapiens
  misc_RNA (1)...(19): siRNA sense strand
ugaaggacugucugcagaa

SEQ ID NO: 128841 - RNA, 19 nt, Homo sapiens
  misc_RNA (1)...(19): siRNA sense strand
ccaaugcugccuccaugug

SEQ ID NO: 128842 - RNA, 19 nt, Homo sapiens
  misc_RNA (1)...(19): siRNA sense strand
agaagauccugugcagcaa

SEQ ID NO: 128843 - RNA, 19 nt, Homo sapiens
  misc_RNA (1)...(19): siRNA sense strand
ccagaugcagagccucauu

SEQ ID NO: 128844 - RNA, 19 nt, Homo sapiens
  misc_RNA (1)...(19): siRNA sense strand
caggaaguaaagauucuga

SEQ ID NO: 128845 - RNA, 19 nt, Homo sapiens
  misc_RNA (1)...(19): siRNA sense strand
ccacgagcaggaaguaaag

SEQ ID NO: 128846 - RNA, 19 nt, Homo sapiens
  misc_RNA (1)...(19): siRNA sense strand
auucugaaggcccgaguua

SEQ ID NO: 128847 - RNA, 19 nt, Homo sapiens
  misc_RNA (1)...(19): siRNA sense strand
ugagaaugccaggcugauu

SEQ ID NO: 128848 - RNA, 19 nt, Homo sapiens
  misc_RNA (1)...(19): siRNA sense strand
ggcccgaguuaggagauug

SEQ ID NO: 128849 - RNA, 19 nt, Homo sapiens
  misc_RNA (1)...(19): siRNA sense strand
guuccaagcccagucugaa

SEQ ID NO: 128850 - RNA, 19 nt, Homo sapiens
  misc_RNA (1)...(19): siRNA sense strand
agaccaaccaccaggaugu

SEQ ID NO: 128851 - RNA, 19 nt, Homo sapiens
  misc_RNA (1)...(19): siRNA sense strand
gaaugccaggcugauugua

SEQ ID NO: 128852 - RNA, 19 nt, Homo sapiens
  misc_RNA (1)...(19): siRNA sense strand
gagaauaaccgcagagaug

SEQ ID NO: 128853 - RNA, 19 nt, Homo sapiens
  misc_RNA (1)...(19): siRNA sense strand
gcuccuaccugucuucuga

SEQ ID NO: 128854 - RNA, 19 nt, Homo sapiens
  misc_RNA (1)...(19): siRNA sense strand
gagcugaugugccucaaga

SEQ ID NO: 128855 - RNA, 19 nt, Homo sapiens
  misc_RNA (1)...(19): siRNA sense strand
ucaagaccaucgaagauuu

SEQ ID NO: 128856 - RNA, 19 nt, Homo sapiens
  misc_RNA (1)...(19): siRNA sense strand
gaucagagaugggaaaguc

SEQ ID NO: 128857 - RNA, 19 nt, Homo sapiens
  misc_RNA (1)...(19): siRNA sense strand
cagaagauccugcugacua

SEQ ID NO: 128858 - RNA, 19 nt, Homo sapiens
  misc_RNA (1)...(19): siRNA sense strand
agaagauccugcugacuaa

SEQ ID NO: 128859 - RNA, 19 nt, Homo sapiens
  misc_RNA (1)...(19): siRNA sense strand
ggguacaucucuucugcua

SEQ ID NO: 128860 - RNA, 19 nt, Homo sapiens
  misc_RNA (1)...(19): siRNA sense strand
gaaggagacuaugcaguuc

SEQ ID NO: 128861 - RNA, 19 nt, Homo sapiens
  misc_RNA (1)...(19): siRNA sense strand
ggucaacgcgcuagagauu

SEQ ID NO: 128862 - RNA, 19 nt, Homo sapiens
  misc_RNA (1)...(19): siRNA sense strand
gcaagccuguuauuagagu

SEQ ID NO: 128863 - RNA, 19 nt, Homo sapiens
  misc_RNA (1)...(19): siRNA sense strand
gaagauuuccagcagaaga

SEQ ID NO: 128864 - RNA, 19 nt, Homo sapiens
  misc_RNA (1)...(19): siRNA sense strand
gcaugcaagccuguuauua

SEQ ID NO: 128865 - RNA, 19 nt, Homo sapiens
  misc_RNA (1)...(19): siRNA sense strand
ugaugugccucaagaagaa

SEQ ID NO: 128866 - RNA, 19 nt, Homo sapiens
  misc_RNA (1)...(19): siRNA sense strand
cagcacagcaugcggaauu

SEQ ID NO: 128867 - RNA, 19 nt, Homo sapiens
  misc_RNA (1)...(19): siRNA sense strand
agaaggagacuaugcaguu

SEQ ID NO: 128868 - RNA, 19 nt, Homo sapiens
  misc_RNA (1)...(19): siRNA sense strand
gcagcgagaaggagacuau

SEQ ID NO: 128869 - RNA, 19 nt, Homo sapiens
  misc_RNA (1)...(19): siRNA sense strand
ggagaucagagaugggaaa

SEQ ID NO: 128870 - RNA, 19 nt, Homo sapiens
  misc_RNA (1)...(19): siRNA sense strand
ggaccaaguaugagacaga

SEQ ID NO: 128871 - RNA, 19 nt, Homo sapiens
  misc_RNA (1)...(19): siRNA sense strand
ucgaagauuuccagcagaa

SEQ ID NO: 128872 - RNA, 19 nt, Homo sapiens
  misc_RNA (1)...(19): siRNA sense strand
gcacucagauccgcaccau

SEQ ID NO: 128873 - RNA, 19 nt, Homo sapiens
  misc_RNA (1)...(19): siRNA sense strand
cagaugcagugccugauca

SEQ ID NO: 128874 - RNA, 19 nt, Homo sapiens
  misc_RNA (1)...(19): siRNA sense strand
guggaggccugguucaaca

SEQ ID NO: 128875 - RNA, 19 nt, Homo sapiens
  misc_RNA (1)...(19): siRNA sense strand
augcaagccuguuauuaga

SEQ ID NO: 128876 - RNA, 19 nt, Homo sapiens
  misc_RNA (1)...(19): siRNA sense strand
caugcaagccuguuauuag

SEQ ID NO: 128877 - RNA, 19 nt, Homo sapiens
  misc_RNA (1)...(19): siRNA sense strand
ccaggaguaccagguguua

SEQ ID NO: 128878 - RNA, 19 nt, Homo sapiens
  misc_RNA (1)...(19): siRNA sense strand
gaagaaucacgaggaggaa

SEQ ID NO: 128879 - RNA, 19 nt, Homo sapiens
  misc_RNA (1)...(19): siRNA sense strand
gcuggcugcugacgacuuc

SEQ ID NO: 128880 - RNA, 19 nt, Homo sapiens
  misc_RNA (1)...(19): siRNA sense strand
gaauaaccgcagagaugug

SEQ ID NO: 128881 - RNA, 19 nt, Homo sapiens
  misc_RNA (1)...(19): siRNA sense strand
ccaggagugguacgaguuu

SEQ ID NO: 128882 - RNA, 19 nt, Homo sapiens
  misc_RNA (1)...(19): siRNA sense strand
acucagauccgcaccauca

SEQ ID NO: 128883 - RNA, 19 nt, Homo sapiens
  misc_RNA (1)...(19): siRNA sense strand
uaccaguccuacuucaaga

SEQ ID NO: 128884 - RNA, 19 nt, Homo sapiens
  misc_RNA (1)...(19): siRNA sense strand
gggagaggacugcaagcuu

SEQ ID NO: 128885 - RNA, 19 nt, Homo sapiens
  misc_RNA (1)...(19): siRNA sense strand
ggagaauaaccgcagagau

SEQ ID NO: 128886 - RNA, 19 nt, Homo sapiens
  misc_RNA (1)...(19): siRNA sense strand
cgaggaggaagucagugua

SEQ ID NO: 128887 - RNA, 19 nt, Homo sapiens
  misc_RNA (1)...(19): siRNA sense strand
ugaaggaggagcugaugug

SEQ ID NO: 128888 - RNA, 19 nt, Homo sapiens
  misc_RNA (1)...(19): siRNA sense strand
caagaccaucgaagauuuc

SEQ ID NO: 128889 - RNA, 19 nt, Homo sapiens
  misc_RNA (1)...(19): siRNA sense strand
ucaccgaggagaucagaga

SEQ ID NO: 128890 - RNA, 19 nt, Homo sapiens
  misc_RNA (1)...(19): siRNA sense strand
acgaggcccugguggagaa

SEQ ID NO: 128891 - RNA, 19 nt, Homo sapiens
  misc_RNA (1)...(19): siRNA sense strand
ggaggaagucaguguacuc

SEQ ID NO: 128892 - RNA, 19 nt, Homo sapiens
  misc_RNA (1)...(19): siRNA sense strand
ggagaucaucgagcugaga

SEQ ID NO: 128893 - RNA, 19 nt, Homo sapiens
  misc_RNA (1)...(19): siRNA sense strand
gcgagaaggagacuaugca

SEQ ID NO: 128894 - RNA, 19 nt, Homo sapiens
  misc_RNA (1)...(19): siRNA sense strand
uuauuagaguuccuucugu

SEQ ID NO: 128895 - RNA, 19 nt, Homo sapiens
  misc_RNA (1)...(19): siRNA sense strand
guuauuagaguuccuucug

SEQ ID NO: 128896 - RNA, 19 nt, Homo sapiens
  misc_RNA (1)...(19): siRNA sense strand
ggcugguccugcagauuga

SEQ ID NO: 128897 - RNA, 19 nt, Homo sapiens
  misc_RNA (1)...(19): siRNA sense strand
cccaguggaucucaacaag

SEQ ID NO: 128898 - RNA, 19 nt, Homo sapiens
  misc_RNA (1)...(19): siRNA sense strand
gaauccacccuggccgaaa

SEQ ID NO: 128899 - RNA, 19 nt, Homo sapiens
  misc_RNA (1)...(19): siRNA sense strand
gagauguggaggccugguu

SEQ ID NO: 128900 - RNA, 19 nt, Homo sapiens
  misc_RNA (1)...(19): siRNA sense strand
ggauaugagaugccaguac

SEQ ID NO: 128901 - RNA, 19 nt, Homo sapiens
  misc_RNA (1)...(19): siRNA sense strand
ugcagugccugaucagcaa

SEQ ID NO: 128902 - RNA, 19 nt, Homo sapiens
  misc_RNA (1)...(19): siRNA sense strand
agaauaaccgcagagaugu

SEQ ID NO: 128903 - RNA, 19 nt, Homo sapiens
  misc_RNA (1)...(19): siRNA sense strand
gcugaugugccucaagaag

SEQ ID NO: 128904 - RNA, 19 nt, Homo sapiens
  misc_RNA (1)...(19): siRNA sense strand
ggcaugcaagccuguuauu

SEQ ID NO: 128905 - RNA, 19 nt, Homo sapiens
  misc_RNA (1)...(19): siRNA sense strand
gguucaacacccagacuga

SEQ ID NO: 128906 - RNA, 19 nt, Homo sapiens
  misc_RNA (1)...(19): siRNA sense strand
ccaguggaucucaacaaga

SEQ ID NO: 128907 - RNA, 19 nt, Homo sapiens
  misc_RNA (1)...(19): siRNA sense strand
gaggaggaagucaguguac

SEQ ID NO: 128908 - RNA, 19 nt, Homo sapiens
  misc_RNA (1)...(19): siRNA sense strand
ucaacggccugcguaggau

SEQ ID NO: 128909 - RNA, 19 nt, Homo sapiens
  misc_RNA (1)...(19): siRNA sense strand
caagccuguuauuagaguu

SEQ ID NO: 128910 - RNA, 19 nt, Homo sapiens
  misc_RNA (1)...(19): siRNA sense strand
agacuaugcaguuccugaa

SEQ ID NO: 128911 - RNA, 19 nt, Homo sapiens
  misc_RNA (1)...(19): siRNA sense strand
uaaaucaacugacaccuua

SEQ ID NO: 128912 - RNA, 19 nt, Homo sapiens
  misc_RNA (1)...(19): siRNA sense strand
ggaagaagcuaacucuguu

SEQ ID NO: 128913 - RNA, 19 nt, Homo sapiens
  misc_RNA (1)...(19): siRNA sense strand
gaagaaagagucacaauca

SEQ ID NO: 128914 - RNA, 19 nt, Homo sapiens
  misc_RNA (1)...(19): siRNA sense strand
gcagaugaauccagugaaa

SEQ ID NO: 128915 - RNA, 19 nt, Homo sapiens
  misc_RNA (1)...(19): siRNA sense strand
gcacaaaucaauugaagaa

SEQ ID NO: 128916 - RNA, 19 nt, Homo sapiens
  misc_RNA (1)...(19): siRNA sense strand
gcuaugaaguguuaacuga

SEQ ID NO: 128917 - RNA, 19 nt, Homo sapiens
  misc_RNA (1)...(19): siRNA sense strand
ggaugcacuuuaugaaaua

SEQ ID NO: 128918 - RNA, 19 nt, Homo sapiens
  misc_RNA (1)...(19): siRNA sense strand
ggacuuugauguugaagau

SEQ ID NO: 128919 - RNA, 19 nt, Homo sapiens
  misc_RNA (1)...(19): siRNA sense strand
gcacagcauuagagagauu

SEQ ID NO: 128920 - RNA, 19 nt, Homo sapiens
  misc_RNA (1)...(19): siRNA sense strand
gauaugauucuaccugaua

SEQ ID NO: 128921 - RNA, 19 nt, Homo sapiens
  misc_RNA (1)...(19): siRNA sense strand
uagcaacgaugaagagaaa

SEQ ID NO: 128922 - RNA, 19 nt, Homo sapiens
  misc_RNA (1)...(19): siRNA sense strand
aaaccucgcuccuuuaaau

SEQ ID NO: 128923 - RNA, 19 nt, Homo sapiens
  misc_RNA (1)...(19): siRNA sense strand
gggcagaguucuucuuuua

SEQ ID NO: 128924 - RNA, 19 nt, Homo sapiens
  misc_RNA (1)...(19): siRNA sense strand
acaacaaggugauaugauu

SEQ ID NO: 128925 - RNA, 19 nt, Homo sapiens
  misc_RNA (1)...(19): siRNA sense strand
gcugugcucuuguuggaua

SEQ ID NO: 128926 - RNA, 19 nt, Homo sapiens
  misc_RNA (1)...(19): siRNA sense strand
gaaacaacaguucgggaua

SEQ ID NO: 128927 - RNA, 19 nt, Homo sapiens
  misc_RNA (1)...(19): siRNA sense strand
gaacaacaaggugauauga

SEQ ID NO: 128928 - RNA, 19 nt, Homo sapiens
  misc_RNA (1)...(19): siRNA sense strand
gggcaaugcuggaaugguu

SEQ ID NO: 128929 - RNA, 19 nt, Homo sapiens
  misc_RNA (1)...(19): siRNA sense strand
agacugcgguggaagauuu

SEQ ID NO: 128930 - RNA, 19 nt, Homo sapiens
  misc_RNA (1)...(19): siRNA sense strand
gaaagagucacaaucaugu

SEQ ID NO: 128931 - RNA, 19 nt, Homo sapiens
  misc_RNA (1)...(19): siRNA sense strand
agaugaaacuggacucuuu

SEQ ID NO: 128932 - RNA, 19 nt, Homo sapiens
  misc_RNA (1)...(19): siRNA sense strand
agacggagguucuuccaaa

SEQ ID NO: 128933 - RNA, 19 nt, Homo sapiens
  misc_RNA (1)...(19): siRNA sense strand
cgugugguguugacuauua

SEQ ID NO: 128934 - RNA, 19 nt, Homo sapiens
  misc_RNA (1)...(19): siRNA sense strand
ucuaaaggcuugcaggaaa

SEQ ID NO: 128935 - RNA, 19 nt, Homo sapiens
  misc_RNA (1)...(19): siRNA sense strand
gaaccaggcuaugaagugu

SEQ ID NO: 128936 - RNA, 19 nt, Homo sapiens
  misc_RNA (1)...(19): siRNA sense strand
gaagcuaacucuguuggau

SEQ ID NO: 128937 - RNA, 19 nt, Homo sapiens
  misc_RNA (1)...(19): siRNA sense strand
gacaaagucaagucaauaa

SEQ ID NO: 128938 - RNA, 19 nt, Homo sapiens
  misc_RNA (1)...(19): siRNA sense strand
gcaauggcauggaacuuag

SEQ ID NO: 128939 - RNA, 19 nt, Homo sapiens
  misc_RNA (1)...(19): siRNA sense strand
gagccaccaucagaaauaa

SEQ ID NO: 128940 - RNA, 19 nt, Homo sapiens
  misc_RNA (1)...(19): siRNA sense strand
ucccauaucuggaccaauu

SEQ ID NO: 128941 - RNA, 19 nt, Homo sapiens
  misc_RNA (1)...(19): siRNA sense strand
gcagugauuuauggaauug

SEQ ID NO: 128942 - RNA, 19 nt, Homo sapiens
  misc_RNA (1)...(19): siRNA sense strand
ggaaaaggcugugcucuug

SEQ ID NO: 128943 - RNA, 19 nt, Homo sapiens
  misc_RNA (1)...(19): siRNA sense strand
caacgaugaagagaaauua

SEQ ID NO: 128944 - RNA, 19 nt, Homo sapiens
  misc_RNA (1)...(19): siRNA sense strand
ggaggaaauagaacuaauu

SEQ ID NO: 128945 - RNA, 19 nt, Homo sapiens
  misc_RNA (1)...(19): siRNA sense strand
gaaauaaacagaagaugac

SEQ ID NO: 128946 - RNA, 19 nt, Homo sapiens
  misc_RNA (1)...(19): siRNA sense strand
gggaauggauggugauuuu

SEQ ID NO: 128947 - RNA, 19 nt, Homo sapiens
  misc_RNA (1)...(19): siRNA sense strand
gucagaugauggccaaaua

SEQ ID NO: 128948 - RNA, 19 nt, Homo sapiens
  misc_RNA (1)...(19): siRNA sense strand
aaacaacaguucgggauau

SEQ ID NO: 128949 - RNA, 19 nt, Homo sapiens
  misc_RNA (1)...(19): siRNA sense strand
gguaauacguaaacuucga

SEQ ID NO: 128950 - RNA, 19 nt, Homo sapiens
  misc_RNA (1)...(19): siRNA sense strand
gggcacaaaucaauugaag

SEQ ID NO: 128951 - RNA, 19 nt, Homo sapiens
  misc_RNA (1)...(19): siRNA sense strand
gugcuugccuucuaggauu

SEQ ID NO: 128952 - RNA, 19 nt, Homo sapiens
  misc_RNA (1)...(19): siRNA sense strand
caucagaaauaaacagaag

SEQ ID NO: 128953 - RNA, 19 nt, Homo sapiens
  misc_RNA (1)...(19): siRNA sense strand
gaagauucucccuauggua

SEQ ID NO: 128954 - RNA, 19 nt, Homo sapiens
  misc_RNA (1)...(19): siRNA sense strand
gugcauggauggaucuuuc

SEQ ID NO: 128955 - RNA, 19 nt, Homo sapiens
  misc_RNA (1)...(19): siRNA sense strand
guacugaaccaggcuauga

SEQ ID NO: 128956 - RNA, 19 nt, Homo sapiens
  misc_RNA (1)...(19): siRNA sense strand
ugcaacagguuuacacaaa

SEQ ID NO: 128957 - RNA, 19 nt, Homo sapiens
  misc_RNA (1)...(19): siRNA sense strand
gauagacugguaauacgua

SEQ ID NO: 128958 - RNA, 19 nt, Homo sapiens
  misc_RNA (1)...(19): siRNA sense strand
aagagagccuggacuuuga

SEQ ID NO: 128959 - RNA, 19 nt, Homo sapiens
  misc_RNA (1)...(19): siRNA sense strand
gcaacgaugaagagaaauu

SEQ ID NO: 128960 - RNA, 19 nt, Homo sapiens
  misc_RNA (1)...(19): siRNA sense strand
gguguugacuauuaaagau

SEQ ID NO: 128961 - RNA, 19 nt, Homo sapiens
  misc_RNA (1)...(19): siRNA sense strand
gaauuuacagccugaacaa

SEQ ID NO: 128962 - RNA, 19 nt, Homo sapiens
  misc_RNA (1)...(19): siRNA sense strand
agaacuaauuccagagaaa

SEQ ID NO: 128963 - RNA, 19 nt, Homo sapiens
  misc_RNA (1)...(19): siRNA sense strand
caaguucgagaguauuuaa

SEQ ID NO: 128964 - RNA, 19 nt, Homo sapiens
  misc_RNA (1)...(19): siRNA sense strand
gccaagaggaaaucuauga

SEQ ID NO: 128965 - RNA, 19 nt, Homo sapiens
  misc_RNA (1)...(19): siRNA sense strand
gaggaaauagaacuaauuc

SEQ ID NO: 128966 - RNA, 19 nt, Homo sapiens
  misc_RNA (1)...(19): siRNA sense strand
aaauagcaauggcauggaa

SEQ ID NO: 128967 - RNA, 19 nt, Homo sapiens
  misc_RNA (1)...(19): siRNA sense strand
cgagaguauuuaagaucua

SEQ ID NO: 128968 - RNA, 19 nt, Homo sapiens
  misc_RNA (1)...(19): siRNA sense strand
ggaggaggaaauagaacua

SEQ ID NO: 128969 - RNA, 19 nt, Homo sapiens
  misc_RNA (1)...(19): siRNA sense strand
gcacaaggccaggcagaug

SEQ ID NO: 128970 - RNA, 19 nt, Homo sapiens
  misc_RNA (1)...(19): siRNA sense strand
uggaugcacuuuaugaaau

SEQ ID NO: 128971 - RNA, 19 nt, Homo sapiens
  misc_RNA (1)...(19): siRNA sense strand
gcaaguucgagaguauuua

SEQ ID NO: 128972 - RNA, 19 nt, Homo sapiens
  misc_RNA (1)...(19): siRNA sense strand
ggcagugauuuauggaauu

SEQ ID NO: 128973 - RNA, 19 nt, Homo sapiens
  misc_RNA (1)...(19): siRNA sense strand
aaacagaagaugacaaagu

SEQ ID NO: 128974 - RNA, 19 nt, Homo sapiens
  misc_RNA (1)...(19): siRNA sense strand
gcagaguucuucuuuuaug

SEQ ID NO: 128975 - RNA, 19 nt, Homo sapiens
  misc_RNA (1)...(19): siRNA sense strand
ccagagaaacauauuaauc

SEQ ID NO: 128976 - RNA, 19 nt, Homo sapiens
  misc_RNA (1)...(19): siRNA sense strand
gaucagggagucauagcaa

SEQ ID NO: 128977 - RNA, 19 nt, Homo sapiens
  misc_RNA (1)...(19): siRNA sense strand
caaagaaaccucgcuccuu

SEQ ID NO: 128978 - RNA, 19 nt, Homo sapiens
  misc_RNA (1)...(19): siRNA sense strand
ccgguuggcuaacucguuu

SEQ ID NO: 128979 - RNA, 19 nt, Homo sapiens
  misc_RNA (1)...(19): siRNA sense strand
cgagccaccaucagaaaua

SEQ ID NO: 128980 - RNA, 19 nt, Homo sapiens
  misc_RNA (1)...(19): siRNA sense strand
gaacaacuuggaagaaggu

SEQ ID NO: 128981 - RNA, 19 nt, Homo sapiens
  misc_RNA (1)...(19): siRNA sense strand
cagaacaacuuggaagaag

SEQ ID NO: 128982 - RNA, 19 nt, Homo sapiens
  misc_RNA (1)...(19): siRNA sense strand
caccaacacauccaaauga

SEQ ID NO: 128983 - RNA, 19 nt, Homo sapiens
  misc_RNA (1)...(19): siRNA sense strand
uaaaccugccagucucuua

SEQ ID NO: 128984 - RNA, 19 nt, Homo sapiens
  misc_RNA (1)...(19): siRNA sense strand
uggauuaucuagaacaaca

SEQ ID NO: 128985 - RNA, 19 nt, Homo sapiens
  misc_RNA (1)...(19): siRNA sense strand
ggacagggcaaugcuggaa

SEQ ID NO: 128986 - RNA, 19 nt, Homo sapiens
  misc_RNA (1)...(19): siRNA sense strand
accaggcuaugaaguguua

SEQ ID NO: 128987 - RNA, 19 nt, Homo sapiens
  misc_RNA (1)...(19): siRNA sense strand
gaagaagcuaacucuguug

SEQ ID NO: 128988 - RNA, 19 nt, Homo sapiens
  misc_RNA (1)...(19): siRNA sense strand
aagcagcggcacagcauua

SEQ ID NO: 128989 - RNA, 19 nt, Homo sapiens
  misc_RNA (1)...(19): siRNA sense strand
cuaugaagccauccaugua

SEQ ID NO: 128990 - RNA, 19 nt, Homo sapiens
  misc_RNA (1)...(19): siRNA sense strand
aacagaagaugacaaaguc

SEQ ID NO: 128991 - RNA, 19 nt, Homo sapiens
  misc_RNA (1)...(19): siRNA sense strand
caacaaggugauaugauuc

SEQ ID NO: 128992 - RNA, 19 nt, Homo sapiens
  misc_RNA (1)...(19): siRNA sense strand
agaaaccucgcuccuuuaa

SEQ ID NO: 128993 - RNA, 19 nt, Homo sapiens
  misc_RNA (1)...(19): siRNA sense strand
caacacauccaaaugaaaa

SEQ ID NO: 128994 - RNA, 19 nt, Homo sapiens
  misc_RNA (1)...(19): siRNA sense strand
gagccuggacuuugauguu

SEQ ID NO: 128995 - RNA, 19 nt, Homo sapiens
  misc_RNA (1)...(19): siRNA sense strand
ucuguuggaugcacuuuau

SEQ ID NO: 128996 - RNA, 19 nt, Homo sapiens
  misc_RNA (1)...(19): siRNA sense strand
caacuuggaagaagguaau

SEQ ID NO: 128997 - RNA, 19 nt, Homo sapiens
  misc_RNA (1)...(19): siRNA sense strand
cagaugauggccaaauauu

SEQ ID NO: 128998 - RNA, 19 nt, Homo sapiens
  misc_RNA (1)...(19): siRNA sense strand
aaacuggacucuuuuggaa

SEQ ID NO: 128999 - RNA, 19 nt, Homo sapiens
  misc_RNA (1)...(19): siRNA sense strand
gaggaggaaauagaacuaa

SEQ ID NO: 129000 - RNA, 19 nt, Homo sapiens
  misc_RNA (1)...(19): siRNA sense strand
aacaacaguucgggauaua

SEQ ID NO: 129001 - RNA, 19 nt, Homo sapiens
  misc_RNA (1)...(19): siRNA sense strand
cgacaaugguuugauaaaa

SEQ ID NO: 129002 - RNA, 19 nt, Homo sapiens
  misc_RNA (1)...(19): siRNA sense strand
agaaagagucacaaucaug

SEQ ID NO: 129003 - RNA, 19 nt, Homo sapiens
  misc_RNA (1)...(19): siRNA sense strand
cggagguucuuccaaacaa

SEQ ID NO: 129004 - RNA, 19 nt, Homo sapiens
  misc_RNA (1)...(19): siRNA sense strand
guccuaaggucagaugaug

SEQ ID NO: 129005 - RNA, 19 nt, Homo sapiens
  misc_RNA (1)...(19): siRNA sense strand
gauaauucaccaacacauc

SEQ ID NO: 129006 - RNA, 19 nt, Homo sapiens
  misc_RNA (1)...(19): siRNA sense strand
guucgagaguauuuaagau

SEQ ID NO: 129007 - RNA, 19 nt, Homo sapiens
  misc_RNA (1)...(19): siRNA sense strand
gaaaccucgcuccuuuaaa

SEQ ID NO: 129008 - RNA, 19 nt, Homo sapiens
  misc_RNA (1)...(19): siRNA sense strand
aaucauguguugugccaau

SEQ ID NO: 129009 - RNA, 19 nt, Homo sapiens
  misc_RNA (1)...(19): siRNA sense strand
caacaguucgggauauaag

SEQ ID NO: 129010 - RNA, 19 nt, Homo sapiens
  misc_RNA (1)...(19): siRNA sense strand
gaacuaauuccagagaaac

SEQ ID NO: 129011 - RNA, 19 nt, Homo sapiens
  misc_RNA (1)...(19): siRNA sense strand
agacacaacuugaaacuua

SEQ ID NO: 129012 - RNA, 19 nt, Homo sapiens
  misc_RNA (1)...(19): siRNA sense strand
aaagagcacuucuacaaua

SEQ ID NO: 129013 - RNA, 19 nt, Homo sapiens
  misc_RNA (1)...(19): siRNA sense strand
gcaguuguguguccuguua

SEQ ID NO: 129014 - RNA, 19 nt, Homo sapiens
  misc_RNA (1)...(19): siRNA sense strand
gaucucgucugaauguuua

SEQ ID NO: 129015 - RNA, 19 nt, Homo sapiens
  misc_RNA (1)...(19): siRNA sense strand
gauacgccaucaauauuua

SEQ ID NO: 129016 - RNA, 19 nt, Homo sapiens
  misc_RNA (1)...(19): siRNA sense strand
guagagggaucucgucuga

SEQ ID NO: 129017 - RNA, 19 nt, Homo sapiens
  misc_RNA (1)...(19): siRNA sense strand
gcaagagcuuugacuggua

SEQ ID NO: 129018 - RNA, 19 nt, Homo sapiens
  misc_RNA (1)...(19): siRNA sense strand
gauagaguacgcuugauua

SEQ ID NO: 129019 - RNA, 19 nt, Homo sapiens
  misc_RNA (1)...(19): siRNA sense strand
gcagugugguggcaaauug

SEQ ID NO: 129020 - RNA, 19 nt, Homo sapiens
  misc_RNA (1)...(19): siRNA sense strand
ugacuggcguuuaacauuu

SEQ ID NO: 129021 - RNA, 19 nt, Homo sapiens
  misc_RNA (1)...(19): siRNA sense strand
ugacagaguuuauuugaag

SEQ ID NO: 129022 - RNA, 19 nt, Homo sapiens
  misc_RNA (1)...(19): siRNA sense strand
caacgaggaugaacugaag

SEQ ID NO: 129023 - RNA, 19 nt, Homo sapiens
  misc_RNA (1)...(19): siRNA sense strand
gagauacgccaucaauauu

SEQ ID NO: 129024 - RNA, 19 nt, Homo sapiens
  misc_RNA (1)...(19): siRNA sense strand
gaaagggacaggcggauau

SEQ ID NO: 129025 - RNA, 19 nt, Homo sapiens
  misc_RNA (1)...(19): siRNA sense strand
caaaugagaacuugugaug

SEQ ID NO: 129026 - RNA, 19 nt, Homo sapiens
  misc_RNA (1)...(19): siRNA sense strand
agaguacgcuugauuagga

SEQ ID NO: 129027 - RNA, 19 nt, Homo sapiens
  misc_RNA (1)...(19): siRNA sense strand
gugcuaaccuuucacuguu

SEQ ID NO: 129028 - RNA, 19 nt, Homo sapiens
  misc_RNA (1)...(19): siRNA sense strand
uagaaacccuccagcaaga

SEQ ID NO: 129029 - RNA, 19 nt, Homo sapiens
  misc_RNA (1)...(19): siRNA sense strand
acaaagagcacuucuacaa

SEQ ID NO: 129030 - RNA, 19 nt, Homo sapiens
  misc_RNA (1)...(19): siRNA sense strand
ggguuugacuggcguuuaa

SEQ ID NO: 129031 - RNA, 19 nt, Homo sapiens
  misc_RNA (1)...(19): siRNA sense strand
gggccgaccugauguacaa

SEQ ID NO: 129032 - RNA, 19 nt, Homo sapiens
  misc_RNA (1)...(19): siRNA sense strand
caagagcuuugacugguau

SEQ ID NO: 129033 - RNA, 19 nt, Homo sapiens
  misc_RNA (1)...(19): siRNA sense strand
gaacguaugacacaggaau

SEQ ID NO: 129034 - RNA, 19 nt, Homo sapiens
  misc_RNA (1)...(19): siRNA sense strand
gcagcaagaagaacucauu

SEQ ID NO: 129035 - RNA, 19 nt, Homo sapiens
  misc_RNA (1)...(19): siRNA sense strand
gauuauaauucuccugaca

SEQ ID NO: 129036 - RNA, 19 nt, Homo sapiens
  misc_RNA (1)...(19): siRNA sense strand
gaaaggauugggagagaug

SEQ ID NO: 129037 - RNA, 19 nt, Homo sapiens
  misc_RNA (1)...(19): siRNA sense strand
gagagauacgccaucaaua

SEQ ID NO: 129038 - RNA, 19 nt, Homo sapiens
  misc_RNA (1)...(19): siRNA sense strand
ugacuugagugacagaguu

SEQ ID NO: 129039 - RNA, 19 nt, Homo sapiens
  misc_RNA (1)...(19): siRNA sense strand
agagggaucucgucugaau

SEQ ID NO: 129040 - RNA, 19 nt, Homo sapiens
  misc_RNA (1)...(19): siRNA sense strand
aggcggauaucaagaauug

SEQ ID NO: 129041 - RNA, 19 nt, Homo sapiens
  misc_RNA (1)...(19): siRNA sense strand
gacugugucuuagugcuua

SEQ ID NO: 129042 - RNA, 19 nt, Homo sapiens
  misc_RNA (1)...(19): siRNA sense strand
gaacugaagcagcaagaag

SEQ ID NO: 129043 - RNA, 19 nt, Homo sapiens
  misc_RNA (1)...(19): siRNA sense strand
aaagauggguucccuguac

SEQ ID NO: 129044 - RNA, 19 nt, Homo sapiens
  misc_RNA (1)...(19): siRNA sense strand
aaguuuggauggaugaaua

SEQ ID NO: 129045 - RNA, 19 nt, Homo sapiens
  misc_RNA (1)...(19): siRNA sense strand
ggaaagggacaggcggaua

SEQ ID NO: 129046 - RNA, 19 nt, Homo sapiens
  misc_RNA (1)...(19): siRNA sense strand
ucacuuuccuggauuguca

SEQ ID NO: 129047 - RNA, 19 nt, Homo sapiens
  misc_RNA (1)...(19): siRNA sense strand
cagcaaucuugauagagua

SEQ ID NO: 129048 - RNA, 19 nt, Homo sapiens
  misc_RNA (1)...(19): siRNA sense strand
aaacuuacaucagcaaucu

SEQ ID NO: 129049 - RNA, 19 nt, Homo sapiens
  misc_RNA (1)...(19): siRNA sense strand
uaccaccucuguuaucauu

SEQ ID NO: 129050 - RNA, 19 nt, Homo sapiens
  misc_RNA (1)...(19): siRNA sense strand
agagauacgccaucaauau

SEQ ID NO: 129051 - RNA, 19 nt, Homo sapiens
  misc_RNA (1)...(19): siRNA sense strand
ugaaacagcaguugugugu

SEQ ID NO: 129052 - RNA, 19 nt, Homo sapiens
  misc_RNA (1)...(19): siRNA sense strand
ucagcaaucuugauagagu

SEQ ID NO: 129053 - RNA, 19 nt, Homo sapiens
  misc_RNA (1)...(19): siRNA sense strand
gaacuugugaugcucuaga

SEQ ID NO: 129054 - RNA, 19 nt, Homo sapiens
  misc_RNA (1)...(19): siRNA sense strand
ucaaggaggcaaucaauuc

SEQ ID NO: 129055 - RNA, 19 nt, Homo sapiens
  misc_RNA (1)...(19): siRNA sense strand
gaaacccuccagcaagaaa

SEQ ID NO: 129056 - RNA, 19 nt, Homo sapiens
  misc_RNA (1)...(19): siRNA sense strand
gcucucagaccuccagaaa

SEQ ID NO: 129057 - RNA, 19 nt, Homo sapiens
  misc_RNA (1)...(19): siRNA sense strand
gagaacuugugaugcucua

SEQ ID NO: 129058 - RNA, 19 nt, Homo sapiens
  misc_RNA (1)...(19): siRNA sense strand
caaagagcacuucuacaau

SEQ ID NO: 129059 - RNA, 19 nt, Homo sapiens
  misc_RNA (1)...(19): siRNA sense strand
ccaauuuccuacagaauac

SEQ ID NO: 129060 - RNA, 19 nt, Homo sapiens
  misc_RNA (1)...(19): siRNA sense strand
ggaaaggauugggagagau

SEQ ID NO: 129061 - RNA, 19 nt, Homo sapiens
  misc_RNA (1)...(19): siRNA sense strand
guggaugacuugagugaca

SEQ ID NO: 129062 - RNA, 19 nt, Homo sapiens
  misc_RNA (1)...(19): siRNA sense strand
gcuaaccuuucacuguuug

SEQ ID NO: 129063 - RNA, 19 nt, Homo sapiens
  misc_RNA (1)...(19): siRNA sense strand
cgucugaauguuuagauua

SEQ ID NO: 129064 - RNA, 19 nt, Homo sapiens
  misc_RNA (1)...(19): siRNA sense strand
uuggauggaugaauacaaa

SEQ ID NO: 129065 - RNA, 19 nt, Homo sapiens
  misc_RNA (1)...(19): siRNA sense strand
ggaggacuguuugcuguca

SEQ ID NO: 129066 - RNA, 19 nt, Homo sapiens
  misc_RNA (1)...(19): siRNA sense strand
gaguuuauuugaagacaca

SEQ ID NO: 129067 - RNA, 19 nt, Homo sapiens
  misc_RNA (1)...(19): siRNA sense strand
gaagacacaacuugaaacu

SEQ ID NO: 129068 - RNA, 19 nt, Homo sapiens
  misc_RNA (1)...(19): siRNA sense strand
aggaggcaaucaauucuuu

SEQ ID NO: 129069 - RNA, 19 nt, Homo sapiens
  misc_RNA (1)...(19): siRNA sense strand
cgagagcgguugagaugca

SEQ ID NO: 129070 - RNA, 19 nt, Homo sapiens
  misc_RNA (1)...(19): siRNA sense strand
aaagaagcuuauggugaua

SEQ ID NO: 129071 - RNA, 19 nt, Homo sapiens
  misc_RNA (1)...(19): siRNA sense strand
cagcagaaguuuggaugga

SEQ ID NO: 129072 - RNA, 19 nt, Homo sapiens
  misc_RNA (1)...(19): siRNA sense strand
caacuugaaacuuacauca

SEQ ID NO: 129073 - RNA, 19 nt, Homo sapiens
  misc_RNA (1)...(19): siRNA sense strand
gaguguaagucccagaagu

SEQ ID NO: 129074 - RNA, 19 nt, Homo sapiens
  misc_RNA (1)...(19): siRNA sense strand
ccagcaaacuccagcucaa

SEQ ID NO: 129075 - RNA, 19 nt, Homo sapiens
  misc_RNA (1)...(19): siRNA sense strand
aaaagaagcuuauggugau

SEQ ID NO: 129076 - RNA, 19 nt, Homo sapiens
  misc_RNA (1)...(19): siRNA sense strand
ugagugacagaguuuauuu

SEQ ID NO: 129077 - RNA, 19 nt, Homo sapiens
  misc_RNA (1)...(19): siRNA sense strand
gacagaguuuauuugaaga

SEQ ID NO: 129078 - RNA, 19 nt, Homo sapiens
  misc_RNA (1)...(19): siRNA sense strand
gugacagaguuuauuugaa

SEQ ID NO: 129079 - RNA, 19 nt, Homo sapiens
  misc_RNA (1)...(19): siRNA sense strand
ucaggacugugucuuagug

SEQ ID NO: 129080 - RNA, 19 nt, Homo sapiens
  misc_RNA (1)...(19): siRNA sense strand
uaacaguggccuauaucuu

SEQ ID NO: 129081 - RNA, 19 nt, Homo sapiens
  misc_RNA (1)...(19): siRNA sense strand
ggacaggcggauaucaaga

SEQ ID NO: 129082 - RNA, 19 nt, Homo sapiens
  misc_RNA (1)...(19): siRNA sense strand
guaccagcaaacauuauuu

SEQ ID NO: 129083 - RNA, 19 nt, Homo sapiens
  misc_RNA (1)...(19): siRNA sense strand
ggaucucgucugaauguuu

SEQ ID NO: 129084 - RNA, 19 nt, Homo sapiens
  misc_RNA (1)...(19): siRNA sense strand
guaagucccagaaguucaa

SEQ ID NO: 129085 - RNA, 19 nt, Homo sapiens
  misc_RNA (1)...(19): siRNA sense strand
gcaaaauugucccaaagau

SEQ ID NO: 129086 - RNA, 19 nt, Homo sapiens
  misc_RNA (1)...(19): siRNA sense strand
ggucaaggaggcaaucaau

SEQ ID NO: 129087 - RNA, 19 nt, Homo sapiens
  misc_RNA (1)...(19): siRNA sense strand
cccaauuuccuacagaaua

SEQ ID NO: 129088 - RNA, 19 nt, Homo sapiens
  misc_RNA (1)...(19): siRNA sense strand
gacaggcggauaucaagaa

SEQ ID NO: 129089 - RNA, 19 nt, Homo sapiens
  misc_RNA (1)...(19): siRNA sense strand
gaaacuuacaucagcaauc

SEQ ID NO: 129090 - RNA, 19 nt, Homo sapiens
  misc_RNA (1)...(19): siRNA sense strand
ugagagauacgccaucaau

SEQ ID NO: 129091 - RNA, 19 nt, Homo sapiens
  misc_RNA (1)...(19): siRNA sense strand
ccucuguuaucauugcuuu

SEQ ID NO: 129092 - RNA, 19 nt, Homo sapiens
  misc_RNA (1)...(19): siRNA sense strand
gcagauucccgugcacuug

SEQ ID NO: 129093 - RNA, 19 nt, Homo sapiens
  misc_RNA (1)...(19): siRNA sense strand
caaagauggguucccugua

SEQ ID NO: 129094 - RNA, 19 nt, Homo sapiens
  misc_RNA (1)...(19): siRNA sense strand
ggauggaugaauacaaaga

SEQ ID NO: 129095 - RNA, 19 nt, Homo sapiens
  misc_RNA (1)...(19): siRNA sense strand
cucgaccgcuuuauaagaa

SEQ ID NO: 129096 - RNA, 19 nt, Homo sapiens
  misc_RNA (1)...(19): siRNA sense strand
gaccugauguacaaaugag

SEQ ID NO: 129097 - RNA, 19 nt, Homo sapiens
  misc_RNA (1)...(19): siRNA sense strand
ccacgugggccauguguuc

SEQ ID NO: 129098 - RNA, 19 nt, Homo sapiens
  misc_RNA (1)...(19): siRNA sense strand
ugucucgaccgcuuuauaa

SEQ ID NO: 129099 - RNA, 19 nt, Homo sapiens
  misc_RNA (1)...(19): siRNA sense strand
ggagggccgaccugaugua

SEQ ID NO: 129100 - RNA, 19 nt, Homo sapiens
  misc_RNA (1)...(19): siRNA sense strand
uggaaaggauugggagaga

SEQ ID NO: 129101 - RNA, 19 nt, Homo sapiens
  misc_RNA (1)...(19): siRNA sense strand
agaagcuuauggugauauu

SEQ ID NO: 129102 - RNA, 19 nt, Homo sapiens
  misc_RNA (1)...(19): siRNA sense strand
gacuggcguuuaacauuuc

SEQ ID NO: 129103 - RNA, 19 nt, Homo sapiens
  misc_RNA (1)...(19): siRNA sense strand
gagaugaaacagcaguugu

SEQ ID NO: 129104 - RNA, 19 nt, Homo sapiens
  misc_RNA (1)...(19): siRNA sense strand
cuuccuaccaccucuguua

SEQ ID NO: 129105 - RNA, 19 nt, Homo sapiens
  misc_RNA (1)...(19): siRNA sense strand
aaugagaacuugugaugcu

SEQ ID NO: 129106 - RNA, 19 nt, Homo sapiens
  misc_RNA (1)...(19): siRNA sense strand
agauacgccaucaauauuu

SEQ ID NO: 129107 - RNA, 19 nt, Homo sapiens
  misc_RNA (1)...(19): siRNA sense strand
ggugcuaaccuuucacugu

SEQ ID NO: 129108 - RNA, 19 nt, Homo sapiens
  misc_RNA (1)...(19): siRNA sense strand
gagcuuugacugguauuug

SEQ ID NO: 129109 - RNA, 19 nt, Homo sapiens
  misc_RNA (1)...(19): siRNA sense strand
ggacugugucuuagugcuu

SEQ ID NO: 129110 - RNA, 19 nt, Homo sapiens
  misc_RNA (1)...(19): siRNA sense strand
gauguacaaaugagaacuu

SEQ ID NO: 129111 - RNA, 19 nt, Homo sapiens
  misc_RNA (1)...(19): siRNA sense strand
gacgcugggucuacuauug

SEQ ID NO: 129112 - RNA, 19 nt, Homo sapiens
  misc_RNA (1)...(19): siRNA sense strand
ugaagacggugcugaugau

SEQ ID NO: 129113 - RNA, 19 nt, Homo sapiens
  misc_RNA (1)...(19): siRNA sense strand
gcacagccggcucauuguu

SEQ ID NO: 129114 - RNA, 19 nt, Homo sapiens
  misc_RNA (1)...(19): siRNA sense strand
gaacugccugugcgccuuu

SEQ ID NO: 129115 - RNA, 19 nt, Homo sapiens
  misc_RNA (1)...(19): siRNA sense strand
gcugcuggccgacgucuuu

SEQ ID NO: 129116 - RNA, 19 nt, Homo sapiens
  misc_RNA (1)...(19): siRNA sense strand
acuauugccuggugaacau

SEQ ID NO: 129117 - RNA, 19 nt, Homo sapiens
  misc_RNA (1)...(19): siRNA sense strand
gcucauuguucugcacuac

SEQ ID NO: 129118 - RNA, 19 nt, Homo sapiens
  misc_RNA (1)...(19): siRNA sense strand
ggccaucaccagccacaug

SEQ ID NO: 129119 - RNA, 19 nt, Homo sapiens
  misc_RNA (1)...(19): siRNA sense strand
cugaagacggugcugauga

SEQ ID NO: 129120 - RNA, 19 nt, Homo sapiens
  misc_RNA (1)...(19): siRNA sense strand
gagaaugacuuuaaccuuu

SEQ ID NO: 129121 - RNA, 19 nt, Homo sapiens
  misc_RNA (1)...(19): siRNA sense strand
caaaggaguucauggcuaa

SEQ ID NO: 129122 - RNA, 19 nt, Homo sapiens
  misc_RNA (1)...(19): siRNA sense strand
ggaacacaauccuuuauau

SEQ ID NO: 129123 - RNA, 19 nt, Homo sapiens
  misc_RNA (1)...(19): siRNA sense strand
gagccaaacucuugaaugu

SEQ ID NO: 129124 - RNA, 19 nt, Homo sapiens
  misc_RNA (1)...(19): siRNA sense strand
cgaagaagguagaacuuga

SEQ ID NO: 129125 - RNA, 19 nt, Homo sapiens
  misc_RNA (1)...(19): siRNA sense strand
gagagaaacaccugaugua

SEQ ID NO: 129126 - RNA, 19 nt, Homo sapiens
  misc_RNA (1)...(19): siRNA sense strand
gaacagauggguugaguag

SEQ ID NO: 129127 - RNA, 19 nt, Homo sapiens
  misc_RNA (1)...(19): siRNA sense strand
ccaccaggcugaagguaaa

SEQ ID NO: 129128 - RNA, 19 nt, Homo sapiens
  misc_RNA (1)...(19): siRNA sense strand
cgaagacgaugaccucaga

SEQ ID NO: 129129 - RNA, 19 nt, Homo sapiens
  misc_RNA (1)...(19): siRNA sense strand
gaaugugggcuaucuagaa

SEQ ID NO: 129130 - RNA, 19 nt, Homo sapiens
  misc_RNA (1)...(19): siRNA sense strand
acagauggguugaguaguu

SEQ ID NO: 129131 - RNA, 19 nt, Homo sapiens
  misc_RNA (1)...(19): siRNA sense strand
acaauggucuuccacacua

SEQ ID NO: 129132 - RNA, 19 nt, Homo sapiens
  misc_RNA (1)...(19): siRNA sense strand
ggguugagcuccaaagaau

SEQ ID NO: 129133 - RNA, 19 nt, Homo sapiens
  misc_RNA (1)...(19): siRNA sense strand
caacugcccuucugugucu

SEQ ID NO: 129134 - RNA, 19 nt, Homo sapiens
  misc_RNA (1)...(19): siRNA sense strand
uagaagcccucaaggaaga

SEQ ID NO: 129135 - RNA, 19 nt, Homo sapiens
  misc_RNA (1)...(19): siRNA sense strand
gcccuucugugucuccuua

SEQ ID NO: 129136 - RNA, 19 nt, Homo sapiens
  misc_RNA (1)...(19): siRNA sense strand
caaccugacuuuccaccuu

SEQ ID NO: 129137 - RNA, 19 nt, Homo sapiens
  misc_RNA (1)...(19): siRNA sense strand
cacaguggauuucugguuu

SEQ ID NO: 129138 - RNA, 19 nt, Homo sapiens
  misc_RNA (1)...(19): siRNA sense strand
gagaacagauggguugagu

SEQ ID NO: 129139 - RNA, 19 nt, Homo sapiens
  misc_RNA (1)...(19): siRNA sense strand
caaauuccgauuacuguug

SEQ ID NO: 129140 - RNA, 19 nt, Homo sapiens
  misc_RNA (1)...(19): siRNA sense strand
aaccagaucucacuuugga

SEQ ID NO: 129141 - RNA, 19 nt, Homo sapiens
  misc_RNA (1)...(19): siRNA sense strand
gaagguagaacuugacaac

SEQ ID NO: 129142 - RNA, 19 nt, Homo sapiens
  misc_RNA (1)...(19): siRNA sense strand
ugaaguggguaaauauaca

SEQ ID NO: 129143 - RNA, 19 nt, Homo sapiens
  misc_RNA (1)...(19): siRNA sense strand
aaauugggacugcuuuaua

SEQ ID NO: 129144 - RNA, 19 nt, Homo sapiens
  misc_RNA (1)...(19): siRNA sense strand
caagagauuccuaaagcaa

SEQ ID NO: 129145 - RNA, 19 nt, Homo sapiens
  misc_RNA (1)...(19): siRNA sense strand
ugauguaccugcuggaaca

SEQ ID NO: 129146 - RNA, 19 nt, Homo sapiens
  misc_RNA (1)...(19): siRNA sense strand
aauugggacugcuuuauau

SEQ ID NO: 129147 - RNA, 19 nt, Homo sapiens
  misc_RNA (1)...(19): siRNA sense strand
gaagagguacaggcagaaa

SEQ ID NO: 129148 - RNA, 19 nt, Homo sapiens
  misc_RNA (1)...(19): siRNA sense strand
caacaucacaguggauuuc

SEQ ID NO: 129149 - RNA, 19 nt, Homo sapiens
  misc_RNA (1)...(19): siRNA sense strand
ugccugaaguggguaaaua

SEQ ID NO: 129150 - RNA, 19 nt, Homo sapiens
  misc_RNA (1)...(19): siRNA sense strand
ggguacagguuacguuaca

SEQ ID NO: 129151 - RNA, 19 nt, Homo sapiens
  misc_RNA (1)...(19): siRNA sense strand
ucuagaagcccucaaggaa

SEQ ID NO: 129152 - RNA, 19 nt, Homo sapiens
  misc_RNA (1)...(19): siRNA sense strand
gaaguggguaaauauacaa

SEQ ID NO: 129153 - RNA, 19 nt, Homo sapiens
  misc_RNA (1)...(19): siRNA sense strand
cgauuacuguugcuguuga

SEQ ID NO: 129154 - RNA, 19 nt, Homo sapiens
  misc_RNA (1)...(19): siRNA sense strand
aaaguuuaaucgagccaaa

SEQ ID NO: 129155 - RNA, 19 nt, Homo sapiens
  misc_RNA (1)...(19): siRNA sense strand
guugagcuccaaagaauga

SEQ ID NO: 129156 - RNA, 19 nt, Homo sapiens
  misc_RNA (1)...(19): siRNA sense strand
uaaucgagccaaacucuug

SEQ ID NO: 129157 - RNA, 19 nt, Homo sapiens
  misc_RNA (1)...(19): siRNA sense strand
ucacgagucuggagaacag

SEQ ID NO: 129158 - RNA, 19 nt, Homo sapiens
  misc_RNA (1)...(19): siRNA sense strand
gaaugacuuuaaccuuuac

SEQ ID NO: 129159 - RNA, 19 nt, Homo sapiens
  misc_RNA (1)...(19): siRNA sense strand
gaaaauugggacugcuuua

SEQ ID NO: 129160 - RNA, 19 nt, Homo sapiens
  misc_RNA (1)...(19): siRNA sense strand
agaaacaccugauguaccu

SEQ ID NO: 129161 - RNA, 19 nt, Homo sapiens
  misc_RNA (1)...(19): siRNA sense strand
cagauggguugaguaguug

SEQ ID NO: 129162 - RNA, 19 nt, Homo sapiens
  misc_RNA (1)...(19): siRNA sense strand
cagaacggaugaagcucuu

SEQ ID NO: 129163 - RNA, 19 nt, Homo sapiens
  misc_RNA (1)...(19): siRNA sense strand
gacgaugaccucagacuca

SEQ ID NO: 129164 - RNA, 19 nt, Homo sapiens
  misc_RNA (1)...(19): siRNA sense strand
ucaagagauuccuaaagca

SEQ ID NO: 129165 - RNA, 19 nt, Homo sapiens
  misc_RNA (1)...(19): siRNA sense strand
uacuguugcuguugacuuu

SEQ ID NO: 129166 - RNA, 19 nt, Homo sapiens
  misc_RNA (1)...(19): siRNA sense strand
ucaaaccagaucucacuuu

SEQ ID NO: 129167 - RNA, 19 nt, Homo sapiens
  misc_RNA (1)...(19): siRNA sense strand
aggaguucauggcuaauuu

SEQ ID NO: 129168 - RNA, 19 nt, Homo sapiens
  misc_RNA (1)...(19): siRNA sense strand
aaugaagcauccacgaaga

SEQ ID NO: 129169 - RNA, 19 nt, Homo sapiens
  misc_RNA (1)...(19): siRNA sense strand
guggguaaauauacaaugg

SEQ ID NO: 129170 - RNA, 19 nt, Homo sapiens
  misc_RNA (1)...(19): siRNA sense strand
uggaacacaauccuuuaua

SEQ ID NO: 129171 - RNA, 19 nt, Homo sapiens
  misc_RNA (1)...(19): siRNA sense strand
ccaccuuuccuacaaauuc

SEQ ID NO: 129172 - RNA, 19 nt, Homo sapiens
  misc_RNA (1)...(19): siRNA sense strand
guugaguaguuguucuuau

SEQ ID NO: 129173 - RNA, 19 nt, Homo sapiens
  misc_RNA (1)...(19): siRNA sense strand
aaccugacuuuccaccuuu

SEQ ID NO: 129174 - RNA, 19 nt, Homo sapiens
  misc_RNA (1)...(19): siRNA sense strand
gaacggaugaagcucuuac

SEQ ID NO: 129175 - RNA, 19 nt, Homo sapiens
  misc_RNA (1)...(19): siRNA sense strand
cuacaaauuccgauuacug

SEQ ID NO: 129176 - RNA, 19 nt, Homo sapiens
  misc_RNA (1)...(19): siRNA sense strand
cgagaaugacuuuaaccuu

SEQ ID NO: 129177 - RNA, 19 nt, Homo sapiens
  misc_RNA (1)...(19): siRNA sense strand
gaacgcagaacggaugaag

SEQ ID NO: 129178 - RNA, 19 nt, Homo sapiens
  misc_RNA (1)...(19): siRNA sense strand
caaaggcaaugaggugaac

SEQ ID NO: 129179 - RNA, 19 nt, Homo sapiens
  misc_RNA (1)...(19): siRNA sense strand
ccugaaguggguaaauaua

SEQ ID NO: 129180 - RNA, 19 nt, Homo sapiens
  misc_RNA (1)...(19): siRNA sense strand
agguagaacuugacaacug

SEQ ID NO: 129181 - RNA, 19 nt, Homo sapiens
  misc_RNA (1)...(19): siRNA sense strand
gacaacugcccuucugugu

SEQ ID NO: 129182 - RNA, 19 nt, Homo sapiens
  misc_RNA (1)...(19): siRNA sense strand
cuaaugaagcauccacgaa

SEQ ID NO: 129183 - RNA, 19 nt, Homo sapiens
  misc_RNA (1)...(19): siRNA sense strand
gaugaagcucuuacaccaa

SEQ ID NO: 129184 - RNA, 19 nt, Homo sapiens
  misc_RNA (1)...(19): siRNA sense strand
gugaggagcaucccaagca

SEQ ID NO: 129185 - RNA, 19 nt, Homo sapiens
  misc_RNA (1)...(19): siRNA sense strand
gaagaagguagaacuugac

SEQ ID NO: 129186 - RNA, 19 nt, Homo sapiens
  misc_RNA (1)...(19): siRNA sense strand
uacccgagaaugacuuuaa

SEQ ID NO: 129187 - RNA, 19 nt, Homo sapiens
  misc_RNA (1)...(19): siRNA sense strand
acaguggauuucugguuug

SEQ ID NO: 129188 - RNA, 19 nt, Homo sapiens
  misc_RNA (1)...(19): siRNA sense strand
ucacaguggauuucugguu

SEQ ID NO: 129189 - RNA, 19 nt, Homo sapiens
  misc_RNA (1)...(19): siRNA sense strand
caccaagugucacgagucu

SEQ ID NO: 129190 - RNA, 19 nt, Homo sapiens
  misc_RNA (1)...(19): siRNA sense strand
ggaguucauggcuaauuuc

SEQ ID NO: 129191 - RNA, 19 nt, Homo sapiens
  misc_RNA (1)...(19): siRNA sense strand
cagcacuggguacagguua

SEQ ID NO: 129192 - RNA, 19 nt, Homo sapiens
  misc_RNA (1)...(19): siRNA sense strand
ccacgaagaagguagaacu

SEQ ID NO: 129193 - RNA, 19 nt, Homo sapiens
  misc_RNA (1)...(19): siRNA sense strand
cuuccacacuagagacaaa

SEQ ID NO: 129194 - RNA, 19 nt, Homo sapiens
  misc_RNA (1)...(19): siRNA sense strand
uggauucucuaacaacuac

SEQ ID NO: 129195 - RNA, 19 nt, Homo sapiens
  misc_RNA (1)...(19): siRNA sense strand
agagauuccuaaagcaaag

SEQ ID NO: 129196 - RNA, 19 nt, Homo sapiens
  misc_RNA (1)...(19): siRNA sense strand
aaugugggcuaucuagaag

SEQ ID NO: 129197 - RNA, 19 nt, Homo sapiens
  misc_RNA (1)...(19): siRNA sense strand
ggaagagguacaggcagaa

SEQ ID NO: 129198 - RNA, 19 nt, Homo sapiens
  misc_RNA (1)...(19): siRNA sense strand
ugacuuuccaccuuuccua

SEQ ID NO: 129199 - RNA, 19 nt, Homo sapiens
  misc_RNA (1)...(19): siRNA sense strand
uucaagagauuccuaaagc

SEQ ID NO: 129200 - RNA, 19 nt, Homo sapiens
  misc_RNA (1)...(19): siRNA sense strand
cuucgugggugccauucaa

SEQ ID NO: 129201 - RNA, 19 nt, Homo sapiens
  misc_RNA (1)...(19): siRNA sense strand
agagagaaacaccugaugu

SEQ ID NO: 129202 - RNA, 19 nt, Homo sapiens
  misc_RNA (1)...(19): siRNA sense strand
gcuucaaccugacuuucca

SEQ ID NO: 129203 - RNA, 19 nt, Homo sapiens
  misc_RNA (1)...(19): siRNA sense strand
gguugaguaguuguucuua

SEQ ID NO: 129204 - RNA, 19 nt, Homo sapiens
  misc_RNA (1)...(19): siRNA sense strand
gaagcucuuacaccaagug

SEQ ID NO: 129205 - RNA, 19 nt, Homo sapiens
  misc_RNA (1)...(19): siRNA sense strand
guacagguuacguuacagu

SEQ ID NO: 129206 - RNA, 19 nt, Homo sapiens
  misc_RNA (1)...(19): siRNA sense strand
ccauucaagagauuccuaa

SEQ ID NO: 129207 - RNA, 19 nt, Homo sapiens
  misc_RNA (1)...(19): siRNA sense strand
ggcagaaaaucccaaagug

SEQ ID NO: 129208 - RNA, 19 nt, Homo sapiens
  misc_RNA (1)...(19): siRNA sense strand
guggaacacaauccuuuau

SEQ ID NO: 129209 - RNA, 19 nt, Homo sapiens
  misc_RNA (1)...(19): siRNA sense strand
uacaaauuccgauuacugu

SEQ ID NO: 129210 - RNA, 19 nt, Homo sapiens
  misc_RNA (1)...(19): siRNA sense strand
aagagauuccuaaagcaaa

SEQ ID NO: 129211 - RNA, 19 nt, Homo sapiens
  misc_RNA (1)...(19): siRNA sense strand
ggaccugguacccgagaau

SEQ ID NO: 129212 - RNA, 19 nt, Homo sapiens
  misc_RNA (1)...(19): siRNA sense strand
gcuggauuauggcaucuac

SEQ ID NO: 129213 - RNA, 19 nt, Homo sapiens
  misc_RNA (1)...(19): siRNA sense strand
gcagaaaaucccaaagugu

SEQ ID NO: 129214 - RNA, 19 nt, Homo sapiens
  misc_RNA (1)...(19): siRNA sense strand
uaaagcaaaggaguucaug

SEQ ID NO: 129215 - RNA, 19 nt, Homo sapiens
  misc_RNA (1)...(19): siRNA sense strand
uuucugguuuggugcauga

SEQ ID NO: 129216 - RNA, 19 nt, Homo sapiens
  misc_RNA (1)...(19): siRNA sense strand
gggugccauucaagagauu

SEQ ID NO: 129217 - RNA, 19 nt, Homo sapiens
  misc_RNA (1)...(19): siRNA sense strand
caauggucuuccacacuag

SEQ ID NO: 129218 - RNA, 19 nt, Homo sapiens
  misc_RNA (1)...(19): siRNA sense strand
uggcuaauuuccauaagac

SEQ ID NO: 129219 - RNA, 19 nt, Homo sapiens
  misc_RNA (1)...(19): siRNA sense strand
ugaggagcaucccaagcau

SEQ ID NO: 129220 - RNA, 19 nt, Homo sapiens
  misc_RNA (1)...(19): siRNA sense strand
agaacgaucuccucucuua

SEQ ID NO: 129221 - RNA, 19 nt, Homo sapiens
  misc_RNA (1)...(19): siRNA sense strand
ggaggagucucagcacuua

SEQ ID NO: 129222 - RNA, 19 nt, Homo sapiens
  misc_RNA (1)...(19): siRNA sense strand
caacaucacagcagacauu

SEQ ID NO: 129223 - RNA, 19 nt, Homo sapiens
  misc_RNA (1)...(19): siRNA sense strand
gaucagggaccgacauuug

SEQ ID NO: 129224 - RNA, 19 nt, Homo sapiens
  misc_RNA (1)...(19): siRNA sense strand
ggaccgacauuugacuauu

SEQ ID NO: 129225 - RNA, 19 nt, Homo sapiens
  misc_RNA (1)...(19): siRNA sense strand
gagaggcccugcgugauga

SEQ ID NO: 129226 - RNA, 19 nt, Homo sapiens
  misc_RNA (1)...(19): siRNA sense strand
gggaugaacucacugacau

SEQ ID NO: 129227 - RNA, 19 nt, Homo sapiens
  misc_RNA (1)...(19): siRNA sense strand
cagcagacauugggacuga

SEQ ID NO: 129228 - RNA, 19 nt, Homo sapiens
  misc_RNA (1)...(19): siRNA sense strand
gaccgacauuugacuauuc

SEQ ID NO: 129229 - RNA, 19 nt, Homo sapiens
  misc_RNA (1)...(19): siRNA sense strand
ccagaacgaucuccucucu

SEQ ID NO: 129230 - RNA, 19 nt, Homo sapiens
  misc_RNA (1)...(19): siRNA sense strand
guggaccucuugccagaaa

SEQ ID NO: 129231 - RNA, 19 nt, Homo sapiens
  misc_RNA (1)...(19): siRNA sense strand
gaccaguaccugaagauga

SEQ ID NO: 129232 - RNA, 19 nt, Homo sapiens
  misc_RNA (1)...(19): siRNA sense strand
ggaugaacucacugacaua

SEQ ID NO: 129233 - RNA, 19 nt, Homo sapiens
  misc_RNA (1)...(19): siRNA sense strand
ccacaucuguaggacacua

SEQ ID NO: 129234 - RNA, 19 nt, Homo sapiens
  misc_RNA (1)...(19): siRNA sense strand
gaggagauaagggcaauga

SEQ ID NO: 129235 - RNA, 19 nt, Homo sapiens
  misc_RNA (1)...(19): siRNA sense strand
guaccgcccugcagguugu

SEQ ID NO: 129236 - RNA, 19 nt, Homo sapiens
  misc_RNA (1)...(19): siRNA sense strand
gugaagcaccgaggagaua

SEQ ID NO: 129237 - RNA, 19 nt, Homo sapiens
  misc_RNA (1)...(19): siRNA sense strand
acuauaagauggugaagca

SEQ ID NO: 129238 - RNA, 19 nt, Homo sapiens
  misc_RNA (1)...(19): siRNA sense strand
gaaaaugaccacaaucugu

SEQ ID NO: 129239 - RNA, 19 nt, Homo sapiens
  misc_RNA (1)...(19): siRNA sense strand
gauaagggcaaugaggaaa

SEQ ID NO: 129240 - RNA, 19 nt, Homo sapiens
  misc_RNA (1)...(19): siRNA sense strand
gaacauuuaacagggcaaa

SEQ ID NO: 129241 - RNA, 19 nt, Homo sapiens
  misc_RNA (1)...(19): siRNA sense strand
accaguaccugaagaugaa

SEQ ID NO: 129242 - RNA, 19 nt, Homo sapiens
  misc_RNA (1)...(19): siRNA sense strand
gaggaugacgacauugcua

SEQ ID NO: 129243 - RNA, 19 nt, Homo sapiens
  misc_RNA (1)...(19): siRNA sense strand
ugaacucacugacauacca

SEQ ID NO: 129244 - RNA, 19 nt, Homo sapiens
  misc_RNA (1)...(19): siRNA sense strand
gcuuauggcaucuauguca

SEQ ID NO: 129245 - RNA, 19 nt, Homo sapiens
  misc_RNA (1)...(19): siRNA sense strand
guacuucggaggagucuca

SEQ ID NO: 129246 - RNA, 19 nt, Homo sapiens
  misc_RNA (1)...(19): siRNA sense strand
cucgugaugucuacaguaa

SEQ ID NO: 129247 - RNA, 19 nt, Homo sapiens
  misc_RNA (1)...(19): siRNA sense strand
gagaucagggaccgacauu

SEQ ID NO: 129248 - RNA, 19 nt, Homo sapiens
  misc_RNA (1)...(19): siRNA sense strand
gggcaaaacuguugaacgu

SEQ ID NO: 129249 - RNA, 19 nt, Homo sapiens
  misc_RNA (1)...(19): siRNA sense strand
gagcuggggccucuuuaua

SEQ ID NO: 129250 - RNA, 19 nt, Homo sapiens
  misc_RNA (1)...(19): siRNA sense strand
gggacugccuguucuugca

SEQ ID NO: 129251 - RNA, 19 nt, Homo sapiens
  misc_RNA (1)...(19): siRNA sense strand
gaugggaugaacucacuga

SEQ ID NO: 129252 - RNA, 19 nt, Homo sapiens
  misc_RNA (1)...(19): siRNA sense strand
gcacgauguggaccucuug

SEQ ID NO: 129253 - RNA, 19 nt, Homo sapiens
  misc_RNA (1)...(19): siRNA sense strand
gcuaugaacaaguuuggau

SEQ ID NO: 129254 - RNA, 19 nt, Homo sapiens
  misc_RNA (1)...(19): siRNA sense strand
gcccuacuguccagaacga

SEQ ID NO: 129255 - RNA, 19 nt, Homo sapiens
  misc_RNA (1)...(19): siRNA sense strand
ccacguuacccaccugguu

SEQ ID NO: 129256 - RNA, 19 nt, Homo sapiens
  misc_RNA (1)...(19): siRNA sense strand
gaacgaucuccucucuuag

SEQ ID NO: 129257 - RNA, 19 nt, Homo sapiens
  misc_RNA (1)...(19): siRNA sense strand
cuaugaacaaguuuggaua

SEQ ID NO: 129258 - RNA, 19 nt, Homo sapiens
  misc_RNA (1)...(19): siRNA sense strand
ccguugcuaugaacaaguu

SEQ ID NO: 129259 - RNA, 19 nt, Homo sapiens
  misc_RNA (1)...(19): siRNA sense strand
gagugggacugccuguucu

SEQ ID NO: 129260 - RNA, 19 nt, Homo sapiens
  misc_RNA (1)...(19): siRNA sense strand
cgacauuugacuauucuca

SEQ ID NO: 129261 - RNA, 19 nt, Homo sapiens
  misc_RNA (1)...(19): siRNA sense strand
uggugaggaugacgacauu

SEQ ID NO: 129262 - RNA, 19 nt, Homo sapiens
  misc_RNA (1)...(19): siRNA sense strand
uguaggacacuauaagaug

SEQ ID NO: 129263 - RNA, 19 nt, Homo sapiens
  misc_RNA (1)...(19): siRNA sense strand
ccgaacagccaucauugug

SEQ ID NO: 129264 - RNA, 19 nt, Homo sapiens
  misc_RNA (1)...(19): siRNA sense strand
aaaaugaccacaaucugua

SEQ ID NO: 129265 - RNA, 19 nt, Homo sapiens
  misc_RNA (1)...(19): siRNA sense strand
aagucucagugcccuauuu

SEQ ID NO: 129266 - RNA, 19 nt, Homo sapiens
  misc_RNA (1)...(19): siRNA sense strand
ggacgcaagaugggaugaa

SEQ ID NO: 129267 - RNA, 19 nt, Homo sapiens
  misc_RNA (1)...(19): siRNA sense strand
aagaugggaugaacucacu

SEQ ID NO: 129268 - RNA, 19 nt, Homo sapiens
  misc_RNA (1)...(19): siRNA sense strand
ugaacaaguuuggauacag

SEQ ID NO: 129269 - RNA, 19 nt, Homo sapiens
  misc_RNA (1)...(19): siRNA sense strand
ucccaagccuuccgucaag

SEQ ID NO: 129270 - RNA, 19 nt, Homo sapiens
  misc_RNA (1)...(19): siRNA sense strand
ugaauggcuuccccaauga

SEQ ID NO: 129271 - RNA, 19 nt, Homo sapiens
  misc_RNA (1)...(19): siRNA sense strand
cucaaggucugcccuacug

SEQ ID NO: 129272 - RNA, 19 nt, Homo sapiens
  misc_RNA (1)...(19): siRNA sense strand
gaugaacucacugacauac

SEQ ID NO: 129273 - RNA, 19 nt, Homo sapiens
  misc_RNA (1)...(19): siRNA sense strand
ugaagcaccgaggagauaa

SEQ ID NO: 129274 - RNA, 19 nt, Homo sapiens
  misc_RNA (1)...(19): siRNA sense strand
gacacuauaagauggugaa

SEQ ID NO: 129275 - RNA, 19 nt, Homo sapiens
  misc_RNA (1)...(19): siRNA sense strand
caucuguaggacacuauaa

SEQ ID NO: 129276 - RNA, 19 nt, Homo sapiens
  misc_RNA (1)...(19): siRNA sense strand
gccagaaaaugaccacaau

SEQ ID NO: 129277 - RNA, 19 nt, Homo sapiens
  misc_RNA (1)...(19): siRNA sense strand
ugaggaaaauccccacaga

SEQ ID NO: 129278 - RNA, 19 nt, Homo sapiens
  misc_RNA (1)...(19): siRNA sense strand
cauguugccguugcuauga

SEQ ID NO: 129279 - RNA, 19 nt, Homo sapiens
  misc_RNA (1)...(19): siRNA sense strand
gaagucucagugcccuauu

SEQ ID NO: 129280 - RNA, 19 nt, Homo sapiens
  misc_RNA (1)...(19): siRNA sense strand
ccgaggagauaagggcaau

SEQ ID NO: 129281 - RNA, 19 nt, Homo sapiens
  misc_RNA (1)...(19): siRNA sense strand
caaccacucuucaccaaua

SEQ ID NO: 129282 - RNA, 19 nt, Homo sapiens
  misc_RNA (1)...(19): siRNA sense strand
acacgaagcugaccaugaa

SEQ ID NO: 129283 - RNA, 19 nt, Homo sapiens
  misc_RNA (1)...(19): siRNA sense strand
gaaggaggaugccgccuau

SEQ ID NO: 129284 - RNA, 19 nt, Homo sapiens
  misc_RNA (1)...(19): siRNA sense strand
gcuacuggcuccacuaucu

SEQ ID NO: 129285 - RNA, 19 nt, Homo sapiens
  misc_RNA (1)...(19): siRNA sense strand
gaguaaggcucaguuucug

SEQ ID NO: 129286 - RNA, 19 nt, Homo sapiens
  misc_RNA (1)...(19): siRNA sense strand
ggcaaccacucuucaccaa

SEQ ID NO: 129287 - RNA, 19 nt, Homo sapiens
  misc_RNA (1)...(19): siRNA sense strand
ucccuaugcuggcuacuuu

SEQ ID NO: 129288 - RNA, 19 nt, Homo sapiens
  misc_RNA (1)...(19): siRNA sense strand
ucagagguuuaccaagauu

SEQ ID NO: 129289 - RNA, 19 nt, Homo sapiens
  misc_RNA (1)...(19): siRNA sense strand
gaacaccaccugcgcuacu

SEQ ID NO: 129290 - RNA, 19 nt, Homo sapiens
  misc_RNA (1)...(19): siRNA sense strand
ugacugggaugaagaucuc

SEQ ID NO: 129291 - RNA, 19 nt, Homo sapiens
  misc_RNA (1)...(19): siRNA sense strand
gaacccaggcgugcucaug

SEQ ID NO: 129292 - RNA, 19 nt, Homo sapiens
  misc_RNA (1)...(19): siRNA sense strand
ggaggugucucggcaacca

SEQ ID NO: 129293 - RNA, 19 nt, Homo sapiens
  misc_RNA (1)...(19): siRNA sense strand
uggaugaccgcaaccuaua

SEQ ID NO: 129294 - RNA, 19 nt, Homo sapiens
  misc_RNA (1)...(19): siRNA sense strand
caauaucacaguggacauu

SEQ ID NO: 129295 - RNA, 19 nt, Homo sapiens
  misc_RNA (1)...(19): siRNA sense strand
uaacgugggcuuccuagag

SEQ ID NO: 129296 - RNA, 19 nt, Homo sapiens
  misc_RNA (1)...(19): siRNA sense strand
gaucucacgcccagacauc

SEQ ID NO: 129297 - RNA, 19 nt, Homo sapiens
  misc_RNA (1)...(19): siRNA sense strand
acaagcauaacgaaccuaa

SEQ ID NO: 129298 - RNA, 19 nt, Homo sapiens
  misc_RNA (1)...(19): siRNA sense strand
cgacaagcauaacgaaccu

SEQ ID NO: 129299 - RNA, 19 nt, Homo sapiens
  misc_RNA (1)...(19): siRNA sense strand
gcacgaccgcgacaagcau

SEQ ID NO: 129300 - RNA, 19 nt, Homo sapiens
  misc_RNA (1)...(19): siRNA sense strand
ggccgucauccucuacuuu

SEQ ID NO: 129301 - RNA, 19 nt, Homo sapiens
  misc_RNA (1)...(19): siRNA sense strand
ccacucuucaccaauauca

SEQ ID NO: 129302 - RNA, 19 nt, Homo sapiens
  misc_RNA (1)...(19): siRNA sense strand
gccgucauccucuacuuug

SEQ ID NO: 129303 - RNA, 19 nt, Homo sapiens
  misc_RNA (1)...(19): siRNA sense strand
ucaauggcuuccccaauga

SEQ ID NO: 129304 - RNA, 19 nt, Homo sapiens
  misc_RNA (1)...(19): siRNA sense strand
aggaggaugccgccuauga

SEQ ID NO: 129305 - RNA, 19 nt, Homo sapiens
  misc_RNA (1)...(19): siRNA sense strand
gcgcuacuggcuccacuau

SEQ ID NO: 129306 - RNA, 19 nt, Homo sapiens
  misc_RNA (1)...(19): siRNA sense strand
gcaaccacucuucaccaau

SEQ ID NO: 129307 - RNA, 19 nt, Homo sapiens
  misc_RNA (1)...(19): siRNA sense strand
gcuaccgcaugaucaagca

SEQ ID NO: 129308 - RNA, 19 nt, Homo sapiens
  misc_RNA (1)...(19): siRNA sense strand
gacgguggcggucaucauc

SEQ ID NO: 129309 - RNA, 19 nt, Homo sapiens
  misc_RNA (1)...(19): siRNA sense strand
gaggaugccgccuaugacu

SEQ ID NO: 129310 - RNA, 19 nt, Homo sapiens
  misc_RNA (1)...(19): siRNA sense strand
gcgucuaugucaucaacca

SEQ ID NO: 129311 - RNA, 19 nt, Homo sapiens
  misc_RNA (1)...(19): siRNA sense strand
gcgcuacggcgucuauguc

SEQ ID NO: 129312 - RNA, 19 nt, Homo sapiens
  misc_RNA (1)...(19): siRNA sense strand
cuacuggcuccacuaucua

SEQ ID NO: 129313 - RNA, 19 nt, Homo sapiens
  misc_RNA (1)...(19): siRNA sense strand
gaacccaggcgugcucaug

SEQ ID NO: 129314 - RNA, 19 nt, Homo sapiens
  misc_RNA (1)...(19): siRNA sense strand
ggccgucauccucuacuuu

SEQ ID NO: 129315 - RNA, 19 nt, Homo sapiens
  misc_RNA (1)...(19): siRNA sense strand
gccgucauccucuacuuug

SEQ ID NO: 129316 - RNA, 19 nt, Homo sapiens
  misc_RNA (1)...(19): siRNA sense strand
gacgguggcggucaucauc

SEQ ID NO: 129317 - RNA, 19 nt, Homo sapiens
  misc_RNA (1)...(19): siRNA sense strand
gaaaugaagagcagaugaa

SEQ ID NO: 129318 - RNA, 19 nt, Homo sapiens
  misc_RNA (1)...(19): siRNA sense strand
gaaguggaaucaccaacuc

SEQ ID NO: 129319 - RNA, 19 nt, Homo sapiens
  misc_RNA (1)...(19): siRNA sense strand
gaaaacaccugaggaagau

SEQ ID NO: 129320 - RNA, 19 nt, Homo sapiens
  misc_RNA (1)...(19): siRNA sense strand
ugagcaaccugacgaagug

SEQ ID NO: 129321 - RNA, 19 nt, Homo sapiens
  misc_RNA (1)...(19): siRNA sense strand
gcgcggagaugguccugau

SEQ ID NO: 129322 - RNA, 19 nt, Homo sapiens
  misc_RNA (1)...(19): siRNA sense strand
ggaguccagugaugagcaa

SEQ ID NO: 129323 - RNA, 19 nt, Homo sapiens
  misc_RNA (1)...(19): siRNA sense strand
ggaaucaccaacucaaagu

SEQ ID NO: 129324 - RNA, 19 nt, Homo sapiens
  misc_RNA (1)...(19): siRNA sense strand
caacucaaagucaggauuc

SEQ ID NO: 129325 - RNA, 19 nt, Homo sapiens
  misc_RNA (1)...(19): siRNA sense strand
gggugugccugcgaaauga

SEQ ID NO: 129326 - RNA, 19 nt, Homo sapiens
  misc_RNA (1)...(19): siRNA sense strand
cgaaaugaagagcagauga

SEQ ID NO: 129327 - RNA, 19 nt, Homo sapiens
  misc_RNA (1)...(19): siRNA sense strand
ugaagcggauagccaggaa

SEQ ID NO: 129328 - RNA, 19 nt, Homo sapiens
  misc_RNA (1)...(19): siRNA sense strand
aaacaccugaggaagauga

SEQ ID NO: 129329 - RNA, 19 nt, Homo sapiens
  misc_RNA (1)...(19): siRNA sense strand
ggauagccaggaacagguu

SEQ ID NO: 129330 - RNA, 19 nt, Homo sapiens
  misc_RNA (1)...(19): siRNA sense strand
ggaagaugaagggcaauca

SEQ ID NO: 129331 - RNA, 19 nt, Homo sapiens
  misc_RNA (1)...(19): siRNA sense strand
ucugaggaguccagugaug

SEQ ID NO: 129332 - RNA, 19 nt, Homo sapiens
  misc_RNA (1)...(19): siRNA sense strand
ugaagcugauagccaggaa

SEQ ID NO: 129333 - RNA, 19 nt, Homo sapiens
  misc_RNA (1)...(19): siRNA sense strand
gcggagaugguccugaugu

SEQ ID NO: 129334 - RNA, 19 nt, Homo sapiens
  misc_RNA (1)...(19): siRNA sense strand
aaaugaagagcagaugaaa

SEQ ID NO: 129335 - RNA, 19 nt, Homo sapiens
  misc_RNA (1)...(19): siRNA sense strand
gcaaccugacgaaguggaa

SEQ ID NO: 129336 - RNA, 19 nt, Homo sapiens
  misc_RNA (1)...(19): siRNA sense strand
uaucggcguagaccaauga

SEQ ID NO: 129337 - RNA, 19 nt, Homo sapiens
  misc_RNA (1)...(19): siRNA sense strand
cugaagagagagaggauga

SEQ ID NO: 129338 - RNA, 19 nt, Homo sapiens
  misc_RNA (1)...(19): siRNA sense strand
cuucugaggaguccaguga

SEQ ID NO: 129339 - RNA, 19 nt, Homo sapiens
  misc_RNA (1)...(19): siRNA sense strand
ugaaaacaccugaggaaga

SEQ ID NO: 129340 - RNA, 19 nt, Homo sapiens
  misc_RNA (1)...(19): siRNA sense strand
cggcguagaccaaugaucu

SEQ ID NO: 129341 - RNA, 19 nt, Homo sapiens
  misc_RNA (1)...(19): siRNA sense strand
guggaaucaccaacucaaa

SEQ ID NO: 129342 - RNA, 19 nt, Homo sapiens
  misc_RNA (1)...(19): siRNA sense strand
gaagaugaagggcaaucac

SEQ ID NO: 129343 - RNA, 19 nt, Homo sapiens
  misc_RNA (1)...(19): siRNA sense strand
ccaacucaaagucaggauu

SEQ ID NO: 129344 - RNA, 19 nt, Homo sapiens
  misc_RNA (1)...(19): siRNA sense strand
caaauccagaggaggugaa

SEQ ID NO: 129345 - RNA, 19 nt, Homo sapiens
  misc_RNA (1)...(19): siRNA sense strand
gaggagcgcuguuugaguu

SEQ ID NO: 129346 - RNA, 19 nt, Homo sapiens
  misc_RNA (1)...(19): siRNA sense strand
ggacgaggagcgcuguuug

SEQ ID NO: 129347 - RNA, 19 nt, Homo sapiens
  misc_RNA (1)...(19): siRNA sense strand
gcuccgggaugaagaacug

SEQ ID NO: 129348 - RNA, 19 nt, Homo sapiens
  misc_RNA (1)...(19): siRNA sense strand
uggaggcacucgaggagaa

SEQ ID NO: 129349 - RNA, 19 nt, Homo sapiens
  misc_RNA (1)...(19): siRNA sense strand
gaggaugcgcugcgaaauc

SEQ ID NO: 129350 - RNA, 19 nt, Homo sapiens
  misc_RNA (1)...(19): siRNA sense strand
gacgaggagcgcuguuuga

SEQ ID NO: 129351 - RNA, 19 nt, Homo sapiens
  misc_RNA (1)...(19): siRNA sense strand
ugaaggaccaacagacguu

SEQ ID NO: 129352 - RNA, 19 nt, Homo sapiens
  misc_RNA (1)...(19): siRNA sense strand
gaugcgcugcgaaaucuga

SEQ ID NO: 129353 - RNA, 19 nt, Homo sapiens
  misc_RNA (1)...(19): siRNA sense strand
gggucagccuguagugaau

SEQ ID NO: 129354 - RNA, 19 nt, Homo sapiens
  misc_RNA (1)...(19): siRNA sense strand
gcucugugggucucaaaug

SEQ ID NO: 129355 - RNA, 19 nt, Homo sapiens
  misc_RNA (1)...(19): siRNA sense strand
uggacucgcuggccuacga

SEQ ID NO: 129356 - RNA, 19 nt, Homo sapiens
  misc_RNA (1)...(19): siRNA sense strand
aggaugcgcugcgaaaucu

SEQ ID NO: 129357 - RNA, 19 nt, Homo sapiens
  misc_RNA (1)...(19): siRNA sense strand
gagcgcuguuugaguugca

SEQ ID NO: 129358 - RNA, 19 nt, Homo sapiens
  misc_RNA (1)...(19): siRNA sense strand
ggaggaugcgcugcgaaau

SEQ ID NO: 129359 - RNA, 19 nt, Homo sapiens
  misc_RNA (1)...(19): siRNA sense strand
gaggagcgcuguuugaguu

SEQ ID NO: 129360 - RNA, 19 nt, Homo sapiens
  misc_RNA (1)...(19): siRNA sense strand
ggacgaggagcgcuguuug

SEQ ID NO: 129361 - RNA, 19 nt, Homo sapiens
  misc_RNA (1)...(19): siRNA sense strand
gcuccgggaugaagaacug

SEQ ID NO: 129362 - RNA, 19 nt, Homo sapiens
  misc_RNA (1)...(19): siRNA sense strand
uggaggcacucgaggagaa

SEQ ID NO: 129363 - RNA, 19 nt, Homo sapiens
  misc_RNA (1)...(19): siRNA sense strand
gaggaugcgcugcgaaauc

SEQ ID NO: 129364 - RNA, 19 nt, Homo sapiens
  misc_RNA (1)...(19): siRNA sense strand
gacgaggagcgcuguuuga

SEQ ID NO: 129365 - RNA, 19 nt, Homo sapiens
  misc_RNA (1)...(19): siRNA sense strand
ugaaggaccaacagacguu

SEQ ID NO: 129366 - RNA, 19 nt, Homo sapiens
  misc_RNA (1)...(19): siRNA sense strand
gaugcgcugcgaaaucuga

SEQ ID NO: 129367 - RNA, 19 nt, Homo sapiens
  misc_RNA (1)...(19): siRNA sense strand
gggucagccuguagugaau

SEQ ID NO: 129368 - RNA, 19 nt, Homo sapiens
  misc_RNA (1)...(19): siRNA sense strand
gcucugugggucucaaaug

SEQ ID NO: 129369 - RNA, 19 nt, Homo sapiens
  misc_RNA (1)...(19): siRNA sense strand
uggacucgcuggccuacga

SEQ ID NO: 129370 - RNA, 19 nt, Homo sapiens
  misc_RNA (1)...(19): siRNA sense strand
aggaugcgcugcgaaaucu

SEQ ID NO: 129371 - RNA, 19 nt, Homo sapiens
  misc_RNA (1)...(19): siRNA sense strand
gagcgcuguuugaguugca

SEQ ID NO: 129372 - RNA, 19 nt, Homo sapiens
  misc_RNA (1)...(19): siRNA sense strand
ggaggaugcgcugcgaaau

SEQ ID NO: 129373 - RNA, 19 nt, Homo sapiens
  misc_RNA (1)...(19): siRNA sense strand
caagaagauuggucuguuu

SEQ ID NO: 129374 - RNA, 19 nt, Homo sapiens
  misc_RNA (1)...(19): siRNA sense strand
gaucugcaccguccaguug

SEQ ID NO: 129375 - RNA, 19 nt, Homo sapiens
  misc_RNA (1)...(19): siRNA sense strand
acaagaagauuggucuguu

SEQ ID NO: 129376 - RNA, 19 nt, Homo sapiens
  misc_RNA (1)...(19): siRNA sense strand
gccggugacuuccacaaga

SEQ ID NO: 129377 - RNA, 19 nt, Homo sapiens
  misc_RNA (1)...(19): siRNA sense strand
ugacagcagugagaagauc

SEQ ID NO: 129378 - RNA, 19 nt, Homo sapiens
  misc_RNA (1)...(19): siRNA sense strand
ccggugacuuccacaagaa

SEQ ID NO: 129379 - RNA, 19 nt, Homo sapiens
  misc_RNA (1)...(19): siRNA sense strand
gaagauuggucuguuuugu

SEQ ID NO: 129380 - RNA, 19 nt, Homo sapiens
  misc_RNA (1)...(19): siRNA sense strand
ugacugugccggugacuuc

SEQ ID NO: 129381 - RNA, 19 nt, Homo sapiens
  misc_RNA (1)...(19): siRNA sense strand
gagaccagcaguacgagau

SEQ ID NO: 129382 - RNA, 19 nt, Homo sapiens
  misc_RNA (1)...(19): siRNA sense strand
gcagcucuacgacgugaug

SEQ ID NO: 129383 - RNA, 19 nt, Homo sapiens
  misc_RNA (1)...(19): siRNA sense strand
gcgcgaggcagagaucgaa

SEQ ID NO: 129384 - RNA, 19 nt, Homo sapiens
  misc_RNA (1)...(19): siRNA sense strand
caagaagauuggucuguuu

SEQ ID NO: 129385 - RNA, 19 nt, Homo sapiens
  misc_RNA (1)...(19): siRNA sense strand
gaucugcaccguccaguug

SEQ ID NO: 129386 - RNA, 19 nt, Homo sapiens
  misc_RNA (1)...(19): siRNA sense strand
acaagaagauuggucuguu

SEQ ID NO: 129387 - RNA, 19 nt, Homo sapiens
  misc_RNA (1)...(19): siRNA sense strand
gccggugacuuccacaaga

SEQ ID NO: 129388 - RNA, 19 nt, Homo sapiens
  misc_RNA (1)...(19): siRNA sense strand
ugacagcagugagaagauc

SEQ ID NO: 129389 - RNA, 19 nt, Homo sapiens
  misc_RNA (1)...(19): siRNA sense strand
ccggugacuuccacaagaa

SEQ ID NO: 129390 - RNA, 19 nt, Homo sapiens
  misc_RNA (1)...(19): siRNA sense strand
gaagauuggucuguuuugu

SEQ ID NO: 129391 - RNA, 19 nt, Homo sapiens
  misc_RNA (1)...(19): siRNA sense strand
ugacugugccggugacuuc

SEQ ID NO: 129392 - RNA, 19 nt, Homo sapiens
  misc_RNA (1)...(19): siRNA sense strand
gagaccagcaguacgagau

SEQ ID NO: 129393 - RNA, 19 nt, Homo sapiens
  misc_RNA (1)...(19): siRNA sense strand
gcagcucuacgacgugaug

SEQ ID NO: 129394 - RNA, 19 nt, Homo sapiens
  misc_RNA (1)...(19): siRNA sense strand
gcgcgaggcagagaucgaa

SEQ ID NO: 129395 - RNA, 19 nt, Homo sapiens
  misc_RNA (1)...(19): siRNA sense strand
caagaagauuggucuguuu

SEQ ID NO: 129396 - RNA, 19 nt, Homo sapiens
  misc_RNA (1)...(19): siRNA sense strand
gaucugcaccguccaguug

SEQ ID NO: 129397 - RNA, 19 nt, Homo sapiens
  misc_RNA (1)...(19): siRNA sense strand
acaagaagauuggucuguu

SEQ ID NO: 129398 - RNA, 19 nt, Homo sapiens
  misc_RNA (1)...(19): siRNA sense strand
gccggugacuuccacaaga

SEQ ID NO: 129399 - RNA, 19 nt, Homo sapiens
  misc_RNA (1)...(19): siRNA sense strand
ugacagcagugagaagauc

SEQ ID NO: 129400 - RNA, 19 nt, Homo sapiens
  misc_RNA (1)...(19): siRNA sense strand
ccggugacuuccacaagaa

SEQ ID NO: 129401 - RNA, 19 nt, Homo sapiens
  misc_RNA (1)...(19): siRNA sense strand
gaagauuggucuguuuugu

SEQ ID NO: 129402 - RNA, 19 nt, Homo sapiens
  misc_RNA (1)...(19): siRNA sense strand
ugacugugccggugacuuc

SEQ ID NO: 129403 - RNA, 19 nt, Homo sapiens
  misc_RNA (1)...(19): siRNA sense strand
gagaccagcaguacgagau

SEQ ID NO: 129404 - RNA, 19 nt, Homo sapiens
  misc_RNA (1)...(19): siRNA sense strand
gcagcucuacgacgugaug

SEQ ID NO: 129405 - RNA, 19 nt, Homo sapiens
  misc_RNA (1)...(19): siRNA sense strand
gcgcgaggcagagaucgaa

SEQ ID NO: 129406 - RNA, 19 nt, Homo sapiens
  misc_RNA (1)...(19): siRNA sense strand
caagaagauuggucuguuu

SEQ ID NO: 129407 - RNA, 19 nt, Homo sapiens
  misc_RNA (1)...(19): siRNA sense strand
gaucugcaccguccaguug

SEQ ID NO: 129408 - RNA, 19 nt, Homo sapiens
  misc_RNA (1)...(19): siRNA sense strand
acaagaagauuggucuguu

SEQ ID NO: 129409 - RNA, 19 nt, Homo sapiens
  misc_RNA (1)...(19): siRNA sense strand
gccggugacuuccacaaga

SEQ ID NO: 129410 - RNA, 19 nt, Homo sapiens
  misc_RNA (1)...(19): siRNA sense strand
ugacagcagugagaagauc

SEQ ID NO: 129411 - RNA, 19 nt, Homo sapiens
  misc_RNA (1)...(19): siRNA sense strand
ccggugacuuccacaagaa

SEQ ID NO: 129412 - RNA, 19 nt, Homo sapiens
  misc_RNA (1)...(19): siRNA sense strand
gaagauuggucuguuuugu

SEQ ID NO: 129413 - RNA, 19 nt, Homo sapiens
  misc_RNA (1)...(19): siRNA sense strand
ugacugugccggugacuuc

SEQ ID NO: 129414 - RNA, 19 nt, Homo sapiens
  misc_RNA (1)...(19): siRNA sense strand
gagaccagcaguacgagau

SEQ ID NO: 129415 - RNA, 19 nt, Homo sapiens
  misc_RNA (1)...(19): siRNA sense strand
gcagcucuacgacgugaug

SEQ ID NO: 129416 - RNA, 19 nt, Homo sapiens
  misc_RNA (1)...(19): siRNA sense strand
gcgcgaggcagagaucgaa

SEQ ID NO: 129417 - RNA, 19 nt, Homo sapiens
  misc_RNA (1)...(19): siRNA sense strand
caagaagauuggucuguuu

SEQ ID NO: 129418 - RNA, 19 nt, Homo sapiens
  misc_RNA (1)...(19): siRNA sense strand
acaagaagauuggucuguu

SEQ ID NO: 129419 - RNA, 19 nt, Homo sapiens
  misc_RNA (1)...(19): siRNA sense strand
gccggugacuuccacaaga

SEQ ID NO: 129420 - RNA, 19 nt, Homo sapiens
  misc_RNA (1)...(19): siRNA sense strand
ccggugacuuccacaagaa

SEQ ID NO: 129421 - RNA, 19 nt, Homo sapiens
  misc_RNA (1)...(19): siRNA sense strand
gaagauuggucuguuuugu

SEQ ID NO: 129422 - RNA, 19 nt, Homo sapiens
  misc_RNA (1)...(19): siRNA sense strand
ugacugugccggugacuuc

SEQ ID NO: 129423 - RNA, 19 nt, Homo sapiens
  misc_RNA (1)...(19): siRNA sense strand
caagaagauuggucuguuu

SEQ ID NO: 129424 - RNA, 19 nt, Homo sapiens
  misc_RNA (1)...(19): siRNA sense strand
acaagaagauuggucuguu

SEQ ID NO: 129425 - RNA, 19 nt, Homo sapiens
  misc_RNA (1)...(19): siRNA sense strand
gccggugacuuccacaaga

SEQ ID NO: 129426 - RNA, 19 nt, Homo sapiens
  misc_RNA (1)...(19): siRNA sense strand
ccggugacuuccacaagaa

SEQ ID NO: 129427 - RNA, 19 nt, Homo sapiens
  misc_RNA (1)...(19): siRNA sense strand
gaagauuggucuguuuugu

SEQ ID NO: 129428 - RNA, 19 nt, Homo sapiens
  misc_RNA (1)...(19): siRNA sense strand
ugacugugccggugacuuc

SEQ ID NO: 129429 - RNA, 19 nt, Homo sapiens
  misc_RNA (1)...(19): siRNA sense strand
caagaagauuggucuguuu

SEQ ID NO: 129430 - RNA, 19 nt, Homo sapiens
  misc_RNA (1)...(19): siRNA sense strand
gaucugcaccguccaguug

SEQ ID NO: 129431 - RNA, 19 nt, Homo sapiens
  misc_RNA (1)...(19): siRNA sense strand
acaagaagauuggucuguu

SEQ ID NO: 129432 - RNA, 19 nt, Homo sapiens
  misc_RNA (1)...(19): siRNA sense strand
gccggugacuuccacaaga

SEQ ID NO: 129433 - RNA, 19 nt, Homo sapiens
  misc_RNA (1)...(19): siRNA sense strand
ugacagcagugagaagauc

SEQ ID NO: 129434 - RNA, 19 nt, Homo sapiens
  misc_RNA (1)...(19): siRNA sense strand
ccggugacuuccacaagaa

SEQ ID NO: 129435 - RNA, 19 nt, Homo sapiens
  misc_RNA (1)...(19): siRNA sense strand
gaagauuggucuguuuugu

SEQ ID NO: 129436 - RNA, 19 nt, Homo sapiens
  misc_RNA (1)...(19): siRNA sense strand
ugacugugccggugacuuc

SEQ ID NO: 129437 - RNA, 19 nt, Homo sapiens
  misc_RNA (1)...(19): siRNA sense strand
gagaccagcaguacgagau

SEQ ID NO: 129438 - RNA, 19 nt, Homo sapiens
  misc_RNA (1)...(19): siRNA sense strand
gcagcucuacgacgugaug

SEQ ID NO: 129439 - RNA, 19 nt, Homo sapiens
  misc_RNA (1)...(19): siRNA sense strand
gcgcgaggcagagaucgaa

SEQ ID NO: 129440 - RNA, 19 nt, Homo sapiens
  misc_RNA (1)...(19): siRNA sense strand
caagaagauuggucuguuu

SEQ ID NO: 129441 - RNA, 19 nt, Homo sapiens
  misc_RNA (1)...(19): siRNA sense strand
acaagaagauuggucuguu

SEQ ID NO: 129442 - RNA, 19 nt, Homo sapiens
  misc_RNA (1)...(19): siRNA sense strand
gccggugacuuccacaaga

SEQ ID NO: 129443 - RNA, 19 nt, Homo sapiens
  misc_RNA (1)...(19): siRNA sense strand
ccggugacuuccacaagaa

SEQ ID NO: 129444 - RNA, 19 nt, Homo sapiens
  misc_RNA (1)...(19): siRNA sense strand
gaagauuggucuguuuugu

SEQ ID NO: 129445 - RNA, 19 nt, Homo sapiens
  misc_RNA (1)...(19): siRNA sense strand
ugacugugccggugacuuc

SEQ ID NO: 129446 - RNA, 19 nt, Homo sapiens
  misc_RNA (1)...(19): siRNA sense strand
caagaagauuggucuguuu

SEQ ID NO: 129447 - RNA, 19 nt, Homo sapiens
  misc_RNA (1)...(19): siRNA sense strand
acaagaagauuggucuguu

SEQ ID NO: 129448 - RNA, 19 nt, Homo sapiens
  misc_RNA (1)...(19): siRNA sense strand
gccggugacuuccacaaga

SEQ ID NO: 129449 - RNA, 19 nt, Homo sapiens
  misc_RNA (1)...(19): siRNA sense strand
ccggugacuuccacaagaa

SEQ ID NO: 129450 - RNA, 19 nt, Homo sapiens
  misc_RNA (1)...(19): siRNA sense strand
gaagauuggucuguuuugu

SEQ ID NO: 129451 - RNA, 19 nt, Homo sapiens
  misc_RNA (1)...(19): siRNA sense strand
ugacugugccggugacuuc

SEQ ID NO: 129452 - RNA, 19 nt, Homo sapiens
  misc_RNA (1)...(19): siRNA sense strand
caagaagauuggucuguuu

SEQ ID NO: 129453 - RNA, 19 nt, Homo sapiens
  misc_RNA (1)...(19): siRNA sense strand
acaagaagauuggucuguu

SEQ ID NO: 129454 - RNA, 19 nt, Homo sapiens
  misc_RNA (1)...(19): siRNA sense strand
gccggugacuuccacaaga

SEQ ID NO: 129455 - RNA, 19 nt, Homo sapiens
  misc_RNA (1)...(19): siRNA sense strand
ccggugacuuccacaagaa

SEQ ID NO: 129456 - RNA, 19 nt, Homo sapiens
  misc_RNA (1)...(19): siRNA sense strand
gaagauuggucuguuuugu

SEQ ID NO: 129457 - RNA, 19 nt, Homo sapiens
  misc_RNA (1)...(19): siRNA sense strand
ugacugugccggugacuuc

SEQ ID NO: 129458 - RNA, 19 nt, Homo sapiens
  misc_RNA (1)...(19): siRNA sense strand
caagaagauuggucuguuu

SEQ ID NO: 129459 - RNA, 19 nt, Homo sapiens
  misc_RNA (1)...(19): siRNA sense strand
acaagaagauuggucuguu

SEQ ID NO: 129460 - RNA, 19 nt, Homo sapiens
  misc_RNA (1)...(19): siRNA sense strand
gccggugacuuccacaaga

SEQ ID NO: 129461 - RNA, 19 nt, Homo sapiens
  misc_RNA (1)...(19): siRNA sense strand
ccggugacuuccacaagaa

SEQ ID NO: 129462 - RNA, 19 nt, Homo sapiens
  misc_RNA (1)...(19): siRNA sense strand
gaagauuggucuguuuugu

SEQ ID NO: 129463 - RNA, 19 nt, Homo sapiens
  misc_RNA (1)...(19): siRNA sense strand
ugacugugccggugacuuc

SEQ ID NO: 129464 - RNA, 19 nt, Homo sapiens
  misc_RNA (1)...(19): siRNA sense strand
gaacagacuucaacaguaa

SEQ ID NO: 129465 - RNA, 19 nt, Homo sapiens
  misc_RNA (1)...(19): siRNA sense strand
gaugaagaaugacccuuua

SEQ ID NO: 129466 - RNA, 19 nt, Homo sapiens
  misc_RNA (1)...(19): siRNA sense strand
ccaauaaucagguaucuua

SEQ ID NO: 129467 - RNA, 19 nt, Homo sapiens
  misc_RNA (1)...(19): siRNA sense strand
gcagugaaguagacaauug

SEQ ID NO: 129468 - RNA, 19 nt, Homo sapiens
  misc_RNA (1)...(19): siRNA sense strand
gcauugacuuugaagauaa

SEQ ID NO: 129469 - RNA, 19 nt, Homo sapiens
  misc_RNA (1)...(19): siRNA sense strand
gaauaacccugcugaucaa

SEQ ID NO: 129470 - RNA, 19 nt, Homo sapiens
  misc_RNA (1)...(19): siRNA sense strand
ugaaugagcugcugucugu

SEQ ID NO: 129471 - RNA, 19 nt, Homo sapiens
  misc_RNA (1)...(19): siRNA sense strand
uaaagaagaucgacguguu

SEQ ID NO: 129472 - RNA, 19 nt, Homo sapiens
  misc_RNA (1)...(19): siRNA sense strand
gaaacaauccauccaguga

SEQ ID NO: 129473 - RNA, 19 nt, Homo sapiens
  misc_RNA (1)...(19): siRNA sense strand
gaagauggcgucgugauaa

SEQ ID NO: 129474 - RNA, 19 nt, Homo sapiens
  misc_RNA (1)...(19): siRNA sense strand
gaacggagacaacauugaa

SEQ ID NO: 129475 - RNA, 19 nt, Homo sapiens
  misc_RNA (1)...(19): siRNA sense strand
ggaauuaacagcuaacaau

SEQ ID NO: 129476 - RNA, 19 nt, Homo sapiens
  misc_RNA (1)...(19): siRNA sense strand
caggaagaauuguagauaa

SEQ ID NO: 129477 - RNA, 19 nt, Homo sapiens
  misc_RNA (1)...(19): siRNA sense strand
ggcauugacuuugaagaua

SEQ ID NO: 129478 - RNA, 19 nt, Homo sapiens
  misc_RNA (1)...(19): siRNA sense strand
gaagagcagugaaguagac

SEQ ID NO: 129479 - RNA, 19 nt, Homo sapiens
  misc_RNA (1)...(19): siRNA sense strand
uaacacagacuuucaagga

SEQ ID NO: 129480 - RNA, 19 nt, Homo sapiens
  misc_RNA (1)...(19): siRNA sense strand
gacaaggugugggaauuaa

SEQ ID NO: 129481 - RNA, 19 nt, Homo sapiens
  misc_RNA (1)...(19): siRNA sense strand
agaacagacuucaacagua

SEQ ID NO: 129482 - RNA, 19 nt, Homo sapiens
  misc_RNA (1)...(19): siRNA sense strand
gcaaugacggaccucuuua

SEQ ID NO: 129483 - RNA, 19 nt, Homo sapiens
  misc_RNA (1)...(19): siRNA sense strand
ggaauucucaucaacaguu

SEQ ID NO: 129484 - RNA, 19 nt, Homo sapiens
  misc_RNA (1)...(19): siRNA sense strand
gaucacauccacaccaauu

SEQ ID NO: 129485 - RNA, 19 nt, Homo sapiens
  misc_RNA (1)...(19): siRNA sense strand
guucagcgauggccuguau

SEQ ID NO: 129486 - RNA, 19 nt, Homo sapiens
  misc_RNA (1)...(19): siRNA sense strand
ggagaauuauaccucgaaa

SEQ ID NO: 129487 - RNA, 19 nt, Homo sapiens
  misc_RNA (1)...(19): siRNA sense strand
ccaguaaccuuuggaaaca

SEQ ID NO: 129488 - RNA, 19 nt, Homo sapiens
  misc_RNA (1)...(19): siRNA sense strand
cagagaggauggaaggaaa

SEQ ID NO: 129489 - RNA, 19 nt, Homo sapiens
  misc_RNA (1)...(19): siRNA sense strand
ucagguaucuuacacaucu

SEQ ID NO: 129490 - RNA, 19 nt, Homo sapiens
  misc_RNA (1)...(19): siRNA sense strand
acaguacccugcaaugaaa

SEQ ID NO: 129491 - RNA, 19 nt, Homo sapiens
  misc_RNA (1)...(19): siRNA sense strand
gaagaucauccaaacauca

SEQ ID NO: 129492 - RNA, 19 nt, Homo sapiens
  misc_RNA (1)...(19): siRNA sense strand
ggaggaaugccgacaguug

SEQ ID NO: 129493 - RNA, 19 nt, Homo sapiens
  misc_RNA (1)...(19): siRNA sense strand
gaagguggaauucucauca

SEQ ID NO: 129494 - RNA, 19 nt, Homo sapiens
  misc_RNA (1)...(19): siRNA sense strand
ggaugaagaaugacccuuu

SEQ ID NO: 129495 - RNA, 19 nt, Homo sapiens
  misc_RNA (1)...(19): siRNA sense strand
gcaugaaaccugacauugu

SEQ ID NO: 129496 - RNA, 19 nt, Homo sapiens
  misc_RNA (1)...(19): siRNA sense strand
uaacccugcugaucaaaug

SEQ ID NO: 129497 - RNA, 19 nt, Homo sapiens
  misc_RNA (1)...(19): siRNA sense strand
ucaaguaugcugaaucuga

SEQ ID NO: 129498 - RNA, 19 nt, Homo sapiens
  misc_RNA (1)...(19): siRNA sense strand
aaagaagaucgacguguua

SEQ ID NO: 129499 - RNA, 19 nt, Homo sapiens
  misc_RNA (1)...(19): siRNA sense strand
ggaaugccgacaguuguua

SEQ ID NO: 129500 - RNA, 19 nt, Homo sapiens
  misc_RNA (1)...(19): siRNA sense strand
ugaauaacccugcugauca

SEQ ID NO: 129501 - RNA, 19 nt, Homo sapiens
  misc_RNA (1)...(19): siRNA sense strand
gaauuaacagcuaacaaug

SEQ ID NO: 129502 - RNA, 19 nt, Homo sapiens
  misc_RNA (1)...(19): siRNA sense strand
ucaaauggaugugauugga

SEQ ID NO: 129503 - RNA, 19 nt, Homo sapiens
  misc_RNA (1)...(19): siRNA sense strand
caguaaagcuccccauuaa

SEQ ID NO: 129504 - RNA, 19 nt, Homo sapiens
  misc_RNA (1)...(19): siRNA sense strand
gaaguagacaauuggagaa

SEQ ID NO: 129505 - RNA, 19 nt, Homo sapiens
  misc_RNA (1)...(19): siRNA sense strand
cagcagagacagagucaaa

SEQ ID NO: 129506 - RNA, 19 nt, Homo sapiens
  misc_RNA (1)...(19): siRNA sense strand
gaucauccguuuguugaca

SEQ ID NO: 129507 - RNA, 19 nt, Homo sapiens
  misc_RNA (1)...(19): siRNA sense strand
ugacaaggugugggaauua

SEQ ID NO: 129508 - RNA, 19 nt, Homo sapiens
  misc_RNA (1)...(19): siRNA sense strand
ggagucacaggaagaauug

SEQ ID NO: 129509 - RNA, 19 nt, Homo sapiens
  misc_RNA (1)...(19): siRNA sense strand
caucuacuauggaggaaug

SEQ ID NO: 129510 - RNA, 19 nt, Homo sapiens
  misc_RNA (1)...(19): siRNA sense strand
aaucaugguuucugcuauu

SEQ ID NO: 129511 - RNA, 19 nt, Homo sapiens
  misc_RNA (1)...(19): siRNA sense strand
gcucccagcccaucuacua

SEQ ID NO: 129512 - RNA, 19 nt, Homo sapiens
  misc_RNA (1)...(19): siRNA sense strand
agccaaagcuagaaauuca

SEQ ID NO: 129513 - RNA, 19 nt, Homo sapiens
  misc_RNA (1)...(19): siRNA sense strand
uaacaucccagcucugaau

SEQ ID NO: 129514 - RNA, 19 nt, Homo sapiens
  misc_RNA (1)...(19): siRNA sense strand
gaagaucgacguguuaaac

SEQ ID NO: 129515 - RNA, 19 nt, Homo sapiens
  misc_RNA (1)...(19): siRNA sense strand
ccaaggauuugcuccagau

SEQ ID NO: 129516 - RNA, 19 nt, Homo sapiens
  misc_RNA (1)...(19): siRNA sense strand
ucagggucuuuaccaauaa

SEQ ID NO: 129517 - RNA, 19 nt, Homo sapiens
  misc_RNA (1)...(19): siRNA sense strand
gagaagcaugggcuacuuu

SEQ ID NO: 129518 - RNA, 19 nt, Homo sapiens
  misc_RNA (1)...(19): siRNA sense strand
ggcaaugacggaccucuuu

SEQ ID NO: 129519 - RNA, 19 nt, Homo sapiens
  misc_RNA (1)...(19): siRNA sense strand
ggaggaagcccagggugaa

SEQ ID NO: 129520 - RNA, 19 nt, Homo sapiens
  misc_RNA (1)...(19): siRNA sense strand
ucgaaucgcccucaaguga

SEQ ID NO: 129521 - RNA, 19 nt, Homo sapiens
  misc_RNA (1)...(19): siRNA sense strand
gugaaucccgccaguauga

SEQ ID NO: 129522 - RNA, 19 nt, Homo sapiens
  misc_RNA (1)...(19): siRNA sense strand
acacugggcugagcgagaa

SEQ ID NO: 129523 - RNA, 19 nt, Homo sapiens
  misc_RNA (1)...(19): siRNA sense strand
gcuaacaucccagcucuga

SEQ ID NO: 129524 - RNA, 19 nt, Homo sapiens
  misc_RNA (1)...(19): siRNA sense strand
aagcaugggcuacuuugua

SEQ ID NO: 129525 - RNA, 19 nt, Homo sapiens
  misc_RNA (1)...(19): siRNA sense strand
uucagggucuuuaccaaua

SEQ ID NO: 129526 - RNA, 19 nt, Homo sapiens
  misc_RNA (1)...(19): siRNA sense strand
ggcuuucaauggauacuuu

SEQ ID NO: 129527 - RNA, 19 nt, Homo sapiens
  misc_RNA (1)...(19): siRNA sense strand
gagggagugccaaggauuu

SEQ ID NO: 129528 - RNA, 19 nt, Homo sapiens
  misc_RNA (1)...(19): siRNA sense strand
ccucaaguaugcugaaucu

SEQ ID NO: 129529 - RNA, 19 nt, Homo sapiens
  misc_RNA (1)...(19): siRNA sense strand
gaggccggauuguacugua

SEQ ID NO: 129530 - RNA, 19 nt, Homo sapiens
  misc_RNA (1)...(19): siRNA sense strand
gaagaaugacccuuuagac

SEQ ID NO: 129531 - RNA, 19 nt, Homo sapiens
  misc_RNA (1)...(19): siRNA sense strand
agggauaauuuaaggauga

SEQ ID NO: 129532 - RNA, 19 nt, Homo sapiens
  misc_RNA (1)...(19): siRNA sense strand
guucccaccugacuuugaa

SEQ ID NO: 129533 - RNA, 19 nt, Homo sapiens
  misc_RNA (1)...(19): siRNA sense strand
guaaucaugguuucugcua

SEQ ID NO: 129534 - RNA, 19 nt, Homo sapiens
  misc_RNA (1)...(19): siRNA sense strand
gaugcagaacuucacauuu

SEQ ID NO: 129535 - RNA, 19 nt, Homo sapiens
  misc_RNA (1)...(19): siRNA sense strand
gauauacaggugcuaaugu

SEQ ID NO: 129536 - RNA, 19 nt, Homo sapiens
  misc_RNA (1)...(19): siRNA sense strand
gggagucacaggaagaauu

SEQ ID NO: 129537 - RNA, 19 nt, Homo sapiens
  misc_RNA (1)...(19): siRNA sense strand
gaucgaaucgcccucaagu

SEQ ID NO: 129538 - RNA, 19 nt, Homo sapiens
  misc_RNA (1)...(19): siRNA sense strand
ccaaagcuagaaauucauu

SEQ ID NO: 129539 - RNA, 19 nt, Homo sapiens
  misc_RNA (1)...(19): siRNA sense strand
agaagcuacucuccauuga

SEQ ID NO: 129540 - RNA, 19 nt, Homo sapiens
  misc_RNA (1)...(19): siRNA sense strand
cagaagcuacucuccauug

SEQ ID NO: 129541 - RNA, 19 nt, Homo sapiens
  misc_RNA (1)...(19): siRNA sense strand
gggccaagccacagccuuu

SEQ ID NO: 129542 - RNA, 19 nt, Homo sapiens
  misc_RNA (1)...(19): siRNA sense strand
ucgcgaaguuuccagaaga

SEQ ID NO: 129543 - RNA, 19 nt, Homo sapiens
  misc_RNA (1)...(19): siRNA sense strand
gauauguaccagcaucuga

SEQ ID NO: 129544 - RNA, 19 nt, Homo sapiens
  misc_RNA (1)...(19): siRNA sense strand
agaauuauaccucgaaaca

SEQ ID NO: 129545 - RNA, 19 nt, Homo sapiens
  misc_RNA (1)...(19): siRNA sense strand
gaaugccgacaguuguuaa

SEQ ID NO: 129546 - RNA, 19 nt, Homo sapiens
  misc_RNA (1)...(19): siRNA sense strand
ccacaguacccugcaauga

SEQ ID NO: 129547 - RNA, 19 nt, Homo sapiens
  misc_RNA (1)...(19): siRNA sense strand
gcuaacacuugaagaucau

SEQ ID NO: 129548 - RNA, 19 nt, Homo sapiens
  misc_RNA (1)...(19): siRNA sense strand
gcuauccaccuggcuauuu

SEQ ID NO: 129549 - RNA, 19 nt, Homo sapiens
  misc_RNA (1)...(19): siRNA sense strand
ggauauacaggugcuaaug

SEQ ID NO: 129550 - RNA, 19 nt, Homo sapiens
  misc_RNA (1)...(19): siRNA sense strand
ggaaacaucagaagcuacu

SEQ ID NO: 129551 - RNA, 19 nt, Homo sapiens
  misc_RNA (1)...(19): siRNA sense strand
guauggcacuuugcugaug

SEQ ID NO: 129552 - RNA, 19 nt, Homo sapiens
  misc_RNA (1)...(19): siRNA sense strand
gggauaauuuaaggaugaa

SEQ ID NO: 129553 - RNA, 19 nt, Homo sapiens
  misc_RNA (1)...(19): siRNA sense strand
cacaguacccugcaaugaa

SEQ ID NO: 129554 - RNA, 19 nt, Homo sapiens
  misc_RNA (1)...(19): siRNA sense strand
agaagauggcgucgugaua

SEQ ID NO: 129555 - RNA, 19 nt, Homo sapiens
  misc_RNA (1)...(19): siRNA sense strand
acaggaagaauuguagaua

SEQ ID NO: 129556 - RNA, 19 nt, Homo sapiens
  misc_RNA (1)...(19): siRNA sense strand
gcuguucccaccugacuuu

SEQ ID NO: 129557 - RNA, 19 nt, Homo sapiens
  misc_RNA (1)...(19): siRNA sense strand
aggcuacggucgcaugaaa

SEQ ID NO: 129558 - RNA, 19 nt, Homo sapiens
  misc_RNA (1)...(19): siRNA sense strand
cuucaacuaugccauuuua

SEQ ID NO: 129559 - RNA, 19 nt, Homo sapiens
  misc_RNA (1)...(19): siRNA sense strand
ugaagaaugacccuuuaga

SEQ ID NO: 129560 - RNA, 19 nt, Homo sapiens
  misc_RNA (1)...(19): siRNA sense strand
gagcagugaaguagacaau

SEQ ID NO: 129561 - RNA, 19 nt, Homo sapiens
  misc_RNA (1)...(19): siRNA sense strand
cagaacagacuucaacagu

SEQ ID NO: 129562 - RNA, 19 nt, Homo sapiens
  misc_RNA (1)...(19): siRNA sense strand
gaggaaugccgacaguugu

SEQ ID NO: 129563 - RNA, 19 nt, Homo sapiens
  misc_RNA (1)...(19): siRNA sense strand
gcccggacuucauggauca

SEQ ID NO: 129564 - RNA, 19 nt, Homo sapiens
  misc_RNA (1)...(19): siRNA sense strand
cagaggagcugcaccauga

SEQ ID NO: 129565 - RNA, 19 nt, Homo sapiens
  misc_RNA (1)...(19): siRNA sense strand
ggacgggccauacccaaua

SEQ ID NO: 129566 - RNA, 19 nt, Homo sapiens
  misc_RNA (1)...(19): siRNA sense strand
agaaggaccuggccacgaa

SEQ ID NO: 129567 - RNA, 19 nt, Homo sapiens
  misc_RNA (1)...(19): siRNA sense strand
gcaaggggcuuacgcagaa

SEQ ID NO: 129568 - RNA, 19 nt, Homo sapiens
  misc_RNA (1)...(19): siRNA sense strand
gacgggccauacccaauaa

SEQ ID NO: 129569 - RNA, 19 nt, Homo sapiens
  misc_RNA (1)...(19): siRNA sense strand
gcacagagacgaggagaag

SEQ ID NO: 129570 - RNA, 19 nt, Homo sapiens
  misc_RNA (1)...(19): siRNA sense strand
ugacggugcugcgcaagaa

SEQ ID NO: 129571 - RNA, 19 nt, Homo sapiens
  misc_RNA (1)...(19): siRNA sense strand
uaucuuagcggcacagaga

SEQ ID NO: 129572 - RNA, 19 nt, Homo sapiens
  misc_RNA (1)...(19): siRNA sense strand
ccacgaaaaucaaugagaa

SEQ ID NO: 129573 - RNA, 19 nt, Homo sapiens
  misc_RNA (1)...(19): siRNA sense strand
ggccagaacaaacaacauu

SEQ ID NO: 129574 - RNA, 19 nt, Homo sapiens
  misc_RNA (1)...(19): siRNA sense strand
caaacaacauucuauuacc

SEQ ID NO: 129575 - RNA, 19 nt, Homo sapiens
  misc_RNA (1)...(19): siRNA sense strand
ccaaauccaagcaggcuau

SEQ ID NO: 129576 - RNA, 19 nt, Homo sapiens
  misc_RNA (1)...(19): siRNA sense strand
caacauucuauuaccaaga

SEQ ID NO: 129577 - RNA, 19 nt, Homo sapiens
  misc_RNA (1)...(19): siRNA sense strand
gagacgaggagaagaugug

SEQ ID NO: 129578 - RNA, 19 nt, Homo sapiens
  misc_RNA (1)...(19): siRNA sense strand
cacaggugaucgcggacua

SEQ ID NO: 129579 - RNA, 19 nt, Homo sapiens
  misc_RNA (1)...(19): siRNA sense strand
gaaggaccuggccacgaaa

SEQ ID NO: 129580 - RNA, 19 nt, Homo sapiens
  misc_RNA (1)...(19): siRNA sense strand
ggugaucgcggacuaugag

SEQ ID NO: 129581 - RNA, 19 nt, Homo sapiens
  misc_RNA (1)...(19): siRNA sense strand
ccaagaacacggccaagcu

SEQ ID NO: 129582 - RNA, 19 nt, Homo sapiens
  misc_RNA (1)...(19): siRNA sense strand
acagagacgaggagaagau

SEQ ID NO: 129583 - RNA, 19 nt, Homo sapiens
  misc_RNA (1)...(19): siRNA sense strand
uaaccaggugcuuggcaaa

SEQ ID NO: 129584 - RNA, 19 nt, Homo sapiens
  misc_RNA (1)...(19): siRNA sense strand
aauccaagcaggcuaucuu

SEQ ID NO: 129585 - RNA, 19 nt, Homo sapiens
  misc_RNA (1)...(19): siRNA sense strand
cagaggagcugcaccauga

SEQ ID NO: 129586 - RNA, 19 nt, Homo sapiens
  misc_RNA (1)...(19): siRNA sense strand
ggacgggccauacccaaua

SEQ ID NO: 129587 - RNA, 19 nt, Homo sapiens
  misc_RNA (1)...(19): siRNA sense strand
agaaggaccuggccacgaa

SEQ ID NO: 129588 - RNA, 19 nt, Homo sapiens
  misc_RNA (1)...(19): siRNA sense strand
gcaaggggcuuacgcagaa

SEQ ID NO: 129589 - RNA, 19 nt, Homo sapiens
  misc_RNA (1)...(19): siRNA sense strand
gacgggccauacccaauaa

SEQ ID NO: 129590 - RNA, 19 nt, Homo sapiens
  misc_RNA (1)...(19): siRNA sense strand
gcacagagacgaggagaag

SEQ ID NO: 129591 - RNA, 19 nt, Homo sapiens
  misc_RNA (1)...(19): siRNA sense strand
ugacggugcugcgcaagaa

SEQ ID NO: 129592 - RNA, 19 nt, Homo sapiens
  misc_RNA (1)...(19): siRNA sense strand
uaucuuagcggcacagaga

SEQ ID NO: 129593 - RNA, 19 nt, Homo sapiens
  misc_RNA (1)...(19): siRNA sense strand
ccacgaaaaucaaugagaa

SEQ ID NO: 129594 - RNA, 19 nt, Homo sapiens
  misc_RNA (1)...(19): siRNA sense strand
ggccagaacaaacaacauu

SEQ ID NO: 129595 - RNA, 19 nt, Homo sapiens
  misc_RNA (1)...(19): siRNA sense strand
caaacaacauucuauuacc

SEQ ID NO: 129596 - RNA, 19 nt, Homo sapiens
  misc_RNA (1)...(19): siRNA sense strand
ccaaauccaagcaggcuau

SEQ ID NO: 129597 - RNA, 19 nt, Homo sapiens
  misc_RNA (1)...(19): siRNA sense strand
caacauucuauuaccaaga

SEQ ID NO: 129598 - RNA, 19 nt, Homo sapiens
  misc_RNA (1)...(19): siRNA sense strand
gagacgaggagaagaugug

SEQ ID NO: 129599 - RNA, 19 nt, Homo sapiens
  misc_RNA (1)...(19): siRNA sense strand
cacaggugaucgcggacua

SEQ ID NO: 129600 - RNA, 19 nt, Homo sapiens
  misc_RNA (1)...(19): siRNA sense strand
gaaggaccuggccacgaaa

SEQ ID NO: 129601 - RNA, 19 nt, Homo sapiens
  misc_RNA (1)...(19): siRNA sense strand
ggugaucgcggacuaugag

SEQ ID NO: 129602 - RNA, 19 nt, Homo sapiens
  misc_RNA (1)...(19): siRNA sense strand
ccaagaacacggccaagcu

SEQ ID NO: 129603 - RNA, 19 nt, Homo sapiens
  misc_RNA (1)...(19): siRNA sense strand
acagagacgaggagaagau

SEQ ID NO: 129604 - RNA, 19 nt, Homo sapiens
  misc_RNA (1)...(19): siRNA sense strand
uaaccaggugcuuggcaaa

SEQ ID NO: 129605 - RNA, 19 nt, Homo sapiens
  misc_RNA (1)...(19): siRNA sense strand
aauccaagcaggcuaucuu

SEQ ID NO: 129606 - RNA, 19 nt, Homo sapiens
  misc_RNA (1)...(19): siRNA sense strand
gaauaaaggugcuagaaga

SEQ ID NO: 129607 - RNA, 19 nt, Homo sapiens
  misc_RNA (1)...(19): siRNA sense strand
ggaaggagacugugaauga

SEQ ID NO: 129608 - RNA, 19 nt, Homo sapiens
  misc_RNA (1)...(19): siRNA sense strand
gcagagagaagccagaaua

SEQ ID NO: 129609 - RNA, 19 nt, Homo sapiens
  misc_RNA (1)...(19): siRNA sense strand
gaagcuaccuuuuaguuua

SEQ ID NO: 129610 - RNA, 19 nt, Homo sapiens
  misc_RNA (1)...(19): siRNA sense strand
gaaggcagacuccagguua

SEQ ID NO: 129611 - RNA, 19 nt, Homo sapiens
  misc_RNA (1)...(19): siRNA sense strand
gaacaugcaagaaacauau

SEQ ID NO: 129612 - RNA, 19 nt, Homo sapiens
  misc_RNA (1)...(19): siRNA sense strand
gaaggagacugugaaugaa

SEQ ID NO: 129613 - RNA, 19 nt, Homo sapiens
  misc_RNA (1)...(19): siRNA sense strand
gaauuugaguuguugagaa

SEQ ID NO: 129614 - RNA, 19 nt, Homo sapiens
  misc_RNA (1)...(19): siRNA sense strand
caacauggauccagauuuu

SEQ ID NO: 129615 - RNA, 19 nt, Homo sapiens
  misc_RNA (1)...(19): siRNA sense strand
uuacugaccuuaagcacua

SEQ ID NO: 129616 - RNA, 19 nt, Homo sapiens
  misc_RNA (1)...(19): siRNA sense strand
caagaaacauauacugcuu

SEQ ID NO: 129617 - RNA, 19 nt, Homo sapiens
  misc_RNA (1)...(19): siRNA sense strand
gaagaaaugccaugaacau

SEQ ID NO: 129618 - RNA, 19 nt, Homo sapiens
  misc_RNA (1)...(19): siRNA sense strand
aacaugaacuuaugcagua

SEQ ID NO: 129619 - RNA, 19 nt, Homo sapiens
  misc_RNA (1)...(19): siRNA sense strand
ggacuuagcauccaagaag

SEQ ID NO: 129620 - RNA, 19 nt, Homo sapiens
  misc_RNA (1)...(19): siRNA sense strand
ccaagaagcagcaguguga

SEQ ID NO: 129621 - RNA, 19 nt, Homo sapiens
  misc_RNA (1)...(19): siRNA sense strand
gaagauagaaaucaguguu

SEQ ID NO: 129622 - RNA, 19 nt, Homo sapiens
  misc_RNA (1)...(19): siRNA sense strand
caggaaacaugaacuuaug

SEQ ID NO: 129623 - RNA, 19 nt, Homo sapiens
  misc_RNA (1)...(19): siRNA sense strand
gagagaagccagaauaaag

SEQ ID NO: 129624 - RNA, 19 nt, Homo sapiens
  misc_RNA (1)...(19): siRNA sense strand
gaaacaaggucaguugaac

SEQ ID NO: 129625 - RNA, 19 nt, Homo sapiens
  misc_RNA (1)...(19): siRNA sense strand
gugaugaacugcagucugu

SEQ ID NO: 129626 - RNA, 19 nt, Homo sapiens
  misc_RNA (1)...(19): siRNA sense strand
gaacauaccgauggucaga

SEQ ID NO: 129627 - RNA, 19 nt, Homo sapiens
  misc_RNA (1)...(19): siRNA sense strand
gauggcugcucaggacuua

SEQ ID NO: 129628 - RNA, 19 nt, Homo sapiens
  misc_RNA (1)...(19): siRNA sense strand
gcaggaaacaugaacuuau

SEQ ID NO: 129629 - RNA, 19 nt, Homo sapiens
  misc_RNA (1)...(19): siRNA sense strand
ugaagaacauuaugcagau

SEQ ID NO: 129630 - RNA, 19 nt, Homo sapiens
  misc_RNA (1)...(19): siRNA sense strand
gcagagugcuggucaucau

SEQ ID NO: 129631 - RNA, 19 nt, Homo sapiens
  misc_RNA (1)...(19): siRNA sense strand
gcggcgauauagugaauuu

SEQ ID NO: 129632 - RNA, 19 nt, Homo sapiens
  misc_RNA (1)...(19): siRNA sense strand
gacaaaaucuucuaucugu

SEQ ID NO: 129633 - RNA, 19 nt, Homo sapiens
  misc_RNA (1)...(19): siRNA sense strand
gagauuuacugaccuuaag

SEQ ID NO: 129634 - RNA, 19 nt, Homo sapiens
  misc_RNA (1)...(19): siRNA sense strand
ggugcuagaagaacaaaua

SEQ ID NO: 129635 - RNA, 19 nt, Homo sapiens
  misc_RNA (1)...(19): siRNA sense strand
caagagauuuacugaccuu

SEQ ID NO: 129636 - RNA, 19 nt, Homo sapiens
  misc_RNA (1)...(19): siRNA sense strand
gaaggcagagaauuuguga

SEQ ID NO: 129637 - RNA, 19 nt, Homo sapiens
  misc_RNA (1)...(19): siRNA sense strand
gaucgacucuaugguguau

SEQ ID NO: 129638 - RNA, 19 nt, Homo sapiens
  misc_RNA (1)...(19): siRNA sense strand
ucacaucccauccuuugua

SEQ ID NO: 129639 - RNA, 19 nt, Homo sapiens
  misc_RNA (1)...(19): siRNA sense strand
gaaggagaacaacagcuaa

SEQ ID NO: 129640 - RNA, 19 nt, Homo sapiens
  misc_RNA (1)...(19): siRNA sense strand
uaaaggugcuagaagaaca

SEQ ID NO: 129641 - RNA, 19 nt, Homo sapiens
  misc_RNA (1)...(19): siRNA sense strand
gaacugcagucugucaucu

SEQ ID NO: 129642 - RNA, 19 nt, Homo sapiens
  misc_RNA (1)...(19): siRNA sense strand
ggaccaaugcuaaggaaug

SEQ ID NO: 129643 - RNA, 19 nt, Homo sapiens
  misc_RNA (1)...(19): siRNA sense strand
cagaauuuguuuggcauaa

SEQ ID NO: 129644 - RNA, 19 nt, Homo sapiens
  misc_RNA (1)...(19): siRNA sense strand
gcagaucaguaugugcaaa

SEQ ID NO: 129645 - RNA, 19 nt, Homo sapiens
  misc_RNA (1)...(19): siRNA sense strand
ggaagaugaagaacauuau

SEQ ID NO: 129646 - RNA, 19 nt, Homo sapiens
  misc_RNA (1)...(19): siRNA sense strand
guaugcaucuucuauugau

SEQ ID NO: 129647 - RNA, 19 nt, Homo sapiens
  misc_RNA (1)...(19): siRNA sense strand
guguaugcaucuucuauug

SEQ ID NO: 129648 - RNA, 19 nt, Homo sapiens
  misc_RNA (1)...(19): siRNA sense strand
gaagaugaagaacauuaug

SEQ ID NO: 129649 - RNA, 19 nt, Homo sapiens
  misc_RNA (1)...(19): siRNA sense strand
caaggucaguugaacauac

SEQ ID NO: 129650 - RNA, 19 nt, Homo sapiens
  misc_RNA (1)...(19): siRNA sense strand
cgaugacacacaauaauuu

SEQ ID NO: 129651 - RNA, 19 nt, Homo sapiens
  misc_RNA (1)...(19): siRNA sense strand
cgcaugggcugauauugaa

SEQ ID NO: 129652 - RNA, 19 nt, Homo sapiens
  misc_RNA (1)...(19): siRNA sense strand
gaacuuaugcaguaugacu

SEQ ID NO: 129653 - RNA, 19 nt, Homo sapiens
  misc_RNA (1)...(19): siRNA sense strand
ugaaggagaacaacagcua

SEQ ID NO: 129654 - RNA, 19 nt, Homo sapiens
  misc_RNA (1)...(19): siRNA sense strand
cauaaacucucugcugaca

SEQ ID NO: 129655 - RNA, 19 nt, Homo sapiens
  misc_RNA (1)...(19): siRNA sense strand
ugaagggaaugacuaccaa

SEQ ID NO: 129656 - RNA, 19 nt, Homo sapiens
  misc_RNA (1)...(19): siRNA sense strand
gagaggcgacggauugguu

SEQ ID NO: 129657 - RNA, 19 nt, Homo sapiens
  misc_RNA (1)...(19): siRNA sense strand
gcagucaugcagaucagua

SEQ ID NO: 129658 - RNA, 19 nt, Homo sapiens
  misc_RNA (1)...(19): siRNA sense strand
gaagaacauuaugcagauc

SEQ ID NO: 129659 - RNA, 19 nt, Homo sapiens
  misc_RNA (1)...(19): siRNA sense strand
uaaacucucugcugacaac

SEQ ID NO: 129660 - RNA, 19 nt, Homo sapiens
  misc_RNA (1)...(19): siRNA sense strand
uggaagaugaagaacauua

SEQ ID NO: 129661 - RNA, 19 nt, Homo sapiens
  misc_RNA (1)...(19): siRNA sense strand
ugaagaagauagaaaucag

SEQ ID NO: 129662 - RNA, 19 nt, Homo sapiens
  misc_RNA (1)...(19): siRNA sense strand
caaaagaaccgagacuuaa

SEQ ID NO: 129663 - RNA, 19 nt, Homo sapiens
  misc_RNA (1)...(19): siRNA sense strand
gacacgaugacacacaaua

SEQ ID NO: 129664 - RNA, 19 nt, Homo sapiens
  misc_RNA (1)...(19): siRNA sense strand
cagagagaagccagaauaa

SEQ ID NO: 129665 - RNA, 19 nt, Homo sapiens
  misc_RNA (1)...(19): siRNA sense strand
gcgacggauugguuuagaa

SEQ ID NO: 129666 - RNA, 19 nt, Homo sapiens
  misc_RNA (1)...(19): siRNA sense strand
ggagaacaacagcuaaagu

SEQ ID NO: 129667 - RNA, 19 nt, Homo sapiens
  misc_RNA (1)...(19): siRNA sense strand
gaagaagauagaaaucagu

SEQ ID NO: 129668 - RNA, 19 nt, Homo sapiens
  misc_RNA (1)...(19): siRNA sense strand
gcagaauuuguuuggcaua

SEQ ID NO: 129669 - RNA, 19 nt, Homo sapiens
  misc_RNA (1)...(19): siRNA sense strand
aaagggaauucaaguuugg

SEQ ID NO: 129670 - RNA, 19 nt, Homo sapiens
  misc_RNA (1)...(19): siRNA sense strand
aguagcagaucgacucuau

SEQ ID NO: 129671 - RNA, 19 nt, Homo sapiens
  misc_RNA (1)...(19): siRNA sense strand
ggaagaaaugccaugaaca

SEQ ID NO: 129672 - RNA, 19 nt, Homo sapiens
  misc_RNA (1)...(19): siRNA sense strand
cgacggauugguuuagaaa

SEQ ID NO: 129673 - RNA, 19 nt, Homo sapiens
  misc_RNA (1)...(19): siRNA sense strand
guggagaggcgacggauug

SEQ ID NO: 129674 - RNA, 19 nt, Homo sapiens
  misc_RNA (1)...(19): siRNA sense strand
ggcgauauagugaauuuga

SEQ ID NO: 129675 - RNA, 19 nt, Homo sapiens
  misc_RNA (1)...(19): siRNA sense strand
acauuaugcagaucaguua

SEQ ID NO: 129676 - RNA, 19 nt, Homo sapiens
  misc_RNA (1)...(19): siRNA sense strand
aaaacgaacuggaagaaau

SEQ ID NO: 129677 - RNA, 19 nt, Homo sapiens
  misc_RNA (1)...(19): siRNA sense strand
aggcagagaauuugugaaa

SEQ ID NO: 129678 - RNA, 19 nt, Homo sapiens
  misc_RNA (1)...(19): siRNA sense strand
gcagaucaguuaaaagagu

SEQ ID NO: 129679 - RNA, 19 nt, Homo sapiens
  misc_RNA (1)...(19): siRNA sense strand
ucugucaucucacaucuuc

SEQ ID NO: 129680 - RNA, 19 nt, Homo sapiens
  misc_RNA (1)...(19): siRNA sense strand
aaacgaacuggaagaaaug

SEQ ID NO: 129681 - RNA, 19 nt, Homo sapiens
  misc_RNA (1)...(19): siRNA sense strand
acacgaugacacacaauaa

SEQ ID NO: 129682 - RNA, 19 nt, Homo sapiens
  misc_RNA (1)...(19): siRNA sense strand
caucucacaucuucuucga

SEQ ID NO: 129683 - RNA, 19 nt, Homo sapiens
  misc_RNA (1)...(19): siRNA sense strand
ggaaggcagagaauuugug

SEQ ID NO: 129684 - RNA, 19 nt, Homo sapiens
  misc_RNA (1)...(19): siRNA sense strand
cagaauaaaggugcuagaa

SEQ ID NO: 129685 - RNA, 19 nt, Homo sapiens
  misc_RNA (1)...(19): siRNA sense strand
ugaaacaaggucaguugaa

SEQ ID NO: 129686 - RNA, 19 nt, Homo sapiens
  misc_RNA (1)...(19): siRNA sense strand
ucgacucuaugguguauau

SEQ ID NO: 129687 - RNA, 19 nt, Homo sapiens
  misc_RNA (1)...(19): siRNA sense strand
ugaacaugcaagaaacaua

SEQ ID NO: 129688 - RNA, 19 nt, Homo sapiens
  misc_RNA (1)...(19): siRNA sense strand
auauacugcuuaccucauu

SEQ ID NO: 129689 - RNA, 19 nt, Homo sapiens
  misc_RNA (1)...(19): siRNA sense strand
gagcagagagaagccagaa

SEQ ID NO: 129690 - RNA, 19 nt, Homo sapiens
  misc_RNA (1)...(19): siRNA sense strand
gacucuaugguguauauaa

SEQ ID NO: 129691 - RNA, 19 nt, Homo sapiens
  misc_RNA (1)...(19): siRNA sense strand
uggaagaaaugccaugaac

SEQ ID NO: 129692 - RNA, 19 nt, Homo sapiens
  misc_RNA (1)...(19): siRNA sense strand
cugcuuaccucauugaaac

SEQ ID NO: 129693 - RNA, 19 nt, Homo sapiens
  misc_RNA (1)...(19): siRNA sense strand
gugcuagaagaacaaauaa

SEQ ID NO: 129694 - RNA, 19 nt, Homo sapiens
  misc_RNA (1)...(19): siRNA sense strand
gagacaaaaucuucuaucu

SEQ ID NO: 129695 - RNA, 19 nt, Homo sapiens
  misc_RNA (1)...(19): siRNA sense strand
gucagaguguccuaacaga

SEQ ID NO: 129696 - RNA, 19 nt, Homo sapiens
  misc_RNA (1)...(19): siRNA sense strand
gaccaaugcuaaggaaugc

SEQ ID NO: 129697 - RNA, 19 nt, Homo sapiens
  misc_RNA (1)...(19): siRNA sense strand
gcucaggacuuagcaucca

SEQ ID NO: 129698 - RNA, 19 nt, Homo sapiens
  misc_RNA (1)...(19): siRNA sense strand
aaacauauacugcuuaccu

SEQ ID NO: 129699 - RNA, 19 nt, Homo sapiens
  misc_RNA (1)...(19): siRNA sense strand
agaaacauauacugcuuac

SEQ ID NO: 129700 - RNA, 19 nt, Homo sapiens
  misc_RNA (1)...(19): siRNA sense strand
gaauuauggucgaguuuuc

SEQ ID NO: 129701 - RNA, 19 nt, Homo sapiens
  misc_RNA (1)...(19): siRNA sense strand
ccuaacagacucacuaugg

SEQ ID NO: 129702 - RNA, 19 nt, Homo sapiens
  misc_RNA (1)...(19): siRNA sense strand
aaggcagacuccagguuaa

SEQ ID NO: 129703 - RNA, 19 nt, Homo sapiens
  misc_RNA (1)...(19): siRNA sense strand
aaacgcaugggcugauauu

SEQ ID NO: 129704 - RNA, 19 nt, Homo sapiens
  misc_RNA (1)...(19): siRNA sense strand
acaaaagaaccgagacuua

SEQ ID NO: 129705 - RNA, 19 nt, Homo sapiens
  misc_RNA (1)...(19): siRNA sense strand
guugagaagcuaccuuuua

SEQ ID NO: 129706 - RNA, 19 nt, Homo sapiens
  misc_RNA (1)...(19): siRNA sense strand
uagaggagaugauggaaua

SEQ ID NO: 129707 - RNA, 19 nt, Homo sapiens
  misc_RNA (1)...(19): siRNA sense strand
gaugauggaauauuugaug

SEQ ID NO: 129708 - RNA, 19 nt, Homo sapiens
  misc_RNA (1)...(19): siRNA sense strand
gauaaaagcuauacuccau

SEQ ID NO: 129709 - RNA, 19 nt, Homo sapiens
  misc_RNA (1)...(19): siRNA sense strand
aggagaugauggaauauuu

SEQ ID NO: 129710 - RNA, 19 nt, Homo sapiens
  misc_RNA (1)...(19): siRNA sense strand
gauggaauauuugaugaca

SEQ ID NO: 129711 - RNA, 19 nt, Homo sapiens
  misc_RNA (1)...(19): siRNA sense strand
gagaugauggaauauuuga

SEQ ID NO: 129712 - RNA, 19 nt, Homo sapiens
  misc_RNA (1)...(19): siRNA sense strand
aacaagggcuggagcaguu

SEQ ID NO: 129713 - RNA, 19 nt, Homo sapiens
  misc_RNA (1)...(19): siRNA sense strand
gaacguugucuucacaugu

SEQ ID NO: 129714 - RNA, 19 nt, Homo sapiens
  misc_RNA (1)...(19): siRNA sense strand
ggagaugauggaauauuug

SEQ ID NO: 129715 - RNA, 19 nt, Homo sapiens
  misc_RNA (1)...(19): siRNA sense strand
aaagcuauacuccaucuaa

SEQ ID NO: 129716 - RNA, 19 nt, Homo sapiens
  misc_RNA (1)...(19): siRNA sense strand
gggcuggagcaguuuauaa

SEQ ID NO: 129717 - RNA, 19 nt, Homo sapiens
  misc_RNA (1)...(19): siRNA sense strand
gaugugagcaacccgcaaa

SEQ ID NO: 129718 - RNA, 19 nt, Homo sapiens
  misc_RNA (1)...(19): siRNA sense strand
aagcuauacuccaucuaaa

SEQ ID NO: 129719 - RNA, 19 nt, Homo sapiens
  misc_RNA (1)...(19): siRNA sense strand
gaggagaugauggaauauu

SEQ ID NO: 129720 - RNA, 19 nt, Homo sapiens
  misc_RNA (1)...(19): siRNA sense strand
cuucaccacuuacgaaauc

SEQ ID NO: 129721 - RNA, 19 nt, Homo sapiens
  misc_RNA (1)...(19): siRNA sense strand
caaggucgcuggucauccu

SEQ ID NO: 129722 - RNA, 19 nt, Homo sapiens
  misc_RNA (1)...(19): siRNA sense strand
ggcuggagcaguuuauaaa

SEQ ID NO: 129723 - RNA, 19 nt, Homo sapiens
  misc_RNA (1)...(19): siRNA sense strand
cgaacguugucuucacaug

SEQ ID NO: 129724 - RNA, 19 nt, Homo sapiens
  misc_RNA (1)...(19): siRNA sense strand
caagggcuggagcaguuua

SEQ ID NO: 129725 - RNA, 19 nt, Homo sapiens
  misc_RNA (1)...(19): siRNA sense strand
aacguugucuucacauguu

SEQ ID NO: 129726 - RNA, 19 nt, Homo sapiens
  misc_RNA (1)...(19): siRNA sense strand
ccaagccgcagaaccugaa

SEQ ID NO: 129727 - RNA, 19 nt, Homo sapiens
  misc_RNA (1)...(19): siRNA sense strand
ccagcaacuuccucgagau

SEQ ID NO: 129728 - RNA, 19 nt, Homo sapiens
  misc_RNA (1)...(19): siRNA sense strand
uaaaagcuauacuccaucu

SEQ ID NO: 129729 - RNA, 19 nt, Homo sapiens
  misc_RNA (1)...(19): siRNA sense strand
uagaggagaugauggaaua

SEQ ID NO: 129730 - RNA, 19 nt, Homo sapiens
  misc_RNA (1)...(19): siRNA sense strand
gaugauggaauauuugaug

SEQ ID NO: 129731 - RNA, 19 nt, Homo sapiens
  misc_RNA (1)...(19): siRNA sense strand
gauaaaagcuauacuccau

SEQ ID NO: 129732 - RNA, 19 nt, Homo sapiens
  misc_RNA (1)...(19): siRNA sense strand
aggagaugauggaauauuu

SEQ ID NO: 129733 - RNA, 19 nt, Homo sapiens
  misc_RNA (1)...(19): siRNA sense strand
gauggaauauuugaugaca

SEQ ID NO: 129734 - RNA, 19 nt, Homo sapiens
  misc_RNA (1)...(19): siRNA sense strand
gagaugauggaauauuuga

SEQ ID NO: 129735 - RNA, 19 nt, Homo sapiens
  misc_RNA (1)...(19): siRNA sense strand
aacaagggcuggagcaguu

SEQ ID NO: 129736 - RNA, 19 nt, Homo sapiens
  misc_RNA (1)...(19): siRNA sense strand
gaacguugucuucacaugu

SEQ ID NO: 129737 - RNA, 19 nt, Homo sapiens
  misc_RNA (1)...(19): siRNA sense strand
ggagaugauggaauauuug

SEQ ID NO: 129738 - RNA, 19 nt, Homo sapiens
  misc_RNA (1)...(19): siRNA sense strand
aaagcuauacuccaucuaa

SEQ ID NO: 129739 - RNA, 19 nt, Homo sapiens
  misc_RNA (1)...(19): siRNA sense strand
gggcuggagcaguuuauaa

SEQ ID NO: 129740 - RNA, 19 nt, Homo sapiens
  misc_RNA (1)...(19): siRNA sense strand
gaugugagcaacccgcaaa

SEQ ID NO: 129741 - RNA, 19 nt, Homo sapiens
  misc_RNA (1)...(19): siRNA sense strand
aagcuauacuccaucuaaa

SEQ ID NO: 129742 - RNA, 19 nt, Homo sapiens
  misc_RNA (1)...(19): siRNA sense strand
gaggagaugauggaauauu

SEQ ID NO: 129743 - RNA, 19 nt, Homo sapiens
  misc_RNA (1)...(19): siRNA sense strand
cuucaccacuuacgaaauc

SEQ ID NO: 129744 - RNA, 19 nt, Homo sapiens
  misc_RNA (1)...(19): siRNA sense strand
caaggucgcuggucauccu

SEQ ID NO: 129745 - RNA, 19 nt, Homo sapiens
  misc_RNA (1)...(19): siRNA sense strand
ggcuggagcaguuuauaaa

SEQ ID NO: 129746 - RNA, 19 nt, Homo sapiens
  misc_RNA (1)...(19): siRNA sense strand
cgaacguugucuucacaug

SEQ ID NO: 129747 - RNA, 19 nt, Homo sapiens
  misc_RNA (1)...(19): siRNA sense strand
caagggcuggagcaguuua

SEQ ID NO: 129748 - RNA, 19 nt, Homo sapiens
  misc_RNA (1)...(19): siRNA sense strand
aacguugucuucacauguu

SEQ ID NO: 129749 - RNA, 19 nt, Homo sapiens
  misc_RNA (1)...(19): siRNA sense strand
ccaagccgcagaaccugaa

SEQ ID NO: 129750 - RNA, 19 nt, Homo sapiens
  misc_RNA (1)...(19): siRNA sense strand
ccagcaacuuccucgagau

SEQ ID NO: 129751 - RNA, 19 nt, Homo sapiens
  misc_RNA (1)...(19): siRNA sense strand
uaaaagcuauacuccaucu

SEQ ID NO: 129752 - RNA, 19 nt, Homo sapiens
  misc_RNA (1)...(19): siRNA sense strand
gaugugagcaacccgcaaa

SEQ ID NO: 129753 - RNA, 19 nt, Homo sapiens
  misc_RNA (1)...(19): siRNA sense strand
cuucaccacuuacgaaauc

SEQ ID NO: 129754 - RNA, 19 nt, Homo sapiens
  misc_RNA (1)...(19): siRNA sense strand
ccaagccgcagaaccugaa

SEQ ID NO: 129755 - RNA, 19 nt, Homo sapiens
  misc_RNA (1)...(19): siRNA sense strand
ccagcaacuuccucgagau

SEQ ID NO: 129756 - RNA, 19 nt, Homo sapiens
  misc_RNA (1)...(19): siRNA sense strand
ggagggagcuggacaggua

SEQ ID NO: 129757 - RNA, 19 nt, Homo sapiens
  misc_RNA (1)...(19): siRNA sense strand
ggaauuagaggacugauua

SEQ ID NO: 129758 - RNA, 19 nt, Homo sapiens
  misc_RNA (1)...(19): siRNA sense strand
ccucguggcugauuauuua

SEQ ID NO: 129759 - RNA, 19 nt, Homo sapiens
  misc_RNA (1)...(19): siRNA sense strand
ugaaguauguggagcuuua

SEQ ID NO: 129760 - RNA, 19 nt, Homo sapiens
  misc_RNA (1)...(19): siRNA sense strand
gaacaccuccuucuuugaa

SEQ ID NO: 129761 - RNA, 19 nt, Homo sapiens
  misc_RNA (1)...(19): siRNA sense strand
gcaccaaauugcaucguuu

SEQ ID NO: 129762 - RNA, 19 nt, Homo sapiens
  misc_RNA (1)...(19): siRNA sense strand
ucauagagaucgccaacua

SEQ ID NO: 129763 - RNA, 19 nt, Homo sapiens
  misc_RNA (1)...(19): siRNA sense strand
gagaagaagaggaauguaa

SEQ ID NO: 129764 - RNA, 19 nt, Homo sapiens
  misc_RNA (1)...(19): siRNA sense strand
gaacuuaucauaccucagu

SEQ ID NO: 129765 - RNA, 19 nt, Homo sapiens
  misc_RNA (1)...(19): siRNA sense strand
gcagucaggugguggaaug

SEQ ID NO: 129766 - RNA, 19 nt, Homo sapiens
  misc_RNA (1)...(19): siRNA sense strand
gaucaacacuccggaaauc

SEQ ID NO: 129767 - RNA, 19 nt, Homo sapiens
  misc_RNA (1)...(19): siRNA sense strand
gauuuaaacuccaugaagu

SEQ ID NO: 129768 - RNA, 19 nt, Homo sapiens
  misc_RNA (1)...(19): siRNA sense strand
gggaacaugugugaaguuu

SEQ ID NO: 129769 - RNA, 19 nt, Homo sapiens
  misc_RNA (1)...(19): siRNA sense strand
ggacagguaucugcaguca

SEQ ID NO: 129770 - RNA, 19 nt, Homo sapiens
  misc_RNA (1)...(19): siRNA sense strand
ugacaacgcccaauuaauc

SEQ ID NO: 129771 - RNA, 19 nt, Homo sapiens
  misc_RNA (1)...(19): siRNA sense strand
ggagaagaaugagcaacuu

SEQ ID NO: 129772 - RNA, 19 nt, Homo sapiens
  misc_RNA (1)...(19): siRNA sense strand
cuacaaccauauuugcuuu

SEQ ID NO: 129773 - RNA, 19 nt, Homo sapiens
  misc_RNA (1)...(19): siRNA sense strand
uaaacuccaugaaguaugu

SEQ ID NO: 129774 - RNA, 19 nt, Homo sapiens
  misc_RNA (1)...(19): siRNA sense strand
gaguguggguccuguggua

SEQ ID NO: 129775 - RNA, 19 nt, Homo sapiens
  misc_RNA (1)...(19): siRNA sense strand
ugugguagcuggaguguug

SEQ ID NO: 129776 - RNA, 19 nt, Homo sapiens
  misc_RNA (1)...(19): siRNA sense strand
cgagaugggccacaacuuu

SEQ ID NO: 129777 - RNA, 19 nt, Homo sapiens
  misc_RNA (1)...(19): siRNA sense strand
ggagacaccuuuggaaacu

SEQ ID NO: 129778 - RNA, 19 nt, Homo sapiens
  misc_RNA (1)...(19): siRNA sense strand
ggacaugaauggugaacac

SEQ ID NO: 129779 - RNA, 19 nt, Homo sapiens
  misc_RNA (1)...(19): siRNA sense strand
cacaggaagugcaacauga

SEQ ID NO: 129780 - RNA, 19 nt, Homo sapiens
  misc_RNA (1)...(19): siRNA sense strand
ccaacgcggugcccauuga

SEQ ID NO: 129781 - RNA, 19 nt, Homo sapiens
  misc_RNA (1)...(19): siRNA sense strand
gagaagaaugagcaacuuu

SEQ ID NO: 129782 - RNA, 19 nt, Homo sapiens
  misc_RNA (1)...(19): siRNA sense strand
ccacugcccuaccaacuuc

SEQ ID NO: 129783 - RNA, 19 nt, Homo sapiens
  misc_RNA (1)...(19): siRNA sense strand
ugacaccacuaucaucaug

SEQ ID NO: 129784 - RNA, 19 nt, Homo sapiens
  misc_RNA (1)...(19): siRNA sense strand
gggaagauccagugucaga

SEQ ID NO: 129785 - RNA, 19 nt, Homo sapiens
  misc_RNA (1)...(19): siRNA sense strand
gaacacaggaagugcaaca

SEQ ID NO: 129786 - RNA, 19 nt, Homo sapiens
  misc_RNA (1)...(19): siRNA sense strand
ccaugacaacgcccaauua

SEQ ID NO: 129787 - RNA, 19 nt, Homo sapiens
  misc_RNA (1)...(19): siRNA sense strand
agaaggcacucccggcaaa

SEQ ID NO: 129788 - RNA, 19 nt, Homo sapiens
  misc_RNA (1)...(19): siRNA sense strand
gugggaagauccaguguca

SEQ ID NO: 129789 - RNA, 19 nt, Homo sapiens
  misc_RNA (1)...(19): siRNA sense strand
gagaugggccacaacuuug

SEQ ID NO: 129790 - RNA, 19 nt, Homo sapiens
  misc_RNA (1)...(19): siRNA sense strand
gccaacaccuuauuuacag

SEQ ID NO: 129791 - RNA, 19 nt, Homo sapiens
  misc_RNA (1)...(19): siRNA sense strand
caugagagaugcgaagugu

SEQ ID NO: 129792 - RNA, 19 nt, Homo sapiens
  misc_RNA (1)...(19): siRNA sense strand
aaacacaagcucauagaga

SEQ ID NO: 129793 - RNA, 19 nt, Homo sapiens
  misc_RNA (1)...(19): siRNA sense strand
gaugaaaagggaagauuua

SEQ ID NO: 129794 - RNA, 19 nt, Homo sapiens
  misc_RNA (1)...(19): siRNA sense strand
gaagaagaggaauguaaca

SEQ ID NO: 129795 - RNA, 19 nt, Homo sapiens
  misc_RNA (1)...(19): siRNA sense strand
caugacaacgcccaauuaa

SEQ ID NO: 129796 - RNA, 19 nt, Homo sapiens
  misc_RNA (1)...(19): siRNA sense strand
gaagauuuaaacuccauga

SEQ ID NO: 129797 - RNA, 19 nt, Homo sapiens
  misc_RNA (1)...(19): siRNA sense strand
ccucagcucucccuuccaa

SEQ ID NO: 129798 - RNA, 19 nt, Homo sapiens
  misc_RNA (1)...(19): siRNA sense strand
acacagaaacccauuauac

SEQ ID NO: 129799 - RNA, 19 nt, Homo sapiens
  misc_RNA (1)...(19): siRNA sense strand
caaacuaggccaacucaag

SEQ ID NO: 129800 - RNA, 19 nt, Homo sapiens
  misc_RNA (1)...(19): siRNA sense strand
ggaagugcaacaugagaga

SEQ ID NO: 129801 - RNA, 19 nt, Homo sapiens
  misc_RNA (1)...(19): siRNA sense strand
gcaggagacaccuuuggaa

SEQ ID NO: 129802 - RNA, 19 nt, Homo sapiens
  misc_RNA (1)...(19): siRNA sense strand
acagaaacccauuauacuu

SEQ ID NO: 129803 - RNA, 19 nt, Homo sapiens
  misc_RNA (1)...(19): siRNA sense strand
gcaugugccucaccuacca

SEQ ID NO: 129804 - RNA, 19 nt, Homo sapiens
  misc_RNA (1)...(19): siRNA sense strand
cagaaacccauuauacuuc

SEQ ID NO: 129805 - RNA, 19 nt, Homo sapiens
  misc_RNA (1)...(19): siRNA sense strand
agaaacccauuauacuuca

SEQ ID NO: 129806 - RNA, 19 nt, Homo sapiens
  misc_RNA (1)...(19): siRNA sense strand
gcagacagaacaacaaacu

SEQ ID NO: 129807 - RNA, 19 nt, Homo sapiens
  misc_RNA (1)...(19): siRNA sense strand
uuacacaacagaccaagaa

SEQ ID NO: 129808 - RNA, 19 nt, Homo sapiens
  misc_RNA (1)...(19): siRNA sense strand
gaaacccauuauacuucaa

SEQ ID NO: 129809 - RNA, 19 nt, Homo sapiens
  misc_RNA (1)...(19): siRNA sense strand
gggaagauuuaaacuccau

SEQ ID NO: 129810 - RNA, 19 nt, Homo sapiens
  misc_RNA (1)...(19): siRNA sense strand
gcccagaaguaccaugaca

SEQ ID NO: 129811 - RNA, 19 nt, Homo sapiens
  misc_RNA (1)...(19): siRNA sense strand
ggaacaccuccuucuuuga

SEQ ID NO: 129812 - RNA, 19 nt, Homo sapiens
  misc_RNA (1)...(19): siRNA sense strand
gcucuucaguuuacacaac

SEQ ID NO: 129813 - RNA, 19 nt, Homo sapiens
  misc_RNA (1)...(19): siRNA sense strand
aaguguggcuacaaccaua

SEQ ID NO: 129814 - RNA, 19 nt, Homo sapiens
  misc_RNA (1)...(19): siRNA sense strand
acaccaggauguuguaugg

SEQ ID NO: 129815 - RNA, 19 nt, Homo sapiens
  misc_RNA (1)...(19): siRNA sense strand
gacaacgcccaauuaauca

SEQ ID NO: 129816 - RNA, 19 nt, Homo sapiens
  misc_RNA (1)...(19): siRNA sense strand
aacacaagcucauagagau

SEQ ID NO: 129817 - RNA, 19 nt, Homo sapiens
  misc_RNA (1)...(19): siRNA sense strand
ccaaacacaagcucauaga

SEQ ID NO: 129818 - RNA, 19 nt, Homo sapiens
  misc_RNA (1)...(19): siRNA sense strand
gcuccuuccuacacagaaa

SEQ ID NO: 129819 - RNA, 19 nt, Homo sapiens
  misc_RNA (1)...(19): siRNA sense strand
caggagacaccuuuggaaa

SEQ ID NO: 129820 - RNA, 19 nt, Homo sapiens
  misc_RNA (1)...(19): siRNA sense strand
gaaccaaguguggcuacaa

SEQ ID NO: 129821 - RNA, 19 nt, Homo sapiens
  misc_RNA (1)...(19): siRNA sense strand
gcagcaaccucagcuacgu

SEQ ID NO: 129822 - RNA, 19 nt, Homo sapiens
  misc_RNA (1)...(19): siRNA sense strand
agacagaacaacaaacuag

SEQ ID NO: 129823 - RNA, 19 nt, Homo sapiens
  misc_RNA (1)...(19): siRNA sense strand
gaugcgaagugugggaaga

SEQ ID NO: 129824 - RNA, 19 nt, Homo sapiens
  misc_RNA (1)...(19): siRNA sense strand
ggccaacaccuuauuuaca

SEQ ID NO: 129825 - RNA, 19 nt, Homo sapiens
  misc_RNA (1)...(19): siRNA sense strand
gaaaagggaagauuuaaac

SEQ ID NO: 129826 - RNA, 19 nt, Homo sapiens
  misc_RNA (1)...(19): siRNA sense strand
caccauggcccacgagaug

SEQ ID NO: 129827 - RNA, 19 nt, Homo sapiens
  misc_RNA (1)...(19): siRNA sense strand
agagaucgccaacuauguu

SEQ ID NO: 129828 - RNA, 19 nt, Homo sapiens
  misc_RNA (1)...(19): siRNA sense strand
ggcugauuauuuagaguuu

SEQ ID NO: 129829 - RNA, 19 nt, Homo sapiens
  misc_RNA (1)...(19): siRNA sense strand
acaaccauauuugcuuuga

SEQ ID NO: 129830 - RNA, 19 nt, Homo sapiens
  misc_RNA (1)...(19): siRNA sense strand
gcuacaaccauauuugcuu

SEQ ID NO: 129831 - RNA, 19 nt, Homo sapiens
  misc_RNA (1)...(19): siRNA sense strand
ccaacaccuuauuuacaga

SEQ ID NO: 129832 - RNA, 19 nt, Homo sapiens
  misc_RNA (1)...(19): siRNA sense strand
agaaaagcauccacucaaa

SEQ ID NO: 129833 - RNA, 19 nt, Homo sapiens
  misc_RNA (1)...(19): siRNA sense strand
caaaccaccacacggaaau

SEQ ID NO: 129834 - RNA, 19 nt, Homo sapiens
  misc_RNA (1)...(19): siRNA sense strand
ggagaagaagaggaaugua

SEQ ID NO: 129835 - RNA, 19 nt, Homo sapiens
  misc_RNA (1)...(19): siRNA sense strand
gcacggugagggagacaga

SEQ ID NO: 129836 - RNA, 19 nt, Homo sapiens
  misc_RNA (1)...(19): siRNA sense strand
ggaaugugucucuccaaca

SEQ ID NO: 129837 - RNA, 19 nt, Homo sapiens
  misc_RNA (1)...(19): siRNA sense strand
cuacacagaaacccauuau

SEQ ID NO: 129838 - RNA, 19 nt, Homo sapiens
  misc_RNA (1)...(19): siRNA sense strand
agacaccuuuggaaacugu

SEQ ID NO: 129839 - RNA, 19 nt, Homo sapiens
  misc_RNA (1)...(19): siRNA sense strand
gccccaagcugcagcauga

SEQ ID NO: 129840 - RNA, 19 nt, Homo sapiens
  misc_RNA (1)...(19): siRNA sense strand
caccaaacacaagcucaua

SEQ ID NO: 129841 - RNA, 19 nt, Homo sapiens
  misc_RNA (1)...(19): siRNA sense strand
caacaaacuaggccaacuc

SEQ ID NO: 129842 - RNA, 19 nt, Homo sapiens
  misc_RNA (1)...(19): siRNA sense strand
gugugacuguggagaagaa

SEQ ID NO: 129843 - RNA, 19 nt, Homo sapiens
  misc_RNA (1)...(19): siRNA sense strand
ggaacggguaucuggaaga

SEQ ID NO: 129844 - RNA, 19 nt, Homo sapiens
  misc_RNA (1)...(19): siRNA sense strand
gagaaaagcauccacucaa

SEQ ID NO: 129845 - RNA, 19 nt, Homo sapiens
  misc_RNA (1)...(19): siRNA sense strand
ucaaaccaccacacggaaa

SEQ ID NO: 129846 - RNA, 19 nt, Homo sapiens
  misc_RNA (1)...(19): siRNA sense strand
ggucaugccaacccaacuu

SEQ ID NO: 129847 - RNA, 19 nt, Homo sapiens
  misc_RNA (1)...(19): siRNA sense strand
guggaaaggacaugaaugg

SEQ ID NO: 129848 - RNA, 19 nt, Homo sapiens
  misc_RNA (1)...(19): siRNA sense strand
cccaaaguguucaauggau

SEQ ID NO: 129849 - RNA, 19 nt, Homo sapiens
  misc_RNA (1)...(19): siRNA sense strand
gaacagcgggacuggucau

SEQ ID NO: 129850 - RNA, 19 nt, Homo sapiens
  misc_RNA (1)...(19): siRNA sense strand
gaguguugguggccaucuu

SEQ ID NO: 129851 - RNA, 19 nt, Homo sapiens
  misc_RNA (1)...(19): siRNA sense strand
acugaaggcugugggaaga

SEQ ID NO: 129852 - RNA, 19 nt, Homo sapiens
  misc_RNA (1)...(19): siRNA sense strand
ggaaccaaguguggcuaca

SEQ ID NO: 129853 - RNA, 19 nt, Homo sapiens
  misc_RNA (1)...(19): siRNA sense strand
cuaccaacuucuaccagau

SEQ ID NO: 129854 - RNA, 19 nt, Homo sapiens
  misc_RNA (1)...(19): siRNA sense strand
cacggaaauuggaggauca

SEQ ID NO: 129855 - RNA, 19 nt, Homo sapiens
  misc_RNA (1)...(19): siRNA sense strand
guaacaacaaccagaacug

SEQ ID NO: 129856 - RNA, 19 nt, Homo sapiens
  misc_RNA (1)...(19): siRNA sense strand
ggagggagcuggacaggua

SEQ ID NO: 129857 - RNA, 19 nt, Homo sapiens
  misc_RNA (1)...(19): siRNA sense strand
ggaauuagaggacugauua

SEQ ID NO: 129858 - RNA, 19 nt, Homo sapiens
  misc_RNA (1)...(19): siRNA sense strand
ccucguggcugauuauuua

SEQ ID NO: 129859 - RNA, 19 nt, Homo sapiens
  misc_RNA (1)...(19): siRNA sense strand
ugaaguauguggagcuuua

SEQ ID NO: 129860 - RNA, 19 nt, Homo sapiens
  misc_RNA (1)...(19): siRNA sense strand
gaacaccuccuucuuugaa

SEQ ID NO: 129861 - RNA, 19 nt, Homo sapiens
  misc_RNA (1)...(19): siRNA sense strand
gcaccaaauugcaucguuu

SEQ ID NO: 129862 - RNA, 19 nt, Homo sapiens
  misc_RNA (1)...(19): siRNA sense strand
ucauagagaucgccaacua

SEQ ID NO: 129863 - RNA, 19 nt, Homo sapiens
  misc_RNA (1)...(19): siRNA sense strand
gagaagaagaggaauguaa

SEQ ID NO: 129864 - RNA, 19 nt, Homo sapiens
  misc_RNA (1)...(19): siRNA sense strand
gaacuuaucauaccucagu

SEQ ID NO: 129865 - RNA, 19 nt, Homo sapiens
  misc_RNA (1)...(19): siRNA sense strand
gcagucaggugguggaaug

SEQ ID NO: 129866 - RNA, 19 nt, Homo sapiens
  misc_RNA (1)...(19): siRNA sense strand
gaucaacacuccggaaauc

SEQ ID NO: 129867 - RNA, 19 nt, Homo sapiens
  misc_RNA (1)...(19): siRNA sense strand
gauuuaaacuccaugaagu

SEQ ID NO: 129868 - RNA, 19 nt, Homo sapiens
  misc_RNA (1)...(19): siRNA sense strand
gggaacaugugugaaguuu

SEQ ID NO: 129869 - RNA, 19 nt, Homo sapiens
  misc_RNA (1)...(19): siRNA sense strand
ggacagguaucugcaguca

SEQ ID NO: 129870 - RNA, 19 nt, Homo sapiens
  misc_RNA (1)...(19): siRNA sense strand
ugacaacgcccaauuaauc

SEQ ID NO: 129871 - RNA, 19 nt, Homo sapiens
  misc_RNA (1)...(19): siRNA sense strand
ggagaagaaugagcaacuu

SEQ ID NO: 129872 - RNA, 19 nt, Homo sapiens
  misc_RNA (1)...(19): siRNA sense strand
cuacaaccauauuugcuuu

SEQ ID NO: 129873 - RNA, 19 nt, Homo sapiens
  misc_RNA (1)...(19): siRNA sense strand
uaaacuccaugaaguaugu

SEQ ID NO: 129874 - RNA, 19 nt, Homo sapiens
  misc_RNA (1)...(19): siRNA sense strand
gaguguggguccuguggua

SEQ ID NO: 129875 - RNA, 19 nt, Homo sapiens
  misc_RNA (1)...(19): siRNA sense strand
ugugguagcuggaguguug

SEQ ID NO: 129876 - RNA, 19 nt, Homo sapiens
  misc_RNA (1)...(19): siRNA sense strand
cgagaugggccacaacuuu

SEQ ID NO: 129877 - RNA, 19 nt, Homo sapiens
  misc_RNA (1)...(19): siRNA sense strand
ggagacaccuuuggaaacu

SEQ ID NO: 129878 - RNA, 19 nt, Homo sapiens
  misc_RNA (1)...(19): siRNA sense strand
ggacaugaauggugaacac

SEQ ID NO: 129879 - RNA, 19 nt, Homo sapiens
  misc_RNA (1)...(19): siRNA sense strand
cacaggaagugcaacauga

SEQ ID NO: 129880 - RNA, 19 nt, Homo sapiens
  misc_RNA (1)...(19): siRNA sense strand
ccaacgcggugcccauuga

SEQ ID NO: 129881 - RNA, 19 nt, Homo sapiens
  misc_RNA (1)...(19): siRNA sense strand
gagaagaaugagcaacuuu

SEQ ID NO: 129882 - RNA, 19 nt, Homo sapiens
  misc_RNA (1)...(19): siRNA sense strand
ccacugcccuaccaacuuc

SEQ ID NO: 129883 - RNA, 19 nt, Homo sapiens
  misc_RNA (1)...(19): siRNA sense strand
ugacaccacuaucaucaug

SEQ ID NO: 129884 - RNA, 19 nt, Homo sapiens
  misc_RNA (1)...(19): siRNA sense strand
gggaagauccagugucaga

SEQ ID NO: 129885 - RNA, 19 nt, Homo sapiens
  misc_RNA (1)...(19): siRNA sense strand
gaacacaggaagugcaaca

SEQ ID NO: 129886 - RNA, 19 nt, Homo sapiens
  misc_RNA (1)...(19): siRNA sense strand
ccaugacaacgcccaauua

SEQ ID NO: 129887 - RNA, 19 nt, Homo sapiens
  misc_RNA (1)...(19): siRNA sense strand
agaaggcacucccggcaaa

SEQ ID NO: 129888 - RNA, 19 nt, Homo sapiens
  misc_RNA (1)...(19): siRNA sense strand
gugggaagauccaguguca

SEQ ID NO: 129889 - RNA, 19 nt, Homo sapiens
  misc_RNA (1)...(19): siRNA sense strand
gagaugggccacaacuuug

SEQ ID NO: 129890 - RNA, 19 nt, Homo sapiens
  misc_RNA (1)...(19): siRNA sense strand
gccaacaccuuauuuacag

SEQ ID NO: 129891 - RNA, 19 nt, Homo sapiens
  misc_RNA (1)...(19): siRNA sense strand
caugagagaugcgaagugu

SEQ ID NO: 129892 - RNA, 19 nt, Homo sapiens
  misc_RNA (1)...(19): siRNA sense strand
aaacacaagcucauagaga

SEQ ID NO: 129893 - RNA, 19 nt, Homo sapiens
  misc_RNA (1)...(19): siRNA sense strand
gaugaaaagggaagauuua

SEQ ID NO: 129894 - RNA, 19 nt, Homo sapiens
  misc_RNA (1)...(19): siRNA sense strand
gaagaagaggaauguaaca

SEQ ID NO: 129895 - RNA, 19 nt, Homo sapiens
  misc_RNA (1)...(19): siRNA sense strand
caugacaacgcccaauuaa

SEQ ID NO: 129896 - RNA, 19 nt, Homo sapiens
  misc_RNA (1)...(19): siRNA sense strand
gaagauuuaaacuccauga

SEQ ID NO: 129897 - RNA, 19 nt, Homo sapiens
  misc_RNA (1)...(19): siRNA sense strand
ccucagcucucccuuccaa

SEQ ID NO: 129898 - RNA, 19 nt, Homo sapiens
  misc_RNA (1)...(19): siRNA sense strand
acacagaaacccauuauac

SEQ ID NO: 129899 - RNA, 19 nt, Homo sapiens
  misc_RNA (1)...(19): siRNA sense strand
caaacuaggccaacucaag

SEQ ID NO: 129900 - RNA, 19 nt, Homo sapiens
  misc_RNA (1)...(19): siRNA sense strand
ggaagugcaacaugagaga

SEQ ID NO: 129901 - RNA, 19 nt, Homo sapiens
  misc_RNA (1)...(19): siRNA sense strand
gcaggagacaccuuuggaa

SEQ ID NO: 129902 - RNA, 19 nt, Homo sapiens
  misc_RNA (1)...(19): siRNA sense strand
acagaaacccauuauacuu

SEQ ID NO: 129903 - RNA, 19 nt, Homo sapiens
  misc_RNA (1)...(19): siRNA sense strand
gcaugugccucaccuacca

SEQ ID NO: 129904 - RNA, 19 nt, Homo sapiens
  misc_RNA (1)...(19): siRNA sense strand
cagaaacccauuauacuuc

SEQ ID NO: 129905 - RNA, 19 nt, Homo sapiens
  misc_RNA (1)...(19): siRNA sense strand
agaaacccauuauacuuca

SEQ ID NO: 129906 - RNA, 19 nt, Homo sapiens
  misc_RNA (1)...(19): siRNA sense strand
gcagacagaacaacaaacu

SEQ ID NO: 129907 - RNA, 19 nt, Homo sapiens
  misc_RNA (1)...(19): siRNA sense strand
uuacacaacagaccaagaa

SEQ ID NO: 129908 - RNA, 19 nt, Homo sapiens
  misc_RNA (1)...(19): siRNA sense strand
gaaacccauuauacuucaa

SEQ ID NO: 129909 - RNA, 19 nt, Homo sapiens
  misc_RNA (1)...(19): siRNA sense strand
gggaagauuuaaacuccau

SEQ ID NO: 129910 - RNA, 19 nt, Homo sapiens
  misc_RNA (1)...(19): siRNA sense strand
gcccagaaguaccaugaca

SEQ ID NO: 129911 - RNA, 19 nt, Homo sapiens
  misc_RNA (1)...(19): siRNA sense strand
ggaacaccuccuucuuuga

SEQ ID NO: 129912 - RNA, 19 nt, Homo sapiens
  misc_RNA (1)...(19): siRNA sense strand
gcucuucaguuuacacaac

SEQ ID NO: 129913 - RNA, 19 nt, Homo sapiens
  misc_RNA (1)...(19): siRNA sense strand
aaguguggcuacaaccaua

SEQ ID NO: 129914 - RNA, 19 nt, Homo sapiens
  misc_RNA (1)...(19): siRNA sense strand
acaccaggauguuguaugg

SEQ ID NO: 129915 - RNA, 19 nt, Homo sapiens
  misc_RNA (1)...(19): siRNA sense strand
gacaacgcccaauuaauca

SEQ ID NO: 129916 - RNA, 19 nt, Homo sapiens
  misc_RNA (1)...(19): siRNA sense strand
aacacaagcucauagagau

SEQ ID NO: 129917 - RNA, 19 nt, Homo sapiens
  misc_RNA (1)...(19): siRNA sense strand
ccaaacacaagcucauaga

SEQ ID NO: 129918 - RNA, 19 nt, Homo sapiens
  misc_RNA (1)...(19): siRNA sense strand
gcuccuuccuacacagaaa

SEQ ID NO: 129919 - RNA, 19 nt, Homo sapiens
  misc_RNA (1)...(19): siRNA sense strand
caggagacaccuuuggaaa

SEQ ID NO: 129920 - RNA, 19 nt, Homo sapiens
  misc_RNA (1)...(19): siRNA sense strand
gaaccaaguguggcuacaa

SEQ ID NO: 129921 - RNA, 19 nt, Homo sapiens
  misc_RNA (1)...(19): siRNA sense strand
gcagcaaccucagcuacgu

SEQ ID NO: 129922 - RNA, 19 nt, Homo sapiens
  misc_RNA (1)...(19): siRNA sense strand
agacagaacaacaaacuag

SEQ ID NO: 129923 - RNA, 19 nt, Homo sapiens
  misc_RNA (1)...(19): siRNA sense strand
gaugcgaagugugggaaga

SEQ ID NO: 129924 - RNA, 19 nt, Homo sapiens
  misc_RNA (1)...(19): siRNA sense strand
ggccaacaccuuauuuaca

SEQ ID NO: 129925 - RNA, 19 nt, Homo sapiens
  misc_RNA (1)...(19): siRNA sense strand
gaaaagggaagauuuaaac

SEQ ID NO: 129926 - RNA, 19 nt, Homo sapiens
  misc_RNA (1)...(19): siRNA sense strand
caccauggcccacgagaug

SEQ ID NO: 129927 - RNA, 19 nt, Homo sapiens
  misc_RNA (1)...(19): siRNA sense strand
agagaucgccaacuauguu

SEQ ID NO: 129928 - RNA, 19 nt, Homo sapiens
  misc_RNA (1)...(19): siRNA sense strand
ggcugauuauuuagaguuu

SEQ ID NO: 129929 - RNA, 19 nt, Homo sapiens
  misc_RNA (1)...(19): siRNA sense strand
acaaccauauuugcuuuga

SEQ ID NO: 129930 - RNA, 19 nt, Homo sapiens
  misc_RNA (1)...(19): siRNA sense strand
gcuacaaccauauuugcuu

SEQ ID NO: 129931 - RNA, 19 nt, Homo sapiens
  misc_RNA (1)...(19): siRNA sense strand
ccaacaccuuauuuacaga

SEQ ID NO: 129932 - RNA, 19 nt, Homo sapiens
  misc_RNA (1)...(19): siRNA sense strand
agaaaagcauccacucaaa

SEQ ID NO: 129933 - RNA, 19 nt, Homo sapiens
  misc_RNA (1)...(19): siRNA sense strand
caaaccaccacacggaaau

SEQ ID NO: 129934 - RNA, 19 nt, Homo sapiens
  misc_RNA (1)...(19): siRNA sense strand
ggagaagaagaggaaugua

SEQ ID NO: 129935 - RNA, 19 nt, Homo sapiens
  misc_RNA (1)...(19): siRNA sense strand
gcacggugagggagacaga

SEQ ID NO: 129936 - RNA, 19 nt, Homo sapiens
  misc_RNA (1)...(19): siRNA sense strand
ggaaugugucucuccaaca

SEQ ID NO: 129937 - RNA, 19 nt, Homo sapiens
  misc_RNA (1)...(19): siRNA sense strand
cuacacagaaacccauuau

SEQ ID NO: 129938 - RNA, 19 nt, Homo sapiens
  misc_RNA (1)...(19): siRNA sense strand
agacaccuuuggaaacugu

SEQ ID NO: 129939 - RNA, 19 nt, Homo sapiens
  misc_RNA (1)...(19): siRNA sense strand
gccccaagcugcagcauga

SEQ ID NO: 129940 - RNA, 19 nt, Homo sapiens
  misc_RNA (1)...(19): siRNA sense strand
caccaaacacaagcucaua

SEQ ID NO: 129941 - RNA, 19 nt, Homo sapiens
  misc_RNA (1)...(19): siRNA sense strand
caacaaacuaggccaacuc

SEQ ID NO: 129942 - RNA, 19 nt, Homo sapiens
  misc_RNA (1)...(19): siRNA sense strand
gugugacuguggagaagaa

SEQ ID NO: 129943 - RNA, 19 nt, Homo sapiens
  misc_RNA (1)...(19): siRNA sense strand
ggaacggguaucuggaaga

SEQ ID NO: 129944 - RNA, 19 nt, Homo sapiens
  misc_RNA (1)...(19): siRNA sense strand
gagaaaagcauccacucaa

SEQ ID NO: 129945 - RNA, 19 nt, Homo sapiens
  misc_RNA (1)...(19): siRNA sense strand
ucaaaccaccacacggaaa

SEQ ID NO: 129946 - RNA, 19 nt, Homo sapiens
  misc_RNA (1)...(19): siRNA sense strand
ggucaugccaacccaacuu

SEQ ID NO: 129947 - RNA, 19 nt, Homo sapiens
  misc_RNA (1)...(19): siRNA sense strand
guggaaaggacaugaaugg

SEQ ID NO: 129948 - RNA, 19 nt, Homo sapiens
  misc_RNA (1)...(19): siRNA sense strand
cccaaaguguucaauggau

SEQ ID NO: 129949 - RNA, 19 nt, Homo sapiens
  misc_RNA (1)...(19): siRNA sense strand
gaacagcgggacuggucau

SEQ ID NO: 129950 - RNA, 19 nt, Homo sapiens
  misc_RNA (1)...(19): siRNA sense strand
gaguguugguggccaucuu

SEQ ID NO: 129951 - RNA, 19 nt, Homo sapiens
  misc_RNA (1)...(19): siRNA sense strand
acugaaggcugugggaaga

SEQ ID NO: 129952 - RNA, 19 nt, Homo sapiens
  misc_RNA (1)...(19): siRNA sense strand
ggaaccaaguguggcuaca

SEQ ID NO: 129953 - RNA, 19 nt, Homo sapiens
  misc_RNA (1)...(19): siRNA sense strand
cuaccaacuucuaccagau

SEQ ID NO: 129954 - RNA, 19 nt, Homo sapiens
  misc_RNA (1)...(19): siRNA sense strand
cacggaaauuggaggauca

SEQ ID NO: 129955 - RNA, 19 nt, Homo sapiens
  misc_RNA (1)...(19): siRNA sense strand
guaacaacaaccagaacug

SEQ ID NO: 129956 - RNA, 19 nt, Homo sapiens
  misc_RNA (1)...(19): siRNA sense strand
gcacuuacaugucggagaa

SEQ ID NO: 129957 - RNA, 19 nt, Homo sapiens
  misc_RNA (1)...(19): siRNA sense strand
ggaaugugcucuucuggaa

SEQ ID NO: 129958 - RNA, 19 nt, Homo sapiens
  misc_RNA (1)...(19): siRNA sense strand
ugacacugcuggcgauuua

SEQ ID NO: 129959 - RNA, 19 nt, Homo sapiens
  misc_RNA (1)...(19): siRNA sense strand
gauaucgucuuccugguaa

SEQ ID NO: 129960 - RNA, 19 nt, Homo sapiens
  misc_RNA (1)...(19): siRNA sense strand
aaacugcccuucccagaug

SEQ ID NO: 129961 - RNA, 19 nt, Homo sapiens
  misc_RNA (1)...(19): siRNA sense strand
gcacugaggcuuggcuuga

SEQ ID NO: 129962 - RNA, 19 nt, Homo sapiens
  misc_RNA (1)...(19): siRNA sense strand
gaaacugcccuucccagau

SEQ ID NO: 129963 - RNA, 19 nt, Homo sapiens
  misc_RNA (1)...(19): siRNA sense strand
caguagggcuggaggucua

SEQ ID NO: 129964 - RNA, 19 nt, Homo sapiens
  misc_RNA (1)...(19): siRNA sense strand
gcaucgcccucaccaacuu

SEQ ID NO: 129965 - RNA, 19 nt, Homo sapiens
  misc_RNA (1)...(19): siRNA sense strand
gggcaucgccugguucuug

SEQ ID NO: 129966 - RNA, 19 nt, Homo sapiens
  misc_RNA (1)...(19): siRNA sense strand
ggacuggacaucauuggau

SEQ ID NO: 129967 - RNA, 19 nt, Homo sapiens
  misc_RNA (1)...(19): siRNA sense strand
gguaacagaacaugaccuu

SEQ ID NO: 129968 - RNA, 19 nt, Homo sapiens
  misc_RNA (1)...(19): siRNA sense strand
ucaauagcuuccgccagua

SEQ ID NO: 129969 - RNA, 19 nt, Homo sapiens
  misc_RNA (1)...(19): siRNA sense strand
ccaugggacuggcccucua

SEQ ID NO: 129970 - RNA, 19 nt, Homo sapiens
  misc_RNA (1)...(19): siRNA sense strand
ucucaaggcucuggaacug

SEQ ID NO: 129971 - RNA, 19 nt, Homo sapiens
  misc_RNA (1)...(19): siRNA sense strand
cuaccacgaugucaauguc

SEQ ID NO: 129972 - RNA, 19 nt, Homo sapiens
  misc_RNA (1)...(19): siRNA sense strand
agacacugcugcucauggu

SEQ ID NO: 129973 - RNA, 19 nt, Homo sapiens
  misc_RNA (1)...(19): siRNA sense strand
agauaucgucuuccuggua

SEQ ID NO: 129974 - RNA, 19 nt, Homo sapiens
  misc_RNA (1)...(19): siRNA sense strand
cccuggagcugagcaguga

SEQ ID NO: 129975 - RNA, 19 nt, Homo sapiens
  misc_RNA (1)...(19): siRNA sense strand
caccucugcugaucucaca

SEQ ID NO: 129976 - RNA, 19 nt, Homo sapiens
  misc_RNA (1)...(19): siRNA sense strand
cacugaggcuuggcuugaa

SEQ ID NO: 129977 - RNA, 19 nt, Homo sapiens
  misc_RNA (1)...(19): siRNA sense strand
gggacuggcccucuauguc

SEQ ID NO: 129978 - RNA, 19 nt, Homo sapiens
  misc_RNA (1)...(19): siRNA sense strand
gaagcugguagcccugauc

SEQ ID NO: 129979 - RNA, 19 nt, Homo sapiens
  misc_RNA (1)...(19): siRNA sense strand
ggaaagagguuguuguaaa

SEQ ID NO: 129980 - RNA, 19 nt, Homo sapiens
  misc_RNA (1)...(19): siRNA sense strand
gaaacaagguccucacuuu

SEQ ID NO: 129981 - RNA, 19 nt, Homo sapiens
  misc_RNA (1)...(19): siRNA sense strand
gagcagaucuggcuacaaa

SEQ ID NO: 129982 - RNA, 19 nt, Homo sapiens
  misc_RNA (1)...(19): siRNA sense strand
gaaagagguuguuguaaau

SEQ ID NO: 129983 - RNA, 19 nt, Homo sapiens
  misc_RNA (1)...(19): siRNA sense strand
caagaaagaugcugggauu

SEQ ID NO: 129984 - RNA, 19 nt, Homo sapiens
  misc_RNA (1)...(19): siRNA sense strand
gauaucaccugucuugaaa

SEQ ID NO: 129985 - RNA, 19 nt, Homo sapiens
  misc_RNA (1)...(19): siRNA sense strand
ggaagugacuggugaaugu

SEQ ID NO: 129986 - RNA, 19 nt, Homo sapiens
  misc_RNA (1)...(19): siRNA sense strand
ggacuccggucacugguua

SEQ ID NO: 129987 - RNA, 19 nt, Homo sapiens
  misc_RNA (1)...(19): siRNA sense strand
gaaagaugcugggauuuau

SEQ ID NO: 129988 - RNA, 19 nt, Homo sapiens
  misc_RNA (1)...(19): siRNA sense strand
gaaguuauccugaaagaug

SEQ ID NO: 129989 - RNA, 19 nt, Homo sapiens
  misc_RNA (1)...(19): siRNA sense strand
gaggaggcauacaagauua

SEQ ID NO: 129990 - RNA, 19 nt, Homo sapiens
  misc_RNA (1)...(19): siRNA sense strand
gaaggagacucauauugug

SEQ ID NO: 129991 - RNA, 19 nt, Homo sapiens
  misc_RNA (1)...(19): siRNA sense strand
gaucgaaggucguuccuau

SEQ ID NO: 129992 - RNA, 19 nt, Homo sapiens
  misc_RNA (1)...(19): siRNA sense strand
caauaaauguccaugcaaa

SEQ ID NO: 129993 - RNA, 19 nt, Homo sapiens
  misc_RNA (1)...(19): siRNA sense strand
aaggagagcuuucggcaua

SEQ ID NO: 129994 - RNA, 19 nt, Homo sapiens
  misc_RNA (1)...(19): siRNA sense strand
gcuccugaguuuaucauua

SEQ ID NO: 129995 - RNA, 19 nt, Homo sapiens
  misc_RNA (1)...(19): siRNA sense strand
gggagaauauuaugaacaa

SEQ ID NO: 129996 - RNA, 19 nt, Homo sapiens
  misc_RNA (1)...(19): siRNA sense strand
gcaucaagcuacuuaauag

SEQ ID NO: 129997 - RNA, 19 nt, Homo sapiens
  misc_RNA (1)...(19): siRNA sense strand
ggaaucuucuugcuaguga

SEQ ID NO: 129998 - RNA, 19 nt, Homo sapiens
  misc_RNA (1)...(19): siRNA sense strand
gacugaagcuuguggauga

SEQ ID NO: 129999 - RNA, 19 nt, Homo sapiens
  misc_RNA (1)...(19): siRNA sense strand
ugagaaagcuagacuaaag

SEQ ID NO: 130000 - RNA, 19 nt, Homo sapiens
  misc_RNA (1)...(19): siRNA sense strand
gaaggaaucacaacaccua

SEQ ID NO: 130001 - RNA, 19 nt, Homo sapiens
  misc_RNA (1)...(19): siRNA sense strand
gcauccaacuguacucuuu

SEQ ID NO: 130002 - RNA, 19 nt, Homo sapiens
  misc_RNA (1)...(19): siRNA sense strand
ucaccugucuugaaaguuu

SEQ ID NO: 130003 - RNA, 19 nt, Homo sapiens
  misc_RNA (1)...(19): siRNA sense strand
ugucaucacuccugaaauu

SEQ ID NO: 130004 - RNA, 19 nt, Homo sapiens
  misc_RNA (1)...(19): siRNA sense strand
gaauugaaacguuuacuug

SEQ ID NO: 130005 - RNA, 19 nt, Homo sapiens
  misc_RNA (1)...(19): siRNA sense strand
gugauaagaugacuccaaa

SEQ ID NO: 130006 - RNA, 19 nt, Homo sapiens
  misc_RNA (1)...(19): siRNA sense strand
gaaggucguuccuauaucu

SEQ ID NO: 130007 - RNA, 19 nt, Homo sapiens
  misc_RNA (1)...(19): siRNA sense strand
gaggaagaauugaaacguu

SEQ ID NO: 130008 - RNA, 19 nt, Homo sapiens
  misc_RNA (1)...(19): siRNA sense strand
gaagaugaaggccucuaua

SEQ ID NO: 130009 - RNA, 19 nt, Homo sapiens
  misc_RNA (1)...(19): siRNA sense strand
gcagagacccguccaggaa

SEQ ID NO: 130010 - RNA, 19 nt, Homo sapiens
  misc_RNA (1)...(19): siRNA sense strand
ucaaugaggcggcuauuaa

SEQ ID NO: 130011 - RNA, 19 nt, Homo sapiens
  misc_RNA (1)...(19): siRNA sense strand
gaugaaggccucuauacaa

SEQ ID NO: 130012 - RNA, 19 nt, Homo sapiens
  misc_RNA (1)...(19): siRNA sense strand
gguuugagauccacuuuga

SEQ ID NO: 130013 - RNA, 19 nt, Homo sapiens
  misc_RNA (1)...(19): siRNA sense strand
ggaguccuauucucggaua

SEQ ID NO: 130014 - RNA, 19 nt, Homo sapiens
  misc_RNA (1)...(19): siRNA sense strand
gaaaagaagucaaggaaag

SEQ ID NO: 130015 - RNA, 19 nt, Homo sapiens
  misc_RNA (1)...(19): siRNA sense strand
guggaggauuugaaaguua

SEQ ID NO: 130016 - RNA, 19 nt, Homo sapiens
  misc_RNA (1)...(19): siRNA sense strand
gcgaaugcuucaaauguga

SEQ ID NO: 130017 - RNA, 19 nt, Homo sapiens
  misc_RNA (1)...(19): siRNA sense strand
cagcuggacuuagugaaua

SEQ ID NO: 130018 - RNA, 19 nt, Homo sapiens
  misc_RNA (1)...(19): siRNA sense strand
gaaggagaauguaaaauug

SEQ ID NO: 130019 - RNA, 19 nt, Homo sapiens
  misc_RNA (1)...(19): siRNA sense strand
gauggaagcaaccagauaa

SEQ ID NO: 130020 - RNA, 19 nt, Homo sapiens
  misc_RNA (1)...(19): siRNA sense strand
uagaagaaaccgagacaua

SEQ ID NO: 130021 - RNA, 19 nt, Homo sapiens
  misc_RNA (1)...(19): siRNA sense strand
uaacagaguuuuccaagaa

SEQ ID NO: 130022 - RNA, 19 nt, Homo sapiens
  misc_RNA (1)...(19): siRNA sense strand
ggaagaauugaaacguuua

SEQ ID NO: 130023 - RNA, 19 nt, Homo sapiens
  misc_RNA (1)...(19): siRNA sense strand
gaaauuacuggcuauuaug

SEQ ID NO: 130024 - RNA, 19 nt, Homo sapiens
  misc_RNA (1)...(19): siRNA sense strand
acacggagcucccugugaa

SEQ ID NO: 130025 - RNA, 19 nt, Homo sapiens
  misc_RNA (1)...(19): siRNA sense strand
gcaagugggagcccuguaa

SEQ ID NO: 130026 - RNA, 19 nt, Homo sapiens
  misc_RNA (1)...(19): siRNA sense strand
agacucauauuguguggua

SEQ ID NO: 130027 - RNA, 19 nt, Homo sapiens
  misc_RNA (1)...(19): siRNA sense strand
caacuaaccauucuacugu

SEQ ID NO: 130028 - RNA, 19 nt, Homo sapiens
  misc_RNA (1)...(19): siRNA sense strand
uggcaaauauuaagaagga

SEQ ID NO: 130029 - RNA, 19 nt, Homo sapiens
  misc_RNA (1)...(19): siRNA sense strand
uuaaggaacugaugaugga

SEQ ID NO: 130030 - RNA, 19 nt, Homo sapiens
  misc_RNA (1)...(19): siRNA sense strand
gaagaaaccgagacauauc

SEQ ID NO: 130031 - RNA, 19 nt, Homo sapiens
  misc_RNA (1)...(19): siRNA sense strand
gcaagguggcaaauauuaa

SEQ ID NO: 130032 - RNA, 19 nt, Homo sapiens
  misc_RNA (1)...(19): siRNA sense strand
ucaaagaccuugggaugga

SEQ ID NO: 130033 - RNA, 19 nt, Homo sapiens
  misc_RNA (1)...(19): siRNA sense strand
guagugaagucaggaaaga

SEQ ID NO: 130034 - RNA, 19 nt, Homo sapiens
  misc_RNA (1)...(19): siRNA sense strand
gagauccggugguacagaa

SEQ ID NO: 130035 - RNA, 19 nt, Homo sapiens
  misc_RNA (1)...(19): siRNA sense strand
caucacuccugaaauuaaa

SEQ ID NO: 130036 - RNA, 19 nt, Homo sapiens
  misc_RNA (1)...(19): siRNA sense strand
gcuauuaugugaacuaucg

SEQ ID NO: 130037 - RNA, 19 nt, Homo sapiens
  misc_RNA (1)...(19): siRNA sense strand
agaaagaugcugggauuua

SEQ ID NO: 130038 - RNA, 19 nt, Homo sapiens
  misc_RNA (1)...(19): siRNA sense strand
aacagacacugauggaaua

SEQ ID NO: 130039 - RNA, 19 nt, Homo sapiens
  misc_RNA (1)...(19): siRNA sense strand
ugaggacucuccacgauug

SEQ ID NO: 130040 - RNA, 19 nt, Homo sapiens
  misc_RNA (1)...(19): siRNA sense strand
caacuguacucuuuuguaa

SEQ ID NO: 130041 - RNA, 19 nt, Homo sapiens
  misc_RNA (1)...(19): siRNA sense strand
gaacugaugauggaaguau

SEQ ID NO: 130042 - RNA, 19 nt, Homo sapiens
  misc_RNA (1)...(19): siRNA sense strand
ccagaaagaagcugaauuc

SEQ ID NO: 130043 - RNA, 19 nt, Homo sapiens
  misc_RNA (1)...(19): siRNA sense strand
cuuaauagaugaggaagaa

SEQ ID NO: 130044 - RNA, 19 nt, Homo sapiens
  misc_RNA (1)...(19): siRNA sense strand
caaugcagcuggacuuagu

SEQ ID NO: 130045 - RNA, 19 nt, Homo sapiens
  misc_RNA (1)...(19): siRNA sense strand
gagaaacugucuggcaaug

SEQ ID NO: 130046 - RNA, 19 nt, Homo sapiens
  misc_RNA (1)...(19): siRNA sense strand
aaucagaguuggcaguuga

SEQ ID NO: 130047 - RNA, 19 nt, Homo sapiens
  misc_RNA (1)...(19): siRNA sense strand
ccucggcgaugaauguuaa

SEQ ID NO: 130048 - RNA, 19 nt, Homo sapiens
  misc_RNA (1)...(19): siRNA sense strand
caagcuacuuaauagauga

SEQ ID NO: 130049 - RNA, 19 nt, Homo sapiens
  misc_RNA (1)...(19): siRNA sense strand
gaugacaaauuugaugugu

SEQ ID NO: 130050 - RNA, 19 nt, Homo sapiens
  misc_RNA (1)...(19): siRNA sense strand
ggagauaucaguggaugaa

SEQ ID NO: 130051 - RNA, 19 nt, Homo sapiens
  misc_RNA (1)...(19): siRNA sense strand
gaaaggccagguccgguuu

SEQ ID NO: 130052 - RNA, 19 nt, Homo sapiens
  misc_RNA (1)...(19): siRNA sense strand
gaaagcaagggcaacaaga

SEQ ID NO: 130053 - RNA, 19 nt, Homo sapiens
  misc_RNA (1)...(19): siRNA sense strand
gauaagaugacuccaaagu

SEQ ID NO: 130054 - RNA, 19 nt, Homo sapiens
  misc_RNA (1)...(19): siRNA sense strand
gaacuucgagugugauaag

SEQ ID NO: 130055 - RNA, 19 nt, Homo sapiens
  misc_RNA (1)...(19): siRNA sense strand
gcugagaaagcuagacuaa

SEQ ID NO: 130056 - RNA, 19 nt, Homo sapiens
  misc_RNA (1)...(19): siRNA sense strand
gaugggagaauauuaugaa

SEQ ID NO: 130057 - RNA, 19 nt, Homo sapiens
  misc_RNA (1)...(19): siRNA sense strand
ccuggaaaguauauuauug

SEQ ID NO: 130058 - RNA, 19 nt, Homo sapiens
  misc_RNA (1)...(19): siRNA sense strand
gcugggauuuaugaaguua

SEQ ID NO: 130059 - RNA, 19 nt, Homo sapiens
  misc_RNA (1)...(19): siRNA sense strand
guacccugcuuauaacaga

SEQ ID NO: 130060 - RNA, 19 nt, Homo sapiens
  misc_RNA (1)...(19): siRNA sense strand
uaacagacacugauggaau

SEQ ID NO: 130061 - RNA, 19 nt, Homo sapiens
  misc_RNA (1)...(19): siRNA sense strand
gagagaagccaaugucaag

SEQ ID NO: 130062 - RNA, 19 nt, Homo sapiens
  misc_RNA (1)...(19): siRNA sense strand
cguguccgcuguucuaauu

SEQ ID NO: 130063 - RNA, 19 nt, Homo sapiens
  misc_RNA (1)...(19): siRNA sense strand
agucaaagcugcuauugca

SEQ ID NO: 130064 - RNA, 19 nt, Homo sapiens
  misc_RNA (1)...(19): siRNA sense strand
uauuuacucuugcgaugua

SEQ ID NO: 130065 - RNA, 19 nt, Homo sapiens
  misc_RNA (1)...(19): siRNA sense strand
gaaggagaaggccaaagaa

SEQ ID NO: 130066 - RNA, 19 nt, Homo sapiens
  misc_RNA (1)...(19): siRNA sense strand
ggauggaagcaaccagaua

SEQ ID NO: 130067 - RNA, 19 nt, Homo sapiens
  misc_RNA (1)...(19): siRNA sense strand
caaggaaaguugugauucg

SEQ ID NO: 130068 - RNA, 19 nt, Homo sapiens
  misc_RNA (1)...(19): siRNA sense strand
aggaagaauugaaacguuu

SEQ ID NO: 130069 - RNA, 19 nt, Homo sapiens
  misc_RNA (1)...(19): siRNA sense strand
gauuggaagucgaaagcaa

SEQ ID NO: 130070 - RNA, 19 nt, Homo sapiens
  misc_RNA (1)...(19): siRNA sense strand
aagauuauguauccacuga

SEQ ID NO: 130071 - RNA, 19 nt, Homo sapiens
  misc_RNA (1)...(19): siRNA sense strand
ggaagaagaaagaauuaag

SEQ ID NO: 130072 - RNA, 19 nt, Homo sapiens
  misc_RNA (1)...(19): siRNA sense strand
gaagaagaaagaauuaagg

SEQ ID NO: 130073 - RNA, 19 nt, Homo sapiens
  misc_RNA (1)...(19): siRNA sense strand
gagauuaaugcaugugauu

SEQ ID NO: 130074 - RNA, 19 nt, Homo sapiens
  misc_RNA (1)...(19): siRNA sense strand
gauggagucauuucauuga

SEQ ID NO: 130075 - RNA, 19 nt, Homo sapiens
  misc_RNA (1)...(19): siRNA sense strand
gcaaauacgggcugguugu

SEQ ID NO: 130076 - RNA, 19 nt, Homo sapiens
  misc_RNA (1)...(19): siRNA sense strand
gaugauggaaguaugcaaa

SEQ ID NO: 130077 - RNA, 19 nt, Homo sapiens
  misc_RNA (1)...(19): siRNA sense strand
aaugcaagguggcaaauau

SEQ ID NO: 130078 - RNA, 19 nt, Homo sapiens
  misc_RNA (1)...(19): siRNA sense strand
gcaacuaaccauucuacug

SEQ ID NO: 130079 - RNA, 19 nt, Homo sapiens
  misc_RNA (1)...(19): siRNA sense strand
gaaggaaucuugacggaaa

SEQ ID NO: 130080 - RNA, 19 nt, Homo sapiens
  misc_RNA (1)...(19): siRNA sense strand
ggagcugggugcagaggua

SEQ ID NO: 130081 - RNA, 19 nt, Homo sapiens
  misc_RNA (1)...(19): siRNA sense strand
caucagaccggcagauuaa

SEQ ID NO: 130082 - RNA, 19 nt, Homo sapiens
  misc_RNA (1)...(19): siRNA sense strand
ggccagagacaaacaagua

SEQ ID NO: 130083 - RNA, 19 nt, Homo sapiens
  misc_RNA (1)...(19): siRNA sense strand
acaaugcuccugcuggaua

SEQ ID NO: 130084 - RNA, 19 nt, Homo sapiens
  misc_RNA (1)...(19): siRNA sense strand
uagauucccuacaggaguu

SEQ ID NO: 130085 - RNA, 19 nt, Homo sapiens
  misc_RNA (1)...(19): siRNA sense strand
ccaucagaccggcagauua

SEQ ID NO: 130086 - RNA, 19 nt, Homo sapiens
  misc_RNA (1)...(19): siRNA sense strand
acggauaucuaccgcugua

SEQ ID NO: 130087 - RNA, 19 nt, Homo sapiens
  misc_RNA (1)...(19): siRNA sense strand
caaugcuccugcuggauau

SEQ ID NO: 130088 - RNA, 19 nt, Homo sapiens
  misc_RNA (1)...(19): siRNA sense strand
ggcccuaaagcauuugaua

SEQ ID NO: 130089 - RNA, 19 nt, Homo sapiens
  misc_RNA (1)...(19): siRNA sense strand
gccugcaggugacagauug

SEQ ID NO: 130090 - RNA, 19 nt, Homo sapiens
  misc_RNA (1)...(19): siRNA sense strand
gaagaaggcaagggaagag

SEQ ID NO: 130091 - RNA, 19 nt, Homo sapiens
  misc_RNA (1)...(19): siRNA sense strand
uggagggacugguucuuca

SEQ ID NO: 130092 - RNA, 19 nt, Homo sapiens
  misc_RNA (1)...(19): siRNA sense strand
ccuaaagcauuugauacau

SEQ ID NO: 130093 - RNA, 19 nt, Homo sapiens
  misc_RNA (1)...(19): siRNA sense strand
ugaagaaggcaagggaaga

SEQ ID NO: 130094 - RNA, 19 nt, Homo sapiens
  misc_RNA (1)...(19): siRNA sense strand
ggauaucuaccgcuguaag

SEQ ID NO: 130095 - RNA, 19 nt, Homo sapiens
  misc_RNA (1)...(19): siRNA sense strand
cuaccaggaaggaaucuug

SEQ ID NO: 130096 - RNA, 19 nt, Homo sapiens
  misc_RNA (1)...(19): siRNA sense strand
ggaggccagagacaaacaa

SEQ ID NO: 130097 - RNA, 19 nt, Homo sapiens
  misc_RNA (1)...(19): siRNA sense strand
gcaagggaagaggccauga

SEQ ID NO: 130098 - RNA, 19 nt, Homo sapiens
  misc_RNA (1)...(19): siRNA sense strand
gauaucuaccgcuguaagg

SEQ ID NO: 130099 - RNA, 19 nt, Homo sapiens
  misc_RNA (1)...(19): siRNA sense strand
uugauacauuccuagauuc

SEQ ID NO: 130100 - RNA, 19 nt, Homo sapiens
  misc_RNA (1)...(19): siRNA sense strand
gaguuuaucugcuguauag

SEQ ID NO: 130101 - RNA, 19 nt, Homo sapiens
  misc_RNA (1)...(19): siRNA sense strand
gcgcaggugucuuccauuu

SEQ ID NO: 130102 - RNA, 19 nt, Homo sapiens
  misc_RNA (1)...(19): siRNA sense strand
gagacucuauuccgaugua

SEQ ID NO: 130103 - RNA, 19 nt, Homo sapiens
  misc_RNA (1)...(19): siRNA sense strand
gcaggugucuuccauuuac

SEQ ID NO: 130104 - RNA, 19 nt, Homo sapiens
  misc_RNA (1)...(19): siRNA sense strand
gggcaagggcgaaacuuaa

SEQ ID NO: 130105 - RNA, 19 nt, Homo sapiens
  misc_RNA (1)...(19): siRNA sense strand
gaaggcaggagacucuauu

SEQ ID NO: 130106 - RNA, 19 nt, Homo sapiens
  misc_RNA (1)...(19): siRNA sense strand
cuauuccgauguauaagaa

SEQ ID NO: 130107 - RNA, 19 nt, Homo sapiens
  misc_RNA (1)...(19): siRNA sense strand
gauauucugagugucauaa

SEQ ID NO: 130108 - RNA, 19 nt, Homo sapiens
  misc_RNA (1)...(19): siRNA sense strand
ggaguuuaucugcuguaua

SEQ ID NO: 130109 - RNA, 19 nt, Homo sapiens
  misc_RNA (1)...(19): siRNA sense strand
cuuaaccucucuccacaug

SEQ ID NO: 130110 - RNA, 19 nt, Homo sapiens
  misc_RNA (1)...(19): siRNA sense strand
ggaaggcaggagacucuau

SEQ ID NO: 130111 - RNA, 19 nt, Homo sapiens
  misc_RNA (1)...(19): siRNA sense strand
acucuauuccgauguauaa

SEQ ID NO: 130112 - RNA, 19 nt, Homo sapiens
  misc_RNA (1)...(19): siRNA sense strand
ugucuuccauuuacaccaa

SEQ ID NO: 130113 - RNA, 19 nt, Homo sapiens
  misc_RNA (1)...(19): siRNA sense strand
cgggcaagggcgaaacuua

SEQ ID NO: 130114 - RNA, 19 nt, Homo sapiens
  misc_RNA (1)...(19): siRNA sense strand
ccuacaggcccaaggauau

SEQ ID NO: 130115 - RNA, 19 nt, Homo sapiens
  misc_RNA (1)...(19): siRNA sense strand
uagcgcaggugucuuccau

SEQ ID NO: 130116 - RNA, 19 nt, Homo sapiens
  misc_RNA (1)...(19): siRNA sense strand
gccuacaacagcugcuaua

SEQ ID NO: 130117 - RNA, 19 nt, Homo sapiens
  misc_RNA (1)...(19): siRNA sense strand
ggauauucugagugucaua

SEQ ID NO: 130118 - RNA, 19 nt, Homo sapiens
  misc_RNA (1)...(19): siRNA sense strand
gauaugguguccgaaucca

SEQ ID NO: 130119 - RNA, 19 nt, Homo sapiens
  misc_RNA (1)...(19): siRNA sense strand
cuauagcgcaggugucuuc

SEQ ID NO: 130120 - RNA, 19 nt, Homo sapiens
  misc_RNA (1)...(19): siRNA sense strand
cagguggugucucgagaag

SEQ ID NO: 130121 - RNA, 19 nt, Homo sapiens
  misc_RNA (1)...(19): siRNA sense strand
ggcgaaacuuaaccucucu

SEQ ID NO: 130122 - RNA, 19 nt, Homo sapiens
  misc_RNA (1)...(19): siRNA sense strand
gacucuauuccgauguaua

SEQ ID NO: 130123 - RNA, 19 nt, Homo sapiens
  misc_RNA (1)...(19): siRNA sense strand
cgcaggugucuuccauuua

SEQ ID NO: 130124 - RNA, 19 nt, Homo sapiens
  misc_RNA (1)...(19): siRNA sense strand
gaguuuaucugcuguauag

SEQ ID NO: 130125 - RNA, 19 nt, Homo sapiens
  misc_RNA (1)...(19): siRNA sense strand
gcgcaggugucuuccauuu

SEQ ID NO: 130126 - RNA, 19 nt, Homo sapiens
  misc_RNA (1)...(19): siRNA sense strand
gagacucuauuccgaugua

SEQ ID NO: 130127 - RNA, 19 nt, Homo sapiens
  misc_RNA (1)...(19): siRNA sense strand
gcaggugucuuccauuuac

SEQ ID NO: 130128 - RNA, 19 nt, Homo sapiens
  misc_RNA (1)...(19): siRNA sense strand
gggcaagggcgaaacuuaa

SEQ ID NO: 130129 - RNA, 19 nt, Homo sapiens
  misc_RNA (1)...(19): siRNA sense strand
gaaggcaggagacucuauu

SEQ ID NO: 130130 - RNA, 19 nt, Homo sapiens
  misc_RNA (1)...(19): siRNA sense strand
cuauuccgauguauaagaa

SEQ ID NO: 130131 - RNA, 19 nt, Homo sapiens
  misc_RNA (1)...(19): siRNA sense strand
gauauucugagugucauaa

SEQ ID NO: 130132 - RNA, 19 nt, Homo sapiens
  misc_RNA (1)...(19): siRNA sense strand
ggaguuuaucugcuguaua

SEQ ID NO: 130133 - RNA, 19 nt, Homo sapiens
  misc_RNA (1)...(19): siRNA sense strand
cuuaaccucucuccacaug

SEQ ID NO: 130134 - RNA, 19 nt, Homo sapiens
  misc_RNA (1)...(19): siRNA sense strand
ggaaggcaggagacucuau

SEQ ID NO: 130135 - RNA, 19 nt, Homo sapiens
  misc_RNA (1)...(19): siRNA sense strand
acucuauuccgauguauaa

SEQ ID NO: 130136 - RNA, 19 nt, Homo sapiens
  misc_RNA (1)...(19): siRNA sense strand
ugucuuccauuuacaccaa

SEQ ID NO: 130137 - RNA, 19 nt, Homo sapiens
  misc_RNA (1)...(19): siRNA sense strand
cgggcaagggcgaaacuua

SEQ ID NO: 130138 - RNA, 19 nt, Homo sapiens
  misc_RNA (1)...(19): siRNA sense strand
ccuacaggcccaaggauau

SEQ ID NO: 130139 - RNA, 19 nt, Homo sapiens
  misc_RNA (1)...(19): siRNA sense strand
uagcgcaggugucuuccau

SEQ ID NO: 130140 - RNA, 19 nt, Homo sapiens
  misc_RNA (1)...(19): siRNA sense strand
gccuacaacagcugcuaua

SEQ ID NO: 130141 - RNA, 19 nt, Homo sapiens
  misc_RNA (1)...(19): siRNA sense strand
ggauauucugagugucaua

SEQ ID NO: 130142 - RNA, 19 nt, Homo sapiens
  misc_RNA (1)...(19): siRNA sense strand
gauaugguguccgaaucca

SEQ ID NO: 130143 - RNA, 19 nt, Homo sapiens
  misc_RNA (1)...(19): siRNA sense strand
cuauagcgcaggugucuuc

SEQ ID NO: 130144 - RNA, 19 nt, Homo sapiens
  misc_RNA (1)...(19): siRNA sense strand
cagguggugucucgagaag

SEQ ID NO: 130145 - RNA, 19 nt, Homo sapiens
  misc_RNA (1)...(19): siRNA sense strand
ggcgaaacuuaaccucucu

SEQ ID NO: 130146 - RNA, 19 nt, Homo sapiens
  misc_RNA (1)...(19): siRNA sense strand
gacucuauuccgauguaua

SEQ ID NO: 130147 - RNA, 19 nt, Homo sapiens
  misc_RNA (1)...(19): siRNA sense strand
cgcaggugucuuccauuua

SEQ ID NO: 130148 - RNA, 19 nt, Homo sapiens
  misc_RNA (1)...(19): siRNA sense strand
gaguuuaucugcuguauag

SEQ ID NO: 130149 - RNA, 19 nt, Homo sapiens
  misc_RNA (1)...(19): siRNA sense strand
gcgcaggugucuuccauuu

SEQ ID NO: 130150 - RNA, 19 nt, Homo sapiens
  misc_RNA (1)...(19): siRNA sense strand
gagacucuauuccgaugua

SEQ ID NO: 130151 - RNA, 19 nt, Homo sapiens
  misc_RNA (1)...(19): siRNA sense strand
gcaggugucuuccauuuac

SEQ ID NO: 130152 - RNA, 19 nt, Homo sapiens
  misc_RNA (1)...(19): siRNA sense strand
gggcaagggcgaaacuuaa

SEQ ID NO: 130153 - RNA, 19 nt, Homo sapiens
  misc_RNA (1)...(19): siRNA sense strand
gaaggcaggagacucuauu

SEQ ID NO: 130154 - RNA, 19 nt, Homo sapiens
  misc_RNA (1)...(19): siRNA sense strand
cuauuccgauguauaagaa

SEQ ID NO: 130155 - RNA, 19 nt, Homo sapiens
  misc_RNA (1)...(19): siRNA sense strand
gauauucugagugucauaa

SEQ ID NO: 130156 - RNA, 19 nt, Homo sapiens
  misc_RNA (1)...(19): siRNA sense strand
ggaguuuaucugcuguaua

SEQ ID NO: 130157 - RNA, 19 nt, Homo sapiens
  misc_RNA (1)...(19): siRNA sense strand
cuuaaccucucuccacaug

SEQ ID NO: 130158 - RNA, 19 nt, Homo sapiens
  misc_RNA (1)...(19): siRNA sense strand
ggaaggcaggagacucuau

SEQ ID NO: 130159 - RNA, 19 nt, Homo sapiens
  misc_RNA (1)...(19): siRNA sense strand
acucuauuccgauguauaa

SEQ ID NO: 130160 - RNA, 19 nt, Homo sapiens
  misc_RNA (1)...(19): siRNA sense strand
ugucuuccauuuacaccaa

SEQ ID NO: 130161 - RNA, 19 nt, Homo sapiens
  misc_RNA (1)...(19): siRNA sense strand
cgggcaagggcgaaacuua

SEQ ID NO: 130162 - RNA, 19 nt, Homo sapiens
  misc_RNA (1)...(19): siRNA sense strand
ccuacaggcccaaggauau

SEQ ID NO: 130163 - RNA, 19 nt, Homo sapiens
  misc_RNA (1)...(19): siRNA sense strand
uagcgcaggugucuuccau

SEQ ID NO: 130164 - RNA, 19 nt, Homo sapiens
  misc_RNA (1)...(19): siRNA sense strand
gccuacaacagcugcuaua

SEQ ID NO: 130165 - RNA, 19 nt, Homo sapiens
  misc_RNA (1)...(19): siRNA sense strand
ggauauucugagugucaua

SEQ ID NO: 130166 - RNA, 19 nt, Homo sapiens
  misc_RNA (1)...(19): siRNA sense strand
gauaugguguccgaaucca

SEQ ID NO: 130167 - RNA, 19 nt, Homo sapiens
  misc_RNA (1)...(19): siRNA sense strand
cuauagcgcaggugucuuc

SEQ ID NO: 130168 - RNA, 19 nt, Homo sapiens
  misc_RNA (1)...(19): siRNA sense strand
cagguggugucucgagaag

SEQ ID NO: 130169 - RNA, 19 nt, Homo sapiens
  misc_RNA (1)...(19): siRNA sense strand
ggcgaaacuuaaccucucu

SEQ ID NO: 130170 - RNA, 19 nt, Homo sapiens
  misc_RNA (1)...(19): siRNA sense strand
gacucuauuccgauguaua

SEQ ID NO: 130171 - RNA, 19 nt, Homo sapiens
  misc_RNA (1)...(19): siRNA sense strand
cgcaggugucuuccauuua

SEQ ID NO: 130172 - RNA, 19 nt, Homo sapiens
  misc_RNA (1)...(19): siRNA sense strand
gaguuuaucugcuguauag

SEQ ID NO: 130173 - RNA, 19 nt, Homo sapiens
  misc_RNA (1)...(19): siRNA sense strand
gcgcaggugucuuccauuu

SEQ ID NO: 130174 - RNA, 19 nt, Homo sapiens
  misc_RNA (1)...(19): siRNA sense strand
gagacucuauuccgaugua

SEQ ID NO: 130175 - RNA, 19 nt, Homo sapiens
  misc_RNA (1)...(19): siRNA sense strand
gcaggugucuuccauuuac

SEQ ID NO: 130176 - RNA, 19 nt, Homo sapiens
  misc_RNA (1)...(19): siRNA sense strand
gggcaagggcgaaacuuaa

SEQ ID NO: 130177 - RNA, 19 nt, Homo sapiens
  misc_RNA (1)...(19): siRNA sense strand
gaaggcaggagacucuauu

SEQ ID NO: 130178 - RNA, 19 nt, Homo sapiens
  misc_RNA (1)...(19): siRNA sense strand
cuauuccgauguauaagaa

SEQ ID NO: 130179 - RNA, 19 nt, Homo sapiens
  misc_RNA (1)...(19): siRNA sense strand
gauauucugagugucauaa

SEQ ID NO: 130180 - RNA, 19 nt, Homo sapiens
  misc_RNA (1)...(19): siRNA sense strand
ggaguuuaucugcuguaua

SEQ ID NO: 130181 - RNA, 19 nt, Homo sapiens
  misc_RNA (1)...(19): siRNA sense strand
cuuaaccucucuccacaug

SEQ ID NO: 130182 - RNA, 19 nt, Homo sapiens
  misc_RNA (1)...(19): siRNA sense strand
ggaaggcaggagacucuau

SEQ ID NO: 130183 - RNA, 19 nt, Homo sapiens
  misc_RNA (1)...(19): siRNA sense strand
acucuauuccgauguauaa

SEQ ID NO: 130184 - RNA, 19 nt, Homo sapiens
  misc_RNA (1)...(19): siRNA sense strand
ugucuuccauuuacaccaa

SEQ ID NO: 130185 - RNA, 19 nt, Homo sapiens
  misc_RNA (1)...(19): siRNA sense strand
cgggcaagggcgaaacuua

SEQ ID NO: 130186 - RNA, 19 nt, Homo sapiens
  misc_RNA (1)...(19): siRNA sense strand
ccuacaggcccaaggauau

SEQ ID NO: 130187 - RNA, 19 nt, Homo sapiens
  misc_RNA (1)...(19): siRNA sense strand
uagcgcaggugucuuccau

SEQ ID NO: 130188 - RNA, 19 nt, Homo sapiens
  misc_RNA (1)...(19): siRNA sense strand
gccuacaacagcugcuaua

SEQ ID NO: 130189 - RNA, 19 nt, Homo sapiens
  misc_RNA (1)...(19): siRNA sense strand
ggauauucugagugucaua

SEQ ID NO: 130190 - RNA, 19 nt, Homo sapiens
  misc_RNA (1)...(19): siRNA sense strand
gauaugguguccgaaucca

SEQ ID NO: 130191 - RNA, 19 nt, Homo sapiens
  misc_RNA (1)...(19): siRNA sense strand
cuauagcgcaggugucuuc

SEQ ID NO: 130192 - RNA, 19 nt, Homo sapiens
  misc_RNA (1)...(19): siRNA sense strand
cagguggugucucgagaag

SEQ ID NO: 130193 - RNA, 19 nt, Homo sapiens
  misc_RNA (1)...(19): siRNA sense strand
ggcgaaacuuaaccucucu

SEQ ID NO: 130194 - RNA, 19 nt, Homo sapiens
  misc_RNA (1)...(19): siRNA sense strand
gacucuauuccgauguaua

SEQ ID NO: 130195 - RNA, 19 nt, Homo sapiens
  misc_RNA (1)...(19): siRNA sense strand
cgcaggugucuuccauuua

SEQ ID NO: 130196 - RNA, 19 nt, Homo sapiens
  misc_RNA (1)...(19): siRNA sense strand
gagaguagcagcucacaua

SEQ ID NO: 130197 - RNA, 19 nt, Homo sapiens
  misc_RNA (1)...(19): siRNA sense strand
uggcauugcuuguuucuua

SEQ ID NO: 130198 - RNA, 19 nt, Homo sapiens
  misc_RNA (1)...(19): siRNA sense strand
acaaacaaaugguccaaua

SEQ ID NO: 130199 - RNA, 19 nt, Homo sapiens
  misc_RNA (1)...(19): siRNA sense strand
caaaugagcacuugauaga

SEQ ID NO: 130200 - RNA, 19 nt, Homo sapiens
  misc_RNA (1)...(19): siRNA sense strand
ccaaacauacuuucgauuu

SEQ ID NO: 130201 - RNA, 19 nt, Homo sapiens
  misc_RNA (1)...(19): siRNA sense strand
agaaauaguuguuggucua

SEQ ID NO: 130202 - RNA, 19 nt, Homo sapiens
  misc_RNA (1)...(19): siRNA sense strand
uaacuuacguguacuuuac

SEQ ID NO: 130203 - RNA, 19 nt, Homo sapiens
  misc_RNA (1)...(19): siRNA sense strand
gacccuauauuguugauga

SEQ ID NO: 130204 - RNA, 19 nt, Homo sapiens
  misc_RNA (1)...(19): siRNA sense strand
ccaacgagcugaagcagau

SEQ ID NO: 130205 - RNA, 19 nt, Homo sapiens
  misc_RNA (1)...(19): siRNA sense strand
aaaguggcauugcuuguuu

SEQ ID NO: 130206 - RNA, 19 nt, Homo sapiens
  misc_RNA (1)...(19): siRNA sense strand
ggaagaagcaacacauugu

SEQ ID NO: 130207 - RNA, 19 nt, Homo sapiens
  misc_RNA (1)...(19): siRNA sense strand
caaacauacuuucgauuuc

SEQ ID NO: 130208 - RNA, 19 nt, Homo sapiens
  misc_RNA (1)...(19): siRNA sense strand
gucuaaagaugcagaauau

SEQ ID NO: 130209 - RNA, 19 nt, Homo sapiens
  misc_RNA (1)...(19): siRNA sense strand
caaguuauccugacccuau

SEQ ID NO: 130210 - RNA, 19 nt, Homo sapiens
  misc_RNA (1)...(19): siRNA sense strand
ggucuaaagaugcagaaua

SEQ ID NO: 130211 - RNA, 19 nt, Homo sapiens
  misc_RNA (1)...(19): siRNA sense strand
cuacaucuauucccaaaca

SEQ ID NO: 130212 - RNA, 19 nt, Homo sapiens
  misc_RNA (1)...(19): siRNA sense strand
gaaaagugcuagaaauagu

SEQ ID NO: 130213 - RNA, 19 nt, Homo sapiens
  misc_RNA (1)...(19): siRNA sense strand
ugaagcagaugcaggacaa

SEQ ID NO: 130214 - RNA, 19 nt, Homo sapiens
  misc_RNA (1)...(19): siRNA sense strand
gaaauaguuguuggucuaa

SEQ ID NO: 130215 - RNA, 19 nt, Homo sapiens
  misc_RNA (1)...(19): siRNA sense strand
acaaagaacgacaaacaaa

SEQ ID NO: 130216 - RNA, 19 nt, Homo sapiens
  misc_RNA (1)...(19): siRNA sense strand
caaagaacgacaaacaaau

SEQ ID NO: 130217 - RNA, 19 nt, Homo sapiens
  misc_RNA (1)...(19): siRNA sense strand
ggcauugcuuguuucuuaa

SEQ ID NO: 130218 - RNA, 19 nt, Homo sapiens
  misc_RNA (1)...(19): siRNA sense strand
acacaaagaacgacaaaca

SEQ ID NO: 130219 - RNA, 19 nt, Homo sapiens
  misc_RNA (1)...(19): siRNA sense strand
gaugaaaagugcuagaaau

SEQ ID NO: 130220 - RNA, 19 nt, Homo sapiens
  misc_RNA (1)...(19): siRNA sense strand
caaacaaaugguccaauau

SEQ ID NO: 130221 - RNA, 19 nt, Homo sapiens
  misc_RNA (1)...(19): siRNA sense strand
aaagaacgacaaacaaaug

SEQ ID NO: 130222 - RNA, 19 nt, Homo sapiens
  misc_RNA (1)...(19): siRNA sense strand
ucuccaaacuccaagaaug

SEQ ID NO: 130223 - RNA, 19 nt, Homo sapiens
  misc_RNA (1)...(19): siRNA sense strand
uaacaaaugagcacuugau

SEQ ID NO: 130224 - RNA, 19 nt, Homo sapiens
  misc_RNA (1)...(19): siRNA sense strand
gaggaagaagcaacacauu

SEQ ID NO: 130225 - RNA, 19 nt, Homo sapiens
  misc_RNA (1)...(19): siRNA sense strand
gggaauauuugagcuuaag

SEQ ID NO: 130226 - RNA, 19 nt, Homo sapiens
  misc_RNA (1)...(19): siRNA sense strand
aaugagcacuugauagaca

SEQ ID NO: 130227 - RNA, 19 nt, Homo sapiens
  misc_RNA (1)...(19): siRNA sense strand
gcaacuccgucagcucguu

SEQ ID NO: 130228 - RNA, 19 nt, Homo sapiens
  misc_RNA (1)...(19): siRNA sense strand
aaaauaaacuccugggaau

SEQ ID NO: 130229 - RNA, 19 nt, Homo sapiens
  misc_RNA (1)...(19): siRNA sense strand
caacuccgucagcucguua

SEQ ID NO: 130230 - RNA, 19 nt, Homo sapiens
  misc_RNA (1)...(19): siRNA sense strand
ugcagaauauggacucuau

SEQ ID NO: 130231 - RNA, 19 nt, Homo sapiens
  misc_RNA (1)...(19): siRNA sense strand
uaaagaugcagaauaugga

SEQ ID NO: 130232 - RNA, 19 nt, Homo sapiens
  misc_RNA (1)...(19): siRNA sense strand
gaagaagcaacacauuguc

SEQ ID NO: 130233 - RNA, 19 nt, Homo sapiens
  misc_RNA (1)...(19): siRNA sense strand
uccgucagcucguuagaaa

SEQ ID NO: 130234 - RNA, 19 nt, Homo sapiens
  misc_RNA (1)...(19): siRNA sense strand
gaauauuugagcuuaagga

SEQ ID NO: 130235 - RNA, 19 nt, Homo sapiens
  misc_RNA (1)...(19): siRNA sense strand
gaaagaugauuuugagaac

SEQ ID NO: 130236 - RNA, 19 nt, Homo sapiens
  misc_RNA (1)...(19): siRNA sense strand
uguaacaaaugagcacuug

SEQ ID NO: 130237 - RNA, 19 nt, Homo sapiens
  misc_RNA (1)...(19): siRNA sense strand
aaacacaaagaacgacaaa

SEQ ID NO: 130238 - RNA, 19 nt, Homo sapiens
  misc_RNA (1)...(19): siRNA sense strand
cgucagcucguuagaaaga

SEQ ID NO: 130239 - RNA, 19 nt, Homo sapiens
  misc_RNA (1)...(19): siRNA sense strand
gcaggacaaguacuccaaa

SEQ ID NO: 130240 - RNA, 19 nt, Homo sapiens
  misc_RNA (1)...(19): siRNA sense strand
cuaaagaugcagaauaugg

SEQ ID NO: 130241 - RNA, 19 nt, Homo sapiens
  misc_RNA (1)...(19): siRNA sense strand
aguagcagcucacauaacu

SEQ ID NO: 130242 - RNA, 19 nt, Homo sapiens
  misc_RNA (1)...(19): siRNA sense strand
caaggagugggcauucauu

SEQ ID NO: 130243 - RNA, 19 nt, Homo sapiens
  misc_RNA (1)...(19): siRNA sense strand
ccaaugacgaagagaguau

SEQ ID NO: 130244 - RNA, 19 nt, Homo sapiens
  misc_RNA (1)...(19): siRNA sense strand
cacauugucuucuccaaac

SEQ ID NO: 130245 - RNA, 19 nt, Homo sapiens
  misc_RNA (1)...(19): siRNA sense strand
gcauugcuuguuucuuaaa

SEQ ID NO: 130246 - RNA, 19 nt, Homo sapiens
  misc_RNA (1)...(19): siRNA sense strand
aagaagaugacaguuauug

SEQ ID NO: 130247 - RNA, 19 nt, Homo sapiens
  misc_RNA (1)...(19): siRNA sense strand
gcagaugcaggacaaguac

SEQ ID NO: 130248 - RNA, 19 nt, Homo sapiens
  misc_RNA (1)...(19): siRNA sense strand
gacaaguacuccaaaagug

SEQ ID NO: 130249 - RNA, 19 nt, Homo sapiens
  misc_RNA (1)...(19): siRNA sense strand
cacaaagaacgacaaacaa

SEQ ID NO: 130250 - RNA, 19 nt, Homo sapiens
  misc_RNA (1)...(19): siRNA sense strand
aauaaacuccugggaauca

SEQ ID NO: 130251 - RNA, 19 nt, Homo sapiens
  misc_RNA (1)...(19): siRNA sense strand
aaguuauccugacccuaua

SEQ ID NO: 130252 - RNA, 19 nt, Homo sapiens
  misc_RNA (1)...(19): siRNA sense strand
uacuacaucuauucccaaa

SEQ ID NO: 130253 - RNA, 19 nt, Homo sapiens
  misc_RNA (1)...(19): siRNA sense strand
ggacaaguacuccaaaagu

SEQ ID NO: 130254 - RNA, 19 nt, Homo sapiens
  misc_RNA (1)...(19): siRNA sense strand
ggacucuauuccaucuauc

SEQ ID NO: 130255 - RNA, 19 nt, Homo sapiens
  misc_RNA (1)...(19): siRNA sense strand
ccaaacuccaagaaugaaa

SEQ ID NO: 130256 - RNA, 19 nt, Homo sapiens
  misc_RNA (1)...(19): siRNA sense strand
ucuguguggcuguaacuua

SEQ ID NO: 130257 - RNA, 19 nt, Homo sapiens
  misc_RNA (1)...(19): siRNA sense strand
gcacuugaggaauggugaa

SEQ ID NO: 130258 - RNA, 19 nt, Homo sapiens
  misc_RNA (1)...(19): siRNA sense strand
ggcauucauuccugagcaa

SEQ ID NO: 130259 - RNA, 19 nt, Homo sapiens
  misc_RNA (1)...(19): siRNA sense strand
acacauugucuucuccaaa

SEQ ID NO: 130260 - RNA, 19 nt, Homo sapiens
  misc_RNA (1)...(19): siRNA sense strand
aacaaaugagcacuugaua

SEQ ID NO: 130261 - RNA, 19 nt, Homo sapiens
  misc_RNA (1)...(19): siRNA sense strand
aauaguuguuggucuaaag

SEQ ID NO: 130262 - RNA, 19 nt, Homo sapiens
  misc_RNA (1)...(19): siRNA sense strand
agaguagcagcucacauaa

SEQ ID NO: 130263 - RNA, 19 nt, Homo sapiens
  misc_RNA (1)...(19): siRNA sense strand
acaaaugagcacuugauag

SEQ ID NO: 130264 - RNA, 19 nt, Homo sapiens
  misc_RNA (1)...(19): siRNA sense strand
ucccaaacauacuuucgau

SEQ ID NO: 130265 - RNA, 19 nt, Homo sapiens
  misc_RNA (1)...(19): siRNA sense strand
ucagcucguuagaaagaug

SEQ ID NO: 130266 - RNA, 19 nt, Homo sapiens
  misc_RNA (1)...(19): siRNA sense strand
caacuugcacuugaggaau

SEQ ID NO: 130267 - RNA, 19 nt, Homo sapiens
  misc_RNA (1)...(19): siRNA sense strand
cuccaaacuccaagaauga

SEQ ID NO: 130268 - RNA, 19 nt, Homo sapiens
  misc_RNA (1)...(19): siRNA sense strand
aggaagaagcaacacauug

SEQ ID NO: 130269 - RNA, 19 nt, Homo sapiens
  misc_RNA (1)...(19): siRNA sense strand
acaucuauucccaaacaua

SEQ ID NO: 130270 - RNA, 19 nt, Homo sapiens
  misc_RNA (1)...(19): siRNA sense strand
uauccugacccuauauugu

SEQ ID NO: 130271 - RNA, 19 nt, Homo sapiens
  misc_RNA (1)...(19): siRNA sense strand
aaccauuucuacaguucaa

SEQ ID NO: 130272 - RNA, 19 nt, Homo sapiens
  misc_RNA (1)...(19): siRNA sense strand
aaagugcuagaaauaguug

SEQ ID NO: 130273 - RNA, 19 nt, Homo sapiens
  misc_RNA (1)...(19): siRNA sense strand
caucuauucccaaacauac

SEQ ID NO: 130274 - RNA, 19 nt, Homo sapiens
  misc_RNA (1)...(19): siRNA sense strand
guaacaaaugagcacuuga

SEQ ID NO: 130275 - RNA, 19 nt, Homo sapiens
  misc_RNA (1)...(19): siRNA sense strand
cuugaggaauggugaacug

SEQ ID NO: 130276 - RNA, 19 nt, Homo sapiens
  misc_RNA (1)...(19): siRNA sense strand
gaacucggccuucgguuuc

SEQ ID NO: 130277 - RNA, 19 nt, Homo sapiens
  misc_RNA (1)...(19): siRNA sense strand
ggccaaggcuggagucuac

SEQ ID NO: 130278 - RNA, 19 nt, Homo sapiens
  misc_RNA (1)...(19): siRNA sense strand
ggaacucggccuucgguuu

SEQ ID NO: 130279 - RNA, 19 nt, Homo sapiens
  misc_RNA (1)...(19): siRNA sense strand
agucuacuaugucuucuuu

SEQ ID NO: 130280 - RNA, 19 nt, Homo sapiens
  misc_RNA (1)...(19): siRNA sense strand
acaaagaggacacgaagga

SEQ ID NO: 130281 - RNA, 19 nt, Homo sapiens
  misc_RNA (1)...(19): siRNA sense strand
gcguccaucuucacacuga

SEQ ID NO: 130282 - RNA, 19 nt, Homo sapiens
  misc_RNA (1)...(19): siRNA sense strand
ucuacuaugucuucuuuca

SEQ ID NO: 130283 - RNA, 19 nt, Homo sapiens
  misc_RNA (1)...(19): siRNA sense strand
gcuggagucuacuaugucu

SEQ ID NO: 130284 - RNA, 19 nt, Homo sapiens
  misc_RNA (1)...(19): siRNA sense strand
gggcucaggcuccguuuca

SEQ ID NO: 130285 - RNA, 19 nt, Homo sapiens
  misc_RNA (1)...(19): siRNA sense strand
aggcuggagucuacuaugu

SEQ ID NO: 130286 - RNA, 19 nt, Homo sapiens
  misc_RNA (1)...(19): siRNA sense strand
gggcguccaucuucacacu

SEQ ID NO: 130287 - RNA, 19 nt, Homo sapiens
  misc_RNA (1)...(19): siRNA sense strand
gcuacaaagaggacacgaa

SEQ ID NO: 130288 - RNA, 19 nt, Homo sapiens
  misc_RNA (1)...(19): siRNA sense strand
uaugucuucuuucaacuag

SEQ ID NO: 130289 - RNA, 19 nt, Homo sapiens
  misc_RNA (1)...(19): siRNA sense strand
ccaaggcuggagucuacua

SEQ ID NO: 130290 - RNA, 19 nt, Homo sapiens
  misc_RNA (1)...(19): siRNA sense strand
uacuaugucuucuuucaac

SEQ ID NO: 130291 - RNA, 19 nt, Homo sapiens
  misc_RNA (1)...(19): siRNA sense strand
auacgccucugacgcuuca

SEQ ID NO: 130292 - RNA, 19 nt, Homo sapiens
  misc_RNA (1)...(19): siRNA sense strand
ggaaagcccuuaucacguu

SEQ ID NO: 130293 - RNA, 19 nt, Homo sapiens
  misc_RNA (1)...(19): siRNA sense strand
cagaauagcagcaguaaua

SEQ ID NO: 130294 - RNA, 19 nt, Homo sapiens
  misc_RNA (1)...(19): siRNA sense strand
guagagaccuggacugaga

SEQ ID NO: 130295 - RNA, 19 nt, Homo sapiens
  misc_RNA (1)...(19): siRNA sense strand
gaucggaagugccuacaaa

SEQ ID NO: 130296 - RNA, 19 nt, Homo sapiens
  misc_RNA (1)...(19): siRNA sense strand
aacaauaccucaugucuuu

SEQ ID NO: 130297 - RNA, 19 nt, Homo sapiens
  misc_RNA (1)...(19): siRNA sense strand
ggauaugcaugcaaucaaa

SEQ ID NO: 130298 - RNA, 19 nt, Homo sapiens
  misc_RNA (1)...(19): siRNA sense strand
ggaagugccuacaaauuca

SEQ ID NO: 130299 - RNA, 19 nt, Homo sapiens
  misc_RNA (1)...(19): siRNA sense strand
gacaaguucugcuaugaaa

SEQ ID NO: 130300 - RNA, 19 nt, Homo sapiens
  misc_RNA (1)...(19): siRNA sense strand
ugaagaaucucacuaugga

SEQ ID NO: 130301 - RNA, 19 nt, Homo sapiens
  misc_RNA (1)...(19): siRNA sense strand
ggaaaccacaguacucuaa

SEQ ID NO: 130302 - RNA, 19 nt, Homo sapiens
  misc_RNA (1)...(19): siRNA sense strand
caaauucaagcccuaaaua

SEQ ID NO: 130303 - RNA, 19 nt, Homo sapiens
  misc_RNA (1)...(19): siRNA sense strand
ggauuaugcuguaagaaau

SEQ ID NO: 130304 - RNA, 19 nt, Homo sapiens
  misc_RNA (1)...(19): siRNA sense strand
ggacaguauucuaagcaaa

SEQ ID NO: 130305 - RNA, 19 nt, Homo sapiens
  misc_RNA (1)...(19): siRNA sense strand
gaacgagugugauauuacu

SEQ ID NO: 130306 - RNA, 19 nt, Homo sapiens
  misc_RNA (1)...(19): siRNA sense strand
ggcaguggcacaaguauua

SEQ ID NO: 130307 - RNA, 19 nt, Homo sapiens
  misc_RNA (1)...(19): siRNA sense strand
gcacauaccaacaacuuug

SEQ ID NO: 130308 - RNA, 19 nt, Homo sapiens
  misc_RNA (1)...(19): siRNA sense strand
cacuagagcugguucauga

SEQ ID NO: 130309 - RNA, 19 nt, Homo sapiens
  misc_RNA (1)...(19): siRNA sense strand
ggaaugcuauggauuaugc

SEQ ID NO: 130310 - RNA, 19 nt, Homo sapiens
  misc_RNA (1)...(19): siRNA sense strand
caccaaaucuucauaagca

SEQ ID NO: 130311 - RNA, 19 nt, Homo sapiens
  misc_RNA (1)...(19): siRNA sense strand
caggcaagcuuccagauug

SEQ ID NO: 130312 - RNA, 19 nt, Homo sapiens
  misc_RNA (1)...(19): siRNA sense strand
gaagccaccugcauuugug

SEQ ID NO: 130313 - RNA, 19 nt, Homo sapiens
  misc_RNA (1)...(19): siRNA sense strand
gugaacgagugugauauua

SEQ ID NO: 130314 - RNA, 19 nt, Homo sapiens
  misc_RNA (1)...(19): siRNA sense strand
aagcaucgcucuucucaug

SEQ ID NO: 130315 - RNA, 19 nt, Homo sapiens
  misc_RNA (1)...(19): siRNA sense strand
gaagcagucugaguuacuu

SEQ ID NO: 130316 - RNA, 19 nt, Homo sapiens
  misc_RNA (1)...(19): siRNA sense strand
caacagaauagcagcagua

SEQ ID NO: 130317 - RNA, 19 nt, Homo sapiens
  misc_RNA (1)...(19): siRNA sense strand
gaguuggugugaaugagua

SEQ ID NO: 130318 - RNA, 19 nt, Homo sapiens
  misc_RNA (1)...(19): siRNA sense strand
caacuuccuucuaccauca

SEQ ID NO: 130319 - RNA, 19 nt, Homo sapiens
  misc_RNA (1)...(19): siRNA sense strand
gaaaucacacugccuucaa

SEQ ID NO: 130320 - RNA, 19 nt, Homo sapiens
  misc_RNA (1)...(19): siRNA sense strand
gcccgucuaugauguguuu

SEQ ID NO: 130321 - RNA, 19 nt, Homo sapiens
  misc_RNA (1)...(19): siRNA sense strand
gaccacauauaauccagaa

SEQ ID NO: 130322 - RNA, 19 nt, Homo sapiens
  misc_RNA (1)...(19): siRNA sense strand
uaauaaggcuguccaucug

SEQ ID NO: 130323 - RNA, 19 nt, Homo sapiens
  misc_RNA (1)...(19): siRNA sense strand
gcagcaguaauaucaguua

SEQ ID NO: 130324 - RNA, 19 nt, Homo sapiens
  misc_RNA (1)...(19): siRNA sense strand
gggcccugcuguaacaaua

SEQ ID NO: 130325 - RNA, 19 nt, Homo sapiens
  misc_RNA (1)...(19): siRNA sense strand
ggagaccgguggauucagu

SEQ ID NO: 130326 - RNA, 19 nt, Homo sapiens
  misc_RNA (1)...(19): siRNA sense strand
gcacaggucgaccacauau

SEQ ID NO: 130327 - RNA, 19 nt, Homo sapiens
  misc_RNA (1)...(19): siRNA sense strand
ccaccaaucucauaauagg

SEQ ID NO: 130328 - RNA, 19 nt, Homo sapiens
  misc_RNA (1)...(19): siRNA sense strand
gagcagcuguccacucgau

SEQ ID NO: 130329 - RNA, 19 nt, Homo sapiens
  misc_RNA (1)...(19): siRNA sense strand
uguguucuguggauucuua

SEQ ID NO: 130330 - RNA, 19 nt, Homo sapiens
  misc_RNA (1)...(19): siRNA sense strand
gcagaaagccaaaauguga

SEQ ID NO: 130331 - RNA, 19 nt, Homo sapiens
  misc_RNA (1)...(19): siRNA sense strand
uauaagagaagcagucuga

SEQ ID NO: 130332 - RNA, 19 nt, Homo sapiens
  misc_RNA (1)...(19): siRNA sense strand
gcuccaaauucauucuuga

SEQ ID NO: 130333 - RNA, 19 nt, Homo sapiens
  misc_RNA (1)...(19): siRNA sense strand
gaaucucacuauggaaaga

SEQ ID NO: 130334 - RNA, 19 nt, Homo sapiens
  misc_RNA (1)...(19): siRNA sense strand
ggaugugggcuauguagaa

SEQ ID NO: 130335 - RNA, 19 nt, Homo sapiens
  misc_RNA (1)...(19): siRNA sense strand
caaaugaagaaucucacua

SEQ ID NO: 130336 - RNA, 19 nt, Homo sapiens
  misc_RNA (1)...(19): siRNA sense strand
caacaggccaacaaagcua

SEQ ID NO: 130337 - RNA, 19 nt, Homo sapiens
  misc_RNA (1)...(19): siRNA sense strand
acaggucgaccacauauaa

SEQ ID NO: 130338 - RNA, 19 nt, Homo sapiens
  misc_RNA (1)...(19): siRNA sense strand
ugccaccaaucucauaaua

SEQ ID NO: 130339 - RNA, 19 nt, Homo sapiens
  misc_RNA (1)...(19): siRNA sense strand
ccaccugcauuugugauuu

SEQ ID NO: 130340 - RNA, 19 nt, Homo sapiens
  misc_RNA (1)...(19): siRNA sense strand
ggugagaucauuccaacuu

SEQ ID NO: 130341 - RNA, 19 nt, Homo sapiens
  misc_RNA (1)...(19): siRNA sense strand
cuaagcaaaugaagaaucu

SEQ ID NO: 130342 - RNA, 19 nt, Homo sapiens
  misc_RNA (1)...(19): siRNA sense strand
gaauuacagugguugaaaa

SEQ ID NO: 130343 - RNA, 19 nt, Homo sapiens
  misc_RNA (1)...(19): siRNA sense strand
ccauguggcccgucuauga

SEQ ID NO: 130344 - RNA, 19 nt, Homo sapiens
  misc_RNA (1)...(19): siRNA sense strand
gaauccaucacgugguaua

SEQ ID NO: 130345 - RNA, 19 nt, Homo sapiens
  misc_RNA (1)...(19): siRNA sense strand
gaaggaagagagcagugaa

SEQ ID NO: 130346 - RNA, 19 nt, Homo sapiens
  misc_RNA (1)...(19): siRNA sense strand
uccaucacgugguauauuu

SEQ ID NO: 130347 - RNA, 19 nt, Homo sapiens
  misc_RNA (1)...(19): siRNA sense strand
agacggauaugcaugcaau

SEQ ID NO: 130348 - RNA, 19 nt, Homo sapiens
  misc_RNA (1)...(19): siRNA sense strand
gcugugaacgagugugaua

SEQ ID NO: 130349 - RNA, 19 nt, Homo sapiens
  misc_RNA (1)...(19): siRNA sense strand
gaagagagcagugaaucca

SEQ ID NO: 130350 - RNA, 19 nt, Homo sapiens
  misc_RNA (1)...(19): siRNA sense strand
aagagaagguucgauccua

SEQ ID NO: 130351 - RNA, 19 nt, Homo sapiens
  misc_RNA (1)...(19): siRNA sense strand
ggaaugaaacugcagaaaa

SEQ ID NO: 130352 - RNA, 19 nt, Homo sapiens
  misc_RNA (1)...(19): siRNA sense strand
caagaggaguuggugugaa

SEQ ID NO: 130353 - RNA, 19 nt, Homo sapiens
  misc_RNA (1)...(19): siRNA sense strand
gcagggacagauugcagua

SEQ ID NO: 130354 - RNA, 19 nt, Homo sapiens
  misc_RNA (1)...(19): siRNA sense strand
uguggaaugcuauggauua

SEQ ID NO: 130355 - RNA, 19 nt, Homo sapiens
  misc_RNA (1)...(19): siRNA sense strand
cagaugaagacaauacauu

SEQ ID NO: 130356 - RNA, 19 nt, Homo sapiens
  misc_RNA (1)...(19): siRNA sense strand
gaccagagacaaccagugu

SEQ ID NO: 130357 - RNA, 19 nt, Homo sapiens
  misc_RNA (1)...(19): siRNA sense strand
ggucagugcccaccaaauc

SEQ ID NO: 130358 - RNA, 19 nt, Homo sapiens
  misc_RNA (1)...(19): siRNA sense strand
ggagguggagccugccuuu

SEQ ID NO: 130359 - RNA, 19 nt, Homo sapiens
  misc_RNA (1)...(19): siRNA sense strand
agagaagcagucugaguua

SEQ ID NO: 130360 - RNA, 19 nt, Homo sapiens
  misc_RNA (1)...(19): siRNA sense strand
cgugguauauuugaagaaa

SEQ ID NO: 130361 - RNA, 19 nt, Homo sapiens
  misc_RNA (1)...(19): siRNA sense strand
gaaugaguauggucuucca

SEQ ID NO: 130362 - RNA, 19 nt, Homo sapiens
  misc_RNA (1)...(19): siRNA sense strand
aagaggaguuggugugaau

SEQ ID NO: 130363 - RNA, 19 nt, Homo sapiens
  misc_RNA (1)...(19): siRNA sense strand
cugauuauguggagauuca

SEQ ID NO: 130364 - RNA, 19 nt, Homo sapiens
  misc_RNA (1)...(19): siRNA sense strand
cggaagugccuacaaauuc

SEQ ID NO: 130365 - RNA, 19 nt, Homo sapiens
  misc_RNA (1)...(19): siRNA sense strand
ugaguauggucuuccaaug

SEQ ID NO: 130366 - RNA, 19 nt, Homo sapiens
  misc_RNA (1)...(19): siRNA sense strand
uggauucuauuuacaagga

SEQ ID NO: 130367 - RNA, 19 nt, Homo sapiens
  misc_RNA (1)...(19): siRNA sense strand
guggagagcacuguuacua

SEQ ID NO: 130368 - RNA, 19 nt, Homo sapiens
  misc_RNA (1)...(19): siRNA sense strand
uaacaauaccucaugucuu

SEQ ID NO: 130369 - RNA, 19 nt, Homo sapiens
  misc_RNA (1)...(19): siRNA sense strand
gcuauggauuaugcuguaa

SEQ ID NO: 130370 - RNA, 19 nt, Homo sapiens
  misc_RNA (1)...(19): siRNA sense strand
ggaauccaaugggaaccuu

SEQ ID NO: 130371 - RNA, 19 nt, Homo sapiens
  misc_RNA (1)...(19): siRNA sense strand
gcagaugcuccaugaguuc

SEQ ID NO: 130372 - RNA, 19 nt, Homo sapiens
  misc_RNA (1)...(19): siRNA sense strand
uggcaggacaguauucuaa

SEQ ID NO: 130373 - RNA, 19 nt, Homo sapiens
  misc_RNA (1)...(19): siRNA sense strand
gaugugggcuauguagaag

SEQ ID NO: 130374 - RNA, 19 nt, Homo sapiens
  misc_RNA (1)...(19): siRNA sense strand
aauagcagcaguaauauca

SEQ ID NO: 130375 - RNA, 19 nt, Homo sapiens
  misc_RNA (1)...(19): siRNA sense strand
caugauguguucuguggau

SEQ ID NO: 130376 - RNA, 19 nt, Homo sapiens
  misc_RNA (1)...(19): siRNA sense strand
gauggagaccgguggauuc

SEQ ID NO: 130377 - RNA, 19 nt, Homo sapiens
  misc_RNA (1)...(19): siRNA sense strand
ggucugacaaguucugcua

SEQ ID NO: 130378 - RNA, 19 nt, Homo sapiens
  misc_RNA (1)...(19): siRNA sense strand
ggagugugauugugguuuu

SEQ ID NO: 130379 - RNA, 19 nt, Homo sapiens
  misc_RNA (1)...(19): siRNA sense strand
gacaguauucuaagcaaau

SEQ ID NO: 130380 - RNA, 19 nt, Homo sapiens
  misc_RNA (1)...(19): siRNA sense strand
gcacugagaagggaaacug

SEQ ID NO: 130381 - RNA, 19 nt, Homo sapiens
  misc_RNA (1)...(19): siRNA sense strand
gaauagcagcaguaauauc

SEQ ID NO: 130382 - RNA, 19 nt, Homo sapiens
  misc_RNA (1)...(19): siRNA sense strand
uggauuaugcuguaagaaa

SEQ ID NO: 130383 - RNA, 19 nt, Homo sapiens
  misc_RNA (1)...(19): siRNA sense strand
gagaagcagucugaguuac

SEQ ID NO: 130384 - RNA, 19 nt, Homo sapiens
  misc_RNA (1)...(19): siRNA sense strand
aagagaagcagucugaguu

SEQ ID NO: 130385 - RNA, 19 nt, Homo sapiens
  misc_RNA (1)...(19): siRNA sense strand
ggcccuuucucucugaauu

SEQ ID NO: 130386 - RNA, 19 nt, Homo sapiens
  misc_RNA (1)...(19): siRNA sense strand
gcccuuaucacguucuuga

SEQ ID NO: 130387 - RNA, 19 nt, Homo sapiens
  misc_RNA (1)...(19): siRNA sense strand
gcuguccacucgauuccaa

SEQ ID NO: 130388 - RNA, 19 nt, Homo sapiens
  misc_RNA (1)...(19): siRNA sense strand
auucaagcccuaaauauga

SEQ ID NO: 130389 - RNA, 19 nt, Homo sapiens
  misc_RNA (1)...(19): siRNA sense strand
gcccuuucucucugaauua

SEQ ID NO: 130390 - RNA, 19 nt, Homo sapiens
  misc_RNA (1)...(19): siRNA sense strand
cugcaguggugcccaugua

SEQ ID NO: 130391 - RNA, 19 nt, Homo sapiens
  misc_RNA (1)...(19): siRNA sense strand
gaggaguuggugugaauga

SEQ ID NO: 130392 - RNA, 19 nt, Homo sapiens
  misc_RNA (1)...(19): siRNA sense strand
ggaaagaucugcauccaua

SEQ ID NO: 130393 - RNA, 19 nt, Homo sapiens
  misc_RNA (1)...(19): siRNA sense strand
ggaaagagguugcaucaug

SEQ ID NO: 130394 - RNA, 19 nt, Homo sapiens
  misc_RNA (1)...(19): siRNA sense strand
gaacauaucugacauuggu

SEQ ID NO: 130395 - RNA, 19 nt, Homo sapiens
  misc_RNA (1)...(19): siRNA sense strand
gcaguuagguacuuacaua

SEQ ID NO: 130396 - RNA, 19 nt, Homo sapiens
  misc_RNA (1)...(19): siRNA sense strand
gaaagagguugcaucauga

SEQ ID NO: 130397 - RNA, 19 nt, Homo sapiens
  misc_RNA (1)...(19): siRNA sense strand
gacaagaggucaaugaaug

SEQ ID NO: 130398 - RNA, 19 nt, Homo sapiens
  misc_RNA (1)...(19): siRNA sense strand
gaggauguauuucuuguug

SEQ ID NO: 130399 - RNA, 19 nt, Homo sapiens
  misc_RNA (1)...(19): siRNA sense strand
ccugagaccugcaauauga

SEQ ID NO: 130400 - RNA, 19 nt, Homo sapiens
  misc_RNA (1)...(19): siRNA sense strand
ucauaucucugaugucuuu

SEQ ID NO: 130401 - RNA, 19 nt, Homo sapiens
  misc_RNA (1)...(19): siRNA sense strand
gcuaugagauguggcuuaa

SEQ ID NO: 130402 - RNA, 19 nt, Homo sapiens
  misc_RNA (1)...(19): siRNA sense strand
gaacucagcucuggaacca

SEQ ID NO: 130403 - RNA, 19 nt, Homo sapiens
  misc_RNA (1)...(19): siRNA sense strand
ugacauuggugaagugaaa

SEQ ID NO: 130404 - RNA, 19 nt, Homo sapiens
  misc_RNA (1)...(19): siRNA sense strand
gaaagaugguacugugugu

SEQ ID NO: 130405 - RNA, 19 nt, Homo sapiens
  misc_RNA (1)...(19): siRNA sense strand
gaucaugucugcauaaucc

SEQ ID NO: 130406 - RNA, 19 nt, Homo sapiens
  misc_RNA (1)...(19): siRNA sense strand
gcagcacacucauaucaau

SEQ ID NO: 130407 - RNA, 19 nt, Homo sapiens
  misc_RNA (1)...(19): siRNA sense strand
ggaauggugugguugaaag

SEQ ID NO: 130408 - RNA, 19 nt, Homo sapiens
  misc_RNA (1)...(19): siRNA sense strand
gcagcaugaugaagaauuc

SEQ ID NO: 130409 - RNA, 19 nt, Homo sapiens
  misc_RNA (1)...(19): siRNA sense strand
guauaaauggcacaacaua

SEQ ID NO: 130410 - RNA, 19 nt, Homo sapiens
  misc_RNA (1)...(19): siRNA sense strand
ggggaaaucuuuaugcuaa

SEQ ID NO: 130411 - RNA, 19 nt, Homo sapiens
  misc_RNA (1)...(19): siRNA sense strand
ccagaugacuguuacuauc

SEQ ID NO: 130412 - RNA, 19 nt, Homo sapiens
  misc_RNA (1)...(19): siRNA sense strand
cuaaagcgcugugggaaug

SEQ ID NO: 130413 - RNA, 19 nt, Homo sapiens
  misc_RNA (1)...(19): siRNA sense strand
ggugaaccaugauuucuuc

SEQ ID NO: 130414 - RNA, 19 nt, Homo sapiens
  misc_RNA (1)...(19): siRNA sense strand
gagacacaauucccagcua

SEQ ID NO: 130415 - RNA, 19 nt, Homo sapiens
  misc_RNA (1)...(19): siRNA sense strand
ggauggcucuccuauaguc

SEQ ID NO: 130416 - RNA, 19 nt, Homo sapiens
  misc_RNA (1)...(19): siRNA sense strand
ccagaauggugcaauggaa

SEQ ID NO: 130417 - RNA, 19 nt, Homo sapiens
  misc_RNA (1)...(19): siRNA sense strand
uaugagauguggcuuaaca

SEQ ID NO: 130418 - RNA, 19 nt, Homo sapiens
  misc_RNA (1)...(19): siRNA sense strand
ggguauugacuaucauuua

SEQ ID NO: 130419 - RNA, 19 nt, Homo sapiens
  misc_RNA (1)...(19): siRNA sense strand
gaauaugucguccaccuau

SEQ ID NO: 130420 - RNA, 19 nt, Homo sapiens
  misc_RNA (1)...(19): siRNA sense strand
gagguugcaucaugaauac

SEQ ID NO: 130421 - RNA, 19 nt, Homo sapiens
  misc_RNA (1)...(19): siRNA sense strand
gaaugugaccuuccagaau

SEQ ID NO: 130422 - RNA, 19 nt, Homo sapiens
  misc_RNA (1)...(19): siRNA sense strand
gaaagaucugcauccauaa

SEQ ID NO: 130423 - RNA, 19 nt, Homo sapiens
  misc_RNA (1)...(19): siRNA sense strand
ugacuuuccuguuuacugu

SEQ ID NO: 130424 - RNA, 19 nt, Homo sapiens
  misc_RNA (1)...(19): siRNA sense strand
uggccucacuuaugaaauu

SEQ ID NO: 130425 - RNA, 19 nt, Homo sapiens
  misc_RNA (1)...(19): siRNA sense strand
aaacuaaggcucauucauc

SEQ ID NO: 130426 - RNA, 19 nt, Homo sapiens
  misc_RNA (1)...(19): siRNA sense strand
ugauugugauuccuucuuu

SEQ ID NO: 130427 - RNA, 19 nt, Homo sapiens
  misc_RNA (1)...(19): siRNA sense strand
uggaacaucucaucagugu

SEQ ID NO: 130428 - RNA, 19 nt, Homo sapiens
  misc_RNA (1)...(19): siRNA sense strand
ggaaguagcacgccaacag

SEQ ID NO: 130429 - RNA, 19 nt, Homo sapiens
  misc_RNA (1)...(19): siRNA sense strand
agauguggcuuaacagaga

SEQ ID NO: 130430 - RNA, 19 nt, Homo sapiens
  misc_RNA (1)...(19): siRNA sense strand
gaucugcaauaacaaacau

SEQ ID NO: 130431 - RNA, 19 nt, Homo sapiens
  misc_RNA (1)...(19): siRNA sense strand
aaugugaccuuccagaaug

SEQ ID NO: 130432 - RNA, 19 nt, Homo sapiens
  misc_RNA (1)...(19): siRNA sense strand
guagacaagaggucaauga

SEQ ID NO: 130433 - RNA, 19 nt, Homo sapiens
  misc_RNA (1)...(19): siRNA sense strand
ggugcaagaggauguauuu

SEQ ID NO: 130434 - RNA, 19 nt, Homo sapiens
  misc_RNA (1)...(19): siRNA sense strand
gaaauuuggaaucaaggaa

SEQ ID NO: 130435 - RNA, 19 nt, Homo sapiens
  misc_RNA (1)...(19): siRNA sense strand
ccaacacuguggcccauga

SEQ ID NO: 130436 - RNA, 19 nt, Homo sapiens
  misc_RNA (1)...(19): siRNA sense strand
cuggauggcucuccuauag

SEQ ID NO: 130437 - RNA, 19 nt, Homo sapiens
  misc_RNA (1)...(19): siRNA sense strand
agacauuccucuucuccaa

SEQ ID NO: 130438 - RNA, 19 nt, Homo sapiens
  misc_RNA (1)...(19): siRNA sense strand
cuguugaacugcacucuaa

SEQ ID NO: 130439 - RNA, 19 nt, Homo sapiens
  misc_RNA (1)...(19): siRNA sense strand
ggauguauuucuuguuguc

SEQ ID NO: 130440 - RNA, 19 nt, Homo sapiens
  misc_RNA (1)...(19): siRNA sense strand
acaauguucuggucccaaa

SEQ ID NO: 130441 - RNA, 19 nt, Homo sapiens
  misc_RNA (1)...(19): siRNA sense strand
ugaacgauuucucucaaug

SEQ ID NO: 130442 - RNA, 19 nt, Homo sapiens
  misc_RNA (1)...(19): siRNA sense strand
acucagcucuggaaccaaa

SEQ ID NO: 130443 - RNA, 19 nt, Homo sapiens
  misc_RNA (1)...(19): siRNA sense strand
ucucagaauugcuauaaag

SEQ ID NO: 130444 - RNA, 19 nt, Homo sapiens
  misc_RNA (1)...(19): siRNA sense strand
cauuugaacaccugguuua

SEQ ID NO: 130445 - RNA, 19 nt, Homo sapiens
  misc_RNA (1)...(19): siRNA sense strand
gcaauggaacaucucauca

SEQ ID NO: 130446 - RNA, 19 nt, Homo sapiens
  misc_RNA (1)...(19): siRNA sense strand
guacagcagugugaacaag

SEQ ID NO: 130447 - RNA, 19 nt, Homo sapiens
  misc_RNA (1)...(19): siRNA sense strand
aaagagaagagcaguguga

SEQ ID NO: 130448 - RNA, 19 nt, Homo sapiens
  misc_RNA (1)...(19): siRNA sense strand
ggaauaugucguccaccua

SEQ ID NO: 130449 - RNA, 19 nt, Homo sapiens
  misc_RNA (1)...(19): siRNA sense strand
gggcuuucgaggaguauua

SEQ ID NO: 130450 - RNA, 19 nt, Homo sapiens
  misc_RNA (1)...(19): siRNA sense strand
caaagaaacuaaggcucau

SEQ ID NO: 130451 - RNA, 19 nt, Homo sapiens
  misc_RNA (1)...(19): siRNA sense strand
agacacaauucccagcuau

SEQ ID NO: 130452 - RNA, 19 nt, Homo sapiens
  misc_RNA (1)...(19): siRNA sense strand
ggaugaacauaucugacau

SEQ ID NO: 130453 - RNA, 19 nt, Homo sapiens
  misc_RNA (1)...(19): siRNA sense strand
gugggagaguucaauguga

SEQ ID NO: 130454 - RNA, 19 nt, Homo sapiens
  misc_RNA (1)...(19): siRNA sense strand
caucucagaauugcuauaa

SEQ ID NO: 130455 - RNA, 19 nt, Homo sapiens
  misc_RNA (1)...(19): siRNA sense strand
caaaagagguguaauaacc

SEQ ID NO: 130456 - RNA, 19 nt, Homo sapiens
  misc_RNA (1)...(19): siRNA sense strand
gcacucugccacauuugaa

SEQ ID NO: 130457 - RNA, 19 nt, Homo sapiens
  misc_RNA (1)...(19): siRNA sense strand
gaaacuaaggcucauucau

SEQ ID NO: 130458 - RNA, 19 nt, Homo sapiens
  misc_RNA (1)...(19): siRNA sense strand
gauugugauuccuucuuug

SEQ ID NO: 130459 - RNA, 19 nt, Homo sapiens
  misc_RNA (1)...(19): siRNA sense strand
ugucauaucucugaugucu

SEQ ID NO: 130460 - RNA, 19 nt, Homo sapiens
  misc_RNA (1)...(19): siRNA sense strand
gugcaucucagaauugcua

SEQ ID NO: 130461 - RNA, 19 nt, Homo sapiens
  misc_RNA (1)...(19): siRNA sense strand
cacuguggcccaugaguua

SEQ ID NO: 130462 - RNA, 19 nt, Homo sapiens
  misc_RNA (1)...(19): siRNA sense strand
caaagcaacaucucaaagg

SEQ ID NO: 130463 - RNA, 19 nt, Homo sapiens
  misc_RNA (1)...(19): siRNA sense strand
gaaguagcacgccaacagu

SEQ ID NO: 130464 - RNA, 19 nt, Homo sapiens
  misc_RNA (1)...(19): siRNA sense strand
gaugaacauaucugacauu

SEQ ID NO: 130465 - RNA, 19 nt, Homo sapiens
  misc_RNA (1)...(19): siRNA sense strand
gaacgauuucucucaaugg

SEQ ID NO: 130466 - RNA, 19 nt, Homo sapiens
  misc_RNA (1)...(19): siRNA sense strand
aaagcaacaucucaaaggu

SEQ ID NO: 130467 - RNA, 19 nt, Homo sapiens
  misc_RNA (1)...(19): siRNA sense strand
gauguggcuuaacagagaa

SEQ ID NO: 130468 - RNA, 19 nt, Homo sapiens
  misc_RNA (1)...(19): siRNA sense strand
aacuaaggcucauucauca

SEQ ID NO: 130469 - RNA, 19 nt, Homo sapiens
  misc_RNA (1)...(19): siRNA sense strand
gcaaagacugcaaguucau

SEQ ID NO: 130470 - RNA, 19 nt, Homo sapiens
  misc_RNA (1)...(19): siRNA sense strand
agagguugcaucaugaaua

SEQ ID NO: 130471 - RNA, 19 nt, Homo sapiens
  misc_RNA (1)...(19): siRNA sense strand
ccugaacgauuucucucaa

SEQ ID NO: 130472 - RNA, 19 nt, Homo sapiens
  misc_RNA (1)...(19): siRNA sense strand
cccagcaucugcaaagaga

SEQ ID NO: 130473 - RNA, 19 nt, Homo sapiens
  misc_RNA (1)...(19): siRNA sense strand
ugaaggggaucugcaauaa

SEQ ID NO: 130474 - RNA, 19 nt, Homo sapiens
  misc_RNA (1)...(19): siRNA sense strand
caaugaaugugaccuucca

SEQ ID NO: 130475 - RNA, 19 nt, Homo sapiens
  misc_RNA (1)...(19): siRNA sense strand
gggaucaugucugcauaau

SEQ ID NO: 130476 - RNA, 19 nt, Homo sapiens
  misc_RNA (1)...(19): siRNA sense strand
cagggaucaugucugcaua

SEQ ID NO: 130477 - RNA, 19 nt, Homo sapiens
  misc_RNA (1)...(19): siRNA sense strand
aaacaguaaugagacacaa

SEQ ID NO: 130478 - RNA, 19 nt, Homo sapiens
  misc_RNA (1)...(19): siRNA sense strand
aaaagugcaucucagaauu

SEQ ID NO: 130479 - RNA, 19 nt, Homo sapiens
  misc_RNA (1)...(19): siRNA sense strand
uaauaaccaugaccagcau

SEQ ID NO: 130480 - RNA, 19 nt, Homo sapiens
  misc_RNA (1)...(19): siRNA sense strand
uuaugaagaccaccuuaaa

SEQ ID NO: 130481 - RNA, 19 nt, Homo sapiens
  misc_RNA (1)...(19): siRNA sense strand
uaaggaugaacauaucuga

SEQ ID NO: 130482 - RNA, 19 nt, Homo sapiens
  misc_RNA (1)...(19): siRNA sense strand
uuuggucacugugguauaa

SEQ ID NO: 130483 - RNA, 19 nt, Homo sapiens
  misc_RNA (1)...(19): siRNA sense strand
acacaauucccagcuauga

SEQ ID NO: 130484 - RNA, 19 nt, Homo sapiens
  misc_RNA (1)...(19): siRNA sense strand
aaagugcaucucagaauug

SEQ ID NO: 130485 - RNA, 19 nt, Homo sapiens
  misc_RNA (1)...(19): siRNA sense strand
ccuguugucuguugaacug

SEQ ID NO: 130486 - RNA, 19 nt, Homo sapiens
  misc_RNA (1)...(19): siRNA sense strand
ugaaagagaagagcagugu

SEQ ID NO: 130487 - RNA, 19 nt, Homo sapiens
  misc_RNA (1)...(19): siRNA sense strand
guugcaucaugaauacuuu

SEQ ID NO: 130488 - RNA, 19 nt, Homo sapiens
  misc_RNA (1)...(19): siRNA sense strand
uggaaucaaggaaauguuu

SEQ ID NO: 130489 - RNA, 19 nt, Homo sapiens
  misc_RNA (1)...(19): siRNA sense strand
ggugacugguggacucaug

SEQ ID NO: 130490 - RNA, 19 nt, Homo sapiens
  misc_RNA (1)...(19): siRNA sense strand
cagcauugcagggagauuu

SEQ ID NO: 130491 - RNA, 19 nt, Homo sapiens
  misc_RNA (1)...(19): siRNA sense strand
gcacacucauaucaauggu

SEQ ID NO: 130492 - RNA, 19 nt, Homo sapiens
  misc_RNA (1)...(19): siRNA sense strand
gcaaagagcugcaucauga

SEQ ID NO: 130493 - RNA, 19 nt, Homo sapiens
  misc_RNA (1)...(19): siRNA sense strand
ggaaguaccuguaagcuua

SEQ ID NO: 130494 - RNA, 19 nt, Homo sapiens
  misc_RNA (1)...(19): siRNA sense strand
caacagaccucacaucuuu

SEQ ID NO: 130495 - RNA, 19 nt, Homo sapiens
  misc_RNA (1)...(19): siRNA sense strand
ggaggaaacugccuucuua

SEQ ID NO: 130496 - RNA, 19 nt, Homo sapiens
  misc_RNA (1)...(19): siRNA sense strand
gaaacugccuucuuaauau

SEQ ID NO: 130497 - RNA, 19 nt, Homo sapiens
  misc_RNA (1)...(19): siRNA sense strand
gaaagaaacugcaaaggau

SEQ ID NO: 130498 - RNA, 19 nt, Homo sapiens
  misc_RNA (1)...(19): siRNA sense strand
ggaaagaucuguagaaacu

SEQ ID NO: 130499 - RNA, 19 nt, Homo sapiens
  misc_RNA (1)...(19): siRNA sense strand
gagauuaacuagagaaaga

SEQ ID NO: 130500 - RNA, 19 nt, Homo sapiens
  misc_RNA (1)...(19): siRNA sense strand
ccagagaaguuccuauaua

SEQ ID NO: 130501 - RNA, 19 nt, Homo sapiens
  misc_RNA (1)...(19): siRNA sense strand
ccucacaucuuucuucuua

SEQ ID NO: 130502 - RNA, 19 nt, Homo sapiens
  misc_RNA (1)...(19): siRNA sense strand
ggaaacugccuucuuaaua

SEQ ID NO: 130503 - RNA, 19 nt, Homo sapiens
  misc_RNA (1)...(19): siRNA sense strand
caacaaggauauagagaaa

SEQ ID NO: 130504 - RNA, 19 nt, Homo sapiens
  misc_RNA (1)...(19): siRNA sense strand
gaagagaucacaaacauau

SEQ ID NO: 130505 - RNA, 19 nt, Homo sapiens
  misc_RNA (1)...(19): siRNA sense strand
ggaaagguaugacaugaug

SEQ ID NO: 130506 - RNA, 19 nt, Homo sapiens
  misc_RNA (1)...(19): siRNA sense strand
guggaaagcuucaguguga

SEQ ID NO: 130507 - RNA, 19 nt, Homo sapiens
  misc_RNA (1)...(19): siRNA sense strand
ccuguaagcuuaaaucauu

SEQ ID NO: 130508 - RNA, 19 nt, Homo sapiens
  misc_RNA (1)...(19): siRNA sense strand
ggagggaguucauaauuca

SEQ ID NO: 130509 - RNA, 19 nt, Homo sapiens
  misc_RNA (1)...(19): siRNA sense strand
cagagaaguuccuauauau

SEQ ID NO: 130510 - RNA, 19 nt, Homo sapiens
  misc_RNA (1)...(19): siRNA sense strand
ggaccuacauacaaugaaa

SEQ ID NO: 130511 - RNA, 19 nt, Homo sapiens
  misc_RNA (1)...(19): siRNA sense strand
gaggauugcugcauuuaga

SEQ ID NO: 130512 - RNA, 19 nt, Homo sapiens
  misc_RNA (1)...(19): siRNA sense strand
ggauauccuugccagaaua

SEQ ID NO: 130513 - RNA, 19 nt, Homo sapiens
  misc_RNA (1)...(19): siRNA sense strand
ggaauugugccugcuauua

SEQ ID NO: 130514 - RNA, 19 nt, Homo sapiens
  misc_RNA (1)...(19): siRNA sense strand
guucauaauucauccauug

SEQ ID NO: 130515 - RNA, 19 nt, Homo sapiens
  misc_RNA (1)...(19): siRNA sense strand
ggaagggacuuuaaucacu

SEQ ID NO: 130516 - RNA, 19 nt, Homo sapiens
  misc_RNA (1)...(19): siRNA sense strand
ggagacauuugcuuccauu

SEQ ID NO: 130517 - RNA, 19 nt, Homo sapiens
  misc_RNA (1)...(19): siRNA sense strand
gaaauuauaacuccuugga

SEQ ID NO: 130518 - RNA, 19 nt, Homo sapiens
  misc_RNA (1)...(19): siRNA sense strand
gcaccuccuuuauauaguu

SEQ ID NO: 130519 - RNA, 19 nt, Homo sapiens
  misc_RNA (1)...(19): siRNA sense strand
gacauuugcuuccauuguu

SEQ ID NO: 130520 - RNA, 19 nt, Homo sapiens
  misc_RNA (1)...(19): siRNA sense strand
gugcacagcuaguucuaaa

SEQ ID NO: 130521 - RNA, 19 nt, Homo sapiens
  misc_RNA (1)...(19): siRNA sense strand
cgacauguuucuccaguga

SEQ ID NO: 130522 - RNA, 19 nt, Homo sapiens
  misc_RNA (1)...(19): siRNA sense strand
gcacagcuaguucuaaaga

SEQ ID NO: 130523 - RNA, 19 nt, Homo sapiens
  misc_RNA (1)...(19): siRNA sense strand
guagaaacuuccagugugu

SEQ ID NO: 130524 - RNA, 19 nt, Homo sapiens
  misc_RNA (1)...(19): siRNA sense strand
ugacagauuuggcaauugu

SEQ ID NO: 130525 - RNA, 19 nt, Homo sapiens
  misc_RNA (1)...(19): siRNA sense strand
caacaaggaagggacuuua

SEQ ID NO: 130526 - RNA, 19 nt, Homo sapiens
  misc_RNA (1)...(19): siRNA sense strand
ugacugugauguucagaaa

SEQ ID NO: 130527 - RNA, 19 nt, Homo sapiens
  misc_RNA (1)...(19): siRNA sense strand
ugaauugggucauaaucuu

SEQ ID NO: 130528 - RNA, 19 nt, Homo sapiens
  misc_RNA (1)...(19): siRNA sense strand
acaaggauauagagaaaga

SEQ ID NO: 130529 - RNA, 19 nt, Homo sapiens
  misc_RNA (1)...(19): siRNA sense strand
gagcacaucauuuaucgaa

SEQ ID NO: 130530 - RNA, 19 nt, Homo sapiens
  misc_RNA (1)...(19): siRNA sense strand
gaauugugccugcuauuau

SEQ ID NO: 130531 - RNA, 19 nt, Homo sapiens
  misc_RNA (1)...(19): siRNA sense strand
aagaagagaucacaaacau

SEQ ID NO: 130532 - RNA, 19 nt, Homo sapiens
  misc_RNA (1)...(19): siRNA sense strand
ggugacagauuuggcaauu

SEQ ID NO: 130533 - RNA, 19 nt, Homo sapiens
  misc_RNA (1)...(19): siRNA sense strand
ucacaucuuucuucuuaug

SEQ ID NO: 130534 - RNA, 19 nt, Homo sapiens
  misc_RNA (1)...(19): siRNA sense strand
ucagaggauugcugcauuu

SEQ ID NO: 130535 - RNA, 19 nt, Homo sapiens
  misc_RNA (1)...(19): siRNA sense strand
cauuguugcucaugaauug

SEQ ID NO: 130536 - RNA, 19 nt, Homo sapiens
  misc_RNA (1)...(19): siRNA sense strand
ccagaguacugcaaugguu

SEQ ID NO: 130537 - RNA, 19 nt, Homo sapiens
  misc_RNA (1)...(19): siRNA sense strand
gagcaucggguuccagaaa

SEQ ID NO: 130538 - RNA, 19 nt, Homo sapiens
  misc_RNA (1)...(19): siRNA sense strand
ucacugaccaucccaauau

SEQ ID NO: 130539 - RNA, 19 nt, Homo sapiens
  misc_RNA (1)...(19): siRNA sense strand
ccaaagauuguuucauuga

SEQ ID NO: 130540 - RNA, 19 nt, Homo sapiens
  misc_RNA (1)...(19): siRNA sense strand
uggaugaugucuacaaaga

SEQ ID NO: 130541 - RNA, 19 nt, Homo sapiens
  misc_RNA (1)...(19): siRNA sense strand
gaaugcgaguuaugggauu

SEQ ID NO: 130542 - RNA, 19 nt, Homo sapiens
  misc_RNA (1)...(19): siRNA sense strand
cagaacagcucucauuuug

SEQ ID NO: 130543 - RNA, 19 nt, Homo sapiens
  misc_RNA (1)...(19): siRNA sense strand
augcuucuguucugaauua

SEQ ID NO: 130544 - RNA, 19 nt, Homo sapiens
  misc_RNA (1)...(19): siRNA sense strand
gggaaugcuuuguguggaa

SEQ ID NO: 130545 - RNA, 19 nt, Homo sapiens
  misc_RNA (1)...(19): siRNA sense strand
gaaggaaaagagcauauua

SEQ ID NO: 130546 - RNA, 19 nt, Homo sapiens
  misc_RNA (1)...(19): siRNA sense strand
gcaugugccaguauuauga

SEQ ID NO: 130547 - RNA, 19 nt, Homo sapiens
  misc_RNA (1)...(19): siRNA sense strand
gaagagccucccagcauga

SEQ ID NO: 130548 - RNA, 19 nt, Homo sapiens
  misc_RNA (1)...(19): siRNA sense strand
ggaaugcuuuguguggaaa

SEQ ID NO: 130549 - RNA, 19 nt, Homo sapiens
  misc_RNA (1)...(19): siRNA sense strand
cuuauugucugugcuauuu

SEQ ID NO: 130550 - RNA, 19 nt, Homo sapiens
  misc_RNA (1)...(19): siRNA sense strand
ggacggacuucuggucuuc

SEQ ID NO: 130551 - RNA, 19 nt, Homo sapiens
  misc_RNA (1)...(19): siRNA sense strand
gaaaccugaucaacauagu

SEQ ID NO: 130552 - RNA, 19 nt, Homo sapiens
  misc_RNA (1)...(19): siRNA sense strand
aaacagauuugcaguacca

SEQ ID NO: 130553 - RNA, 19 nt, Homo sapiens
  misc_RNA (1)...(19): siRNA sense strand
guauuaugaugcucaaugu

SEQ ID NO: 130554 - RNA, 19 nt, Homo sapiens
  misc_RNA (1)...(19): siRNA sense strand
ccucugaaauguggaguuu

SEQ ID NO: 130555 - RNA, 19 nt, Homo sapiens
  misc_RNA (1)...(19): siRNA sense strand
caagcaaccucagcaguuc

SEQ ID NO: 130556 - RNA, 19 nt, Homo sapiens
  misc_RNA (1)...(19): siRNA sense strand
gaaagaagagaucacaaac

SEQ ID NO: 130557 - RNA, 19 nt, Homo sapiens
  misc_RNA (1)...(19): siRNA sense strand
gaucaacuguggagaagcu

SEQ ID NO: 130558 - RNA, 19 nt, Homo sapiens
  misc_RNA (1)...(19): siRNA sense strand
gcauauuauucacuuggaa

SEQ ID NO: 130559 - RNA, 19 nt, Homo sapiens
  misc_RNA (1)...(19): siRNA sense strand
aaagaucuguagaaacuuc

SEQ ID NO: 130560 - RNA, 19 nt, Homo sapiens
  misc_RNA (1)...(19): siRNA sense strand
gcaaugaauacaagaagug

SEQ ID NO: 130561 - RNA, 19 nt, Homo sapiens
  misc_RNA (1)...(19): siRNA sense strand
cagcaugacucagcuacuu

SEQ ID NO: 130562 - RNA, 19 nt, Homo sapiens
  misc_RNA (1)...(19): siRNA sense strand
gaauggaugaugucuacaa

SEQ ID NO: 130563 - RNA, 19 nt, Homo sapiens
  misc_RNA (1)...(19): siRNA sense strand
agaaagaagagaucacaaa

SEQ ID NO: 130564 - RNA, 19 nt, Homo sapiens
  misc_RNA (1)...(19): siRNA sense strand
cuucuguucugaauuauga

SEQ ID NO: 130565 - RNA, 19 nt, Homo sapiens
  misc_RNA (1)...(19): siRNA sense strand
agaaagaaacugcaaagga

SEQ ID NO: 130566 - RNA, 19 nt, Homo sapiens
  misc_RNA (1)...(19): siRNA sense strand
gcgaaggaaguaccuguaa

SEQ ID NO: 130567 - RNA, 19 nt, Homo sapiens
  misc_RNA (1)...(19): siRNA sense strand
guagaugcuucuguucuga

SEQ ID NO: 130568 - RNA, 19 nt, Homo sapiens
  misc_RNA (1)...(19): siRNA sense strand
ugaagugaauucuaaaggu

SEQ ID NO: 130569 - RNA, 19 nt, Homo sapiens
  misc_RNA (1)...(19): siRNA sense strand
caaugguucuucucaguuc

SEQ ID NO: 130570 - RNA, 19 nt, Homo sapiens
  misc_RNA (1)...(19): siRNA sense strand
gaaguaccuguaagcuuaa

SEQ ID NO: 130571 - RNA, 19 nt, Homo sapiens
  misc_RNA (1)...(19): siRNA sense strand
gaauuaugacugugauguu

SEQ ID NO: 130572 - RNA, 19 nt, Homo sapiens
  misc_RNA (1)...(19): siRNA sense strand
cagaaucauugucauuauc

SEQ ID NO: 130573 - RNA, 19 nt, Homo sapiens
  misc_RNA (1)...(19): siRNA sense strand
gcaaugguucuucucaguu

SEQ ID NO: 130574 - RNA, 19 nt, Homo sapiens
  misc_RNA (1)...(19): siRNA sense strand
gaauugggucauaaucuug

SEQ ID NO: 130575 - RNA, 19 nt, Homo sapiens
  misc_RNA (1)...(19): siRNA sense strand
ccaagcaaccucagcaguu

SEQ ID NO: 130576 - RNA, 19 nt, Homo sapiens
  misc_RNA (1)...(19): siRNA sense strand
gagaaguuccuauauaugc

SEQ ID NO: 130577 - RNA, 19 nt, Homo sapiens
  misc_RNA (1)...(19): siRNA sense strand
cuggaaagaucuguagaaa

SEQ ID NO: 130578 - RNA, 19 nt, Homo sapiens
  misc_RNA (1)...(19): siRNA sense strand
gaugcucaaugucaaguca

SEQ ID NO: 130579 - RNA, 19 nt, Homo sapiens
  misc_RNA (1)...(19): siRNA sense strand
gaggaaacugccuucuuaa

SEQ ID NO: 130580 - RNA, 19 nt, Homo sapiens
  misc_RNA (1)...(19): siRNA sense strand
ccaacaaggauauagagaa

SEQ ID NO: 130581 - RNA, 19 nt, Homo sapiens
  misc_RNA (1)...(19): siRNA sense strand
guacugcaaugguucuucu

SEQ ID NO: 130582 - RNA, 19 nt, Homo sapiens
  misc_RNA (1)...(19): siRNA sense strand
uauggugacuguuguaaag

SEQ ID NO: 130583 - RNA, 19 nt, Homo sapiens
  misc_RNA (1)...(19): siRNA sense strand
acaaaucacuguggagaca

SEQ ID NO: 130584 - RNA, 19 nt, Homo sapiens
  misc_RNA (1)...(19): siRNA sense strand
cggccaggcuuucaacaga

SEQ ID NO: 130585 - RNA, 19 nt, Homo sapiens
  misc_RNA (1)...(19): siRNA sense strand
ggucuucuucuuccuaauu

SEQ ID NO: 130586 - RNA, 19 nt, Homo sapiens
  misc_RNA (1)...(19): siRNA sense strand
caagucaucuuuggcucaa

SEQ ID NO: 130587 - RNA, 19 nt, Homo sapiens
  misc_RNA (1)...(19): siRNA sense strand
ugcaaaggaugaagaggaa

SEQ ID NO: 130588 - RNA, 19 nt, Homo sapiens
  misc_RNA (1)...(19): siRNA sense strand
ggaaagcuucagugugaga

SEQ ID NO: 130589 - RNA, 19 nt, Homo sapiens
  misc_RNA (1)...(19): siRNA sense strand
gugcagaggacuuugagaa

SEQ ID NO: 130590 - RNA, 19 nt, Homo sapiens
  misc_RNA (1)...(19): siRNA sense strand
aaggaaagguaugacauga

SEQ ID NO: 130591 - RNA, 19 nt, Homo sapiens
  misc_RNA (1)...(19): siRNA sense strand
caaggaaagguaugacaug

SEQ ID NO: 130592 - RNA, 19 nt, Homo sapiens
  misc_RNA (1)...(19): siRNA sense strand
gaagaaaccuuacauguua

SEQ ID NO: 130593 - RNA, 19 nt, Homo sapiens
  misc_RNA (1)...(19): siRNA sense strand
ggagaaagaugucagaugu

SEQ ID NO: 130594 - RNA, 19 nt, Homo sapiens
  misc_RNA (1)...(19): siRNA sense strand
gaagaaugcuacugucaaa

SEQ ID NO: 130595 - RNA, 19 nt, Homo sapiens
  misc_RNA (1)...(19): siRNA sense strand
gaagaagacuccaaaauaa

SEQ ID NO: 130596 - RNA, 19 nt, Homo sapiens
  misc_RNA (1)...(19): siRNA sense strand
guaugugccugcccuauua

SEQ ID NO: 130597 - RNA, 19 nt, Homo sapiens
  misc_RNA (1)...(19): siRNA sense strand
gaagaagaauuguuguaug

SEQ ID NO: 130598 - RNA, 19 nt, Homo sapiens
  misc_RNA (1)...(19): siRNA sense strand
ggaaguggcucuacucaca

SEQ ID NO: 130599 - RNA, 19 nt, Homo sapiens
  misc_RNA (1)...(19): siRNA sense strand
gaccaaagauaccucauug

SEQ ID NO: 130600 - RNA, 19 nt, Homo sapiens
  misc_RNA (1)...(19): siRNA sense strand
gcuacaagaugaauacaaa

SEQ ID NO: 130601 - RNA, 19 nt, Homo sapiens
  misc_RNA (1)...(19): siRNA sense strand
gcucugaacuauuugauga

SEQ ID NO: 130602 - RNA, 19 nt, Homo sapiens
  misc_RNA (1)...(19): siRNA sense strand
gaauaaacgaccaaagaua

SEQ ID NO: 130603 - RNA, 19 nt, Homo sapiens
  misc_RNA (1)...(19): siRNA sense strand
ggacagugauggaagcauu

SEQ ID NO: 130604 - RNA, 19 nt, Homo sapiens
  misc_RNA (1)...(19): siRNA sense strand
gaaacaagaaguuggauga

SEQ ID NO: 130605 - RNA, 19 nt, Homo sapiens
  misc_RNA (1)...(19): siRNA sense strand
gacaagacuuaucaccuua

SEQ ID NO: 130606 - RNA, 19 nt, Homo sapiens
  misc_RNA (1)...(19): siRNA sense strand
caugauaucugcuacaaga

SEQ ID NO: 130607 - RNA, 19 nt, Homo sapiens
  misc_RNA (1)...(19): siRNA sense strand
gaaacauucuacuccauga

SEQ ID NO: 130608 - RNA, 19 nt, Homo sapiens
  misc_RNA (1)...(19): siRNA sense strand
caacaauggugaaugucua

SEQ ID NO: 130609 - RNA, 19 nt, Homo sapiens
  misc_RNA (1)...(19): siRNA sense strand
ggaauggugugcaacaaug

SEQ ID NO: 130610 - RNA, 19 nt, Homo sapiens
  misc_RNA (1)...(19): siRNA sense strand
gaaggagaaugcugugaau

SEQ ID NO: 130611 - RNA, 19 nt, Homo sapiens
  misc_RNA (1)...(19): siRNA sense strand
uaucggaguucuuauacua

SEQ ID NO: 130612 - RNA, 19 nt, Homo sapiens
  misc_RNA (1)...(19): siRNA sense strand
guacagagcuuaauuuuac

SEQ ID NO: 130613 - RNA, 19 nt, Homo sapiens
  misc_RNA (1)...(19): siRNA sense strand
gcaauagagagucaugaua

SEQ ID NO: 130614 - RNA, 19 nt, Homo sapiens
  misc_RNA (1)...(19): siRNA sense strand
caacaugcaugcucaacau

SEQ ID NO: 130615 - RNA, 19 nt, Homo sapiens
  misc_RNA (1)...(19): siRNA sense strand
gaaaacguaugaagaagaa

SEQ ID NO: 130616 - RNA, 19 nt, Homo sapiens
  misc_RNA (1)...(19): siRNA sense strand
guacugaagccaggauuua

SEQ ID NO: 130617 - RNA, 19 nt, Homo sapiens
  misc_RNA (1)...(19): siRNA sense strand
gagaagacaagacuuauca

SEQ ID NO: 130618 - RNA, 19 nt, Homo sapiens
  misc_RNA (1)...(19): siRNA sense strand
ccaaagauaccucauugaa

SEQ ID NO: 130619 - RNA, 19 nt, Homo sapiens
  misc_RNA (1)...(19): siRNA sense strand
agacaagacuuaucaccuu

SEQ ID NO: 130620 - RNA, 19 nt, Homo sapiens
  misc_RNA (1)...(19): siRNA sense strand
aaacuaaggaaccgaauuu

SEQ ID NO: 130621 - RNA, 19 nt, Homo sapiens
  misc_RNA (1)...(19): siRNA sense strand
ucagaaggcuacuguuuca

SEQ ID NO: 130622 - RNA, 19 nt, Homo sapiens
  misc_RNA (1)...(19): siRNA sense strand
ggagaaugcugugaaucuu

SEQ ID NO: 130623 - RNA, 19 nt, Homo sapiens
  misc_RNA (1)...(19): siRNA sense strand
gcucaggaguguacuaauc

SEQ ID NO: 130624 - RNA, 19 nt, Homo sapiens
  misc_RNA (1)...(19): siRNA sense strand
gaaguuggaugagggugaa

SEQ ID NO: 130625 - RNA, 19 nt, Homo sapiens
  misc_RNA (1)...(19): siRNA sense strand
gaaauggucauccucacaa

SEQ ID NO: 130626 - RNA, 19 nt, Homo sapiens
  misc_RNA (1)...(19): siRNA sense strand
gauaaggacugagccaauc

SEQ ID NO: 130627 - RNA, 19 nt, Homo sapiens
  misc_RNA (1)...(19): siRNA sense strand
ugaagaaaccuuacauguu

SEQ ID NO: 130628 - RNA, 19 nt, Homo sapiens
  misc_RNA (1)...(19): siRNA sense strand
ggguguauauucuugauga

SEQ ID NO: 130629 - RNA, 19 nt, Homo sapiens
  misc_RNA (1)...(19): siRNA sense strand
guacuaauccuugcuguga

SEQ ID NO: 130630 - RNA, 19 nt, Homo sapiens
  misc_RNA (1)...(19): siRNA sense strand
cagaauaaacgaccaaaga

SEQ ID NO: 130631 - RNA, 19 nt, Homo sapiens
  misc_RNA (1)...(19): siRNA sense strand
gucuauaucucaaccaauu

SEQ ID NO: 130632 - RNA, 19 nt, Homo sapiens
  misc_RNA (1)...(19): siRNA sense strand
gaugucagauguggaaaga

SEQ ID NO: 130633 - RNA, 19 nt, Homo sapiens
  misc_RNA (1)...(19): siRNA sense strand
caauagagagucaugauau

SEQ ID NO: 130634 - RNA, 19 nt, Homo sapiens
  misc_RNA (1)...(19): siRNA sense strand
gaacucagaaggcuacugu

SEQ ID NO: 130635 - RNA, 19 nt, Homo sapiens
  misc_RNA (1)...(19): siRNA sense strand
caaucaaagugccaaguga

SEQ ID NO: 130636 - RNA, 19 nt, Homo sapiens
  misc_RNA (1)...(19): siRNA sense strand
gagccaauccugccagaaa

SEQ ID NO: 130637 - RNA, 19 nt, Homo sapiens
  misc_RNA (1)...(19): siRNA sense strand
gcaaggaauuucuuaucca

SEQ ID NO: 130638 - RNA, 19 nt, Homo sapiens
  misc_RNA (1)...(19): siRNA sense strand
cuaaauaaaccugcaagua

SEQ ID NO: 130639 - RNA, 19 nt, Homo sapiens
  misc_RNA (1)...(19): siRNA sense strand
gugcaacaauggugaaugu

SEQ ID NO: 130640 - RNA, 19 nt, Homo sapiens
  misc_RNA (1)...(19): siRNA sense strand
ggaugagggugaagagugu

SEQ ID NO: 130641 - RNA, 19 nt, Homo sapiens
  misc_RNA (1)...(19): siRNA sense strand
caaacagaauggcacauca

SEQ ID NO: 130642 - RNA, 19 nt, Homo sapiens
  misc_RNA (1)...(19): siRNA sense strand
ucauugaaccagugaaaua

SEQ ID NO: 130643 - RNA, 19 nt, Homo sapiens
  misc_RNA (1)...(19): siRNA sense strand
gauaaugaaucugaagaag

SEQ ID NO: 130644 - RNA, 19 nt, Homo sapiens
  misc_RNA (1)...(19): siRNA sense strand
gaaaaggucuauaucucaa

SEQ ID NO: 130645 - RNA, 19 nt, Homo sapiens
  misc_RNA (1)...(19): siRNA sense strand
gcagaccggcgaaagauga

SEQ ID NO: 130646 - RNA, 19 nt, Homo sapiens
  misc_RNA (1)...(19): siRNA sense strand
gauccauaguacacgaaua

SEQ ID NO: 130647 - RNA, 19 nt, Homo sapiens
  misc_RNA (1)...(19): siRNA sense strand
gagagggaauggugugcaa

SEQ ID NO: 130648 - RNA, 19 nt, Homo sapiens
  misc_RNA (1)...(19): siRNA sense strand
uaaugaaucugaagaagac

SEQ ID NO: 130649 - RNA, 19 nt, Homo sapiens
  misc_RNA (1)...(19): siRNA sense strand
ccagugaaauacucagaug

SEQ ID NO: 130650 - RNA, 19 nt, Homo sapiens
  misc_RNA (1)...(19): siRNA sense strand
ugaagaagacuccaaaaua

SEQ ID NO: 130651 - RNA, 19 nt, Homo sapiens
  misc_RNA (1)...(19): siRNA sense strand
ccaccaguaucauuaagga

SEQ ID NO: 130652 - RNA, 19 nt, Homo sapiens
  misc_RNA (1)...(19): siRNA sense strand
aagcauuccugcacugaaa

SEQ ID NO: 130653 - RNA, 19 nt, Homo sapiens
  misc_RNA (1)...(19): siRNA sense strand
guaugaagaagaauuguug

SEQ ID NO: 130654 - RNA, 19 nt, Homo sapiens
  misc_RNA (1)...(19): siRNA sense strand
caacaacugguucguccua

SEQ ID NO: 130655 - RNA, 19 nt, Homo sapiens
  misc_RNA (1)...(19): siRNA sense strand
ggcgaaagaugaaugugau

SEQ ID NO: 130656 - RNA, 19 nt, Homo sapiens
  misc_RNA (1)...(19): siRNA sense strand
gaguggagaacaaaggaua

SEQ ID NO: 130657 - RNA, 19 nt, Homo sapiens
  misc_RNA (1)...(19): siRNA sense strand
ggauaaugaaucugaagaa

SEQ ID NO: 130658 - RNA, 19 nt, Homo sapiens
  misc_RNA (1)...(19): siRNA sense strand
cggaguucuuauacuauua

SEQ ID NO: 130659 - RNA, 19 nt, Homo sapiens
  misc_RNA (1)...(19): siRNA sense strand
ccuuacauguuaccaauau

SEQ ID NO: 130660 - RNA, 19 nt, Homo sapiens
  misc_RNA (1)...(19): siRNA sense strand
accaguacuugaaggauua

SEQ ID NO: 130661 - RNA, 19 nt, Homo sapiens
  misc_RNA (1)...(19): siRNA sense strand
caccaguacuugaaggauu

SEQ ID NO: 130662 - RNA, 19 nt, Homo sapiens
  misc_RNA (1)...(19): siRNA sense strand
ggaaggauuuugaucaugu

SEQ ID NO: 130663 - RNA, 19 nt, Homo sapiens
  misc_RNA (1)...(19): siRNA sense strand
ugucagauguggaaagauc

SEQ ID NO: 130664 - RNA, 19 nt, Homo sapiens
  misc_RNA (1)...(19): siRNA sense strand
cagaugagggagaacauuu

SEQ ID NO: 130665 - RNA, 19 nt, Homo sapiens
  misc_RNA (1)...(19): siRNA sense strand
gcagaucccaaucaaagug

SEQ ID NO: 130666 - RNA, 19 nt, Homo sapiens
  misc_RNA (1)...(19): siRNA sense strand
gugaagaaaccuuacaugu

SEQ ID NO: 130667 - RNA, 19 nt, Homo sapiens
  misc_RNA (1)...(19): siRNA sense strand
ggacacacccaugaugaug

SEQ ID NO: 130668 - RNA, 19 nt, Homo sapiens
  misc_RNA (1)...(19): siRNA sense strand
cgaaagaugaaugugauuu

SEQ ID NO: 130669 - RNA, 19 nt, Homo sapiens
  misc_RNA (1)...(19): siRNA sense strand
gaaaagauccuuaaaacac

SEQ ID NO: 130670 - RNA, 19 nt, Homo sapiens
  misc_RNA (1)...(19): siRNA sense strand
gaaauauggacacaugaag

SEQ ID NO: 130671 - RNA, 19 nt, Homo sapiens
  misc_RNA (1)...(19): siRNA sense strand
gacguugguuggcauugaa

SEQ ID NO: 130672 - RNA, 19 nt, Homo sapiens
  misc_RNA (1)...(19): siRNA sense strand
gaaugcuacugucaaaugc

SEQ ID NO: 130673 - RNA, 19 nt, Homo sapiens
  misc_RNA (1)...(19): siRNA sense strand
gagaaugcugugaaucuug

SEQ ID NO: 130674 - RNA, 19 nt, Homo sapiens
  misc_RNA (1)...(19): siRNA sense strand
cacccaugaugaugacaua

SEQ ID NO: 130675 - RNA, 19 nt, Homo sapiens
  misc_RNA (1)...(19): siRNA sense strand
uuaccaaggauccauagua

SEQ ID NO: 130676 - RNA, 19 nt, Homo sapiens
  misc_RNA (1)...(19): siRNA sense strand
caucuugguuguugugcuu

SEQ ID NO: 130677 - RNA, 19 nt, Homo sapiens
  misc_RNA (1)...(19): siRNA sense strand
gagcuuaauuuuaccagaa

SEQ ID NO: 130678 - RNA, 19 nt, Homo sapiens
  misc_RNA (1)...(19): siRNA sense strand
gaucauguuguauuacuca

SEQ ID NO: 130679 - RNA, 19 nt, Homo sapiens
  misc_RNA (1)...(19): siRNA sense strand
aaagaugucagauguggaa

SEQ ID NO: 130680 - RNA, 19 nt, Homo sapiens
  misc_RNA (1)...(19): siRNA sense strand
gccaguaucaguacgugua

SEQ ID NO: 130681 - RNA, 19 nt, Homo sapiens
  misc_RNA (1)...(19): siRNA sense strand
gcaaguaaagauucaagag

SEQ ID NO: 130682 - RNA, 19 nt, Homo sapiens
  misc_RNA (1)...(19): siRNA sense strand
ucaauggauuuccuugcaa

SEQ ID NO: 130683 - RNA, 19 nt, Homo sapiens
  misc_RNA (1)...(19): siRNA sense strand
ugaaauauggacacaugaa

SEQ ID NO: 130684 - RNA, 19 nt, Homo sapiens
  misc_RNA (1)...(19): siRNA sense strand
uuaccaauaucaccaucuu

SEQ ID NO: 130685 - RNA, 19 nt, Homo sapiens
  misc_RNA (1)...(19): siRNA sense strand
ccaugauucuacagacauu

SEQ ID NO: 130686 - RNA, 19 nt, Homo sapiens
  misc_RNA (1)...(19): siRNA sense strand
ggagaagacaagacuuauc

SEQ ID NO: 130687 - RNA, 19 nt, Homo sapiens
  misc_RNA (1)...(19): siRNA sense strand
agaaugcugugaaucuugu

SEQ ID NO: 130688 - RNA, 19 nt, Homo sapiens
  misc_RNA (1)...(19): siRNA sense strand
cagaauggcacaucaacug

SEQ ID NO: 130689 - RNA, 19 nt, Homo sapiens
  misc_RNA (1)...(19): siRNA sense strand
gcaaacagaauggcacauc

SEQ ID NO: 130690 - RNA, 19 nt, Homo sapiens
  misc_RNA (1)...(19): siRNA sense strand
ucacaugugcaaggaauuu

SEQ ID NO: 130691 - RNA, 19 nt, Homo sapiens
  misc_RNA (1)...(19): siRNA sense strand
ggauuuugaucauguugua

SEQ ID NO: 130692 - RNA, 19 nt, Homo sapiens
  misc_RNA (1)...(19): siRNA sense strand
caucauggccuauauguuu

SEQ ID NO: 130693 - RNA, 19 nt, Homo sapiens
  misc_RNA (1)...(19): siRNA sense strand
cauaugaucugcccugguu

SEQ ID NO: 130694 - RNA, 19 nt, Homo sapiens
  misc_RNA (1)...(19): siRNA sense strand
gaagagccuuugcggauuc

SEQ ID NO: 130695 - RNA, 19 nt, Homo sapiens
  misc_RNA (1)...(19): siRNA sense strand
gugagacagugacggauua

SEQ ID NO: 130696 - RNA, 19 nt, Homo sapiens
  misc_RNA (1)...(19): siRNA sense strand
gcguucagauuaaguguuu

SEQ ID NO: 130697 - RNA, 19 nt, Homo sapiens
  misc_RNA (1)...(19): siRNA sense strand
ugagaggcauccugacuuu

SEQ ID NO: 130698 - RNA, 19 nt, Homo sapiens
  misc_RNA (1)...(19): siRNA sense strand
uaucuugugugaucuguaa

SEQ ID NO: 130699 - RNA, 19 nt, Homo sapiens
  misc_RNA (1)...(19): siRNA sense strand
ugacauugcugauuguugu

SEQ ID NO: 130700 - RNA, 19 nt, Homo sapiens
  misc_RNA (1)...(19): siRNA sense strand
caaccuauuugaaggaaug

SEQ ID NO: 130701 - RNA, 19 nt, Homo sapiens
  misc_RNA (1)...(19): siRNA sense strand
guaacacagucacaucuug

SEQ ID NO: 130702 - RNA, 19 nt, Homo sapiens
  misc_RNA (1)...(19): siRNA sense strand
ggucucaucugaucgacaa

SEQ ID NO: 130703 - RNA, 19 nt, Homo sapiens
  misc_RNA (1)...(19): siRNA sense strand
ggacaaggagucagaguca

SEQ ID NO: 130704 - RNA, 19 nt, Homo sapiens
  misc_RNA (1)...(19): siRNA sense strand
cuaauaggauucugcaugu

SEQ ID NO: 130705 - RNA, 19 nt, Homo sapiens
  misc_RNA (1)...(19): siRNA sense strand
cgacugcaguucuacaugu

SEQ ID NO: 130706 - RNA, 19 nt, Homo sapiens
  misc_RNA (1)...(19): siRNA sense strand
ucaggacgcucagcuggua

SEQ ID NO: 130707 - RNA, 19 nt, Homo sapiens
  misc_RNA (1)...(19): siRNA sense strand
caacgucuaccacucauau

SEQ ID NO: 130708 - RNA, 19 nt, Homo sapiens
  misc_RNA (1)...(19): siRNA sense strand
ggaaaacgguccggaugua

SEQ ID NO: 130709 - RNA, 19 nt, Homo sapiens
  misc_RNA (1)...(19): siRNA sense strand
gugaugugcguucagauua

SEQ ID NO: 130710 - RNA, 19 nt, Homo sapiens
  misc_RNA (1)...(19): siRNA sense strand
ccaccuuugucaauguaua

SEQ ID NO: 130711 - RNA, 19 nt, Homo sapiens
  misc_RNA (1)...(19): siRNA sense strand
caugagauaaucacuauug

SEQ ID NO: 130712 - RNA, 19 nt, Homo sapiens
  misc_RNA (1)...(19): siRNA sense strand
ugaugugcguucagauuaa

SEQ ID NO: 130713 - RNA, 19 nt, Homo sapiens
  misc_RNA (1)...(19): siRNA sense strand
gaaggaaugaucugguuca

SEQ ID NO: 130714 - RNA, 19 nt, Homo sapiens
  misc_RNA (1)...(19): siRNA sense strand
aaagguagauggagagacu

SEQ ID NO: 130715 - RNA, 19 nt, Homo sapiens
  misc_RNA (1)...(19): siRNA sense strand
aaacgagccuuuaaaauca

SEQ ID NO: 130716 - RNA, 19 nt, Homo sapiens
  misc_RNA (1)...(19): siRNA sense strand
ggaggauucuucgcaagug

SEQ ID NO: 130717 - RNA, 19 nt, Homo sapiens
  misc_RNA (1)...(19): siRNA sense strand
uccaugagauaaucacuau

SEQ ID NO: 130718 - RNA, 19 nt, Homo sapiens
  misc_RNA (1)...(19): siRNA sense strand
ggccaccuuugucaaugua

SEQ ID NO: 130719 - RNA, 19 nt, Homo sapiens
  misc_RNA (1)...(19): siRNA sense strand
ugugugaucuguaaugaca

SEQ ID NO: 130720 - RNA, 19 nt, Homo sapiens
  misc_RNA (1)...(19): siRNA sense strand
gcaucgcucucuccaccuu

SEQ ID NO: 130721 - RNA, 19 nt, Homo sapiens
  misc_RNA (1)...(19): siRNA sense strand
ccaaugguuuugaugauaa

SEQ ID NO: 130722 - RNA, 19 nt, Homo sapiens
  misc_RNA (1)...(19): siRNA sense strand
caaacgagccuuuaaaauc

SEQ ID NO: 130723 - RNA, 19 nt, Homo sapiens
  misc_RNA (1)...(19): siRNA sense strand
ggauucaaacgagccuuua

SEQ ID NO: 130724 - RNA, 19 nt, Homo sapiens
  misc_RNA (1)...(19): siRNA sense strand
ggguacagaugcuuugucu

SEQ ID NO: 130725 - RNA, 19 nt, Homo sapiens
  misc_RNA (1)...(19): siRNA sense strand
acacagucacaucuuguua

SEQ ID NO: 130726 - RNA, 19 nt, Homo sapiens
  misc_RNA (1)...(19): siRNA sense strand
agaagagccuuugcggauu

SEQ ID NO: 130727 - RNA, 19 nt, Homo sapiens
  misc_RNA (1)...(19): siRNA sense strand
gauuaaguguuuccaugag

SEQ ID NO: 130728 - RNA, 19 nt, Homo sapiens
  misc_RNA (1)...(19): siRNA sense strand
gccagucucugcagaugau

SEQ ID NO: 130729 - RNA, 19 nt, Homo sapiens
  misc_RNA (1)...(19): siRNA sense strand
gguacuuucuccugugugu

SEQ ID NO: 130730 - RNA, 19 nt, Homo sapiens
  misc_RNA (1)...(19): siRNA sense strand
caucauggaucgcuuugac

SEQ ID NO: 130731 - RNA, 19 nt, Homo sapiens
  misc_RNA (1)...(19): siRNA sense strand
guacugagucuggucaaga

SEQ ID NO: 130732 - RNA, 19 nt, Homo sapiens
  misc_RNA (1)...(19): siRNA sense strand
ucaacacgcugcggucuca

SEQ ID NO: 130733 - RNA, 19 nt, Homo sapiens
  misc_RNA (1)...(19): siRNA sense strand
aauaggauucugcauguuu

SEQ ID NO: 130734 - RNA, 19 nt, Homo sapiens
  misc_RNA (1)...(19): siRNA sense strand
cuucgcaaguggauucaaa

SEQ ID NO: 130735 - RNA, 19 nt, Homo sapiens
  misc_RNA (1)...(19): siRNA sense strand
cagcuucacuguggacugu

SEQ ID NO: 130736 - RNA, 19 nt, Homo sapiens
  misc_RNA (1)...(19): siRNA sense strand
uaaauaccaccgguucauu

SEQ ID NO: 130737 - RNA, 19 nt, Homo sapiens
  misc_RNA (1)...(19): siRNA sense strand
acgcugcggucucaucuga

SEQ ID NO: 130738 - RNA, 19 nt, Homo sapiens
  misc_RNA (1)...(19): siRNA sense strand
gauucaaacgagccuuuaa

SEQ ID NO: 130739 - RNA, 19 nt, Homo sapiens
  misc_RNA (1)...(19): siRNA sense strand
gaagaacuggugggugaga

SEQ ID NO: 130740 - RNA, 19 nt, Homo sapiens
  misc_RNA (1)...(19): siRNA sense strand
uaaguguuuccaugagaua

SEQ ID NO: 130741 - RNA, 19 nt, Homo sapiens
  misc_RNA (1)...(19): siRNA sense strand
gaucagcagcuccacaucu

SEQ ID NO: 130742 - RNA, 19 nt, Homo sapiens
  misc_RNA (1)...(19): siRNA sense strand
cuucugcuguccuauguga

SEQ ID NO: 130743 - RNA, 19 nt, Homo sapiens
  misc_RNA (1)...(19): siRNA sense strand
gacugcaguucuacauguu

SEQ ID NO: 130744 - RNA, 19 nt, Homo sapiens
  misc_RNA (1)...(19): siRNA sense strand
gacagugacggauuacuuc

SEQ ID NO: 130745 - RNA, 19 nt, Homo sapiens
  misc_RNA (1)...(19): siRNA sense strand
acgcucagcugguacuuuc

SEQ ID NO: 130746 - RNA, 19 nt, Homo sapiens
  misc_RNA (1)...(19): siRNA sense strand
auagggcccuuuccaacuu

SEQ ID NO: 130747 - RNA, 19 nt, Homo sapiens
  misc_RNA (1)...(19): siRNA sense strand
uugaaggaaugaucugguu

SEQ ID NO: 130748 - RNA, 19 nt, Homo sapiens
  misc_RNA (1)...(19): siRNA sense strand
ggagucagagucagaagca

SEQ ID NO: 130749 - RNA, 19 nt, Homo sapiens
  misc_RNA (1)...(19): siRNA sense strand
cuacaacgucuaccacuca

SEQ ID NO: 130750 - RNA, 19 nt, Homo sapiens
  misc_RNA (1)...(19): siRNA sense strand
gcugcggucucaucugauc

SEQ ID NO: 130751 - RNA, 19 nt, Homo sapiens
  misc_RNA (1)...(19): siRNA sense strand
guauacaucgccaguuuua

SEQ ID NO: 130752 - RNA, 19 nt, Homo sapiens
  misc_RNA (1)...(19): siRNA sense strand
ucaauagggcccuuuccaa

SEQ ID NO: 130753 - RNA, 19 nt, Homo sapiens
  misc_RNA (1)...(19): siRNA sense strand
acagucacaucuuguuauc

SEQ ID NO: 130754 - RNA, 19 nt, Homo sapiens
  misc_RNA (1)...(19): siRNA sense strand
ggugagacagugacggauu

SEQ ID NO: 130755 - RNA, 19 nt, Homo sapiens
  misc_RNA (1)...(19): siRNA sense strand
guaaauaccaccgguucau

SEQ ID NO: 130756 - RNA, 19 nt, Homo sapiens
  misc_RNA (1)...(19): siRNA sense strand
ggugauccagucagucauu

SEQ ID NO: 130757 - RNA, 19 nt, Homo sapiens
  misc_RNA (1)...(19): siRNA sense strand
uaacacagucacaucuugu

SEQ ID NO: 130758 - RNA, 19 nt, Homo sapiens
  misc_RNA (1)...(19): siRNA sense strand
uacugagucuggucaagaa

SEQ ID NO: 130759 - RNA, 19 nt, Homo sapiens
  misc_RNA (1)...(19): siRNA sense strand
uaauaggauucugcauguu

SEQ ID NO: 130760 - RNA, 19 nt, Homo sapiens
  misc_RNA (1)...(19): siRNA sense strand
gaugugcguucagauuaag

SEQ ID NO: 130761 - RNA, 19 nt, Homo sapiens
  misc_RNA (1)...(19): siRNA sense strand
gauggccaccuuugucaau

SEQ ID NO: 130762 - RNA, 19 nt, Homo sapiens
  misc_RNA (1)...(19): siRNA sense strand
ccacaaccuauuugaagga

SEQ ID NO: 130763 - RNA, 19 nt, Homo sapiens
  misc_RNA (1)...(19): siRNA sense strand
agacagugacggauuacuu

SEQ ID NO: 130764 - RNA, 19 nt, Homo sapiens
  misc_RNA (1)...(19): siRNA sense strand
ucauuuaccugggaccaau

SEQ ID NO: 130765 - RNA, 19 nt, Homo sapiens
  misc_RNA (1)...(19): siRNA sense strand
agagucagaagcaaaggua

SEQ ID NO: 130766 - RNA, 19 nt, Homo sapiens
  misc_RNA (1)...(19): siRNA sense strand
uaacccaagcaaacugauu

SEQ ID NO: 130767 - RNA, 19 nt, Homo sapiens
  misc_RNA (1)...(19): siRNA sense strand
acaaugacaccaacagcuu

SEQ ID NO: 130768 - RNA, 19 nt, Homo sapiens
  misc_RNA (1)...(19): siRNA sense strand
ccagagagaagagccuuug

SEQ ID NO: 130769 - RNA, 19 nt, Homo sapiens
  misc_RNA (1)...(19): siRNA sense strand
ucuccuguguguaaacuau

SEQ ID NO: 130770 - RNA, 19 nt, Homo sapiens
  misc_RNA (1)...(19): siRNA sense strand
gcaaagguagauggagaga

SEQ ID NO: 130771 - RNA, 19 nt, Homo sapiens
  misc_RNA (1)...(19): siRNA sense strand
auaggauucugcauguuug

SEQ ID NO: 130772 - RNA, 19 nt, Homo sapiens
  misc_RNA (1)...(19): siRNA sense strand
ccuuuacucucuaucuaau

SEQ ID NO: 130773 - RNA, 19 nt, Homo sapiens
  misc_RNA (1)...(19): siRNA sense strand
uuaaguguuuccaugagau

SEQ ID NO: 130774 - RNA, 19 nt, Homo sapiens
  misc_RNA (1)...(19): siRNA sense strand
agacuuugccaauaccauu

SEQ ID NO: 130775 - RNA, 19 nt, Homo sapiens
  misc_RNA (1)...(19): siRNA sense strand
agucacaucuuguuaucca

SEQ ID NO: 130776 - RNA, 19 nt, Homo sapiens
  misc_RNA (1)...(19): siRNA sense strand
ucauuuccuuuacucucua

SEQ ID NO: 130777 - RNA, 19 nt, Homo sapiens
  misc_RNA (1)...(19): siRNA sense strand
agugacggauuacuucuuc

SEQ ID NO: 130778 - RNA, 19 nt, Homo sapiens
  misc_RNA (1)...(19): siRNA sense strand
cacaaccuauuugaaggaa

SEQ ID NO: 130779 - RNA, 19 nt, Homo sapiens
  misc_RNA (1)...(19): siRNA sense strand
cugcaguucuacauguuug

SEQ ID NO: 130780 - RNA, 19 nt, Homo sapiens
  misc_RNA (1)...(19): siRNA sense strand
caccgguucauuuccuuua

SEQ ID NO: 130781 - RNA, 19 nt, Homo sapiens
  misc_RNA (1)...(19): siRNA sense strand
ugcggauucucaguaaaua

SEQ ID NO: 130782 - RNA, 19 nt, Homo sapiens
  misc_RNA (1)...(19): siRNA sense strand
caaggagucagagucagaa

SEQ ID NO: 130783 - RNA, 19 nt, Homo sapiens
  misc_RNA (1)...(19): siRNA sense strand
cuuugcggauucucaguaa

SEQ ID NO: 130784 - RNA, 19 nt, Homo sapiens
  misc_RNA (1)...(19): siRNA sense strand
cagcagcuccacaucuuca

SEQ ID NO: 130785 - RNA, 19 nt, Homo sapiens
  misc_RNA (1)...(19): siRNA sense strand
gugauccagucagucauug

SEQ ID NO: 130786 - RNA, 19 nt, Homo sapiens
  misc_RNA (1)...(19): siRNA sense strand
cugcaggaguacaacauuc

SEQ ID NO: 130787 - RNA, 19 nt, Homo sapiens
  misc_RNA (1)...(19): siRNA sense strand
cgugaugugcguucagauu

SEQ ID NO: 130788 - RNA, 19 nt, Homo sapiens
  misc_RNA (1)...(19): siRNA sense strand
acaaggagucagagucaga

SEQ ID NO: 130789 - RNA, 19 nt, Homo sapiens
  misc_RNA (1)...(19): siRNA sense strand
agauuaaguguuuccauga

SEQ ID NO: 130790 - RNA, 19 nt, Homo sapiens
  misc_RNA (1)...(19): siRNA sense strand
gucagucauuggcuggaaa

SEQ ID NO: 130791 - RNA, 19 nt, Homo sapiens
  misc_RNA (1)...(19): siRNA sense strand
gugagaggcauccugacuu

SEQ ID NO: 130792 - RNA, 19 nt, Homo sapiens
  misc_RNA (1)...(19): siRNA sense strand
gaaagaagcugcccagaag

SEQ ID NO: 130793 - RNA, 19 nt, Homo sapiens
  misc_RNA (1)...(19): siRNA sense strand
gaacuuggaugacacuauu

SEQ ID NO: 130794 - RNA, 19 nt, Homo sapiens
  misc_RNA (1)...(19): siRNA sense strand
gggaagagguggaugauga

SEQ ID NO: 130795 - RNA, 19 nt, Homo sapiens
  misc_RNA (1)...(19): siRNA sense strand
ggaugaagcuguagcaguu

SEQ ID NO: 130796 - RNA, 19 nt, Homo sapiens
  misc_RNA (1)...(19): siRNA sense strand
gggugaaucucuacauuaa

SEQ ID NO: 130797 - RNA, 19 nt, Homo sapiens
  misc_RNA (1)...(19): siRNA sense strand
gggaaggccuccauauuau

SEQ ID NO: 130798 - RNA, 19 nt, Homo sapiens
  misc_RNA (1)...(19): siRNA sense strand
ucaagaaccuggacaaauc

SEQ ID NO: 130799 - RNA, 19 nt, Homo sapiens
  misc_RNA (1)...(19): siRNA sense strand
ggagagaauuagucgauau

SEQ ID NO: 130800 - RNA, 19 nt, Homo sapiens
  misc_RNA (1)...(19): siRNA sense strand
gaugagaaauuaaggaaag

SEQ ID NO: 130801 - RNA, 19 nt, Homo sapiens
  misc_RNA (1)...(19): siRNA sense strand
caagguggaugaagcugua

SEQ ID NO: 130802 - RNA, 19 nt, Homo sapiens
  misc_RNA (1)...(19): siRNA sense strand
gugaaucucuacauuaaga

SEQ ID NO: 130803 - RNA, 19 nt, Homo sapiens
  misc_RNA (1)...(19): siRNA sense strand
ccaaugccaucuuaaauca

SEQ ID NO: 130804 - RNA, 19 nt, Homo sapiens
  misc_RNA (1)...(19): siRNA sense strand
gaaccuggacaaaucuaua

SEQ ID NO: 130805 - RNA, 19 nt, Homo sapiens
  misc_RNA (1)...(19): siRNA sense strand
uggaagagaugaauggaaa

SEQ ID NO: 130806 - RNA, 19 nt, Homo sapiens
  misc_RNA (1)...(19): siRNA sense strand
gaaacauacuguccugcaa

SEQ ID NO: 130807 - RNA, 19 nt, Homo sapiens
  misc_RNA (1)...(19): siRNA sense strand
ggaauucaccaauguuuau

SEQ ID NO: 130808 - RNA, 19 nt, Homo sapiens
  misc_RNA (1)...(19): siRNA sense strand
ccaaggaauucaccaaugu

SEQ ID NO: 130809 - RNA, 19 nt, Homo sapiens
  misc_RNA (1)...(19): siRNA sense strand
gaacggcucuaaggguuau

SEQ ID NO: 130810 - RNA, 19 nt, Homo sapiens
  misc_RNA (1)...(19): siRNA sense strand
ggaaggccuccauauuaua

SEQ ID NO: 130811 - RNA, 19 nt, Homo sapiens
  misc_RNA (1)...(19): siRNA sense strand
gguaagacccuaaguguca

SEQ ID NO: 130812 - RNA, 19 nt, Homo sapiens
  misc_RNA (1)...(19): siRNA sense strand
gaacuuugaugugauuaag

SEQ ID NO: 130813 - RNA, 19 nt, Homo sapiens
  misc_RNA (1)...(19): siRNA sense strand
gcaagguggugugugauga

SEQ ID NO: 130814 - RNA, 19 nt, Homo sapiens
  misc_RNA (1)...(19): siRNA sense strand
gaaugcugcuggagauaga

SEQ ID NO: 130815 - RNA, 19 nt, Homo sapiens
  misc_RNA (1)...(19): siRNA sense strand
ccaagaggcugccgacaag

SEQ ID NO: 130816 - RNA, 19 nt, Homo sapiens
  misc_RNA (1)...(19): siRNA sense strand
gcacagaugaggccuaauc

SEQ ID NO: 130817 - RNA, 19 nt, Homo sapiens
  misc_RNA (1)...(19): siRNA sense strand
ccaauaaggcuguggaaga

SEQ ID NO: 130818 - RNA, 19 nt, Homo sapiens
  misc_RNA (1)...(19): siRNA sense strand
agggaaggccuccauauua

SEQ ID NO: 130819 - RNA, 19 nt, Homo sapiens
  misc_RNA (1)...(19): siRNA sense strand
uaacaaggcacuuuaugau

SEQ ID NO: 130820 - RNA, 19 nt, Homo sapiens
  misc_RNA (1)...(19): siRNA sense strand
gcuuuggcuuugugaguua

SEQ ID NO: 130821 - RNA, 19 nt, Homo sapiens
  misc_RNA (1)...(19): siRNA sense strand
gaaaggcucaccugaccaa

SEQ ID NO: 130822 - RNA, 19 nt, Homo sapiens
  misc_RNA (1)...(19): siRNA sense strand
caugaacuuugaugugauu

SEQ ID NO: 130823 - RNA, 19 nt, Homo sapiens
  misc_RNA (1)...(19): siRNA sense strand
gccaaggaauucaccaaug

SEQ ID NO: 130824 - RNA, 19 nt, Homo sapiens
  misc_RNA (1)...(19): siRNA sense strand
caaggaaugccaagugcua

SEQ ID NO: 130825 - RNA, 19 nt, Homo sapiens
  misc_RNA (1)...(19): siRNA sense strand
acaaggcacuuuaugauac

SEQ ID NO: 130826 - RNA, 19 nt, Homo sapiens
  misc_RNA (1)...(19): siRNA sense strand
uagcacagaugaggccuaa

SEQ ID NO: 130827 - RNA, 19 nt, Homo sapiens
  misc_RNA (1)...(19): siRNA sense strand
caauaaggcuguggaagag

SEQ ID NO: 130828 - RNA, 19 nt, Homo sapiens
  misc_RNA (1)...(19): siRNA sense strand
ggaugacacuauugaugau

SEQ ID NO: 130829 - RNA, 19 nt, Homo sapiens
  misc_RNA (1)...(19): siRNA sense strand
ucaaugaccgcaaaguauu

SEQ ID NO: 130830 - RNA, 19 nt, Homo sapiens
  misc_RNA (1)...(19): siRNA sense strand
gagccaaagccaaggaauu

SEQ ID NO: 130831 - RNA, 19 nt, Homo sapiens
  misc_RNA (1)...(19): siRNA sense strand
ggaaagccaauccgcauca

SEQ ID NO: 130832 - RNA, 19 nt, Homo sapiens
  misc_RNA (1)...(19): siRNA sense strand
gcuccaagccacuauaugu

SEQ ID NO: 130833 - RNA, 19 nt, Homo sapiens
  misc_RNA (1)...(19): siRNA sense strand
aaagagcuauucagucagu

SEQ ID NO: 130834 - RNA, 19 nt, Homo sapiens
  misc_RNA (1)...(19): siRNA sense strand
uagauaacaaggcacuuua

SEQ ID NO: 130835 - RNA, 19 nt, Homo sapiens
  misc_RNA (1)...(19): siRNA sense strand
aaacggaaauuugaacagu

SEQ ID NO: 130836 - RNA, 19 nt, Homo sapiens
  misc_RNA (1)...(19): siRNA sense strand
uccaaacaaugcauucaaa

SEQ ID NO: 130837 - RNA, 19 nt, Homo sapiens
  misc_RNA (1)...(19): siRNA sense strand
ccgcuuggcuauggacuuu

SEQ ID NO: 130838 - RNA, 19 nt, Homo sapiens
  misc_RNA (1)...(19): siRNA sense strand
acgaguggcuggaaugaga

SEQ ID NO: 130839 - RNA, 19 nt, Homo sapiens
  misc_RNA (1)...(19): siRNA sense strand
agaaagaagcugcccagaa

SEQ ID NO: 130840 - RNA, 19 nt, Homo sapiens
  misc_RNA (1)...(19): siRNA sense strand
caaacaaugcauucaaauc

SEQ ID NO: 130841 - RNA, 19 nt, Homo sapiens
  misc_RNA (1)...(19): siRNA sense strand
gaugagaacggcucuaagg

SEQ ID NO: 130842 - RNA, 19 nt, Homo sapiens
  misc_RNA (1)...(19): siRNA sense strand
gaaggccuccauauuauac

SEQ ID NO: 130843 - RNA, 19 nt, Homo sapiens
  misc_RNA (1)...(19): siRNA sense strand
gaacggcaggcagaguuaa

SEQ ID NO: 130844 - RNA, 19 nt, Homo sapiens
  misc_RNA (1)...(19): siRNA sense strand
caaugaccgcaaaguauuu

SEQ ID NO: 130845 - RNA, 19 nt, Homo sapiens
  misc_RNA (1)...(19): siRNA sense strand
ccugcaaggugguguguga

SEQ ID NO: 130846 - RNA, 19 nt, Homo sapiens
  misc_RNA (1)...(19): siRNA sense strand
ggaaaagaaauaaguggua

SEQ ID NO: 130847 - RNA, 19 nt, Homo sapiens
  misc_RNA (1)...(19): siRNA sense strand
acacgaggaugccaauaag

SEQ ID NO: 130848 - RNA, 19 nt, Homo sapiens
  misc_RNA (1)...(19): siRNA sense strand
ccucaaugaccgcaaagua

SEQ ID NO: 130849 - RNA, 19 nt, Homo sapiens
  misc_RNA (1)...(19): siRNA sense strand
gcuccucaaugaccgcaaa

SEQ ID NO: 130850 - RNA, 19 nt, Homo sapiens
  misc_RNA (1)...(19): siRNA sense strand
cagggaaggccuccauauu

SEQ ID NO: 130851 - RNA, 19 nt, Homo sapiens
  misc_RNA (1)...(19): siRNA sense strand
cgacaaggccaucgagaag

SEQ ID NO: 130852 - RNA, 19 nt, Homo sapiens
  misc_RNA (1)...(19): siRNA sense strand
acaaauacgccuccagugu

SEQ ID NO: 130853 - RNA, 19 nt, Homo sapiens
  misc_RNA (1)...(19): siRNA sense strand
gagagcacuuccugccaau

SEQ ID NO: 130854 - RNA, 19 nt, Homo sapiens
  misc_RNA (1)...(19): siRNA sense strand
cacuauugaugaugagaaa

SEQ ID NO: 130855 - RNA, 19 nt, Homo sapiens
  misc_RNA (1)...(19): siRNA sense strand
gagaauuagucgauaucag

SEQ ID NO: 130856 - RNA, 19 nt, Homo sapiens
  misc_RNA (1)...(19): siRNA sense strand
acggaaauuugaacaguug

SEQ ID NO: 130857 - RNA, 19 nt, Homo sapiens
  misc_RNA (1)...(19): siRNA sense strand
acaaggccaucgagaagau

SEQ ID NO: 130858 - RNA, 19 nt, Homo sapiens
  misc_RNA (1)...(19): siRNA sense strand
aacaaggcacuuuaugaua

SEQ ID NO: 130859 - RNA, 19 nt, Homo sapiens
  misc_RNA (1)...(19): siRNA sense strand
gcaacgaguggcuggaaug

SEQ ID NO: 130860 - RNA, 19 nt, Homo sapiens
  misc_RNA (1)...(19): siRNA sense strand
gaucaauuaccagugcuaa

SEQ ID NO: 130861 - RNA, 19 nt, Homo sapiens
  misc_RNA (1)...(19): siRNA sense strand
ggaaauuugaacaguugaa

SEQ ID NO: 130862 - RNA, 19 nt, Homo sapiens
  misc_RNA (1)...(19): siRNA sense strand
ugggaaacgucuucaucaa

SEQ ID NO: 130863 - RNA, 19 nt, Homo sapiens
  misc_RNA (1)...(19): siRNA sense strand
guaagacccuaagugucaa

SEQ ID NO: 130864 - RNA, 19 nt, Homo sapiens
  misc_RNA (1)...(19): siRNA sense strand
gaaagccaauccgcaucau

SEQ ID NO: 130865 - RNA, 19 nt, Homo sapiens
  misc_RNA (1)...(19): siRNA sense strand
ucaccgaggccaugcugua

SEQ ID NO: 130866 - RNA, 19 nt, Homo sapiens
  misc_RNA (1)...(19): siRNA sense strand
ugaauggcaugcuccucaa

SEQ ID NO: 130867 - RNA, 19 nt, Homo sapiens
  misc_RNA (1)...(19): siRNA sense strand
accaugaacuuugauguga

SEQ ID NO: 130868 - RNA, 19 nt, Homo sapiens
  misc_RNA (1)...(19): siRNA sense strand
gccaaugccaucuuaaauc

SEQ ID NO: 130869 - RNA, 19 nt, Homo sapiens
  misc_RNA (1)...(19): siRNA sense strand
ugaagaagcaaccaaagca

SEQ ID NO: 130870 - RNA, 19 nt, Homo sapiens
  misc_RNA (1)...(19): siRNA sense strand
uggaugacacuauugauga

SEQ ID NO: 130871 - RNA, 19 nt, Homo sapiens
  misc_RNA (1)...(19): siRNA sense strand
gaaacaggagagaauuagu

SEQ ID NO: 130872 - RNA, 19 nt, Homo sapiens
  misc_RNA (1)...(19): siRNA sense strand
gagcuauucagucaguuug

SEQ ID NO: 130873 - RNA, 19 nt, Homo sapiens
  misc_RNA (1)...(19): siRNA sense strand
acucugagcugcugcacau

SEQ ID NO: 130874 - RNA, 19 nt, Homo sapiens
  misc_RNA (1)...(19): siRNA sense strand
agagguggaugaugagagu

SEQ ID NO: 130875 - RNA, 19 nt, Homo sapiens
  misc_RNA (1)...(19): siRNA sense strand
caacgaguggcuggaauga

SEQ ID NO: 130876 - RNA, 19 nt, Homo sapiens
  misc_RNA (1)...(19): siRNA sense strand
gaaaaucuggugugggaaa

SEQ ID NO: 130877 - RNA, 19 nt, Homo sapiens
  misc_RNA (1)...(19): siRNA sense strand
gugucaaggugaugagaga

SEQ ID NO: 130878 - RNA, 19 nt, Homo sapiens
  misc_RNA (1)...(19): siRNA sense strand
caaggcacuuuaugauacu

SEQ ID NO: 130879 - RNA, 19 nt, Homo sapiens
  misc_RNA (1)...(19): siRNA sense strand
ccaaacaaugcauucaaau

SEQ ID NO: 130880 - RNA, 19 nt, Homo sapiens
  misc_RNA (1)...(19): siRNA sense strand
gaugaugagaaauuaagga

SEQ ID NO: 130881 - RNA, 19 nt, Homo sapiens
  misc_RNA (1)...(19): siRNA sense strand
acauuaagaacuuggauga

SEQ ID NO: 130882 - RNA, 19 nt, Homo sapiens
  misc_RNA (1)...(19): siRNA sense strand
caaggaauucaccaauguu

SEQ ID NO: 130883 - RNA, 19 nt, Homo sapiens
  misc_RNA (1)...(19): siRNA sense strand
gugaugagaacggcucuaa

SEQ ID NO: 130884 - RNA, 19 nt, Homo sapiens
  misc_RNA (1)...(19): siRNA sense strand
gggaaacgucuucaucaag

SEQ ID NO: 130885 - RNA, 19 nt, Homo sapiens
  misc_RNA (1)...(19): siRNA sense strand
ggaaugcugcuggagauag

SEQ ID NO: 130886 - RNA, 19 nt, Homo sapiens
  misc_RNA (1)...(19): siRNA sense strand
gaggauggaagaagcaaag

SEQ ID NO: 130887 - RNA, 19 nt, Homo sapiens
  misc_RNA (1)...(19): siRNA sense strand
gagagaauuagucgauauc

SEQ ID NO: 130888 - RNA, 19 nt, Homo sapiens
  misc_RNA (1)...(19): siRNA sense strand
uggacaccaugaacuuuga

SEQ ID NO: 130889 - RNA, 19 nt, Homo sapiens
  misc_RNA (1)...(19): siRNA sense strand
ggcuuuggcuuugugaguu

SEQ ID NO: 130890 - RNA, 19 nt, Homo sapiens
  misc_RNA (1)...(19): siRNA sense strand
caucaagaaccuggacaaa

SEQ ID NO: 130891 - RNA, 19 nt, Homo sapiens
  misc_RNA (1)...(19): siRNA sense strand
cgggaaugcugcuggagau

SEQ ID NO: 130892 - RNA, 19 nt, Homo sapiens
  misc_RNA (1)...(19): siRNA sense strand
caagugcaguccagguuau

SEQ ID NO: 130893 - RNA, 19 nt, Homo sapiens
  misc_RNA (1)...(19): siRNA sense strand
ggccuaaucauauguguga

SEQ ID NO: 130894 - RNA, 19 nt, Homo sapiens
  misc_RNA (1)...(19): siRNA sense strand
acaguuggccuaaucauau

SEQ ID NO: 130895 - RNA, 19 nt, Homo sapiens
  misc_RNA (1)...(19): siRNA sense strand
ccaagugcaguccagguua

SEQ ID NO: 130896 - RNA, 19 nt, Homo sapiens
  misc_RNA (1)...(19): siRNA sense strand
gagacaauacccucauuca

SEQ ID NO: 130897 - RNA, 19 nt, Homo sapiens
  misc_RNA (1)...(19): siRNA sense strand
gaagggaggcaccgagagu

SEQ ID NO: 130898 - RNA, 19 nt, Homo sapiens
  misc_RNA (1)...(19): siRNA sense strand
gaaggugaggccacaguca

SEQ ID NO: 130899 - RNA, 19 nt, Homo sapiens
  misc_RNA (1)...(19): siRNA sense strand
ucaauggccuaagcaagug

SEQ ID NO: 130900 - RNA, 19 nt, Homo sapiens
  misc_RNA (1)...(19): siRNA sense strand
gaggagcccaaaccacuga

SEQ ID NO: 130901 - RNA, 19 nt, Homo sapiens
  misc_RNA (1)...(19): siRNA sense strand
ucuugaggcuggugcugua

SEQ ID NO: 130902 - RNA, 19 nt, Homo sapiens
  misc_RNA (1)...(19): siRNA sense strand
ggagacaauacccucauuc

SEQ ID NO: 130903 - RNA, 19 nt, Homo sapiens
  misc_RNA (1)...(19): siRNA sense strand
cacaguuggccuaaucaua

SEQ ID NO: 130904 - RNA, 19 nt, Homo sapiens
  misc_RNA (1)...(19): siRNA sense strand
ugucugcagugccaaaugu

SEQ ID NO: 130905 - RNA, 19 nt, Homo sapiens
  misc_RNA (1)...(19): siRNA sense strand
cagguuaucgugugaagga

SEQ ID NO: 130906 - RNA, 19 nt, Homo sapiens
  misc_RNA (1)...(19): siRNA sense strand
gagcugacgggcacagugu

SEQ ID NO: 130907 - RNA, 19 nt, Homo sapiens
  misc_RNA (1)...(19): siRNA sense strand
caguuggccuaaucauaug

SEQ ID NO: 130908 - RNA, 19 nt, Homo sapiens
  misc_RNA (1)...(19): siRNA sense strand
gaaaagacaggaggcagaa

SEQ ID NO: 130909 - RNA, 19 nt, Homo sapiens
  misc_RNA (1)...(19): siRNA sense strand
gguauggugguuucucuca

SEQ ID NO: 130910 - RNA, 19 nt, Homo sapiens
  misc_RNA (1)...(19): siRNA sense strand
ccuaaucauaugugugaaa

SEQ ID NO: 130911 - RNA, 19 nt, Homo sapiens
  misc_RNA (1)...(19): siRNA sense strand
gagccucgucaucgucauu

SEQ ID NO: 130912 - RNA, 19 nt, Homo sapiens
  misc_RNA (1)...(19): siRNA sense strand
auuguuugcuccacaguug

SEQ ID NO: 130913 - RNA, 19 nt, Homo sapiens
  misc_RNA (1)...(19): siRNA sense strand
aggagacaauacccucauu

SEQ ID NO: 130914 - RNA, 19 nt, Homo sapiens
  misc_RNA (1)...(19): siRNA sense strand
ccaccucaauggccuaagc

SEQ ID NO: 130915 - RNA, 19 nt, Homo sapiens
  misc_RNA (1)...(19): siRNA sense strand
ggugaggccacagucauug

SEQ ID NO: 130916 - RNA, 19 nt, Homo sapiens
  misc_RNA (1)...(19): siRNA sense strand
ggccguggaggagacaaua

SEQ ID NO: 130917 - RNA, 19 nt, Homo sapiens
  misc_RNA (1)...(19): siRNA sense strand
cuccacaguuggccuaauc

SEQ ID NO: 130918 - RNA, 19 nt, Homo sapiens
  misc_RNA (1)...(19): siRNA sense strand
ccuccaggcaccuacauug

SEQ ID NO: 130919 - RNA, 19 nt, Homo sapiens
  misc_RNA (1)...(19): siRNA sense strand
caggacaucuccaucaaga

SEQ ID NO: 130920 - RNA, 19 nt, Homo sapiens
  misc_RNA (1)...(19): siRNA sense strand
ucaucgacuuuguggcuuu

SEQ ID NO: 130921 - RNA, 19 nt, Homo sapiens
  misc_RNA (1)...(19): siRNA sense strand
uccaggacaucuccaucaa

SEQ ID NO: 130922 - RNA, 19 nt, Homo sapiens
  misc_RNA (1)...(19): siRNA sense strand
accaggagcugaggagugu

SEQ ID NO: 130923 - RNA, 19 nt, Homo sapiens
  misc_RNA (1)...(19): siRNA sense strand
uggcagaaacacccaccua

SEQ ID NO: 130924 - RNA, 19 nt, Homo sapiens
  misc_RNA (1)...(19): siRNA sense strand
caggagcugaggaguguga

SEQ ID NO: 130925 - RNA, 19 nt, Homo sapiens
  misc_RNA (1)...(19): siRNA sense strand
caggacaucuccaucaaga

SEQ ID NO: 130926 - RNA, 19 nt, Homo sapiens
  misc_RNA (1)...(19): siRNA sense strand
ucaucgacuuuguggcuuu

SEQ ID NO: 130927 - RNA, 19 nt, Homo sapiens
  misc_RNA (1)...(19): siRNA sense strand
uccaggacaucuccaucaa

SEQ ID NO: 130928 - RNA, 19 nt, Homo sapiens
  misc_RNA (1)...(19): siRNA sense strand
accaggagcugaggagugu

SEQ ID NO: 130929 - RNA, 19 nt, Homo sapiens
  misc_RNA (1)...(19): siRNA sense strand
uggcagaaacacccaccua

SEQ ID NO: 130930 - RNA, 19 nt, Homo sapiens
  misc_RNA (1)...(19): siRNA sense strand
caggagcugaggaguguga

SEQ ID NO: 130931 - RNA, 19 nt, Homo sapiens
  misc_RNA (1)...(19): siRNA sense strand
agagaaggcuguacaguua

SEQ ID NO: 130932 - RNA, 19 nt, Homo sapiens
  misc_RNA (1)...(19): siRNA sense strand
acacagaaaugacuaugua

SEQ ID NO: 130933 - RNA, 19 nt, Homo sapiens
  misc_RNA (1)...(19): siRNA sense strand
ucaaguacauggacaauga

SEQ ID NO: 130934 - RNA, 19 nt, Homo sapiens
  misc_RNA (1)...(19): siRNA sense strand
acagacagcuaauguguuu

SEQ ID NO: 130935 - RNA, 19 nt, Homo sapiens
  misc_RNA (1)...(19): siRNA sense strand
aacaauugcucaagucuua

SEQ ID NO: 130936 - RNA, 19 nt, Homo sapiens
  misc_RNA (1)...(19): siRNA sense strand
gcaguugaauuacuaggaa

SEQ ID NO: 130937 - RNA, 19 nt, Homo sapiens
  misc_RNA (1)...(19): siRNA sense strand
cuauguagcugcagaaaga

SEQ ID NO: 130938 - RNA, 19 nt, Homo sapiens
  misc_RNA (1)...(19): siRNA sense strand
gaagaaaucaccugcaaca

SEQ ID NO: 130939 - RNA, 19 nt, Homo sapiens
  misc_RNA (1)...(19): siRNA sense strand
ggacaaugauuaugcuaag

SEQ ID NO: 130940 - RNA, 19 nt, Homo sapiens
  misc_RNA (1)...(19): siRNA sense strand
gaagccagauuaugacagu

SEQ ID NO: 130941 - RNA, 19 nt, Homo sapiens
  misc_RNA (1)...(19): siRNA sense strand
gggaagcuguugcccauga

SEQ ID NO: 130942 - RNA, 19 nt, Homo sapiens
  misc_RNA (1)...(19): siRNA sense strand
ugagcaagcuggaaugaug

SEQ ID NO: 130943 - RNA, 19 nt, Homo sapiens
  misc_RNA (1)...(19): siRNA sense strand
guacauggacaaugauuau

SEQ ID NO: 130944 - RNA, 19 nt, Homo sapiens
  misc_RNA (1)...(19): siRNA sense strand
agaggaagaugaauacuca

SEQ ID NO: 130945 - RNA, 19 nt, Homo sapiens
  misc_RNA (1)...(19): siRNA sense strand
ugaaggagaugcagaaacu

SEQ ID NO: 130946 - RNA, 19 nt, Homo sapiens
  misc_RNA (1)...(19): siRNA sense strand
ugccaaagcuuaugagcaa

SEQ ID NO: 130947 - RNA, 19 nt, Homo sapiens
  misc_RNA (1)...(19): siRNA sense strand
guacaguuauaucaacaga

SEQ ID NO: 130948 - RNA, 19 nt, Homo sapiens
  misc_RNA (1)...(19): siRNA sense strand
agaaggcuguacaguuaua

SEQ ID NO: 130949 - RNA, 19 nt, Homo sapiens
  misc_RNA (1)...(19): siRNA sense strand
caacagacagcuaaugugu

SEQ ID NO: 130950 - RNA, 19 nt, Homo sapiens
  misc_RNA (1)...(19): siRNA sense strand
gcagagaaauaccugaaaa

SEQ ID NO: 130951 - RNA, 19 nt, Homo sapiens
  misc_RNA (1)...(19): siRNA sense strand
gcucaagucuuaguucauc

SEQ ID NO: 130952 - RNA, 19 nt, Homo sapiens
  misc_RNA (1)...(19): siRNA sense strand
acaggcaguugaauuacua

SEQ ID NO: 130953 - RNA, 19 nt, Homo sapiens
  misc_RNA (1)...(19): siRNA sense strand
aagaagaaaucaccugcaa

SEQ ID NO: 130954 - RNA, 19 nt, Homo sapiens
  misc_RNA (1)...(19): siRNA sense strand
gcuggaaagcuuauagaaa

SEQ ID NO: 130955 - RNA, 19 nt, Homo sapiens
  misc_RNA (1)...(19): siRNA sense strand
cagugccgcuucugaauau

SEQ ID NO: 130956 - RNA, 19 nt, Homo sapiens
  misc_RNA (1)...(19): siRNA sense strand
gaaaacaauugcucaaguc

SEQ ID NO: 130957 - RNA, 19 nt, Homo sapiens
  misc_RNA (1)...(19): siRNA sense strand
ggaaaagccuccagacuac

SEQ ID NO: 130958 - RNA, 19 nt, Homo sapiens
  misc_RNA (1)...(19): siRNA sense strand
aauggaagccagauuauga

SEQ ID NO: 130959 - RNA, 19 nt, Homo sapiens
  misc_RNA (1)...(19): siRNA sense strand
agacugugcugcccuggaa

SEQ ID NO: 130960 - RNA, 19 nt, Homo sapiens
  misc_RNA (1)...(19): siRNA sense strand
acaguuauaucaacagaca

SEQ ID NO: 130961 - RNA, 19 nt, Homo sapiens
  misc_RNA (1)...(19): siRNA sense strand
cagagaaggcuguacaguu

SEQ ID NO: 130962 - RNA, 19 nt, Homo sapiens
  misc_RNA (1)...(19): siRNA sense strand
gagaaggccagcaugaugu

SEQ ID NO: 130963 - RNA, 19 nt, Homo sapiens
  misc_RNA (1)...(19): siRNA sense strand
ggaagcuguugcccaugaa

SEQ ID NO: 130964 - RNA, 19 nt, Homo sapiens
  misc_RNA (1)...(19): siRNA sense strand
gaaugauguugaaggagau

SEQ ID NO: 130965 - RNA, 19 nt, Homo sapiens
  misc_RNA (1)...(19): siRNA sense strand
gcggcacucucuauucaga

SEQ ID NO: 130966 - RNA, 19 nt, Homo sapiens
  misc_RNA (1)...(19): siRNA sense strand
ggcacucucuauucagaaa

SEQ ID NO: 130967 - RNA, 19 nt, Homo sapiens
  misc_RNA (1)...(19): siRNA sense strand
cuggaaagcuuauagaaaa

SEQ ID NO: 130968 - RNA, 19 nt, Homo sapiens
  misc_RNA (1)...(19): siRNA sense strand
gaucaggugucagaugucu

SEQ ID NO: 130969 - RNA, 19 nt, Homo sapiens
  misc_RNA (1)...(19): siRNA sense strand
cagcuaauguguuugaaaa

SEQ ID NO: 130970 - RNA, 19 nt, Homo sapiens
  misc_RNA (1)...(19): siRNA sense strand
aagaucaggugucagaugu

SEQ ID NO: 130971 - RNA, 19 nt, Homo sapiens
  misc_RNA (1)...(19): siRNA sense strand
acgacaggcaguugaauua

SEQ ID NO: 130972 - RNA, 19 nt, Homo sapiens
  misc_RNA (1)...(19): siRNA sense strand
uagcaucccuggguucaau

SEQ ID NO: 130973 - RNA, 19 nt, Homo sapiens
  misc_RNA (1)...(19): siRNA sense strand
aagcuggaaugauguugaa

SEQ ID NO: 130974 - RNA, 19 nt, Homo sapiens
  misc_RNA (1)...(19): siRNA sense strand
ugaauacucaggaggacua

SEQ ID NO: 130975 - RNA, 19 nt, Homo sapiens
  misc_RNA (1)...(19): siRNA sense strand
uauaucaacagacagcuaa

SEQ ID NO: 130976 - RNA, 19 nt, Homo sapiens
  misc_RNA (1)...(19): siRNA sense strand
gaaaauaauagggcucuuu

SEQ ID NO: 130977 - RNA, 19 nt, Homo sapiens
  misc_RNA (1)...(19): siRNA sense strand
uaguucaucuacacagaaa

SEQ ID NO: 130978 - RNA, 19 nt, Homo sapiens
  misc_RNA (1)...(19): siRNA sense strand
ugacagugccgcuucugaa

SEQ ID NO: 130979 - RNA, 19 nt, Homo sapiens
  misc_RNA (1)...(19): siRNA sense strand
caagaucaggugucagaug

SEQ ID NO: 130980 - RNA, 19 nt, Homo sapiens
  misc_RNA (1)...(19): siRNA sense strand
agaccaagaucagguguca

SEQ ID NO: 130981 - RNA, 19 nt, Homo sapiens
  misc_RNA (1)...(19): siRNA sense strand
gagaauuauccaacuuguu

SEQ ID NO: 130982 - RNA, 19 nt, Homo sapiens
  misc_RNA (1)...(19): siRNA sense strand
ugagaaggccagcaugaug

SEQ ID NO: 130983 - RNA, 19 nt, Homo sapiens
  misc_RNA (1)...(19): siRNA sense strand
agacagcuaauguguuuga

SEQ ID NO: 130984 - RNA, 19 nt, Homo sapiens
  misc_RNA (1)...(19): siRNA sense strand
ugagaauuauccaacuugu

SEQ ID NO: 130985 - RNA, 19 nt, Homo sapiens
  misc_RNA (1)...(19): siRNA sense strand
gaaggagaugcagaaacua

SEQ ID NO: 130986 - RNA, 19 nt, Homo sapiens
  misc_RNA (1)...(19): siRNA sense strand
ugaagguuaugaccagcaa

SEQ ID NO: 130987 - RNA, 19 nt, Homo sapiens
  misc_RNA (1)...(19): siRNA sense strand
gacaggcaguugaauuacu

SEQ ID NO: 130988 - RNA, 19 nt, Homo sapiens
  misc_RNA (1)...(19): siRNA sense strand
gcuguacaguuauaucaac

SEQ ID NO: 130989 - RNA, 19 nt, Homo sapiens
  misc_RNA (1)...(19): siRNA sense strand
ccguucagcuaauugagaa

SEQ ID NO: 130990 - RNA, 19 nt, Homo sapiens
  misc_RNA (1)...(19): siRNA sense strand
acagugccgcuucugaaua

SEQ ID NO: 130991 - RNA, 19 nt, Homo sapiens
  misc_RNA (1)...(19): siRNA sense strand
ugccacggcugcugaugaa

SEQ ID NO: 130992 - RNA, 19 nt, Homo sapiens
  misc_RNA (1)...(19): siRNA sense strand
acucaccgcuuuucaagua

SEQ ID NO: 130993 - RNA, 19 nt, Homo sapiens
  misc_RNA (1)...(19): siRNA sense strand
guucaucuacacagaaaug

SEQ ID NO: 130994 - RNA, 19 nt, Homo sapiens
  misc_RNA (1)...(19): siRNA sense strand
cagaggccguucagcuaau

SEQ ID NO: 130995 - RNA, 19 nt, Homo sapiens
  misc_RNA (1)...(19): siRNA sense strand
ugaagaggaagaugaauac

SEQ ID NO: 130996 - RNA, 19 nt, Homo sapiens
  misc_RNA (1)...(19): siRNA sense strand
ccacggcugcugaugaaga

SEQ ID NO: 130997 - RNA, 19 nt, Homo sapiens
  misc_RNA (1)...(19): siRNA sense strand
gaagcuguugcccaugaaa

SEQ ID NO: 130998 - RNA, 19 nt, Homo sapiens
  misc_RNA (1)...(19): siRNA sense strand
gaggacguagguuugauga

SEQ ID NO: 130999 - RNA, 19 nt, Homo sapiens
  misc_RNA (1)...(19): siRNA sense strand
gcuaauguguuugaaaaug

SEQ ID NO: 131000 - RNA, 19 nt, Homo sapiens
  misc_RNA (1)...(19): siRNA sense strand
gagaaggcuguacaguuau

SEQ ID NO: 131001 - RNA, 19 nt, Homo sapiens
  misc_RNA (1)...(19): siRNA sense strand
ccagcaugauguaucuaga

SEQ ID NO: 131002 - RNA, 19 nt, Homo sapiens
  misc_RNA (1)...(19): siRNA sense strand
caagcuggaaugauguuga

SEQ ID NO: 131003 - RNA, 19 nt, Homo sapiens
  misc_RNA (1)...(19): siRNA sense strand
gcuggaacaccucgccaaa

SEQ ID NO: 131004 - RNA, 19 nt, Homo sapiens
  misc_RNA (1)...(19): siRNA sense strand
aggcggcacucucuauuca

SEQ ID NO: 131005 - RNA, 19 nt, Homo sapiens
  misc_RNA (1)...(19): siRNA sense strand
agcaugauguaucuagaaa

SEQ ID NO: 131006 - RNA, 19 nt, Homo sapiens
  misc_RNA (1)...(19): siRNA sense strand
cagcaugauguaucuagaa

SEQ ID NO: 131007 - RNA, 19 nt, Homo sapiens
  misc_RNA (1)...(19): siRNA sense strand
gagcaagcuggaaugaugu

SEQ ID NO: 131008 - RNA, 19 nt, Homo sapiens
  misc_RNA (1)...(19): siRNA sense strand
caguugaauuacuaggaaa

SEQ ID NO: 131009 - RNA, 19 nt, Homo sapiens
  misc_RNA (1)...(19): siRNA sense strand
augaagaggaagaugaaua

SEQ ID NO: 131010 - RNA, 19 nt, Homo sapiens
  misc_RNA (1)...(19): siRNA sense strand
ugaugaagaggaagaugaa

SEQ ID NO: 131011 - RNA, 19 nt, Homo sapiens
  misc_RNA (1)...(19): siRNA sense strand
gucugcaacucaccgcuuu

SEQ ID NO: 131012 - RNA, 19 nt, Homo sapiens
  misc_RNA (1)...(19): siRNA sense strand
cuggaaugauguugaagga

SEQ ID NO: 131013 - RNA, 19 nt, Homo sapiens
  misc_RNA (1)...(19): siRNA sense strand
gcuaagcugggccugaguu

SEQ ID NO: 131014 - RNA, 19 nt, Homo sapiens
  misc_RNA (1)...(19): siRNA sense strand
gacagugccgcuucugaau

SEQ ID NO: 131015 - RNA, 19 nt, Homo sapiens
  misc_RNA (1)...(19): siRNA sense strand
ucgccaaagcagagaaaua

SEQ ID NO: 131016 - RNA, 19 nt, Homo sapiens
  misc_RNA (1)...(19): siRNA sense strand
uggaacaccucgccaaagc

SEQ ID NO: 131017 - RNA, 19 nt, Homo sapiens
  misc_RNA (1)...(19): siRNA sense strand
agaaggccagcaugaugua

SEQ ID NO: 131018 - RNA, 19 nt, Homo sapiens
  misc_RNA (1)...(19): siRNA sense strand
aaauguugauccagagaag

SEQ ID NO: 131019 - RNA, 19 nt, Homo sapiens
  misc_RNA (1)...(19): siRNA sense strand
gaaaacggcaccccagaca

SEQ ID NO: 131020 - RNA, 19 nt, Homo sapiens
  misc_RNA (1)...(19): siRNA sense strand
gaugaggcggcacucucua

SEQ ID NO: 131021 - RNA, 19 nt, Homo sapiens
  misc_RNA (1)...(19): siRNA sense strand
aaaugaagaacgcuuacga

SEQ ID NO: 131022 - RNA, 19 nt, Homo sapiens
  misc_RNA (1)...(19): siRNA sense strand
ucaagucuuaguucaucua

SEQ ID NO: 131023 - RNA, 19 nt, Homo sapiens
  misc_RNA (1)...(19): siRNA sense strand
gaggcggcacucucuauuc

SEQ ID NO: 131024 - RNA, 19 nt, Homo sapiens
  misc_RNA (1)...(19): siRNA sense strand
ugaaaaugaagaacgcuua

SEQ ID NO: 131025 - RNA, 19 nt, Homo sapiens
  misc_RNA (1)...(19): siRNA sense strand
gggccugaguuuggugguu

SEQ ID NO: 131026 - RNA, 19 nt, Homo sapiens
  misc_RNA (1)...(19): siRNA sense strand
gauguguccgggagagcua

SEQ ID NO: 131027 - RNA, 19 nt, Homo sapiens
  misc_RNA (1)...(19): siRNA sense strand
agaggccguucagcuaauu

SEQ ID NO: 131028 - RNA, 19 nt, Homo sapiens
  misc_RNA (1)...(19): siRNA sense strand
aaacaauugcucaagucuu

SEQ ID NO: 131029 - RNA, 19 nt, Homo sapiens
  misc_RNA (1)...(19): siRNA sense strand
gaaggcuguacaguuauau

SEQ ID NO: 131030 - RNA, 19 nt, Homo sapiens
  misc_RNA (1)...(19): siRNA sense strand
cuuaguucaucuacacaga

SEQ ID NO: 131031 - RNA, 19 nt, Homo sapiens
  misc_RNA (1)...(19): siRNA sense strand
caaucgagaucuacacaga

SEQ ID NO: 131032 - RNA, 19 nt, Homo sapiens
  misc_RNA (1)...(19): siRNA sense strand
gcaaacauguucaaaaugg

SEQ ID NO: 131033 - RNA, 19 nt, Homo sapiens
  misc_RNA (1)...(19): siRNA sense strand
aagaggccauuaacuguuu

SEQ ID NO: 131034 - RNA, 19 nt, Homo sapiens
  misc_RNA (1)...(19): siRNA sense strand
cuucuucucuggccucuuu

SEQ ID NO: 131035 - RNA, 19 nt, Homo sapiens
  misc_RNA (1)...(19): siRNA sense strand
agaaggccauugacaucua

SEQ ID NO: 131036 - RNA, 19 nt, Homo sapiens
  misc_RNA (1)...(19): siRNA sense strand
caacaagugucugcugaag

SEQ ID NO: 131037 - RNA, 19 nt, Homo sapiens
  misc_RNA (1)...(19): siRNA sense strand
gaaugcaaguugaugaaaa

SEQ ID NO: 131038 - RNA, 19 nt, Homo sapiens
  misc_RNA (1)...(19): siRNA sense strand
guacagcgccaaagacuac

SEQ ID NO: 131039 - RNA, 19 nt, Homo sapiens
  misc_RNA (1)...(19): siRNA sense strand
cagcaaacauguucaaaau

SEQ ID NO: 131040 - RNA, 19 nt, Homo sapiens
  misc_RNA (1)...(19): siRNA sense strand
ccaagaggccauuaacugu

SEQ ID NO: 131041 - RNA, 19 nt, Homo sapiens
  misc_RNA (1)...(19): siRNA sense strand
acaagugucugcugaaggu

SEQ ID NO: 131042 - RNA, 19 nt, Homo sapiens
  misc_RNA (1)...(19): siRNA sense strand
agaaggccauugcccacua

SEQ ID NO: 131043 - RNA, 19 nt, Homo sapiens
  misc_RNA (1)...(19): siRNA sense strand
agacagaguugguggacau

SEQ ID NO: 131044 - RNA, 19 nt, Homo sapiens
  misc_RNA (1)...(19): siRNA sense strand
acacagacaugggccgauu

SEQ ID NO: 131045 - RNA, 19 nt, Homo sapiens
  misc_RNA (1)...(19): siRNA sense strand
caagaggccauuaacuguu

SEQ ID NO: 131046 - RNA, 19 nt, Homo sapiens
  misc_RNA (1)...(19): siRNA sense strand
ggaaugcaaguugaugaaa

SEQ ID NO: 131047 - RNA, 19 nt, Homo sapiens
  misc_RNA (1)...(19): siRNA sense strand
ccauugacaucuacgaaca

SEQ ID NO: 131048 - RNA, 19 nt, Homo sapiens
  misc_RNA (1)...(19): siRNA sense strand
ggaagcaugcgaaaucuac

SEQ ID NO: 131049 - RNA, 19 nt, Homo sapiens
  misc_RNA (1)...(19): siRNA sense strand
gaaggccauugacaucuac

SEQ ID NO: 131050 - RNA, 19 nt, Homo sapiens
  misc_RNA (1)...(19): siRNA sense strand
caacagcucagccaacaag

SEQ ID NO: 131051 - RNA, 19 nt, Homo sapiens
  misc_RNA (1)...(19): siRNA sense strand
gaggaagcaugcgaaaucu

SEQ ID NO: 131052 - RNA, 19 nt, Homo sapiens
  misc_RNA (1)...(19): siRNA sense strand
uggcaacgcauucaagaaa

SEQ ID NO: 131053 - RNA, 19 nt, Homo sapiens
  misc_RNA (1)...(19): siRNA sense strand
gaacucgcaguccuucuuc

SEQ ID NO: 131054 - RNA, 19 nt, Homo sapiens
  misc_RNA (1)...(19): siRNA sense strand
ucaaguacagcgccaaaga

SEQ ID NO: 131055 - RNA, 19 nt, Homo sapiens
  misc_RNA (1)...(19): siRNA sense strand
gagcagcaaacauguucaa

SEQ ID NO: 131056 - RNA, 19 nt, Homo sapiens
  misc_RNA (1)...(19): siRNA sense strand
ugcugaagguggcugguua

SEQ ID NO: 131057 - RNA, 19 nt, Homo sapiens
  misc_RNA (1)...(19): siRNA sense strand
gaaggccauugcccacuac

SEQ ID NO: 131058 - RNA, 19 nt, Homo sapiens
  misc_RNA (1)...(19): siRNA sense strand
gggaaugcaaguugaugaa

SEQ ID NO: 131059 - RNA, 19 nt, Homo sapiens
  misc_RNA (1)...(19): siRNA sense strand
agaggaagcaugcgaaauc

SEQ ID NO: 131060 - RNA, 19 nt, Homo sapiens
  misc_RNA (1)...(19): siRNA sense strand
gcaacgcauucaagaaagc

SEQ ID NO: 131061 - RNA, 19 nt, Homo sapiens
  misc_RNA (1)...(19): siRNA sense strand
guucccagcuuucucugau

SEQ ID NO: 131062 - RNA, 19 nt, Homo sapiens
  misc_RNA (1)...(19): siRNA sense strand
ggacaucgagaaggccauu

SEQ ID NO: 131063 - RNA, 19 nt, Homo sapiens
  misc_RNA (1)...(19): siRNA sense strand
ucagaaggccauugacauc

SEQ ID NO: 131064 - RNA, 19 nt, Homo sapiens
  misc_RNA (1)...(19): siRNA sense strand
cgccagagcagcaaacaug

SEQ ID NO: 131065 - RNA, 19 nt, Homo sapiens
  misc_RNA (1)...(19): siRNA sense strand
ggcaacgcauucaagaaag

SEQ ID NO: 131066 - RNA, 19 nt, Homo sapiens
  misc_RNA (1)...(19): siRNA sense strand
cagcucagccaacaagugu

SEQ ID NO: 131067 - RNA, 19 nt, Homo sapiens
  misc_RNA (1)...(19): siRNA sense strand
gaucuaugagacagaguug

SEQ ID NO: 131068 - RNA, 19 nt, Homo sapiens
  misc_RNA (1)...(19): siRNA sense strand
gcagcaaacauguucaaaa

SEQ ID NO: 131069 - RNA, 19 nt, Homo sapiens
  misc_RNA (1)...(19): siRNA sense strand
agcagaauguggacagcua

SEQ ID NO: 131070 - RNA, 19 nt, Homo sapiens
  misc_RNA (1)...(19): siRNA sense strand
caagcuggcuguccaaaag

SEQ ID NO: 131071 - RNA, 19 nt, Homo sapiens
  misc_RNA (1)...(19): siRNA sense strand
cagagcagcaaacauguuc

SEQ ID NO: 131072 - RNA, 19 nt, Homo sapiens
  misc_RNA (1)...(19): siRNA sense strand
gcuggcaacgcauucaaga

SEQ ID NO: 131073 - RNA, 19 nt, Homo sapiens
  misc_RNA (1)...(19): siRNA sense strand
cagaguugguggacaucga

SEQ ID NO: 131074 - RNA, 19 nt, Homo sapiens
  misc_RNA (1)...(19): siRNA sense strand
ccauugcugagaucuauga

SEQ ID NO: 131075 - RNA, 19 nt, Homo sapiens
  misc_RNA (1)...(19): siRNA sense strand
cgagaucuacacagacaug

SEQ ID NO: 131076 - RNA, 19 nt, Homo sapiens
  misc_RNA (1)...(19): siRNA sense strand
cccaagaggccauuaacug

SEQ ID NO: 131077 - RNA, 19 nt, Homo sapiens
  misc_RNA (1)...(19): siRNA sense strand
ccagagcagcaaacauguu

SEQ ID NO: 131078 - RNA, 19 nt, Homo sapiens
  misc_RNA (1)...(19): siRNA sense strand
gaugcgagcaaucgagauc

SEQ ID NO: 131079 - RNA, 19 nt, Homo sapiens
  misc_RNA (1)...(19): siRNA sense strand
uaucagaaggccauugaca

SEQ ID NO: 131080 - RNA, 19 nt, Homo sapiens
  misc_RNA (1)...(19): siRNA sense strand
cuccauugcugagaucuau

SEQ ID NO: 131081 - RNA, 19 nt, Homo sapiens
  misc_RNA (1)...(19): siRNA sense strand
ugcgagcaaucgagaucua

SEQ ID NO: 131082 - RNA, 19 nt, Homo sapiens
  misc_RNA (1)...(19): siRNA sense strand
ccacuucugcaucgacaug

SEQ ID NO: 131083 - RNA, 19 nt, Homo sapiens
  misc_RNA (1)...(19): siRNA sense strand
gaacagguggggaccaaug

SEQ ID NO: 131084 - RNA, 19 nt, Homo sapiens
  misc_RNA (1)...(19): siRNA sense strand
uccaacagcucagccaaca

SEQ ID NO: 131085 - RNA, 19 nt, Homo sapiens
  misc_RNA (1)...(19): siRNA sense strand
ugaagaacucgcaguccuu

SEQ ID NO: 131086 - RNA, 19 nt, Homo sapiens
  misc_RNA (1)...(19): siRNA sense strand
ggccauuaacuguuugaug

SEQ ID NO: 131087 - RNA, 19 nt, Homo sapiens
  misc_RNA (1)...(19): siRNA sense strand
ccaacaagugucugcugaa

SEQ ID NO: 131088 - RNA, 19 nt, Homo sapiens
  misc_RNA (1)...(19): siRNA sense strand
gaggcggagcgcaaaguga

SEQ ID NO: 131089 - RNA, 19 nt, Homo sapiens
  misc_RNA (1)...(19): siRNA sense strand
aagcaccacaucuccauug

SEQ ID NO: 131090 - RNA, 19 nt, Homo sapiens
  misc_RNA (1)...(19): siRNA sense strand
ggacgcuggcaacgcauuc

SEQ ID NO: 131091 - RNA, 19 nt, Homo sapiens
  misc_RNA (1)...(19): siRNA sense strand
ucccagcuuucucugauuc

SEQ ID NO: 131092 - RNA, 19 nt, Homo sapiens
  misc_RNA (1)...(19): siRNA sense strand
ggccauugacaucuacgaa

SEQ ID NO: 131093 - RNA, 19 nt, Homo sapiens
  misc_RNA (1)...(19): siRNA sense strand
gaaauaagcuggcacagau

SEQ ID NO: 131094 - RNA, 19 nt, Homo sapiens
  misc_RNA (1)...(19): siRNA sense strand
gaaaguuuaugauccagua

SEQ ID NO: 131095 - RNA, 19 nt, Homo sapiens
  misc_RNA (1)...(19): siRNA sense strand
gaaagucaagcaacgauua

SEQ ID NO: 131096 - RNA, 19 nt, Homo sapiens
  misc_RNA (1)...(19): siRNA sense strand
ugaccgaucucccauauuu

SEQ ID NO: 131097 - RNA, 19 nt, Homo sapiens
  misc_RNA (1)...(19): siRNA sense strand
aaacaugcauuuccucuuu

SEQ ID NO: 131098 - RNA, 19 nt, Homo sapiens
  misc_RNA (1)...(19): siRNA sense strand
gcauucagcuauaaagaaa

SEQ ID NO: 131099 - RNA, 19 nt, Homo sapiens
  misc_RNA (1)...(19): siRNA sense strand
gagauagugugcaaggaua

SEQ ID NO: 131100 - RNA, 19 nt, Homo sapiens
  misc_RNA (1)...(19): siRNA sense strand
agacagggcuugccaaaug

SEQ ID NO: 131101 - RNA, 19 nt, Homo sapiens
  misc_RNA (1)...(19): siRNA sense strand
ggagacaauuccuguggua

SEQ ID NO: 131102 - RNA, 19 nt, Homo sapiens
  misc_RNA (1)...(19): siRNA sense strand
gacaaaggguggaggauau

SEQ ID NO: 131103 - RNA, 19 nt, Homo sapiens
  misc_RNA (1)...(19): siRNA sense strand
gaaaauguguccagagauu

SEQ ID NO: 131104 - RNA, 19 nt, Homo sapiens
  misc_RNA (1)...(19): siRNA sense strand
gagcuauucuugauuacaa

SEQ ID NO: 131105 - RNA, 19 nt, Homo sapiens
  misc_RNA (1)...(19): siRNA sense strand
gaaagugcuuacccaaaug

SEQ ID NO: 131106 - RNA, 19 nt, Homo sapiens
  misc_RNA (1)...(19): siRNA sense strand
gcaaggauaugaggaacuu

SEQ ID NO: 131107 - RNA, 19 nt, Homo sapiens
  misc_RNA (1)...(19): siRNA sense strand
ugaaagugcuuacccaaau

SEQ ID NO: 131108 - RNA, 19 nt, Homo sapiens
  misc_RNA (1)...(19): siRNA sense strand
auuaauggcuggaaaguuu

SEQ ID NO: 131109 - RNA, 19 nt, Homo sapiens
  misc_RNA (1)...(19): siRNA sense strand
ucuaaucccuucuuuguga

SEQ ID NO: 131110 - RNA, 19 nt, Homo sapiens
  misc_RNA (1)...(19): siRNA sense strand
gagagucacuacgcaaauu

SEQ ID NO: 131111 - RNA, 19 nt, Homo sapiens
  misc_RNA (1)...(19): siRNA sense strand
gcaguaagaauugcugaua

SEQ ID NO: 131112 - RNA, 19 nt, Homo sapiens
  misc_RNA (1)...(19): siRNA sense strand
uuaaagccauugugaaaga

SEQ ID NO: 131113 - RNA, 19 nt, Homo sapiens
  misc_RNA (1)...(19): siRNA sense strand
gcaguuuccuucagcauuc

SEQ ID NO: 131114 - RNA, 19 nt, Homo sapiens
  misc_RNA (1)...(19): siRNA sense strand
gauccaguaucugaauaua

SEQ ID NO: 131115 - RNA, 19 nt, Homo sapiens
  misc_RNA (1)...(19): siRNA sense strand
uaacggacaggcacuauuu

SEQ ID NO: 131116 - RNA, 19 nt, Homo sapiens
  misc_RNA (1)...(19): siRNA sense strand
ugugaaagaugucauguau

SEQ ID NO: 131117 - RNA, 19 nt, Homo sapiens
  misc_RNA (1)...(19): siRNA sense strand
ggaagaacagaguaaacua

SEQ ID NO: 131118 - RNA, 19 nt, Homo sapiens
  misc_RNA (1)...(19): siRNA sense strand
cgcauuggcuggaauauau

SEQ ID NO: 131119 - RNA, 19 nt, Homo sapiens
  misc_RNA (1)...(19): siRNA sense strand
guauagagauagugugcaa

SEQ ID NO: 131120 - RNA, 19 nt, Homo sapiens
  misc_RNA (1)...(19): siRNA sense strand
caguaagaauugcugauaa

SEQ ID NO: 131121 - RNA, 19 nt, Homo sapiens
  misc_RNA (1)...(19): siRNA sense strand
guaauuaugaguucuguga

SEQ ID NO: 131122 - RNA, 19 nt, Homo sapiens
  misc_RNA (1)...(19): siRNA sense strand
gaacagcagcgauucaaag

SEQ ID NO: 131123 - RNA, 19 nt, Homo sapiens
  misc_RNA (1)...(19): siRNA sense strand
ggaaauaagcuggcacaga

SEQ ID NO: 131124 - RNA, 19 nt, Homo sapiens
  misc_RNA (1)...(19): siRNA sense strand
gaacagcccagcucacauc

SEQ ID NO: 131125 - RNA, 19 nt, Homo sapiens
  misc_RNA (1)...(19): siRNA sense strand
ggaacuugcggcuugcuua

SEQ ID NO: 131126 - RNA, 19 nt, Homo sapiens
  misc_RNA (1)...(19): siRNA sense strand
ugacggacuuuaagcugua

SEQ ID NO: 131127 - RNA, 19 nt, Homo sapiens
  misc_RNA (1)...(19): siRNA sense strand
auguauaucugcccauuua

SEQ ID NO: 131128 - RNA, 19 nt, Homo sapiens
  misc_RNA (1)...(19): siRNA sense strand
ggaagaggcuccacuuuuc

SEQ ID NO: 131129 - RNA, 19 nt, Homo sapiens
  misc_RNA (1)...(19): siRNA sense strand
gcacagucacacaagcuua

SEQ ID NO: 131130 - RNA, 19 nt, Homo sapiens
  misc_RNA (1)...(19): siRNA sense strand
caacaaacaugcauuuccu

SEQ ID NO: 131131 - RNA, 19 nt, Homo sapiens
  misc_RNA (1)...(19): siRNA sense strand
gaccucagaugcccauuca

SEQ ID NO: 131132 - RNA, 19 nt, Homo sapiens
  misc_RNA (1)...(19): siRNA sense strand
gacaggcacuauuugcauu

SEQ ID NO: 131133 - RNA, 19 nt, Homo sapiens
  misc_RNA (1)...(19): siRNA sense strand
gaagaacagaguaaacuag

SEQ ID NO: 131134 - RNA, 19 nt, Homo sapiens
  misc_RNA (1)...(19): siRNA sense strand
gcaaaugacaaggcaguuu

SEQ ID NO: 131135 - RNA, 19 nt, Homo sapiens
  misc_RNA (1)...(19): siRNA sense strand
acacaagcuuaucaucuuu

SEQ ID NO: 131136 - RNA, 19 nt, Homo sapiens
  misc_RNA (1)...(19): siRNA sense strand
cacacaagcuuaucaucuu

SEQ ID NO: 131137 - RNA, 19 nt, Homo sapiens
  misc_RNA (1)...(19): siRNA sense strand
gacagggcuugccaaauga

SEQ ID NO: 131138 - RNA, 19 nt, Homo sapiens
  misc_RNA (1)...(19): siRNA sense strand
gcacagagccauggagaca

SEQ ID NO: 131139 - RNA, 19 nt, Homo sapiens
  misc_RNA (1)...(19): siRNA sense strand
gcugaccgaucucccauau

SEQ ID NO: 131140 - RNA, 19 nt, Homo sapiens
  misc_RNA (1)...(19): siRNA sense strand
ugacagugacggacuuuaa

SEQ ID NO: 131141 - RNA, 19 nt, Homo sapiens
  misc_RNA (1)...(19): siRNA sense strand
gcuacaauuucuagucaga

SEQ ID NO: 131142 - RNA, 19 nt, Homo sapiens
  misc_RNA (1)...(19): siRNA sense strand
ccaggagaaucaauuaaag

SEQ ID NO: 131143 - RNA, 19 nt, Homo sapiens
  misc_RNA (1)...(19): siRNA sense strand
gcaguuuguugauuguguu

SEQ ID NO: 131144 - RNA, 19 nt, Homo sapiens
  misc_RNA (1)...(19): siRNA sense strand
caccuacccugccaucauu

SEQ ID NO: 131145 - RNA, 19 nt, Homo sapiens
  misc_RNA (1)...(19): siRNA sense strand
gacaauuccugugguauag

SEQ ID NO: 131146 - RNA, 19 nt, Homo sapiens
  misc_RNA (1)...(19): siRNA sense strand
ggacgcauuggcuggaaua

SEQ ID NO: 131147 - RNA, 19 nt, Homo sapiens
  misc_RNA (1)...(19): siRNA sense strand
gaacuugcggcuugcuuau

SEQ ID NO: 131148 - RNA, 19 nt, Homo sapiens
  misc_RNA (1)...(19): siRNA sense strand
gcucacaucucuggcuaug

SEQ ID NO: 131149 - RNA, 19 nt, Homo sapiens
  misc_RNA (1)...(19): siRNA sense strand
gcucuaagggauggaaaua

SEQ ID NO: 131150 - RNA, 19 nt, Homo sapiens
  misc_RNA (1)...(19): siRNA sense strand
ccauauuucugcaguuugu

SEQ ID NO: 131151 - RNA, 19 nt, Homo sapiens
  misc_RNA (1)...(19): siRNA sense strand
caucugugguggugcauug

SEQ ID NO: 131152 - RNA, 19 nt, Homo sapiens
  misc_RNA (1)...(19): siRNA sense strand
gauuucagguucagugaca

SEQ ID NO: 131153 - RNA, 19 nt, Homo sapiens
  misc_RNA (1)...(19): siRNA sense strand
agacaauuccugugguaua

SEQ ID NO: 131154 - RNA, 19 nt, Homo sapiens
  misc_RNA (1)...(19): siRNA sense strand
agaguaaacuagggauauu

SEQ ID NO: 131155 - RNA, 19 nt, Homo sapiens
  misc_RNA (1)...(19): siRNA sense strand
cuauuugcauucagcuaua

SEQ ID NO: 131156 - RNA, 19 nt, Homo sapiens
  misc_RNA (1)...(19): siRNA sense strand
cuucagcauucgaguuuaa

SEQ ID NO: 131157 - RNA, 19 nt, Homo sapiens
  misc_RNA (1)...(19): siRNA sense strand
gagagggacccgcauuuua

SEQ ID NO: 131158 - RNA, 19 nt, Homo sapiens
  misc_RNA (1)...(19): siRNA sense strand
ucuaagggauggaaauaag

SEQ ID NO: 131159 - RNA, 19 nt, Homo sapiens
  misc_RNA (1)...(19): siRNA sense strand
ggacaggcacuauuugcau

SEQ ID NO: 131160 - RNA, 19 nt, Homo sapiens
  misc_RNA (1)...(19): siRNA sense strand
ggaaagucaagcaacgauu

SEQ ID NO: 131161 - RNA, 19 nt, Homo sapiens
  misc_RNA (1)...(19): siRNA sense strand
cauuuggaauuguggguaa

SEQ ID NO: 131162 - RNA, 19 nt, Homo sapiens
  misc_RNA (1)...(19): siRNA sense strand
caaaugacaaggcaguuuc

SEQ ID NO: 131163 - RNA, 19 nt, Homo sapiens
  misc_RNA (1)...(19): siRNA sense strand
uggauaagcuuuggacaca

SEQ ID NO: 131164 - RNA, 19 nt, Homo sapiens
  misc_RNA (1)...(19): siRNA sense strand
ucacaucucuggcuaugcu

SEQ ID NO: 131165 - RNA, 19 nt, Homo sapiens
  misc_RNA (1)...(19): siRNA sense strand
caacuaguguaaaagauga

SEQ ID NO: 131166 - RNA, 19 nt, Homo sapiens
  misc_RNA (1)...(19): siRNA sense strand
gaaaaggaguggauaagcu

SEQ ID NO: 131167 - RNA, 19 nt, Homo sapiens
  misc_RNA (1)...(19): siRNA sense strand
acaggaccauuaaaggauu

SEQ ID NO: 131168 - RNA, 19 nt, Homo sapiens
  misc_RNA (1)...(19): siRNA sense strand
uggaggauaugaaagugaa

SEQ ID NO: 131169 - RNA, 19 nt, Homo sapiens
  misc_RNA (1)...(19): siRNA sense strand
acuugcggcuugcuuauaa

SEQ ID NO: 131170 - RNA, 19 nt, Homo sapiens
  misc_RNA (1)...(19): siRNA sense strand
agacaaaggguggaggaua

SEQ ID NO: 131171 - RNA, 19 nt, Homo sapiens
  misc_RNA (1)...(19): siRNA sense strand
uccaguaucugaauauaag

SEQ ID NO: 131172 - RNA, 19 nt, Homo sapiens
  misc_RNA (1)...(19): siRNA sense strand
acuuuaagcuguacuucaa

SEQ ID NO: 131173 - RNA, 19 nt, Homo sapiens
  misc_RNA (1)...(19): siRNA sense strand
cuacaggaccauuaaagga

SEQ ID NO: 131174 - RNA, 19 nt, Homo sapiens
  misc_RNA (1)...(19): siRNA sense strand
gcauuggcuggaauauaua

SEQ ID NO: 131175 - RNA, 19 nt, Homo sapiens
  misc_RNA (1)...(19): siRNA sense strand
cagguucagugacaucaga

SEQ ID NO: 131176 - RNA, 19 nt, Homo sapiens
  misc_RNA (1)...(19): siRNA sense strand
cagagucccuguguuguca

SEQ ID NO: 131177 - RNA, 19 nt, Homo sapiens
  misc_RNA (1)...(19): siRNA sense strand
aaacaggaagaacagagua

SEQ ID NO: 131178 - RNA, 19 nt, Homo sapiens
  misc_RNA (1)...(19): siRNA sense strand
acagagccauggagacaau

SEQ ID NO: 131179 - RNA, 19 nt, Homo sapiens
  misc_RNA (1)...(19): siRNA sense strand
gaguaaacuagggauauuu

SEQ ID NO: 131180 - RNA, 19 nt, Homo sapiens
  misc_RNA (1)...(19): siRNA sense strand
cagcccagcucacaucucu

SEQ ID NO: 131181 - RNA, 19 nt, Homo sapiens
  misc_RNA (1)...(19): siRNA sense strand
gagauuguguacccuucga

SEQ ID NO: 131182 - RNA, 19 nt, Homo sapiens
  misc_RNA (1)...(19): siRNA sense strand
ugaaugguguaaacagcuu

SEQ ID NO: 131183 - RNA, 19 nt, Homo sapiens
  misc_RNA (1)...(19): siRNA sense strand
cagaaaauguguccagaga

SEQ ID NO: 131184 - RNA, 19 nt, Homo sapiens
  misc_RNA (1)...(19): siRNA sense strand
ccucaacaaacaugcauuu

SEQ ID NO: 131185 - RNA, 19 nt, Homo sapiens
  misc_RNA (1)...(19): siRNA sense strand
acaagcuuaucaucuuuga

SEQ ID NO: 131186 - RNA, 19 nt, Homo sapiens
  misc_RNA (1)...(19): siRNA sense strand
guauaucugcccauuuaug

SEQ ID NO: 131187 - RNA, 19 nt, Homo sapiens
  misc_RNA (1)...(19): siRNA sense strand
uugcuagucugagucauuu

SEQ ID NO: 131188 - RNA, 19 nt, Homo sapiens
  misc_RNA (1)...(19): siRNA sense strand
caggaccauuaaaggauuu

SEQ ID NO: 131189 - RNA, 19 nt, Homo sapiens
  misc_RNA (1)...(19): siRNA sense strand
caaacaauaauggaugcua

SEQ ID NO: 131190 - RNA, 19 nt, Homo sapiens
  misc_RNA (1)...(19): siRNA sense strand
gaaugguguaaacagcuua

SEQ ID NO: 131191 - RNA, 19 nt, Homo sapiens
  misc_RNA (1)...(19): siRNA sense strand
ucccauauuucugcaguuu

SEQ ID NO: 131192 - RNA, 19 nt, Homo sapiens
  misc_RNA (1)...(19): siRNA sense strand
gugaaagugcuuacccaaa

SEQ ID NO: 131193 - RNA, 19 nt, Homo sapiens
  misc_RNA (1)...(19): siRNA sense strand
gaaauaagcuggcacagau

SEQ ID NO: 131194 - RNA, 19 nt, Homo sapiens
  misc_RNA (1)...(19): siRNA sense strand
gaaaguuuaugauccagua

SEQ ID NO: 131195 - RNA, 19 nt, Homo sapiens
  misc_RNA (1)...(19): siRNA sense strand
gaaagucaagcaacgauua

SEQ ID NO: 131196 - RNA, 19 nt, Homo sapiens
  misc_RNA (1)...(19): siRNA sense strand
ugaccgaucucccauauuu

SEQ ID NO: 131197 - RNA, 19 nt, Homo sapiens
  misc_RNA (1)...(19): siRNA sense strand
aaacaugcauuuccucuuu

SEQ ID NO: 131198 - RNA, 19 nt, Homo sapiens
  misc_RNA (1)...(19): siRNA sense strand
gcauucagcuauaaagaaa

SEQ ID NO: 131199 - RNA, 19 nt, Homo sapiens
  misc_RNA (1)...(19): siRNA sense strand
gagauagugugcaaggaua

SEQ ID NO: 131200 - RNA, 19 nt, Homo sapiens
  misc_RNA (1)...(19): siRNA sense strand
agacagggcuugccaaaug

SEQ ID NO: 131201 - RNA, 19 nt, Homo sapiens
  misc_RNA (1)...(19): siRNA sense strand
ggagacaauuccuguggua

SEQ ID NO: 131202 - RNA, 19 nt, Homo sapiens
  misc_RNA (1)...(19): siRNA sense strand
gacaaaggguggaggauau

SEQ ID NO: 131203 - RNA, 19 nt, Homo sapiens
  misc_RNA (1)...(19): siRNA sense strand
gaaaauguguccagagauu

SEQ ID NO: 131204 - RNA, 19 nt, Homo sapiens
  misc_RNA (1)...(19): siRNA sense strand
gagcuauucuugauuacaa

SEQ ID NO: 131205 - RNA, 19 nt, Homo sapiens
  misc_RNA (1)...(19): siRNA sense strand
gaaagugcuuacccaaaug

SEQ ID NO: 131206 - RNA, 19 nt, Homo sapiens
  misc_RNA (1)...(19): siRNA sense strand
gcaaggauaugaggaacuu

SEQ ID NO: 131207 - RNA, 19 nt, Homo sapiens
  misc_RNA (1)...(19): siRNA sense strand
ugaaagugcuuacccaaau

SEQ ID NO: 131208 - RNA, 19 nt, Homo sapiens
  misc_RNA (1)...(19): siRNA sense strand
auuaauggcuggaaaguuu

SEQ ID NO: 131209 - RNA, 19 nt, Homo sapiens
  misc_RNA (1)...(19): siRNA sense strand
gagagucacuacgcaaauu

SEQ ID NO: 131210 - RNA, 19 nt, Homo sapiens
  misc_RNA (1)...(19): siRNA sense strand
gcaguaagaauugcugaua

SEQ ID NO: 131211 - RNA, 19 nt, Homo sapiens
  misc_RNA (1)...(19): siRNA sense strand
uuaaagccauugugaaaga

SEQ ID NO: 131212 - RNA, 19 nt, Homo sapiens
  misc_RNA (1)...(19): siRNA sense strand
gcaguuuccuucagcauuc

SEQ ID NO: 131213 - RNA, 19 nt, Homo sapiens
  misc_RNA (1)...(19): siRNA sense strand
gauccaguaucugaauaua

SEQ ID NO: 131214 - RNA, 19 nt, Homo sapiens
  misc_RNA (1)...(19): siRNA sense strand
uaacggacaggcacuauuu

SEQ ID NO: 131215 - RNA, 19 nt, Homo sapiens
  misc_RNA (1)...(19): siRNA sense strand
ugugaaagaugucauguau

SEQ ID NO: 131216 - RNA, 19 nt, Homo sapiens
  misc_RNA (1)...(19): siRNA sense strand
ggaagaacagaguaaacua

SEQ ID NO: 131217 - RNA, 19 nt, Homo sapiens
  misc_RNA (1)...(19): siRNA sense strand
cgcauuggcuggaauauau

SEQ ID NO: 131218 - RNA, 19 nt, Homo sapiens
  misc_RNA (1)...(19): siRNA sense strand
guauagagauagugugcaa

SEQ ID NO: 131219 - RNA, 19 nt, Homo sapiens
  misc_RNA (1)...(19): siRNA sense strand
caguaagaauugcugauaa

SEQ ID NO: 131220 - RNA, 19 nt, Homo sapiens
  misc_RNA (1)...(19): siRNA sense strand
guaauuaugaguucuguga

SEQ ID NO: 131221 - RNA, 19 nt, Homo sapiens
  misc_RNA (1)...(19): siRNA sense strand
gaacagcagcgauucaaag

SEQ ID NO: 131222 - RNA, 19 nt, Homo sapiens
  misc_RNA (1)...(19): siRNA sense strand
ggaaauaagcuggcacaga

SEQ ID NO: 131223 - RNA, 19 nt, Homo sapiens
  misc_RNA (1)...(19): siRNA sense strand
gaacagcccagcucacauc

SEQ ID NO: 131224 - RNA, 19 nt, Homo sapiens
  misc_RNA (1)...(19): siRNA sense strand
ggaacuugcggcuugcuua

SEQ ID NO: 131225 - RNA, 19 nt, Homo sapiens
  misc_RNA (1)...(19): siRNA sense strand
ugacggacuuuaagcugua

SEQ ID NO: 131226 - RNA, 19 nt, Homo sapiens
  misc_RNA (1)...(19): siRNA sense strand
auguauaucugcccauuua

SEQ ID NO: 131227 - RNA, 19 nt, Homo sapiens
  misc_RNA (1)...(19): siRNA sense strand
ggaagaggcuccacuuuuc

SEQ ID NO: 131228 - RNA, 19 nt, Homo sapiens
  misc_RNA (1)...(19): siRNA sense strand
gcacagucacacaagcuua

SEQ ID NO: 131229 - RNA, 19 nt, Homo sapiens
  misc_RNA (1)...(19): siRNA sense strand
caacaaacaugcauuuccu

SEQ ID NO: 131230 - RNA, 19 nt, Homo sapiens
  misc_RNA (1)...(19): siRNA sense strand
gacaggcacuauuugcauu

SEQ ID NO: 131231 - RNA, 19 nt, Homo sapiens
  misc_RNA (1)...(19): siRNA sense strand
gaagaacagaguaaacuag

SEQ ID NO: 131232 - RNA, 19 nt, Homo sapiens
  misc_RNA (1)...(19): siRNA sense strand
gcaaaugacaaggcaguuu

SEQ ID NO: 131233 - RNA, 19 nt, Homo sapiens
  misc_RNA (1)...(19): siRNA sense strand
acacaagcuuaucaucuuu

SEQ ID NO: 131234 - RNA, 19 nt, Homo sapiens
  misc_RNA (1)...(19): siRNA sense strand
cacacaagcuuaucaucuu

SEQ ID NO: 131235 - RNA, 19 nt, Homo sapiens
  misc_RNA (1)...(19): siRNA sense strand
gacagggcuugccaaauga

SEQ ID NO: 131236 - RNA, 19 nt, Homo sapiens
  misc_RNA (1)...(19): siRNA sense strand
gcacagagccauggagaca

SEQ ID NO: 131237 - RNA, 19 nt, Homo sapiens
  misc_RNA (1)...(19): siRNA sense strand
gcugaccgaucucccauau

SEQ ID NO: 131238 - RNA, 19 nt, Homo sapiens
  misc_RNA (1)...(19): siRNA sense strand
ugacagugacggacuuuaa

SEQ ID NO: 131239 - RNA, 19 nt, Homo sapiens
  misc_RNA (1)...(19): siRNA sense strand
gcuacaauuucuagucaga

SEQ ID NO: 131240 - RNA, 19 nt, Homo sapiens
  misc_RNA (1)...(19): siRNA sense strand
ccaggagaaucaauuaaag

SEQ ID NO: 131241 - RNA, 19 nt, Homo sapiens
  misc_RNA (1)...(19): siRNA sense strand
gcaguuuguugauuguguu

SEQ ID NO: 131242 - RNA, 19 nt, Homo sapiens
  misc_RNA (1)...(19): siRNA sense strand
caccuacccugccaucauu

SEQ ID NO: 131243 - RNA, 19 nt, Homo sapiens
  misc_RNA (1)...(19): siRNA sense strand
gacaauuccugugguauag

SEQ ID NO: 131244 - RNA, 19 nt, Homo sapiens
  misc_RNA (1)...(19): siRNA sense strand
ggacgcauuggcuggaaua

SEQ ID NO: 131245 - RNA, 19 nt, Homo sapiens
  misc_RNA (1)...(19): siRNA sense strand
gaacuugcggcuugcuuau

SEQ ID NO: 131246 - RNA, 19 nt, Homo sapiens
  misc_RNA (1)...(19): siRNA sense strand
gcucacaucucuggcuaug

SEQ ID NO: 131247 - RNA, 19 nt, Homo sapiens
  misc_RNA (1)...(19): siRNA sense strand
gcucuaagggauggaaaua

SEQ ID NO: 131248 - RNA, 19 nt, Homo sapiens
  misc_RNA (1)...(19): siRNA sense strand
ccauauuucugcaguuugu

SEQ ID NO: 131249 - RNA, 19 nt, Homo sapiens
  misc_RNA (1)...(19): siRNA sense strand
caucugugguggugcauug

SEQ ID NO: 131250 - RNA, 19 nt, Homo sapiens
  misc_RNA (1)...(19): siRNA sense strand
gauuucagguucagugaca

SEQ ID NO: 131251 - RNA, 19 nt, Homo sapiens
  misc_RNA (1)...(19): siRNA sense strand
agacaauuccugugguaua

SEQ ID NO: 131252 - RNA, 19 nt, Homo sapiens
  misc_RNA (1)...(19): siRNA sense strand
agaguaaacuagggauauu

SEQ ID NO: 131253 - RNA, 19 nt, Homo sapiens
  misc_RNA (1)...(19): siRNA sense strand
cuauuugcauucagcuaua

SEQ ID NO: 131254 - RNA, 19 nt, Homo sapiens
  misc_RNA (1)...(19): siRNA sense strand
cuucagcauucgaguuuaa

SEQ ID NO: 131255 - RNA, 19 nt, Homo sapiens
  misc_RNA (1)...(19): siRNA sense strand
ucuaagggauggaaauaag

SEQ ID NO: 131256 - RNA, 19 nt, Homo sapiens
  misc_RNA (1)...(19): siRNA sense strand
ggacaggcacuauuugcau

SEQ ID NO: 131257 - RNA, 19 nt, Homo sapiens
  misc_RNA (1)...(19): siRNA sense strand
gagagggacccgcauuuua

SEQ ID NO: 131258 - RNA, 19 nt, Homo sapiens
  misc_RNA (1)...(19): siRNA sense strand
ggaaagucaagcaacgauu

SEQ ID NO: 131259 - RNA, 19 nt, Homo sapiens
  misc_RNA (1)...(19): siRNA sense strand
caaaugacaaggcaguuuc

SEQ ID NO: 131260 - RNA, 19 nt, Homo sapiens
  misc_RNA (1)...(19): siRNA sense strand
uggauaagcuuuggacaca

SEQ ID NO: 131261 - RNA, 19 nt, Homo sapiens
  misc_RNA (1)...(19): siRNA sense strand
ucacaucucuggcuaugcu

SEQ ID NO: 131262 - RNA, 19 nt, Homo sapiens
  misc_RNA (1)...(19): siRNA sense strand
caacuaguguaaaagauga

SEQ ID NO: 131263 - RNA, 19 nt, Homo sapiens
  misc_RNA (1)...(19): siRNA sense strand
gaaaaggaguggauaagcu

SEQ ID NO: 131264 - RNA, 19 nt, Homo sapiens
  misc_RNA (1)...(19): siRNA sense strand
acaggaccauuaaaggauu

SEQ ID NO: 131265 - RNA, 19 nt, Homo sapiens
  misc_RNA (1)...(19): siRNA sense strand
uggaggauaugaaagugaa

SEQ ID NO: 131266 - RNA, 19 nt, Homo sapiens
  misc_RNA (1)...(19): siRNA sense strand
acuugcggcuugcuuauaa

SEQ ID NO: 131267 - RNA, 19 nt, Homo sapiens
  misc_RNA (1)...(19): siRNA sense strand
agacaaaggguggaggaua

SEQ ID NO: 131268 - RNA, 19 nt, Homo sapiens
  misc_RNA (1)...(19): siRNA sense strand
uccaguaucugaauauaag

SEQ ID NO: 131269 - RNA, 19 nt, Homo sapiens
  misc_RNA (1)...(19): siRNA sense strand
acuuuaagcuguacuucaa

SEQ ID NO: 131270 - RNA, 19 nt, Homo sapiens
  misc_RNA (1)...(19): siRNA sense strand
cuacaggaccauuaaagga

SEQ ID NO: 131271 - RNA, 19 nt, Homo sapiens
  misc_RNA (1)...(19): siRNA sense strand
gcauuggcuggaauauaua

SEQ ID NO: 131272 - RNA, 19 nt, Homo sapiens
  misc_RNA (1)...(19): siRNA sense strand
cagagucccuguguuguca

SEQ ID NO: 131273 - RNA, 19 nt, Homo sapiens
  misc_RNA (1)...(19): siRNA sense strand
cagguucagugacaucaga

SEQ ID NO: 131274 - RNA, 19 nt, Homo sapiens
  misc_RNA (1)...(19): siRNA sense strand
aaacaggaagaacagagua

SEQ ID NO: 131275 - RNA, 19 nt, Homo sapiens
  misc_RNA (1)...(19): siRNA sense strand
acagagccauggagacaau

SEQ ID NO: 131276 - RNA, 19 nt, Homo sapiens
  misc_RNA (1)...(19): siRNA sense strand
gaguaaacuagggauauuu

SEQ ID NO: 131277 - RNA, 19 nt, Homo sapiens
  misc_RNA (1)...(19): siRNA sense strand
ugaaugguguaaacagcuu

SEQ ID NO: 131278 - RNA, 19 nt, Homo sapiens
  misc_RNA (1)...(19): siRNA sense strand
cagaaaauguguccagaga

SEQ ID NO: 131279 - RNA, 19 nt, Homo sapiens
  misc_RNA (1)...(19): siRNA sense strand
cagcccagcucacaucucu

SEQ ID NO: 131280 - RNA, 19 nt, Homo sapiens
  misc_RNA (1)...(19): siRNA sense strand
gagauuguguacccuucga

SEQ ID NO: 131281 - RNA, 19 nt, Homo sapiens
  misc_RNA (1)...(19): siRNA sense strand
ccucaacaaacaugcauuu

SEQ ID NO: 131282 - RNA, 19 nt, Homo sapiens
  misc_RNA (1)...(19): siRNA sense strand
acaagcuuaucaucuuuga

SEQ ID NO: 131283 - RNA, 19 nt, Homo sapiens
  misc_RNA (1)...(19): siRNA sense strand
guauaucugcccauuuaug

SEQ ID NO: 131284 - RNA, 19 nt, Homo sapiens
  misc_RNA (1)...(19): siRNA sense strand
caggaccauuaaaggauuu

SEQ ID NO: 131285 - RNA, 19 nt, Homo sapiens
  misc_RNA (1)...(19): siRNA sense strand
guaaacuagggauauuuga

SEQ ID NO: 131286 - RNA, 19 nt, Homo sapiens
  misc_RNA (1)...(19): siRNA sense strand
ucccauauuucugcaguuu

SEQ ID NO: 131287 - RNA, 19 nt, Homo sapiens
  misc_RNA (1)...(19): siRNA sense strand
gugaaagugcuuacccaaa

SEQ ID NO: 131288 - RNA, 19 nt, Homo sapiens
  misc_RNA (1)...(19): siRNA sense strand
caaacaauaauggaugcua

SEQ ID NO: 131289 - RNA, 19 nt, Homo sapiens
  misc_RNA (1)...(19): siRNA sense strand
gaaugguguaaacagcuua

SEQ ID NO: 131290 - RNA, 19 nt, Homo sapiens
  misc_RNA (1)...(19): siRNA sense strand
guuacuacaggaccauuaa

SEQ ID NO: 131291 - RNA, 19 nt, Homo sapiens
  misc_RNA (1)...(19): siRNA sense strand
cgaguuuaaugagcuauuc

SEQ ID NO: 131292 - RNA, 19 nt, Homo sapiens
  misc_RNA (1)...(19): siRNA sense strand
gauuugaaacucucguaga

SEQ ID NO: 131293 - RNA, 19 nt, Homo sapiens
  misc_RNA (1)...(19): siRNA sense strand
gauagaagcuuuggagaaa

SEQ ID NO: 131294 - RNA, 19 nt, Homo sapiens
  misc_RNA (1)...(19): siRNA sense strand
gaaagaagccuacuaucaa

SEQ ID NO: 131295 - RNA, 19 nt, Homo sapiens
  misc_RNA (1)...(19): siRNA sense strand
gcaguuauaucaugaaugu

SEQ ID NO: 131296 - RNA, 19 nt, Homo sapiens
  misc_RNA (1)...(19): siRNA sense strand
gcugaaggaccauuuauua

SEQ ID NO: 131297 - RNA, 19 nt, Homo sapiens
  misc_RNA (1)...(19): siRNA sense strand
caccaaacaugaugaagua

SEQ ID NO: 131298 - RNA, 19 nt, Homo sapiens
  misc_RNA (1)...(19): siRNA sense strand
caaacaugaugaaguagua

SEQ ID NO: 131299 - RNA, 19 nt, Homo sapiens
  misc_RNA (1)...(19): siRNA sense strand
gugaacagcuggccaaaga

SEQ ID NO: 131300 - RNA, 19 nt, Homo sapiens
  misc_RNA (1)...(19): siRNA sense strand
gaacacagcaagaauggaa

SEQ ID NO: 131301 - RNA, 19 nt, Homo sapiens
  misc_RNA (1)...(19): siRNA sense strand
gagguugacuggcaggaua

SEQ ID NO: 131302 - RNA, 19 nt, Homo sapiens
  misc_RNA (1)...(19): siRNA sense strand
gacaaucacuggcuguauu

SEQ ID NO: 131303 - RNA, 19 nt, Homo sapiens
  misc_RNA (1)...(19): siRNA sense strand
ccaaagaauugcaguuaga

SEQ ID NO: 131304 - RNA, 19 nt, Homo sapiens
  misc_RNA (1)...(19): siRNA sense strand
gaaaggaggagucaaggaa

SEQ ID NO: 131305 - RNA, 19 nt, Homo sapiens
  misc_RNA (1)...(19): siRNA sense strand
gaaggaccauuuauuacug

SEQ ID NO: 131306 - RNA, 19 nt, Homo sapiens
  misc_RNA (1)...(19): siRNA sense strand
gcaggaaugucucgcaguu

SEQ ID NO: 131307 - RNA, 19 nt, Homo sapiens
  misc_RNA (1)...(19): siRNA sense strand
aaguaaagcucaauaguga

SEQ ID NO: 131308 - RNA, 19 nt, Homo sapiens
  misc_RNA (1)...(19): siRNA sense strand
gaaguaaagcucaauagug

SEQ ID NO: 131309 - RNA, 19 nt, Homo sapiens
  misc_RNA (1)...(19): siRNA sense strand
aaagaagccuacuaucaaa

SEQ ID NO: 131310 - RNA, 19 nt, Homo sapiens
  misc_RNA (1)...(19): siRNA sense strand
caauggagauagcaaaguu

SEQ ID NO: 131311 - RNA, 19 nt, Homo sapiens
  misc_RNA (1)...(19): siRNA sense strand
gaagaucacguucagaaga

SEQ ID NO: 131312 - RNA, 19 nt, Homo sapiens
  misc_RNA (1)...(19): siRNA sense strand
gaaaagauaucaccaccaa

SEQ ID NO: 131313 - RNA, 19 nt, Homo sapiens
  misc_RNA (1)...(19): siRNA sense strand
gguaggagauggaauugga

SEQ ID NO: 131314 - RNA, 19 nt, Homo sapiens
  misc_RNA (1)...(19): siRNA sense strand
aaagaucgcuucaguaaac

SEQ ID NO: 131315 - RNA, 19 nt, Homo sapiens
  misc_RNA (1)...(19): siRNA sense strand
gcagagagcuggaauuccu

SEQ ID NO: 131316 - RNA, 19 nt, Homo sapiens
  misc_RNA (1)...(19): siRNA sense strand
caacaugccuacucagaag

SEQ ID NO: 131317 - RNA, 19 nt, Homo sapiens
  misc_RNA (1)...(19): siRNA sense strand
gaacgagaacucuucaaug

SEQ ID NO: 131318 - RNA, 19 nt, Homo sapiens
  misc_RNA (1)...(19): siRNA sense strand
uuaaagaucgcuucaguaa

SEQ ID NO: 131319 - RNA, 19 nt, Homo sapiens
  misc_RNA (1)...(19): siRNA sense strand
gaaagaacacagcaagaau

SEQ ID NO: 131320 - RNA, 19 nt, Homo sapiens
  misc_RNA (1)...(19): siRNA sense strand
gaaguaguaugugggagaa

SEQ ID NO: 131321 - RNA, 19 nt, Homo sapiens
  misc_RNA (1)...(19): siRNA sense strand
gcucaauagugaagaaaug

SEQ ID NO: 131322 - RNA, 19 nt, Homo sapiens
  misc_RNA (1)...(19): siRNA sense strand
ggaauuggaauggauuuaa

SEQ ID NO: 131323 - RNA, 19 nt, Homo sapiens
  misc_RNA (1)...(19): siRNA sense strand
gaaaggagucuguugucuu

SEQ ID NO: 131324 - RNA, 19 nt, Homo sapiens
  misc_RNA (1)...(19): siRNA sense strand
ugaaagaagccuacuauca

SEQ ID NO: 131325 - RNA, 19 nt, Homo sapiens
  misc_RNA (1)...(19): siRNA sense strand
gagaaaacauugauacuuc

SEQ ID NO: 131326 - RNA, 19 nt, Homo sapiens
  misc_RNA (1)...(19): siRNA sense strand
gaauaugaugcacagcuua

SEQ ID NO: 131327 - RNA, 19 nt, Homo sapiens
  misc_RNA (1)...(19): siRNA sense strand
gaaaagugcauccuuauga

SEQ ID NO: 131328 - RNA, 19 nt, Homo sapiens
  misc_RNA (1)...(19): siRNA sense strand
gauagcaaaguuuccauuu

SEQ ID NO: 131329 - RNA, 19 nt, Homo sapiens
  misc_RNA (1)...(19): siRNA sense strand
ucagaagaauggaaggaaa

SEQ ID NO: 131330 - RNA, 19 nt, Homo sapiens
  misc_RNA (1)...(19): siRNA sense strand
guaaaguuauaccuacaga

SEQ ID NO: 131331 - RNA, 19 nt, Homo sapiens
  misc_RNA (1)...(19): siRNA sense strand
gaacagcuggccaaagaau

SEQ ID NO: 131332 - RNA, 19 nt, Homo sapiens
  misc_RNA (1)...(19): siRNA sense strand
ggccaaagaauugcaguua

SEQ ID NO: 131333 - RNA, 19 nt, Homo sapiens
  misc_RNA (1)...(19): siRNA sense strand
gagggagcauggaggauga

SEQ ID NO: 131334 - RNA, 19 nt, Homo sapiens
  misc_RNA (1)...(19): siRNA sense strand
ugaaguugcuguugcugaa

SEQ ID NO: 131335 - RNA, 19 nt, Homo sapiens
  misc_RNA (1)...(19): siRNA sense strand
gauuucagguuuaaagauc

SEQ ID NO: 131336 - RNA, 19 nt, Homo sapiens
  misc_RNA (1)...(19): siRNA sense strand
ggaaaggagucuguugucu

SEQ ID NO: 131337 - RNA, 19 nt, Homo sapiens
  misc_RNA (1)...(19): siRNA sense strand
cagcaagaauggaaaauuu

SEQ ID NO: 131338 - RNA, 19 nt, Homo sapiens
  misc_RNA (1)...(19): siRNA sense strand
caucacagcagauaaugaa

SEQ ID NO: 131339 - RNA, 19 nt, Homo sapiens
  misc_RNA (1)...(19): siRNA sense strand
gcaggauacucgugaugau

SEQ ID NO: 131340 - RNA, 19 nt, Homo sapiens
  misc_RNA (1)...(19): siRNA sense strand
uaaacuaaauccacguaag

SEQ ID NO: 131341 - RNA, 19 nt, Homo sapiens
  misc_RNA (1)...(19): siRNA sense strand
aaacuaaauccacguaaga

SEQ ID NO: 131342 - RNA, 19 nt, Homo sapiens
  misc_RNA (1)...(19): siRNA sense strand
gauaucaccaccaaacaug

SEQ ID NO: 131343 - RNA, 19 nt, Homo sapiens
  misc_RNA (1)...(19): siRNA sense strand
guuuaaagaucgcuucagu

SEQ ID NO: 131344 - RNA, 19 nt, Homo sapiens
  misc_RNA (1)...(19): siRNA sense strand
aaacaucacagcagauaau

SEQ ID NO: 131345 - RNA, 19 nt, Homo sapiens
  misc_RNA (1)...(19): siRNA sense strand
aagaucacguucagaagaa

SEQ ID NO: 131346 - RNA, 19 nt, Homo sapiens
  misc_RNA (1)...(19): siRNA sense strand
gaagaagaagcugccguuu

SEQ ID NO: 131347 - RNA, 19 nt, Homo sapiens
  misc_RNA (1)...(19): siRNA sense strand
caaugcuguuucaggcuua

SEQ ID NO: 131348 - RNA, 19 nt, Homo sapiens
  misc_RNA (1)...(19): siRNA sense strand
ggaauuccuuguccaacag

SEQ ID NO: 131349 - RNA, 19 nt, Homo sapiens
  misc_RNA (1)...(19): siRNA sense strand
agacagcgauagcucugaa

SEQ ID NO: 131350 - RNA, 19 nt, Homo sapiens
  misc_RNA (1)...(19): siRNA sense strand
gccaaagaauugcaguuag

SEQ ID NO: 131351 - RNA, 19 nt, Homo sapiens
  misc_RNA (1)...(19): siRNA sense strand
gaaugugccaucaagguau

SEQ ID NO: 131352 - RNA, 19 nt, Homo sapiens
  misc_RNA (1)...(19): siRNA sense strand
gagauggaauuggaaugga

SEQ ID NO: 131353 - RNA, 19 nt, Homo sapiens
  misc_RNA (1)...(19): siRNA sense strand
gagaaagaacacagcaaga

SEQ ID NO: 131354 - RNA, 19 nt, Homo sapiens
  misc_RNA (1)...(19): siRNA sense strand
agaaagaacacagcaagaa

SEQ ID NO: 131355 - RNA, 19 nt, Homo sapiens
  misc_RNA (1)...(19): siRNA sense strand
gaauugcaguuagaagaag

SEQ ID NO: 131356 - RNA, 19 nt, Homo sapiens
  misc_RNA (1)...(19): siRNA sense strand
acaaucacuggcuguauua

SEQ ID NO: 131357 - RNA, 19 nt, Homo sapiens
  misc_RNA (1)...(19): siRNA sense strand
uggcugauguaaugaguga

SEQ ID NO: 131358 - RNA, 19 nt, Homo sapiens
  misc_RNA (1)...(19): siRNA sense strand
ggagacccaccacuacuau

SEQ ID NO: 131359 - RNA, 19 nt, Homo sapiens
  misc_RNA (1)...(19): siRNA sense strand
gaucgcuucaguaaacuaa

SEQ ID NO: 131360 - RNA, 19 nt, Homo sapiens
  misc_RNA (1)...(19): siRNA sense strand
ucagguaggagauggaauu

SEQ ID NO: 131361 - RNA, 19 nt, Homo sapiens
  misc_RNA (1)...(19): siRNA sense strand
uuaaacaucacagcagaua

SEQ ID NO: 131362 - RNA, 19 nt, Homo sapiens
  misc_RNA (1)...(19): siRNA sense strand
agacacguuuacuuaugua

SEQ ID NO: 131363 - RNA, 19 nt, Homo sapiens
  misc_RNA (1)...(19): siRNA sense strand
cgauagcucugaagaugag

SEQ ID NO: 131364 - RNA, 19 nt, Homo sapiens
  misc_RNA (1)...(19): siRNA sense strand
cagauaaugaagcugauuu

SEQ ID NO: 131365 - RNA, 19 nt, Homo sapiens
  misc_RNA (1)...(19): siRNA sense strand
aaagaacacagcaagaaug

SEQ ID NO: 131366 - RNA, 19 nt, Homo sapiens
  misc_RNA (1)...(19): siRNA sense strand
caaagaauugcaguuagaa

SEQ ID NO: 131367 - RNA, 19 nt, Homo sapiens
  misc_RNA (1)...(19): siRNA sense strand
ugacagagaauaugaugca

SEQ ID NO: 131368 - RNA, 19 nt, Homo sapiens
  misc_RNA (1)...(19): siRNA sense strand
aaagcucaauagugaagaa

SEQ ID NO: 131369 - RNA, 19 nt, Homo sapiens
  misc_RNA (1)...(19): siRNA sense strand
cuacugaagaaacacauuu

SEQ ID NO: 131370 - RNA, 19 nt, Homo sapiens
  misc_RNA (1)...(19): siRNA sense strand
gcacaaucucgcaagaaug

SEQ ID NO: 131371 - RNA, 19 nt, Homo sapiens
  misc_RNA (1)...(19): siRNA sense strand
cuaaauccacguaagauca

SEQ ID NO: 131372 - RNA, 19 nt, Homo sapiens
  misc_RNA (1)...(19): siRNA sense strand
cagcuuaggcgugaagaaa

SEQ ID NO: 131373 - RNA, 19 nt, Homo sapiens
  misc_RNA (1)...(19): siRNA sense strand
agaauaugaugcacagcuu

SEQ ID NO: 131374 - RNA, 19 nt, Homo sapiens
  misc_RNA (1)...(19): siRNA sense strand
gcaaaguuuccauuuccuu

SEQ ID NO: 131375 - RNA, 19 nt, Homo sapiens
  misc_RNA (1)...(19): siRNA sense strand
aguuauaccuacagaaugu

SEQ ID NO: 131376 - RNA, 19 nt, Homo sapiens
  misc_RNA (1)...(19): siRNA sense strand
gcaguuagaagaagaagcu

SEQ ID NO: 131377 - RNA, 19 nt, Homo sapiens
  misc_RNA (1)...(19): siRNA sense strand
uagcaaaguuuccauuucc

SEQ ID NO: 131378 - RNA, 19 nt, Homo sapiens
  misc_RNA (1)...(19): siRNA sense strand
ccacuacuauaugaugaau

SEQ ID NO: 131379 - RNA, 19 nt, Homo sapiens
  misc_RNA (1)...(19): siRNA sense strand
caccacuacuauaugauga

SEQ ID NO: 131380 - RNA, 19 nt, Homo sapiens
  misc_RNA (1)...(19): siRNA sense strand
aacgagaacucuucaaugc

SEQ ID NO: 131381 - RNA, 19 nt, Homo sapiens
  misc_RNA (1)...(19): siRNA sense strand
guaaagcucaauagugaag

SEQ ID NO: 131382 - RNA, 19 nt, Homo sapiens
  misc_RNA (1)...(19): siRNA sense strand
gaugauuucagguuuaaag

SEQ ID NO: 131383 - RNA, 19 nt, Homo sapiens
  misc_RNA (1)...(19): siRNA sense strand
aucacuggcuguauuagua

SEQ ID NO: 131384 - RNA, 19 nt, Homo sapiens
  misc_RNA (1)...(19): siRNA sense strand
gcucugaagaugagguuga

SEQ ID NO: 131385 - RNA, 19 nt, Homo sapiens
  misc_RNA (1)...(19): siRNA sense strand
aaugaaagaagccuacuau

SEQ ID NO: 131386 - RNA, 19 nt, Homo sapiens
  misc_RNA (1)...(19): siRNA sense strand
cguaagaucauccgcaugu

SEQ ID NO: 131387 - RNA, 19 nt, Homo sapiens
  misc_RNA (1)...(19): siRNA sense strand
agaaugugccaucaaggua

SEQ ID NO: 131388 - RNA, 19 nt, Homo sapiens
  misc_RNA (1)...(19): siRNA sense strand
uaaagaucgcuucaguaaa

SEQ ID NO: 131389 - RNA, 19 nt, Homo sapiens
  misc_RNA (1)...(19): siRNA sense strand
gaaaaugaaugaagaucac

SEQ ID NO: 131390 - RNA, 19 nt, Homo sapiens
  misc_RNA (1)...(19): siRNA sense strand
gaacucuucaaugcuguuu

SEQ ID NO: 131391 - RNA, 19 nt, Homo sapiens
  misc_RNA (1)...(19): siRNA sense strand
cgaugucagucagucagua

SEQ ID NO: 131392 - RNA, 19 nt, Homo sapiens
  misc_RNA (1)...(19): siRNA sense strand
guaaacuaaauccacguaa

SEQ ID NO: 131393 - RNA, 19 nt, Homo sapiens
  misc_RNA (1)...(19): siRNA sense strand
gaaagaagccuacuaucaa

SEQ ID NO: 131394 - RNA, 19 nt, Homo sapiens
  misc_RNA (1)...(19): siRNA sense strand
gcaguuauaucaugaaugu

SEQ ID NO: 131395 - RNA, 19 nt, Homo sapiens
  misc_RNA (1)...(19): siRNA sense strand
gcugaaggaccauuuauua

SEQ ID NO: 131396 - RNA, 19 nt, Homo sapiens
  misc_RNA (1)...(19): siRNA sense strand
caccaaacaugaugaagua

SEQ ID NO: 131397 - RNA, 19 nt, Homo sapiens
  misc_RNA (1)...(19): siRNA sense strand
caaacaugaugaaguagua

SEQ ID NO: 131398 - RNA, 19 nt, Homo sapiens
  misc_RNA (1)...(19): siRNA sense strand
gugaacagcuggccaaaga

SEQ ID NO: 131399 - RNA, 19 nt, Homo sapiens
  misc_RNA (1)...(19): siRNA sense strand
gaacacagcaagaauggaa

SEQ ID NO: 131400 - RNA, 19 nt, Homo sapiens
  misc_RNA (1)...(19): siRNA sense strand
gagguugacuggcaggaua

SEQ ID NO: 131401 - RNA, 19 nt, Homo sapiens
  misc_RNA (1)...(19): siRNA sense strand
gacaaucacuggcuguauu

SEQ ID NO: 131402 - RNA, 19 nt, Homo sapiens
  misc_RNA (1)...(19): siRNA sense strand
ccaaagaauugcaguuaga

SEQ ID NO: 131403 - RNA, 19 nt, Homo sapiens
  misc_RNA (1)...(19): siRNA sense strand
gaaggaccauuuauuacug

SEQ ID NO: 131404 - RNA, 19 nt, Homo sapiens
  misc_RNA (1)...(19): siRNA sense strand
aaguaaagcucaauaguga

SEQ ID NO: 131405 - RNA, 19 nt, Homo sapiens
  misc_RNA (1)...(19): siRNA sense strand
gaaguaaagcucaauagug

SEQ ID NO: 131406 - RNA, 19 nt, Homo sapiens
  misc_RNA (1)...(19): siRNA sense strand
aaagaagccuacuaucaaa

SEQ ID NO: 131407 - RNA, 19 nt, Homo sapiens
  misc_RNA (1)...(19): siRNA sense strand
caauggagauagcaaaguu

SEQ ID NO: 131408 - RNA, 19 nt, Homo sapiens
  misc_RNA (1)...(19): siRNA sense strand
gaaaagauaucaccaccaa

SEQ ID NO: 131409 - RNA, 19 nt, Homo sapiens
  misc_RNA (1)...(19): siRNA sense strand
gguaggagauggaauugga

SEQ ID NO: 131410 - RNA, 19 nt, Homo sapiens
  misc_RNA (1)...(19): siRNA sense strand
aaagaucgcuucaguaaac

SEQ ID NO: 131411 - RNA, 19 nt, Homo sapiens
  misc_RNA (1)...(19): siRNA sense strand
gcagagagcuggaauuccu

SEQ ID NO: 131412 - RNA, 19 nt, Homo sapiens
  misc_RNA (1)...(19): siRNA sense strand
caacaugccuacucagaag

SEQ ID NO: 131413 - RNA, 19 nt, Homo sapiens
  misc_RNA (1)...(19): siRNA sense strand
uuaaagaucgcuucaguaa

SEQ ID NO: 131414 - RNA, 19 nt, Homo sapiens
  misc_RNA (1)...(19): siRNA sense strand
gaaagaacacagcaagaau

SEQ ID NO: 131415 - RNA, 19 nt, Homo sapiens
  misc_RNA (1)...(19): siRNA sense strand
gaaguaguaugugggagaa

SEQ ID NO: 131416 - RNA, 19 nt, Homo sapiens
  misc_RNA (1)...(19): siRNA sense strand
gcucaauagugaagaaaug

SEQ ID NO: 131417 - RNA, 19 nt, Homo sapiens
  misc_RNA (1)...(19): siRNA sense strand
ggaauuggaauggauuuaa

SEQ ID NO: 131418 - RNA, 19 nt, Homo sapiens
  misc_RNA (1)...(19): siRNA sense strand
gaaaggagucuguugucuu

SEQ ID NO: 131419 - RNA, 19 nt, Homo sapiens
  misc_RNA (1)...(19): siRNA sense strand
ugaaagaagccuacuauca

SEQ ID NO: 131420 - RNA, 19 nt, Homo sapiens
  misc_RNA (1)...(19): siRNA sense strand
gagaaaacauugauacuuc

SEQ ID NO: 131421 - RNA, 19 nt, Homo sapiens
  misc_RNA (1)...(19): siRNA sense strand
gaauaugaugcacagcuua

SEQ ID NO: 131422 - RNA, 19 nt, Homo sapiens
  misc_RNA (1)...(19): siRNA sense strand
gaaaagugcauccuuauga

SEQ ID NO: 131423 - RNA, 19 nt, Homo sapiens
  misc_RNA (1)...(19): siRNA sense strand
gauagcaaaguuuccauuu

SEQ ID NO: 131424 - RNA, 19 nt, Homo sapiens
  misc_RNA (1)...(19): siRNA sense strand
guaaaguuauaccuacaga

SEQ ID NO: 131425 - RNA, 19 nt, Homo sapiens
  misc_RNA (1)...(19): siRNA sense strand
gaacagcuggccaaagaau

SEQ ID NO: 131426 - RNA, 19 nt, Homo sapiens
  misc_RNA (1)...(19): siRNA sense strand
ggccaaagaauugcaguua

SEQ ID NO: 131427 - RNA, 19 nt, Homo sapiens
  misc_RNA (1)...(19): siRNA sense strand
gagggagcauggaggauga

SEQ ID NO: 131428 - RNA, 19 nt, Homo sapiens
  misc_RNA (1)...(19): siRNA sense strand
ugaaguugcuguugcugaa

SEQ ID NO: 131429 - RNA, 19 nt, Homo sapiens
  misc_RNA (1)...(19): siRNA sense strand
gauuucagguuuaaagauc

SEQ ID NO: 131430 - RNA, 19 nt, Homo sapiens
  misc_RNA (1)...(19): siRNA sense strand
ggaaaggagucuguugucu

SEQ ID NO: 131431 - RNA, 19 nt, Homo sapiens
  misc_RNA (1)...(19): siRNA sense strand
cagcaagaauggaaaauuu

SEQ ID NO: 131432 - RNA, 19 nt, Homo sapiens
  misc_RNA (1)...(19): siRNA sense strand
gcaggauacucgugaugau

SEQ ID NO: 131433 - RNA, 19 nt, Homo sapiens
  misc_RNA (1)...(19): siRNA sense strand
uaaacuaaauccacguaag

SEQ ID NO: 131434 - RNA, 19 nt, Homo sapiens
  misc_RNA (1)...(19): siRNA sense strand
aaacuaaauccacguaaga

SEQ ID NO: 131435 - RNA, 19 nt, Homo sapiens
  misc_RNA (1)...(19): siRNA sense strand
gauaucaccaccaaacaug

SEQ ID NO: 131436 - RNA, 19 nt, Homo sapiens
  misc_RNA (1)...(19): siRNA sense strand
guuuaaagaucgcuucagu

SEQ ID NO: 131437 - RNA, 19 nt, Homo sapiens
  misc_RNA (1)...(19): siRNA sense strand
gaagaagaagcugccguuu

SEQ ID NO: 131438 - RNA, 19 nt, Homo sapiens
  misc_RNA (1)...(19): siRNA sense strand
ggaauuccuuguccaacag

SEQ ID NO: 131439 - RNA, 19 nt, Homo sapiens
  misc_RNA (1)...(19): siRNA sense strand
agacagcgauagcucugaa

SEQ ID NO: 131440 - RNA, 19 nt, Homo sapiens
  misc_RNA (1)...(19): siRNA sense strand
gccaaagaauugcaguuag

SEQ ID NO: 131441 - RNA, 19 nt, Homo sapiens
  misc_RNA (1)...(19): siRNA sense strand
gaaugugccaucaagguau

SEQ ID NO: 131442 - RNA, 19 nt, Homo sapiens
  misc_RNA (1)...(19): siRNA sense strand
gagauggaauuggaaugga

SEQ ID NO: 131443 - RNA, 19 nt, Homo sapiens
  misc_RNA (1)...(19): siRNA sense strand
gagaaagaacacagcaaga

SEQ ID NO: 131444 - RNA, 19 nt, Homo sapiens
  misc_RNA (1)...(19): siRNA sense strand
agaaagaacacagcaagaa

SEQ ID NO: 131445 - RNA, 19 nt, Homo sapiens
  misc_RNA (1)...(19): siRNA sense strand
gaauugcaguuagaagaag

SEQ ID NO: 131446 - RNA, 19 nt, Homo sapiens
  misc_RNA (1)...(19): siRNA sense strand
acaaucacuggcuguauua

SEQ ID NO: 131447 - RNA, 19 nt, Homo sapiens
  misc_RNA (1)...(19): siRNA sense strand
uggcugauguaaugaguga

SEQ ID NO: 131448 - RNA, 19 nt, Homo sapiens
  misc_RNA (1)...(19): siRNA sense strand
gaucgcuucaguaaacuaa

SEQ ID NO: 131449 - RNA, 19 nt, Homo sapiens
  misc_RNA (1)...(19): siRNA sense strand
ucagguaggagauggaauu

SEQ ID NO: 131450 - RNA, 19 nt, Homo sapiens
  misc_RNA (1)...(19): siRNA sense strand
agacacguuuacuuaugua

SEQ ID NO: 131451 - RNA, 19 nt, Homo sapiens
  misc_RNA (1)...(19): siRNA sense strand
cgauagcucugaagaugag

SEQ ID NO: 131452 - RNA, 19 nt, Homo sapiens
  misc_RNA (1)...(19): siRNA sense strand
caaagaauugcaguuagaa

SEQ ID NO: 131453 - RNA, 19 nt, Homo sapiens
  misc_RNA (1)...(19): siRNA sense strand
aaagaacacagcaagaaug

SEQ ID NO: 131454 - RNA, 19 nt, Homo sapiens
  misc_RNA (1)...(19): siRNA sense strand
ugacagagaauaugaugca

SEQ ID NO: 131455 - RNA, 19 nt, Homo sapiens
  misc_RNA (1)...(19): siRNA sense strand
aaagcucaauagugaagaa

SEQ ID NO: 131456 - RNA, 19 nt, Homo sapiens
  misc_RNA (1)...(19): siRNA sense strand
cuacugaagaaacacauuu

SEQ ID NO: 131457 - RNA, 19 nt, Homo sapiens
  misc_RNA (1)...(19): siRNA sense strand
gcacaaucucgcaagaaug

SEQ ID NO: 131458 - RNA, 19 nt, Homo sapiens
  misc_RNA (1)...(19): siRNA sense strand
cuaaauccacguaagauca

SEQ ID NO: 131459 - RNA, 19 nt, Homo sapiens
  misc_RNA (1)...(19): siRNA sense strand
cagcuuaggcgugaagaaa

SEQ ID NO: 131460 - RNA, 19 nt, Homo sapiens
  misc_RNA (1)...(19): siRNA sense strand
agaauaugaugcacagcuu

SEQ ID NO: 131461 - RNA, 19 nt, Homo sapiens
  misc_RNA (1)...(19): siRNA sense strand
gcaaaguuuccauuuccuu

SEQ ID NO: 131462 - RNA, 19 nt, Homo sapiens
  misc_RNA (1)...(19): siRNA sense strand
gcaguuagaagaagaagcu

SEQ ID NO: 131463 - RNA, 19 nt, Homo sapiens
  misc_RNA (1)...(19): siRNA sense strand
aguuauaccuacagaaugu

SEQ ID NO: 131464 - RNA, 19 nt, Homo sapiens
  misc_RNA (1)...(19): siRNA sense strand
uagcaaaguuuccauuucc

SEQ ID NO: 131465 - RNA, 19 nt, Homo sapiens
  misc_RNA (1)...(19): siRNA sense strand
guaaagcucaauagugaag

SEQ ID NO: 131466 - RNA, 19 nt, Homo sapiens
  misc_RNA (1)...(19): siRNA sense strand
gaugauuucagguuuaaag

SEQ ID NO: 131467 - RNA, 19 nt, Homo sapiens
  misc_RNA (1)...(19): siRNA sense strand
aucacuggcuguauuagua

SEQ ID NO: 131468 - RNA, 19 nt, Homo sapiens
  misc_RNA (1)...(19): siRNA sense strand
gcucugaagaugagguuga

SEQ ID NO: 131469 - RNA, 19 nt, Homo sapiens
  misc_RNA (1)...(19): siRNA sense strand
aaugaaagaagccuacuau

SEQ ID NO: 131470 - RNA, 19 nt, Homo sapiens
  misc_RNA (1)...(19): siRNA sense strand
cguaagaucauccgcaugu

SEQ ID NO: 131471 - RNA, 19 nt, Homo sapiens
  misc_RNA (1)...(19): siRNA sense strand
agaaugugccaucaaggua

SEQ ID NO: 131472 - RNA, 19 nt, Homo sapiens
  misc_RNA (1)...(19): siRNA sense strand
ggagauggaauuggaaugg

SEQ ID NO: 131473 - RNA, 19 nt, Homo sapiens
  misc_RNA (1)...(19): siRNA sense strand
guaaacuaaauccacguaa

SEQ ID NO: 131474 - RNA, 19 nt, Homo sapiens
  misc_RNA (1)...(19): siRNA sense strand
uaaagaucgcuucaguaaa

SEQ ID NO: 131475 - RNA, 19 nt, Homo sapiens
  misc_RNA (1)...(19): siRNA sense strand
aagacacguuuacuuaugu

SEQ ID NO: 131476 - RNA, 19 nt, Homo sapiens
  misc_RNA (1)...(19): siRNA sense strand
gagacaaucacuggcugua

SEQ ID NO: 131477 - RNA, 19 nt, Homo sapiens
  misc_RNA (1)...(19): siRNA sense strand
gaauuuaagaaucgugaca

SEQ ID NO: 131478 - RNA, 19 nt, Homo sapiens
  misc_RNA (1)...(19): siRNA sense strand
gcgauagcucugaagauga

SEQ ID NO: 131479 - RNA, 19 nt, Homo sapiens
  misc_RNA (1)...(19): siRNA sense strand
gcaaguguccaugggcuau

SEQ ID NO: 131480 - RNA, 19 nt, Homo sapiens
  misc_RNA (1)...(19): siRNA sense strand
uauuggccaugaucaaguu

SEQ ID NO: 131481 - RNA, 19 nt, Homo sapiens
  misc_RNA (1)...(19): siRNA sense strand
gauggaauuggaauggauu

SEQ ID NO: 131482 - RNA, 19 nt, Homo sapiens
  misc_RNA (1)...(19): siRNA sense strand
aaagauaucaccaccaaac

SEQ ID NO: 131483 - RNA, 19 nt, Homo sapiens
  misc_RNA (1)...(19): siRNA sense strand
auagcaaaguuuccauuuc

SEQ ID NO: 131484 - RNA, 19 nt, Homo sapiens
  misc_RNA (1)...(19): siRNA sense strand
agaauugcaguuagaagaa

SEQ ID NO: 131485 - RNA, 19 nt, Homo sapiens
  misc_RNA (1)...(19): siRNA sense strand
ucgcuucaguaaacuaaau

SEQ ID NO: 131486 - RNA, 19 nt, Homo sapiens
  misc_RNA (1)...(19): siRNA sense strand
uacagaaugugccaucaag

SEQ ID NO: 131487 - RNA, 19 nt, Homo sapiens
  misc_RNA (1)...(19): siRNA sense strand
ccaccaaacaugaugaagu

SEQ ID NO: 131488 - RNA, 19 nt, Homo sapiens
  misc_RNA (1)...(19): siRNA sense strand
agcgauagcucugaagaug

SEQ ID NO: 131489 - RNA, 19 nt, Homo sapiens
  misc_RNA (1)...(19): siRNA sense strand
uaugcuggcucagaugcua

SEQ ID NO: 131490 - RNA, 19 nt, Homo sapiens
  misc_RNA (1)...(19): siRNA sense strand
ugaaggaccauuuauuacu

SEQ ID NO: 131491 - RNA, 19 nt, Homo sapiens
  misc_RNA (1)...(19): siRNA sense strand
ugcacaaucucgcaagaau

SEQ ID NO: 131492 - RNA, 19 nt, Homo sapiens
  misc_RNA (1)...(19): siRNA sense strand
aagaauugcaguuagaaga

SEQ ID NO: 131493 - RNA, 19 nt, Homo sapiens
  misc_RNA (1)...(19): siRNA sense strand
gcgaaagccucguggaguu

SEQ ID NO: 131494 - RNA, 19 nt, Homo sapiens
  misc_RNA (1)...(19): siRNA sense strand
ugacgcaccugcuggagaa

SEQ ID NO: 131495 - RNA, 19 nt, Homo sapiens
  misc_RNA (1)...(19): siRNA sense strand
gaucugguguucgugauug

SEQ ID NO: 131496 - RNA, 19 nt, Homo sapiens
  misc_RNA (1)...(19): siRNA sense strand
gaacugcacguguccuaug

SEQ ID NO: 131497 - RNA, 19 nt, Homo sapiens
  misc_RNA (1)...(19): siRNA sense strand
gcugugaguuccagugugu

SEQ ID NO: 131498 - RNA, 19 nt, Homo sapiens
  misc_RNA (1)...(19): siRNA sense strand
ggaggaaggcaucgucaug

SEQ ID NO: 131499 - RNA, 19 nt, Homo sapiens
  misc_RNA (1)...(19): siRNA sense strand
gaaccagauuguggacuuc

SEQ ID NO: 131500 - RNA, 19 nt, Homo sapiens
  misc_RNA (1)...(19): siRNA sense strand
ugaaccagauuguggacuu

SEQ ID NO: 131501 - RNA, 19 nt, Homo sapiens
  misc_RNA (1)...(19): siRNA sense strand
ggaaacccagcuccaguug

SEQ ID NO: 131502 - RNA, 19 nt, Homo sapiens
  misc_RNA (1)...(19): siRNA sense strand
aggaaggcaucgucaugua

SEQ ID NO: 131503 - RNA, 19 nt, Homo sapiens
  misc_RNA (1)...(19): siRNA sense strand
gcguuggcgugauccagua

SEQ ID NO: 131504 - RNA, 19 nt, Homo sapiens
  misc_RNA (1)...(19): siRNA sense strand
gggaaacccagcuccaguu

SEQ ID NO: 131505 - RNA, 19 nt, Homo sapiens
  misc_RNA (1)...(19): siRNA sense strand
gaaacccagcuccaguuga

SEQ ID NO: 131506 - RNA, 19 nt, Homo sapiens
  misc_RNA (1)...(19): siRNA sense strand
aaacccagcuccaguugac

SEQ ID NO: 131507 - RNA, 19 nt, Homo sapiens
  misc_RNA (1)...(19): siRNA sense strand
uggaggaucuggagaacca

SEQ ID NO: 131508 - RNA, 19 nt, Homo sapiens
  misc_RNA (1)...(19): siRNA sense strand
ggaccauggcugugaguuc

SEQ ID NO: 131509 - RNA, 19 nt, Homo sapiens
  misc_RNA (1)...(19): siRNA sense strand
gaggaaggcaucgucaugu

SEQ ID NO: 131510 - RNA, 19 nt, Homo sapiens
  misc_RNA (1)...(19): siRNA sense strand
ggaccuuguucugcugguu

SEQ ID NO: 131511 - RNA, 19 nt, Homo sapiens
  misc_RNA (1)...(19): siRNA sense strand
agaaccagcuggccaacca

SEQ ID NO: 131512 - RNA, 19 nt, Homo sapiens
  misc_RNA (1)...(19): siRNA sense strand
gauuguggacuuccuagau

SEQ ID NO: 131513 - RNA, 19 nt, Homo sapiens
  misc_RNA (1)...(19): siRNA sense strand
ggaguucggccugcaguuc

SEQ ID NO: 131514 - RNA, 19 nt, Homo sapiens
  misc_RNA (1)...(19): siRNA sense strand
ucgagagccugacgcugaa

SEQ ID NO: 131515 - RNA, 19 nt, Homo sapiens
  misc_RNA (1)...(19): siRNA sense strand
ggaaggcaucgucauguac

SEQ ID NO: 131516 - RNA, 19 nt, Homo sapiens
  misc_RNA (1)...(19): siRNA sense strand
gauccaguauucgagucaa

SEQ ID NO: 131517 - RNA, 19 nt, Homo sapiens
  misc_RNA (1)...(19): siRNA sense strand
gcacgucuuccucguagag

SEQ ID NO: 131518 - RNA, 19 nt, Homo sapiens
  misc_RNA (1)...(19): siRNA sense strand
ccacguggaccuuguucug

SEQ ID NO: 131519 - RNA, 19 nt, Homo sapiens
  misc_RNA (1)...(19): siRNA sense strand
caagagcgugcguccacaa

SEQ ID NO: 131520 - RNA, 19 nt, Homo sapiens
  misc_RNA (1)...(19): siRNA sense strand
ggaacgcggcaccaugaca

SEQ ID NO: 131521 - RNA, 19 nt, Homo sapiens
  misc_RNA (1)...(19): siRNA sense strand
ggaucugguguucgugauu

SEQ ID NO: 131522 - RNA, 19 nt, Homo sapiens
  misc_RNA (1)...(19): siRNA sense strand
ggaacugcacguguccuau

SEQ ID NO: 131523 - RNA, 19 nt, Homo sapiens
  misc_RNA (1)...(19): siRNA sense strand
cgugcgcccuuucgaguuc

SEQ ID NO: 131524 - RNA, 19 nt, Homo sapiens
  misc_RNA (1)...(19): siRNA sense strand
ccagauuguggacuuccua

SEQ ID NO: 131525 - RNA, 19 nt, Homo sapiens
  misc_RNA (1)...(19): siRNA sense strand
auuguggacuuccuagaug

SEQ ID NO: 131526 - RNA, 19 nt, Homo sapiens
  misc_RNA (1)...(19): siRNA sense strand
ggccguggaguacauggaa

SEQ ID NO: 131527 - RNA, 19 nt, Homo sapiens
  misc_RNA (1)...(19): siRNA sense strand
gcgaaagccucguggaguu

SEQ ID NO: 131528 - RNA, 19 nt, Homo sapiens
  misc_RNA (1)...(19): siRNA sense strand
ugacgcaccugcuggagaa

SEQ ID NO: 131529 - RNA, 19 nt, Homo sapiens
  misc_RNA (1)...(19): siRNA sense strand
gaucugguguucgugauug

SEQ ID NO: 131530 - RNA, 19 nt, Homo sapiens
  misc_RNA (1)...(19): siRNA sense strand
gaacugcacguguccuaug

SEQ ID NO: 131531 - RNA, 19 nt, Homo sapiens
  misc_RNA (1)...(19): siRNA sense strand
gcugugaguuccagugugu

SEQ ID NO: 131532 - RNA, 19 nt, Homo sapiens
  misc_RNA (1)...(19): siRNA sense strand
ggaggaaggcaucgucaug

SEQ ID NO: 131533 - RNA, 19 nt, Homo sapiens
  misc_RNA (1)...(19): siRNA sense strand
gaaccagauuguggacuuc

SEQ ID NO: 131534 - RNA, 19 nt, Homo sapiens
  misc_RNA (1)...(19): siRNA sense strand
ugaaccagauuguggacuu

SEQ ID NO: 131535 - RNA, 19 nt, Homo sapiens
  misc_RNA (1)...(19): siRNA sense strand
ggaaacccagcuccaguug

SEQ ID NO: 131536 - RNA, 19 nt, Homo sapiens
  misc_RNA (1)...(19): siRNA sense strand
aggaaggcaucgucaugua

SEQ ID NO: 131537 - RNA, 19 nt, Homo sapiens
  misc_RNA (1)...(19): siRNA sense strand
gcguuggcgugauccagua

SEQ ID NO: 131538 - RNA, 19 nt, Homo sapiens
  misc_RNA (1)...(19): siRNA sense strand
gggaaacccagcuccaguu

SEQ ID NO: 131539 - RNA, 19 nt, Homo sapiens
  misc_RNA (1)...(19): siRNA sense strand
gaaacccagcuccaguuga

SEQ ID NO: 131540 - RNA, 19 nt, Homo sapiens
  misc_RNA (1)...(19): siRNA sense strand
aaacccagcuccaguugac

SEQ ID NO: 131541 - RNA, 19 nt, Homo sapiens
  misc_RNA (1)...(19): siRNA sense strand
uggaggaucuggagaacca

SEQ ID NO: 131542 - RNA, 19 nt, Homo sapiens
  misc_RNA (1)...(19): siRNA sense strand
ggaccauggcugugaguuc

SEQ ID NO: 131543 - RNA, 19 nt, Homo sapiens
  misc_RNA (1)...(19): siRNA sense strand
gaggaaggcaucgucaugu

SEQ ID NO: 131544 - RNA, 19 nt, Homo sapiens
  misc_RNA (1)...(19): siRNA sense strand
ggaccuuguucugcugguu

SEQ ID NO: 131545 - RNA, 19 nt, Homo sapiens
  misc_RNA (1)...(19): siRNA sense strand
agaaccagcuggccaacca

SEQ ID NO: 131546 - RNA, 19 nt, Homo sapiens
  misc_RNA (1)...(19): siRNA sense strand
gauuguggacuuccuagau

SEQ ID NO: 131547 - RNA, 19 nt, Homo sapiens
  misc_RNA (1)...(19): siRNA sense strand
ggaguucggccugcaguuc

SEQ ID NO: 131548 - RNA, 19 nt, Homo sapiens
  misc_RNA (1)...(19): siRNA sense strand
ucgagagccugacgcugaa

SEQ ID NO: 131549 - RNA, 19 nt, Homo sapiens
  misc_RNA (1)...(19): siRNA sense strand
ggaaggcaucgucauguac

SEQ ID NO: 131550 - RNA, 19 nt, Homo sapiens
  misc_RNA (1)...(19): siRNA sense strand
gauccaguauucgagucaa

SEQ ID NO: 131551 - RNA, 19 nt, Homo sapiens
  misc_RNA (1)...(19): siRNA sense strand
gcacgucuuccucguagag

SEQ ID NO: 131552 - RNA, 19 nt, Homo sapiens
  misc_RNA (1)...(19): siRNA sense strand
ccacguggaccuuguucug

SEQ ID NO: 131553 - RNA, 19 nt, Homo sapiens
  misc_RNA (1)...(19): siRNA sense strand
caagagcgugcguccacaa

SEQ ID NO: 131554 - RNA, 19 nt, Homo sapiens
  misc_RNA (1)...(19): siRNA sense strand
ggaacgcggcaccaugaca

SEQ ID NO: 131555 - RNA, 19 nt, Homo sapiens
  misc_RNA (1)...(19): siRNA sense strand
ggaucugguguucgugauu

SEQ ID NO: 131556 - RNA, 19 nt, Homo sapiens
  misc_RNA (1)...(19): siRNA sense strand
ggaacugcacguguccuau

SEQ ID NO: 131557 - RNA, 19 nt, Homo sapiens
  misc_RNA (1)...(19): siRNA sense strand
cgugcgcccuuucgaguuc

SEQ ID NO: 131558 - RNA, 19 nt, Homo sapiens
  misc_RNA (1)...(19): siRNA sense strand
ccagauuguggacuuccua

SEQ ID NO: 131559 - RNA, 19 nt, Homo sapiens
  misc_RNA (1)...(19): siRNA sense strand
auuguggacuuccuagaug

SEQ ID NO: 131560 - RNA, 19 nt, Homo sapiens
  misc_RNA (1)...(19): siRNA sense strand
ggccguggaguacauggaa

SEQ ID NO: 131561 - RNA, 19 nt, Homo sapiens
  misc_RNA (1)...(19): siRNA sense strand
gcgaaagccucguggaguu

SEQ ID NO: 131562 - RNA, 19 nt, Homo sapiens
  misc_RNA (1)...(19): siRNA sense strand
ugacgcaccugcuggagaa

SEQ ID NO: 131563 - RNA, 19 nt, Homo sapiens
  misc_RNA (1)...(19): siRNA sense strand
gaucugguguucgugauug

SEQ ID NO: 131564 - RNA, 19 nt, Homo sapiens
  misc_RNA (1)...(19): siRNA sense strand
gaacugcacguguccuaug

SEQ ID NO: 131565 - RNA, 19 nt, Homo sapiens
  misc_RNA (1)...(19): siRNA sense strand
gcugugaguuccagugugu

SEQ ID NO: 131566 - RNA, 19 nt, Homo sapiens
  misc_RNA (1)...(19): siRNA sense strand
ggaggaaggcaucgucaug

SEQ ID NO: 131567 - RNA, 19 nt, Homo sapiens
  misc_RNA (1)...(19): siRNA sense strand
gaaccagauuguggacuuc

SEQ ID NO: 131568 - RNA, 19 nt, Homo sapiens
  misc_RNA (1)...(19): siRNA sense strand
ugaaccagauuguggacuu

SEQ ID NO: 131569 - RNA, 19 nt, Homo sapiens
  misc_RNA (1)...(19): siRNA sense strand
ggaaacccagcuccaguug

SEQ ID NO: 131570 - RNA, 19 nt, Homo sapiens
  misc_RNA (1)...(19): siRNA sense strand
aggaaggcaucgucaugua

SEQ ID NO: 131571 - RNA, 19 nt, Homo sapiens
  misc_RNA (1)...(19): siRNA sense strand
gcguuggcgugauccagua

SEQ ID NO: 131572 - RNA, 19 nt, Homo sapiens
  misc_RNA (1)...(19): siRNA sense strand
gggaaacccagcuccaguu

SEQ ID NO: 131573 - RNA, 19 nt, Homo sapiens
  misc_RNA (1)...(19): siRNA sense strand
gaaacccagcuccaguuga

SEQ ID NO: 131574 - RNA, 19 nt, Homo sapiens
  misc_RNA (1)...(19): siRNA sense strand
aaacccagcuccaguugac

SEQ ID NO: 131575 - RNA, 19 nt, Homo sapiens
  misc_RNA (1)...(19): siRNA sense strand
uggaggaucuggagaacca

SEQ ID NO: 131576 - RNA, 19 nt, Homo sapiens
  misc_RNA (1)...(19): siRNA sense strand
ggaccauggcugugaguuc

SEQ ID NO: 131577 - RNA, 19 nt, Homo sapiens
  misc_RNA (1)...(19): siRNA sense strand
gaggaaggcaucgucaugu

SEQ ID NO: 131578 - RNA, 19 nt, Homo sapiens
  misc_RNA (1)...(19): siRNA sense strand
ggaccuuguucugcugguu

SEQ ID NO: 131579 - RNA, 19 nt, Homo sapiens
  misc_RNA (1)...(19): siRNA sense strand
agaaccagcuggccaacca

SEQ ID NO: 131580 - RNA, 19 nt, Homo sapiens
  misc_RNA (1)...(19): siRNA sense strand
gauuguggacuuccuagau

SEQ ID NO: 131581 - RNA, 19 nt, Homo sapiens
  misc_RNA (1)...(19): siRNA sense strand
ggaguucggccugcaguuc

SEQ ID NO: 131582 - RNA, 19 nt, Homo sapiens
  misc_RNA (1)...(19): siRNA sense strand
ucgagagccugacgcugaa

SEQ ID NO: 131583 - RNA, 19 nt, Homo sapiens
  misc_RNA (1)...(19): siRNA sense strand
ggaaggcaucgucauguac

SEQ ID NO: 131584 - RNA, 19 nt, Homo sapiens
  misc_RNA (1)...(19): siRNA sense strand
gauccaguauucgagucaa

SEQ ID NO: 131585 - RNA, 19 nt, Homo sapiens
  misc_RNA (1)...(19): siRNA sense strand
gcacgucuuccucguagag

SEQ ID NO: 131586 - RNA, 19 nt, Homo sapiens
  misc_RNA (1)...(19): siRNA sense strand
ccacguggaccuuguucug

SEQ ID NO: 131587 - RNA, 19 nt, Homo sapiens
  misc_RNA (1)...(19): siRNA sense strand
caagagcgugcguccacaa

SEQ ID NO: 131588 - RNA, 19 nt, Homo sapiens
  misc_RNA (1)...(19): siRNA sense strand
ggaacgcggcaccaugaca

SEQ ID NO: 131589 - RNA, 19 nt, Homo sapiens
  misc_RNA (1)...(19): siRNA sense strand
ggaucugguguucgugauu

SEQ ID NO: 131590 - RNA, 19 nt, Homo sapiens
  misc_RNA (1)...(19): siRNA sense strand
ggaacugcacguguccuau

SEQ ID NO: 131591 - RNA, 19 nt, Homo sapiens
  misc_RNA (1)...(19): siRNA sense strand
cgugcgcccuuucgaguuc

SEQ ID NO: 131592 - RNA, 19 nt, Homo sapiens
  misc_RNA (1)...(19): siRNA sense strand
ccagauuguggacuuccua

SEQ ID NO: 131593 - RNA, 19 nt, Homo sapiens
  misc_RNA (1)...(19): siRNA sense strand
auuguggacuuccuagaug

SEQ ID NO: 131594 - RNA, 19 nt, Homo sapiens
  misc_RNA (1)...(19): siRNA sense strand
ggccguggaguacauggaa

SEQ ID NO: 131595 - RNA, 19 nt, Homo sapiens
  misc_RNA (1)...(19): siRNA sense strand
caagguuccugaagucuga

SEQ ID NO: 131596 - RNA, 19 nt, Homo sapiens
  misc_RNA (1)...(19): siRNA sense strand
ggacccugguggauuauga

SEQ ID NO: 131597 - RNA, 19 nt, Homo sapiens
  misc_RNA (1)...(19): siRNA sense strand
gaccaagagugcagauuuc

SEQ ID NO: 131598 - RNA, 19 nt, Homo sapiens
  misc_RNA (1)...(19): siRNA sense strand
ccaucuaccuggccaagaa

SEQ ID NO: 131599 - RNA, 19 nt, Homo sapiens
  misc_RNA (1)...(19): siRNA sense strand
gugaggagcuucgauaugg

SEQ ID NO: 131600 - RNA, 19 nt, Homo sapiens
  misc_RNA (1)...(19): siRNA sense strand
ccaagaagaacauccgaaa

SEQ ID NO: 131601 - RNA, 19 nt, Homo sapiens
  misc_RNA (1)...(19): siRNA sense strand
cugcagagcuggacuaugc

SEQ ID NO: 131602 - RNA, 19 nt, Homo sapiens
  misc_RNA (1)...(19): siRNA sense strand
acgcccagcugcacauaua

SEQ ID NO: 131603 - RNA, 19 nt, Homo sapiens
  misc_RNA (1)...(19): siRNA sense strand
ugaccaagagugcagauuu

SEQ ID NO: 131604 - RNA, 19 nt, Homo sapiens
  misc_RNA (1)...(19): siRNA sense strand
agacgcguguucccguuua

SEQ ID NO: 131605 - RNA, 19 nt, Homo sapiens
  misc_RNA (1)...(19): siRNA sense strand
ggaucccgcuggagaugaa

SEQ ID NO: 131606 - RNA, 19 nt, Homo sapiens
  misc_RNA (1)...(19): siRNA sense strand
gaucgaguacuucaggaaa

SEQ ID NO: 131607 - RNA, 19 nt, Homo sapiens
  misc_RNA (1)...(19): siRNA sense strand
gagugcagauuuccauaag

SEQ ID NO: 131608 - RNA, 19 nt, Homo sapiens
  misc_RNA (1)...(19): siRNA sense strand
caugugaggagcuucgaua

SEQ ID NO: 131609 - RNA, 19 nt, Homo sapiens
  misc_RNA (1)...(19): siRNA sense strand
ccugaagucugacauguac

SEQ ID NO: 131610 - RNA, 19 nt, Homo sapiens
  misc_RNA (1)...(19): siRNA sense strand
gcuaugaccggcuacacaa

SEQ ID NO: 131611 - RNA, 19 nt, Homo sapiens
  misc_RNA (1)...(19): siRNA sense strand
gggacaggcuggucauugc

SEQ ID NO: 131612 - RNA, 19 nt, Homo sapiens
  misc_RNA (1)...(19): siRNA sense strand
caugggaccuggugcugau

SEQ ID NO: 131613 - RNA, 19 nt, Homo sapiens
  misc_RNA (1)...(19): siRNA sense strand
ggaggcaugugaggagcuu

SEQ ID NO: 131614 - RNA, 19 nt, Homo sapiens
  misc_RNA (1)...(19): siRNA sense strand
gagcuggacuaugccaucu

SEQ ID NO: 131615 - RNA, 19 nt, Homo sapiens
  misc_RNA (1)...(19): siRNA sense strand
gcuggacuaugccaucuac

SEQ ID NO: 131616 - RNA, 19 nt, Homo sapiens
  misc_RNA (1)...(19): siRNA sense strand
gccgugugcucaugaccaa

SEQ ID NO: 131617 - RNA, 19 nt, Homo sapiens
  misc_RNA (1)...(19): siRNA sense strand
caagagugcagauuuccau

SEQ ID NO: 131618 - RNA, 19 nt, Homo sapiens
  misc_RNA (1)...(19): siRNA sense strand
gaugaagagacgcguguuc

SEQ ID NO: 131619 - RNA, 19 nt, Homo sapiens
  misc_RNA (1)...(19): siRNA sense strand
ccaccgcuauguccuggau

SEQ ID NO: 131620 - RNA, 19 nt, Homo sapiens
  misc_RNA (1)...(19): siRNA sense strand
ccugguggauuaugagaag

SEQ ID NO: 131621 - RNA, 19 nt, Homo sapiens
  misc_RNA (1)...(19): siRNA sense strand
gccaggagcagaccuacug

SEQ ID NO: 131622 - RNA, 19 nt, Homo sapiens
  misc_RNA (1)...(19): siRNA sense strand
uacccaagguuccugaagu

SEQ ID NO: 131623 - RNA, 19 nt, Homo sapiens
  misc_RNA (1)...(19): siRNA sense strand
agagugcagauuuccauaa

SEQ ID NO: 131624 - RNA, 19 nt, Homo sapiens
  misc_RNA (1)...(19): siRNA sense strand
ugaagucugacauguacaa

SEQ ID NO: 131625 - RNA, 19 nt, Homo sapiens
  misc_RNA (1)...(19): siRNA sense strand
ugaggagcuucgauaugga

SEQ ID NO: 131626 - RNA, 19 nt, Homo sapiens
  misc_RNA (1)...(19): siRNA sense strand
ccuacuggcuggugaacag

SEQ ID NO: 131627 - RNA, 19 nt, Homo sapiens
  misc_RNA (1)...(19): siRNA sense strand
gagacgcguguucccguuu

SEQ ID NO: 131628 - RNA, 19 nt, Homo sapiens
  misc_RNA (1)...(19): siRNA sense strand
ccuacugggucaugaaugc

SEQ ID NO: 131629 - RNA, 19 nt, Homo sapiens
  misc_RNA (1)...(19): siRNA sense strand
agcgggagaucgaguacuu

SEQ ID NO: 131630 - RNA, 19 nt, Homo sapiens
  misc_RNA (1)...(19): siRNA sense strand
gcgacgucgugcagugguu

SEQ ID NO: 131631 - RNA, 19 nt, Homo sapiens
  misc_RNA (1)...(19): siRNA sense strand
ggugcagcauggcuacauc

SEQ ID NO: 131632 - RNA, 19 nt, Homo sapiens
  misc_RNA (1)...(19): siRNA sense strand
ggaguucaguggagaaaac

SEQ ID NO: 131633 - RNA, 19 nt, Homo sapiens
  misc_RNA (1)...(19): siRNA sense strand
gcaggacccgagugaaguc

SEQ ID NO: 131634 - RNA, 19 nt, Homo sapiens
  misc_RNA (1)...(19): siRNA sense strand
gggcccacuucauggacuu

SEQ ID NO: 131635 - RNA, 19 nt, Homo sapiens
  misc_RNA (1)...(19): siRNA sense strand
uaugaccggcuacacaaga

SEQ ID NO: 131636 - RNA, 19 nt, Homo sapiens
  misc_RNA (1)...(19): siRNA sense strand
acgagacgcccuacagguu

SEQ ID NO: 131637 - RNA, 19 nt, Homo sapiens
  misc_RNA (1)...(19): siRNA sense strand
ccugguggaugccguguac

SEQ ID NO: 131638 - RNA, 19 nt, Homo sapiens
  misc_RNA (1)...(19): siRNA sense strand
gaccggcuacacaagaaga

SEQ ID NO: 131639 - RNA, 19 nt, Homo sapiens
  misc_RNA (1)...(19): siRNA sense strand
caagguuccugaagucuga

SEQ ID NO: 131640 - RNA, 19 nt, Homo sapiens
  misc_RNA (1)...(19): siRNA sense strand
ggacccugguggauuauga

SEQ ID NO: 131641 - RNA, 19 nt, Homo sapiens
  misc_RNA (1)...(19): siRNA sense strand
gaccaagagugcagauuuc

SEQ ID NO: 131642 - RNA, 19 nt, Homo sapiens
  misc_RNA (1)...(19): siRNA sense strand
ccaucuaccuggccaagaa

SEQ ID NO: 131643 - RNA, 19 nt, Homo sapiens
  misc_RNA (1)...(19): siRNA sense strand
gugaggagcuucgauaugg

SEQ ID NO: 131644 - RNA, 19 nt, Homo sapiens
  misc_RNA (1)...(19): siRNA sense strand
ccaagaagaacauccgaaa

SEQ ID NO: 131645 - RNA, 19 nt, Homo sapiens
  misc_RNA (1)...(19): siRNA sense strand
cugcagagcuggacuaugc

SEQ ID NO: 131646 - RNA, 19 nt, Homo sapiens
  misc_RNA (1)...(19): siRNA sense strand
acgcccagcugcacauaua

SEQ ID NO: 131647 - RNA, 19 nt, Homo sapiens
  misc_RNA (1)...(19): siRNA sense strand
ugaccaagagugcagauuu

SEQ ID NO: 131648 - RNA, 19 nt, Homo sapiens
  misc_RNA (1)...(19): siRNA sense strand
agacgcguguucccguuua

SEQ ID NO: 131649 - RNA, 19 nt, Homo sapiens
  misc_RNA (1)...(19): siRNA sense strand
ggaucccgcuggagaugaa

SEQ ID NO: 131650 - RNA, 19 nt, Homo sapiens
  misc_RNA (1)...(19): siRNA sense strand
gaucgaguacuucaggaaa

SEQ ID NO: 131651 - RNA, 19 nt, Homo sapiens
  misc_RNA (1)...(19): siRNA sense strand
gagugcagauuuccauaag

SEQ ID NO: 131652 - RNA, 19 nt, Homo sapiens
  misc_RNA (1)...(19): siRNA sense strand
caugugaggagcuucgaua

SEQ ID NO: 131653 - RNA, 19 nt, Homo sapiens
  misc_RNA (1)...(19): siRNA sense strand
ccugaagucugacauguac

SEQ ID NO: 131654 - RNA, 19 nt, Homo sapiens
  misc_RNA (1)...(19): siRNA sense strand
gcuaugaccggcuacacaa

SEQ ID NO: 131655 - RNA, 19 nt, Homo sapiens
  misc_RNA (1)...(19): siRNA sense strand
gggacaggcuggucauugc

SEQ ID NO: 131656 - RNA, 19 nt, Homo sapiens
  misc_RNA (1)...(19): siRNA sense strand
caugggaccuggugcugau

SEQ ID NO: 131657 - RNA, 19 nt, Homo sapiens
  misc_RNA (1)...(19): siRNA sense strand
ggaggcaugugaggagcuu

SEQ ID NO: 131658 - RNA, 19 nt, Homo sapiens
  misc_RNA (1)...(19): siRNA sense strand
gagcuggacuaugccaucu

SEQ ID NO: 131659 - RNA, 19 nt, Homo sapiens
  misc_RNA (1)...(19): siRNA sense strand
gcuggacuaugccaucuac

SEQ ID NO: 131660 - RNA, 19 nt, Homo sapiens
  misc_RNA (1)...(19): siRNA sense strand
gccgugugcucaugaccaa

SEQ ID NO: 131661 - RNA, 19 nt, Homo sapiens
  misc_RNA (1)...(19): siRNA sense strand
caagagugcagauuuccau

SEQ ID NO: 131662 - RNA, 19 nt, Homo sapiens
  misc_RNA (1)...(19): siRNA sense strand
gaugaagagacgcguguuc

SEQ ID NO: 131663 - RNA, 19 nt, Homo sapiens
  misc_RNA (1)...(19): siRNA sense strand
ccaccgcuauguccuggau

SEQ ID NO: 131664 - RNA, 19 nt, Homo sapiens
  misc_RNA (1)...(19): siRNA sense strand
ccugguggauuaugagaag

SEQ ID NO: 131665 - RNA, 19 nt, Homo sapiens
  misc_RNA (1)...(19): siRNA sense strand
gccaggagcagaccuacug

SEQ ID NO: 131666 - RNA, 19 nt, Homo sapiens
  misc_RNA (1)...(19): siRNA sense strand
uacccaagguuccugaagu

SEQ ID NO: 131667 - RNA, 19 nt, Homo sapiens
  misc_RNA (1)...(19): siRNA sense strand
agagugcagauuuccauaa

SEQ ID NO: 131668 - RNA, 19 nt, Homo sapiens
  misc_RNA (1)...(19): siRNA sense strand
ugaagucugacauguacaa

SEQ ID NO: 131669 - RNA, 19 nt, Homo sapiens
  misc_RNA (1)...(19): siRNA sense strand
ugaggagcuucgauaugga

SEQ ID NO: 131670 - RNA, 19 nt, Homo sapiens
  misc_RNA (1)...(19): siRNA sense strand
ccuacuggcuggugaacag

SEQ ID NO: 131671 - RNA, 19 nt, Homo sapiens
  misc_RNA (1)...(19): siRNA sense strand
gagacgcguguucccguuu

SEQ ID NO: 131672 - RNA, 19 nt, Homo sapiens
  misc_RNA (1)...(19): siRNA sense strand
ccuacugggucaugaaugc

SEQ ID NO: 131673 - RNA, 19 nt, Homo sapiens
  misc_RNA (1)...(19): siRNA sense strand
agcgggagaucgaguacuu

SEQ ID NO: 131674 - RNA, 19 nt, Homo sapiens
  misc_RNA (1)...(19): siRNA sense strand
gcgacgucgugcagugguu

SEQ ID NO: 131675 - RNA, 19 nt, Homo sapiens
  misc_RNA (1)...(19): siRNA sense strand
ggugcagcauggcuacauc

SEQ ID NO: 131676 - RNA, 19 nt, Homo sapiens
  misc_RNA (1)...(19): siRNA sense strand
ggaguucaguggagaaaac

SEQ ID NO: 131677 - RNA, 19 nt, Homo sapiens
  misc_RNA (1)...(19): siRNA sense strand
gcaggacccgagugaaguc

SEQ ID NO: 131678 - RNA, 19 nt, Homo sapiens
  misc_RNA (1)...(19): siRNA sense strand
gggcccacuucauggacuu

SEQ ID NO: 131679 - RNA, 19 nt, Homo sapiens
  misc_RNA (1)...(19): siRNA sense strand
uaugaccggcuacacaaga

SEQ ID NO: 131680 - RNA, 19 nt, Homo sapiens
  misc_RNA (1)...(19): siRNA sense strand
acgagacgcccuacagguu

SEQ ID NO: 131681 - RNA, 19 nt, Homo sapiens
  misc_RNA (1)...(19): siRNA sense strand
ccugguggaugccguguac

SEQ ID NO: 131682 - RNA, 19 nt, Homo sapiens
  misc_RNA (1)...(19): siRNA sense strand
gaccggcuacacaagaaga

SEQ ID NO: 131683 - RNA, 19 nt, Homo sapiens
  misc_RNA (1)...(19): siRNA sense strand
ggaaauacguggucugcuu

SEQ ID NO: 131684 - RNA, 19 nt, Homo sapiens
  misc_RNA (1)...(19): siRNA sense strand
cagaggaugugcaggaaua

SEQ ID NO: 131685 - RNA, 19 nt, Homo sapiens
  misc_RNA (1)...(19): siRNA sense strand
gagaugaggugaagaaacu

SEQ ID NO: 131686 - RNA, 19 nt, Homo sapiens
  misc_RNA (1)...(19): siRNA sense strand
gaaauacguggucugcuuu

SEQ ID NO: 131687 - RNA, 19 nt, Homo sapiens
  misc_RNA (1)...(19): siRNA sense strand
gaagaaacuggaugugcua

SEQ ID NO: 131688 - RNA, 19 nt, Homo sapiens
  misc_RNA (1)...(19): siRNA sense strand
ccaauucccuggugaucaa

SEQ ID NO: 131689 - RNA, 19 nt, Homo sapiens
  misc_RNA (1)...(19): siRNA sense strand
guccaauccuccuauagua

SEQ ID NO: 131690 - RNA, 19 nt, Homo sapiens
  misc_RNA (1)...(19): siRNA sense strand
gaaccaucuuugccaucua

SEQ ID NO: 131691 - RNA, 19 nt, Homo sapiens
  misc_RNA (1)...(19): siRNA sense strand
aggaauaucucaccugugu

SEQ ID NO: 131692 - RNA, 19 nt, Homo sapiens
  misc_RNA (1)...(19): siRNA sense strand
gaauaaggacgccaucauc

SEQ ID NO: 131693 - RNA, 19 nt, Homo sapiens
  misc_RNA (1)...(19): siRNA sense strand
ggaaucgcaggaagcguua

SEQ ID NO: 131694 - RNA, 19 nt, Homo sapiens
  misc_RNA (1)...(19): siRNA sense strand
gaggaugagccuucugaaa

SEQ ID NO: 131695 - RNA, 19 nt, Homo sapiens
  misc_RNA (1)...(19): siRNA sense strand
ggaaccaucuuugccaucu

SEQ ID NO: 131696 - RNA, 19 nt, Homo sapiens
  misc_RNA (1)...(19): siRNA sense strand
gaagaaaggaaagauuuac

SEQ ID NO: 131697 - RNA, 19 nt, Homo sapiens
  misc_RNA (1)...(19): siRNA sense strand
gcaaucccguggccuacau

SEQ ID NO: 131698 - RNA, 19 nt, Homo sapiens
  misc_RNA (1)...(19): siRNA sense strand
ggauggcagugcucccuau

SEQ ID NO: 131699 - RNA, 19 nt, Homo sapiens
  misc_RNA (1)...(19): siRNA sense strand
ugagggcuaugccaaguau

SEQ ID NO: 131700 - RNA, 19 nt, Homo sapiens
  misc_RNA (1)...(19): siRNA sense strand
gcaguguggccgcaauauu

SEQ ID NO: 131701 - RNA, 19 nt, Homo sapiens
  misc_RNA (1)...(19): siRNA sense strand
gaauuuguccugguggaaa

SEQ ID NO: 131702 - RNA, 19 nt, Homo sapiens
  misc_RNA (1)...(19): siRNA sense strand
ggccaccacugaauaugug

SEQ ID NO: 131703 - RNA, 19 nt, Homo sapiens
  misc_RNA (1)...(19): siRNA sense strand
caguguggccgcaauauug

SEQ ID NO: 131704 - RNA, 19 nt, Homo sapiens
  misc_RNA (1)...(19): siRNA sense strand
ugacccggcucuuggugaa

SEQ ID NO: 131705 - RNA, 19 nt, Homo sapiens
  misc_RNA (1)...(19): siRNA sense strand
gcuccuguaugaaugcaau

SEQ ID NO: 131706 - RNA, 19 nt, Homo sapiens
  misc_RNA (1)...(19): siRNA sense strand
gcaaggcguggaccucuuc

SEQ ID NO: 131707 - RNA, 19 nt, Homo sapiens
  misc_RNA (1)...(19): siRNA sense strand
gaugucaagauuaagaaga

SEQ ID NO: 131708 - RNA, 19 nt, Homo sapiens
  misc_RNA (1)...(19): siRNA sense strand
gguccaauccuccuauagu

SEQ ID NO: 131709 - RNA, 19 nt, Homo sapiens
  misc_RNA (1)...(19): siRNA sense strand
ccacugaauaugugcagaa

SEQ ID NO: 131710 - RNA, 19 nt, Homo sapiens
  misc_RNA (1)...(19): siRNA sense strand
gcaccgcacccuggucuau

SEQ ID NO: 131711 - RNA, 19 nt, Homo sapiens
  misc_RNA (1)...(19): siRNA sense strand
gacgggagaugaggugaag

SEQ ID NO: 131712 - RNA, 19 nt, Homo sapiens
  misc_RNA (1)...(19): siRNA sense strand
aaccaucuuugccaucuau

SEQ ID NO: 131713 - RNA, 19 nt, Homo sapiens
  misc_RNA (1)...(19): siRNA sense strand
caucuuugccaucuauaga

SEQ ID NO: 131714 - RNA, 19 nt, Homo sapiens
  misc_RNA (1)...(19): siRNA sense strand
ggaugagccuucugaaaag

SEQ ID NO: 131715 - RNA, 19 nt, Homo sapiens
  misc_RNA (1)...(19): siRNA sense strand
acccugacccgcuacguua

SEQ ID NO: 131716 - RNA, 19 nt, Homo sapiens
  misc_RNA (1)...(19): siRNA sense strand
aaagaaauucccugaggau

SEQ ID NO: 131717 - RNA, 19 nt, Homo sapiens
  misc_RNA (1)...(19): siRNA sense strand
ucuuugccaucuauagaaa

SEQ ID NO: 131718 - RNA, 19 nt, Homo sapiens
  misc_RNA (1)...(19): siRNA sense strand
ggcaaggcguggaccucuu

SEQ ID NO: 131719 - RNA, 19 nt, Homo sapiens
  misc_RNA (1)...(19): siRNA sense strand
gcaagcuccggcuccugua

SEQ ID NO: 131720 - RNA, 19 nt, Homo sapiens
  misc_RNA (1)...(19): siRNA sense strand
agauuuacagccugaauga

SEQ ID NO: 131721 - RNA, 19 nt, Homo sapiens
  misc_RNA (1)...(19): siRNA sense strand
ggagaugaggugaagaaac

SEQ ID NO: 131722 - RNA, 19 nt, Homo sapiens
  misc_RNA (1)...(19): siRNA sense strand
cacugaauaugugcagaaa

SEQ ID NO: 131723 - RNA, 19 nt, Homo sapiens
  misc_RNA (1)...(19): siRNA sense strand
aauaaggacgccaucauca

SEQ ID NO: 131724 - RNA, 19 nt, Homo sapiens
  misc_RNA (1)...(19): siRNA sense strand
gagaauaaggacgccauca

SEQ ID NO: 131725 - RNA, 19 nt, Homo sapiens
  misc_RNA (1)...(19): siRNA sense strand
ugaucaacaugguccaauc

SEQ ID NO: 131726 - RNA, 19 nt, Homo sapiens
  misc_RNA (1)...(19): siRNA sense strand
guacccagccaaccagaag

SEQ ID NO: 131727 - RNA, 19 nt, Homo sapiens
  misc_RNA (1)...(19): siRNA sense strand
ucccguggccuacaucauu

SEQ ID NO: 131728 - RNA, 19 nt, Homo sapiens
  misc_RNA (1)...(19): siRNA sense strand
cgggagaugaggugaagaa

SEQ ID NO: 131729 - RNA, 19 nt, Homo sapiens
  misc_RNA (1)...(19): siRNA sense strand
gcguggaccucuucaugcu

SEQ ID NO: 131730 - RNA, 19 nt, Homo sapiens
  misc_RNA (1)...(19): siRNA sense strand
ggucuauggaggaaucuuc

SEQ ID NO: 131731 - RNA, 19 nt, Homo sapiens
  misc_RNA (1)...(19): siRNA sense strand
ucucaccugugugcagaaa

SEQ ID NO: 131732 - RNA, 19 nt, Homo sapiens
  misc_RNA (1)...(19): siRNA sense strand
cccguggccuacaucauug

SEQ ID NO: 131733 - RNA, 19 nt, Homo sapiens
  misc_RNA (1)...(19): siRNA sense strand
ccagguaugugggcuccau

SEQ ID NO: 131734 - RNA, 19 nt, Homo sapiens
  misc_RNA (1)...(19): siRNA sense strand
uaacgugacgggagaugag

SEQ ID NO: 131735 - RNA, 19 nt, Homo sapiens
  misc_RNA (1)...(19): siRNA sense strand
gacccgcuacguuauggaa

SEQ ID NO: 131736 - RNA, 19 nt, Homo sapiens
  misc_RNA (1)...(19): siRNA sense strand
ccuggucuauggaggaauc

SEQ ID NO: 131737 - RNA, 19 nt, Homo sapiens
  misc_RNA (1)...(19): siRNA sense strand
agggcuaugccaaguauuu

SEQ ID NO: 131738 - RNA, 19 nt, Homo sapiens
  misc_RNA (1)...(19): siRNA sense strand
ggacauaguugcaauaaca

SEQ ID NO: 131739 - RNA, 19 nt, Homo sapiens
  misc_RNA (1)...(19): siRNA sense strand
gaaaugaggcagagaauau

SEQ ID NO: 131740 - RNA, 19 nt, Homo sapiens
  misc_RNA (1)...(19): siRNA sense strand
ggagauaaauggaauucuu

SEQ ID NO: 131741 - RNA, 19 nt, Homo sapiens
  misc_RNA (1)...(19): siRNA sense strand
ggggaaaacugcauuauua

SEQ ID NO: 131742 - RNA, 19 nt, Homo sapiens
  misc_RNA (1)...(19): siRNA sense strand
gaacaaccgaagaauauuu

SEQ ID NO: 131743 - RNA, 19 nt, Homo sapiens
  misc_RNA (1)...(19): siRNA sense strand
gcuuaaagaugaauagaug

SEQ ID NO: 131744 - RNA, 19 nt, Homo sapiens
  misc_RNA (1)...(19): siRNA sense strand
cagaaaagcugaaaagaaa

SEQ ID NO: 131745 - RNA, 19 nt, Homo sapiens
  misc_RNA (1)...(19): siRNA sense strand
caucacaugucauuaaaga

SEQ ID NO: 131746 - RNA, 19 nt, Homo sapiens
  misc_RNA (1)...(19): siRNA sense strand
aaaggaacaucacuaaaug

SEQ ID NO: 131747 - RNA, 19 nt, Homo sapiens
  misc_RNA (1)...(19): siRNA sense strand
guuauaacaucccuaaaga

SEQ ID NO: 131748 - RNA, 19 nt, Homo sapiens
  misc_RNA (1)...(19): siRNA sense strand
guucuuacauccuaacaaa

SEQ ID NO: 131749 - RNA, 19 nt, Homo sapiens
  misc_RNA (1)...(19): siRNA sense strand
ggaacuugcuuacaaccaa

SEQ ID NO: 131750 - RNA, 19 nt, Homo sapiens
  misc_RNA (1)...(19): siRNA sense strand
cauugccgaucuuaaauua

SEQ ID NO: 131751 - RNA, 19 nt, Homo sapiens
  misc_RNA (1)...(19): siRNA sense strand
ggaguucaauaucacguuu

SEQ ID NO: 131752 - RNA, 19 nt, Homo sapiens
  misc_RNA (1)...(19): siRNA sense strand
gacuaugucuacacagaua

SEQ ID NO: 131753 - RNA, 19 nt, Homo sapiens
  misc_RNA (1)...(19): siRNA sense strand
cagagaauauuucaucuuc

SEQ ID NO: 131754 - RNA, 19 nt, Homo sapiens
  misc_RNA (1)...(19): siRNA sense strand
acacugagcugugaaauag

SEQ ID NO: 131755 - RNA, 19 nt, Homo sapiens
  misc_RNA (1)...(19): siRNA sense strand
gcuaagaggcaaacuugua

SEQ ID NO: 131756 - RNA, 19 nt, Homo sapiens
  misc_RNA (1)...(19): siRNA sense strand
gaagaaaugcuuaucuaca

SEQ ID NO: 131757 - RNA, 19 nt, Homo sapiens
  misc_RNA (1)...(19): siRNA sense strand
aauuaaagcuagccaugua

SEQ ID NO: 131758 - RNA, 19 nt, Homo sapiens
  misc_RNA (1)...(19): siRNA sense strand
uaaagaagagucagaguug

SEQ ID NO: 131759 - RNA, 19 nt, Homo sapiens
  misc_RNA (1)...(19): siRNA sense strand
uaccacacauggaguauuu

SEQ ID NO: 131760 - RNA, 19 nt, Homo sapiens
  misc_RNA (1)...(19): siRNA sense strand
gcucauccuucuaguuuga

SEQ ID NO: 131761 - RNA, 19 nt, Homo sapiens
  misc_RNA (1)...(19): siRNA sense strand
ugacaaaccuggcuuuacu

SEQ ID NO: 131762 - RNA, 19 nt, Homo sapiens
  misc_RNA (1)...(19): siRNA sense strand
gagcuaagaggcaaacuug

SEQ ID NO: 131763 - RNA, 19 nt, Homo sapiens
  misc_RNA (1)...(19): siRNA sense strand
gaaaagcuauauggagaua

SEQ ID NO: 131764 - RNA, 19 nt, Homo sapiens
  misc_RNA (1)...(19): siRNA sense strand
guacauugauuuccccuua

SEQ ID NO: 131765 - RNA, 19 nt, Homo sapiens
  misc_RNA (1)...(19): siRNA sense strand
ugacauugccgaucuuaaa

SEQ ID NO: 131766 - RNA, 19 nt, Homo sapiens
  misc_RNA (1)...(19): siRNA sense strand
aaaccuggcuuuacugcuu

SEQ ID NO: 131767 - RNA, 19 nt, Homo sapiens
  misc_RNA (1)...(19): siRNA sense strand
gugaaaacauugucagaua

SEQ ID NO: 131768 - RNA, 19 nt, Homo sapiens
  misc_RNA (1)...(19): siRNA sense strand
gcucaguuguggaguauuc

SEQ ID NO: 131769 - RNA, 19 nt, Homo sapiens
  misc_RNA (1)...(19): siRNA sense strand
uaccucagauaacaguuua

SEQ ID NO: 131770 - RNA, 19 nt, Homo sapiens
  misc_RNA (1)...(19): siRNA sense strand
aauggaggaucaacacuuu

SEQ ID NO: 131771 - RNA, 19 nt, Homo sapiens
  misc_RNA (1)...(19): siRNA sense strand
auaaguugcuguccauuga

SEQ ID NO: 131772 - RNA, 19 nt, Homo sapiens
  misc_RNA (1)...(19): siRNA sense strand
ggagaauucugggacauag

SEQ ID NO: 131773 - RNA, 19 nt, Homo sapiens
  misc_RNA (1)...(19): siRNA sense strand
aacaggaacuugcuuacaa

SEQ ID NO: 131774 - RNA, 19 nt, Homo sapiens
  misc_RNA (1)...(19): siRNA sense strand
uagcucauccuucuaguuu

SEQ ID NO: 131775 - RNA, 19 nt, Homo sapiens
  misc_RNA (1)...(19): siRNA sense strand
ugccaucguuuccuucaua

SEQ ID NO: 131776 - RNA, 19 nt, Homo sapiens
  misc_RNA (1)...(19): siRNA sense strand
gcuauaaguugcuguccau

SEQ ID NO: 131777 - RNA, 19 nt, Homo sapiens
  misc_RNA (1)...(19): siRNA sense strand
ccaguuuguucuucuuuga

SEQ ID NO: 131778 - RNA, 19 nt, Homo sapiens
  misc_RNA (1)...(19): siRNA sense strand
caaaacauccuguaucauu

SEQ ID NO: 131779 - RNA, 19 nt, Homo sapiens
  misc_RNA (1)...(19): siRNA sense strand
cauacuggauucaagaugu

SEQ ID NO: 131780 - RNA, 19 nt, Homo sapiens
  misc_RNA (1)...(19): siRNA sense strand
gcccuucaauguuuggaaa

SEQ ID NO: 131781 - RNA, 19 nt, Homo sapiens
  misc_RNA (1)...(19): siRNA sense strand
cauaagcccagcauagaaa

SEQ ID NO: 131782 - RNA, 19 nt, Homo sapiens
  misc_RNA (1)...(19): siRNA sense strand
gaugcuagaauuaaagcua

SEQ ID NO: 131783 - RNA, 19 nt, Homo sapiens
  misc_RNA (1)...(19): siRNA sense strand
aaacauagagaccuugaau

SEQ ID NO: 131784 - RNA, 19 nt, Homo sapiens
  misc_RNA (1)...(19): siRNA sense strand
uggaacaaccgaagaauau

SEQ ID NO: 131785 - RNA, 19 nt, Homo sapiens
  misc_RNA (1)...(19): siRNA sense strand
guagaaaugaggcagagaa

SEQ ID NO: 131786 - RNA, 19 nt, Homo sapiens
  misc_RNA (1)...(19): siRNA sense strand
gagaagccacccagcgaaa

SEQ ID NO: 131787 - RNA, 19 nt, Homo sapiens
  misc_RNA (1)...(19): siRNA sense strand
uaacuuacagggaacaaau

SEQ ID NO: 131788 - RNA, 19 nt, Homo sapiens
  misc_RNA (1)...(19): siRNA sense strand
gcacgcauuuucccaguuu

SEQ ID NO: 131789 - RNA, 19 nt, Homo sapiens
  misc_RNA (1)...(19): siRNA sense strand
gcagagaauauuucaucuu

SEQ ID NO: 131790 - RNA, 19 nt, Homo sapiens
  misc_RNA (1)...(19): siRNA sense strand
agucagaguugguagaaau

SEQ ID NO: 131791 - RNA, 19 nt, Homo sapiens
  misc_RNA (1)...(19): siRNA sense strand
gacgauagguaccacacau

SEQ ID NO: 131792 - RNA, 19 nt, Homo sapiens
  misc_RNA (1)...(19): siRNA sense strand
ucaauucuuuggagucugu

SEQ ID NO: 131793 - RNA, 19 nt, Homo sapiens
  misc_RNA (1)...(19): siRNA sense strand
gcuuacaguccauaacuuu

SEQ ID NO: 131794 - RNA, 19 nt, Homo sapiens
  misc_RNA (1)...(19): siRNA sense strand
aaagucagagcucggcuua

SEQ ID NO: 131795 - RNA, 19 nt, Homo sapiens
  misc_RNA (1)...(19): siRNA sense strand
uuugugcccuucaauguuu

SEQ ID NO: 131796 - RNA, 19 nt, Homo sapiens
  misc_RNA (1)...(19): siRNA sense strand
ggaacaaccgaagaauauu

SEQ ID NO: 131797 - RNA, 19 nt, Homo sapiens
  misc_RNA (1)...(19): siRNA sense strand
gagcaacuguggaguacac

SEQ ID NO: 131798 - RNA, 19 nt, Homo sapiens
  misc_RNA (1)...(19): siRNA sense strand
auagagaccuugaauacag

SEQ ID NO: 131799 - RNA, 19 nt, Homo sapiens
  misc_RNA (1)...(19): siRNA sense strand
gcagaugauauugaacuuu

SEQ ID NO: 131800 - RNA, 19 nt, Homo sapiens
  misc_RNA (1)...(19): siRNA sense strand
gaauuaaagcuagccaugu

SEQ ID NO: 131801 - RNA, 19 nt, Homo sapiens
  misc_RNA (1)...(19): siRNA sense strand
gaaaugcuuaucuacaaag

SEQ ID NO: 131802 - RNA, 19 nt, Homo sapiens
  misc_RNA (1)...(19): siRNA sense strand
guguagaccuggaaauuuu

SEQ ID NO: 131803 - RNA, 19 nt, Homo sapiens
  misc_RNA (1)...(19): siRNA sense strand
gccaucguuuccuucauaa

SEQ ID NO: 131804 - RNA, 19 nt, Homo sapiens
  misc_RNA (1)...(19): siRNA sense strand
guauuugucuuagauccuu

SEQ ID NO: 131805 - RNA, 19 nt, Homo sapiens
  misc_RNA (1)...(19): siRNA sense strand
acauggaguauuugucuua

SEQ ID NO: 131806 - RNA, 19 nt, Homo sapiens
  misc_RNA (1)...(19): siRNA sense strand
ucaguuauaacaucccuaa

SEQ ID NO: 131807 - RNA, 19 nt, Homo sapiens
  misc_RNA (1)...(19): siRNA sense strand
uugccgaucuuaaauuaga

SEQ ID NO: 131808 - RNA, 19 nt, Homo sapiens
  misc_RNA (1)...(19): siRNA sense strand
ucacaugucauuaaagaag

SEQ ID NO: 131809 - RNA, 19 nt, Homo sapiens
  misc_RNA (1)...(19): siRNA sense strand
ggcaaaacauccuguauca

SEQ ID NO: 131810 - RNA, 19 nt, Homo sapiens
  misc_RNA (1)...(19): siRNA sense strand
cuuaaaggaacaucacuaa

SEQ ID NO: 131811 - RNA, 19 nt, Homo sapiens
  misc_RNA (1)...(19): siRNA sense strand
gugacuuucugcaggcuuu

SEQ ID NO: 131812 - RNA, 19 nt, Homo sapiens
  misc_RNA (1)...(19): siRNA sense strand
uguauguuccuuaagcuua

SEQ ID NO: 131813 - RNA, 19 nt, Homo sapiens
  misc_RNA (1)...(19): siRNA sense strand
ggaaauggaggaucaacac

SEQ ID NO: 131814 - RNA, 19 nt, Homo sapiens
  misc_RNA (1)...(19): siRNA sense strand
cuuaaaguaugcaacuaug

SEQ ID NO: 131815 - RNA, 19 nt, Homo sapiens
  misc_RNA (1)...(19): siRNA sense strand
gcuuaaaguaugcaacuau

SEQ ID NO: 131816 - RNA, 19 nt, Homo sapiens
  misc_RNA (1)...(19): siRNA sense strand
agucagagcucggcuuaca

SEQ ID NO: 131817 - RNA, 19 nt, Homo sapiens
  misc_RNA (1)...(19): siRNA sense strand
uuaaagaagagucagaguu

SEQ ID NO: 131818 - RNA, 19 nt, Homo sapiens
  misc_RNA (1)...(19): siRNA sense strand
ggaguacaccagaaacaca

SEQ ID NO: 131819 - RNA, 19 nt, Homo sapiens
  misc_RNA (1)...(19): siRNA sense strand
uggaguauuugucuuagau

SEQ ID NO: 131820 - RNA, 19 nt, Homo sapiens
  misc_RNA (1)...(19): siRNA sense strand
uguagcacguggagaauuc

SEQ ID NO: 131821 - RNA, 19 nt, Homo sapiens
  misc_RNA (1)...(19): siRNA sense strand
ggauccugcuggagccaaa

SEQ ID NO: 131822 - RNA, 19 nt, Homo sapiens
  misc_RNA (1)...(19): siRNA sense strand
uaagaacaagucagcauuc

SEQ ID NO: 131823 - RNA, 19 nt, Homo sapiens
  misc_RNA (1)...(19): siRNA sense strand
gaaaacugcauuauuagug

SEQ ID NO: 131824 - RNA, 19 nt, Homo sapiens
  misc_RNA (1)...(19): siRNA sense strand
acauagagaccuugaauac

SEQ ID NO: 131825 - RNA, 19 nt, Homo sapiens
  misc_RNA (1)...(19): siRNA sense strand
cacaugucauuaaagaaga

SEQ ID NO: 131826 - RNA, 19 nt, Homo sapiens
  misc_RNA (1)...(19): siRNA sense strand
caaccgaagaauauuuguu

SEQ ID NO: 131827 - RNA, 19 nt, Homo sapiens
  misc_RNA (1)...(19): siRNA sense strand
ggaauucuuuuaccaucuu

SEQ ID NO: 131828 - RNA, 19 nt, Homo sapiens
  misc_RNA (1)...(19): siRNA sense strand
cccuaaagauguuaaaugc

SEQ ID NO: 131829 - RNA, 19 nt, Homo sapiens
  misc_RNA (1)...(19): siRNA sense strand
gcauuauuagugguucuua

SEQ ID NO: 131830 - RNA, 19 nt, Homo sapiens
  misc_RNA (1)...(19): siRNA sense strand
auucaaagcauacuggauu

SEQ ID NO: 131831 - RNA, 19 nt, Homo sapiens
  misc_RNA (1)...(19): siRNA sense strand
agaaaugaggcagagaaua

SEQ ID NO: 131832 - RNA, 19 nt, Homo sapiens
  misc_RNA (1)...(19): siRNA sense strand
gacauugccgaucuuaaau

SEQ ID NO: 131833 - RNA, 19 nt, Homo sapiens
  misc_RNA (1)...(19): siRNA sense strand
caacgacuuccaaaugcaa

SEQ ID NO: 131834 - RNA, 19 nt, Homo sapiens
  misc_RNA (1)...(19): siRNA sense strand
aaauuagacucugacuaug

SEQ ID NO: 131835 - RNA, 19 nt, Homo sapiens
  misc_RNA (1)...(19): siRNA sense strand
caaagauguagaagauaug

SEQ ID NO: 131836 - RNA, 19 nt, Homo sapiens
  misc_RNA (1)...(19): siRNA sense strand
augcuuagauguuuggaau

SEQ ID NO: 131837 - RNA, 19 nt, Homo sapiens
  misc_RNA (1)...(19): siRNA sense strand
cauccuguaucauucaaag

SEQ ID NO: 131838 - RNA, 19 nt, Homo sapiens
  misc_RNA (1)...(19): siRNA sense strand
gaaaguacaugucuucuaa

SEQ ID NO: 131839 - RNA, 19 nt, Homo sapiens
  misc_RNA (1)...(19): siRNA sense strand
ggaaagcacucacagcuaa

SEQ ID NO: 131840 - RNA, 19 nt, Homo sapiens
  misc_RNA (1)...(19): siRNA sense strand
gcagaucgcuccuccaugu

SEQ ID NO: 131841 - RNA, 19 nt, Homo sapiens
  misc_RNA (1)...(19): siRNA sense strand
ggacggugcuguaacaaau

SEQ ID NO: 131842 - RNA, 19 nt, Homo sapiens
  misc_RNA (1)...(19): siRNA sense strand
guacaugucuucuaaaugc

SEQ ID NO: 131843 - RNA, 19 nt, Homo sapiens
  misc_RNA (1)...(19): siRNA sense strand
gaaagagaguagaacauca

SEQ ID NO: 131844 - RNA, 19 nt, Homo sapiens
  misc_RNA (1)...(19): siRNA sense strand
gagaagacauuuccagaag

SEQ ID NO: 131845 - RNA, 19 nt, Homo sapiens
  misc_RNA (1)...(19): siRNA sense strand
gaagacauuuccagaagau

SEQ ID NO: 131846 - RNA, 19 nt, Homo sapiens
  misc_RNA (1)...(19): siRNA sense strand
gcauaaaguuugugauaca

SEQ ID NO: 131847 - RNA, 19 nt, Homo sapiens
  misc_RNA (1)...(19): siRNA sense strand
cuacuucucugaugccuuu

SEQ ID NO: 131848 - RNA, 19 nt, Homo sapiens
  misc_RNA (1)...(19): siRNA sense strand
cacagaagaugaauacaug

SEQ ID NO: 131849 - RNA, 19 nt, Homo sapiens
  misc_RNA (1)...(19): siRNA sense strand
ggaaaguacaugucuucua

SEQ ID NO: 131850 - RNA, 19 nt, Homo sapiens
  misc_RNA (1)...(19): siRNA sense strand
uuacuugcccgguuuaaua

SEQ ID NO: 131851 - RNA, 19 nt, Homo sapiens
  misc_RNA (1)...(19): siRNA sense strand
caaaugaaccccauguuua

SEQ ID NO: 131852 - RNA, 19 nt, Homo sapiens
  misc_RNA (1)...(19): siRNA sense strand
ggaaugaagaagauaaaug

SEQ ID NO: 131853 - RNA, 19 nt, Homo sapiens
  misc_RNA (1)...(19): siRNA sense strand
ggagaagacauuuccagaa

SEQ ID NO: 131854 - RNA, 19 nt, Homo sapiens
  misc_RNA (1)...(19): siRNA sense strand
gcaaauccacaccuccuuu

SEQ ID NO: 131855 - RNA, 19 nt, Homo sapiens
  misc_RNA (1)...(19): siRNA sense strand
gcagguggcuuugcagauc

SEQ ID NO: 131856 - RNA, 19 nt, Homo sapiens
  misc_RNA (1)...(19): siRNA sense strand
ccagugagaagcauuauga

SEQ ID NO: 131857 - RNA, 19 nt, Homo sapiens
  misc_RNA (1)...(19): siRNA sense strand
ucagacagaugcccacaga

SEQ ID NO: 131858 - RNA, 19 nt, Homo sapiens
  misc_RNA (1)...(19): siRNA sense strand
ggaaagagaguagaacauc

SEQ ID NO: 131859 - RNA, 19 nt, Homo sapiens
  misc_RNA (1)...(19): siRNA sense strand
gaacaucaugggacagaga

SEQ ID NO: 131860 - RNA, 19 nt, Homo sapiens
  misc_RNA (1)...(19): siRNA sense strand
gauaugugcuacccagauc

SEQ ID NO: 131861 - RNA, 19 nt, Homo sapiens
  misc_RNA (1)...(19): siRNA sense strand
gaaugaagaagauaaaugc

SEQ ID NO: 131862 - RNA, 19 nt, Homo sapiens
  misc_RNA (1)...(19): siRNA sense strand
ccacaccuccuuucucuga

SEQ ID NO: 131863 - RNA, 19 nt, Homo sapiens
  misc_RNA (1)...(19): siRNA sense strand
guaccagugagaagcauua

SEQ ID NO: 131864 - RNA, 19 nt, Homo sapiens
  misc_RNA (1)...(19): siRNA sense strand
gcagggagcaugugaaggu

SEQ ID NO: 131865 - RNA, 19 nt, Homo sapiens
  misc_RNA (1)...(19): siRNA sense strand
gcaggcuacuucucugaug

SEQ ID NO: 131866 - RNA, 19 nt, Homo sapiens
  misc_RNA (1)...(19): siRNA sense strand
guacacacacggcaaacuu

SEQ ID NO: 131867 - RNA, 19 nt, Homo sapiens
  misc_RNA (1)...(19): siRNA sense strand
gcgggcaggugaugaacuu

SEQ ID NO: 131868 - RNA, 19 nt, Homo sapiens
  misc_RNA (1)...(19): siRNA sense strand
cugcauaaaguuugugaua

SEQ ID NO: 131869 - RNA, 19 nt, Homo sapiens
  misc_RNA (1)...(19): siRNA sense strand
gaaacaguaacuccacguu

SEQ ID NO: 131870 - RNA, 19 nt, Homo sapiens
  misc_RNA (1)...(19): siRNA sense strand
gaaauccgaugcgguuugc

SEQ ID NO: 131871 - RNA, 19 nt, Homo sapiens
  misc_RNA (1)...(19): siRNA sense strand
uuggauagcuggaaugaag

SEQ ID NO: 131872 - RNA, 19 nt, Homo sapiens
  misc_RNA (1)...(19): siRNA sense strand
agaccgagauagaggaaga

SEQ ID NO: 131873 - RNA, 19 nt, Homo sapiens
  misc_RNA (1)...(19): siRNA sense strand
gcacucacagcuaauuugu

SEQ ID NO: 131874 - RNA, 19 nt, Homo sapiens
  misc_RNA (1)...(19): siRNA sense strand
gggaaagcacucacagcua

SEQ ID NO: 131875 - RNA, 19 nt, Homo sapiens
  misc_RNA (1)...(19): siRNA sense strand
ccggaugaauacuuggaua

SEQ ID NO: 131876 - RNA, 19 nt, Homo sapiens
  misc_RNA (1)...(19): siRNA sense strand
gaacuucaagggcgacauc

SEQ ID NO: 131877 - RNA, 19 nt, Homo sapiens
  misc_RNA (1)...(19): siRNA sense strand
gaccaacuguaccuuccuu

SEQ ID NO: 131878 - RNA, 19 nt, Homo sapiens
  misc_RNA (1)...(19): siRNA sense strand
uagcuggaaugaagaagau

SEQ ID NO: 131879 - RNA, 19 nt, Homo sapiens
  misc_RNA (1)...(19): siRNA sense strand
cuggaaaugugacuggaaa

SEQ ID NO: 131880 - RNA, 19 nt, Homo sapiens
  misc_RNA (1)...(19): siRNA sense strand
ccacagaagaugaauacau

SEQ ID NO: 131881 - RNA, 19 nt, Homo sapiens
  misc_RNA (1)...(19): siRNA sense strand
agaagacauuuccagaaga

SEQ ID NO: 131882 - RNA, 19 nt, Homo sapiens
  misc_RNA (1)...(19): siRNA sense strand
gaaccaggaaaguacaugu

SEQ ID NO: 131883 - RNA, 19 nt, Homo sapiens
  misc_RNA (1)...(19): siRNA sense strand
gagcacaguggguucagaa

SEQ ID NO: 131884 - RNA, 19 nt, Homo sapiens
  misc_RNA (1)...(19): siRNA sense strand
aacaguaacuccacguuca

SEQ ID NO: 131885 - RNA, 19 nt, Homo sapiens
  misc_RNA (1)...(19): siRNA sense strand
caacuguaccuuccuugga

SEQ ID NO: 131886 - RNA, 19 nt, Homo sapiens
  misc_RNA (1)...(19): siRNA sense strand
ggaaaugugacuggaaaca

SEQ ID NO: 131887 - RNA, 19 nt, Homo sapiens
  misc_RNA (1)...(19): siRNA sense strand
gacagaugcccacagaaga

SEQ ID NO: 131888 - RNA, 19 nt, Homo sapiens
  misc_RNA (1)...(19): siRNA sense strand
ugagaagcauuaugagcau

SEQ ID NO: 131889 - RNA, 19 nt, Homo sapiens
  misc_RNA (1)...(19): siRNA sense strand
gcuggaaugaagaagauaa

SEQ ID NO: 131890 - RNA, 19 nt, Homo sapiens
  misc_RNA (1)...(19): siRNA sense strand
ccaggaaaguacaugucuu

SEQ ID NO: 131891 - RNA, 19 nt, Homo sapiens
  misc_RNA (1)...(19): siRNA sense strand
ucacugagccuggaagcaa

SEQ ID NO: 131892 - RNA, 19 nt, Homo sapiens
  misc_RNA (1)...(19): siRNA sense strand
ccaggaugcucucauuggu

SEQ ID NO: 131893 - RNA, 19 nt, Homo sapiens
  misc_RNA (1)...(19): siRNA sense strand
gcacaguggguucagaaag

SEQ ID NO: 131894 - RNA, 19 nt, Homo sapiens
  misc_RNA (1)...(19): siRNA sense strand
ggauagcuggaaugaagaa

SEQ ID NO: 131895 - RNA, 19 nt, Homo sapiens
  misc_RNA (1)...(19): siRNA sense strand
caucugggacggugcugua

SEQ ID NO: 131896 - RNA, 19 nt, Homo sapiens
  misc_RNA (1)...(19): siRNA sense strand
gaugaauacuuggauagcu

SEQ ID NO: 131897 - RNA, 19 nt, Homo sapiens
  misc_RNA (1)...(19): siRNA sense strand
agacauuuccagaagauau

SEQ ID NO: 131898 - RNA, 19 nt, Homo sapiens
  misc_RNA (1)...(19): siRNA sense strand
gaaagcacucacagcuaau

SEQ ID NO: 131899 - RNA, 19 nt, Homo sapiens
  misc_RNA (1)...(19): siRNA sense strand
ucuucuaaaugcacuacua

SEQ ID NO: 131900 - RNA, 19 nt, Homo sapiens
  misc_RNA (1)...(19): siRNA sense strand
ccaaaugaaccccauguuu

SEQ ID NO: 131901 - RNA, 19 nt, Homo sapiens
  misc_RNA (1)...(19): siRNA sense strand
caggaaaguacaugucuuc

SEQ ID NO: 131902 - RNA, 19 nt, Homo sapiens
  misc_RNA (1)...(19): siRNA sense strand
ucagcaagaccgagauaga

SEQ ID NO: 131903 - RNA, 19 nt, Homo sapiens
  misc_RNA (1)...(19): siRNA sense strand
agaucaagguggugucugu

SEQ ID NO: 131904 - RNA, 19 nt, Homo sapiens
  misc_RNA (1)...(19): siRNA sense strand
caaauccacaccuccuuuc

SEQ ID NO: 131905 - RNA, 19 nt, Homo sapiens
  misc_RNA (1)...(19): siRNA sense strand
agacagaugcccacagaag

SEQ ID NO: 131906 - RNA, 19 nt, Homo sapiens
  misc_RNA (1)...(19): siRNA sense strand
gaaaugugacuggaaacag

SEQ ID NO: 131907 - RNA, 19 nt, Homo sapiens
  misc_RNA (1)...(19): siRNA sense strand
ccagcccacagaccaguua

SEQ ID NO: 131908 - RNA, 19 nt, Homo sapiens
  misc_RNA (1)...(19): siRNA sense strand
gggacggugcuguaacaaa

SEQ ID NO: 131909 - RNA, 19 nt, Homo sapiens
  misc_RNA (1)...(19): siRNA sense strand
gcccacagaagaugaauac

SEQ ID NO: 131910 - RNA, 19 nt, Homo sapiens
  misc_RNA (1)...(19): siRNA sense strand
guccucaggugacaguugu

SEQ ID NO: 131911 - RNA, 19 nt, Homo sapiens
  misc_RNA (1)...(19): siRNA sense strand
caucaucuuuggcguuugc

SEQ ID NO: 131912 - RNA, 19 nt, Homo sapiens
  misc_RNA (1)...(19): siRNA sense strand
ccgaugcgguuugcaguuc

SEQ ID NO: 131913 - RNA, 19 nt, Homo sapiens
  misc_RNA (1)...(19): siRNA sense strand
cacugagccuggaagcaaa

SEQ ID NO: 131914 - RNA, 19 nt, Homo sapiens
  misc_RNA (1)...(19): siRNA sense strand
caagaccgagauagaggaa

SEQ ID NO: 131915 - RNA, 19 nt, Homo sapiens
  misc_RNA (1)...(19): siRNA sense strand
gacauuuccagaagauaug

SEQ ID NO: 131916 - RNA, 19 nt, Homo sapiens
  misc_RNA (1)...(19): siRNA sense strand
auacuuggauagcuggaau

SEQ ID NO: 131917 - RNA, 19 nt, Homo sapiens
  misc_RNA (1)...(19): siRNA sense strand
uacuaccucugacagugua

SEQ ID NO: 131918 - RNA, 19 nt, Homo sapiens
  misc_RNA (1)...(19): siRNA sense strand
cuagaaaaccaccaaauga

SEQ ID NO: 131919 - RNA, 19 nt, Homo sapiens
  misc_RNA (1)...(19): siRNA sense strand
gaugcgguuugcaguucuu

SEQ ID NO: 131920 - RNA, 19 nt, Homo sapiens
  misc_RNA (1)...(19): siRNA sense strand
caaaugugaaccaggaaag

SEQ ID NO: 131921 - RNA, 19 nt, Homo sapiens
  misc_RNA (1)...(19): siRNA sense strand
cagaagaugaauacaugga

SEQ ID NO: 131922 - RNA, 19 nt, Homo sapiens
  misc_RNA (1)...(19): siRNA sense strand
aaugugaaccaggaaagua

SEQ ID NO: 131923 - RNA, 19 nt, Homo sapiens
  misc_RNA (1)...(19): siRNA sense strand
cuugcccgguuuaauaauu

SEQ ID NO: 131924 - RNA, 19 nt, Homo sapiens
  misc_RNA (1)...(19): siRNA sense strand
ucaguacacacacggcaaa

SEQ ID NO: 131925 - RNA, 19 nt, Homo sapiens
  misc_RNA (1)...(19): siRNA sense strand
gcgacaucaucguggucua

SEQ ID NO: 131926 - RNA, 19 nt, Homo sapiens
  misc_RNA (1)...(19): siRNA sense strand
cacaguggguucagaaagc

SEQ ID NO: 131927 - RNA, 19 nt, Homo sapiens
  misc_RNA (1)...(19): siRNA sense strand
ggagaaugacaguuuaagc

SEQ ID NO: 131928 - RNA, 19 nt, Homo sapiens
  misc_RNA (1)...(19): siRNA sense strand
gaagcauuaugagcaucug

SEQ ID NO: 131929 - RNA, 19 nt, Homo sapiens
  misc_RNA (1)...(19): siRNA sense strand
ccgccuaaguggagauaag

SEQ ID NO: 131930 - RNA, 19 nt, Homo sapiens
  misc_RNA (1)...(19): siRNA sense strand
caucuuuggcguuugcuau

SEQ ID NO: 131931 - RNA, 19 nt, Homo sapiens
  misc_RNA (1)...(19): siRNA sense strand
gagaaauccgaugcgguuu

SEQ ID NO: 131932 - RNA, 19 nt, Homo sapiens
  misc_RNA (1)...(19): siRNA sense strand
aaagagaguagaacaucau

SEQ ID NO: 131933 - RNA, 19 nt, Homo sapiens
  misc_RNA (1)...(19): siRNA sense strand
cauaaaguuugugauacag

SEQ ID NO: 131934 - RNA, 19 nt, Homo sapiens
  misc_RNA (1)...(19): siRNA sense strand
gcuagaaaaccaccaaaug

SEQ ID NO: 131935 - RNA, 19 nt, Homo sapiens
  misc_RNA (1)...(19): siRNA sense strand
agaaauccgaugcgguuug

SEQ ID NO: 131936 - RNA, 19 nt, Homo sapiens
  misc_RNA (1)...(19): siRNA sense strand
acucccauguccucugaaa

SEQ ID NO: 131937 - RNA, 19 nt, Homo sapiens
  misc_RNA (1)...(19): siRNA sense strand
ucugaaaacuacuugcaaa

SEQ ID NO: 131938 - RNA, 19 nt, Homo sapiens
  misc_RNA (1)...(19): siRNA sense strand
gcaacgagacccugaguaa

SEQ ID NO: 131939 - RNA, 19 nt, Homo sapiens
  misc_RNA (1)...(19): siRNA sense strand
ggagugacaucaagugcaa

SEQ ID NO: 131940 - RNA, 19 nt, Homo sapiens
  misc_RNA (1)...(19): siRNA sense strand
ccaacaauuugccuucuug

SEQ ID NO: 131941 - RNA, 19 nt, Homo sapiens
  misc_RNA (1)...(19): siRNA sense strand
agaaggacaugcaaaggaa

SEQ ID NO: 131942 - RNA, 19 nt, Homo sapiens
  misc_RNA (1)...(19): siRNA sense strand
guaaaucaggucaaacaaa

SEQ ID NO: 131943 - RNA, 19 nt, Homo sapiens
  misc_RNA (1)...(19): siRNA sense strand
ucacuaccuuaucaucaua

SEQ ID NO: 131944 - RNA, 19 nt, Homo sapiens
  misc_RNA (1)...(19): siRNA sense strand
ggaaacaauucaggaccaa

SEQ ID NO: 131945 - RNA, 19 nt, Homo sapiens
  misc_RNA (1)...(19): siRNA sense strand
ggaagaaggacaugcaaag

SEQ ID NO: 131946 - RNA, 19 nt, Homo sapiens
  misc_RNA (1)...(19): siRNA sense strand
ccagagggauggucaaggu

SEQ ID NO: 131947 - RNA, 19 nt, Homo sapiens
  misc_RNA (1)...(19): siRNA sense strand
gagaugugccggacgugua

SEQ ID NO: 131948 - RNA, 19 nt, Homo sapiens
  misc_RNA (1)...(19): siRNA sense strand
ggaacaggcagaagcugaa

SEQ ID NO: 131949 - RNA, 19 nt, Homo sapiens
  misc_RNA (1)...(19): siRNA sense strand
ccaggucucugagcaggaa

SEQ ID NO: 131950 - RNA, 19 nt, Homo sapiens
  misc_RNA (1)...(19): siRNA sense strand
gucaaggucaguaauugua

SEQ ID NO: 131951 - RNA, 19 nt, Homo sapiens
  misc_RNA (1)...(19): siRNA sense strand
gaaggacaugcaaaggaaa

SEQ ID NO: 131952 - RNA, 19 nt, Homo sapiens
  misc_RNA (1)...(19): siRNA sense strand
ugccugcuauguacaguuu

SEQ ID NO: 131953 - RNA, 19 nt, Homo sapiens
  misc_RNA (1)...(19): siRNA sense strand
gaauauacuggagccugua

SEQ ID NO: 131954 - RNA, 19 nt, Homo sapiens
  misc_RNA (1)...(19): siRNA sense strand
gaagaaggacaugcaaagg

SEQ ID NO: 131955 - RNA, 19 nt, Homo sapiens
  misc_RNA (1)...(19): siRNA sense strand
ccaagauccuuaaguucgu

SEQ ID NO: 131956 - RNA, 19 nt, Homo sapiens
  misc_RNA (1)...(19): siRNA sense strand
gcagagcuaacagguguga

SEQ ID NO: 131957 - RNA, 19 nt, Homo sapiens
  misc_RNA (1)...(19): siRNA sense strand
caacuggugggcuccgaaa

SEQ ID NO: 131958 - RNA, 19 nt, Homo sapiens
  misc_RNA (1)...(19): siRNA sense strand
ggucaaggucaguaauugu

SEQ ID NO: 131959 - RNA, 19 nt, Homo sapiens
  misc_RNA (1)...(19): siRNA sense strand
ggacaugcaaaggaaacaa

SEQ ID NO: 131960 - RNA, 19 nt, Homo sapiens
  misc_RNA (1)...(19): siRNA sense strand
cuucuugccugcuauguac

SEQ ID NO: 131961 - RNA, 19 nt, Homo sapiens
  misc_RNA (1)...(19): siRNA sense strand
aagaaggacaugcaaagga

SEQ ID NO: 131962 - RNA, 19 nt, Homo sapiens
  misc_RNA (1)...(19): siRNA sense strand
ggauggucaaggucaguaa

SEQ ID NO: 131963 - RNA, 19 nt, Homo sapiens
  misc_RNA (1)...(19): siRNA sense strand
cccuaucacuaccuuauca

SEQ ID NO: 131964 - RNA, 19 nt, Homo sapiens
  misc_RNA (1)...(19): siRNA sense strand
gaugcuugccucucccuau

SEQ ID NO: 131965 - RNA, 19 nt, Homo sapiens
  misc_RNA (1)...(19): siRNA sense strand
uaaguucgucgucuucauc

SEQ ID NO: 131966 - RNA, 19 nt, Homo sapiens
  misc_RNA (1)...(19): siRNA sense strand
uaucacuaccuuaucauca

SEQ ID NO: 131967 - RNA, 19 nt, Homo sapiens
  misc_RNA (1)...(19): siRNA sense strand
gacaugcaaaggaaacaau

SEQ ID NO: 131968 - RNA, 19 nt, Homo sapiens
  misc_RNA (1)...(19): siRNA sense strand
uggucaaggucaguaauug

SEQ ID NO: 131969 - RNA, 19 nt, Homo sapiens
  misc_RNA (1)...(19): siRNA sense strand
uggaggaggucccgaacgu

SEQ ID NO: 131970 - RNA, 19 nt, Homo sapiens
  misc_RNA (1)...(19): siRNA sense strand
aacgagacccugaguaaca

SEQ ID NO: 131971 - RNA, 19 nt, Homo sapiens
  misc_RNA (1)...(19): siRNA sense strand
gaacaggcagaagcugaag

SEQ ID NO: 131972 - RNA, 19 nt, Homo sapiens
  misc_RNA (1)...(19): siRNA sense strand
ucauguccuucacgaguuc

SEQ ID NO: 131973 - RNA, 19 nt, Homo sapiens
  misc_RNA (1)...(19): siRNA sense strand
gacccugaguaacagauac

SEQ ID NO: 131974 - RNA, 19 nt, Homo sapiens
  misc_RNA (1)...(19): siRNA sense strand
gggauggucaaggucagua

SEQ ID NO: 131975 - RNA, 19 nt, Homo sapiens
  misc_RNA (1)...(19): siRNA sense strand
ccgaacgugugcacagagu

SEQ ID NO: 131976 - RNA, 19 nt, Homo sapiens
  misc_RNA (1)...(19): siRNA sense strand
gaucauaguucuaauugug

SEQ ID NO: 131977 - RNA, 19 nt, Homo sapiens
  misc_RNA (1)...(19): siRNA sense strand
ucucauagaucagaacaua

SEQ ID NO: 131978 - RNA, 19 nt, Homo sapiens
  misc_RNA (1)...(19): siRNA sense strand
gaugauauccaguguguug

SEQ ID NO: 131979 - RNA, 19 nt, Homo sapiens
  misc_RNA (1)...(19): siRNA sense strand
ccaguguguugaagaauuu

SEQ ID NO: 131980 - RNA, 19 nt, Homo sapiens
  misc_RNA (1)...(19): siRNA sense strand
caccaacgcuuccaacaau

SEQ ID NO: 131981 - RNA, 19 nt, Homo sapiens
  misc_RNA (1)...(19): siRNA sense strand
gaaguccaagucaguaauu

SEQ ID NO: 131982 - RNA, 19 nt, Homo sapiens
  misc_RNA (1)...(19): siRNA sense strand
uaauugugcuucugauugu

SEQ ID NO: 131983 - RNA, 19 nt, Homo sapiens
  misc_RNA (1)...(19): siRNA sense strand
caacagaggcacagcuuca

SEQ ID NO: 131984 - RNA, 19 nt, Homo sapiens
  misc_RNA (1)...(19): siRNA sense strand
guagggaucauaguucuaa

SEQ ID NO: 131985 - RNA, 19 nt, Homo sapiens
  misc_RNA (1)...(19): siRNA sense strand
gagaugugccggaagugua

SEQ ID NO: 131986 - RNA, 19 nt, Homo sapiens
  misc_RNA (1)...(19): siRNA sense strand
gaacauacuggagccugua

SEQ ID NO: 131987 - RNA, 19 nt, Homo sapiens
  misc_RNA (1)...(19): siRNA sense strand
ccagagaugugccggaagu

SEQ ID NO: 131988 - RNA, 19 nt, Homo sapiens
  misc_RNA (1)...(19): siRNA sense strand
gggaucauaguucuaauug

SEQ ID NO: 131989 - RNA, 19 nt, Homo sapiens
  misc_RNA (1)...(19): siRNA sense strand
acaaugaaccuucuugcuu

SEQ ID NO: 131990 - RNA, 19 nt, Homo sapiens
  misc_RNA (1)...(19): siRNA sense strand
uauccaguguguugaagaa

SEQ ID NO: 131991 - RNA, 19 nt, Homo sapiens
  misc_RNA (1)...(19): siRNA sense strand
guccaagucaguaauugua

SEQ ID NO: 131992 - RNA, 19 nt, Homo sapiens
  misc_RNA (1)...(19): siRNA sense strand
cuaauugugcuucugauug

SEQ ID NO: 131993 - RNA, 19 nt, Homo sapiens
  misc_RNA (1)...(19): siRNA sense strand
caucguagggaucauaguu

SEQ ID NO: 131994 - RNA, 19 nt, Homo sapiens
  misc_RNA (1)...(19): siRNA sense strand
gggaaguccaagucaguaa

SEQ ID NO: 131995 - RNA, 19 nt, Homo sapiens
  misc_RNA (1)...(19): siRNA sense strand
ggaucauaguucuaauugu

SEQ ID NO: 131996 - RNA, 19 nt, Homo sapiens
  misc_RNA (1)...(19): siRNA sense strand
ggaaguccaagucaguaau

SEQ ID NO: 131997 - RNA, 19 nt, Homo sapiens
  misc_RNA (1)...(19): siRNA sense strand
ggacuccugccucuucuca

SEQ ID NO: 131998 - RNA, 19 nt, Homo sapiens
  misc_RNA (1)...(19): siRNA sense strand
uguagcaggugcccuagug

SEQ ID NO: 131999 - RNA, 19 nt, Homo sapiens
  misc_RNA (1)...(19): siRNA sense strand
ccaagacccuaaaguucgu

SEQ ID NO: 132000 - RNA, 19 nt, Homo sapiens
  misc_RNA (1)...(19): siRNA sense strand
uccaguguguugaagaauu

SEQ ID NO: 132001 - RNA, 19 nt, Homo sapiens
  misc_RNA (1)...(19): siRNA sense strand
ccaacgcuuccaacaauga

SEQ ID NO: 132002 - RNA, 19 nt, Homo sapiens
  misc_RNA (1)...(19): siRNA sense strand
acuccugccucuucucauu

SEQ ID NO: 132003 - RNA, 19 nt, Homo sapiens
  misc_RNA (1)...(19): siRNA sense strand
aaaaguuccugcaccauga

SEQ ID NO: 132004 - RNA, 19 nt, Homo sapiens
  misc_RNA (1)...(19): siRNA sense strand
gauauccaguguguugaag

SEQ ID NO: 132005 - RNA, 19 nt, Homo sapiens
  misc_RNA (1)...(19): siRNA sense strand
guucuaauugugcuucuga

SEQ ID NO: 132006 - RNA, 19 nt, Homo sapiens
  misc_RNA (1)...(19): siRNA sense strand
ccaacaaugaaccuucuug

SEQ ID NO: 132007 - RNA, 19 nt, Homo sapiens
  misc_RNA (1)...(19): siRNA sense strand
aaugaaaacuccccagaga

SEQ ID NO: 132008 - RNA, 19 nt, Homo sapiens
  misc_RNA (1)...(19): siRNA sense strand
ccuucuugcuucccaugua

SEQ ID NO: 132009 - RNA, 19 nt, Homo sapiens
  misc_RNA (1)...(19): siRNA sense strand
caacgcuuccaacaaugaa

SEQ ID NO: 132010 - RNA, 19 nt, Homo sapiens
  misc_RNA (1)...(19): siRNA sense strand
guacguccugggaugauau

SEQ ID NO: 132011 - RNA, 19 nt, Homo sapiens
  misc_RNA (1)...(19): siRNA sense strand
acaccaacgcuuccaacaa

SEQ ID NO: 132012 - RNA, 19 nt, Homo sapiens
  misc_RNA (1)...(19): siRNA sense strand
uaaaguucgucgucgucau

SEQ ID NO: 132013 - RNA, 19 nt, Homo sapiens
  misc_RNA (1)...(19): siRNA sense strand
uguacguccugggaugaua

SEQ ID NO: 132014 - RNA, 19 nt, Homo sapiens
  misc_RNA (1)...(19): siRNA sense strand
cuucugauuguguuuguuu

SEQ ID NO: 132015 - RNA, 19 nt, Homo sapiens
  misc_RNA (1)...(19): siRNA sense strand
ucauagaucagaacauacu

SEQ ID NO: 132016 - RNA, 19 nt, Homo sapiens
  misc_RNA (1)...(19): siRNA sense strand
gcugaagagacaaugaaca

SEQ ID NO: 132017 - RNA, 19 nt, Homo sapiens
  misc_RNA (1)...(19): siRNA sense strand
gcugaagagacaaugaaca

SEQ ID NO: 132018 - RNA, 19 nt, Homo sapiens
  misc_RNA (1)...(19): siRNA sense strand
caacagaucugcugaaaga

SEQ ID NO: 132019 - RNA, 19 nt, Homo sapiens
  misc_RNA (1)...(19): siRNA sense strand
ggacauauguggagaauag

SEQ ID NO: 132020 - RNA, 19 nt, Homo sapiens
  misc_RNA (1)...(19): siRNA sense strand
ccaaagaccuuaauaacuu

SEQ ID NO: 132021 - RNA, 19 nt, Homo sapiens
  misc_RNA (1)...(19): siRNA sense strand
caaaguaaauccugcagua

SEQ ID NO: 132022 - RNA, 19 nt, Homo sapiens
  misc_RNA (1)...(19): siRNA sense strand
gaaacgcccugaagaagaa

SEQ ID NO: 132023 - RNA, 19 nt, Homo sapiens
  misc_RNA (1)...(19): siRNA sense strand
gauaacaguuggauaaaga

SEQ ID NO: 132024 - RNA, 19 nt, Homo sapiens
  misc_RNA (1)...(19): siRNA sense strand
gcagauacauccaccuaaa

SEQ ID NO: 132025 - RNA, 19 nt, Homo sapiens
  misc_RNA (1)...(19): siRNA sense strand
uaaagugacuccugaaaga

SEQ ID NO: 132026 - RNA, 19 nt, Homo sapiens
  misc_RNA (1)...(19): siRNA sense strand
caaauuugcugccauucua

SEQ ID NO: 132027 - RNA, 19 nt, Homo sapiens
  misc_RNA (1)...(19): siRNA sense strand
aaagagauaugugcacuua

SEQ ID NO: 132028 - RNA, 19 nt, Homo sapiens
  misc_RNA (1)...(19): siRNA sense strand
gaaguaaauucucaugugu

SEQ ID NO: 132029 - RNA, 19 nt, Homo sapiens
  misc_RNA (1)...(19): siRNA sense strand
gaaaguaaaugagagagau

SEQ ID NO: 132030 - RNA, 19 nt, Homo sapiens
  misc_RNA (1)...(19): siRNA sense strand
caaggugaauccugaaauu

SEQ ID NO: 132031 - RNA, 19 nt, Homo sapiens
  misc_RNA (1)...(19): siRNA sense strand
ggaaguccgauuaaaguua

SEQ ID NO: 132032 - RNA, 19 nt, Homo sapiens
  misc_RNA (1)...(19): siRNA sense strand
gaagugaagaccuugauaa

SEQ ID NO: 132033 - RNA, 19 nt, Homo sapiens
  misc_RNA (1)...(19): siRNA sense strand
gaacuuucuuacaggauaa

SEQ ID NO: 132034 - RNA, 19 nt, Homo sapiens
  misc_RNA (1)...(19): siRNA sense strand
uaaaguggauccugaaaca

SEQ ID NO: 132035 - RNA, 19 nt, Homo sapiens
  misc_RNA (1)...(19): siRNA sense strand
gauaaucucaucaaaguga

SEQ ID NO: 132036 - RNA, 19 nt, Homo sapiens
  misc_RNA (1)...(19): siRNA sense strand
cgacauaauucccaugaug

SEQ ID NO: 132037 - RNA, 19 nt, Homo sapiens
  misc_RNA (1)...(19): siRNA sense strand
gauaaccaacuaaccaaua

SEQ ID NO: 132038 - RNA, 19 nt, Homo sapiens
  misc_RNA (1)...(19): siRNA sense strand
ugaaguaaaucccaaagga

SEQ ID NO: 132039 - RNA, 19 nt, Homo sapiens
  misc_RNA (1)...(19): siRNA sense strand
gugaagaccuugauaaugc

SEQ ID NO: 132040 - RNA, 19 nt, Homo sapiens
  misc_RNA (1)...(19): siRNA sense strand
gaauaggaaucaaggucuu

SEQ ID NO: 132041 - RNA, 19 nt, Homo sapiens
  misc_RNA (1)...(19): siRNA sense strand
ugaaguaaauucucaugug

SEQ ID NO: 132042 - RNA, 19 nt, Homo sapiens
  misc_RNA (1)...(19): siRNA sense strand
cagagcaaauccaaaggua

SEQ ID NO: 132043 - RNA, 19 nt, Homo sapiens
  misc_RNA (1)...(19): siRNA sense strand
cagaagaagugaagaccuu

SEQ ID NO: 132044 - RNA, 19 nt, Homo sapiens
  misc_RNA (1)...(19): siRNA sense strand
caggauaacaguuggauaa

SEQ ID NO: 132045 - RNA, 19 nt, Homo sapiens
  misc_RNA (1)...(19): siRNA sense strand
caaaguguauccaggaaca

SEQ ID NO: 132046 - RNA, 19 nt, Homo sapiens
  misc_RNA (1)...(19): siRNA sense strand
agauaaagauggcaaagga

SEQ ID NO: 132047 - RNA, 19 nt, Homo sapiens
  misc_RNA (1)...(19): siRNA sense strand
gacaggaucucagacagaa

SEQ ID NO: 132048 - RNA, 19 nt, Homo sapiens
  misc_RNA (1)...(19): siRNA sense strand
gauaauaggcagauacauc

SEQ ID NO: 132049 - RNA, 19 nt, Homo sapiens
  misc_RNA (1)...(19): siRNA sense strand
ucucgaaucuguugcuaaa

SEQ ID NO: 132050 - RNA, 19 nt, Homo sapiens
  misc_RNA (1)...(19): siRNA sense strand
gagcaaauccaaagguaga

SEQ ID NO: 132051 - RNA, 19 nt, Homo sapiens
  misc_RNA (1)...(19): siRNA sense strand
cagaaaugaugcugcuaaa

SEQ ID NO: 132052 - RNA, 19 nt, Homo sapiens
  misc_RNA (1)...(19): siRNA sense strand
ggugauaguauuuggauuu

SEQ ID NO: 132053 - RNA, 19 nt, Homo sapiens
  misc_RNA (1)...(19): siRNA sense strand
uaaauucucaugugucuga

SEQ ID NO: 132054 - RNA, 19 nt, Homo sapiens
  misc_RNA (1)...(19): siRNA sense strand
gaagaggcaguccugguuu

SEQ ID NO: 132055 - RNA, 19 nt, Homo sapiens
  misc_RNA (1)...(19): siRNA sense strand
gaaccuugcuacucuaaaa

SEQ ID NO: 132056 - RNA, 19 nt, Homo sapiens
  misc_RNA (1)...(19): siRNA sense strand
uuacaaauuugcugccauu

SEQ ID NO: 132057 - RNA, 19 nt, Homo sapiens
  misc_RNA (1)...(19): siRNA sense strand
ugauaggucugucauugaa

SEQ ID NO: 132058 - RNA, 19 nt, Homo sapiens
  misc_RNA (1)...(19): siRNA sense strand
uaaagaaacgcccugaaga

SEQ ID NO: 132059 - RNA, 19 nt, Homo sapiens
  misc_RNA (1)...(19): siRNA sense strand
gaauaucucuggaaaauac

SEQ ID NO: 132060 - RNA, 19 nt, Homo sapiens
  misc_RNA (1)...(19): siRNA sense strand
gcaguaaucagaaacaauc

SEQ ID NO: 132061 - RNA, 19 nt, Homo sapiens
  misc_RNA (1)...(19): siRNA sense strand
ucacaaacaaccaaagaaa

SEQ ID NO: 132062 - RNA, 19 nt, Homo sapiens
  misc_RNA (1)...(19): siRNA sense strand
caacaccuccaacaccaua

SEQ ID NO: 132063 - RNA, 19 nt, Homo sapiens
  misc_RNA (1)...(19): siRNA sense strand
gugaagaauuggauaaucu

SEQ ID NO: 132064 - RNA, 19 nt, Homo sapiens
  misc_RNA (1)...(19): siRNA sense strand
gcuaaccucaucaaaguaa

SEQ ID NO: 132065 - RNA, 19 nt, Homo sapiens
  misc_RNA (1)...(19): siRNA sense strand
caaagaccuuaauaacuuc

SEQ ID NO: 132066 - RNA, 19 nt, Homo sapiens
  misc_RNA (1)...(19): siRNA sense strand
gcauuggacaggaaaguaa

SEQ ID NO: 132067 - RNA, 19 nt, Homo sapiens
  misc_RNA (1)...(19): siRNA sense strand
gugaaugccaggaugaaua

SEQ ID NO: 132068 - RNA, 19 nt, Homo sapiens
  misc_RNA (1)...(19): siRNA sense strand
gacaaaaucucgaaucugu

SEQ ID NO: 132069 - RNA, 19 nt, Homo sapiens
  misc_RNA (1)...(19): siRNA sense strand
aaagaaacgcccugaagaa

SEQ ID NO: 132070 - RNA, 19 nt, Homo sapiens
  misc_RNA (1)...(19): siRNA sense strand
gaaacaaucagagccaaga

SEQ ID NO: 132071 - RNA, 19 nt, Homo sapiens
  misc_RNA (1)...(19): siRNA sense strand
gaaagaaacagaacuaacc

SEQ ID NO: 132072 - RNA, 19 nt, Homo sapiens
  misc_RNA (1)...(19): siRNA sense strand
guacaguucugaugacacu

SEQ ID NO: 132073 - RNA, 19 nt, Homo sapiens
  misc_RNA (1)...(19): siRNA sense strand
cuacuacuccuguaaagaa

SEQ ID NO: 132074 - RNA, 19 nt, Homo sapiens
  misc_RNA (1)...(19): siRNA sense strand
gugcucaaccgacauaauu

SEQ ID NO: 132075 - RNA, 19 nt, Homo sapiens
  misc_RNA (1)...(19): siRNA sense strand
gcaagcagccuuuggaaaa

SEQ ID NO: 132076 - RNA, 19 nt, Homo sapiens
  misc_RNA (1)...(19): siRNA sense strand
ggauaacaguuggauaaag

SEQ ID NO: 132077 - RNA, 19 nt, Homo sapiens
  misc_RNA (1)...(19): siRNA sense strand
ggacaggaucucagacaga

SEQ ID NO: 132078 - RNA, 19 nt, Homo sapiens
  misc_RNA (1)...(19): siRNA sense strand
cagcugagacaggauaaua

SEQ ID NO: 132079 - RNA, 19 nt, Homo sapiens
  misc_RNA (1)...(19): siRNA sense strand
ggauggauaucaggagaau

SEQ ID NO: 132080 - RNA, 19 nt, Homo sapiens
  misc_RNA (1)...(19): siRNA sense strand
gccagagccuugauaaucu

SEQ ID NO: 132081 - RNA, 19 nt, Homo sapiens
  misc_RNA (1)...(19): siRNA sense strand
gaccuugaugggcuuauua

SEQ ID NO: 132082 - RNA, 19 nt, Homo sapiens
  misc_RNA (1)...(19): siRNA sense strand
ugaaugccaggaugaauaa

SEQ ID NO: 132083 - RNA, 19 nt, Homo sapiens
  misc_RNA (1)...(19): siRNA sense strand
gguagaagaaagagagaaa

SEQ ID NO: 132084 - RNA, 19 nt, Homo sapiens
  misc_RNA (1)...(19): siRNA sense strand
aaagagaaguaaccaaggu

SEQ ID NO: 132085 - RNA, 19 nt, Homo sapiens
  misc_RNA (1)...(19): siRNA sense strand
ggaaaguaaaugagagaga

SEQ ID NO: 132086 - RNA, 19 nt, Homo sapiens
  misc_RNA (1)...(19): siRNA sense strand
ucugauaggucugucauug

SEQ ID NO: 132087 - RNA, 19 nt, Homo sapiens
  misc_RNA (1)...(19): siRNA sense strand
ggucuugaugaacauauua

SEQ ID NO: 132088 - RNA, 19 nt, Homo sapiens
  misc_RNA (1)...(19): siRNA sense strand
cagaucugcugaaagaaau

SEQ ID NO: 132089 - RNA, 19 nt, Homo sapiens
  misc_RNA (1)...(19): siRNA sense strand
aaacauauaaggccaauac

SEQ ID NO: 132090 - RNA, 19 nt, Homo sapiens
  misc_RNA (1)...(19): siRNA sense strand
gaagaagugaagaccuuga

SEQ ID NO: 132091 - RNA, 19 nt, Homo sapiens
  misc_RNA (1)...(19): siRNA sense strand
ggucugucauugaaagaga

SEQ ID NO: 132092 - RNA, 19 nt, Homo sapiens
  misc_RNA (1)...(19): siRNA sense strand
uugaugggcuuauuaaagu

SEQ ID NO: 132093 - RNA, 19 nt, Homo sapiens
  misc_RNA (1)...(19): siRNA sense strand
agaauuggauaaucucauc

SEQ ID NO: 132094 - RNA, 19 nt, Homo sapiens
  misc_RNA (1)...(19): siRNA sense strand
ggccagagccuugauaauc

SEQ ID NO: 132095 - RNA, 19 nt, Homo sapiens
  misc_RNA (1)...(19): siRNA sense strand
caaagugaccccugaagua

SEQ ID NO: 132096 - RNA, 19 nt, Homo sapiens
  misc_RNA (1)...(19): siRNA sense strand
uugcuaaccucaucaaagu

SEQ ID NO: 132097 - RNA, 19 nt, Homo sapiens
  misc_RNA (1)...(19): siRNA sense strand
guuccaaagaccuuaauaa

SEQ ID NO: 132098 - RNA, 19 nt, Homo sapiens
  misc_RNA (1)...(19): siRNA sense strand
uaauucccaugaugcauug

SEQ ID NO: 132099 - RNA, 19 nt, Homo sapiens
  misc_RNA (1)...(19): siRNA sense strand
aaagugaucccuucagcaa

SEQ ID NO: 132100 - RNA, 19 nt, Homo sapiens
  misc_RNA (1)...(19): siRNA sense strand
gacaggaaaguaaaugaga

SEQ ID NO: 132101 - RNA, 19 nt, Homo sapiens
  misc_RNA (1)...(19): siRNA sense strand
gaaagagauaugugcacuu

SEQ ID NO: 132102 - RNA, 19 nt, Homo sapiens
  misc_RNA (1)...(19): siRNA sense strand
guaaucagaaacaaucaga

SEQ ID NO: 132103 - RNA, 19 nt, Homo sapiens
  misc_RNA (1)...(19): siRNA sense strand
ucgaaucuguugcuaaagu

SEQ ID NO: 132104 - RNA, 19 nt, Homo sapiens
  misc_RNA (1)...(19): siRNA sense strand
aacaaaagcuugaauagga

SEQ ID NO: 132105 - RNA, 19 nt, Homo sapiens
  misc_RNA (1)...(19): siRNA sense strand
acaauuagucgguacaguu

SEQ ID NO: 132106 - RNA, 19 nt, Homo sapiens
  misc_RNA (1)...(19): siRNA sense strand
cacggaagcagcaggauuu

SEQ ID NO: 132107 - RNA, 19 nt, Homo sapiens
  misc_RNA (1)...(19): siRNA sense strand
gauaaagauggcaaaggaa

SEQ ID NO: 132108 - RNA, 19 nt, Homo sapiens
  misc_RNA (1)...(19): siRNA sense strand
ccaguucuccuguuucuuc

SEQ ID NO: 132109 - RNA, 19 nt, Homo sapiens
  misc_RNA (1)...(19): siRNA sense strand
ggaaguaacaaaguugcaa

SEQ ID NO: 132110 - RNA, 19 nt, Homo sapiens
  misc_RNA (1)...(19): siRNA sense strand
acagaaaugaugcugcuaa

SEQ ID NO: 132111 - RNA, 19 nt, Homo sapiens
  misc_RNA (1)...(19): siRNA sense strand
acaauacacugugaaccuu

SEQ ID NO: 132112 - RNA, 19 nt, Homo sapiens
  misc_RNA (1)...(19): siRNA sense strand
agagauaugugcacuuacu

SEQ ID NO: 132113 - RNA, 19 nt, Homo sapiens
  misc_RNA (1)...(19): siRNA sense strand
ccacaggaaaugagaugaa

SEQ ID NO: 132114 - RNA, 19 nt, Homo sapiens
  misc_RNA (1)...(19): siRNA sense strand
ugaguacccggacagauaa

SEQ ID NO: 132115 - RNA, 19 nt, Homo sapiens
  misc_RNA (1)...(19): siRNA sense strand
ccuugaaagucucaucuau

SEQ ID NO: 132116 - RNA, 19 nt, Homo sapiens
  misc_RNA (1)...(19): siRNA sense strand
cauauguggagaauaguaa

SEQ ID NO: 132117 - RNA, 19 nt, Homo sapiens
  misc_RNA (1)...(19): siRNA sense strand
gauaaagaaacgcccugaa

SEQ ID NO: 132118 - RNA, 19 nt, Homo sapiens
  misc_RNA (1)...(19): siRNA sense strand
caacagaucugcugaaaga

SEQ ID NO: 132119 - RNA, 19 nt, Homo sapiens
  misc_RNA (1)...(19): siRNA sense strand
ggacauauguggagaauag

SEQ ID NO: 132120 - RNA, 19 nt, Homo sapiens
  misc_RNA (1)...(19): siRNA sense strand
ccaaagaccuuaauaacuu

SEQ ID NO: 132121 - RNA, 19 nt, Homo sapiens
  misc_RNA (1)...(19): siRNA sense strand
caaaguaaauccugcagua

SEQ ID NO: 132122 - RNA, 19 nt, Homo sapiens
  misc_RNA (1)...(19): siRNA sense strand
gaaacgcccugaagaagaa

SEQ ID NO: 132123 - RNA, 19 nt, Homo sapiens
  misc_RNA (1)...(19): siRNA sense strand
gauaacaguuggauaaaga

SEQ ID NO: 132124 - RNA, 19 nt, Homo sapiens
  misc_RNA (1)...(19): siRNA sense strand
gcagauacauccaccuaaa

SEQ ID NO: 132125 - RNA, 19 nt, Homo sapiens
  misc_RNA (1)...(19): siRNA sense strand
uaaagugacuccugaaaga

SEQ ID NO: 132126 - RNA, 19 nt, Homo sapiens
  misc_RNA (1)...(19): siRNA sense strand
caaauuugcugccauucua

SEQ ID NO: 132127 - RNA, 19 nt, Homo sapiens
  misc_RNA (1)...(19): siRNA sense strand
aaagagauaugugcacuua

SEQ ID NO: 132128 - RNA, 19 nt, Homo sapiens
  misc_RNA (1)...(19): siRNA sense strand
gaaguaaauucucaugugu

SEQ ID NO: 132129 - RNA, 19 nt, Homo sapiens
  misc_RNA (1)...(19): siRNA sense strand
gaaaguaaaugagagagau

SEQ ID NO: 132130 - RNA, 19 nt, Homo sapiens
  misc_RNA (1)...(19): siRNA sense strand
caaggugaauccugaaauu

SEQ ID NO: 132131 - RNA, 19 nt, Homo sapiens
  misc_RNA (1)...(19): siRNA sense strand
ggaaguccgauuaaaguua

SEQ ID NO: 132132 - RNA, 19 nt, Homo sapiens
  misc_RNA (1)...(19): siRNA sense strand
gaagugaagaccuugauaa

SEQ ID NO: 132133 - RNA, 19 nt, Homo sapiens
  misc_RNA (1)...(19): siRNA sense strand
gaacuuucuuacaggauaa

SEQ ID NO: 132134 - RNA, 19 nt, Homo sapiens
  misc_RNA (1)...(19): siRNA sense strand
uaaaguggauccugaaaca

SEQ ID NO: 132135 - RNA, 19 nt, Homo sapiens
  misc_RNA (1)...(19): siRNA sense strand
gauaaucucaucaaaguga

SEQ ID NO: 132136 - RNA, 19 nt, Homo sapiens
  misc_RNA (1)...(19): siRNA sense strand
cgacauaauucccaugaug

SEQ ID NO: 132137 - RNA, 19 nt, Homo sapiens
  misc_RNA (1)...(19): siRNA sense strand
gauaaccaacuaaccaaua

SEQ ID NO: 132138 - RNA, 19 nt, Homo sapiens
  misc_RNA (1)...(19): siRNA sense strand
ugaaguaaaucccaaagga

SEQ ID NO: 132139 - RNA, 19 nt, Homo sapiens
  misc_RNA (1)...(19): siRNA sense strand
gugaagaccuugauaaugc

SEQ ID NO: 132140 - RNA, 19 nt, Homo sapiens
  misc_RNA (1)...(19): siRNA sense strand
gaauaggaaucaaggucuu

SEQ ID NO: 132141 - RNA, 19 nt, Homo sapiens
  misc_RNA (1)...(19): siRNA sense strand
ugaaguaaauucucaugug

SEQ ID NO: 132142 - RNA, 19 nt, Homo sapiens
  misc_RNA (1)...(19): siRNA sense strand
cagagcaaauccaaaggua

SEQ ID NO: 132143 - RNA, 19 nt, Homo sapiens
  misc_RNA (1)...(19): siRNA sense strand
cagaagaagugaagaccuu

SEQ ID NO: 132144 - RNA, 19 nt, Homo sapiens
  misc_RNA (1)...(19): siRNA sense strand
caggauaacaguuggauaa

SEQ ID NO: 132145 - RNA, 19 nt, Homo sapiens
  misc_RNA (1)...(19): siRNA sense strand
caaaguguauccaggaaca

SEQ ID NO: 132146 - RNA, 19 nt, Homo sapiens
  misc_RNA (1)...(19): siRNA sense strand
agauaaagauggcaaagga

SEQ ID NO: 132147 - RNA, 19 nt, Homo sapiens
  misc_RNA (1)...(19): siRNA sense strand
gacaggaucucagacagaa

SEQ ID NO: 132148 - RNA, 19 nt, Homo sapiens
  misc_RNA (1)...(19): siRNA sense strand
gauaauaggcagauacauc

SEQ ID NO: 132149 - RNA, 19 nt, Homo sapiens
  misc_RNA (1)...(19): siRNA sense strand
ucucgaaucuguugcuaaa

SEQ ID NO: 132150 - RNA, 19 nt, Homo sapiens
  misc_RNA (1)...(19): siRNA sense strand
gagcaaauccaaagguaga

SEQ ID NO: 132151 - RNA, 19 nt, Homo sapiens
  misc_RNA (1)...(19): siRNA sense strand
cagaaaugaugcugcuaaa

SEQ ID NO: 132152 - RNA, 19 nt, Homo sapiens
  misc_RNA (1)...(19): siRNA sense strand
ggugauaguauuuggauuu

SEQ ID NO: 132153 - RNA, 19 nt, Homo sapiens
  misc_RNA (1)...(19): siRNA sense strand
uaaauucucaugugucuga

SEQ ID NO: 132154 - RNA, 19 nt, Homo sapiens
  misc_RNA (1)...(19): siRNA sense strand
gaagaggcaguccugguuu

SEQ ID NO: 132155 - RNA, 19 nt, Homo sapiens
  misc_RNA (1)...(19): siRNA sense strand
gaaccuugcuacucuaaaa

SEQ ID NO: 132156 - RNA, 19 nt, Homo sapiens
  misc_RNA (1)...(19): siRNA sense strand
uuacaaauuugcugccauu

SEQ ID NO: 132157 - RNA, 19 nt, Homo sapiens
  misc_RNA (1)...(19): siRNA sense strand
ugauaggucugucauugaa

SEQ ID NO: 132158 - RNA, 19 nt, Homo sapiens
  misc_RNA (1)...(19): siRNA sense strand
uaaagaaacgcccugaaga

SEQ ID NO: 132159 - RNA, 19 nt, Homo sapiens
  misc_RNA (1)...(19): siRNA sense strand
gaauaucucuggaaaauac

SEQ ID NO: 132160 - RNA, 19 nt, Homo sapiens
  misc_RNA (1)...(19): siRNA sense strand
gcaguaaucagaaacaauc

SEQ ID NO: 132161 - RNA, 19 nt, Homo sapiens
  misc_RNA (1)...(19): siRNA sense strand
ucacaaacaaccaaagaaa

SEQ ID NO: 132162 - RNA, 19 nt, Homo sapiens
  misc_RNA (1)...(19): siRNA sense strand
caacaccuccaacaccaua

SEQ ID NO: 132163 - RNA, 19 nt, Homo sapiens
  misc_RNA (1)...(19): siRNA sense strand
gugaagaauuggauaaucu

SEQ ID NO: 132164 - RNA, 19 nt, Homo sapiens
  misc_RNA (1)...(19): siRNA sense strand
gcuaaccucaucaaaguaa

SEQ ID NO: 132165 - RNA, 19 nt, Homo sapiens
  misc_RNA (1)...(19): siRNA sense strand
caaagaccuuaauaacuuc

SEQ ID NO: 132166 - RNA, 19 nt, Homo sapiens
  misc_RNA (1)...(19): siRNA sense strand
gcauuggacaggaaaguaa

SEQ ID NO: 132167 - RNA, 19 nt, Homo sapiens
  misc_RNA (1)...(19): siRNA sense strand
gugaaugccaggaugaaua

SEQ ID NO: 132168 - RNA, 19 nt, Homo sapiens
  misc_RNA (1)...(19): siRNA sense strand
gacaaaaucucgaaucugu

SEQ ID NO: 132169 - RNA, 19 nt, Homo sapiens
  misc_RNA (1)...(19): siRNA sense strand
aaagaaacgcccugaagaa

SEQ ID NO: 132170 - RNA, 19 nt, Homo sapiens
  misc_RNA (1)...(19): siRNA sense strand
gaaacaaucagagccaaga

SEQ ID NO: 132171 - RNA, 19 nt, Homo sapiens
  misc_RNA (1)...(19): siRNA sense strand
gaaagaaacagaacuaacc

SEQ ID NO: 132172 - RNA, 19 nt, Homo sapiens
  misc_RNA (1)...(19): siRNA sense strand
guacaguucugaugacacu

SEQ ID NO: 132173 - RNA, 19 nt, Homo sapiens
  misc_RNA (1)...(19): siRNA sense strand
cuacuacuccuguaaagaa

SEQ ID NO: 132174 - RNA, 19 nt, Homo sapiens
  misc_RNA (1)...(19): siRNA sense strand
gugcucaaccgacauaauu

SEQ ID NO: 132175 - RNA, 19 nt, Homo sapiens
  misc_RNA (1)...(19): siRNA sense strand
gcaagcagccuuuggaaaa

SEQ ID NO: 132176 - RNA, 19 nt, Homo sapiens
  misc_RNA (1)...(19): siRNA sense strand
ggauaacaguuggauaaag

SEQ ID NO: 132177 - RNA, 19 nt, Homo sapiens
  misc_RNA (1)...(19): siRNA sense strand
ggacaggaucucagacaga

SEQ ID NO: 132178 - RNA, 19 nt, Homo sapiens
  misc_RNA (1)...(19): siRNA sense strand
cagcugagacaggauaaua

SEQ ID NO: 132179 - RNA, 19 nt, Homo sapiens
  misc_RNA (1)...(19): siRNA sense strand
ggauggauaucaggagaau

SEQ ID NO: 132180 - RNA, 19 nt, Homo sapiens
  misc_RNA (1)...(19): siRNA sense strand
gccagagccuugauaaucu

SEQ ID NO: 132181 - RNA, 19 nt, Homo sapiens
  misc_RNA (1)...(19): siRNA sense strand
gaccuugaugggcuuauua

SEQ ID NO: 132182 - RNA, 19 nt, Homo sapiens
  misc_RNA (1)...(19): siRNA sense strand
ugaaugccaggaugaauaa

SEQ ID NO: 132183 - RNA, 19 nt, Homo sapiens
  misc_RNA (1)...(19): siRNA sense strand
gguagaagaaagagagaaa

SEQ ID NO: 132184 - RNA, 19 nt, Homo sapiens
  misc_RNA (1)...(19): siRNA sense strand
aaagagaaguaaccaaggu

SEQ ID NO: 132185 - RNA, 19 nt, Homo sapiens
  misc_RNA (1)...(19): siRNA sense strand
ggaaaguaaaugagagaga

SEQ ID NO: 132186 - RNA, 19 nt, Homo sapiens
  misc_RNA (1)...(19): siRNA sense strand
ucugauaggucugucauug

SEQ ID NO: 132187 - RNA, 19 nt, Homo sapiens
  misc_RNA (1)...(19): siRNA sense strand
ggucuugaugaacauauua

SEQ ID NO: 132188 - RNA, 19 nt, Homo sapiens
  misc_RNA (1)...(19): siRNA sense strand
cagaucugcugaaagaaau

SEQ ID NO: 132189 - RNA, 19 nt, Homo sapiens
  misc_RNA (1)...(19): siRNA sense strand
aaacauauaaggccaauac

SEQ ID NO: 132190 - RNA, 19 nt, Homo sapiens
  misc_RNA (1)...(19): siRNA sense strand
gaagaagugaagaccuuga

SEQ ID NO: 132191 - RNA, 19 nt, Homo sapiens
  misc_RNA (1)...(19): siRNA sense strand
ggucugucauugaaagaga

SEQ ID NO: 132192 - RNA, 19 nt, Homo sapiens
  misc_RNA (1)...(19): siRNA sense strand
uugaugggcuuauuaaagu

SEQ ID NO: 132193 - RNA, 19 nt, Homo sapiens
  misc_RNA (1)...(19): siRNA sense strand
agaauuggauaaucucauc

SEQ ID NO: 132194 - RNA, 19 nt, Homo sapiens
  misc_RNA (1)...(19): siRNA sense strand
ggccagagccuugauaauc

SEQ ID NO: 132195 - RNA, 19 nt, Homo sapiens
  misc_RNA (1)...(19): siRNA sense strand
caaagugaccccugaagua

SEQ ID NO: 132196 - RNA, 19 nt, Homo sapiens
  misc_RNA (1)...(19): siRNA sense strand
uugcuaaccucaucaaagu

SEQ ID NO: 132197 - RNA, 19 nt, Homo sapiens
  misc_RNA (1)...(19): siRNA sense strand
guuccaaagaccuuaauaa

SEQ ID NO: 132198 - RNA, 19 nt, Homo sapiens
  misc_RNA (1)...(19): siRNA sense strand
uaauucccaugaugcauug

SEQ ID NO: 132199 - RNA, 19 nt, Homo sapiens
  misc_RNA (1)...(19): siRNA sense strand
aaagugaucccuucagcaa

SEQ ID NO: 132200 - RNA, 19 nt, Homo sapiens
  misc_RNA (1)...(19): siRNA sense strand
gacaggaaaguaaaugaga

SEQ ID NO: 132201 - RNA, 19 nt, Homo sapiens
  misc_RNA (1)...(19): siRNA sense strand
gaaagagauaugugcacuu

SEQ ID NO: 132202 - RNA, 19 nt, Homo sapiens
  misc_RNA (1)...(19): siRNA sense strand
guaaucagaaacaaucaga

SEQ ID NO: 132203 - RNA, 19 nt, Homo sapiens
  misc_RNA (1)...(19): siRNA sense strand
ucgaaucuguugcuaaagu

SEQ ID NO: 132204 - RNA, 19 nt, Homo sapiens
  misc_RNA (1)...(19): siRNA sense strand
aacaaaagcuugaauagga

SEQ ID NO: 132205 - RNA, 19 nt, Homo sapiens
  misc_RNA (1)...(19): siRNA sense strand
acaauuagucgguacaguu

SEQ ID NO: 132206 - RNA, 19 nt, Homo sapiens
  misc_RNA (1)...(19): siRNA sense strand
cacggaagcagcaggauuu

SEQ ID NO: 132207 - RNA, 19 nt, Homo sapiens
  misc_RNA (1)...(19): siRNA sense strand
gauaaagauggcaaaggaa

SEQ ID NO: 132208 - RNA, 19 nt, Homo sapiens
  misc_RNA (1)...(19): siRNA sense strand
ccaguucuccuguuucuuc

SEQ ID NO: 132209 - RNA, 19 nt, Homo sapiens
  misc_RNA (1)...(19): siRNA sense strand
ggaaguaacaaaguugcaa

SEQ ID NO: 132210 - RNA, 19 nt, Homo sapiens
  misc_RNA (1)...(19): siRNA sense strand
acagaaaugaugcugcuaa

SEQ ID NO: 132211 - RNA, 19 nt, Homo sapiens
  misc_RNA (1)...(19): siRNA sense strand
acaauacacugugaaccuu

SEQ ID NO: 132212 - RNA, 19 nt, Homo sapiens
  misc_RNA (1)...(19): siRNA sense strand
agagauaugugcacuuacu

SEQ ID NO: 132213 - RNA, 19 nt, Homo sapiens
  misc_RNA (1)...(19): siRNA sense strand
ccacaggaaaugagaugaa

SEQ ID NO: 132214 - RNA, 19 nt, Homo sapiens
  misc_RNA (1)...(19): siRNA sense strand
ugaguacccggacagauaa

SEQ ID NO: 132215 - RNA, 19 nt, Homo sapiens
  misc_RNA (1)...(19): siRNA sense strand
ccuugaaagucucaucuau

SEQ ID NO: 132216 - RNA, 19 nt, Homo sapiens
  misc_RNA (1)...(19): siRNA sense strand
cauauguggagaauaguaa

SEQ ID NO: 132217 - RNA, 19 nt, Homo sapiens
  misc_RNA (1)...(19): siRNA sense strand
gauaaagaaacgcccugaa

SEQ ID NO: 132218 - RNA, 19 nt, Homo sapiens
  misc_RNA (1)...(19): siRNA sense strand
gcaaagcauucguuauuca

SEQ ID NO: 132219 - RNA, 19 nt, Homo sapiens
  misc_RNA (1)...(19): siRNA sense strand
caagaaacauggauuugau

SEQ ID NO: 132220 - RNA, 19 nt, Homo sapiens
  misc_RNA (1)...(19): siRNA sense strand
cauaauugguucuuugcua

SEQ ID NO: 132221 - RNA, 19 nt, Homo sapiens
  misc_RNA (1)...(19): siRNA sense strand
gcaagaaacauggauuuga

SEQ ID NO: 132222 - RNA, 19 nt, Homo sapiens
  misc_RNA (1)...(19): siRNA sense strand
gcagcggcgugcccuauuu

SEQ ID NO: 132223 - RNA, 19 nt, Homo sapiens
  misc_RNA (1)...(19): siRNA sense strand
caaggugaaugaaacagaa

SEQ ID NO: 132224 - RNA, 19 nt, Homo sapiens
  misc_RNA (1)...(19): siRNA sense strand
aaacagaaauggauauugc

SEQ ID NO: 132225 - RNA, 19 nt, Homo sapiens
  misc_RNA (1)...(19): siRNA sense strand
gaaugaaacagaaauggau

SEQ ID NO: 132226 - RNA, 19 nt, Homo sapiens
  misc_RNA (1)...(19): siRNA sense strand
gaacugugaccaaggugaa

SEQ ID NO: 132227 - RNA, 19 nt, Homo sapiens
  misc_RNA (1)...(19): siRNA sense strand
ugagcaaccugcaggagaa

SEQ ID NO: 132228 - RNA, 19 nt, Homo sapiens
  misc_RNA (1)...(19): siRNA sense strand
gaaacagaaauggauauug

SEQ ID NO: 132229 - RNA, 19 nt, Homo sapiens
  misc_RNA (1)...(19): siRNA sense strand
agaaauggauauugcaaag

SEQ ID NO: 132230 - RNA, 19 nt, Homo sapiens
  misc_RNA (1)...(19): siRNA sense strand
ugacaccagaagaauauua

SEQ ID NO: 132231 - RNA, 19 nt, Homo sapiens
  misc_RNA (1)...(19): siRNA sense strand
ugaccaaggugaaugaaac

SEQ ID NO: 132232 - RNA, 19 nt, Homo sapiens
  misc_RNA (1)...(19): siRNA sense strand
uugcaaagcauucguuauu

SEQ ID NO: 132233 - RNA, 19 nt, Homo sapiens
  misc_RNA (1)...(19): siRNA sense strand
aaauggauauugcaaagca

SEQ ID NO: 132234 - RNA, 19 nt, Homo sapiens
  misc_RNA (1)...(19): siRNA sense strand
aagcauucguuauucauuc

SEQ ID NO: 132235 - RNA, 19 nt, Homo sapiens
  misc_RNA (1)...(19): siRNA sense strand
cuacacugaccaugacuuu

SEQ ID NO: 132236 - RNA, 19 nt, Homo sapiens
  misc_RNA (1)...(19): siRNA sense strand
gcaggagaauccauaugcu

SEQ ID NO: 132237 - RNA, 19 nt, Homo sapiens
  misc_RNA (1)...(19): siRNA sense strand
caggagaauccauaugcua

SEQ ID NO: 132238 - RNA, 19 nt, Homo sapiens
  misc_RNA (1)...(19): siRNA sense strand
caggaacugugaccaaggu

SEQ ID NO: 132239 - RNA, 19 nt, Homo sapiens
  misc_RNA (1)...(19): siRNA sense strand
gacaccagaagaauauuau

SEQ ID NO: 132240 - RNA, 19 nt, Homo sapiens
  misc_RNA (1)...(19): siRNA sense strand
cgugacaccagaagaauau

SEQ ID NO: 132241 - RNA, 19 nt, Homo sapiens
  misc_RNA (1)...(19): siRNA sense strand
cagaaauggauauugcaaa

SEQ ID NO: 132242 - RNA, 19 nt, Homo sapiens
  misc_RNA (1)...(19): siRNA sense strand
ugaaugaaacagaaaugga

SEQ ID NO: 132243 - RNA, 19 nt, Homo sapiens
  misc_RNA (1)...(19): siRNA sense strand
cacauaaugcugucaggaa

SEQ ID NO: 132244 - RNA, 19 nt, Homo sapiens
  misc_RNA (1)...(19): siRNA sense strand
guucuuugcuaaguugaau

SEQ ID NO: 132245 - RNA, 19 nt, Homo sapiens
  misc_RNA (1)...(19): siRNA sense strand
ggagaauccauaugcuaca

SEQ ID NO: 132246 - RNA, 19 nt, Homo sapiens
  misc_RNA (1)...(19): siRNA sense strand
agccauaauugguucuuug

SEQ ID NO: 132247 - RNA, 19 nt, Homo sapiens
  misc_RNA (1)...(19): siRNA sense strand
ccaaggugaaugaaacaga

SEQ ID NO: 132248 - RNA, 19 nt, Homo sapiens
  misc_RNA (1)...(19): siRNA sense strand
cagccauaauugguucuuu

SEQ ID NO: 132249 - RNA, 19 nt, Homo sapiens
  misc_RNA (1)...(19): siRNA sense strand
ugcaaagcauucguuauuc

SEQ ID NO: 132250 - RNA, 19 nt, Homo sapiens
  misc_RNA (1)...(19): siRNA sense strand
caaagcauucguuauucau

SEQ ID NO: 132251 - RNA, 19 nt, Homo sapiens
  misc_RNA (1)...(19): siRNA sense strand
cugcaagaaacauggauuu

SEQ ID NO: 132252 - RNA, 19 nt, Homo sapiens
  misc_RNA (1)...(19): siRNA sense strand
aaucgugacaccagaagaa

SEQ ID NO: 132253 - RNA, 19 nt, Homo sapiens
  misc_RNA (1)...(19): siRNA sense strand
acacugaccaugacuuugg

SEQ ID NO: 132254 - RNA, 19 nt, Homo sapiens
  misc_RNA (1)...(19): siRNA sense strand
ggccuuccagccauaauug

SEQ ID NO: 132255 - RNA, 19 nt, Homo sapiens
  misc_RNA (1)...(19): siRNA sense strand
ucgacacccugagaugaaa

SEQ ID NO: 132256 - RNA, 19 nt, Homo sapiens
  misc_RNA (1)...(19): siRNA sense strand
ggugaaugaaacagaaaug

SEQ ID NO: 132257 - RNA, 19 nt, Homo sapiens
  misc_RNA (1)...(19): siRNA sense strand
gagaauccauaugcuacac

SEQ ID NO: 132258 - RNA, 19 nt, Homo sapiens
  misc_RNA (1)...(19): siRNA sense strand
gaccaaggugaaugaaaca

SEQ ID NO: 132259 - RNA, 19 nt, Homo sapiens
  misc_RNA (1)...(19): siRNA sense strand
uaugcuacacugaccauga

SEQ ID NO: 132260 - RNA, 19 nt, Homo sapiens
  misc_RNA (1)...(19): siRNA sense strand
uauugcaaagcauucguua

SEQ ID NO: 132261 - RNA, 19 nt, Homo sapiens
  misc_RNA (1)...(19): siRNA sense strand
gcggcgugcccuauuucua

SEQ ID NO: 132262 - RNA, 19 nt, Homo sapiens
  misc_RNA (1)...(19): siRNA sense strand
gagcauagauaccaauuua

SEQ ID NO: 132263 - RNA, 19 nt, Homo sapiens
  misc_RNA (1)...(19): siRNA sense strand
caacuuagguucuuuagua

SEQ ID NO: 132264 - RNA, 19 nt, Homo sapiens
  misc_RNA (1)...(19): siRNA sense strand
gcaaacgacugauuacaua

SEQ ID NO: 132265 - RNA, 19 nt, Homo sapiens
  misc_RNA (1)...(19): siRNA sense strand
gaagaacgccaguugcuua

SEQ ID NO: 132266 - RNA, 19 nt, Homo sapiens
  misc_RNA (1)...(19): siRNA sense strand
gaacuccucugcugugaaa

SEQ ID NO: 132267 - RNA, 19 nt, Homo sapiens
  misc_RNA (1)...(19): siRNA sense strand
gaucauagauacacuaauc

SEQ ID NO: 132268 - RNA, 19 nt, Homo sapiens
  misc_RNA (1)...(19): siRNA sense strand
uaacugugccugauuauua

SEQ ID NO: 132269 - RNA, 19 nt, Homo sapiens
  misc_RNA (1)...(19): siRNA sense strand
caacaacaccauccaauuu

SEQ ID NO: 132270 - RNA, 19 nt, Homo sapiens
  misc_RNA (1)...(19): siRNA sense strand
gaccaucgcaugaaacuua

SEQ ID NO: 132271 - RNA, 19 nt, Homo sapiens
  misc_RNA (1)...(19): siRNA sense strand
gcaagaaucagaugaagaa

SEQ ID NO: 132272 - RNA, 19 nt, Homo sapiens
  misc_RNA (1)...(19): siRNA sense strand
ggaacaggauauuaaaguu

SEQ ID NO: 132273 - RNA, 19 nt, Homo sapiens
  misc_RNA (1)...(19): siRNA sense strand
gaacgccaguugcuuaaau

SEQ ID NO: 132274 - RNA, 19 nt, Homo sapiens
  misc_RNA (1)...(19): siRNA sense strand
ggaaguggcuggacucucu

SEQ ID NO: 132275 - RNA, 19 nt, Homo sapiens
  misc_RNA (1)...(19): siRNA sense strand
gaaggacacuacugagguu

SEQ ID NO: 132276 - RNA, 19 nt, Homo sapiens
  misc_RNA (1)...(19): siRNA sense strand
gaacauaccacgacaagca

SEQ ID NO: 132277 - RNA, 19 nt, Homo sapiens
  misc_RNA (1)...(19): siRNA sense strand
caacugagauauccaccaa

SEQ ID NO: 132278 - RNA, 19 nt, Homo sapiens
  misc_RNA (1)...(19): siRNA sense strand
ugaaggccuuguuaaguua

SEQ ID NO: 132279 - RNA, 19 nt, Homo sapiens
  misc_RNA (1)...(19): siRNA sense strand
gcagaauccugucguggaa

SEQ ID NO: 132280 - RNA, 19 nt, Homo sapiens
  misc_RNA (1)...(19): siRNA sense strand
ccaagaaugugcagagaga

SEQ ID NO: 132281 - RNA, 19 nt, Homo sapiens
  misc_RNA (1)...(19): siRNA sense strand
gagagacacaucauagaua

SEQ ID NO: 132282 - RNA, 19 nt, Homo sapiens
  misc_RNA (1)...(19): siRNA sense strand
agagacacaucauagauaa

SEQ ID NO: 132283 - RNA, 19 nt, Homo sapiens
  misc_RNA (1)...(19): siRNA sense strand
ggaaugaaucagaagauaa

SEQ ID NO: 132284 - RNA, 19 nt, Homo sapiens
  misc_RNA (1)...(19): siRNA sense strand
gcaaaggaccaucgcauga

SEQ ID NO: 132285 - RNA, 19 nt, Homo sapiens
  misc_RNA (1)...(19): siRNA sense strand
gaacaggauauuaaaguug

SEQ ID NO: 132286 - RNA, 19 nt, Homo sapiens
  misc_RNA (1)...(19): siRNA sense strand
gaacauaaagagcauagau

SEQ ID NO: 132287 - RNA, 19 nt, Homo sapiens
  misc_RNA (1)...(19): siRNA sense strand
gaucagccuagcucaauua

SEQ ID NO: 132288 - RNA, 19 nt, Homo sapiens
  misc_RNA (1)...(19): siRNA sense strand
agacuuaucuaaaccagaa

SEQ ID NO: 132289 - RNA, 19 nt, Homo sapiens
  misc_RNA (1)...(19): siRNA sense strand
aaacugugcugaauucaau

SEQ ID NO: 132290 - RNA, 19 nt, Homo sapiens
  misc_RNA (1)...(19): siRNA sense strand
aaccagaaguugaauauga

SEQ ID NO: 132291 - RNA, 19 nt, Homo sapiens
  misc_RNA (1)...(19): siRNA sense strand
ugauucagaugaugacuuu

SEQ ID NO: 132292 - RNA, 19 nt, Homo sapiens
  misc_RNA (1)...(19): siRNA sense strand
guacagcauuacuuuauag

SEQ ID NO: 132293 - RNA, 19 nt, Homo sapiens
  misc_RNA (1)...(19): siRNA sense strand
gaaaagcucuacugcauca

SEQ ID NO: 132294 - RNA, 19 nt, Homo sapiens
  misc_RNA (1)...(19): siRNA sense strand
aaagagagccagccacaaa

SEQ ID NO: 132295 - RNA, 19 nt, Homo sapiens
  misc_RNA (1)...(19): siRNA sense strand
gggagggucuuauaaucuu

SEQ ID NO: 132296 - RNA, 19 nt, Homo sapiens
  misc_RNA (1)...(19): siRNA sense strand
guucaccuaugaucgauuu

SEQ ID NO: 132297 - RNA, 19 nt, Homo sapiens
  misc_RNA (1)...(19): siRNA sense strand
ggacaacgcagaagccaau

SEQ ID NO: 132298 - RNA, 19 nt, Homo sapiens
  misc_RNA (1)...(19): siRNA sense strand
gaagcaagaaucagaugaa

SEQ ID NO: 132299 - RNA, 19 nt, Homo sapiens
  misc_RNA (1)...(19): siRNA sense strand
gcagagagacacaucauag

SEQ ID NO: 132300 - RNA, 19 nt, Homo sapiens
  misc_RNA (1)...(19): siRNA sense strand
ucaagacccuguuccucua

SEQ ID NO: 132301 - RNA, 19 nt, Homo sapiens
  misc_RNA (1)...(19): siRNA sense strand
cagcauuacuuuauagcaa

SEQ ID NO: 132302 - RNA, 19 nt, Homo sapiens
  misc_RNA (1)...(19): siRNA sense strand
ggacaauuccucaaaugga

SEQ ID NO: 132303 - RNA, 19 nt, Homo sapiens
  misc_RNA (1)...(19): siRNA sense strand
ucaccucccugcucuuaaa

SEQ ID NO: 132304 - RNA, 19 nt, Homo sapiens
  misc_RNA (1)...(19): siRNA sense strand
ccaauacguucaccuagug

SEQ ID NO: 132305 - RNA, 19 nt, Homo sapiens
  misc_RNA (1)...(19): siRNA sense strand
gacaagcaauaaagccaaa

SEQ ID NO: 132306 - RNA, 19 nt, Homo sapiens
  misc_RNA (1)...(19): siRNA sense strand
caaaccaguuauccaaguu

SEQ ID NO: 132307 - RNA, 19 nt, Homo sapiens
  misc_RNA (1)...(19): siRNA sense strand
gcuggacucucuaaacaau

SEQ ID NO: 132308 - RNA, 19 nt, Homo sapiens
  misc_RNA (1)...(19): siRNA sense strand
cugaaggccuuguuaaguu

SEQ ID NO: 132309 - RNA, 19 nt, Homo sapiens
  misc_RNA (1)...(19): siRNA sense strand
ccaagugguuuaucaucaa

SEQ ID NO: 132310 - RNA, 19 nt, Homo sapiens
  misc_RNA (1)...(19): siRNA sense strand
aaaggaccaucgcaugaaa

SEQ ID NO: 132311 - RNA, 19 nt, Homo sapiens
  misc_RNA (1)...(19): siRNA sense strand
ggagcugacucuacacaca

SEQ ID NO: 132312 - RNA, 19 nt, Homo sapiens
  misc_RNA (1)...(19): siRNA sense strand
gcaaccgccuccacguuug

SEQ ID NO: 132313 - RNA, 19 nt, Homo sapiens
  misc_RNA (1)...(19): siRNA sense strand
caagugguuuaucaucaaa

SEQ ID NO: 132314 - RNA, 19 nt, Homo sapiens
  misc_RNA (1)...(19): siRNA sense strand
uauagcaaacgacugauua

SEQ ID NO: 132315 - RNA, 19 nt, Homo sapiens
  misc_RNA (1)...(19): siRNA sense strand
uggcagcaguacagcauua

SEQ ID NO: 132316 - RNA, 19 nt, Homo sapiens
  misc_RNA (1)...(19): siRNA sense strand
cagaaagugaucauagaua

SEQ ID NO: 132317 - RNA, 19 nt, Homo sapiens
  misc_RNA (1)...(19): siRNA sense strand
gaaaagugccccaaaguau

SEQ ID NO: 132318 - RNA, 19 nt, Homo sapiens
  misc_RNA (1)...(19): siRNA sense strand
aaacagaacgguccaguca

SEQ ID NO: 132319 - RNA, 19 nt, Homo sapiens
  misc_RNA (1)...(19): siRNA sense strand
guugcuauauuuacacuga

SEQ ID NO: 132320 - RNA, 19 nt, Homo sapiens
  misc_RNA (1)...(19): siRNA sense strand
caagaagauuauuccaugu

SEQ ID NO: 132321 - RNA, 19 nt, Homo sapiens
  misc_RNA (1)...(19): siRNA sense strand
uaaagagcauagauaccaa

SEQ ID NO: 132322 - RNA, 19 nt, Homo sapiens
  misc_RNA (1)...(19): siRNA sense strand
acacuaaucaccaaacuga

SEQ ID NO: 132323 - RNA, 19 nt, Homo sapiens
  misc_RNA (1)...(19): siRNA sense strand
gaaguugaauaugauugug

SEQ ID NO: 132324 - RNA, 19 nt, Homo sapiens
  misc_RNA (1)...(19): siRNA sense strand
agaagaagcuuuucagaau

SEQ ID NO: 132325 - RNA, 19 nt, Homo sapiens
  misc_RNA (1)...(19): siRNA sense strand
gaaagaggaugaccccaau

SEQ ID NO: 132326 - RNA, 19 nt, Homo sapiens
  misc_RNA (1)...(19): siRNA sense strand
gaacgguccagucaccaaa

SEQ ID NO: 132327 - RNA, 19 nt, Homo sapiens
  misc_RNA (1)...(19): siRNA sense strand
guacuauuaugcuggacaa

SEQ ID NO: 132328 - RNA, 19 nt, Homo sapiens
  misc_RNA (1)...(19): siRNA sense strand
agaaagugaucauagauac

SEQ ID NO: 132329 - RNA, 19 nt, Homo sapiens
  misc_RNA (1)...(19): siRNA sense strand
aaacugaaggccuuguuaa

SEQ ID NO: 132330 - RNA, 19 nt, Homo sapiens
  misc_RNA (1)...(19): siRNA sense strand
gugcccacauugacaaauu

SEQ ID NO: 132331 - RNA, 19 nt, Homo sapiens
  misc_RNA (1)...(19): siRNA sense strand
gugaggaaagauacuaaua

SEQ ID NO: 132332 - RNA, 19 nt, Homo sapiens
  misc_RNA (1)...(19): siRNA sense strand
caauuacggcuccagcaua

SEQ ID NO: 132333 - RNA, 19 nt, Homo sapiens
  misc_RNA (1)...(19): siRNA sense strand
caucaaaccaguuauccaa

SEQ ID NO: 132334 - RNA, 19 nt, Homo sapiens
  misc_RNA (1)...(19): siRNA sense strand
cuaaacaauuggagcaugu

SEQ ID NO: 132335 - RNA, 19 nt, Homo sapiens
  misc_RNA (1)...(19): siRNA sense strand
gaaaucagauccaaaacag

SEQ ID NO: 132336 - RNA, 19 nt, Homo sapiens
  misc_RNA (1)...(19): siRNA sense strand
ccaacaacaccauccaauu

SEQ ID NO: 132337 - RNA, 19 nt, Homo sapiens
  misc_RNA (1)...(19): siRNA sense strand
ugagacaugugacaaacug

SEQ ID NO: 132338 - RNA, 19 nt, Homo sapiens
  misc_RNA (1)...(19): siRNA sense strand
aggaaugaaucagaagaua

SEQ ID NO: 132339 - RNA, 19 nt, Homo sapiens
  misc_RNA (1)...(19): siRNA sense strand
aagaaccucuauccagaaa

SEQ ID NO: 132340 - RNA, 19 nt, Homo sapiens
  misc_RNA (1)...(19): siRNA sense strand
gucauucguugcccaguuu

SEQ ID NO: 132341 - RNA, 19 nt, Homo sapiens
  misc_RNA (1)...(19): siRNA sense strand
ggacuucaccaggacaauu

SEQ ID NO: 132342 - RNA, 19 nt, Homo sapiens
  misc_RNA (1)...(19): siRNA sense strand
ugaggagacugugcuaaga

SEQ ID NO: 132343 - RNA, 19 nt, Homo sapiens
  misc_RNA (1)...(19): siRNA sense strand
agaccacccucaaacagaa

SEQ ID NO: 132344 - RNA, 19 nt, Homo sapiens
  misc_RNA (1)...(19): siRNA sense strand
caaaucagguauguacaag

SEQ ID NO: 132345 - RNA, 19 nt, Homo sapiens
  misc_RNA (1)...(19): siRNA sense strand
aaacugacaugucgagacu

SEQ ID NO: 132346 - RNA, 19 nt, Homo sapiens
  misc_RNA (1)...(19): siRNA sense strand
caaacccaauggaccaguu

SEQ ID NO: 132347 - RNA, 19 nt, Homo sapiens
  misc_RNA (1)...(19): siRNA sense strand
cgaggaagcucuggcucuu

SEQ ID NO: 132348 - RNA, 19 nt, Homo sapiens
  misc_RNA (1)...(19): siRNA sense strand
uagauacacuaaucaccaa

SEQ ID NO: 132349 - RNA, 19 nt, Homo sapiens
  misc_RNA (1)...(19): siRNA sense strand
ccagugggagggucuuaua

SEQ ID NO: 132350 - RNA, 19 nt, Homo sapiens
  misc_RNA (1)...(19): siRNA sense strand
ucaaaccaguuauccaagu

SEQ ID NO: 132351 - RNA, 19 nt, Homo sapiens
  misc_RNA (1)...(19): siRNA sense strand
caucaacuuagguucuuua

SEQ ID NO: 132352 - RNA, 19 nt, Homo sapiens
  misc_RNA (1)...(19): siRNA sense strand
caaaggaccaucgcaugaa

SEQ ID NO: 132353 - RNA, 19 nt, Homo sapiens
  misc_RNA (1)...(19): siRNA sense strand
ucaccaaacugauggaaaa

SEQ ID NO: 132354 - RNA, 19 nt, Homo sapiens
  misc_RNA (1)...(19): siRNA sense strand
gugggagggucuuauaauc

SEQ ID NO: 132355 - RNA, 19 nt, Homo sapiens
  misc_RNA (1)...(19): siRNA sense strand
caaauggaaagucugaaug

SEQ ID NO: 132356 - RNA, 19 nt, Homo sapiens
  misc_RNA (1)...(19): siRNA sense strand
gcagucagagcucuacuuc

SEQ ID NO: 132357 - RNA, 19 nt, Homo sapiens
  misc_RNA (1)...(19): siRNA sense strand
cuuauaaucuucccucucu

SEQ ID NO: 132358 - RNA, 19 nt, Homo sapiens
  misc_RNA (1)...(19): siRNA sense strand
ccaaguggagaguggauuu

SEQ ID NO: 132359 - RNA, 19 nt, Homo sapiens
  misc_RNA (1)...(19): siRNA sense strand
gaaguagccaaugcuggua

SEQ ID NO: 132360 - RNA, 19 nt, Homo sapiens
  misc_RNA (1)...(19): siRNA sense strand
gaagauuauuccauguacu

SEQ ID NO: 132361 - RNA, 19 nt, Homo sapiens
  misc_RNA (1)...(19): siRNA sense strand
uaucuaaaccagaaguuga

SEQ ID NO: 132362 - RNA, 19 nt, Homo sapiens
  misc_RNA (1)...(19): siRNA sense strand
agaauuaccucuaggauuu

SEQ ID NO: 132363 - RNA, 19 nt, Homo sapiens
  misc_RNA (1)...(19): siRNA sense strand
gaaaucgacucucaccaaa

SEQ ID NO: 132364 - RNA, 19 nt, Homo sapiens
  misc_RNA (1)...(19): siRNA sense strand
caucaaagauucugaccua

SEQ ID NO: 132365 - RNA, 19 nt, Homo sapiens
  misc_RNA (1)...(19): siRNA sense strand
ggaugaaguuuaugacuau

SEQ ID NO: 132366 - RNA, 19 nt, Homo sapiens
  misc_RNA (1)...(19): siRNA sense strand
ccacagaaaucgacucuca

SEQ ID NO: 132367 - RNA, 19 nt, Homo sapiens
  misc_RNA (1)...(19): siRNA sense strand
gaagacauugugagcauua

SEQ ID NO: 132368 - RNA, 19 nt, Homo sapiens
  misc_RNA (1)...(19): siRNA sense strand
gcaggaaguuuguuugcuu

SEQ ID NO: 132369 - RNA, 19 nt, Homo sapiens
  misc_RNA (1)...(19): siRNA sense strand
uaucugauguccaauggua

SEQ ID NO: 132370 - RNA, 19 nt, Homo sapiens
  misc_RNA (1)...(19): siRNA sense strand
gaaaucauugagcguaaua

SEQ ID NO: 132371 - RNA, 19 nt, Homo sapiens
  misc_RNA (1)...(19): siRNA sense strand
gaucaaacacugaaacuca

SEQ ID NO: 132372 - RNA, 19 nt, Homo sapiens
  misc_RNA (1)...(19): siRNA sense strand
gcgguaaccugguacaaga

SEQ ID NO: 132373 - RNA, 19 nt, Homo sapiens
  misc_RNA (1)...(19): siRNA sense strand
gggagacacuaaacucaaa

SEQ ID NO: 132374 - RNA, 19 nt, Homo sapiens
  misc_RNA (1)...(19): siRNA sense strand
caaauguacccuucacuuu

SEQ ID NO: 132375 - RNA, 19 nt, Homo sapiens
  misc_RNA (1)...(19): siRNA sense strand
gauguagccuguuguguca

SEQ ID NO: 132376 - RNA, 19 nt, Homo sapiens
  misc_RNA (1)...(19): siRNA sense strand
gacauugugagcauuauua

SEQ ID NO: 132377 - RNA, 19 nt, Homo sapiens
  misc_RNA (1)...(19): siRNA sense strand
guaacgaccuaucugaugu

SEQ ID NO: 132378 - RNA, 19 nt, Homo sapiens
  misc_RNA (1)...(19): siRNA sense strand
gcacaaaguccagcgguaa

SEQ ID NO: 132379 - RNA, 19 nt, Homo sapiens
  misc_RNA (1)...(19): siRNA sense strand
cgaccuaucugauguccaa

SEQ ID NO: 132380 - RNA, 19 nt, Homo sapiens
  misc_RNA (1)...(19): siRNA sense strand
ccaaagugaugcacaaagu

SEQ ID NO: 132381 - RNA, 19 nt, Homo sapiens
  misc_RNA (1)...(19): siRNA sense strand
agucagagcuguuguucaa

SEQ ID NO: 132382 - RNA, 19 nt, Homo sapiens
  misc_RNA (1)...(19): siRNA sense strand
ggaaaggacucaguagaac

SEQ ID NO: 132383 - RNA, 19 nt, Homo sapiens
  misc_RNA (1)...(19): siRNA sense strand
gagagcgaauuaaaggauu

SEQ ID NO: 132384 - RNA, 19 nt, Homo sapiens
  misc_RNA (1)...(19): siRNA sense strand
gaaaggagcaaccgaaucg

SEQ ID NO: 132385 - RNA, 19 nt, Homo sapiens
  misc_RNA (1)...(19): siRNA sense strand
ggaaccagcucagaauuac

SEQ ID NO: 132386 - RNA, 19 nt, Homo sapiens
  misc_RNA (1)...(19): siRNA sense strand
caaagauucugaccuagag

SEQ ID NO: 132387 - RNA, 19 nt, Homo sapiens
  misc_RNA (1)...(19): siRNA sense strand
cguaguggaugaaguuuau

SEQ ID NO: 132388 - RNA, 19 nt, Homo sapiens
  misc_RNA (1)...(19): siRNA sense strand
ggauauagccuguguuugc

SEQ ID NO: 132389 - RNA, 19 nt, Homo sapiens
  misc_RNA (1)...(19): siRNA sense strand
uggaugaaguuuaugacua

SEQ ID NO: 132390 - RNA, 19 nt, Homo sapiens
  misc_RNA (1)...(19): siRNA sense strand
caauggacccaguaucuuu

SEQ ID NO: 132391 - RNA, 19 nt, Homo sapiens
  misc_RNA (1)...(19): siRNA sense strand
gagccuauuuccugauguu

SEQ ID NO: 132392 - RNA, 19 nt, Homo sapiens
  misc_RNA (1)...(19): siRNA sense strand
gaaaagcuauccucacauc

SEQ ID NO: 132393 - RNA, 19 nt, Homo sapiens
  misc_RNA (1)...(19): siRNA sense strand
ggacucaguagaacagaaa

SEQ ID NO: 132394 - RNA, 19 nt, Homo sapiens
  misc_RNA (1)...(19): siRNA sense strand
gacccaagaugauuaagag

SEQ ID NO: 132395 - RNA, 19 nt, Homo sapiens
  misc_RNA (1)...(19): siRNA sense strand
gaaguuuguuugcuuuguc

SEQ ID NO: 132396 - RNA, 19 nt, Homo sapiens
  misc_RNA (1)...(19): siRNA sense strand
aagcagaagaggaauauuu

SEQ ID NO: 132397 - RNA, 19 nt, Homo sapiens
  misc_RNA (1)...(19): siRNA sense strand
gagaagcagaagaggaaua

SEQ ID NO: 132398 - RNA, 19 nt, Homo sapiens
  misc_RNA (1)...(19): siRNA sense strand
gcacuggcucuauuucuug

SEQ ID NO: 132399 - RNA, 19 nt, Homo sapiens
  misc_RNA (1)...(19): siRNA sense strand
cagaagacauugugagcau

SEQ ID NO: 132400 - RNA, 19 nt, Homo sapiens
  misc_RNA (1)...(19): siRNA sense strand
uacaggcacuggauugaaa

SEQ ID NO: 132401 - RNA, 19 nt, Homo sapiens
  misc_RNA (1)...(19): siRNA sense strand
caggaaguuuguuugcuuu

SEQ ID NO: 132402 - RNA, 19 nt, Homo sapiens
  misc_RNA (1)...(19): siRNA sense strand
ggacacacuggaaguagaa

SEQ ID NO: 132403 - RNA, 19 nt, Homo sapiens
  misc_RNA (1)...(19): siRNA sense strand
cguaauaucaucuuggaaa

SEQ ID NO: 132404 - RNA, 19 nt, Homo sapiens
  misc_RNA (1)...(19): siRNA sense strand
ggacaaauguacccuucac

SEQ ID NO: 132405 - RNA, 19 nt, Homo sapiens
  misc_RNA (1)...(19): siRNA sense strand
ccaacaaccuucgaaugga

SEQ ID NO: 132406 - RNA, 19 nt, Homo sapiens
  misc_RNA (1)...(19): siRNA sense strand
ggaaguuuguuugcuuugu

SEQ ID NO: 132407 - RNA, 19 nt, Homo sapiens
  misc_RNA (1)...(19): siRNA sense strand
ucacaucauucaggacaaa

SEQ ID NO: 132408 - RNA, 19 nt, Homo sapiens
  misc_RNA (1)...(19): siRNA sense strand
aaacuccuuuggacauauu

SEQ ID NO: 132409 - RNA, 19 nt, Homo sapiens
  misc_RNA (1)...(19): siRNA sense strand
gaaaggacucaguagaaca

SEQ ID NO: 132410 - RNA, 19 nt, Homo sapiens
  misc_RNA (1)...(19): siRNA sense strand
gaacuacaagcagcaguga

SEQ ID NO: 132411 - RNA, 19 nt, Homo sapiens
  misc_RNA (1)...(19): siRNA sense strand
guaguaacgaccuaucuga

SEQ ID NO: 132412 - RNA, 19 nt, Homo sapiens
  misc_RNA (1)...(19): siRNA sense strand
ggagagcgaauuaaaggau

SEQ ID NO: 132413 - RNA, 19 nt, Homo sapiens
  misc_RNA (1)...(19): siRNA sense strand
gcagaagaggaauauuuau

SEQ ID NO: 132414 - RNA, 19 nt, Homo sapiens
  misc_RNA (1)...(19): siRNA sense strand
ccuaugauguagccuguug

SEQ ID NO: 132415 - RNA, 19 nt, Homo sapiens
  misc_RNA (1)...(19): siRNA sense strand
aagcuauccucacaucauu

SEQ ID NO: 132416 - RNA, 19 nt, Homo sapiens
  misc_RNA (1)...(19): siRNA sense strand
ggagugaagaggaauuugu

SEQ ID NO: 132417 - RNA, 19 nt, Homo sapiens
  misc_RNA (1)...(19): siRNA sense strand
aaugguacaucaaagauuc

SEQ ID NO: 132418 - RNA, 19 nt, Homo sapiens
  misc_RNA (1)...(19): siRNA sense strand
acaaaugcauccugugagu

SEQ ID NO: 132419 - RNA, 19 nt, Homo sapiens
  misc_RNA (1)...(19): siRNA sense strand
agacaaaugcauccuguga

SEQ ID NO: 132420 - RNA, 19 nt, Homo sapiens
  misc_RNA (1)...(19): siRNA sense strand
uggaaccagcucagaauua

SEQ ID NO: 132421 - RNA, 19 nt, Homo sapiens
  misc_RNA (1)...(19): siRNA sense strand
cagugaaucuugccuugga

SEQ ID NO: 132422 - RNA, 19 nt, Homo sapiens
  misc_RNA (1)...(19): siRNA sense strand
gaguauuccgcaucacaua

SEQ ID NO: 132423 - RNA, 19 nt, Homo sapiens
  misc_RNA (1)...(19): siRNA sense strand
agucucagcugccaaagug

SEQ ID NO: 132424 - RNA, 19 nt, Homo sapiens
  misc_RNA (1)...(19): siRNA sense strand
ggucuuuaacccugucaua

SEQ ID NO: 132425 - RNA, 19 nt, Homo sapiens
  misc_RNA (1)...(19): siRNA sense strand
ggauauuucuuuggcuugu

SEQ ID NO: 132426 - RNA, 19 nt, Homo sapiens
  misc_RNA (1)...(19): siRNA sense strand
ucagagcuguuguucaagu

SEQ ID NO: 132427 - RNA, 19 nt, Homo sapiens
  misc_RNA (1)...(19): siRNA sense strand
aaacuccucucuguggaaa

SEQ ID NO: 132428 - RNA, 19 nt, Homo sapiens
  misc_RNA (1)...(19): siRNA sense strand
guagacccaagaugauuaa

SEQ ID NO: 132429 - RNA, 19 nt, Homo sapiens
  misc_RNA (1)...(19): siRNA sense strand
uacaaggagugaagaggaa

SEQ ID NO: 132430 - RNA, 19 nt, Homo sapiens
  misc_RNA (1)...(19): siRNA sense strand
ggaaaggagcaaccgaauc

SEQ ID NO: 132431 - RNA, 19 nt, Homo sapiens
  misc_RNA (1)...(19): siRNA sense strand
gcaggagagcgaauuaaag

SEQ ID NO: 132432 - RNA, 19 nt, Homo sapiens
  misc_RNA (1)...(19): siRNA sense strand
cagaauuaccucuaggauu

SEQ ID NO: 132433 - RNA, 19 nt, Homo sapiens
  misc_RNA (1)...(19): siRNA sense strand
caccagggcacauauguau

SEQ ID NO: 132434 - RNA, 19 nt, Homo sapiens
  misc_RNA (1)...(19): siRNA sense strand
uggaaaggacucaguagaa

SEQ ID NO: 132435 - RNA, 19 nt, Homo sapiens
  misc_RNA (1)...(19): siRNA sense strand
agcagaagaggaauauuua

SEQ ID NO: 132436 - RNA, 19 nt, Homo sapiens
  misc_RNA (1)...(19): siRNA sense strand
aagagaagcagaagaggaa

SEQ ID NO: 132437 - RNA, 19 nt, Homo sapiens
  misc_RNA (1)...(19): siRNA sense strand
ccuauuuccugauguuuua

SEQ ID NO: 132438 - RNA, 19 nt, Homo sapiens
  misc_RNA (1)...(19): siRNA sense strand
gaggccacuucaucucuga

SEQ ID NO: 132439 - RNA, 19 nt, Homo sapiens
  misc_RNA (1)...(19): siRNA sense strand
ucaaagauucugaccuaga

SEQ ID NO: 132440 - RNA, 19 nt, Homo sapiens
  misc_RNA (1)...(19): siRNA sense strand
agagcgaauuaaaggauuu

SEQ ID NO: 132441 - RNA, 19 nt, Homo sapiens
  misc_RNA (1)...(19): siRNA sense strand
gcucccagccuaaggaaug

SEQ ID NO: 132442 - RNA, 19 nt, Homo sapiens
  misc_RNA (1)...(19): siRNA sense strand
caaacacugaaacucauuu

SEQ ID NO: 132443 - RNA, 19 nt, Homo sapiens
  misc_RNA (1)...(19): siRNA sense strand
uguguuugcuugaaagaga

SEQ ID NO: 132444 - RNA, 19 nt, Homo sapiens
  misc_RNA (1)...(19): siRNA sense strand
agaaaucgacucucaccaa

SEQ ID NO: 132445 - RNA, 19 nt, Homo sapiens
  misc_RNA (1)...(19): siRNA sense strand
gaguggugcuccuguacau

SEQ ID NO: 132446 - RNA, 19 nt, Homo sapiens
  misc_RNA (1)...(19): siRNA sense strand
uaccagagccacagaaauc

SEQ ID NO: 132447 - RNA, 19 nt, Homo sapiens
  misc_RNA (1)...(19): siRNA sense strand
ggauuuugaugcuuucgua

SEQ ID NO: 132448 - RNA, 19 nt, Homo sapiens
  misc_RNA (1)...(19): siRNA sense strand
caaaugcauccugugagua

SEQ ID NO: 132449 - RNA, 19 nt, Homo sapiens
  misc_RNA (1)...(19): siRNA sense strand
caguaucuuugaacuacaa

SEQ ID NO: 132450 - RNA, 19 nt, Homo sapiens
  misc_RNA (1)...(19): siRNA sense strand
cagaagaggaauauuuauc

SEQ ID NO: 132451 - RNA, 19 nt, Homo sapiens
  misc_RNA (1)...(19): siRNA sense strand
ggaccuaccagagcaagga

SEQ ID NO: 132452 - RNA, 19 nt, Homo sapiens
  misc_RNA (1)...(19): siRNA sense strand
uguuugggcuggauauuuc

SEQ ID NO: 132453 - RNA, 19 nt, Homo sapiens
  misc_RNA (1)...(19): siRNA sense strand
gauauagccuguguuugcu

SEQ ID NO: 132454 - RNA, 19 nt, Homo sapiens
  misc_RNA (1)...(19): siRNA sense strand
cauuagaggacauuaggaa

SEQ ID NO: 132455 - RNA, 19 nt, Homo sapiens
  misc_RNA (1)...(19): siRNA sense strand
ggcacuggauugaaauagu

SEQ ID NO: 132456 - RNA, 19 nt, Homo sapiens
  misc_RNA (1)...(19): siRNA sense strand
gauauuucuuuggcuuguu

SEQ ID NO: 132457 - RNA, 19 nt, Homo sapiens
  misc_RNA (1)...(19): siRNA sense strand
aaaugcauccugugaguau

SEQ ID NO: 132458 - RNA, 19 nt, Homo sapiens
  misc_RNA (1)...(19): siRNA sense strand
uguagacccaagaugauua

SEQ ID NO: 132459 - RNA, 19 nt, Homo sapiens
  misc_RNA (1)...(19): siRNA sense strand
aaacucaaaccagauauuc

SEQ ID NO: 132460 - RNA, 19 nt, Homo sapiens
  misc_RNA (1)...(19): siRNA sense strand
cgagugcccuccucuacag

SEQ ID NO: 132461 - RNA, 19 nt, Homo sapiens
  misc_RNA (1)...(19): siRNA sense strand
gcacgauuuggcuuugaaa

SEQ ID NO: 132462 - RNA, 19 nt, Homo sapiens
  misc_RNA (1)...(19): siRNA sense strand
gaacuaggcucaagaagaa

SEQ ID NO: 132463 - RNA, 19 nt, Homo sapiens
  misc_RNA (1)...(19): siRNA sense strand
agaaagagcuggauaugga

SEQ ID NO: 132464 - RNA, 19 nt, Homo sapiens
  misc_RNA (1)...(19): siRNA sense strand
uaacagacaccaaggauaa

SEQ ID NO: 132465 - RNA, 19 nt, Homo sapiens
  misc_RNA (1)...(19): siRNA sense strand
ugaagaaccugucagaaga

SEQ ID NO: 132466 - RNA, 19 nt, Homo sapiens
  misc_RNA (1)...(19): siRNA sense strand
acacuuugguggaugauua

SEQ ID NO: 132467 - RNA, 19 nt, Homo sapiens
  misc_RNA (1)...(19): siRNA sense strand
guaugacgccuaugucuua

SEQ ID NO: 132468 - RNA, 19 nt, Homo sapiens
  misc_RNA (1)...(19): siRNA sense strand
gagagacaauguggauaua

SEQ ID NO: 132469 - RNA, 19 nt, Homo sapiens
  misc_RNA (1)...(19): siRNA sense strand
agaaagaaguguacucuca

SEQ ID NO: 132470 - RNA, 19 nt, Homo sapiens
  misc_RNA (1)...(19): siRNA sense strand
ccaauaaagugguauaagg

SEQ ID NO: 132471 - RNA, 19 nt, Homo sapiens
  misc_RNA (1)...(19): siRNA sense strand
ggagagacaauguggauau

SEQ ID NO: 132472 - RNA, 19 nt, Homo sapiens
  misc_RNA (1)...(19): siRNA sense strand
aaacaucaccuucuuggaa

SEQ ID NO: 132473 - RNA, 19 nt, Homo sapiens
  misc_RNA (1)...(19): siRNA sense strand
gaagcuguaugacgccuau

SEQ ID NO: 132474 - RNA, 19 nt, Homo sapiens
  misc_RNA (1)...(19): siRNA sense strand
gagagucaauaacacuuug

SEQ ID NO: 132475 - RNA, 19 nt, Homo sapiens
  misc_RNA (1)...(19): siRNA sense strand
gagacaauguggauauaag

SEQ ID NO: 132476 - RNA, 19 nt, Homo sapiens
  misc_RNA (1)...(19): siRNA sense strand
gcaggaggcugauugucau

SEQ ID NO: 132477 - RNA, 19 nt, Homo sapiens
  misc_RNA (1)...(19): siRNA sense strand
gacaagccguggccaaugu

SEQ ID NO: 132478 - RNA, 19 nt, Homo sapiens
  misc_RNA (1)...(19): siRNA sense strand
gcaaauauuacaucuugga

SEQ ID NO: 132479 - RNA, 19 nt, Homo sapiens
  misc_RNA (1)...(19): siRNA sense strand
gaaccugucagaagaacaa

SEQ ID NO: 132480 - RNA, 19 nt, Homo sapiens
  misc_RNA (1)...(19): siRNA sense strand
cgacauuguucuuugguau

SEQ ID NO: 132481 - RNA, 19 nt, Homo sapiens
  misc_RNA (1)...(19): siRNA sense strand
guccacagcauacauuaua

SEQ ID NO: 132482 - RNA, 19 nt, Homo sapiens
  misc_RNA (1)...(19): siRNA sense strand
gauuauggccuuccuuuca

SEQ ID NO: 132483 - RNA, 19 nt, Homo sapiens
  misc_RNA (1)...(19): siRNA sense strand
ugaagguuauucucauuga

SEQ ID NO: 132484 - RNA, 19 nt, Homo sapiens
  misc_RNA (1)...(19): siRNA sense strand
gaagaaccugucagaagaa

SEQ ID NO: 132485 - RNA, 19 nt, Homo sapiens
  misc_RNA (1)...(19): siRNA sense strand
gcuuuggccuguugaagaa

SEQ ID NO: 132486 - RNA, 19 nt, Homo sapiens
  misc_RNA (1)...(19): siRNA sense strand
gaacaaaucgcggucuaca

SEQ ID NO: 132487 - RNA, 19 nt, Homo sapiens
  misc_RNA (1)...(19): siRNA sense strand
uaaggacuguaacgagauu

SEQ ID NO: 132488 - RNA, 19 nt, Homo sapiens
  misc_RNA (1)...(19): siRNA sense strand
ggagucuaccaauguguua

SEQ ID NO: 132489 - RNA, 19 nt, Homo sapiens
  misc_RNA (1)...(19): siRNA sense strand
gaagaaagaaguguacucu

SEQ ID NO: 132490 - RNA, 19 nt, Homo sapiens
  misc_RNA (1)...(19): siRNA sense strand
ggagagucaauaacacuuu

SEQ ID NO: 132491 - RNA, 19 nt, Homo sapiens
  misc_RNA (1)...(19): siRNA sense strand
cuaccaauguguuauaaag

SEQ ID NO: 132492 - RNA, 19 nt, Homo sapiens
  misc_RNA (1)...(19): siRNA sense strand
cuacgaugcuggagaguca

SEQ ID NO: 132493 - RNA, 19 nt, Homo sapiens
  misc_RNA (1)...(19): siRNA sense strand
uaugaugaauccaaacgaa

SEQ ID NO: 132494 - RNA, 19 nt, Homo sapiens
  misc_RNA (1)...(19): siRNA sense strand
caccaaggauaauacaaau

SEQ ID NO: 132495 - RNA, 19 nt, Homo sapiens
  misc_RNA (1)...(19): siRNA sense strand
ggaaacccaugucucuuuu

SEQ ID NO: 132496 - RNA, 19 nt, Homo sapiens
  misc_RNA (1)...(19): siRNA sense strand
caauaaagugguauaagga

SEQ ID NO: 132497 - RNA, 19 nt, Homo sapiens
  misc_RNA (1)...(19): siRNA sense strand
caauaacacuuugguggau

SEQ ID NO: 132498 - RNA, 19 nt, Homo sapiens
  misc_RNA (1)...(19): siRNA sense strand
guaacagacaccaaggaua

SEQ ID NO: 132499 - RNA, 19 nt, Homo sapiens
  misc_RNA (1)...(19): siRNA sense strand
ucagaugaguacaagcaaa

SEQ ID NO: 132500 - RNA, 19 nt, Homo sapiens
  misc_RNA (1)...(19): siRNA sense strand
ggaggcugauugucauugu

SEQ ID NO: 132501 - RNA, 19 nt, Homo sapiens
  misc_RNA (1)...(19): siRNA sense strand
gaucgacauuguucuuugg

SEQ ID NO: 132502 - RNA, 19 nt, Homo sapiens
  misc_RNA (1)...(19): siRNA sense strand
ggacgagacuuggauuuug

SEQ ID NO: 132503 - RNA, 19 nt, Homo sapiens
  misc_RNA (1)...(19): siRNA sense strand
caauguggauauaaguugu

SEQ ID NO: 132504 - RNA, 19 nt, Homo sapiens
  misc_RNA (1)...(19): siRNA sense strand
ugucuguuguguacauaua

SEQ ID NO: 132505 - RNA, 19 nt, Homo sapiens
  misc_RNA (1)...(19): siRNA sense strand
caguaaacaucaccuucuu

SEQ ID NO: 132506 - RNA, 19 nt, Homo sapiens
  misc_RNA (1)...(19): siRNA sense strand
gaauacauguaaaccuaac

SEQ ID NO: 132507 - RNA, 19 nt, Homo sapiens
  misc_RNA (1)...(19): siRNA sense strand
cuacgcgugucaagccaua

SEQ ID NO: 132508 - RNA, 19 nt, Homo sapiens
  misc_RNA (1)...(19): siRNA sense strand
ucaagaagaaagaagugua

SEQ ID NO: 132509 - RNA, 19 nt, Homo sapiens
  misc_RNA (1)...(19): siRNA sense strand
gagcagucacaguguauga

SEQ ID NO: 132510 - RNA, 19 nt, Homo sapiens
  misc_RNA (1)...(19): siRNA sense strand
ggaagacagugagauacca

SEQ ID NO: 132511 - RNA, 19 nt, Homo sapiens
  misc_RNA (1)...(19): siRNA sense strand
gaugauagucucacauguc

SEQ ID NO: 132512 - RNA, 19 nt, Homo sapiens
  misc_RNA (1)...(19): siRNA sense strand
cagaaggugucggccguuu

SEQ ID NO: 132513 - RNA, 19 nt, Homo sapiens
  misc_RNA (1)...(19): siRNA sense strand
cagagucaauucaguacau

SEQ ID NO: 132514 - RNA, 19 nt, Homo sapiens
  misc_RNA (1)...(19): siRNA sense strand
aagaacaaaucgcggucua

SEQ ID NO: 132515 - RNA, 19 nt, Homo sapiens
  misc_RNA (1)...(19): siRNA sense strand
ccacagcauacauuauauu

SEQ ID NO: 132516 - RNA, 19 nt, Homo sapiens
  misc_RNA (1)...(19): siRNA sense strand
uacauucccucccauaaca

SEQ ID NO: 132517 - RNA, 19 nt, Homo sapiens
  misc_RNA (1)...(19): siRNA sense strand
ccaaggauaauacaaaucu

SEQ ID NO: 132518 - RNA, 19 nt, Homo sapiens
  misc_RNA (1)...(19): siRNA sense strand
ggaagugucccuaaaauca

SEQ ID NO: 132519 - RNA, 19 nt, Homo sapiens
  misc_RNA (1)...(19): siRNA sense strand
uggaggaagugucccuaaa

SEQ ID NO: 132520 - RNA, 19 nt, Homo sapiens
  misc_RNA (1)...(19): siRNA sense strand
gggaagcaguacgagguuu

SEQ ID NO: 132521 - RNA, 19 nt, Homo sapiens
  misc_RNA (1)...(19): siRNA sense strand
gaugaguacaagcaaauau

SEQ ID NO: 132522 - RNA, 19 nt, Homo sapiens
  misc_RNA (1)...(19): siRNA sense strand
ggucuacagugcccugauc

SEQ ID NO: 132523 - RNA, 19 nt, Homo sapiens
  misc_RNA (1)...(19): siRNA sense strand
ggacaagccguggccaaug

SEQ ID NO: 132524 - RNA, 19 nt, Homo sapiens
  misc_RNA (1)...(19): siRNA sense strand
acaccaaggauaauacaaa

SEQ ID NO: 132525 - RNA, 19 nt, Homo sapiens
  misc_RNA (1)...(19): siRNA sense strand
gauagucucacaugucauc

SEQ ID NO: 132526 - RNA, 19 nt, Homo sapiens
  misc_RNA (1)...(19): siRNA sense strand
ggggagcgguucacuguuu

SEQ ID NO: 132527 - RNA, 19 nt, Homo sapiens
  misc_RNA (1)...(19): siRNA sense strand
ucauugagcuggagaaaau

SEQ ID NO: 132528 - RNA, 19 nt, Homo sapiens
  misc_RNA (1)...(19): siRNA sense strand
uggaugcccugguguugaa

SEQ ID NO: 132529 - RNA, 19 nt, Homo sapiens
  misc_RNA (1)...(19): siRNA sense strand
ggacuguaacgagauuaaa

SEQ ID NO: 132530 - RNA, 19 nt, Homo sapiens
  misc_RNA (1)...(19): siRNA sense strand
gggaugaagguuauucuca

SEQ ID NO: 132531 - RNA, 19 nt, Homo sapiens
  misc_RNA (1)...(19): siRNA sense strand
ugacgccuaugucuuauac

SEQ ID NO: 132532 - RNA, 19 nt, Homo sapiens
  misc_RNA (1)...(19): siRNA sense strand
uggaaacccaugucucuuu

SEQ ID NO: 132533 - RNA, 19 nt, Homo sapiens
  misc_RNA (1)...(19): siRNA sense strand
gaugcuggagagucaauaa

SEQ ID NO: 132534 - RNA, 19 nt, Homo sapiens
  misc_RNA (1)...(19): siRNA sense strand
ccaaauuuaucagaugagu

SEQ ID NO: 132535 - RNA, 19 nt, Homo sapiens
  misc_RNA (1)...(19): siRNA sense strand
agaacuaggcucaagaaga

SEQ ID NO: 132536 - RNA, 19 nt, Homo sapiens
  misc_RNA (1)...(19): siRNA sense strand
gacaauguggauauaaguu

SEQ ID NO: 132537 - RNA, 19 nt, Homo sapiens
  misc_RNA (1)...(19): siRNA sense strand
ccagaggcaugccguggau

SEQ ID NO: 132538 - RNA, 19 nt, Homo sapiens
  misc_RNA (1)...(19): siRNA sense strand
uagaugggaagcuguauga

SEQ ID NO: 132539 - RNA, 19 nt, Homo sapiens
  misc_RNA (1)...(19): siRNA sense strand
gguggaugauuacuaugau

SEQ ID NO: 132540 - RNA, 19 nt, Homo sapiens
  misc_RNA (1)...(19): siRNA sense strand
ucacaugucaucugcacuu

SEQ ID NO: 132541 - RNA, 19 nt, Homo sapiens
  misc_RNA (1)...(19): siRNA sense strand
ccagaacuaggcucaagaa

SEQ ID NO: 132542 - RNA, 19 nt, Homo sapiens
  misc_RNA (1)...(19): siRNA sense strand
ggaacauaauuuguacaca

SEQ ID NO: 132543 - RNA, 19 nt, Homo sapiens
  misc_RNA (1)...(19): siRNA sense strand
gaggaagugucccuaaaau

SEQ ID NO: 132544 - RNA, 19 nt, Homo sapiens
  misc_RNA (1)...(19): siRNA sense strand
uuacagaaagagcuggaua

SEQ ID NO: 132545 - RNA, 19 nt, Homo sapiens
  misc_RNA (1)...(19): siRNA sense strand
ucaggagucuaccaaugug

SEQ ID NO: 132546 - RNA, 19 nt, Homo sapiens
  misc_RNA (1)...(19): siRNA sense strand
gcugggcuuuggccuguug

SEQ ID NO: 132547 - RNA, 19 nt, Homo sapiens
  misc_RNA (1)...(19): siRNA sense strand
gaaaaucgaggacuacaca

SEQ ID NO: 132548 - RNA, 19 nt, Homo sapiens
  misc_RNA (1)...(19): siRNA sense strand
acaaaucgcggucuacagu

SEQ ID NO: 132549 - RNA, 19 nt, Homo sapiens
  misc_RNA (1)...(19): siRNA sense strand
uuugguggaugauuacuau

SEQ ID NO: 132550 - RNA, 19 nt, Homo sapiens
  misc_RNA (1)...(19): siRNA sense strand
cacaguguaugaagaccaa

SEQ ID NO: 132551 - RNA, 19 nt, Homo sapiens
  misc_RNA (1)...(19): siRNA sense strand
ccgaaucgcugggcuuugg

SEQ ID NO: 132552 - RNA, 19 nt, Homo sapiens
  misc_RNA (1)...(19): siRNA sense strand
gaugaauccaaacgaauca

SEQ ID NO: 132553 - RNA, 19 nt, Homo sapiens
  misc_RNA (1)...(19): siRNA sense strand
gguggaaacccaugucucu

SEQ ID NO: 132554 - RNA, 19 nt, Homo sapiens
  misc_RNA (1)...(19): siRNA sense strand
caagaagaaagaaguguac

SEQ ID NO: 132555 - RNA, 19 nt, Homo sapiens
  misc_RNA (1)...(19): siRNA sense strand
gcccagaacuaggcucaag

SEQ ID NO: 132556 - RNA, 19 nt, Homo sapiens
  misc_RNA (1)...(19): siRNA sense strand
caggacgggaugaagguua

SEQ ID NO: 132557 - RNA, 19 nt, Homo sapiens
  misc_RNA (1)...(19): siRNA sense strand
guucuuugguaucgaagug

SEQ ID NO: 132558 - RNA, 19 nt, Homo sapiens
  misc_RNA (1)...(19): siRNA sense strand
acagacaccaaggauaaua

SEQ ID NO: 132559 - RNA, 19 nt, Homo sapiens
  misc_RNA (1)...(19): siRNA sense strand
ucaauucaguacaucaaac

SEQ ID NO: 132560 - RNA, 19 nt, Homo sapiens
  misc_RNA (1)...(19): siRNA sense strand
agaucgacauuguucuuug

SEQ ID NO: 132561 - RNA, 19 nt, Homo sapiens
  misc_RNA (1)...(19): siRNA sense strand
ggaugauuacuaugaugaa

SEQ ID NO: 132562 - RNA, 19 nt, Homo sapiens
  misc_RNA (1)...(19): siRNA sense strand
gagaagagaugaaacauua

SEQ ID NO: 132563 - RNA, 19 nt, Homo sapiens
  misc_RNA (1)...(19): siRNA sense strand
gaccaaagcuuaaccaugu

SEQ ID NO: 132564 - RNA, 19 nt, Homo sapiens
  misc_RNA (1)...(19): siRNA sense strand
gcacaucauuguauaagaa

SEQ ID NO: 132565 - RNA, 19 nt, Homo sapiens
  misc_RNA (1)...(19): siRNA sense strand
gaauuacccuugacccuuu

SEQ ID NO: 132566 - RNA, 19 nt, Homo sapiens
  misc_RNA (1)...(19): siRNA sense strand
gcaaauggcaugcuucaaa

SEQ ID NO: 132567 - RNA, 19 nt, Homo sapiens
  misc_RNA (1)...(19): siRNA sense strand
gaagaucgcaguaauauag

SEQ ID NO: 132568 - RNA, 19 nt, Homo sapiens
  misc_RNA (1)...(19): siRNA sense strand
gaaauccacucacugauag

SEQ ID NO: 132569 - RNA, 19 nt, Homo sapiens
  misc_RNA (1)...(19): siRNA sense strand
gaugaaacauuaacagaug

SEQ ID NO: 132570 - RNA, 19 nt, Homo sapiens
  misc_RNA (1)...(19): siRNA sense strand
gaaagacaaguaacuagua

SEQ ID NO: 132571 - RNA, 19 nt, Homo sapiens
  misc_RNA (1)...(19): siRNA sense strand
gaaugaagaggauguaauu

SEQ ID NO: 132572 - RNA, 19 nt, Homo sapiens
  misc_RNA (1)...(19): siRNA sense strand
ggaaugaucauagcuguuu

SEQ ID NO: 132573 - RNA, 19 nt, Homo sapiens
  misc_RNA (1)...(19): siRNA sense strand
gaggagcuguuguugauga

SEQ ID NO: 132574 - RNA, 19 nt, Homo sapiens
  misc_RNA (1)...(19): siRNA sense strand
gcaguagugugccuaguga

SEQ ID NO: 132575 - RNA, 19 nt, Homo sapiens
  misc_RNA (1)...(19): siRNA sense strand
gagaaaagccgaagacuaa

SEQ ID NO: 132576 - RNA, 19 nt, Homo sapiens
  misc_RNA (1)...(19): siRNA sense strand
cuaaugaggucagguauga

SEQ ID NO: 132577 - RNA, 19 nt, Homo sapiens
  misc_RNA (1)...(19): siRNA sense strand
gaagaacgccgaguuugaa

SEQ ID NO: 132578 - RNA, 19 nt, Homo sapiens
  misc_RNA (1)...(19): siRNA sense strand
gaauugcuuugcaugauug

SEQ ID NO: 132579 - RNA, 19 nt, Homo sapiens
  misc_RNA (1)...(19): siRNA sense strand
caacagcacaucauuguau

SEQ ID NO: 132580 - RNA, 19 nt, Homo sapiens
  misc_RNA (1)...(19): siRNA sense strand
ggucagguaugaacuugaa

SEQ ID NO: 132581 - RNA, 19 nt, Homo sapiens
  misc_RNA (1)...(19): siRNA sense strand
gaugaaauccacucacuga

SEQ ID NO: 132582 - RNA, 19 nt, Homo sapiens
  misc_RNA (1)...(19): siRNA sense strand
gaaggcaaauggcaugcuu

SEQ ID NO: 132583 - RNA, 19 nt, Homo sapiens
  misc_RNA (1)...(19): siRNA sense strand
gaaccuucuuuacuuaaug

SEQ ID NO: 132584 - RNA, 19 nt, Homo sapiens
  misc_RNA (1)...(19): siRNA sense strand
gaagagaaagaaaugagaa

SEQ ID NO: 132585 - RNA, 19 nt, Homo sapiens
  misc_RNA (1)...(19): siRNA sense strand
ugaaauccacucacugaua

SEQ ID NO: 132586 - RNA, 19 nt, Homo sapiens
  misc_RNA (1)...(19): siRNA sense strand
gagcugaacccaaggaguu

SEQ ID NO: 132587 - RNA, 19 nt, Homo sapiens
  misc_RNA (1)...(19): siRNA sense strand
gagaauugcuuugcaugau

SEQ ID NO: 132588 - RNA, 19 nt, Homo sapiens
  misc_RNA (1)...(19): siRNA sense strand
gcucugcuuugcugaauga

SEQ ID NO: 132589 - RNA, 19 nt, Homo sapiens
  misc_RNA (1)...(19): siRNA sense strand
ugacacaggaucuuacuuu

SEQ ID NO: 132590 - RNA, 19 nt, Homo sapiens
  misc_RNA (1)...(19): siRNA sense strand
aagcagacauggcugauau

SEQ ID NO: 132591 - RNA, 19 nt, Homo sapiens
  misc_RNA (1)...(19): siRNA sense strand
ggugaaagcaaucuaaaug

SEQ ID NO: 132592 - RNA, 19 nt, Homo sapiens
  misc_RNA (1)...(19): siRNA sense strand
ggagaaacauuuuggguau

SEQ ID NO: 132593 - RNA, 19 nt, Homo sapiens
  misc_RNA (1)...(19): siRNA sense strand
gugcauuuccuucaucaua

SEQ ID NO: 132594 - RNA, 19 nt, Homo sapiens
  misc_RNA (1)...(19): siRNA sense strand
ccgauaaaucucuuucuua

SEQ ID NO: 132595 - RNA, 19 nt, Homo sapiens
  misc_RNA (1)...(19): siRNA sense strand
ggaagaucgcaguaauaua

SEQ ID NO: 132596 - RNA, 19 nt, Homo sapiens
  misc_RNA (1)...(19): siRNA sense strand
gagaugaaacauuaacaga

SEQ ID NO: 132597 - RNA, 19 nt, Homo sapiens
  misc_RNA (1)...(19): siRNA sense strand
uaaagaagaacgccgaguu

SEQ ID NO: 132598 - RNA, 19 nt, Homo sapiens
  misc_RNA (1)...(19): siRNA sense strand
gccgauaaaucucuuucuu

SEQ ID NO: 132599 - RNA, 19 nt, Homo sapiens
  misc_RNA (1)...(19): siRNA sense strand
aagcauugguggaaagaaa

SEQ ID NO: 132600 - RNA, 19 nt, Homo sapiens
  misc_RNA (1)...(19): siRNA sense strand
gagcuguuguugaugaaau

SEQ ID NO: 132601 - RNA, 19 nt, Homo sapiens
  misc_RNA (1)...(19): siRNA sense strand
aaagaaugccgaccugaaa

SEQ ID NO: 132602 - RNA, 19 nt, Homo sapiens
  misc_RNA (1)...(19): siRNA sense strand
gaaguggaaggccgauaaa

SEQ ID NO: 132603 - RNA, 19 nt, Homo sapiens
  misc_RNA (1)...(19): siRNA sense strand
uuugaaaucucacagaguu

SEQ ID NO: 132604 - RNA, 19 nt, Homo sapiens
  misc_RNA (1)...(19): siRNA sense strand
uggaggagcuguuguugau

SEQ ID NO: 132605 - RNA, 19 nt, Homo sapiens
  misc_RNA (1)...(19): siRNA sense strand
agaauugcuuugcaugauu

SEQ ID NO: 132606 - RNA, 19 nt, Homo sapiens
  misc_RNA (1)...(19): siRNA sense strand
gaaggccgauaaaucucuu

SEQ ID NO: 132607 - RNA, 19 nt, Homo sapiens
  misc_RNA (1)...(19): siRNA sense strand
cguguucacuugcacauga

SEQ ID NO: 132608 - RNA, 19 nt, Homo sapiens
  misc_RNA (1)...(19): siRNA sense strand
gaguugacuugguucuauu

SEQ ID NO: 132609 - RNA, 19 nt, Homo sapiens
  misc_RNA (1)...(19): siRNA sense strand
aaagaagaacgccgaguuu

SEQ ID NO: 132610 - RNA, 19 nt, Homo sapiens
  misc_RNA (1)...(19): siRNA sense strand
gcauuuccuucaucauaau

SEQ ID NO: 132611 - RNA, 19 nt, Homo sapiens
  misc_RNA (1)...(19): siRNA sense strand
gaacgccgaguuugaagau

SEQ ID NO: 132612 - RNA, 19 nt, Homo sapiens
  misc_RNA (1)...(19): siRNA sense strand
uuauagaguugacuugguu

SEQ ID NO: 132613 - RNA, 19 nt, Homo sapiens
  misc_RNA (1)...(19): siRNA sense strand
uguaagcacugcagaaucu

SEQ ID NO: 132614 - RNA, 19 nt, Homo sapiens
  misc_RNA (1)...(19): siRNA sense strand
caaauggcaugcuucaaaa

SEQ ID NO: 132615 - RNA, 19 nt, Homo sapiens
  misc_RNA (1)...(19): siRNA sense strand
ugaaugacacaggaucuua

SEQ ID NO: 132616 - RNA, 19 nt, Homo sapiens
  misc_RNA (1)...(19): siRNA sense strand
gaggucagguaugaacuug

SEQ ID NO: 132617 - RNA, 19 nt, Homo sapiens
  misc_RNA (1)...(19): siRNA sense strand
uaauauaguuccgguucuu

SEQ ID NO: 132618 - RNA, 19 nt, Homo sapiens
  misc_RNA (1)...(19): siRNA sense strand
ugaaguggaaggccgauaa

SEQ ID NO: 132619 - RNA, 19 nt, Homo sapiens
  misc_RNA (1)...(19): siRNA sense strand
cacaugagauugaaacaac

SEQ ID NO: 132620 - RNA, 19 nt, Homo sapiens
  misc_RNA (1)...(19): siRNA sense strand
ccaguugaguugaaugaca

SEQ ID NO: 132621 - RNA, 19 nt, Homo sapiens
  misc_RNA (1)...(19): siRNA sense strand
ccggaagucuugccuguuc

SEQ ID NO: 132622 - RNA, 19 nt, Homo sapiens
  misc_RNA (1)...(19): siRNA sense strand
caagccagguagagacgaa

SEQ ID NO: 132623 - RNA, 19 nt, Homo sapiens
  misc_RNA (1)...(19): siRNA sense strand
gccgaagacuaaucauugu

SEQ ID NO: 132624 - RNA, 19 nt, Homo sapiens
  misc_RNA (1)...(19): siRNA sense strand
gcacaugagauugaaacaa

SEQ ID NO: 132625 - RNA, 19 nt, Homo sapiens
  misc_RNA (1)...(19): siRNA sense strand
caagaggaaugaucauagc

SEQ ID NO: 132626 - RNA, 19 nt, Homo sapiens
  misc_RNA (1)...(19): siRNA sense strand
ugcauuuccuucaucauaa

SEQ ID NO: 132627 - RNA, 19 nt, Homo sapiens
  misc_RNA (1)...(19): siRNA sense strand
aacagcacaucauuguaua

SEQ ID NO: 132628 - RNA, 19 nt, Homo sapiens
  misc_RNA (1)...(19): siRNA sense strand
gaagagaugaaacauuaac

SEQ ID NO: 132629 - RNA, 19 nt, Homo sapiens
  misc_RNA (1)...(19): siRNA sense strand
agaagaacgccgaguuuga

SEQ ID NO: 132630 - RNA, 19 nt, Homo sapiens
  misc_RNA (1)...(19): siRNA sense strand
agaguugacuugguucuau

SEQ ID NO: 132631 - RNA, 19 nt, Homo sapiens
  misc_RNA (1)...(19): siRNA sense strand
gacugugugugucauuuau

SEQ ID NO: 132632 - RNA, 19 nt, Homo sapiens
  misc_RNA (1)...(19): siRNA sense strand
caccaaaaccuucaauaua

SEQ ID NO: 132633 - RNA, 19 nt, Homo sapiens
  misc_RNA (1)...(19): siRNA sense strand
guggaagaucgcaguaaua

SEQ ID NO: 132634 - RNA, 19 nt, Homo sapiens
  misc_RNA (1)...(19): siRNA sense strand
ugcagaaucuuguacuuca

SEQ ID NO: 132635 - RNA, 19 nt, Homo sapiens
  misc_RNA (1)...(19): siRNA sense strand
uuacugacuucacauucuu

SEQ ID NO: 132636 - RNA, 19 nt, Homo sapiens
  misc_RNA (1)...(19): siRNA sense strand
gagaggagcacaccuuugc

SEQ ID NO: 132637 - RNA, 19 nt, Homo sapiens
  misc_RNA (1)...(19): siRNA sense strand
cgagaagagaugaaacauu

SEQ ID NO: 132638 - RNA, 19 nt, Homo sapiens
  misc_RNA (1)...(19): siRNA sense strand
ggucaacagcacaucauug

SEQ ID NO: 132639 - RNA, 19 nt, Homo sapiens
  misc_RNA (1)...(19): siRNA sense strand
agacuaaucauuguccuaa

SEQ ID NO: 132640 - RNA, 19 nt, Homo sapiens
  misc_RNA (1)...(19): siRNA sense strand
cugcuuugcugaaugaaga

SEQ ID NO: 132641 - RNA, 19 nt, Homo sapiens
  misc_RNA (1)...(19): siRNA sense strand
gcucaacugcucugcuuug

SEQ ID NO: 132642 - RNA, 19 nt, Homo sapiens
  misc_RNA (1)...(19): siRNA sense strand
uaaccauguugcaguggaa

SEQ ID NO: 132643 - RNA, 19 nt, Homo sapiens
  misc_RNA (1)...(19): siRNA sense strand
gggaaccuuucuaucugaa

SEQ ID NO: 132644 - RNA, 19 nt, Homo sapiens
  misc_RNA (1)...(19): siRNA sense strand
uguagagaauuacccuuga

SEQ ID NO: 132645 - RNA, 19 nt, Homo sapiens
  misc_RNA (1)...(19): siRNA sense strand
ccauguugcaguggaauua

SEQ ID NO: 132646 - RNA, 19 nt, Homo sapiens
  misc_RNA (1)...(19): siRNA sense strand
guggaaggccgauaaaucu

SEQ ID NO: 132647 - RNA, 19 nt, Homo sapiens
  misc_RNA (1)...(19): siRNA sense strand
gaauuuacaccuguuacug

SEQ ID NO: 132648 - RNA, 19 nt, Homo sapiens
  misc_RNA (1)...(19): siRNA sense strand
gaggauguaauuuauugga

SEQ ID NO: 132649 - RNA, 19 nt, Homo sapiens
  misc_RNA (1)...(19): siRNA sense strand
cgagaauugcuuugcauga

SEQ ID NO: 132650 - RNA, 19 nt, Homo sapiens
  misc_RNA (1)...(19): siRNA sense strand
guuacugacuucacauucu

SEQ ID NO: 132651 - RNA, 19 nt, Homo sapiens
  misc_RNA (1)...(19): siRNA sense strand
caugaagcauugguggaaa

SEQ ID NO: 132652 - RNA, 19 nt, Homo sapiens
  misc_RNA (1)...(19): siRNA sense strand
caccuuugcuguggagauu

SEQ ID NO: 132653 - RNA, 19 nt, Homo sapiens
  misc_RNA (1)...(19): siRNA sense strand
ggagaggagcacaccuuug

SEQ ID NO: 132654 - RNA, 19 nt, Homo sapiens
  misc_RNA (1)...(19): siRNA sense strand
acccaacgauaaagaagaa

SEQ ID NO: 132655 - RNA, 19 nt, Homo sapiens
  misc_RNA (1)...(19): siRNA sense strand
uuacaccuguuacugacuu

SEQ ID NO: 132656 - RNA, 19 nt, Homo sapiens
  misc_RNA (1)...(19): siRNA sense strand
cuaaucauuguccuaagua

SEQ ID NO: 132657 - RNA, 19 nt, Homo sapiens
  misc_RNA (1)...(19): siRNA sense strand
gagaaacauuuuggguaua

SEQ ID NO: 132658 - RNA, 19 nt, Homo sapiens
  misc_RNA (1)...(19): siRNA sense strand
guaauauaguuccgguucu

SEQ ID NO: 132659 - RNA, 19 nt, Homo sapiens
  misc_RNA (1)...(19): siRNA sense strand
gugaaagcaaucuaaaugu

SEQ ID NO: 132660 - RNA, 19 nt, Homo sapiens
  misc_RNA (1)...(19): siRNA sense strand
cacuaaagcuuuugaaauc

SEQ ID NO: 132661 - RNA, 19 nt, Homo sapiens
  misc_RNA (1)...(19): siRNA sense strand
cacaagaggaaugaucaua

SEQ ID NO: 132662 - RNA, 19 nt, Homo sapiens
  misc_RNA (1)...(19): siRNA sense strand
gcaccuucgucuucagcua

SEQ ID NO: 132663 - RNA, 19 nt, Homo sapiens
  misc_RNA (1)...(19): siRNA sense strand
ggcccuaccugagcuacua

SEQ ID NO: 132664 - RNA, 19 nt, Homo sapiens
  misc_RNA (1)...(19): siRNA sense strand
gcucuucgcgcucaucuuc

SEQ ID NO: 132665 - RNA, 19 nt, Homo sapiens
  misc_RNA (1)...(19): siRNA sense strand
gcaaaggcuuccgcacgau

SEQ ID NO: 132666 - RNA, 19 nt, Homo sapiens
  misc_RNA (1)...(19): siRNA sense strand
ucucgcaccuggucuccua

SEQ ID NO: 132667 - RNA, 19 nt, Homo sapiens
  misc_RNA (1)...(19): siRNA sense strand
gcaaggcggugcacuuccu

SEQ ID NO: 132668 - RNA, 19 nt, Homo sapiens
  misc_RNA (1)...(19): siRNA sense strand
gcggugcacuuccucaucu

SEQ ID NO: 132669 - RNA, 19 nt, Homo sapiens
  misc_RNA (1)...(19): siRNA sense strand
ccagcgaccuguugcacau

SEQ ID NO: 132670 - RNA, 19 nt, Homo sapiens
  misc_RNA (1)...(19): siRNA sense strand
caucugcaccuucgucuuc

SEQ ID NO: 132671 - RNA, 19 nt, Homo sapiens
  misc_RNA (1)...(19): siRNA sense strand
accaaccuguucauccuua

SEQ ID NO: 132672 - RNA, 19 nt, Homo sapiens
  misc_RNA (1)...(19): siRNA sense strand
ccaaccuguucauccuuaa

SEQ ID NO: 132673 - RNA, 19 nt, Homo sapiens
  misc_RNA (1)...(19): siRNA sense strand
caaggugacacgcaugauc

SEQ ID NO: 132674 - RNA, 19 nt, Homo sapiens
  misc_RNA (1)...(19): siRNA sense strand
uccaagcacuuccgcaaag

SEQ ID NO: 132675 - RNA, 19 nt, Homo sapiens
  misc_RNA (1)...(19): siRNA sense strand
gcacuaccaaccuguucau

SEQ ID NO: 132676 - RNA, 19 nt, Homo sapiens
  misc_RNA (1)...(19): siRNA sense strand
ccauggacaucugcaccuu

SEQ ID NO: 132677 - RNA, 19 nt, Homo sapiens
  misc_RNA (1)...(19): siRNA sense strand
cuaccaaccuguucauccu

SEQ ID NO: 132678 - RNA, 19 nt, Homo sapiens
  misc_RNA (1)...(19): siRNA sense strand
acagcauccugacgguuga

SEQ ID NO: 132679 - RNA, 19 nt, Homo sapiens
  misc_RNA (1)...(19): siRNA sense strand
uuuacgcgcuggucuccaa

SEQ ID NO: 132680 - RNA, 19 nt, Homo sapiens
  misc_RNA (1)...(19): siRNA sense strand
gcaagacaguugaauuaua

SEQ ID NO: 132681 - RNA, 19 nt, Homo sapiens
  misc_RNA (1)...(19): siRNA sense strand
gggaggaaaugaaauagua

SEQ ID NO: 132682 - RNA, 19 nt, Homo sapiens
  misc_RNA (1)...(19): siRNA sense strand
gaacaaauauucggugcuu

SEQ ID NO: 132683 - RNA, 19 nt, Homo sapiens
  misc_RNA (1)...(19): siRNA sense strand
caaaggaaauggaggugua

SEQ ID NO: 132684 - RNA, 19 nt, Homo sapiens
  misc_RNA (1)...(19): siRNA sense strand
acaggaaacuacaucauua

SEQ ID NO: 132685 - RNA, 19 nt, Homo sapiens
  misc_RNA (1)...(19): siRNA sense strand
gggcaagacaguugaauua

SEQ ID NO: 132686 - RNA, 19 nt, Homo sapiens
  misc_RNA (1)...(19): siRNA sense strand
ggaacucgcuacaaaggaa

SEQ ID NO: 132687 - RNA, 19 nt, Homo sapiens
  misc_RNA (1)...(19): siRNA sense strand
caagacaguugaauuauac

SEQ ID NO: 132688 - RNA, 19 nt, Homo sapiens
  misc_RNA (1)...(19): siRNA sense strand
guauauggcugggauuuga

SEQ ID NO: 132689 - RNA, 19 nt, Homo sapiens
  misc_RNA (1)...(19): siRNA sense strand
aacaggaaguuucagauua

SEQ ID NO: 132690 - RNA, 19 nt, Homo sapiens
  misc_RNA (1)...(19): siRNA sense strand
acuaggaacugcauauauu

SEQ ID NO: 132691 - RNA, 19 nt, Homo sapiens
  misc_RNA (1)...(19): siRNA sense strand
ggacuaggaacugcauaua

SEQ ID NO: 132692 - RNA, 19 nt, Homo sapiens
  misc_RNA (1)...(19): siRNA sense strand
ggaacugcauauauucaug

SEQ ID NO: 132693 - RNA, 19 nt, Homo sapiens
  misc_RNA (1)...(19): siRNA sense strand
acaggaaguuucagauuau

SEQ ID NO: 132694 - RNA, 19 nt, Homo sapiens
  misc_RNA (1)...(19): siRNA sense strand
agaguggaaucaacuauga

SEQ ID NO: 132695 - RNA, 19 nt, Homo sapiens
  misc_RNA (1)...(19): siRNA sense strand
uaacaggaaguuucagauu

SEQ ID NO: 132696 - RNA, 19 nt, Homo sapiens
  misc_RNA (1)...(19): siRNA sense strand
gaaauggagguguauaugg

SEQ ID NO: 132697 - RNA, 19 nt, Homo sapiens
  misc_RNA (1)...(19): siRNA sense strand
ccaggagcaucugauuuaa

SEQ ID NO: 132698 - RNA, 19 nt, Homo sapiens
  misc_RNA (1)...(19): siRNA sense strand
ggaaauggagguguauaug

SEQ ID NO: 132699 - RNA, 19 nt, Homo sapiens
  misc_RNA (1)...(19): siRNA sense strand
gauggaagcccagauggaa

SEQ ID NO: 132700 - RNA, 19 nt, Homo sapiens
  misc_RNA (1)...(19): siRNA sense strand
caggaaguuucagauuaua

SEQ ID NO: 132701 - RNA, 19 nt, Homo sapiens
  misc_RNA (1)...(19): siRNA sense strand
gauauugucucuggaacuc

SEQ ID NO: 132702 - RNA, 19 nt, Homo sapiens
  misc_RNA (1)...(19): siRNA sense strand
guugggaggaaaugaaaua

SEQ ID NO: 132703 - RNA, 19 nt, Homo sapiens
  misc_RNA (1)...(19): siRNA sense strand
gaccaggagcaucugauuu

SEQ ID NO: 132704 - RNA, 19 nt, Homo sapiens
  misc_RNA (1)...(19): siRNA sense strand
accaggagcaucugauuua

SEQ ID NO: 132705 - RNA, 19 nt, Homo sapiens
  misc_RNA (1)...(19): siRNA sense strand
ucuaagaccacgagagaaa

SEQ ID NO: 132706 - RNA, 19 nt, Homo sapiens
  misc_RNA (1)...(19): siRNA sense strand
ugaaacaugccacaggaaa

SEQ ID NO: 132707 - RNA, 19 nt, Homo sapiens
  misc_RNA (1)...(19): siRNA sense strand
gcgagaaccugccgcucau

SEQ ID NO: 132708 - RNA, 19 nt, Homo sapiens
  misc_RNA (1)...(19): siRNA sense strand
gcaucugauuuaacaggaa

SEQ ID NO: 132709 - RNA, 19 nt, Homo sapiens
  misc_RNA (1)...(19): siRNA sense strand
uauggaugcugaucucuca

SEQ ID NO: 132710 - RNA, 19 nt, Homo sapiens
  misc_RNA (1)...(19): siRNA sense strand
gcugaacaguuggagaaga

SEQ ID NO: 132711 - RNA, 19 nt, Homo sapiens
  misc_RNA (1)...(19): siRNA sense strand
caaguugggaggaaaugaa

SEQ ID NO: 132712 - RNA, 19 nt, Homo sapiens
  misc_RNA (1)...(19): siRNA sense strand
aggagcaucugauuuaaca

SEQ ID NO: 132713 - RNA, 19 nt, Homo sapiens
  misc_RNA (1)...(19): siRNA sense strand
gaugauggaagcccagaug

SEQ ID NO: 132714 - RNA, 19 nt, Homo sapiens
  misc_RNA (1)...(19): siRNA sense strand
ggaggaaaugaaauaguau

SEQ ID NO: 132715 - RNA, 19 nt, Homo sapiens
  misc_RNA (1)...(19): siRNA sense strand
cacaggaaacuacaucauu

SEQ ID NO: 132716 - RNA, 19 nt, Homo sapiens
  misc_RNA (1)...(19): siRNA sense strand
guccacgacagaacaaaua

SEQ ID NO: 132717 - RNA, 19 nt, Homo sapiens
  misc_RNA (1)...(19): siRNA sense strand
gagaguggaaucaacuaug

SEQ ID NO: 132718 - RNA, 19 nt, Homo sapiens
  misc_RNA (1)...(19): siRNA sense strand
gacuaggaacugcauauau

SEQ ID NO: 132719 - RNA, 19 nt, Homo sapiens
  misc_RNA (1)...(19): siRNA sense strand
gagguuccaauaucauuug

SEQ ID NO: 132720 - RNA, 19 nt, Homo sapiens
  misc_RNA (1)...(19): siRNA sense strand
gaacucgcuacaaaggaaa

SEQ ID NO: 132721 - RNA, 19 nt, Homo sapiens
  misc_RNA (1)...(19): siRNA sense strand
uggcgagguuccaauauca

SEQ ID NO: 132722 - RNA, 19 nt, Homo sapiens
  misc_RNA (1)...(19): siRNA sense strand
gaugauuguucgggcaaga

SEQ ID NO: 132723 - RNA, 19 nt, Homo sapiens
  misc_RNA (1)...(19): siRNA sense strand
ggaggguaauuuugauauu

SEQ ID NO: 132724 - RNA, 19 nt, Homo sapiens
  misc_RNA (1)...(19): siRNA sense strand
ugaaaggauuauugacucu

SEQ ID NO: 132725 - RNA, 19 nt, Homo sapiens
  misc_RNA (1)...(19): siRNA sense strand
cugaacaguuggagaagau

SEQ ID NO: 132726 - RNA, 19 nt, Homo sapiens
  misc_RNA (1)...(19): siRNA sense strand
gauuuaacaggaaguuuca

SEQ ID NO: 132727 - RNA, 19 nt, Homo sapiens
  misc_RNA (1)...(19): siRNA sense strand
gaaaggauuauugacucuu

SEQ ID NO: 132728 - RNA, 19 nt, Homo sapiens
  misc_RNA (1)...(19): siRNA sense strand
gaucuaugggucagacaga

SEQ ID NO: 132729 - RNA, 19 nt, Homo sapiens
  misc_RNA (1)...(19): siRNA sense strand
gcgagguuccaauaucauu

SEQ ID NO: 132730 - RNA, 19 nt, Homo sapiens
  misc_RNA (1)...(19): siRNA sense strand
gaggguaauuuugauauug

SEQ ID NO: 132731 - RNA, 19 nt, Homo sapiens
  misc_RNA (1)...(19): siRNA sense strand
gaaacaugccacaggaaac

SEQ ID NO: 132732 - RNA, 19 nt, Homo sapiens
  misc_RNA (1)...(19): siRNA sense strand
caggaaacuacaucauuau

SEQ ID NO: 132733 - RNA, 19 nt, Homo sapiens
  misc_RNA (1)...(19): siRNA sense strand
gaucguguuuauggugaau

SEQ ID NO: 132734 - RNA, 19 nt, Homo sapiens
  misc_RNA (1)...(19): siRNA sense strand
gaacaguuggagaagaucu

SEQ ID NO: 132735 - RNA, 19 nt, Homo sapiens
  misc_RNA (1)...(19): siRNA sense strand
ccacgacagaacaaauauu

SEQ ID NO: 132736 - RNA, 19 nt, Homo sapiens
  misc_RNA (1)...(19): siRNA sense strand
gcugggauuugaaaagaaa

SEQ ID NO: 132737 - RNA, 19 nt, Homo sapiens
  misc_RNA (1)...(19): siRNA sense strand
cacgacagaacaaauauuc

SEQ ID NO: 132738 - RNA, 19 nt, Homo sapiens
  misc_RNA (1)...(19): siRNA sense strand
cuucuaagaccacgagaga

SEQ ID NO: 132739 - RNA, 19 nt, Homo sapiens
  misc_RNA (1)...(19): siRNA sense strand
gaggaaaugaaauaguauc

SEQ ID NO: 132740 - RNA, 19 nt, Homo sapiens
  misc_RNA (1)...(19): siRNA sense strand
ggaucguguuuauggugaa

SEQ ID NO: 132741 - RNA, 19 nt, Homo sapiens
  misc_RNA (1)...(19): siRNA sense strand
cgagguuccaauaucauuu

SEQ ID NO: 132742 - RNA, 19 nt, Homo sapiens
  misc_RNA (1)...(19): siRNA sense strand
ggcaagacaguugaauuau

SEQ ID NO: 132743 - RNA, 19 nt, Homo sapiens
  misc_RNA (1)...(19): siRNA sense strand
gcugagaccaggagcaucu

SEQ ID NO: 132744 - RNA, 19 nt, Homo sapiens
  misc_RNA (1)...(19): siRNA sense strand
gggacuaggaacugcauau

SEQ ID NO: 132745 - RNA, 19 nt, Homo sapiens
  misc_RNA (1)...(19): siRNA sense strand
cucuggaacucgcuacaaa

SEQ ID NO: 132746 - RNA, 19 nt, Homo sapiens
  misc_RNA (1)...(19): siRNA sense strand
ugauuuaacaggaaguuuc

SEQ ID NO: 132747 - RNA, 19 nt, Homo sapiens
  misc_RNA (1)...(19): siRNA sense strand
gcaguccacgacagaacaa

SEQ ID NO: 132748 - RNA, 19 nt, Homo sapiens
  misc_RNA (1)...(19): siRNA sense strand
caaauauucggugcuuuua

SEQ ID NO: 132749 - RNA, 19 nt, Homo sapiens
  misc_RNA (1)...(19): siRNA sense strand
cuaggaacugcauauauuc

SEQ ID NO: 132750 - RNA, 19 nt, Homo sapiens
  misc_RNA (1)...(19): siRNA sense strand
cagauuauaccgaaaagaa

SEQ ID NO: 132751 - RNA, 19 nt, Homo sapiens
  misc_RNA (1)...(19): siRNA sense strand
uauuauggaugcugaucuc

SEQ ID NO: 132752 - RNA, 19 nt, Homo sapiens
  misc_RNA (1)...(19): siRNA sense strand
gaguggaaucaacuaugaa

SEQ ID NO: 132753 - RNA, 19 nt, Homo sapiens
  misc_RNA (1)...(19): siRNA sense strand
cgagaguggaaucaacuau

SEQ ID NO: 132754 - RNA, 19 nt, Homo sapiens
  misc_RNA (1)...(19): siRNA sense strand
cagauggagaugauuguuc

SEQ ID NO: 132755 - RNA, 19 nt, Homo sapiens
  misc_RNA (1)...(19): siRNA sense strand
agaccaggagcaucugauu

SEQ ID NO: 132756 - RNA, 19 nt, Homo sapiens
  misc_RNA (1)...(19): siRNA sense strand
ucguguggcugcuggugaa

SEQ ID NO: 132757 - RNA, 19 nt, Homo sapiens
  misc_RNA (1)...(19): siRNA sense strand
ggaagcaaaaggaggguaa

SEQ ID NO: 132758 - RNA, 19 nt, Homo sapiens
  misc_RNA (1)...(19): siRNA sense strand
ucacaccauccaaaauuua

SEQ ID NO: 132759 - RNA, 19 nt, Homo sapiens
  misc_RNA (1)...(19): siRNA sense strand
ccacaggaaacuacaucau

SEQ ID NO: 132760 - RNA, 19 nt, Homo sapiens
  misc_RNA (1)...(19): siRNA sense strand
gcaagaagcuggaggaaag

SEQ ID NO: 132761 - RNA, 19 nt, Homo sapiens
  misc_RNA (1)...(19): siRNA sense strand
ggaaagggguuuugacaag

SEQ ID NO: 132762 - RNA, 19 nt, Homo sapiens
  misc_RNA (1)...(19): siRNA sense strand
gugcgacgccuucuuguga

SEQ ID NO: 132763 - RNA, 19 nt, Homo sapiens
  misc_RNA (1)...(19): siRNA sense strand
gugaaguccugggcaagaa

SEQ ID NO: 132764 - RNA, 19 nt, Homo sapiens
  misc_RNA (1)...(19): siRNA sense strand
ggugaaguccugggcaaga

SEQ ID NO: 132765 - RNA, 19 nt, Homo sapiens
  misc_RNA (1)...(19): siRNA sense strand
ggcaagaagcuggaggaaa

SEQ ID NO: 132766 - RNA, 19 nt, Homo sapiens
  misc_RNA (1)...(19): siRNA sense strand
gcuaaagaaagaugaagac

SEQ ID NO: 132767 - RNA, 19 nt, Homo sapiens
  misc_RNA (1)...(19): siRNA sense strand
guggugcgacgccuucuug

SEQ ID NO: 132768 - RNA, 19 nt, Homo sapiens
  misc_RNA (1)...(19): siRNA sense strand
gcaaggagacggaauucua

SEQ ID NO: 132769 - RNA, 19 nt, Homo sapiens
  misc_RNA (1)...(19): siRNA sense strand
ggacgugcauuucaugaag

SEQ ID NO: 132770 - RNA, 19 nt, Homo sapiens
  misc_RNA (1)...(19): siRNA sense strand
gcacuugccuguguuuaca

SEQ ID NO: 132771 - RNA, 19 nt, Homo sapiens
  misc_RNA (1)...(19): siRNA sense strand
gaauucuaccugugcauga

SEQ ID NO: 132772 - RNA, 19 nt, Homo sapiens
  misc_RNA (1)...(19): siRNA sense strand
caacuacacggcccugaug

SEQ ID NO: 132773 - RNA, 19 nt, Homo sapiens
  misc_RNA (1)...(19): siRNA sense strand
gggacgaugugagccguaa

SEQ ID NO: 132774 - RNA, 19 nt, Homo sapiens
  misc_RNA (1)...(19): siRNA sense strand
uacgugggcuucaccaaga

SEQ ID NO: 132775 - RNA, 19 nt, Homo sapiens
  misc_RNA (1)...(19): siRNA sense strand
gcaaggaguguguguucau

SEQ ID NO: 132776 - RNA, 19 nt, Homo sapiens
  misc_RNA (1)...(19): siRNA sense strand
acacgacggugaccaagag

SEQ ID NO: 132777 - RNA, 19 nt, Homo sapiens
  misc_RNA (1)...(19): siRNA sense strand
caaggaguguguguucauc

SEQ ID NO: 132778 - RNA, 19 nt, Homo sapiens
  misc_RNA (1)...(19): siRNA sense strand
cagcaaggaguguguguuc

SEQ ID NO: 132779 - RNA, 19 nt, Homo sapiens
  misc_RNA (1)...(19): siRNA sense strand
gcaggacgugcauuucaug

SEQ ID NO: 132780 - RNA, 19 nt, Homo sapiens
  misc_RNA (1)...(19): siRNA sense strand
cagcaggacgugcauuuca

SEQ ID NO: 132781 - RNA, 19 nt, Homo sapiens
  misc_RNA (1)...(19): siRNA sense strand
caaguaugcccagcuccua

SEQ ID NO: 132782 - RNA, 19 nt, Homo sapiens
  misc_RNA (1)...(19): siRNA sense strand
guagucaaguccggaucaa

SEQ ID NO: 132783 - RNA, 19 nt, Homo sapiens
  misc_RNA (1)...(19): siRNA sense strand
acagacaccuucgguaguc

SEQ ID NO: 132784 - RNA, 19 nt, Homo sapiens
  misc_RNA (1)...(19): siRNA sense strand
caaggagacggaauucuac

SEQ ID NO: 132785 - RNA, 19 nt, Homo sapiens
  misc_RNA (1)...(19): siRNA sense strand
gcccugaugucggcuaagu

SEQ ID NO: 132786 - RNA, 19 nt, Homo sapiens
  misc_RNA (1)...(19): siRNA sense strand
cgccugcacuugccugugu

SEQ ID NO: 132787 - RNA, 19 nt, Homo sapiens
  misc_RNA (1)...(19): siRNA sense strand
caccuucgguagucaaguc

SEQ ID NO: 132788 - RNA, 19 nt, Homo sapiens
  misc_RNA (1)...(19): siRNA sense strand
gcaccagcaaggagugugu

SEQ ID NO: 132789 - RNA, 19 nt, Homo sapiens
  misc_RNA (1)...(19): siRNA sense strand
gacagacaccuucgguagu

SEQ ID NO: 132790 - RNA, 19 nt, Homo sapiens
  misc_RNA (1)...(19): siRNA sense strand
gguagucaaguccggauca

SEQ ID NO: 132791 - RNA, 19 nt, Homo sapiens
  misc_RNA (1)...(19): siRNA sense strand
gcugcugugcuuccaggua

SEQ ID NO: 132792 - RNA, 19 nt, Homo sapiens
  misc_RNA (1)...(19): siRNA sense strand
cuaaguacuccggcuggua

SEQ ID NO: 132793 - RNA, 19 nt, Homo sapiens
  misc_RNA (1)...(19): siRNA sense strand
gcaaggagacggaauucua

SEQ ID NO: 132794 - RNA, 19 nt, Homo sapiens
  misc_RNA (1)...(19): siRNA sense strand
ggacgugcauuucaugaag

SEQ ID NO: 132795 - RNA, 19 nt, Homo sapiens
  misc_RNA (1)...(19): siRNA sense strand
gcacuugccuguguuuaca

SEQ ID NO: 132796 - RNA, 19 nt, Homo sapiens
  misc_RNA (1)...(19): siRNA sense strand
gaauucuaccugugcauga

SEQ ID NO: 132797 - RNA, 19 nt, Homo sapiens
  misc_RNA (1)...(19): siRNA sense strand
caacuacacggcccugaug

SEQ ID NO: 132798 - RNA, 19 nt, Homo sapiens
  misc_RNA (1)...(19): siRNA sense strand
gggacgaugugagccguaa

SEQ ID NO: 132799 - RNA, 19 nt, Homo sapiens
  misc_RNA (1)...(19): siRNA sense strand
uacgugggcuucaccaaga

SEQ ID NO: 132800 - RNA, 19 nt, Homo sapiens
  misc_RNA (1)...(19): siRNA sense strand
gcaaggaguguguguucau

SEQ ID NO: 132801 - RNA, 19 nt, Homo sapiens
  misc_RNA (1)...(19): siRNA sense strand
acacgacggugaccaagag

SEQ ID NO: 132802 - RNA, 19 nt, Homo sapiens
  misc_RNA (1)...(19): siRNA sense strand
caaggaguguguguucauc

SEQ ID NO: 132803 - RNA, 19 nt, Homo sapiens
  misc_RNA (1)...(19): siRNA sense strand
cagcaaggaguguguguuc

SEQ ID NO: 132804 - RNA, 19 nt, Homo sapiens
  misc_RNA (1)...(19): siRNA sense strand
gcaggacgugcauuucaug

SEQ ID NO: 132805 - RNA, 19 nt, Homo sapiens
  misc_RNA (1)...(19): siRNA sense strand
cagcaggacgugcauuuca

SEQ ID NO: 132806 - RNA, 19 nt, Homo sapiens
  misc_RNA (1)...(19): siRNA sense strand
caaguaugcccagcuccua

SEQ ID NO: 132807 - RNA, 19 nt, Homo sapiens
  misc_RNA (1)...(19): siRNA sense strand
guagucaaguccggaucaa

SEQ ID NO: 132808 - RNA, 19 nt, Homo sapiens
  misc_RNA (1)...(19): siRNA sense strand
acagacaccuucgguaguc

SEQ ID NO: 132809 - RNA, 19 nt, Homo sapiens
  misc_RNA (1)...(19): siRNA sense strand
caaggagacggaauucuac

SEQ ID NO: 132810 - RNA, 19 nt, Homo sapiens
  misc_RNA (1)...(19): siRNA sense strand
gcccugaugucggcuaagu

SEQ ID NO: 132811 - RNA, 19 nt, Homo sapiens
  misc_RNA (1)...(19): siRNA sense strand
cgccugcacuugccugugu

SEQ ID NO: 132812 - RNA, 19 nt, Homo sapiens
  misc_RNA (1)...(19): siRNA sense strand
caccuucgguagucaaguc

SEQ ID NO: 132813 - RNA, 19 nt, Homo sapiens
  misc_RNA (1)...(19): siRNA sense strand
gcaccagcaaggagugugu

SEQ ID NO: 132814 - RNA, 19 nt, Homo sapiens
  misc_RNA (1)...(19): siRNA sense strand
gacagacaccuucgguagu

SEQ ID NO: 132815 - RNA, 19 nt, Homo sapiens
  misc_RNA (1)...(19): siRNA sense strand
gguagucaaguccggauca

SEQ ID NO: 132816 - RNA, 19 nt, Homo sapiens
  misc_RNA (1)...(19): siRNA sense strand
gcugcugugcuuccaggua

SEQ ID NO: 132817 - RNA, 19 nt, Homo sapiens
  misc_RNA (1)...(19): siRNA sense strand
cuaaguacuccggcuggua

SEQ ID NO: 132818 - RNA, 19 nt, Homo sapiens
  misc_RNA (1)...(19): siRNA sense strand
gauaguugguugccacuuu

SEQ ID NO: 132819 - RNA, 19 nt, Homo sapiens
  misc_RNA (1)...(19): siRNA sense strand
caaggcaucuuuacauaug

SEQ ID NO: 132820 - RNA, 19 nt, Homo sapiens
  misc_RNA (1)...(19): siRNA sense strand
gcaagaggauccagaagag

SEQ ID NO: 132821 - RNA, 19 nt, Homo sapiens
  misc_RNA (1)...(19): siRNA sense strand
guaaauacacuuaggagau

SEQ ID NO: 132822 - RNA, 19 nt, Homo sapiens
  misc_RNA (1)...(19): siRNA sense strand
cgcaaggcaucuuuacaua

SEQ ID NO: 132823 - RNA, 19 nt, Homo sapiens
  misc_RNA (1)...(19): siRNA sense strand
gaccaggacuuaauaaagc

SEQ ID NO: 132824 - RNA, 19 nt, Homo sapiens
  misc_RNA (1)...(19): siRNA sense strand
agaagaaggugaagaucga

SEQ ID NO: 132825 - RNA, 19 nt, Homo sapiens
  misc_RNA (1)...(19): siRNA sense strand
cgaaacagaagaaagagaa

SEQ ID NO: 132826 - RNA, 19 nt, Homo sapiens
  misc_RNA (1)...(19): siRNA sense strand
gcaaggcaucuuuacauau

SEQ ID NO: 132827 - RNA, 19 nt, Homo sapiens
  misc_RNA (1)...(19): siRNA sense strand
gaaaagggagugaugauga

SEQ ID NO: 132828 - RNA, 19 nt, Homo sapiens
  misc_RNA (1)...(19): siRNA sense strand
gaagaaugacaagaacaaa

SEQ ID NO: 132829 - RNA, 19 nt, Homo sapiens
  misc_RNA (1)...(19): siRNA sense strand
guucgaaacagaagaaaga

SEQ ID NO: 132830 - RNA, 19 nt, Homo sapiens
  misc_RNA (1)...(19): siRNA sense strand
gaaacagaagaaagagaaa

SEQ ID NO: 132831 - RNA, 19 nt, Homo sapiens
  misc_RNA (1)...(19): siRNA sense strand
auaguugguugccacuuua

SEQ ID NO: 132832 - RNA, 19 nt, Homo sapiens
  misc_RNA (1)...(19): siRNA sense strand
aagagcaucucccagaaga

SEQ ID NO: 132833 - RNA, 19 nt, Homo sapiens
  misc_RNA (1)...(19): siRNA sense strand
gugaagaucgagcuggaua

SEQ ID NO: 132834 - RNA, 19 nt, Homo sapiens
  misc_RNA (1)...(19): siRNA sense strand
agaagagcaucucccagaa

SEQ ID NO: 132835 - RNA, 19 nt, Homo sapiens
  misc_RNA (1)...(19): siRNA sense strand
ccccagagguugauuuaua

SEQ ID NO: 132836 - RNA, 19 nt, Homo sapiens
  misc_RNA (1)...(19): siRNA sense strand
ugauucaccuguucaagau

SEQ ID NO: 132837 - RNA, 19 nt, Homo sapiens
  misc_RNA (1)...(19): siRNA sense strand
gagguugauuuauaccaau

SEQ ID NO: 132838 - RNA, 19 nt, Homo sapiens
  misc_RNA (1)...(19): siRNA sense strand
ccaaccagaccaggacuua

SEQ ID NO: 132839 - RNA, 19 nt, Homo sapiens
  misc_RNA (1)...(19): siRNA sense strand
caaaagacacuucaagcua

SEQ ID NO: 132840 - RNA, 19 nt, Homo sapiens
  misc_RNA (1)...(19): siRNA sense strand
gcgcaaggcaucuuuacau

SEQ ID NO: 132841 - RNA, 19 nt, Homo sapiens
  misc_RNA (1)...(19): siRNA sense strand
ucuacucagugaagaauga

SEQ ID NO: 132842 - RNA, 19 nt, Homo sapiens
  misc_RNA (1)...(19): siRNA sense strand
gacaagaacaaaucagauc

SEQ ID NO: 132843 - RNA, 19 nt, Homo sapiens
  misc_RNA (1)...(19): siRNA sense strand
ugaagaaugacaagaacaa

SEQ ID NO: 132844 - RNA, 19 nt, Homo sapiens
  misc_RNA (1)...(19): siRNA sense strand
uauuucaucuacucaguga

SEQ ID NO: 132845 - RNA, 19 nt, Homo sapiens
  misc_RNA (1)...(19): siRNA sense strand
gaagagcaucucccagaag

SEQ ID NO: 132846 - RNA, 19 nt, Homo sapiens
  misc_RNA (1)...(19): siRNA sense strand
gaaugacaagaacaaauca

SEQ ID NO: 132847 - RNA, 19 nt, Homo sapiens
  misc_RNA (1)...(19): siRNA sense strand
gaagaucgagcuggauaag

SEQ ID NO: 132848 - RNA, 19 nt, Homo sapiens
  misc_RNA (1)...(19): siRNA sense strand
agaucgagcuggauaagag

SEQ ID NO: 132849 - RNA, 19 nt, Homo sapiens
  misc_RNA (1)...(19): siRNA sense strand
agagguugauuuauaccaa

SEQ ID NO: 132850 - RNA, 19 nt, Homo sapiens
  misc_RNA (1)...(19): siRNA sense strand
gagcaucucccagaagaag

SEQ ID NO: 132851 - RNA, 19 nt, Homo sapiens
  misc_RNA (1)...(19): siRNA sense strand
cuuaauaaagcacaacuug

SEQ ID NO: 132852 - RNA, 19 nt, Homo sapiens
  misc_RNA (1)...(19): siRNA sense strand
gguugccacuuuaggucua

SEQ ID NO: 132853 - RNA, 19 nt, Homo sapiens
  misc_RNA (1)...(19): siRNA sense strand
agaaugacaagaacaaauc

SEQ ID NO: 132854 - RNA, 19 nt, Homo sapiens
  misc_RNA (1)...(19): siRNA sense strand
cauauuucaucuacucagu

SEQ ID NO: 132855 - RNA, 19 nt, Homo sapiens
  misc_RNA (1)...(19): siRNA sense strand
ccagaccaggacuuaauaa

SEQ ID NO: 132856 - RNA, 19 nt, Homo sapiens
  misc_RNA (1)...(19): siRNA sense strand
cagugaagaaugacaagaa

SEQ ID NO: 132857 - RNA, 19 nt, Homo sapiens
  misc_RNA (1)...(19): siRNA sense strand
uaauucagaguguucgaaa

SEQ ID NO: 132858 - RNA, 19 nt, Homo sapiens
  misc_RNA (1)...(19): siRNA sense strand
caccuuaacauauuucauc

SEQ ID NO: 132859 - RNA, 19 nt, Homo sapiens
  misc_RNA (1)...(19): siRNA sense strand
cuucacgccugacgagaug

SEQ ID NO: 132860 - RNA, 19 nt, Homo sapiens
  misc_RNA (1)...(19): siRNA sense strand
uuaggucuauuccagugaa

SEQ ID NO: 132861 - RNA, 19 nt, Homo sapiens
  misc_RNA (1)...(19): siRNA sense strand
gcaggcaacgccagcuuca

SEQ ID NO: 132862 - RNA, 19 nt, Homo sapiens
  misc_RNA (1)...(19): siRNA sense strand
caaccagaccaggacuuaa

SEQ ID NO: 132863 - RNA, 19 nt, Homo sapiens
  misc_RNA (1)...(19): siRNA sense strand
cagaccaggacuuaauaaa

SEQ ID NO: 132864 - RNA, 19 nt, Homo sapiens
  misc_RNA (1)...(19): siRNA sense strand
cccagagguugauuuauac

SEQ ID NO: 132865 - RNA, 19 nt, Homo sapiens
  misc_RNA (1)...(19): siRNA sense strand
ugacaagaacaaaucagau

SEQ ID NO: 132866 - RNA, 19 nt, Homo sapiens
  misc_RNA (1)...(19): siRNA sense strand
ugaagaucgagcuggauaa

SEQ ID NO: 132867 - RNA, 19 nt, Homo sapiens
  misc_RNA (1)...(19): siRNA sense strand
agaccaggacuuaauaaag

SEQ ID NO: 132868 - RNA, 19 nt, Homo sapiens
  misc_RNA (1)...(19): siRNA sense strand
ucagcaagaggauccagaa

SEQ ID NO: 132869 - RNA, 19 nt, Homo sapiens
  misc_RNA (1)...(19): siRNA sense strand
auucaccuguucaagauau

SEQ ID NO: 132870 - RNA, 19 nt, Homo sapiens
  misc_RNA (1)...(19): siRNA sense strand
aacgccagcuucagcaaga

SEQ ID NO: 132871 - RNA, 19 nt, Homo sapiens
  misc_RNA (1)...(19): siRNA sense strand
gcaacgccagcuucagcaa

SEQ ID NO: 132872 - RNA, 19 nt, Homo sapiens
  misc_RNA (1)...(19): siRNA sense strand
aaccagaccaggacuuaau

SEQ ID NO: 132873 - RNA, 19 nt, Homo sapiens
  misc_RNA (1)...(19): siRNA sense strand
gaugaugauggaggugauu

SEQ ID NO: 132874 - RNA, 19 nt, Homo sapiens
  misc_RNA (1)...(19): siRNA sense strand
gagcgcaaggcaucuuuac

SEQ ID NO: 132875 - RNA, 19 nt, Homo sapiens
  misc_RNA (1)...(19): siRNA sense strand
acacuuaggagauacaaaa

SEQ ID NO: 132876 - RNA, 19 nt, Homo sapiens
  misc_RNA (1)...(19): siRNA sense strand
gauucaccuguucaagaua

SEQ ID NO: 132877 - RNA, 19 nt, Homo sapiens
  misc_RNA (1)...(19): siRNA sense strand
ccagacagcuugaagaauu

SEQ ID NO: 132878 - RNA, 19 nt, Homo sapiens
  misc_RNA (1)...(19): siRNA sense strand
caacaucaaucaacuacaa

SEQ ID NO: 132879 - RNA, 19 nt, Homo sapiens
  misc_RNA (1)...(19): siRNA sense strand
gaacccaguauguaaauua

SEQ ID NO: 132880 - RNA, 19 nt, Homo sapiens
  misc_RNA (1)...(19): siRNA sense strand
gaaagaugcucucuacgau

SEQ ID NO: 132881 - RNA, 19 nt, Homo sapiens
  misc_RNA (1)...(19): siRNA sense strand
gagaauguacugaagaaua

SEQ ID NO: 132882 - RNA, 19 nt, Homo sapiens
  misc_RNA (1)...(19): siRNA sense strand
gggcagcacuuucuuccua

SEQ ID NO: 132883 - RNA, 19 nt, Homo sapiens
  misc_RNA (1)...(19): siRNA sense strand
gcagaaaccaggagauaaa

SEQ ID NO: 132884 - RNA, 19 nt, Homo sapiens
  misc_RNA (1)...(19): siRNA sense strand
uaaagaacccaguauguaa

SEQ ID NO: 132885 - RNA, 19 nt, Homo sapiens
  misc_RNA (1)...(19): siRNA sense strand
caaaggaaguucucagcaa

SEQ ID NO: 132886 - RNA, 19 nt, Homo sapiens
  misc_RNA (1)...(19): siRNA sense strand
ccagaagacuccaaaugaa

SEQ ID NO: 132887 - RNA, 19 nt, Homo sapiens
  misc_RNA (1)...(19): siRNA sense strand
aaagaugccuccugauuau

SEQ ID NO: 132888 - RNA, 19 nt, Homo sapiens
  misc_RNA (1)...(19): siRNA sense strand
acacagcccucacuugaaa

SEQ ID NO: 132889 - RNA, 19 nt, Homo sapiens
  misc_RNA (1)...(19): siRNA sense strand
ggaagcuacuccauagauu

SEQ ID NO: 132890 - RNA, 19 nt, Homo sapiens
  misc_RNA (1)...(19): siRNA sense strand
guacacagcccucacuuga

SEQ ID NO: 132891 - RNA, 19 nt, Homo sapiens
  misc_RNA (1)...(19): siRNA sense strand
gagagcugcugaagucaaa

SEQ ID NO: 132892 - RNA, 19 nt, Homo sapiens
  misc_RNA (1)...(19): siRNA sense strand
gacaguugcuucaugugua

SEQ ID NO: 132893 - RNA, 19 nt, Homo sapiens
  misc_RNA (1)...(19): siRNA sense strand
ucuaugaugucaaggauaa

SEQ ID NO: 132894 - RNA, 19 nt, Homo sapiens
  misc_RNA (1)...(19): siRNA sense strand
gaagccaaauccaaugaug

SEQ ID NO: 132895 - RNA, 19 nt, Homo sapiens
  misc_RNA (1)...(19): siRNA sense strand
gaucaaauggugaauaugu

SEQ ID NO: 132896 - RNA, 19 nt, Homo sapiens
  misc_RNA (1)...(19): siRNA sense strand
ugauuucccuucacauuaa

SEQ ID NO: 132897 - RNA, 19 nt, Homo sapiens
  misc_RNA (1)...(19): siRNA sense strand
gaaccuucauuaacagaug

SEQ ID NO: 132898 - RNA, 19 nt, Homo sapiens
  misc_RNA (1)...(19): siRNA sense strand
gaagcuacuccauagauuu

SEQ ID NO: 132899 - RNA, 19 nt, Homo sapiens
  misc_RNA (1)...(19): siRNA sense strand
ggaagagccugaacugcau

SEQ ID NO: 132900 - RNA, 19 nt, Homo sapiens
  misc_RNA (1)...(19): siRNA sense strand
caaaugaaccgcaguugga

SEQ ID NO: 132901 - RNA, 19 nt, Homo sapiens
  misc_RNA (1)...(19): siRNA sense strand
ccggauaccaguuuauuua

SEQ ID NO: 132902 - RNA, 19 nt, Homo sapiens
  misc_RNA (1)...(19): siRNA sense strand
gugaucaaauggugaauau

SEQ ID NO: 132903 - RNA, 19 nt, Homo sapiens
  misc_RNA (1)...(19): siRNA sense strand
gaauugauuucccuucaca

SEQ ID NO: 132904 - RNA, 19 nt, Homo sapiens
  misc_RNA (1)...(19): siRNA sense strand
gaaguuggccgaaguuucu

SEQ ID NO: 132905 - RNA, 19 nt, Homo sapiens
  misc_RNA (1)...(19): siRNA sense strand
gaacugcauuauugcuaug

SEQ ID NO: 132906 - RNA, 19 nt, Homo sapiens
  misc_RNA (1)...(19): siRNA sense strand
gugaauauguuccaagaca

SEQ ID NO: 132907 - RNA, 19 nt, Homo sapiens
  misc_RNA (1)...(19): siRNA sense strand
ccauagauuugaaacagaa

SEQ ID NO: 132908 - RNA, 19 nt, Homo sapiens
  misc_RNA (1)...(19): siRNA sense strand
gaaaagaugccuccugauu

SEQ ID NO: 132909 - RNA, 19 nt, Homo sapiens
  misc_RNA (1)...(19): siRNA sense strand
gaaguucucagcaacauca

SEQ ID NO: 132910 - RNA, 19 nt, Homo sapiens
  misc_RNA (1)...(19): siRNA sense strand
gcaagaaaguauuaaucag

SEQ ID NO: 132911 - RNA, 19 nt, Homo sapiens
  misc_RNA (1)...(19): siRNA sense strand
ggacaaacugauugaaaga

SEQ ID NO: 132912 - RNA, 19 nt, Homo sapiens
  misc_RNA (1)...(19): siRNA sense strand
caagagaggacugguauga

SEQ ID NO: 132913 - RNA, 19 nt, Homo sapiens
  misc_RNA (1)...(19): siRNA sense strand
uagagaauguacugaagaa

SEQ ID NO: 132914 - RNA, 19 nt, Homo sapiens
  misc_RNA (1)...(19): siRNA sense strand
gagagaugagcaccaguua

SEQ ID NO: 132915 - RNA, 19 nt, Homo sapiens
  misc_RNA (1)...(19): siRNA sense strand
gauuaaagaaggacaguug

SEQ ID NO: 132916 - RNA, 19 nt, Homo sapiens
  misc_RNA (1)...(19): siRNA sense strand
caacuacaaccucuuauag

SEQ ID NO: 132917 - RNA, 19 nt, Homo sapiens
  misc_RNA (1)...(19): siRNA sense strand
gagaugagcaccaguuaca

SEQ ID NO: 132918 - RNA, 19 nt, Homo sapiens
  misc_RNA (1)...(19): siRNA sense strand
ugaauacacuggugcagau

SEQ ID NO: 132919 - RNA, 19 nt, Homo sapiens
  misc_RNA (1)...(19): siRNA sense strand
guacauacagcgaugaaau

SEQ ID NO: 132920 - RNA, 19 nt, Homo sapiens
  misc_RNA (1)...(19): siRNA sense strand
gauaguacaauaugaagga

SEQ ID NO: 132921 - RNA, 19 nt, Homo sapiens
  misc_RNA (1)...(19): siRNA sense strand
gaaccgcaguuggaauuca

SEQ ID NO: 132922 - RNA, 19 nt, Homo sapiens
  misc_RNA (1)...(19): siRNA sense strand
uuaaagaacccaguaugua

SEQ ID NO: 132923 - RNA, 19 nt, Homo sapiens
  misc_RNA (1)...(19): siRNA sense strand
aaagaagauuugugcagaa

SEQ ID NO: 132924 - RNA, 19 nt, Homo sapiens
  misc_RNA (1)...(19): siRNA sense strand
gcauagagaauguacugaa

SEQ ID NO: 132925 - RNA, 19 nt, Homo sapiens
  misc_RNA (1)...(19): siRNA sense strand
gucacuaccucuacagauu

SEQ ID NO: 132926 - RNA, 19 nt, Homo sapiens
  misc_RNA (1)...(19): siRNA sense strand
agccugaacugcauuauug

SEQ ID NO: 132927 - RNA, 19 nt, Homo sapiens
  misc_RNA (1)...(19): siRNA sense strand
ucacuaccucuacagauua

SEQ ID NO: 132928 - RNA, 19 nt, Homo sapiens
  misc_RNA (1)...(19): siRNA sense strand
ggugagcuuucuccacauu

SEQ ID NO: 132929 - RNA, 19 nt, Homo sapiens
  misc_RNA (1)...(19): siRNA sense strand
uggaaaagcugacaccuaa

SEQ ID NO: 132930 - RNA, 19 nt, Homo sapiens
  misc_RNA (1)...(19): siRNA sense strand
caaaggagagaaaacauua

SEQ ID NO: 132931 - RNA, 19 nt, Homo sapiens
  misc_RNA (1)...(19): siRNA sense strand
gguauucguuucaccuguu

SEQ ID NO: 132932 - RNA, 19 nt, Homo sapiens
  misc_RNA (1)...(19): siRNA sense strand
acgagaacauuacguggua

SEQ ID NO: 132933 - RNA, 19 nt, Homo sapiens
  misc_RNA (1)...(19): siRNA sense strand
auacagcgaugaaauugga

SEQ ID NO: 132934 - RNA, 19 nt, Homo sapiens
  misc_RNA (1)...(19): siRNA sense strand
gaagaagggcagcacuuuc

SEQ ID NO: 132935 - RNA, 19 nt, Homo sapiens
  misc_RNA (1)...(19): siRNA sense strand
ugggagagcugcugaaguc

SEQ ID NO: 132936 - RNA, 19 nt, Homo sapiens
  misc_RNA (1)...(19): siRNA sense strand
acaaacugauugaaagaga

SEQ ID NO: 132937 - RNA, 19 nt, Homo sapiens
  misc_RNA (1)...(19): siRNA sense strand
agagagcauucuuuccuuu

SEQ ID NO: 132938 - RNA, 19 nt, Homo sapiens
  misc_RNA (1)...(19): siRNA sense strand
caggaagacgagaacauua

SEQ ID NO: 132939 - RNA, 19 nt, Homo sapiens
  misc_RNA (1)...(19): siRNA sense strand
gcagugguggcaacaauga

SEQ ID NO: 132940 - RNA, 19 nt, Homo sapiens
  misc_RNA (1)...(19): siRNA sense strand
ccaggaggcauucuuaaga

SEQ ID NO: 132941 - RNA, 19 nt, Homo sapiens
  misc_RNA (1)...(19): siRNA sense strand
cugaguaucccaucuauga

SEQ ID NO: 132942 - RNA, 19 nt, Homo sapiens
  misc_RNA (1)...(19): siRNA sense strand
ucaacuacaaccucuuaua

SEQ ID NO: 132943 - RNA, 19 nt, Homo sapiens
  misc_RNA (1)...(19): siRNA sense strand
uuucagggauuuaagaaug

SEQ ID NO: 132944 - RNA, 19 nt, Homo sapiens
  misc_RNA (1)...(19): siRNA sense strand
gaagucaaaggagcaauug

SEQ ID NO: 132945 - RNA, 19 nt, Homo sapiens
  misc_RNA (1)...(19): siRNA sense strand
ucaaggauaagucucauga

SEQ ID NO: 132946 - RNA, 19 nt, Homo sapiens
  misc_RNA (1)...(19): siRNA sense strand
ggacaguugcuucaugugu

SEQ ID NO: 132947 - RNA, 19 nt, Homo sapiens
  misc_RNA (1)...(19): siRNA sense strand
ugaacugcauuauugcuau

SEQ ID NO: 132948 - RNA, 19 nt, Homo sapiens
  misc_RNA (1)...(19): siRNA sense strand
aaucaacuacaaccucuua

SEQ ID NO: 132949 - RNA, 19 nt, Homo sapiens
  misc_RNA (1)...(19): siRNA sense strand
gaaauaccggauaccaguu

SEQ ID NO: 132950 - RNA, 19 nt, Homo sapiens
  misc_RNA (1)...(19): siRNA sense strand
ugaaagaugcucucuacga

SEQ ID NO: 132951 - RNA, 19 nt, Homo sapiens
  misc_RNA (1)...(19): siRNA sense strand
aagaagauuugugcagaaa

SEQ ID NO: 132952 - RNA, 19 nt, Homo sapiens
  misc_RNA (1)...(19): siRNA sense strand
caaacugauugaaagagau

SEQ ID NO: 132953 - RNA, 19 nt, Homo sapiens
  misc_RNA (1)...(19): siRNA sense strand
gaagaaauaccggauacca

SEQ ID NO: 132954 - RNA, 19 nt, Homo sapiens
  misc_RNA (1)...(19): siRNA sense strand
aagaugcucucuacgaugu

SEQ ID NO: 132955 - RNA, 19 nt, Homo sapiens
  misc_RNA (1)...(19): siRNA sense strand
cuacagcccaggccaauga

SEQ ID NO: 132956 - RNA, 19 nt, Homo sapiens
  misc_RNA (1)...(19): siRNA sense strand
gugcagaaaccaggagaua

SEQ ID NO: 132957 - RNA, 19 nt, Homo sapiens
  misc_RNA (1)...(19): siRNA sense strand
gaagauuugugcagaaacc

SEQ ID NO: 132958 - RNA, 19 nt, Homo sapiens
  misc_RNA (1)...(19): siRNA sense strand
aaacuaacagucuaugaug

SEQ ID NO: 132959 - RNA, 19 nt, Homo sapiens
  misc_RNA (1)...(19): siRNA sense strand
ugaacaaugcucaaucuug

SEQ ID NO: 132960 - RNA, 19 nt, Homo sapiens
  misc_RNA (1)...(19): siRNA sense strand
gccgcaaacugaaugguau

SEQ ID NO: 132961 - RNA, 19 nt, Homo sapiens
  misc_RNA (1)...(19): siRNA sense strand
gaugccuccugauuauauu

SEQ ID NO: 132962 - RNA, 19 nt, Homo sapiens
  misc_RNA (1)...(19): siRNA sense strand
ucacaaguauccagaagac

SEQ ID NO: 132963 - RNA, 19 nt, Homo sapiens
  misc_RNA (1)...(19): siRNA sense strand
uggcaacaaugauggagaa

SEQ ID NO: 132964 - RNA, 19 nt, Homo sapiens
  misc_RNA (1)...(19): siRNA sense strand
aaacacagccaaagcaaag

SEQ ID NO: 132965 - RNA, 19 nt, Homo sapiens
  misc_RNA (1)...(19): siRNA sense strand
aaagaagaaauaccggaua

SEQ ID NO: 132966 - RNA, 19 nt, Homo sapiens
  misc_RNA (1)...(19): siRNA sense strand
aaagaacccaguauguaaa

SEQ ID NO: 132967 - RNA, 19 nt, Homo sapiens
  misc_RNA (1)...(19): siRNA sense strand
gagcggaaaagauaacuua

SEQ ID NO: 132968 - RNA, 19 nt, Homo sapiens
  misc_RNA (1)...(19): siRNA sense strand
cagagagcauucuuuccuu

SEQ ID NO: 132969 - RNA, 19 nt, Homo sapiens
  misc_RNA (1)...(19): siRNA sense strand
cauagagaauguacugaag

SEQ ID NO: 132970 - RNA, 19 nt, Homo sapiens
  misc_RNA (1)...(19): siRNA sense strand
gcgcuggauugcaugagaa

SEQ ID NO: 132971 - RNA, 19 nt, Homo sapiens
  misc_RNA (1)...(19): siRNA sense strand
gcacuugcuggauugguuu

SEQ ID NO: 132972 - RNA, 19 nt, Homo sapiens
  misc_RNA (1)...(19): siRNA sense strand
cagaugccauucccucuca

SEQ ID NO: 132973 - RNA, 19 nt, Homo sapiens
  misc_RNA (1)...(19): siRNA sense strand
caacaaugauggagaaaag

SEQ ID NO: 132974 - RNA, 19 nt, Homo sapiens
  misc_RNA (1)...(19): siRNA sense strand
aaacuucgaacuucuacaa

SEQ ID NO: 132975 - RNA, 19 nt, Homo sapiens
  misc_RNA (1)...(19): siRNA sense strand
cagaauguuugagucacua

SEQ ID NO: 132976 - RNA, 19 nt, Homo sapiens
  misc_RNA (1)...(19): siRNA sense strand
gcauuuccgauuuaaagaa

SEQ ID NO: 132977 - RNA, 19 nt, Homo sapiens
  misc_RNA (1)...(19): siRNA sense strand
caaccucacucugugcuua

SEQ ID NO: 132978 - RNA, 19 nt, Homo sapiens
  misc_RNA (1)...(19): siRNA sense strand
gagcaaagacugcguguuc

SEQ ID NO: 132979 - RNA, 19 nt, Homo sapiens
  misc_RNA (1)...(19): siRNA sense strand
gggcugagagugagaagua

SEQ ID NO: 132980 - RNA, 19 nt, Homo sapiens
  misc_RNA (1)...(19): siRNA sense strand
gcagaagcaguucgaguuu

SEQ ID NO: 132981 - RNA, 19 nt, Homo sapiens
  misc_RNA (1)...(19): siRNA sense strand
cugauucucugcugucaaa

SEQ ID NO: 132982 - RNA, 19 nt, Homo sapiens
  misc_RNA (1)...(19): siRNA sense strand
aaucacccgucuccuaauu

SEQ ID NO: 132983 - RNA, 19 nt, Homo sapiens
  misc_RNA (1)...(19): siRNA sense strand
agaaucacccgucuccuaa

SEQ ID NO: 132984 - RNA, 19 nt, Homo sapiens
  misc_RNA (1)...(19): siRNA sense strand
agaagcaguucgaguuugu

SEQ ID NO: 132985 - RNA, 19 nt, Homo sapiens
  misc_RNA (1)...(19): siRNA sense strand
caaguuugccaagcucaua

SEQ ID NO: 132986 - RNA, 19 nt, Homo sapiens
  misc_RNA (1)...(19): siRNA sense strand
cagaagcaguucgaguuug

SEQ ID NO: 132987 - RNA, 19 nt, Homo sapiens
  misc_RNA (1)...(19): siRNA sense strand
cgaggacggcaacaaguuu

SEQ ID NO: 132988 - RNA, 19 nt, Homo sapiens
  misc_RNA (1)...(19): siRNA sense strand
gcacgagggcugguucaug

SEQ ID NO: 132989 - RNA, 19 nt, Homo sapiens
  misc_RNA (1)...(19): siRNA sense strand
cagccggguucgcaucaaa

SEQ ID NO: 132990 - RNA, 19 nt, Homo sapiens
  misc_RNA (1)...(19): siRNA sense strand
ccgagaagcagaagcaguu

SEQ ID NO: 132991 - RNA, 19 nt, Homo sapiens
  misc_RNA (1)...(19): siRNA sense strand
gaggacggcaacaaguuug

SEQ ID NO: 132992 - RNA, 19 nt, Homo sapiens
  misc_RNA (1)...(19): siRNA sense strand
gcagauccgcgaguaccaa

SEQ ID NO: 132993 - RNA, 19 nt, Homo sapiens
  misc_RNA (1)...(19): siRNA sense strand
caucaagcgccucuaccaa

SEQ ID NO: 132994 - RNA, 19 nt, Homo sapiens
  misc_RNA (1)...(19): siRNA sense strand
ucacccgucuccuaauuuu

SEQ ID NO: 132995 - RNA, 19 nt, Homo sapiens
  misc_RNA (1)...(19): siRNA sense strand
gaaucacccgucuccuaau

SEQ ID NO: 132996 - RNA, 19 nt, Homo sapiens
  misc_RNA (1)...(19): siRNA sense strand
agaucgugcuggagaacaa

SEQ ID NO: 132997 - RNA, 19 nt, Homo sapiens
  misc_RNA (1)...(19): siRNA sense strand
gcgaggcccacuucaucaa

SEQ ID NO: 132998 - RNA, 19 nt, Homo sapiens
  misc_RNA (1)...(19): siRNA sense strand
gcagccggguucgcaucaa

SEQ ID NO: 132999 - RNA, 19 nt, Homo sapiens
  misc_RNA (1)...(19): siRNA sense strand
ucaaaggggcugagaguga

SEQ ID NO: 133000 - RNA, 19 nt, Homo sapiens
  misc_RNA (1)...(19): siRNA sense strand
ccgaggacggcaacaaguu

SEQ ID NO: 133001 - RNA, 19 nt, Homo sapiens
  misc_RNA (1)...(19): siRNA sense strand
cggagaucgugcuggagaa

SEQ ID NO: 133002 - RNA, 19 nt, Homo sapiens
  misc_RNA (1)...(19): siRNA sense strand
gaagaaaacugguacaaca

SEQ ID NO: 133003 - RNA, 19 nt, Homo sapiens
  misc_RNA (1)...(19): siRNA sense strand
guacaaacauucggacuca

SEQ ID NO: 133004 - RNA, 19 nt, Homo sapiens
  misc_RNA (1)...(19): siRNA sense strand
ggacuaaacgacaccagaa

SEQ ID NO: 133005 - RNA, 19 nt, Homo sapiens
  misc_RNA (1)...(19): siRNA sense strand
acucagagagacaguauua

SEQ ID NO: 133006 - RNA, 19 nt, Homo sapiens
  misc_RNA (1)...(19): siRNA sense strand
ccagaaauucacucacuuu

SEQ ID NO: 133007 - RNA, 19 nt, Homo sapiens
  misc_RNA (1)...(19): siRNA sense strand
ggacucagagagacaguau

SEQ ID NO: 133008 - RNA, 19 nt, Homo sapiens
  misc_RNA (1)...(19): siRNA sense strand
gggaacaguuugaagaaaa

SEQ ID NO: 133009 - RNA, 19 nt, Homo sapiens
  misc_RNA (1)...(19): siRNA sense strand
cuaaacgacaccagaaauu

SEQ ID NO: 133010 - RNA, 19 nt, Homo sapiens
  misc_RNA (1)...(19): siRNA sense strand
ccucaaccuuguacaaaca

SEQ ID NO: 133011 - RNA, 19 nt, Homo sapiens
  misc_RNA (1)...(19): siRNA sense strand
caccagaaauucacucacu

SEQ ID NO: 133012 - RNA, 19 nt, Homo sapiens
  misc_RNA (1)...(19): siRNA sense strand
aaacgacaccagaaauuca

SEQ ID NO: 133013 - RNA, 19 nt, Homo sapiens
  misc_RNA (1)...(19): siRNA sense strand
uaaacgacaccagaaauuc

SEQ ID NO: 133014 - RNA, 19 nt, Homo sapiens
  misc_RNA (1)...(19): siRNA sense strand
ucggaauccuggaguuuau

SEQ ID NO: 133015 - RNA, 19 nt, Homo sapiens
  misc_RNA (1)...(19): siRNA sense strand
cgggagggauacaggacua

SEQ ID NO: 133016 - RNA, 19 nt, Homo sapiens
  misc_RNA (1)...(19): siRNA sense strand
cgggaacaguuugaagaaa

SEQ ID NO: 133017 - RNA, 19 nt, Homo sapiens
  misc_RNA (1)...(19): siRNA sense strand
gacuaaacgacaccagaaa

SEQ ID NO: 133018 - RNA, 19 nt, Homo sapiens
  misc_RNA (1)...(19): siRNA sense strand
ggaauccuggaguuuauca

SEQ ID NO: 133019 - RNA, 19 nt, Homo sapiens
  misc_RNA (1)...(19): siRNA sense strand
uuacguggcccugaacaaa

SEQ ID NO: 133020 - RNA, 19 nt, Homo sapiens
  misc_RNA (1)...(19): siRNA sense strand
ggagggauacaggacuaaa

SEQ ID NO: 133021 - RNA, 19 nt, Homo sapiens
  misc_RNA (1)...(19): siRNA sense strand
ccacagccgcuucggaauc

SEQ ID NO: 133022 - RNA, 19 nt, Homo sapiens
  misc_RNA (1)...(19): siRNA sense strand
aguauuacguggcccugaa

SEQ ID NO: 133023 - RNA, 19 nt, Homo sapiens
  misc_RNA (1)...(19): siRNA sense strand
acaaacauucggacucaga

SEQ ID NO: 133024 - RNA, 19 nt, Homo sapiens
  misc_RNA (1)...(19): siRNA sense strand
gagaccucuuucacuauag

SEQ ID NO: 133025 - RNA, 19 nt, Homo sapiens
  misc_RNA (1)...(19): siRNA sense strand
ugagcgaggagaacucuau

SEQ ID NO: 133026 - RNA, 19 nt, Homo sapiens
  misc_RNA (1)...(19): siRNA sense strand
aaacugguacaacaccuau

SEQ ID NO: 133027 - RNA, 19 nt, Homo sapiens
  misc_RNA (1)...(19): siRNA sense strand
ggacucuggccuguaccua

SEQ ID NO: 133028 - RNA, 19 nt, Homo sapiens
  misc_RNA (1)...(19): siRNA sense strand
gagcgaggagaacucuaug

SEQ ID NO: 133029 - RNA, 19 nt, Homo sapiens
  misc_RNA (1)...(19): siRNA sense strand
gcuucggaauccuggaguu

SEQ ID NO: 133030 - RNA, 19 nt, Homo sapiens
  misc_RNA (1)...(19): siRNA sense strand
acguggcccugaacaaaga

SEQ ID NO: 133031 - RNA, 19 nt, Homo sapiens
  misc_RNA (1)...(19): siRNA sense strand
ucaaccuuguacaaacauu

SEQ ID NO: 133032 - RNA, 19 nt, Homo sapiens
  misc_RNA (1)...(19): siRNA sense strand
gaacucuaugggucgaaga

SEQ ID NO: 133033 - RNA, 19 nt, Homo sapiens
  misc_RNA (1)...(19): siRNA sense strand
gccuguaccuaggaaugaa

SEQ ID NO: 133034 - RNA, 19 nt, Homo sapiens
  misc_RNA (1)...(19): siRNA sense strand
ccucuuucacuauagguaa

SEQ ID NO: 133035 - RNA, 19 nt, Homo sapiens
  misc_RNA (1)...(19): siRNA sense strand
ggccuguaccuaggaauga

SEQ ID NO: 133036 - RNA, 19 nt, Homo sapiens
  misc_RNA (1)...(19): siRNA sense strand
cuucuaaguugcccuccau

SEQ ID NO: 133037 - RNA, 19 nt, Homo sapiens
  misc_RNA (1)...(19): siRNA sense strand
caaccuuguacaaacauuc

SEQ ID NO: 133038 - RNA, 19 nt, Homo sapiens
  misc_RNA (1)...(19): siRNA sense strand
ccgggaacaguuugaagaa

SEQ ID NO: 133039 - RNA, 19 nt, Homo sapiens
  misc_RNA (1)...(19): siRNA sense strand
gaacaaggauuccgugcua

SEQ ID NO: 133040 - RNA, 19 nt, Homo sapiens
  misc_RNA (1)...(19): siRNA sense strand
caaaguagcugauggauuc

SEQ ID NO: 133041 - RNA, 19 nt, Homo sapiens
  misc_RNA (1)...(19): siRNA sense strand
acacagagcucaucagaaa

SEQ ID NO: 133042 - RNA, 19 nt, Homo sapiens
  misc_RNA (1)...(19): siRNA sense strand
ugaaggagcuguugucauu

SEQ ID NO: 133043 - RNA, 19 nt, Homo sapiens
  misc_RNA (1)...(19): siRNA sense strand
gaaagugcaucccuuguug

SEQ ID NO: 133044 - RNA, 19 nt, Homo sapiens
  misc_RNA (1)...(19): siRNA sense strand
gcaaugagaucccuguaga

SEQ ID NO: 133045 - RNA, 19 nt, Homo sapiens
  misc_RNA (1)...(19): siRNA sense strand
gaaguuggccuuacagaaa

SEQ ID NO: 133046 - RNA, 19 nt, Homo sapiens
  misc_RNA (1)...(19): siRNA sense strand
guaugcagaugaugaauaa

SEQ ID NO: 133047 - RNA, 19 nt, Homo sapiens
  misc_RNA (1)...(19): siRNA sense strand
gaacagagaacuugagugu

SEQ ID NO: 133048 - RNA, 19 nt, Homo sapiens
  misc_RNA (1)...(19): siRNA sense strand
gagaagcugaugcaaauua

SEQ ID NO: 133049 - RNA, 19 nt, Homo sapiens
  misc_RNA (1)...(19): siRNA sense strand
uaaagaaccuccuacagau

SEQ ID NO: 133050 - RNA, 19 nt, Homo sapiens
  misc_RNA (1)...(19): siRNA sense strand
gaaccuuuauuacuaguga

SEQ ID NO: 133051 - RNA, 19 nt, Homo sapiens
  misc_RNA (1)...(19): siRNA sense strand
acagagaacuugaguguau

SEQ ID NO: 133052 - RNA, 19 nt, Homo sapiens
  misc_RNA (1)...(19): siRNA sense strand
gaaccaagaacaagucauu

SEQ ID NO: 133053 - RNA, 19 nt, Homo sapiens
  misc_RNA (1)...(19): siRNA sense strand
gaagauuccugguauuucu

SEQ ID NO: 133054 - RNA, 19 nt, Homo sapiens
  misc_RNA (1)...(19): siRNA sense strand
uagaaccucugaaagauuu

SEQ ID NO: 133055 - RNA, 19 nt, Homo sapiens
  misc_RNA (1)...(19): siRNA sense strand
ccacauacccuauuacaga

SEQ ID NO: 133056 - RNA, 19 nt, Homo sapiens
  misc_RNA (1)...(19): siRNA sense strand
caacaacccuaccaauauc

SEQ ID NO: 133057 - RNA, 19 nt, Homo sapiens
  misc_RNA (1)...(19): siRNA sense strand
ccugguauuucucgaauua

SEQ ID NO: 133058 - RNA, 19 nt, Homo sapiens
  misc_RNA (1)...(19): siRNA sense strand
ugaaguaauuggagaaaug

SEQ ID NO: 133059 - RNA, 19 nt, Homo sapiens
  misc_RNA (1)...(19): siRNA sense strand
uaauagaaccucugaaaga

SEQ ID NO: 133060 - RNA, 19 nt, Homo sapiens
  misc_RNA (1)...(19): siRNA sense strand
ugaagaugcucccugguuu

SEQ ID NO: 133061 - RNA, 19 nt, Homo sapiens
  misc_RNA (1)...(19): siRNA sense strand
caaauuaccagucugcauu

SEQ ID NO: 133062 - RNA, 19 nt, Homo sapiens
  misc_RNA (1)...(19): siRNA sense strand
uuaagaagauuccugguau

SEQ ID NO: 133063 - RNA, 19 nt, Homo sapiens
  misc_RNA (1)...(19): siRNA sense strand
uggcaaagcugaacucauc

SEQ ID NO: 133064 - RNA, 19 nt, Homo sapiens
  misc_RNA (1)...(19): siRNA sense strand
gcugaagaaccuuauauuu

SEQ ID NO: 133065 - RNA, 19 nt, Homo sapiens
  misc_RNA (1)...(19): siRNA sense strand
cgagaaagccagucuguug

SEQ ID NO: 133066 - RNA, 19 nt, Homo sapiens
  misc_RNA (1)...(19): siRNA sense strand
gcuuauaccucgcaugugu

SEQ ID NO: 133067 - RNA, 19 nt, Homo sapiens
  misc_RNA (1)...(19): siRNA sense strand
gaacaacaacccuaccaau

SEQ ID NO: 133068 - RNA, 19 nt, Homo sapiens
  misc_RNA (1)...(19): siRNA sense strand
gaauucaggucaaagugau

SEQ ID NO: 133069 - RNA, 19 nt, Homo sapiens
  misc_RNA (1)...(19): siRNA sense strand
aaagccacauacccuauua

SEQ ID NO: 133070 - RNA, 19 nt, Homo sapiens
  misc_RNA (1)...(19): siRNA sense strand
aguaauaugugcugaagaa

SEQ ID NO: 133071 - RNA, 19 nt, Homo sapiens
  misc_RNA (1)...(19): siRNA sense strand
aaacauaguagcaggcaua

SEQ ID NO: 133072 - RNA, 19 nt, Homo sapiens
  misc_RNA (1)...(19): siRNA sense strand
gacugggaaucacuuauuu

SEQ ID NO: 133073 - RNA, 19 nt, Homo sapiens
  misc_RNA (1)...(19): siRNA sense strand
ccacaaguccugaagagaa

SEQ ID NO: 133074 - RNA, 19 nt, Homo sapiens
  misc_RNA (1)...(19): siRNA sense strand
gaucgggacccacuucaaa

SEQ ID NO: 133075 - RNA, 19 nt, Homo sapiens
  misc_RNA (1)...(19): siRNA sense strand
gcauagcaaaugaaucuaa

SEQ ID NO: 133076 - RNA, 19 nt, Homo sapiens
  misc_RNA (1)...(19): siRNA sense strand
uaagaagauuccugguauu

SEQ ID NO: 133077 - RNA, 19 nt, Homo sapiens
  misc_RNA (1)...(19): siRNA sense strand
caaggauuccgugcuauua

SEQ ID NO: 133078 - RNA, 19 nt, Homo sapiens
  misc_RNA (1)...(19): siRNA sense strand
uuaaagaaccuccuacaga

SEQ ID NO: 133079 - RNA, 19 nt, Homo sapiens
  misc_RNA (1)...(19): siRNA sense strand
ggaauucaggucaaaguga

SEQ ID NO: 133080 - RNA, 19 nt, Homo sapiens
  misc_RNA (1)...(19): siRNA sense strand
uagcaggcauagcaaauga

SEQ ID NO: 133081 - RNA, 19 nt, Homo sapiens
  misc_RNA (1)...(19): siRNA sense strand
aggagaagcugaugcaaau

SEQ ID NO: 133082 - RNA, 19 nt, Homo sapiens
  misc_RNA (1)...(19): siRNA sense strand
gaaguaauuggagaaauga

SEQ ID NO: 133083 - RNA, 19 nt, Homo sapiens
  misc_RNA (1)...(19): siRNA sense strand
gagauaguguagacaaagu

SEQ ID NO: 133084 - RNA, 19 nt, Homo sapiens
  misc_RNA (1)...(19): siRNA sense strand
ucacaacguuaacagaguu

SEQ ID NO: 133085 - RNA, 19 nt, Homo sapiens
  misc_RNA (1)...(19): siRNA sense strand
cacaaguccugaagagaaa

SEQ ID NO: 133086 - RNA, 19 nt, Homo sapiens
  misc_RNA (1)...(19): siRNA sense strand
gagaaagccagucuguuga

SEQ ID NO: 133087 - RNA, 19 nt, Homo sapiens
  misc_RNA (1)...(19): siRNA sense strand
gcaaucagaguaauaugug

SEQ ID NO: 133088 - RNA, 19 nt, Homo sapiens
  misc_RNA (1)...(19): siRNA sense strand
cugaagaaccuuauauuug

SEQ ID NO: 133089 - RNA, 19 nt, Homo sapiens
  misc_RNA (1)...(19): siRNA sense strand
ggaagaaguuguuuugcuu

SEQ ID NO: 133090 - RNA, 19 nt, Homo sapiens
  misc_RNA (1)...(19): siRNA sense strand
acaacaacccuaccaauau

SEQ ID NO: 133091 - RNA, 19 nt, Homo sapiens
  misc_RNA (1)...(19): siRNA sense strand
guacagcuuugcuaaaucg

SEQ ID NO: 133092 - RNA, 19 nt, Homo sapiens
  misc_RNA (1)...(19): siRNA sense strand
ggcacguucuggaaacaua

SEQ ID NO: 133093 - RNA, 19 nt, Homo sapiens
  misc_RNA (1)...(19): siRNA sense strand
ccugaaaccaacaauauuu

SEQ ID NO: 133094 - RNA, 19 nt, Homo sapiens
  misc_RNA (1)...(19): siRNA sense strand
gaagaugcucccugguuug

SEQ ID NO: 133095 - RNA, 19 nt, Homo sapiens
  misc_RNA (1)...(19): siRNA sense strand
cuguagaggugguauuaaa

SEQ ID NO: 133096 - RNA, 19 nt, Homo sapiens
  misc_RNA (1)...(19): siRNA sense strand
gagcucaucagaaaguuga

SEQ ID NO: 133097 - RNA, 19 nt, Homo sapiens
  misc_RNA (1)...(19): siRNA sense strand
gguaugcagaugaugaaua

SEQ ID NO: 133098 - RNA, 19 nt, Homo sapiens
  misc_RNA (1)...(19): siRNA sense strand
ggaauuugcuaugguaugc

SEQ ID NO: 133099 - RNA, 19 nt, Homo sapiens
  misc_RNA (1)...(19): siRNA sense strand
gauggaguuuucaacauua

SEQ ID NO: 133100 - RNA, 19 nt, Homo sapiens
  misc_RNA (1)...(19): siRNA sense strand
ggccugaucuaauugaaag

SEQ ID NO: 133101 - RNA, 19 nt, Homo sapiens
  misc_RNA (1)...(19): siRNA sense strand
gaaagucauagaccgaaga

SEQ ID NO: 133102 - RNA, 19 nt, Homo sapiens
  misc_RNA (1)...(19): siRNA sense strand
guagaggugguauuaaaga

SEQ ID NO: 133103 - RNA, 19 nt, Homo sapiens
  misc_RNA (1)...(19): siRNA sense strand
cagaagaggaucaggagaa

SEQ ID NO: 133104 - RNA, 19 nt, Homo sapiens
  misc_RNA (1)...(19): siRNA sense strand
gaccacaaguccugaagag

SEQ ID NO: 133105 - RNA, 19 nt, Homo sapiens
  misc_RNA (1)...(19): siRNA sense strand
aacaacaacccuaccaaua

SEQ ID NO: 133106 - RNA, 19 nt, Homo sapiens
  misc_RNA (1)...(19): siRNA sense strand
gcuaugguaugcagaugau

SEQ ID NO: 133107 - RNA, 19 nt, Homo sapiens
  misc_RNA (1)...(19): siRNA sense strand
gaaccuccuacagauguua

SEQ ID NO: 133108 - RNA, 19 nt, Homo sapiens
  misc_RNA (1)...(19): siRNA sense strand
aauagaaccucugaaagau

SEQ ID NO: 133109 - RNA, 19 nt, Homo sapiens
  misc_RNA (1)...(19): siRNA sense strand
gaaagccagucuguugaag

SEQ ID NO: 133110 - RNA, 19 nt, Homo sapiens
  misc_RNA (1)...(19): siRNA sense strand
ggaccuaauucuguguaug

SEQ ID NO: 133111 - RNA, 19 nt, Homo sapiens
  misc_RNA (1)...(19): siRNA sense strand
cugaagaauuuccuuuaug

SEQ ID NO: 133112 - RNA, 19 nt, Homo sapiens
  misc_RNA (1)...(19): siRNA sense strand
gaaggaagaaguuguuuug

SEQ ID NO: 133113 - RNA, 19 nt, Homo sapiens
  misc_RNA (1)...(19): siRNA sense strand
gaugcucccugguuugauc

SEQ ID NO: 133114 - RNA, 19 nt, Homo sapiens
  misc_RNA (1)...(19): siRNA sense strand
gcagaugaugaauaaggua

SEQ ID NO: 133115 - RNA, 19 nt, Homo sapiens
  misc_RNA (1)...(19): siRNA sense strand
auauuuggcccaccaguua

SEQ ID NO: 133116 - RNA, 19 nt, Homo sapiens
  misc_RNA (1)...(19): siRNA sense strand
gggcagagaacuuggacuu

SEQ ID NO: 133117 - RNA, 19 nt, Homo sapiens
  misc_RNA (1)...(19): siRNA sense strand
gaagagugagggaacuguu

SEQ ID NO: 133118 - RNA, 19 nt, Homo sapiens
  misc_RNA (1)...(19): siRNA sense strand
ucauugcugugcacauuga

SEQ ID NO: 133119 - RNA, 19 nt, Homo sapiens
  misc_RNA (1)...(19): siRNA sense strand
ugacugggaaucacuuauu

SEQ ID NO: 133120 - RNA, 19 nt, Homo sapiens
  misc_RNA (1)...(19): siRNA sense strand
gaagaaguuguuuugcuua

SEQ ID NO: 133121 - RNA, 19 nt, Homo sapiens
  misc_RNA (1)...(19): siRNA sense strand
gcacaacagaagaggauca

SEQ ID NO: 133122 - RNA, 19 nt, Homo sapiens
  misc_RNA (1)...(19): siRNA sense strand
aguaauagaaccucugaaa

SEQ ID NO: 133123 - RNA, 19 nt, Homo sapiens
  misc_RNA (1)...(19): siRNA sense strand
ugacacagagcucaucaga

SEQ ID NO: 133124 - RNA, 19 nt, Homo sapiens
  misc_RNA (1)...(19): siRNA sense strand
gauagaaccccacggaaaa

SEQ ID NO: 133125 - RNA, 19 nt, Homo sapiens
  misc_RNA (1)...(19): siRNA sense strand
cauaguagcaggcauagca

SEQ ID NO: 133126 - RNA, 19 nt, Homo sapiens
  misc_RNA (1)...(19): siRNA sense strand
uuggagaaaugaacuugaa

SEQ ID NO: 133127 - RNA, 19 nt, Homo sapiens
  misc_RNA (1)...(19): siRNA sense strand
ugaaagugcaucccuuguu

SEQ ID NO: 133128 - RNA, 19 nt, Homo sapiens
  misc_RNA (1)...(19): siRNA sense strand
uuuacggccugaucuaauu

SEQ ID NO: 133129 - RNA, 19 nt, Homo sapiens
  misc_RNA (1)...(19): siRNA sense strand
gguuugauccagcaauauu

SEQ ID NO: 133130 - RNA, 19 nt, Homo sapiens
  misc_RNA (1)...(19): siRNA sense strand
caggagaagcugaugcaaa

SEQ ID NO: 133131 - RNA, 19 nt, Homo sapiens
  misc_RNA (1)...(19): siRNA sense strand
gaaaagaauuagcaaaacg

SEQ ID NO: 133132 - RNA, 19 nt, Homo sapiens
  misc_RNA (1)...(19): siRNA sense strand
guaggcacgucaaaaguuu

SEQ ID NO: 133133 - RNA, 19 nt, Homo sapiens
  misc_RNA (1)...(19): siRNA sense strand
cagagaacuugaguguauu

SEQ ID NO: 133134 - RNA, 19 nt, Homo sapiens
  misc_RNA (1)...(19): siRNA sense strand
ggaacaacaacccuaccaa

SEQ ID NO: 133135 - RNA, 19 nt, Homo sapiens
  misc_RNA (1)...(19): siRNA sense strand
aagaagauuccugguauuu

SEQ ID NO: 133136 - RNA, 19 nt, Homo sapiens
  misc_RNA (1)...(19): siRNA sense strand
uauaaaggaacaaggauuc

SEQ ID NO: 133137 - RNA, 19 nt, Homo sapiens
  misc_RNA (1)...(19): siRNA sense strand
guaauagaaccucugaaag

SEQ ID NO: 133138 - RNA, 19 nt, Homo sapiens
  misc_RNA (1)...(19): siRNA sense strand
gcaaagcugaacucaucaa

SEQ ID NO: 133139 - RNA, 19 nt, Homo sapiens
  misc_RNA (1)...(19): siRNA sense strand
gaaagagacugcacaacac

SEQ ID NO: 133140 - RNA, 19 nt, Homo sapiens
  misc_RNA (1)...(19): siRNA sense strand
gcaaguaccaaguggagua

SEQ ID NO: 133141 - RNA, 19 nt, Homo sapiens
  misc_RNA (1)...(19): siRNA sense strand
gaagauuuacgaacucuau

SEQ ID NO: 133142 - RNA, 19 nt, Homo sapiens
  misc_RNA (1)...(19): siRNA sense strand
cgaacucuaugccguauga

SEQ ID NO: 133143 - RNA, 19 nt, Homo sapiens
  misc_RNA (1)...(19): siRNA sense strand
ggaguacgacgccuauaaa

SEQ ID NO: 133144 - RNA, 19 nt, Homo sapiens
  misc_RNA (1)...(19): siRNA sense strand
gcgcugcccuuagauuauu

SEQ ID NO: 133145 - RNA, 19 nt, Homo sapiens
  misc_RNA (1)...(19): siRNA sense strand
guacgacgccuauaaacug

SEQ ID NO: 133146 - RNA, 19 nt, Homo sapiens
  misc_RNA (1)...(19): siRNA sense strand
gcaacugccugcacaagac

SEQ ID NO: 133147 - RNA, 19 nt, Homo sapiens
  misc_RNA (1)...(19): siRNA sense strand
gccacagacugcuacauug

SEQ ID NO: 133148 - RNA, 19 nt, Homo sapiens
  misc_RNA (1)...(19): siRNA sense strand
agaaagagacugcacaaca

SEQ ID NO: 133149 - RNA, 19 nt, Homo sapiens
  misc_RNA (1)...(19): siRNA sense strand
ggccacagacugcuacauu

SEQ ID NO: 133150 - RNA, 19 nt, Homo sapiens
  misc_RNA (1)...(19): siRNA sense strand
gcccugguguacuguguaa

SEQ ID NO: 133151 - RNA, 19 nt, Homo sapiens
  misc_RNA (1)...(19): siRNA sense strand
gauuauucccacuacauuu

SEQ ID NO: 133152 - RNA, 19 nt, Homo sapiens
  misc_RNA (1)...(19): siRNA sense strand
gaaggacgaccugcacaga

SEQ ID NO: 133153 - RNA, 19 nt, Homo sapiens
  misc_RNA (1)...(19): siRNA sense strand
ugcaugagaucuacaaugg

SEQ ID NO: 133154 - RNA, 19 nt, Homo sapiens
  misc_RNA (1)...(19): siRNA sense strand
aggacgaccugcacagaaa

SEQ ID NO: 133155 - RNA, 19 nt, Homo sapiens
  misc_RNA (1)...(19): siRNA sense strand
cccaagaccaguuugagua

SEQ ID NO: 133156 - RNA, 19 nt, Homo sapiens
  misc_RNA (1)...(19): siRNA sense strand
uggaagcccaguacaagua

SEQ ID NO: 133157 - RNA, 19 nt, Homo sapiens
  misc_RNA (1)...(19): siRNA sense strand
gguguacuguguaaagaag

SEQ ID NO: 133158 - RNA, 19 nt, Homo sapiens
  misc_RNA (1)...(19): siRNA sense strand
aaagaagauuuacgaacuc

SEQ ID NO: 133159 - RNA, 19 nt, Homo sapiens
  misc_RNA (1)...(19): siRNA sense strand
gaaugcccaagaccaguuu

SEQ ID NO: 133160 - RNA, 19 nt, Homo sapiens
  misc_RNA (1)...(19): siRNA sense strand
gagagagggugagcuuguc

SEQ ID NO: 133161 - RNA, 19 nt, Homo sapiens
  misc_RNA (1)...(19): siRNA sense strand
gggaucuccuggcaguuug

SEQ ID NO: 133162 - RNA, 19 nt, Homo sapiens
  misc_RNA (1)...(19): siRNA sense strand
ccacagacugcuacauugu

SEQ ID NO: 133163 - RNA, 19 nt, Homo sapiens
  misc_RNA (1)...(19): siRNA sense strand
uggaguacgacgccuauaa

SEQ ID NO: 133164 - RNA, 19 nt, Homo sapiens
  misc_RNA (1)...(19): siRNA sense strand
gagacugcacaacacgaua

SEQ ID NO: 133165 - RNA, 19 nt, Homo sapiens
  misc_RNA (1)...(19): siRNA sense strand
cgagagagggugagcuugu

SEQ ID NO: 133166 - RNA, 19 nt, Homo sapiens
  misc_RNA (1)...(19): siRNA sense strand
cguuggcgcugcccuuaga

SEQ ID NO: 133167 - RNA, 19 nt, Homo sapiens
  misc_RNA (1)...(19): siRNA sense strand
uggcgcugcccuuagauua

SEQ ID NO: 133168 - RNA, 19 nt, Homo sapiens
  misc_RNA (1)...(19): siRNA sense strand
acugcuacauugugcauga

SEQ ID NO: 133169 - RNA, 19 nt, Homo sapiens
  misc_RNA (1)...(19): siRNA sense strand
gugcaugagaucuacaaug

SEQ ID NO: 133170 - RNA, 19 nt, Homo sapiens
  misc_RNA (1)...(19): siRNA sense strand
gcuacauugugcaugagau

SEQ ID NO: 133171 - RNA, 19 nt, Homo sapiens
  misc_RNA (1)...(19): siRNA sense strand
caaguacauugugauugag

SEQ ID NO: 133172 - RNA, 19 nt, Homo sapiens
  misc_RNA (1)...(19): siRNA sense strand
acagaaagagacugcacaa

SEQ ID NO: 133173 - RNA, 19 nt, Homo sapiens
  misc_RNA (1)...(19): siRNA sense strand
gauugagcccacucgcauu

SEQ ID NO: 133174 - RNA, 19 nt, Homo sapiens
  misc_RNA (1)...(19): siRNA sense strand
aagaccaguuugaguacga

SEQ ID NO: 133175 - RNA, 19 nt, Homo sapiens
  misc_RNA (1)...(19): siRNA sense strand
uacgacgccuauaaacugu

SEQ ID NO: 133176 - RNA, 19 nt, Homo sapiens
  misc_RNA (1)...(19): siRNA sense strand
gcccaagaccaguuugagu

SEQ ID NO: 133177 - RNA, 19 nt, Homo sapiens
  misc_RNA (1)...(19): siRNA sense strand
agauuauucccacuacauu

SEQ ID NO: 133178 - RNA, 19 nt, Homo sapiens
  misc_RNA (1)...(19): siRNA sense strand
gcagaauguuccagaauuu

SEQ ID NO: 133179 - RNA, 19 nt, Homo sapiens
  misc_RNA (1)...(19): siRNA sense strand
gcacaugccuuggauuuga

SEQ ID NO: 133180 - RNA, 19 nt, Homo sapiens
  misc_RNA (1)...(19): siRNA sense strand
gaacuucacuggaggucaa

SEQ ID NO: 133181 - RNA, 19 nt, Homo sapiens
  misc_RNA (1)...(19): siRNA sense strand
ggagagugcuuauuaacug

SEQ ID NO: 133182 - RNA, 19 nt, Homo sapiens
  misc_RNA (1)...(19): siRNA sense strand
ggagaaagcauugauuuau

SEQ ID NO: 133183 - RNA, 19 nt, Homo sapiens
  misc_RNA (1)...(19): siRNA sense strand
gagaaagcauugauuuauc

SEQ ID NO: 133184 - RNA, 19 nt, Homo sapiens
  misc_RNA (1)...(19): siRNA sense strand
aaauacagauggcaagauu

SEQ ID NO: 133185 - RNA, 19 nt, Homo sapiens
  misc_RNA (1)...(19): siRNA sense strand
gaggagaaagcauugauuu

SEQ ID NO: 133186 - RNA, 19 nt, Homo sapiens
  misc_RNA (1)...(19): siRNA sense strand
gagaaagacuaugaaauac

SEQ ID NO: 133187 - RNA, 19 nt, Homo sapiens
  misc_RNA (1)...(19): siRNA sense strand
gagcuuucacugcugauua

SEQ ID NO: 133188 - RNA, 19 nt, Homo sapiens
  misc_RNA (1)...(19): siRNA sense strand
gcccaucaucggaauauua

SEQ ID NO: 133189 - RNA, 19 nt, Homo sapiens
  misc_RNA (1)...(19): siRNA sense strand
ccaguggcauccagagaaa

SEQ ID NO: 133190 - RNA, 19 nt, Homo sapiens
  misc_RNA (1)...(19): siRNA sense strand
ucaguucaguccaauuuau

SEQ ID NO: 133191 - RNA, 19 nt, Homo sapiens
  misc_RNA (1)...(19): siRNA sense strand
uuacagagaaagacuauga

SEQ ID NO: 133192 - RNA, 19 nt, Homo sapiens
  misc_RNA (1)...(19): siRNA sense strand
gaguuuauuucaacaaugg

SEQ ID NO: 133193 - RNA, 19 nt, Homo sapiens
  misc_RNA (1)...(19): siRNA sense strand
uaguggagagugcuuauua

SEQ ID NO: 133194 - RNA, 19 nt, Homo sapiens
  misc_RNA (1)...(19): siRNA sense strand
uuucaacaauggaaggaua

SEQ ID NO: 133195 - RNA, 19 nt, Homo sapiens
  misc_RNA (1)...(19): siRNA sense strand
ggcuggaucuuacagagaa

SEQ ID NO: 133196 - RNA, 19 nt, Homo sapiens
  misc_RNA (1)...(19): siRNA sense strand
gaauuuggauggcauuucc

SEQ ID NO: 133197 - RNA, 19 nt, Homo sapiens
  misc_RNA (1)...(19): siRNA sense strand
caacaauggaaggauauaa

SEQ ID NO: 133198 - RNA, 19 nt, Homo sapiens
  misc_RNA (1)...(19): siRNA sense strand
uaucaguucaguccaauuu

SEQ ID NO: 133199 - RNA, 19 nt, Homo sapiens
  misc_RNA (1)...(19): siRNA sense strand
caauggaaggauauaagua

SEQ ID NO: 133200 - RNA, 19 nt, Homo sapiens
  misc_RNA (1)...(19): siRNA sense strand
gaccucagacgcucagauu

SEQ ID NO: 133201 - RNA, 19 nt, Homo sapiens
  misc_RNA (1)...(19): siRNA sense strand
cagagaaagcaccuuauga

SEQ ID NO: 133202 - RNA, 19 nt, Homo sapiens
  misc_RNA (1)...(19): siRNA sense strand
cuuauuaacugccacagau

SEQ ID NO: 133203 - RNA, 19 nt, Homo sapiens
  misc_RNA (1)...(19): siRNA sense strand
ggcaagauugaguuuauuu

SEQ ID NO: 133204 - RNA, 19 nt, Homo sapiens
  misc_RNA (1)...(19): siRNA sense strand
gagaaagcaccuuaugagu

SEQ ID NO: 133205 - RNA, 19 nt, Homo sapiens
  misc_RNA (1)...(19): siRNA sense strand
ugcgagaguuguaccagua

SEQ ID NO: 133206 - RNA, 19 nt, Homo sapiens
  misc_RNA (1)...(19): siRNA sense strand
ugacugccaauuuccauaa

SEQ ID NO: 133207 - RNA, 19 nt, Homo sapiens
  misc_RNA (1)...(19): siRNA sense strand
acgcucagauuaugcuaaa

SEQ ID NO: 133208 - RNA, 19 nt, Homo sapiens
  misc_RNA (1)...(19): siRNA sense strand
ccuuaugaguggaagaauu

SEQ ID NO: 133209 - RNA, 19 nt, Homo sapiens
  misc_RNA (1)...(19): siRNA sense strand
caucaucggaauauuaaug

SEQ ID NO: 133210 - RNA, 19 nt, Homo sapiens
  misc_RNA (1)...(19): siRNA sense strand
ccucagacgcucagauuau

SEQ ID NO: 133211 - RNA, 19 nt, Homo sapiens
  misc_RNA (1)...(19): siRNA sense strand
gcaagauugaguuuauuuc

SEQ ID NO: 133212 - RNA, 19 nt, Homo sapiens
  misc_RNA (1)...(19): siRNA sense strand
ccagagaaagcaccuuaug

SEQ ID NO: 133213 - RNA, 19 nt, Homo sapiens
  misc_RNA (1)...(19): siRNA sense strand
aggagaaagcauugauuua

SEQ ID NO: 133214 - RNA, 19 nt, Homo sapiens
  misc_RNA (1)...(19): siRNA sense strand
cuuaugaguggaagaauuu

SEQ ID NO: 133215 - RNA, 19 nt, Homo sapiens
  misc_RNA (1)...(19): siRNA sense strand
agcagaauguuccagaauu

SEQ ID NO: 133216 - RNA, 19 nt, Homo sapiens
  misc_RNA (1)...(19): siRNA sense strand
gaagaggagaaagcauuga

SEQ ID NO: 133217 - RNA, 19 nt, Homo sapiens
  misc_RNA (1)...(19): siRNA sense strand
gaagaauuuggauggcauu

SEQ ID NO: 133218 - RNA, 19 nt, Homo sapiens
  misc_RNA (1)...(19): siRNA sense strand
gcucagauuaugcuaaagu

SEQ ID NO: 133219 - RNA, 19 nt, Homo sapiens
  misc_RNA (1)...(19): siRNA sense strand
auacagauggcaagauuga

SEQ ID NO: 133220 - RNA, 19 nt, Homo sapiens
  misc_RNA (1)...(19): siRNA sense strand
aguggagagugcuuauuaa

SEQ ID NO: 133221 - RNA, 19 nt, Homo sapiens
  misc_RNA (1)...(19): siRNA sense strand
uauaacuuguccauacaga

SEQ ID NO: 133222 - RNA, 19 nt, Homo sapiens
  misc_RNA (1)...(19): siRNA sense strand
caauugcacagcagaaugu

SEQ ID NO: 133223 - RNA, 19 nt, Homo sapiens
  misc_RNA (1)...(19): siRNA sense strand
uaacuuguccauacagagu

SEQ ID NO: 133224 - RNA, 19 nt, Homo sapiens
  misc_RNA (1)...(19): siRNA sense strand
gccucuccgugaagaauuu

SEQ ID NO: 133225 - RNA, 19 nt, Homo sapiens
  misc_RNA (1)...(19): siRNA sense strand
caguucaguccaauuuaua

SEQ ID NO: 133226 - RNA, 19 nt, Homo sapiens
  misc_RNA (1)...(19): siRNA sense strand
gauggcaagauugaguuua

SEQ ID NO: 133227 - RNA, 19 nt, Homo sapiens
  misc_RNA (1)...(19): siRNA sense strand
cagagaaagacuaugaaau

SEQ ID NO: 133228 - RNA, 19 nt, Homo sapiens
  misc_RNA (1)...(19): siRNA sense strand
cguccuauguaaaguacuu

SEQ ID NO: 133229 - RNA, 19 nt, Homo sapiens
  misc_RNA (1)...(19): siRNA sense strand
gaaccucugacugccaauu

SEQ ID NO: 133230 - RNA, 19 nt, Homo sapiens
  misc_RNA (1)...(19): siRNA sense strand
gaauuuuccuacugaguug

SEQ ID NO: 133231 - RNA, 19 nt, Homo sapiens
  misc_RNA (1)...(19): siRNA sense strand
acagagaaagacuaugaaa

SEQ ID NO: 133232 - RNA, 19 nt, Homo sapiens
  misc_RNA (1)...(19): siRNA sense strand
gcgagaguuguaccaguaa

SEQ ID NO: 133233 - RNA, 19 nt, Homo sapiens
  misc_RNA (1)...(19): siRNA sense strand
cccaucaucggaauauuaa

SEQ ID NO: 133234 - RNA, 19 nt, Homo sapiens
  misc_RNA (1)...(19): siRNA sense strand
ugaagaggagaaagcauug

SEQ ID NO: 133235 - RNA, 19 nt, Homo sapiens
  misc_RNA (1)...(19): siRNA sense strand
agagaaagcaccuuaugag

SEQ ID NO: 133236 - RNA, 19 nt, Homo sapiens
  misc_RNA (1)...(19): siRNA sense strand
cacaugccuuggauuugaa

SEQ ID NO: 133237 - RNA, 19 nt, Homo sapiens
  misc_RNA (1)...(19): siRNA sense strand
gaagcccaucaucggaaua

SEQ ID NO: 133238 - RNA, 19 nt, Homo sapiens
  misc_RNA (1)...(19): siRNA sense strand
auaaguauccaguauaugg

SEQ ID NO: 133239 - RNA, 19 nt, Homo sapiens
  misc_RNA (1)...(19): siRNA sense strand
uggcaagauugaguuuauu

SEQ ID NO: 133240 - RNA, 19 nt, Homo sapiens
  misc_RNA (1)...(19): siRNA sense strand
acagcagaauguuccagaa

SEQ ID NO: 133241 - RNA, 19 nt, Homo sapiens
  misc_RNA (1)...(19): siRNA sense strand
cugaagaggagaaagcauu

SEQ ID NO: 133242 - RNA, 19 nt, Homo sapiens
  misc_RNA (1)...(19): siRNA sense strand
cuauauugcugcguccuau

SEQ ID NO: 133243 - RNA, 19 nt, Homo sapiens
  misc_RNA (1)...(19): siRNA sense strand
gauuaguggagagugcuua

SEQ ID NO: 133244 - RNA, 19 nt, Homo sapiens
  misc_RNA (1)...(19): siRNA sense strand
cagcagaauguuccagaau

SEQ ID NO: 133245 - RNA, 19 nt, Homo sapiens
  misc_RNA (1)...(19): siRNA sense strand
auggcaagauugaguuuau

SEQ ID NO: 133246 - RNA, 19 nt, Homo sapiens
  misc_RNA (1)...(19): siRNA sense strand
cugaguuguugcugucauu

SEQ ID NO: 133247 - RNA, 19 nt, Homo sapiens
  misc_RNA (1)...(19): siRNA sense strand
gcuggaucuuacagagaaa

SEQ ID NO: 133248 - RNA, 19 nt, Homo sapiens
  misc_RNA (1)...(19): siRNA sense strand
caaauacagauggcaagau

SEQ ID NO: 133249 - RNA, 19 nt, Homo sapiens
  misc_RNA (1)...(19): siRNA sense strand
ucaauugcacagcagaaug

SEQ ID NO: 133250 - RNA, 19 nt, Homo sapiens
  misc_RNA (1)...(19): siRNA sense strand
ucaacaauggaaggauaua

SEQ ID NO: 133251 - RNA, 19 nt, Homo sapiens
  misc_RNA (1)...(19): siRNA sense strand
agaagcccaucaucggaau

SEQ ID NO: 133252 - RNA, 19 nt, Homo sapiens
  misc_RNA (1)...(19): siRNA sense strand
aggaaguguugaccucaga

SEQ ID NO: 133253 - RNA, 19 nt, Homo sapiens
  misc_RNA (1)...(19): siRNA sense strand
cucagacgcucagauuaug

SEQ ID NO: 133254 - RNA, 19 nt, Homo sapiens
  misc_RNA (1)...(19): siRNA sense strand
caucggaauauuaaugcaa

SEQ ID NO: 133255 - RNA, 19 nt, Homo sapiens
  misc_RNA (1)...(19): siRNA sense strand
gagccucuccgugaagaau

SEQ ID NO: 133256 - RNA, 19 nt, Homo sapiens
  misc_RNA (1)...(19): siRNA sense strand
gugcugggccugcuacucu

SEQ ID NO: 133257 - RNA, 19 nt, Homo sapiens
  misc_RNA (1)...(19): siRNA sense strand
uugaugauggagacuauuu

SEQ ID NO: 133258 - RNA, 19 nt, Homo sapiens
  misc_RNA (1)...(19): siRNA sense strand
acaauggaaggauauaagu

SEQ ID NO: 133259 - RNA, 19 nt, Homo sapiens
  misc_RNA (1)...(19): siRNA sense strand
cagauggcaagauugaguu

SEQ ID NO: 133260 - RNA, 19 nt, Homo sapiens
  misc_RNA (1)...(19): siRNA sense strand
cugccaauuuccauaagug

SEQ ID NO: 133261 - RNA, 19 nt, Homo sapiens
  misc_RNA (1)...(19): siRNA sense strand
ugaguuguugcugucauua

SEQ ID NO: 133262 - RNA, 19 nt, Homo sapiens
  misc_RNA (1)...(19): siRNA sense strand
ggucaauugcacagcagaa

SEQ ID NO: 133263 - RNA, 19 nt, Homo sapiens
  misc_RNA (1)...(19): siRNA sense strand
uuauuaacugccacagaua

SEQ ID NO: 133264 - RNA, 19 nt, Homo sapiens
  misc_RNA (1)...(19): siRNA sense strand
cagagaaccuggagauaua

SEQ ID NO: 133265 - RNA, 19 nt, Homo sapiens
  misc_RNA (1)...(19): siRNA sense strand
ggaauaugcuuggauaaga

SEQ ID NO: 133266 - RNA, 19 nt, Homo sapiens
  misc_RNA (1)...(19): siRNA sense strand
caaugaagcugaccucugu

SEQ ID NO: 133267 - RNA, 19 nt, Homo sapiens
  misc_RNA (1)...(19): siRNA sense strand
gcaaaugcccucagcagaa

SEQ ID NO: 133268 - RNA, 19 nt, Homo sapiens
  misc_RNA (1)...(19): siRNA sense strand
gaugcuguaucccuaauaa

SEQ ID NO: 133269 - RNA, 19 nt, Homo sapiens
  misc_RNA (1)...(19): siRNA sense strand
caauaaagauucccaaagg

SEQ ID NO: 133270 - RNA, 19 nt, Homo sapiens
  misc_RNA (1)...(19): siRNA sense strand
ggaaagaagucugaucagu

SEQ ID NO: 133271 - RNA, 19 nt, Homo sapiens
  misc_RNA (1)...(19): siRNA sense strand
aaagaagucugaucaguca

SEQ ID NO: 133272 - RNA, 19 nt, Homo sapiens
  misc_RNA (1)...(19): siRNA sense strand
guacgagacuggagugugu

SEQ ID NO: 133273 - RNA, 19 nt, Homo sapiens
  misc_RNA (1)...(19): siRNA sense strand
gauuacaucuugugugugu

SEQ ID NO: 133274 - RNA, 19 nt, Homo sapiens
  misc_RNA (1)...(19): siRNA sense strand
gcagagaaccuggagauau

SEQ ID NO: 133275 - RNA, 19 nt, Homo sapiens
  misc_RNA (1)...(19): siRNA sense strand
cgacagcaauauauuaaag

SEQ ID NO: 133276 - RNA, 19 nt, Homo sapiens
  misc_RNA (1)...(19): siRNA sense strand
auagaaaucucccacuuau

SEQ ID NO: 133277 - RNA, 19 nt, Homo sapiens
  misc_RNA (1)...(19): siRNA sense strand
cagcaacugugaaaugaga

SEQ ID NO: 133278 - RNA, 19 nt, Homo sapiens
  misc_RNA (1)...(19): siRNA sense strand
cuaacagggugaccaauga

SEQ ID NO: 133279 - RNA, 19 nt, Homo sapiens
  misc_RNA (1)...(19): siRNA sense strand
uggaagaugcuguggauua

SEQ ID NO: 133280 - RNA, 19 nt, Homo sapiens
  misc_RNA (1)...(19): siRNA sense strand
gaauaugcuuggauaagag

SEQ ID NO: 133281 - RNA, 19 nt, Homo sapiens
  misc_RNA (1)...(19): siRNA sense strand
uauagaaaucucccacuua

SEQ ID NO: 133282 - RNA, 19 nt, Homo sapiens
  misc_RNA (1)...(19): siRNA sense strand
ggaagaugcuguggauuac

SEQ ID NO: 133283 - RNA, 19 nt, Homo sapiens
  misc_RNA (1)...(19): siRNA sense strand
aaacaugccaaccuacuuu

SEQ ID NO: 133284 - RNA, 19 nt, Homo sapiens
  misc_RNA (1)...(19): siRNA sense strand
gaacaugugggaugggaau

SEQ ID NO: 133285 - RNA, 19 nt, Homo sapiens
  misc_RNA (1)...(19): siRNA sense strand
cagagaaacugcagagaac

SEQ ID NO: 133286 - RNA, 19 nt, Homo sapiens
  misc_RNA (1)...(19): siRNA sense strand
uguggaauaugcuuggaua

SEQ ID NO: 133287 - RNA, 19 nt, Homo sapiens
  misc_RNA (1)...(19): siRNA sense strand
ucaaccagguacauuauca

SEQ ID NO: 133288 - RNA, 19 nt, Homo sapiens
  misc_RNA (1)...(19): siRNA sense strand
gagugagccuggugagaga

SEQ ID NO: 133289 - RNA, 19 nt, Homo sapiens
  misc_RNA (1)...(19): siRNA sense strand
caaaugcccucagcagaag

SEQ ID NO: 133290 - RNA, 19 nt, Homo sapiens
  misc_RNA (1)...(19): siRNA sense strand
aaacaaugccagcuuauag

SEQ ID NO: 133291 - RNA, 19 nt, Homo sapiens
  misc_RNA (1)...(19): siRNA sense strand
gaaaagacuguguuacauu

SEQ ID NO: 133292 - RNA, 19 nt, Homo sapiens
  misc_RNA (1)...(19): siRNA sense strand
caaccuacuuuccaacucu

SEQ ID NO: 133293 - RNA, 19 nt, Homo sapiens
  misc_RNA (1)...(19): siRNA sense strand
acaaaacaaugccagcuua

SEQ ID NO: 133294 - RNA, 19 nt, Homo sapiens
  misc_RNA (1)...(19): siRNA sense strand
gcacaccucuguucauacc

SEQ ID NO: 133295 - RNA, 19 nt, Homo sapiens
  misc_RNA (1)...(19): siRNA sense strand
ucagagaaacugcagagaa

SEQ ID NO: 133296 - RNA, 19 nt, Homo sapiens
  misc_RNA (1)...(19): siRNA sense strand
uggauuacaucuugugugu

SEQ ID NO: 133297 - RNA, 19 nt, Homo sapiens
  misc_RNA (1)...(19): siRNA sense strand
gagaugcuguaucccuaau

SEQ ID NO: 133298 - RNA, 19 nt, Homo sapiens
  misc_RNA (1)...(19): siRNA sense strand
uuucugagcucaagauucu

SEQ ID NO: 133299 - RNA, 19 nt, Homo sapiens
  misc_RNA (1)...(19): siRNA sense strand
uacagcagcuuucaacaag

SEQ ID NO: 133300 - RNA, 19 nt, Homo sapiens
  misc_RNA (1)...(19): siRNA sense strand
aauaaagauucccaaagga

SEQ ID NO: 133301 - RNA, 19 nt, Homo sapiens
  misc_RNA (1)...(19): siRNA sense strand
gacaauaaagauucccaaa

SEQ ID NO: 133302 - RNA, 19 nt, Homo sapiens
  misc_RNA (1)...(19): siRNA sense strand
gagcuaaagguggaaagaa

SEQ ID NO: 133303 - RNA, 19 nt, Homo sapiens
  misc_RNA (1)...(19): siRNA sense strand
uuauagaaaucucccacuu

SEQ ID NO: 133304 - RNA, 19 nt, Homo sapiens
  misc_RNA (1)...(19): siRNA sense strand
aaugccagcuuauagaaau

SEQ ID NO: 133305 - RNA, 19 nt, Homo sapiens
  misc_RNA (1)...(19): siRNA sense strand
augcacaccucuguucaua

SEQ ID NO: 133306 - RNA, 19 nt, Homo sapiens
  misc_RNA (1)...(19): siRNA sense strand
ucaacaagcuacaaaacaa

SEQ ID NO: 133307 - RNA, 19 nt, Homo sapiens
  misc_RNA (1)...(19): siRNA sense strand
cuacagcagcuuucaacaa

SEQ ID NO: 133308 - RNA, 19 nt, Homo sapiens
  misc_RNA (1)...(19): siRNA sense strand
aauggaagaugcuguggau

SEQ ID NO: 133309 - RNA, 19 nt, Homo sapiens
  misc_RNA (1)...(19): siRNA sense strand
ucauaauggccaaguguuu

SEQ ID NO: 133310 - RNA, 19 nt, Homo sapiens
  misc_RNA (1)...(19): siRNA sense strand
gagaaaagacuguguuaca

SEQ ID NO: 133311 - RNA, 19 nt, Homo sapiens
  misc_RNA (1)...(19): siRNA sense strand
gcaacugugaaaugagaaa

SEQ ID NO: 133312 - RNA, 19 nt, Homo sapiens
  misc_RNA (1)...(19): siRNA sense strand
ccacacaaagggcuguauu

SEQ ID NO: 133313 - RNA, 19 nt, Homo sapiens
  misc_RNA (1)...(19): siRNA sense strand
gcuguauugugacuacuca

SEQ ID NO: 133314 - RNA, 19 nt, Homo sapiens
  misc_RNA (1)...(19): siRNA sense strand
uaaaaucugugccaagcaa

SEQ ID NO: 133315 - RNA, 19 nt, Homo sapiens
  misc_RNA (1)...(19): siRNA sense strand
gggaugggaauaucuaaca

SEQ ID NO: 133316 - RNA, 19 nt, Homo sapiens
  misc_RNA (1)...(19): siRNA sense strand
guggaaagaagucugauca

SEQ ID NO: 133317 - RNA, 19 nt, Homo sapiens
  misc_RNA (1)...(19): siRNA sense strand
ggaaaucugcaaugaagcu

SEQ ID NO: 133318 - RNA, 19 nt, Homo sapiens
  misc_RNA (1)...(19): siRNA sense strand
ggggaaaucugcaaugaag

SEQ ID NO: 133319 - RNA, 19 nt, Homo sapiens
  misc_RNA (1)...(19): siRNA sense strand
gagaaccuggagauauauu

SEQ ID NO: 133320 - RNA, 19 nt, Homo sapiens
  misc_RNA (1)...(19): siRNA sense strand
gaaccuggagauauauuuu

SEQ ID NO: 133321 - RNA, 19 nt, Homo sapiens
  misc_RNA (1)...(19): siRNA sense strand
guucaaccagguacauuau

SEQ ID NO: 133322 - RNA, 19 nt, Homo sapiens
  misc_RNA (1)...(19): siRNA sense strand
uaacagggugaccaaugaa

SEQ ID NO: 133323 - RNA, 19 nt, Homo sapiens
  misc_RNA (1)...(19): siRNA sense strand
gucaaacuguagccuggaa

SEQ ID NO: 133324 - RNA, 19 nt, Homo sapiens
  misc_RNA (1)...(19): siRNA sense strand
acaccucuguucauaccaa

SEQ ID NO: 133325 - RNA, 19 nt, Homo sapiens
  misc_RNA (1)...(19): siRNA sense strand
gcgacagcaauauauuaaa

SEQ ID NO: 133326 - RNA, 19 nt, Homo sapiens
  misc_RNA (1)...(19): siRNA sense strand
aaaagacuguguuacauuc

SEQ ID NO: 133327 - RNA, 19 nt, Homo sapiens
  misc_RNA (1)...(19): siRNA sense strand
caaugccagcuuauagaaa

SEQ ID NO: 133328 - RNA, 19 nt, Homo sapiens
  misc_RNA (1)...(19): siRNA sense strand
gaagucugaucagucaaac

SEQ ID NO: 133329 - RNA, 19 nt, Homo sapiens
  misc_RNA (1)...(19): siRNA sense strand
ggagcuaaagguggaaaga

SEQ ID NO: 133330 - RNA, 19 nt, Homo sapiens
  misc_RNA (1)...(19): siRNA sense strand
ggaugggaauaucuaacag

SEQ ID NO: 133331 - RNA, 19 nt, Homo sapiens
  misc_RNA (1)...(19): siRNA sense strand
acaaugccagcuuauagaa

SEQ ID NO: 133332 - RNA, 19 nt, Homo sapiens
  misc_RNA (1)...(19): siRNA sense strand
agaagucugaucagucaaa

SEQ ID NO: 133333 - RNA, 19 nt, Homo sapiens
  misc_RNA (1)...(19): siRNA sense strand
aagaugcuguggauuacau

SEQ ID NO: 133334 - RNA, 19 nt, Homo sapiens
  misc_RNA (1)...(19): siRNA sense strand
aaccagguacauuaucaua

SEQ ID NO: 133335 - RNA, 19 nt, Homo sapiens
  misc_RNA (1)...(19): siRNA sense strand
acuguagccuggaaccauu

SEQ ID NO: 133336 - RNA, 19 nt, Homo sapiens
  misc_RNA (1)...(19): siRNA sense strand
gcuaaagguggaaagaagu

SEQ ID NO: 133337 - RNA, 19 nt, Homo sapiens
  misc_RNA (1)...(19): siRNA sense strand
caguagacaggccuaggua

SEQ ID NO: 133338 - RNA, 19 nt, Homo sapiens
  misc_RNA (1)...(19): siRNA sense strand
cauaauggccaaguguuuc

SEQ ID NO: 133339 - RNA, 19 nt, Homo sapiens
  misc_RNA (1)...(19): siRNA sense strand
agaguuacaaacccacuuu

SEQ ID NO: 133340 - RNA, 19 nt, Homo sapiens
  misc_RNA (1)...(19): siRNA sense strand
caugugggaugggaauauc

SEQ ID NO: 133341 - RNA, 19 nt, Homo sapiens
  misc_RNA (1)...(19): siRNA sense strand
ucacuggcccugcaaaugc

SEQ ID NO: 133342 - RNA, 19 nt, Homo sapiens
  misc_RNA (1)...(19): siRNA sense strand
ugcgacagcaauauauuaa

SEQ ID NO: 133343 - RNA, 19 nt, Homo sapiens
  misc_RNA (1)...(19): siRNA sense strand
acaauaaagauucccaaag

SEQ ID NO: 133344 - RNA, 19 nt, Homo sapiens
  misc_RNA (1)...(19): siRNA sense strand
uaucauaauggccaagugu

SEQ ID NO: 133345 - RNA, 19 nt, Homo sapiens
  misc_RNA (1)...(19): siRNA sense strand
ggaugcacaccucuguuca

SEQ ID NO: 133346 - RNA, 19 nt, Homo sapiens
  misc_RNA (1)...(19): siRNA sense strand
gaagaugcuguggauuaca

SEQ ID NO: 133347 - RNA, 19 nt, Homo sapiens
  misc_RNA (1)...(19): siRNA sense strand
uagccuggaaccauuacua

SEQ ID NO: 133348 - RNA, 19 nt, Homo sapiens
  misc_RNA (1)...(19): siRNA sense strand
cacacaaagggcuguauug

SEQ ID NO: 133349 - RNA, 19 nt, Homo sapiens
  misc_RNA (1)...(19): siRNA sense strand
ugcuguggauuacaucuug

SEQ ID NO: 133350 - RNA, 19 nt, Homo sapiens
  misc_RNA (1)...(19): siRNA sense strand
ccaacucuccaaagcugaa

SEQ ID NO: 133351 - RNA, 19 nt, Homo sapiens
  misc_RNA (1)...(19): siRNA sense strand
uagaaaucucccacuuauu

SEQ ID NO: 133352 - RNA, 19 nt, Homo sapiens
  misc_RNA (1)...(19): siRNA sense strand
gcuguaucccuaauaaguc

SEQ ID NO: 133353 - RNA, 19 nt, Homo sapiens
  misc_RNA (1)...(19): siRNA sense strand
ccaaccuacuuuccaacuc

SEQ ID NO: 133354 - RNA, 19 nt, Homo sapiens
  misc_RNA (1)...(19): siRNA sense strand
ucuaacagggugaccaaug

SEQ ID NO: 133355 - RNA, 19 nt, Homo sapiens
  misc_RNA (1)...(19): siRNA sense strand
aguucaaccagguacauua

SEQ ID NO: 133356 - RNA, 19 nt, Homo sapiens
  misc_RNA (1)...(19): siRNA sense strand
agaaccuggagauauauuu

SEQ ID NO: 133357 - RNA, 19 nt, Homo sapiens
  misc_RNA (1)...(19): siRNA sense strand
agagauggcuguggaugcu

SEQ ID NO: 133358 - RNA, 19 nt, Homo sapiens
  misc_RNA (1)...(19): siRNA sense strand
gaguucaaccagguacauu

SEQ ID NO: 133359 - RNA, 19 nt, Homo sapiens
  misc_RNA (1)...(19): siRNA sense strand
aacaaugccagcuuauaga

SEQ ID NO: 133360 - RNA, 19 nt, Homo sapiens
  misc_RNA (1)...(19): siRNA sense strand
cagagaaccuggagauaua

SEQ ID NO: 133361 - RNA, 19 nt, Homo sapiens
  misc_RNA (1)...(19): siRNA sense strand
ggaauaugcuuggauaaga

SEQ ID NO: 133362 - RNA, 19 nt, Homo sapiens
  misc_RNA (1)...(19): siRNA sense strand
caaugaagcugaccucugu

SEQ ID NO: 133363 - RNA, 19 nt, Homo sapiens
  misc_RNA (1)...(19): siRNA sense strand
gcaaaugcccucagcagaa

SEQ ID NO: 133364 - RNA, 19 nt, Homo sapiens
  misc_RNA (1)...(19): siRNA sense strand
gaugcuguaucccuaauaa

SEQ ID NO: 133365 - RNA, 19 nt, Homo sapiens
  misc_RNA (1)...(19): siRNA sense strand
caauaaagauucccaaagg

SEQ ID NO: 133366 - RNA, 19 nt, Homo sapiens
  misc_RNA (1)...(19): siRNA sense strand
ggaaagaagucugaucagu

SEQ ID NO: 133367 - RNA, 19 nt, Homo sapiens
  misc_RNA (1)...(19): siRNA sense strand
aaagaagucugaucaguca

SEQ ID NO: 133368 - RNA, 19 nt, Homo sapiens
  misc_RNA (1)...(19): siRNA sense strand
guacgagacuggagugugu

SEQ ID NO: 133369 - RNA, 19 nt, Homo sapiens
  misc_RNA (1)...(19): siRNA sense strand
gauuacaucuugugugugu

SEQ ID NO: 133370 - RNA, 19 nt, Homo sapiens
  misc_RNA (1)...(19): siRNA sense strand
gcagagaaccuggagauau

SEQ ID NO: 133371 - RNA, 19 nt, Homo sapiens
  misc_RNA (1)...(19): siRNA sense strand
cgacagcaauauauuaaag

SEQ ID NO: 133372 - RNA, 19 nt, Homo sapiens
  misc_RNA (1)...(19): siRNA sense strand
auagaaaucucccacuuau

SEQ ID NO: 133373 - RNA, 19 nt, Homo sapiens
  misc_RNA (1)...(19): siRNA sense strand
cagcaacugugaaaugaga

SEQ ID NO: 133374 - RNA, 19 nt, Homo sapiens
  misc_RNA (1)...(19): siRNA sense strand
cuaacagggugaccaauga

SEQ ID NO: 133375 - RNA, 19 nt, Homo sapiens
  misc_RNA (1)...(19): siRNA sense strand
uggaagaugcuguggauua

SEQ ID NO: 133376 - RNA, 19 nt, Homo sapiens
  misc_RNA (1)...(19): siRNA sense strand
gaauaugcuuggauaagag

SEQ ID NO: 133377 - RNA, 19 nt, Homo sapiens
  misc_RNA (1)...(19): siRNA sense strand
uauagaaaucucccacuua

SEQ ID NO: 133378 - RNA, 19 nt, Homo sapiens
  misc_RNA (1)...(19): siRNA sense strand
ggaagaugcuguggauuac

SEQ ID NO: 133379 - RNA, 19 nt, Homo sapiens
  misc_RNA (1)...(19): siRNA sense strand
aaacaugccaaccuacuuu

SEQ ID NO: 133380 - RNA, 19 nt, Homo sapiens
  misc_RNA (1)...(19): siRNA sense strand
gaacaugugggaugggaau

SEQ ID NO: 133381 - RNA, 19 nt, Homo sapiens
  misc_RNA (1)...(19): siRNA sense strand
cagagaaacugcagagaac

SEQ ID NO: 133382 - RNA, 19 nt, Homo sapiens
  misc_RNA (1)...(19): siRNA sense strand
uguggaauaugcuuggaua

SEQ ID NO: 133383 - RNA, 19 nt, Homo sapiens
  misc_RNA (1)...(19): siRNA sense strand
ucaaccagguacauuauca

SEQ ID NO: 133384 - RNA, 19 nt, Homo sapiens
  misc_RNA (1)...(19): siRNA sense strand
gagugagccuggugagaga

SEQ ID NO: 133385 - RNA, 19 nt, Homo sapiens
  misc_RNA (1)...(19): siRNA sense strand
caaaugcccucagcagaag

SEQ ID NO: 133386 - RNA, 19 nt, Homo sapiens
  misc_RNA (1)...(19): siRNA sense strand
aaacaaugccagcuuauag

SEQ ID NO: 133387 - RNA, 19 nt, Homo sapiens
  misc_RNA (1)...(19): siRNA sense strand
gaaaagacuguguuacauu

SEQ ID NO: 133388 - RNA, 19 nt, Homo sapiens
  misc_RNA (1)...(19): siRNA sense strand
caaccuacuuuccaacucu

SEQ ID NO: 133389 - RNA, 19 nt, Homo sapiens
  misc_RNA (1)...(19): siRNA sense strand
acaaaacaaugccagcuua

SEQ ID NO: 133390 - RNA, 19 nt, Homo sapiens
  misc_RNA (1)...(19): siRNA sense strand
gcacaccucuguucauacc

SEQ ID NO: 133391 - RNA, 19 nt, Homo sapiens
  misc_RNA (1)...(19): siRNA sense strand
ucagagaaacugcagagaa

SEQ ID NO: 133392 - RNA, 19 nt, Homo sapiens
  misc_RNA (1)...(19): siRNA sense strand
uggauuacaucuugugugu

SEQ ID NO: 133393 - RNA, 19 nt, Homo sapiens
  misc_RNA (1)...(19): siRNA sense strand
gagaugcuguaucccuaau

SEQ ID NO: 133394 - RNA, 19 nt, Homo sapiens
  misc_RNA (1)...(19): siRNA sense strand
uuucugagcucaagauucu

SEQ ID NO: 133395 - RNA, 19 nt, Homo sapiens
  misc_RNA (1)...(19): siRNA sense strand
uacagcagcuuucaacaag

SEQ ID NO: 133396 - RNA, 19 nt, Homo sapiens
  misc_RNA (1)...(19): siRNA sense strand
aauaaagauucccaaagga

SEQ ID NO: 133397 - RNA, 19 nt, Homo sapiens
  misc_RNA (1)...(19): siRNA sense strand
gacaauaaagauucccaaa

SEQ ID NO: 133398 - RNA, 19 nt, Homo sapiens
  misc_RNA (1)...(19): siRNA sense strand
gagcuaaagguggaaagaa

SEQ ID NO: 133399 - RNA, 19 nt, Homo sapiens
  misc_RNA (1)...(19): siRNA sense strand
uuauagaaaucucccacuu

SEQ ID NO: 133400 - RNA, 19 nt, Homo sapiens
  misc_RNA (1)...(19): siRNA sense strand
aaugccagcuuauagaaau

SEQ ID NO: 133401 - RNA, 19 nt, Homo sapiens
  misc_RNA (1)...(19): siRNA sense strand
augcacaccucuguucaua

SEQ ID NO: 133402 - RNA, 19 nt, Homo sapiens
  misc_RNA (1)...(19): siRNA sense strand
ucaacaagcuacaaaacaa

SEQ ID NO: 133403 - RNA, 19 nt, Homo sapiens
  misc_RNA (1)...(19): siRNA sense strand
cuacagcagcuuucaacaa

SEQ ID NO: 133404 - RNA, 19 nt, Homo sapiens
  misc_RNA (1)...(19): siRNA sense strand
aauggaagaugcuguggau

SEQ ID NO: 133405 - RNA, 19 nt, Homo sapiens
  misc_RNA (1)...(19): siRNA sense strand
ucauaauggccaaguguuu

SEQ ID NO: 133406 - RNA, 19 nt, Homo sapiens
  misc_RNA (1)...(19): siRNA sense strand
gagaaaagacuguguuaca

SEQ ID NO: 133407 - RNA, 19 nt, Homo sapiens
  misc_RNA (1)...(19): siRNA sense strand
gcaacugugaaaugagaaa

SEQ ID NO: 133408 - RNA, 19 nt, Homo sapiens
  misc_RNA (1)...(19): siRNA sense strand
ccacacaaagggcuguauu

SEQ ID NO: 133409 - RNA, 19 nt, Homo sapiens
  misc_RNA (1)...(19): siRNA sense strand
gcuguauugugacuacuca

SEQ ID NO: 133410 - RNA, 19 nt, Homo sapiens
  misc_RNA (1)...(19): siRNA sense strand
uaaaaucugugccaagcaa

SEQ ID NO: 133411 - RNA, 19 nt, Homo sapiens
  misc_RNA (1)...(19): siRNA sense strand
gggaugggaauaucuaaca

SEQ ID NO: 133412 - RNA, 19 nt, Homo sapiens
  misc_RNA (1)...(19): siRNA sense strand
guggaaagaagucugauca

SEQ ID NO: 133413 - RNA, 19 nt, Homo sapiens
  misc_RNA (1)...(19): siRNA sense strand
ggaaaucugcaaugaagcu

SEQ ID NO: 133414 - RNA, 19 nt, Homo sapiens
  misc_RNA (1)...(19): siRNA sense strand
ggggaaaucugcaaugaag

SEQ ID NO: 133415 - RNA, 19 nt, Homo sapiens
  misc_RNA (1)...(19): siRNA sense strand
gagaaccuggagauauauu

SEQ ID NO: 133416 - RNA, 19 nt, Homo sapiens
  misc_RNA (1)...(19): siRNA sense strand
gaaccuggagauauauuuu

SEQ ID NO: 133417 - RNA, 19 nt, Homo sapiens
  misc_RNA (1)...(19): siRNA sense strand
guucaaccagguacauuau

SEQ ID NO: 133418 - RNA, 19 nt, Homo sapiens
  misc_RNA (1)...(19): siRNA sense strand
uaacagggugaccaaugaa

SEQ ID NO: 133419 - RNA, 19 nt, Homo sapiens
  misc_RNA (1)...(19): siRNA sense strand
gucaaacuguagccuggaa

SEQ ID NO: 133420 - RNA, 19 nt, Homo sapiens
  misc_RNA (1)...(19): siRNA sense strand
acaccucuguucauaccaa

SEQ ID NO: 133421 - RNA, 19 nt, Homo sapiens
  misc_RNA (1)...(19): siRNA sense strand
gcgacagcaauauauuaaa

SEQ ID NO: 133422 - RNA, 19 nt, Homo sapiens
  misc_RNA (1)...(19): siRNA sense strand
aaaagacuguguuacauuc

SEQ ID NO: 133423 - RNA, 19 nt, Homo sapiens
  misc_RNA (1)...(19): siRNA sense strand
caaugccagcuuauagaaa

SEQ ID NO: 133424 - RNA, 19 nt, Homo sapiens
  misc_RNA (1)...(19): siRNA sense strand
gaagucugaucagucaaac

SEQ ID NO: 133425 - RNA, 19 nt, Homo sapiens
  misc_RNA (1)...(19): siRNA sense strand
ggagcuaaagguggaaaga

SEQ ID NO: 133426 - RNA, 19 nt, Homo sapiens
  misc_RNA (1)...(19): siRNA sense strand
ggaugggaauaucuaacag

SEQ ID NO: 133427 - RNA, 19 nt, Homo sapiens
  misc_RNA (1)...(19): siRNA sense strand
acaaugccagcuuauagaa

SEQ ID NO: 133428 - RNA, 19 nt, Homo sapiens
  misc_RNA (1)...(19): siRNA sense strand
agaagucugaucagucaaa

SEQ ID NO: 133429 - RNA, 19 nt, Homo sapiens
  misc_RNA (1)...(19): siRNA sense strand
aagaugcuguggauuacau

SEQ ID NO: 133430 - RNA, 19 nt, Homo sapiens
  misc_RNA (1)...(19): siRNA sense strand
aaccagguacauuaucaua

SEQ ID NO: 133431 - RNA, 19 nt, Homo sapiens
  misc_RNA (1)...(19): siRNA sense strand
acuguagccuggaaccauu

SEQ ID NO: 133432 - RNA, 19 nt, Homo sapiens
  misc_RNA (1)...(19): siRNA sense strand
gcuaaagguggaaagaagu

SEQ ID NO: 133433 - RNA, 19 nt, Homo sapiens
  misc_RNA (1)...(19): siRNA sense strand
caguagacaggccuaggua

SEQ ID NO: 133434 - RNA, 19 nt, Homo sapiens
  misc_RNA (1)...(19): siRNA sense strand
cauaauggccaaguguuuc

SEQ ID NO: 133435 - RNA, 19 nt, Homo sapiens
  misc_RNA (1)...(19): siRNA sense strand
agaguuacaaacccacuuu

SEQ ID NO: 133436 - RNA, 19 nt, Homo sapiens
  misc_RNA (1)...(19): siRNA sense strand
caugugggaugggaauauc

SEQ ID NO: 133437 - RNA, 19 nt, Homo sapiens
  misc_RNA (1)...(19): siRNA sense strand
ucacuggcccugcaaaugc

SEQ ID NO: 133438 - RNA, 19 nt, Homo sapiens
  misc_RNA (1)...(19): siRNA sense strand
ugcgacagcaauauauuaa

SEQ ID NO: 133439 - RNA, 19 nt, Homo sapiens
  misc_RNA (1)...(19): siRNA sense strand
acaauaaagauucccaaag

SEQ ID NO: 133440 - RNA, 19 nt, Homo sapiens
  misc_RNA (1)...(19): siRNA sense strand
uaucauaauggccaagugu

SEQ ID NO: 133441 - RNA, 19 nt, Homo sapiens
  misc_RNA (1)...(19): siRNA sense strand
ggaugcacaccucuguuca

SEQ ID NO: 133442 - RNA, 19 nt, Homo sapiens
  misc_RNA (1)...(19): siRNA sense strand
gaagaugcuguggauuaca

SEQ ID NO: 133443 - RNA, 19 nt, Homo sapiens
  misc_RNA (1)...(19): siRNA sense strand
uagccuggaaccauuacua

SEQ ID NO: 133444 - RNA, 19 nt, Homo sapiens
  misc_RNA (1)...(19): siRNA sense strand
cacacaaagggcuguauug

SEQ ID NO: 133445 - RNA, 19 nt, Homo sapiens
  misc_RNA (1)...(19): siRNA sense strand
ugcuguggauuacaucuug

SEQ ID NO: 133446 - RNA, 19 nt, Homo sapiens
  misc_RNA (1)...(19): siRNA sense strand
ccaacucuccaaagcugaa

SEQ ID NO: 133447 - RNA, 19 nt, Homo sapiens
  misc_RNA (1)...(19): siRNA sense strand
uagaaaucucccacuuauu

SEQ ID NO: 133448 - RNA, 19 nt, Homo sapiens
  misc_RNA (1)...(19): siRNA sense strand
gcuguaucccuaauaaguc

SEQ ID NO: 133449 - RNA, 19 nt, Homo sapiens
  misc_RNA (1)...(19): siRNA sense strand
ccaaccuacuuuccaacuc

SEQ ID NO: 133450 - RNA, 19 nt, Homo sapiens
  misc_RNA (1)...(19): siRNA sense strand
ucuaacagggugaccaaug

SEQ ID NO: 133451 - RNA, 19 nt, Homo sapiens
  misc_RNA (1)...(19): siRNA sense strand
aguucaaccagguacauua

SEQ ID NO: 133452 - RNA, 19 nt, Homo sapiens
  misc_RNA (1)...(19): siRNA sense strand
agaaccuggagauauauuu

SEQ ID NO: 133453 - RNA, 19 nt, Homo sapiens
  misc_RNA (1)...(19): siRNA sense strand
agagauggcuguggaugcu

SEQ ID NO: 133454 - RNA, 19 nt, Homo sapiens
  misc_RNA (1)...(19): siRNA sense strand
gaguucaaccagguacauu

SEQ ID NO: 133455 - RNA, 19 nt, Homo sapiens
  misc_RNA (1)...(19): siRNA sense strand
aacaaugccagcuuauaga

SEQ ID NO: 133456 - RNA, 19 nt, Homo sapiens
  misc_RNA (1)...(19): siRNA sense strand
cagagaaccuggagauaua

SEQ ID NO: 133457 - RNA, 19 nt, Homo sapiens
  misc_RNA (1)...(19): siRNA sense strand
ggaauaugcuuggauaaga

SEQ ID NO: 133458 - RNA, 19 nt, Homo sapiens
  misc_RNA (1)...(19): siRNA sense strand
caaugaagcugaccucugu

SEQ ID NO: 133459 - RNA, 19 nt, Homo sapiens
  misc_RNA (1)...(19): siRNA sense strand
gcaaaugcccucagcagaa

SEQ ID NO: 133460 - RNA, 19 nt, Homo sapiens
  misc_RNA (1)...(19): siRNA sense strand
gaugcuguaucccuaauaa

SEQ ID NO: 133461 - RNA, 19 nt, Homo sapiens
  misc_RNA (1)...(19): siRNA sense strand
caauaaagauucccaaagg

SEQ ID NO: 133462 - RNA, 19 nt, Homo sapiens
  misc_RNA (1)...(19): siRNA sense strand
ggaaagaagucugaucagu

SEQ ID NO: 133463 - RNA, 19 nt, Homo sapiens
  misc_RNA (1)...(19): siRNA sense strand
aaagaagucugaucaguca

SEQ ID NO: 133464 - RNA, 19 nt, Homo sapiens
  misc_RNA (1)...(19): siRNA sense strand
guacgagacuggagugugu

SEQ ID NO: 133465 - RNA, 19 nt, Homo sapiens
  misc_RNA (1)...(19): siRNA sense strand
gauuacaucuugugugugu

SEQ ID NO: 133466 - RNA, 19 nt, Homo sapiens
  misc_RNA (1)...(19): siRNA sense strand
gcagagaaccuggagauau

SEQ ID NO: 133467 - RNA, 19 nt, Homo sapiens
  misc_RNA (1)...(19): siRNA sense strand
cgacagcaauauauuaaag

SEQ ID NO: 133468 - RNA, 19 nt, Homo sapiens
  misc_RNA (1)...(19): siRNA sense strand
auagaaaucucccacuuau

SEQ ID NO: 133469 - RNA, 19 nt, Homo sapiens
  misc_RNA (1)...(19): siRNA sense strand
cagcaacugugaaaugaga

SEQ ID NO: 133470 - RNA, 19 nt, Homo sapiens
  misc_RNA (1)...(19): siRNA sense strand
cuaacagggugaccaauga

SEQ ID NO: 133471 - RNA, 19 nt, Homo sapiens
  misc_RNA (1)...(19): siRNA sense strand
uggaagaugcuguggauua

SEQ ID NO: 133472 - RNA, 19 nt, Homo sapiens
  misc_RNA (1)...(19): siRNA sense strand
gaauaugcuuggauaagag

SEQ ID NO: 133473 - RNA, 19 nt, Homo sapiens
  misc_RNA (1)...(19): siRNA sense strand
uauagaaaucucccacuua

SEQ ID NO: 133474 - RNA, 19 nt, Homo sapiens
  misc_RNA (1)...(19): siRNA sense strand
ggaagaugcuguggauuac

SEQ ID NO: 133475 - RNA, 19 nt, Homo sapiens
  misc_RNA (1)...(19): siRNA sense strand
aaacaugccaaccuacuuu

SEQ ID NO: 133476 - RNA, 19 nt, Homo sapiens
  misc_RNA (1)...(19): siRNA sense strand
gaacaugugggaugggaau

SEQ ID NO: 133477 - RNA, 19 nt, Homo sapiens
  misc_RNA (1)...(19): siRNA sense strand
cagagaaacugcagagaac

SEQ ID NO: 133478 - RNA, 19 nt, Homo sapiens
  misc_RNA (1)...(19): siRNA sense strand
uguggaauaugcuuggaua

SEQ ID NO: 133479 - RNA, 19 nt, Homo sapiens
  misc_RNA (1)...(19): siRNA sense strand
ucaaccagguacauuauca

SEQ ID NO: 133480 - RNA, 19 nt, Homo sapiens
  misc_RNA (1)...(19): siRNA sense strand
gagugagccuggugagaga

SEQ ID NO: 133481 - RNA, 19 nt, Homo sapiens
  misc_RNA (1)...(19): siRNA sense strand
caaaugcccucagcagaag

SEQ ID NO: 133482 - RNA, 19 nt, Homo sapiens
  misc_RNA (1)...(19): siRNA sense strand
aaacaaugccagcuuauag

SEQ ID NO: 133483 - RNA, 19 nt, Homo sapiens
  misc_RNA (1)...(19): siRNA sense strand
gaaaagacuguguuacauu

SEQ ID NO: 133484 - RNA, 19 nt, Homo sapiens
  misc_RNA (1)...(19): siRNA sense strand
caaccuacuuuccaacucu

SEQ ID NO: 133485 - RNA, 19 nt, Homo sapiens
  misc_RNA (1)...(19): siRNA sense strand
acaaaacaaugccagcuua

SEQ ID NO: 133486 - RNA, 19 nt, Homo sapiens
  misc_RNA (1)...(19): siRNA sense strand
gcacaccucuguucauacc

SEQ ID NO: 133487 - RNA, 19 nt, Homo sapiens
  misc_RNA (1)...(19): siRNA sense strand
ucagagaaacugcagagaa

SEQ ID NO: 133488 - RNA, 19 nt, Homo sapiens
  misc_RNA (1)...(19): siRNA sense strand
uggauuacaucuugugugu

SEQ ID NO: 133489 - RNA, 19 nt, Homo sapiens
  misc_RNA (1)...(19): siRNA sense strand
gagaugcuguaucccuaau

SEQ ID NO: 133490 - RNA, 19 nt, Homo sapiens
  misc_RNA (1)...(19): siRNA sense strand
uuucugagcucaagauucu

SEQ ID NO: 133491 - RNA, 19 nt, Homo sapiens
  misc_RNA (1)...(19): siRNA sense strand
uacagcagcuuucaacaag

SEQ ID NO: 133492 - RNA, 19 nt, Homo sapiens
  misc_RNA (1)...(19): siRNA sense strand
aauaaagauucccaaagga

SEQ ID NO: 133493 - RNA, 19 nt, Homo sapiens
  misc_RNA (1)...(19): siRNA sense strand
gacaauaaagauucccaaa

SEQ ID NO: 133494 - RNA, 19 nt, Homo sapiens
  misc_RNA (1)...(19): siRNA sense strand
gagcuaaagguggaaagaa

SEQ ID NO: 133495 - RNA, 19 nt, Homo sapiens
  misc_RNA (1)...(19): siRNA sense strand
uuauagaaaucucccacuu

SEQ ID NO: 133496 - RNA, 19 nt, Homo sapiens
  misc_RNA (1)...(19): siRNA sense strand
aaugccagcuuauagaaau

SEQ ID NO: 133497 - RNA, 19 nt, Homo sapiens
  misc_RNA (1)...(19): siRNA sense strand
augcacaccucuguucaua

SEQ ID NO: 133498 - RNA, 19 nt, Homo sapiens
  misc_RNA (1)...(19): siRNA sense strand
ucaacaagcuacaaaacaa

SEQ ID NO: 133499 - RNA, 19 nt, Homo sapiens
  misc_RNA (1)...(19): siRNA sense strand
cuacagcagcuuucaacaa

SEQ ID NO: 133500 - RNA, 19 nt, Homo sapiens
  misc_RNA (1)...(19): siRNA sense strand
aauggaagaugcuguggau

SEQ ID NO: 133501 - RNA, 19 nt, Homo sapiens
  misc_RNA (1)...(19): siRNA sense strand
ucauaauggccaaguguuu

SEQ ID NO: 133502 - RNA, 19 nt, Homo sapiens
  misc_RNA (1)...(19): siRNA sense strand
gagaaaagacuguguuaca

SEQ ID NO: 133503 - RNA, 19 nt, Homo sapiens
  misc_RNA (1)...(19): siRNA sense strand
gcaacugugaaaugagaaa

SEQ ID NO: 133504 - RNA, 19 nt, Homo sapiens
  misc_RNA (1)...(19): siRNA sense strand
ccacacaaagggcuguauu

SEQ ID NO: 133505 - RNA, 19 nt, Homo sapiens
  misc_RNA (1)...(19): siRNA sense strand
gcuguauugugacuacuca

SEQ ID NO: 133506 - RNA, 19 nt, Homo sapiens
  misc_RNA (1)...(19): siRNA sense strand
uaaaaucugugccaagcaa

SEQ ID NO: 133507 - RNA, 19 nt, Homo sapiens
  misc_RNA (1)...(19): siRNA sense strand
gggaugggaauaucuaaca

SEQ ID NO: 133508 - RNA, 19 nt, Homo sapiens
  misc_RNA (1)...(19): siRNA sense strand
guggaaagaagucugauca

SEQ ID NO: 133509 - RNA, 19 nt, Homo sapiens
  misc_RNA (1)...(19): siRNA sense strand
ggaaaucugcaaugaagcu

SEQ ID NO: 133510 - RNA, 19 nt, Homo sapiens
  misc_RNA (1)...(19): siRNA sense strand
ggggaaaucugcaaugaag

SEQ ID NO: 133511 - RNA, 19 nt, Homo sapiens
  misc_RNA (1)...(19): siRNA sense strand
gagaaccuggagauauauu

SEQ ID NO: 133512 - RNA, 19 nt, Homo sapiens
  misc_RNA (1)...(19): siRNA sense strand
gaaccuggagauauauuuu

SEQ ID NO: 133513 - RNA, 19 nt, Homo sapiens
  misc_RNA (1)...(19): siRNA sense strand
guucaaccagguacauuau

SEQ ID NO: 133514 - RNA, 19 nt, Homo sapiens
  misc_RNA (1)...(19): siRNA sense strand
uaacagggugaccaaugaa

SEQ ID NO: 133515 - RNA, 19 nt, Homo sapiens
  misc_RNA (1)...(19): siRNA sense strand
gucaaacuguagccuggaa

SEQ ID NO: 133516 - RNA, 19 nt, Homo sapiens
  misc_RNA (1)...(19): siRNA sense strand
acaccucuguucauaccaa

SEQ ID NO: 133517 - RNA, 19 nt, Homo sapiens
  misc_RNA (1)...(19): siRNA sense strand
gcgacagcaauauauuaaa

SEQ ID NO: 133518 - RNA, 19 nt, Homo sapiens
  misc_RNA (1)...(19): siRNA sense strand
aaaagacuguguuacauuc

SEQ ID NO: 133519 - RNA, 19 nt, Homo sapiens
  misc_RNA (1)...(19): siRNA sense strand
caaugccagcuuauagaaa

SEQ ID NO: 133520 - RNA, 19 nt, Homo sapiens
  misc_RNA (1)...(19): siRNA sense strand
gaagucugaucagucaaac

SEQ ID NO: 133521 - RNA, 19 nt, Homo sapiens
  misc_RNA (1)...(19): siRNA sense strand
ggagcuaaagguggaaaga

SEQ ID NO: 133522 - RNA, 19 nt, Homo sapiens
  misc_RNA (1)...(19): siRNA sense strand
ggaugggaauaucuaacag

SEQ ID NO: 133523 - RNA, 19 nt, Homo sapiens
  misc_RNA (1)...(19): siRNA sense strand
acaaugccagcuuauagaa

SEQ ID NO: 133524 - RNA, 19 nt, Homo sapiens
  misc_RNA (1)...(19): siRNA sense strand
agaagucugaucagucaaa

SEQ ID NO: 133525 - RNA, 19 nt, Homo sapiens
  misc_RNA (1)...(19): siRNA sense strand
aagaugcuguggauuacau

SEQ ID NO: 133526 - RNA, 19 nt, Homo sapiens
  misc_RNA (1)...(19): siRNA sense strand
aaccagguacauuaucaua

SEQ ID NO: 133527 - RNA, 19 nt, Homo sapiens
  misc_RNA (1)...(19): siRNA sense strand
acuguagccuggaaccauu

SEQ ID NO: 133528 - RNA, 19 nt, Homo sapiens
  misc_RNA (1)...(19): siRNA sense strand
gcuaaagguggaaagaagu

SEQ ID NO: 133529 - RNA, 19 nt, Homo sapiens
  misc_RNA (1)...(19): siRNA sense strand
caguagacaggccuaggua

SEQ ID NO: 133530 - RNA, 19 nt, Homo sapiens
  misc_RNA (1)...(19): siRNA sense strand
cauaauggccaaguguuuc

SEQ ID NO: 133531 - RNA, 19 nt, Homo sapiens
  misc_RNA (1)...(19): siRNA sense strand
agaguuacaaacccacuuu

SEQ ID NO: 133532 - RNA, 19 nt, Homo sapiens
  misc_RNA (1)...(19): siRNA sense strand
caugugggaugggaauauc

SEQ ID NO: 133533 - RNA, 19 nt, Homo sapiens
  misc_RNA (1)...(19): siRNA sense strand
ucacuggcccugcaaaugc

SEQ ID NO: 133534 - RNA, 19 nt, Homo sapiens
  misc_RNA (1)...(19): siRNA sense strand
ugcgacagcaauauauuaa

SEQ ID NO: 133535 - RNA, 19 nt, Homo sapiens
  misc_RNA (1)...(19): siRNA sense strand
acaauaaagauucccaaag

SEQ ID NO: 133536 - RNA, 19 nt, Homo sapiens
  misc_RNA (1)...(19): siRNA sense strand
uaucauaauggccaagugu

SEQ ID NO: 133537 - RNA, 19 nt, Homo sapiens
  misc_RNA (1)...(19): siRNA sense strand
ggaugcacaccucuguuca

SEQ ID NO: 133538 - RNA, 19 nt, Homo sapiens
  misc_RNA (1)...(19): siRNA sense strand
gaagaugcuguggauuaca

SEQ ID NO: 133539 - RNA, 19 nt, Homo sapiens
  misc_RNA (1)...(19): siRNA sense strand
uagccuggaaccauuacua

SEQ ID NO: 133540 - RNA, 19 nt, Homo sapiens
  misc_RNA (1)...(19): siRNA sense strand
cacacaaagggcuguauug

SEQ ID NO: 133541 - RNA, 19 nt, Homo sapiens
  misc_RNA (1)...(19): siRNA sense strand
ugcuguggauuacaucuug

SEQ ID NO: 133542 - RNA, 19 nt, Homo sapiens
  misc_RNA (1)...(19): siRNA sense strand
ccaacucuccaaagcugaa

SEQ ID NO: 133543 - RNA, 19 nt, Homo sapiens
  misc_RNA (1)...(19): siRNA sense strand
uagaaaucucccacuuauu

SEQ ID NO: 133544 - RNA, 19 nt, Homo sapiens
  misc_RNA (1)...(19): siRNA sense strand
gcuguaucccuaauaaguc

SEQ ID NO: 133545 - RNA, 19 nt, Homo sapiens
  misc_RNA (1)...(19): siRNA sense strand
ccaaccuacuuuccaacuc

SEQ ID NO: 133546 - RNA, 19 nt, Homo sapiens
  misc_RNA (1)...(19): siRNA sense strand
ucuaacagggugaccaaug

SEQ ID NO: 133547 - RNA, 19 nt, Homo sapiens
  misc_RNA (1)...(19): siRNA sense strand
aguucaaccagguacauua

SEQ ID NO: 133548 - RNA, 19 nt, Homo sapiens
  misc_RNA (1)...(19): siRNA sense strand
agaaccuggagauauauuu

SEQ ID NO: 133549 - RNA, 19 nt, Homo sapiens
  misc_RNA (1)...(19): siRNA sense strand
agagauggcuguggaugcu

SEQ ID NO: 133550 - RNA, 19 nt, Homo sapiens
  misc_RNA (1)...(19): siRNA sense strand
gaguucaaccagguacauu

SEQ ID NO: 133551 - RNA, 19 nt, Homo sapiens
  misc_RNA (1)...(19): siRNA sense strand
aacaaugccagcuuauaga

SEQ ID NO: 133552 - RNA, 19 nt, Homo sapiens
  misc_RNA (1)...(19): siRNA sense strand
ggacauccauacacucauu

SEQ ID NO: 133553 - RNA, 19 nt, Homo sapiens
  misc_RNA (1)...(19): siRNA sense strand
acucggaucuccaauguua

SEQ ID NO: 133554 - RNA, 19 nt, Homo sapiens
  misc_RNA (1)...(19): siRNA sense strand
ucucagaaauugccaacua

SEQ ID NO: 133555 - RNA, 19 nt, Homo sapiens
  misc_RNA (1)...(19): siRNA sense strand
gaaucccaaugacaucuuu

SEQ ID NO: 133556 - RNA, 19 nt, Homo sapiens
  misc_RNA (1)...(19): siRNA sense strand
agaagugucuggcugugua

SEQ ID NO: 133557 - RNA, 19 nt, Homo sapiens
  misc_RNA (1)...(19): siRNA sense strand
caucuuugcugacuuggaa

SEQ ID NO: 133558 - RNA, 19 nt, Homo sapiens
  misc_RNA (1)...(19): siRNA sense strand
ugacaucuuugcugacuug

SEQ ID NO: 133559 - RNA, 19 nt, Homo sapiens
  misc_RNA (1)...(19): siRNA sense strand
ccacucggaucuccaaugu

SEQ ID NO: 133560 - RNA, 19 nt, Homo sapiens
  misc_RNA (1)...(19): siRNA sense strand
ggaguuugcauggacaaua

SEQ ID NO: 133561 - RNA, 19 nt, Homo sapiens
  misc_RNA (1)...(19): siRNA sense strand
cgccagguccuauggauua

SEQ ID NO: 133562 - RNA, 19 nt, Homo sapiens
  misc_RNA (1)...(19): siRNA sense strand
gaguuugcauggacaauag

SEQ ID NO: 133563 - RNA, 19 nt, Homo sapiens
  misc_RNA (1)...(19): siRNA sense strand
gaugugcgcucagcagcuu

SEQ ID NO: 133564 - RNA, 19 nt, Homo sapiens
  misc_RNA (1)...(19): siRNA sense strand
aaccugagcuguaggaauc

SEQ ID NO: 133565 - RNA, 19 nt, Homo sapiens
  misc_RNA (1)...(19): siRNA sense strand
gcuccuaucaacccaagua

SEQ ID NO: 133566 - RNA, 19 nt, Homo sapiens
  misc_RNA (1)...(19): siRNA sense strand
auuaaugccugcuucugua

SEQ ID NO: 133567 - RNA, 19 nt, Homo sapiens
  misc_RNA (1)...(19): siRNA sense strand
gauuaaugccugcuucugu

SEQ ID NO: 133568 - RNA, 19 nt, Homo sapiens
  misc_RNA (1)...(19): siRNA sense strand
guaggaaucccaaugacau

SEQ ID NO: 133569 - RNA, 19 nt, Homo sapiens
  misc_RNA (1)...(19): siRNA sense strand
gcuguaggaaucccaauga

SEQ ID NO: 133570 - RNA, 19 nt, Homo sapiens
  misc_RNA (1)...(19): siRNA sense strand
ugugagugcuguaagaugu

SEQ ID NO: 133571 - RNA, 19 nt, Homo sapiens
  misc_RNA (1)...(19): siRNA sense strand
ggaauccuacccugacuuc

SEQ ID NO: 133572 - RNA, 19 nt, Homo sapiens
  misc_RNA (1)...(19): siRNA sense strand
cgacguguccuuccagugu

SEQ ID NO: 133573 - RNA, 19 nt, Homo sapiens
  misc_RNA (1)...(19): siRNA sense strand
caaguacuguggaguuugc

SEQ ID NO: 133574 - RNA, 19 nt, Homo sapiens
  misc_RNA (1)...(19): siRNA sense strand
cagguccuauggauuaaug

SEQ ID NO: 133575 - RNA, 19 nt, Homo sapiens
  misc_RNA (1)...(19): siRNA sense strand
cacggaggcugccaucugu

SEQ ID NO: 133576 - RNA, 19 nt, Homo sapiens
  misc_RNA (1)...(19): siRNA sense strand
gaacugcauagccuacaca

SEQ ID NO: 133577 - RNA, 19 nt, Homo sapiens
  misc_RNA (1)...(19): siRNA sense strand
cccaaguacuguggaguuu

SEQ ID NO: 133578 - RNA, 19 nt, Homo sapiens
  misc_RNA (1)...(19): siRNA sense strand
ccagaggcauccaugaacu

SEQ ID NO: 133579 - RNA, 19 nt, Homo sapiens
  misc_RNA (1)...(19): siRNA sense strand
cuacgaccauggacuuuac

SEQ ID NO: 133580 - RNA, 19 nt, Homo sapiens
  misc_RNA (1)...(19): siRNA sense strand
gacauccauacacucauua

SEQ ID NO: 133581 - RNA, 19 nt, Homo sapiens
  misc_RNA (1)...(19): siRNA sense strand
caucagcacacgcuccuau

SEQ ID NO: 133582 - RNA, 19 nt, Homo sapiens
  misc_RNA (1)...(19): siRNA sense strand
gggucagccucaucacaga

SEQ ID NO: 133583 - RNA, 19 nt, Homo sapiens
  misc_RNA (1)...(19): siRNA sense strand
gccagguccuauggauuaa

SEQ ID NO: 133584 - RNA, 19 nt, Homo sapiens
  misc_RNA (1)...(19): siRNA sense strand
ggcugugagugcuguaaga

SEQ ID NO: 133585 - RNA, 19 nt, Homo sapiens
  misc_RNA (1)...(19): siRNA sense strand
ggaaucccaaugacaucuu

SEQ ID NO: 133586 - RNA, 19 nt, Homo sapiens
  misc_RNA (1)...(19): siRNA sense strand
uugcugacuuggaauccua

SEQ ID NO: 133587 - RNA, 19 nt, Homo sapiens
  misc_RNA (1)...(19): siRNA sense strand
ucuguaaccugagcuguag

SEQ ID NO: 133588 - RNA, 19 nt, Homo sapiens
  misc_RNA (1)...(19): siRNA sense strand
cagcacacgcuccuaucaa

SEQ ID NO: 133589 - RNA, 19 nt, Homo sapiens
  misc_RNA (1)...(19): siRNA sense strand
ggaacugcauagccuacac

SEQ ID NO: 133590 - RNA, 19 nt, Homo sapiens
  misc_RNA (1)...(19): siRNA sense strand
ccuacgaccauggacuuua

SEQ ID NO: 133591 - RNA, 19 nt, Homo sapiens
  misc_RNA (1)...(19): siRNA sense strand
ccuaucaacccaaguacug

SEQ ID NO: 133592 - RNA, 19 nt, Homo sapiens
  misc_RNA (1)...(19): siRNA sense strand
uuaaugccugcuucuguaa

SEQ ID NO: 133593 - RNA, 19 nt, Homo sapiens
  misc_RNA (1)...(19): siRNA sense strand
gagccgccucugcaacuug

SEQ ID NO: 133594 - RNA, 19 nt, Homo sapiens
  misc_RNA (1)...(19): siRNA sense strand
uaaccugagcuguaggaau

SEQ ID NO: 133595 - RNA, 19 nt, Homo sapiens
  misc_RNA (1)...(19): siRNA sense strand
guacgcaauaggagugugu

SEQ ID NO: 133596 - RNA, 19 nt, Homo sapiens
  misc_RNA (1)...(19): siRNA sense strand
ggacauccauacacucauu

SEQ ID NO: 133597 - RNA, 19 nt, Homo sapiens
  misc_RNA (1)...(19): siRNA sense strand
acucggaucuccaauguua

SEQ ID NO: 133598 - RNA, 19 nt, Homo sapiens
  misc_RNA (1)...(19): siRNA sense strand
ucucagaaauugccaacua

SEQ ID NO: 133599 - RNA, 19 nt, Homo sapiens
  misc_RNA (1)...(19): siRNA sense strand
gaaucccaaugacaucuuu

SEQ ID NO: 133600 - RNA, 19 nt, Homo sapiens
  misc_RNA (1)...(19): siRNA sense strand
agaagugucuggcugugua

SEQ ID NO: 133601 - RNA, 19 nt, Homo sapiens
  misc_RNA (1)...(19): siRNA sense strand
caucuuugcugacuuggaa

SEQ ID NO: 133602 - RNA, 19 nt, Homo sapiens
  misc_RNA (1)...(19): siRNA sense strand
ugacaucuuugcugacuug

SEQ ID NO: 133603 - RNA, 19 nt, Homo sapiens
  misc_RNA (1)...(19): siRNA sense strand
ccacucggaucuccaaugu

SEQ ID NO: 133604 - RNA, 19 nt, Homo sapiens
  misc_RNA (1)...(19): siRNA sense strand
ggaguuugcauggacaaua

SEQ ID NO: 133605 - RNA, 19 nt, Homo sapiens
  misc_RNA (1)...(19): siRNA sense strand
cgccagguccuauggauua

SEQ ID NO: 133606 - RNA, 19 nt, Homo sapiens
  misc_RNA (1)...(19): siRNA sense strand
gaguuugcauggacaauag

SEQ ID NO: 133607 - RNA, 19 nt, Homo sapiens
  misc_RNA (1)...(19): siRNA sense strand
gaugugcgcucagcagcuu

SEQ ID NO: 133608 - RNA, 19 nt, Homo sapiens
  misc_RNA (1)...(19): siRNA sense strand
aaccugagcuguaggaauc

SEQ ID NO: 133609 - RNA, 19 nt, Homo sapiens
  misc_RNA (1)...(19): siRNA sense strand
gcuccuaucaacccaagua

SEQ ID NO: 133610 - RNA, 19 nt, Homo sapiens
  misc_RNA (1)...(19): siRNA sense strand
auuaaugccugcuucugua

SEQ ID NO: 133611 - RNA, 19 nt, Homo sapiens
  misc_RNA (1)...(19): siRNA sense strand
gauuaaugccugcuucugu

SEQ ID NO: 133612 - RNA, 19 nt, Homo sapiens
  misc_RNA (1)...(19): siRNA sense strand
guaggaaucccaaugacau

SEQ ID NO: 133613 - RNA, 19 nt, Homo sapiens
  misc_RNA (1)...(19): siRNA sense strand
gcuguaggaaucccaauga

SEQ ID NO: 133614 - RNA, 19 nt, Homo sapiens
  misc_RNA (1)...(19): siRNA sense strand
ugugagugcuguaagaugu

SEQ ID NO: 133615 - RNA, 19 nt, Homo sapiens
  misc_RNA (1)...(19): siRNA sense strand
ggaauccuacccugacuuc

SEQ ID NO: 133616 - RNA, 19 nt, Homo sapiens
  misc_RNA (1)...(19): siRNA sense strand
cgacguguccuuccagugu

SEQ ID NO: 133617 - RNA, 19 nt, Homo sapiens
  misc_RNA (1)...(19): siRNA sense strand
caaguacuguggaguuugc

SEQ ID NO: 133618 - RNA, 19 nt, Homo sapiens
  misc_RNA (1)...(19): siRNA sense strand
cagguccuauggauuaaug

SEQ ID NO: 133619 - RNA, 19 nt, Homo sapiens
  misc_RNA (1)...(19): siRNA sense strand
cacggaggcugccaucugu

SEQ ID NO: 133620 - RNA, 19 nt, Homo sapiens
  misc_RNA (1)...(19): siRNA sense strand
gaacugcauagccuacaca

SEQ ID NO: 133621 - RNA, 19 nt, Homo sapiens
  misc_RNA (1)...(19): siRNA sense strand
cccaaguacuguggaguuu

SEQ ID NO: 133622 - RNA, 19 nt, Homo sapiens
  misc_RNA (1)...(19): siRNA sense strand
ccagaggcauccaugaacu

SEQ ID NO: 133623 - RNA, 19 nt, Homo sapiens
  misc_RNA (1)...(19): siRNA sense strand
cuacgaccauggacuuuac

SEQ ID NO: 133624 - RNA, 19 nt, Homo sapiens
  misc_RNA (1)...(19): siRNA sense strand
gacauccauacacucauua

SEQ ID NO: 133625 - RNA, 19 nt, Homo sapiens
  misc_RNA (1)...(19): siRNA sense strand
caucagcacacgcuccuau

SEQ ID NO: 133626 - RNA, 19 nt, Homo sapiens
  misc_RNA (1)...(19): siRNA sense strand
gggucagccucaucacaga

SEQ ID NO: 133627 - RNA, 19 nt, Homo sapiens
  misc_RNA (1)...(19): siRNA sense strand
gccagguccuauggauuaa

SEQ ID NO: 133628 - RNA, 19 nt, Homo sapiens
  misc_RNA (1)...(19): siRNA sense strand
ggcugugagugcuguaaga

SEQ ID NO: 133629 - RNA, 19 nt, Homo sapiens
  misc_RNA (1)...(19): siRNA sense strand
ggaaucccaaugacaucuu

SEQ ID NO: 133630 - RNA, 19 nt, Homo sapiens
  misc_RNA (1)...(19): siRNA sense strand
uugcugacuuggaauccua

SEQ ID NO: 133631 - RNA, 19 nt, Homo sapiens
  misc_RNA (1)...(19): siRNA sense strand
ucuguaaccugagcuguag

SEQ ID NO: 133632 - RNA, 19 nt, Homo sapiens
  misc_RNA (1)...(19): siRNA sense strand
cagcacacgcuccuaucaa

SEQ ID NO: 133633 - RNA, 19 nt, Homo sapiens
  misc_RNA (1)...(19): siRNA sense strand
ggaacugcauagccuacac

SEQ ID NO: 133634 - RNA, 19 nt, Homo sapiens
  misc_RNA (1)...(19): siRNA sense strand
ccuacgaccauggacuuua

SEQ ID NO: 133635 - RNA, 19 nt, Homo sapiens
  misc_RNA (1)...(19): siRNA sense strand
ccuaucaacccaaguacug

SEQ ID NO: 133636 - RNA, 19 nt, Homo sapiens
  misc_RNA (1)...(19): siRNA sense strand
uuaaugccugcuucuguaa

SEQ ID NO: 133637 - RNA, 19 nt, Homo sapiens
  misc_RNA (1)...(19): siRNA sense strand
gagccgccucugcaacuug

SEQ ID NO: 133638 - RNA, 19 nt, Homo sapiens
  misc_RNA (1)...(19): siRNA sense strand
uaaccugagcuguaggaau

SEQ ID NO: 133639 - RNA, 19 nt, Homo sapiens
  misc_RNA (1)...(19): siRNA sense strand
guacgcaauaggagugugu

SEQ ID NO: 133640 - RNA, 19 nt, Homo sapiens
  misc_RNA (1)...(19): siRNA sense strand
uaaggaagcuggauuaauu

SEQ ID NO: 133641 - RNA, 19 nt, Homo sapiens
  misc_RNA (1)...(19): siRNA sense strand
gaacagaagcuccaggaua

SEQ ID NO: 133642 - RNA, 19 nt, Homo sapiens
  misc_RNA (1)...(19): siRNA sense strand
gcaaauaauugucagucua

SEQ ID NO: 133643 - RNA, 19 nt, Homo sapiens
  misc_RNA (1)...(19): siRNA sense strand
gcaauuggauacuuuaaga

SEQ ID NO: 133644 - RNA, 19 nt, Homo sapiens
  misc_RNA (1)...(19): siRNA sense strand
gcaauucccucaaccagaa

SEQ ID NO: 133645 - RNA, 19 nt, Homo sapiens
  misc_RNA (1)...(19): siRNA sense strand
ccaauauccuggagaaauu

SEQ ID NO: 133646 - RNA, 19 nt, Homo sapiens
  misc_RNA (1)...(19): siRNA sense strand
gaacagacuccugggaaua

SEQ ID NO: 133647 - RNA, 19 nt, Homo sapiens
  misc_RNA (1)...(19): siRNA sense strand
ucacacggcucgucuuuga

SEQ ID NO: 133648 - RNA, 19 nt, Homo sapiens
  misc_RNA (1)...(19): siRNA sense strand
cuacgugucuaagaaauua

SEQ ID NO: 133649 - RNA, 19 nt, Homo sapiens
  misc_RNA (1)...(19): siRNA sense strand
ugaauaacuuugugcagua

SEQ ID NO: 133650 - RNA, 19 nt, Homo sapiens
  misc_RNA (1)...(19): siRNA sense strand
gauguggaauaucucuuua

SEQ ID NO: 133651 - RNA, 19 nt, Homo sapiens
  misc_RNA (1)...(19): siRNA sense strand
gaagcuggauuaauugaca

SEQ ID NO: 133652 - RNA, 19 nt, Homo sapiens
  misc_RNA (1)...(19): siRNA sense strand
ccaagaaacuggagaaacu

SEQ ID NO: 133653 - RNA, 19 nt, Homo sapiens
  misc_RNA (1)...(19): siRNA sense strand
guugaaggcucuuuggaaa

SEQ ID NO: 133654 - RNA, 19 nt, Homo sapiens
  misc_RNA (1)...(19): siRNA sense strand
cagcgagucuuuaccaauu

SEQ ID NO: 133655 - RNA, 19 nt, Homo sapiens
  misc_RNA (1)...(19): siRNA sense strand
uaucaaggauuaugaagga

SEQ ID NO: 133656 - RNA, 19 nt, Homo sapiens
  misc_RNA (1)...(19): siRNA sense strand
gcagaugaauaugcaauug

SEQ ID NO: 133657 - RNA, 19 nt, Homo sapiens
  misc_RNA (1)...(19): siRNA sense strand
cgaggagucuuguaaaugu

SEQ ID NO: 133658 - RNA, 19 nt, Homo sapiens
  misc_RNA (1)...(19): siRNA sense strand
gagguuaugucuaccauca

SEQ ID NO: 133659 - RNA, 19 nt, Homo sapiens
  misc_RNA (1)...(19): siRNA sense strand
gaaaggcaaacaauaguug

SEQ ID NO: 133660 - RNA, 19 nt, Homo sapiens
  misc_RNA (1)...(19): siRNA sense strand
ucacauaugcagaugaaua

SEQ ID NO: 133661 - RNA, 19 nt, Homo sapiens
  misc_RNA (1)...(19): siRNA sense strand
gaacaagcaagacaggaaa

SEQ ID NO: 133662 - RNA, 19 nt, Homo sapiens
  misc_RNA (1)...(19): siRNA sense strand
gguacuacgugucuaagaa

SEQ ID NO: 133663 - RNA, 19 nt, Homo sapiens
  misc_RNA (1)...(19): siRNA sense strand
gauaaacugccucuugaaa

SEQ ID NO: 133664 - RNA, 19 nt, Homo sapiens
  misc_RNA (1)...(19): siRNA sense strand
gagccgaccugcagcaaau

SEQ ID NO: 133665 - RNA, 19 nt, Homo sapiens
  misc_RNA (1)...(19): siRNA sense strand
gcuagaagaagaaguauau

SEQ ID NO: 133666 - RNA, 19 nt, Homo sapiens
  misc_RNA (1)...(19): siRNA sense strand
cuacaaaugugccaauauc

SEQ ID NO: 133667 - RNA, 19 nt, Homo sapiens
  misc_RNA (1)...(19): siRNA sense strand
gaacucuaauccucacuca

SEQ ID NO: 133668 - RNA, 19 nt, Homo sapiens
  misc_RNA (1)...(19): siRNA sense strand
aacagaagcuccaggauau

SEQ ID NO: 133669 - RNA, 19 nt, Homo sapiens
  misc_RNA (1)...(19): siRNA sense strand
cgacagauuccuauagaaa

SEQ ID NO: 133670 - RNA, 19 nt, Homo sapiens
  misc_RNA (1)...(19): siRNA sense strand
ugaaggagccacuuuaaug

SEQ ID NO: 133671 - RNA, 19 nt, Homo sapiens
  misc_RNA (1)...(19): siRNA sense strand
aaagagaacuacacaaggu

SEQ ID NO: 133672 - RNA, 19 nt, Homo sapiens
  misc_RNA (1)...(19): siRNA sense strand
gcagaaggagauaauuaaa

SEQ ID NO: 133673 - RNA, 19 nt, Homo sapiens
  misc_RNA (1)...(19): siRNA sense strand
acaagaagauccugaugug

SEQ ID NO: 133674 - RNA, 19 nt, Homo sapiens
  misc_RNA (1)...(19): siRNA sense strand
caaagccucuucuggacuu

SEQ ID NO: 133675 - RNA, 19 nt, Homo sapiens
  misc_RNA (1)...(19): siRNA sense strand
ggaagaagaugcagauacc

SEQ ID NO: 133676 - RNA, 19 nt, Homo sapiens
  misc_RNA (1)...(19): siRNA sense strand
gaauuaaucaacgagguua

SEQ ID NO: 133677 - RNA, 19 nt, Homo sapiens
  misc_RNA (1)...(19): siRNA sense strand
uaaaccgcaucaacuauug

SEQ ID NO: 133678 - RNA, 19 nt, Homo sapiens
  misc_RNA (1)...(19): siRNA sense strand
gagagugaauacuacaaau

SEQ ID NO: 133679 - RNA, 19 nt, Homo sapiens
  misc_RNA (1)...(19): siRNA sense strand
gaggagucuuguaaaugua

SEQ ID NO: 133680 - RNA, 19 nt, Homo sapiens
  misc_RNA (1)...(19): siRNA sense strand
gcaaacaauaguugaguug

SEQ ID NO: 133681 - RNA, 19 nt, Homo sapiens
  misc_RNA (1)...(19): siRNA sense strand
cagaagcuccaggauauua

SEQ ID NO: 133682 - RNA, 19 nt, Homo sapiens
  misc_RNA (1)...(19): siRNA sense strand
uaaauguaauggcuggaaa

SEQ ID NO: 133683 - RNA, 19 nt, Homo sapiens
  misc_RNA (1)...(19): siRNA sense strand
ggaacaagcaagacaggaa

SEQ ID NO: 133684 - RNA, 19 nt, Homo sapiens
  misc_RNA (1)...(19): siRNA sense strand
gugaacgccucaagaauag

SEQ ID NO: 133685 - RNA, 19 nt, Homo sapiens
  misc_RNA (1)...(19): siRNA sense strand
aaagauggccguguuauug

SEQ ID NO: 133686 - RNA, 19 nt, Homo sapiens
  misc_RNA (1)...(19): siRNA sense strand
gaagaagaaguauauaguc

SEQ ID NO: 133687 - RNA, 19 nt, Homo sapiens
  misc_RNA (1)...(19): siRNA sense strand
ggauguggaauaucucuuu

SEQ ID NO: 133688 - RNA, 19 nt, Homo sapiens
  misc_RNA (1)...(19): siRNA sense strand
guacaacgccgcugagagu

SEQ ID NO: 133689 - RNA, 19 nt, Homo sapiens
  misc_RNA (1)...(19): siRNA sense strand
gcacaaauucgaaaaguuu

SEQ ID NO: 133690 - RNA, 19 nt, Homo sapiens
  misc_RNA (1)...(19): siRNA sense strand
aagcagaaggagauaauua

SEQ ID NO: 133691 - RNA, 19 nt, Homo sapiens
  misc_RNA (1)...(19): siRNA sense strand
aaagaaaggcaaacaauag

SEQ ID NO: 133692 - RNA, 19 nt, Homo sapiens
  misc_RNA (1)...(19): siRNA sense strand
caagguggcuguguuacug

SEQ ID NO: 133693 - RNA, 19 nt, Homo sapiens
  misc_RNA (1)...(19): siRNA sense strand
ucaacgagguuaugucuac

SEQ ID NO: 133694 - RNA, 19 nt, Homo sapiens
  misc_RNA (1)...(19): siRNA sense strand
gaaggagccacuuuaaugg

SEQ ID NO: 133695 - RNA, 19 nt, Homo sapiens
  misc_RNA (1)...(19): siRNA sense strand
gaacagggugugaauaacu

SEQ ID NO: 133696 - RNA, 19 nt, Homo sapiens
  misc_RNA (1)...(19): siRNA sense strand
agacugcgaucucccaaug

SEQ ID NO: 133697 - RNA, 19 nt, Homo sapiens
  misc_RNA (1)...(19): siRNA sense strand
uggauuaauugacaaguga

SEQ ID NO: 133698 - RNA, 19 nt, Homo sapiens
  misc_RNA (1)...(19): siRNA sense strand
ccucacauaugcagaugaa

SEQ ID NO: 133699 - RNA, 19 nt, Homo sapiens
  misc_RNA (1)...(19): siRNA sense strand
ggaauuaaucaacgagguu

SEQ ID NO: 133700 - RNA, 19 nt, Homo sapiens
  misc_RNA (1)...(19): siRNA sense strand
gaugauauuucuggauaca

SEQ ID NO: 133701 - RNA, 19 nt, Homo sapiens
  misc_RNA (1)...(19): siRNA sense strand
caacgccgcugagagugaa

SEQ ID NO: 133702 - RNA, 19 nt, Homo sapiens
  misc_RNA (1)...(19): siRNA sense strand
ggcaaacaauaguugaguu

SEQ ID NO: 133703 - RNA, 19 nt, Homo sapiens
  misc_RNA (1)...(19): siRNA sense strand
ggaguucgacagauuccua

SEQ ID NO: 133704 - RNA, 19 nt, Homo sapiens
  misc_RNA (1)...(19): siRNA sense strand
uuaaugggaugugagcuaa

SEQ ID NO: 133705 - RNA, 19 nt, Homo sapiens
  misc_RNA (1)...(19): siRNA sense strand
cuaggcauccaaacaguua

SEQ ID NO: 133706 - RNA, 19 nt, Homo sapiens
  misc_RNA (1)...(19): siRNA sense strand
gagugaauacuacaaaugu

SEQ ID NO: 133707 - RNA, 19 nt, Homo sapiens
  misc_RNA (1)...(19): siRNA sense strand
guacuacgugucuaagaaa

SEQ ID NO: 133708 - RNA, 19 nt, Homo sapiens
  misc_RNA (1)...(19): siRNA sense strand
agugaacgccucaagaaua

SEQ ID NO: 133709 - RNA, 19 nt, Homo sapiens
  misc_RNA (1)...(19): siRNA sense strand
uccaggauauuaugaaguu

SEQ ID NO: 133710 - RNA, 19 nt, Homo sapiens
  misc_RNA (1)...(19): siRNA sense strand
cauggaaccugugaagaga

SEQ ID NO: 133711 - RNA, 19 nt, Homo sapiens
  misc_RNA (1)...(19): siRNA sense strand
ggaacacaccugaugaauc

SEQ ID NO: 133712 - RNA, 19 nt, Homo sapiens
  misc_RNA (1)...(19): siRNA sense strand
uaaagauggccguguuauu

SEQ ID NO: 133713 - RNA, 19 nt, Homo sapiens
  misc_RNA (1)...(19): siRNA sense strand
acacaaaacccuugcuuua

SEQ ID NO: 133714 - RNA, 19 nt, Homo sapiens
  misc_RNA (1)...(19): siRNA sense strand
gccgaggagucuuguaaau

SEQ ID NO: 133715 - RNA, 19 nt, Homo sapiens
  misc_RNA (1)...(19): siRNA sense strand
uuggcuauaucaaggauua

SEQ ID NO: 133716 - RNA, 19 nt, Homo sapiens
  misc_RNA (1)...(19): siRNA sense strand
uuuaagcucuugagaaagu

SEQ ID NO: 133717 - RNA, 19 nt, Homo sapiens
  misc_RNA (1)...(19): siRNA sense strand
cagagacccugaccagcuu

SEQ ID NO: 133718 - RNA, 19 nt, Homo sapiens
  misc_RNA (1)...(19): siRNA sense strand
agauggaguucgacagauu

SEQ ID NO: 133719 - RNA, 19 nt, Homo sapiens
  misc_RNA (1)...(19): siRNA sense strand
caaaacccuugcuuuaauu

SEQ ID NO: 133720 - RNA, 19 nt, Homo sapiens
  misc_RNA (1)...(19): siRNA sense strand
gggaugaggcggcaagguu

SEQ ID NO: 133721 - RNA, 19 nt, Homo sapiens
  misc_RNA (1)...(19): siRNA sense strand
ggagaaaagaggaaaauga

SEQ ID NO: 133722 - RNA, 19 nt, Homo sapiens
  misc_RNA (1)...(19): siRNA sense strand
gugccaauauccuggagaa

SEQ ID NO: 133723 - RNA, 19 nt, Homo sapiens
  misc_RNA (1)...(19): siRNA sense strand
guucccaucucaaggauuc

SEQ ID NO: 133724 - RNA, 19 nt, Homo sapiens
  misc_RNA (1)...(19): siRNA sense strand
gaauaacuuugugcaguac

SEQ ID NO: 133725 - RNA, 19 nt, Homo sapiens
  misc_RNA (1)...(19): siRNA sense strand
acccuggacuuucauguuu

SEQ ID NO: 133726 - RNA, 19 nt, Homo sapiens
  misc_RNA (1)...(19): siRNA sense strand
gcucgucuuugacccgaaa

SEQ ID NO: 133727 - RNA, 19 nt, Homo sapiens
  misc_RNA (1)...(19): siRNA sense strand
caugcuagaagaagaagua

SEQ ID NO: 133728 - RNA, 19 nt, Homo sapiens
  misc_RNA (1)...(19): siRNA sense strand
ggcaccaucucaacgaaga

SEQ ID NO: 133729 - RNA, 19 nt, Homo sapiens
  misc_RNA (1)...(19): siRNA sense strand
uuagucaccugccagcaaa

SEQ ID NO: 133730 - RNA, 19 nt, Homo sapiens
  misc_RNA (1)...(19): siRNA sense strand
gaggcaccaucucaacgaa

SEQ ID NO: 133731 - RNA, 19 nt, Homo sapiens
  misc_RNA (1)...(19): siRNA sense strand
gaauagguacuacgugucu

SEQ ID NO: 133732 - RNA, 19 nt, Homo sapiens
  misc_RNA (1)...(19): siRNA sense strand
ccacuuuaaugggauguga

SEQ ID NO: 133733 - RNA, 19 nt, Homo sapiens
  misc_RNA (1)...(19): siRNA sense strand
aauuaaagauggccguguu

SEQ ID NO: 133734 - RNA, 19 nt, Homo sapiens
  misc_RNA (1)...(19): siRNA sense strand
caacgaagacugcgaucuc

SEQ ID NO: 133735 - RNA, 19 nt, Homo sapiens
  misc_RNA (1)...(19): siRNA sense strand
ccgcugagagugaauacua

SEQ ID NO: 133736 - RNA, 19 nt, Homo sapiens
  misc_RNA (1)...(19): siRNA sense strand
uaugaaggagccacuuuaa

SEQ ID NO: 133737 - RNA, 19 nt, Homo sapiens
  misc_RNA (1)...(19): siRNA sense strand
ugaacagacuccugggaau

SEQ ID NO: 133738 - RNA, 19 nt, Homo sapiens
  misc_RNA (1)...(19): siRNA sense strand
gaaugugucagaggaagaa

SEQ ID NO: 133739 - RNA, 19 nt, Homo sapiens
  misc_RNA (1)...(19): siRNA sense strand
ggcgacaacuccuggaaca

SEQ ID NO: 133740 - RNA, 19 nt, Homo sapiens
  misc_RNA (1)...(19): siRNA sense strand
gaaagucggugaacacauu

SEQ ID NO: 133741 - RNA, 19 nt, Homo sapiens
  misc_RNA (1)...(19): siRNA sense strand
caugaaagcugaaaugaaa

SEQ ID NO: 133742 - RNA, 19 nt, Homo sapiens
  misc_RNA (1)...(19): siRNA sense strand
gaagaagacuguccugguu

SEQ ID NO: 133743 - RNA, 19 nt, Homo sapiens
  misc_RNA (1)...(19): siRNA sense strand
ugaagaaccugcauaauau

SEQ ID NO: 133744 - RNA, 19 nt, Homo sapiens
  misc_RNA (1)...(19): siRNA sense strand
gaacagaccucaaaaccua

SEQ ID NO: 133745 - RNA, 19 nt, Homo sapiens
  misc_RNA (1)...(19): siRNA sense strand
caagauugcuucugaaaug

SEQ ID NO: 133746 - RNA, 19 nt, Homo sapiens
  misc_RNA (1)...(19): siRNA sense strand
ucagugaucuccagaagua

SEQ ID NO: 133747 - RNA, 19 nt, Homo sapiens
  misc_RNA (1)...(19): siRNA sense strand
aaucagugcucuacaaaua

SEQ ID NO: 133748 - RNA, 19 nt, Homo sapiens
  misc_RNA (1)...(19): siRNA sense strand
gcaaggggcucaugguuua

SEQ ID NO: 133749 - RNA, 19 nt, Homo sapiens
  misc_RNA (1)...(19): siRNA sense strand
gaucaaugcuuccacagau

SEQ ID NO: 133750 - RNA, 19 nt, Homo sapiens
  misc_RNA (1)...(19): siRNA sense strand
caaacaagcucccucugau

SEQ ID NO: 133751 - RNA, 19 nt, Homo sapiens
  misc_RNA (1)...(19): siRNA sense strand
gggcaaagauacaugugaa

SEQ ID NO: 133752 - RNA, 19 nt, Homo sapiens
  misc_RNA (1)...(19): siRNA sense strand
gaucaggaccggaaaguga

SEQ ID NO: 133753 - RNA, 19 nt, Homo sapiens
  misc_RNA (1)...(19): siRNA sense strand
ugaaacaacuagaaucuca

SEQ ID NO: 133754 - RNA, 19 nt, Homo sapiens
  misc_RNA (1)...(19): siRNA sense strand
gaacaaagagagaaucagu

SEQ ID NO: 133755 - RNA, 19 nt, Homo sapiens
  misc_RNA (1)...(19): siRNA sense strand
ggaaucagagucuugaauu

SEQ ID NO: 133756 - RNA, 19 nt, Homo sapiens
  misc_RNA (1)...(19): siRNA sense strand
caaggacacugagaagaaa

SEQ ID NO: 133757 - RNA, 19 nt, Homo sapiens
  misc_RNA (1)...(19): siRNA sense strand
caagcagccucggcaaaua

SEQ ID NO: 133758 - RNA, 19 nt, Homo sapiens
  misc_RNA (1)...(19): siRNA sense strand
caagcgaacgggcaauuua

SEQ ID NO: 133759 - RNA, 19 nt, Homo sapiens
  misc_RNA (1)...(19): siRNA sense strand
ugacaaagcggaagaacaa

SEQ ID NO: 133760 - RNA, 19 nt, Homo sapiens
  misc_RNA (1)...(19): siRNA sense strand
gugaacacauucucaaaga

SEQ ID NO: 133761 - RNA, 19 nt, Homo sapiens
  misc_RNA (1)...(19): siRNA sense strand
gcucaugguuuaugcaaau

SEQ ID NO: 133762 - RNA, 19 nt, Homo sapiens
  misc_RNA (1)...(19): siRNA sense strand
aaaccuacgucuagaaaug

SEQ ID NO: 133763 - RNA, 19 nt, Homo sapiens
  misc_RNA (1)...(19): siRNA sense strand
gcaugaagaaccugcauaa

SEQ ID NO: 133764 - RNA, 19 nt, Homo sapiens
  misc_RNA (1)...(19): siRNA sense strand
ccgacuaucuucucuggua

SEQ ID NO: 133765 - RNA, 19 nt, Homo sapiens
  misc_RNA (1)...(19): siRNA sense strand
gagcaaaaguggagacaaa

SEQ ID NO: 133766 - RNA, 19 nt, Homo sapiens
  misc_RNA (1)...(19): siRNA sense strand
ccacagaacuaucaagacu

SEQ ID NO: 133767 - RNA, 19 nt, Homo sapiens
  misc_RNA (1)...(19): siRNA sense strand
agaaacugcuuaaugagaa

SEQ ID NO: 133768 - RNA, 19 nt, Homo sapiens
  misc_RNA (1)...(19): siRNA sense strand
cagggaagguggccagaaa

SEQ ID NO: 133769 - RNA, 19 nt, Homo sapiens
  misc_RNA (1)...(19): siRNA sense strand
gagagagagcaaagaauuu

SEQ ID NO: 133770 - RNA, 19 nt, Homo sapiens
  misc_RNA (1)...(19): siRNA sense strand
ucagaguacucaauaugaa

SEQ ID NO: 133771 - RNA, 19 nt, Homo sapiens
  misc_RNA (1)...(19): siRNA sense strand
gaagaaccugcauaauauu

SEQ ID NO: 133772 - RNA, 19 nt, Homo sapiens
  misc_RNA (1)...(19): siRNA sense strand
gagauuguguccgauuuga

SEQ ID NO: 133773 - RNA, 19 nt, Homo sapiens
  misc_RNA (1)...(19): siRNA sense strand
augaagaaccugcauaaua

SEQ ID NO: 133774 - RNA, 19 nt, Homo sapiens
  misc_RNA (1)...(19): siRNA sense strand
gaacugacagcugcagaaa

SEQ ID NO: 133775 - RNA, 19 nt, Homo sapiens
  misc_RNA (1)...(19): siRNA sense strand
cagauucacuggccaagga

SEQ ID NO: 133776 - RNA, 19 nt, Homo sapiens
  misc_RNA (1)...(19): siRNA sense strand
caagguggcuaccaaagca

SEQ ID NO: 133777 - RNA, 19 nt, Homo sapiens
  misc_RNA (1)...(19): siRNA sense strand
agagaaaucuguucaacca

SEQ ID NO: 133778 - RNA, 19 nt, Homo sapiens
  misc_RNA (1)...(19): siRNA sense strand
cuucugaaauggccuauga

SEQ ID NO: 133779 - RNA, 19 nt, Homo sapiens
  misc_RNA (1)...(19): siRNA sense strand
gauugcagccucccaguuu

SEQ ID NO: 133780 - RNA, 19 nt, Homo sapiens
  misc_RNA (1)...(19): siRNA sense strand
uucagaaacugcuuaauga

SEQ ID NO: 133781 - RNA, 19 nt, Homo sapiens
  misc_RNA (1)...(19): siRNA sense strand
gauggucucucucaugaag

SEQ ID NO: 133782 - RNA, 19 nt, Homo sapiens
  misc_RNA (1)...(19): siRNA sense strand
gcucagaaggcaacuuaaa

SEQ ID NO: 133783 - RNA, 19 nt, Homo sapiens
  misc_RNA (1)...(19): siRNA sense strand
gaacgggcaauuuauagau

SEQ ID NO: 133784 - RNA, 19 nt, Homo sapiens
  misc_RNA (1)...(19): siRNA sense strand
gcaaagauacaugugaaga

SEQ ID NO: 133785 - RNA, 19 nt, Homo sapiens
  misc_RNA (1)...(19): siRNA sense strand
auaaggaaaucaaggagaa

SEQ ID NO: 133786 - RNA, 19 nt, Homo sapiens
  misc_RNA (1)...(19): siRNA sense strand
ggacaaaggcaaaaugaaa

SEQ ID NO: 133787 - RNA, 19 nt, Homo sapiens
  misc_RNA (1)...(19): siRNA sense strand
cagcucagaaggcaacuua

SEQ ID NO: 133788 - RNA, 19 nt, Homo sapiens
  misc_RNA (1)...(19): siRNA sense strand
gugaugaagcucugccuua

SEQ ID NO: 133789 - RNA, 19 nt, Homo sapiens
  misc_RNA (1)...(19): siRNA sense strand
caaagauacaugugaagaa

SEQ ID NO: 133790 - RNA, 19 nt, Homo sapiens
  misc_RNA (1)...(19): siRNA sense strand
cccuuaagcugauccagua

SEQ ID NO: 133791 - RNA, 19 nt, Homo sapiens
  misc_RNA (1)...(19): siRNA sense strand
acugacagcugcagaaaug

SEQ ID NO: 133792 - RNA, 19 nt, Homo sapiens
  misc_RNA (1)...(19): siRNA sense strand
ucaaggacacugagaagaa

SEQ ID NO: 133793 - RNA, 19 nt, Homo sapiens
  misc_RNA (1)...(19): siRNA sense strand
caagaggucaugaaguuug

SEQ ID NO: 133794 - RNA, 19 nt, Homo sapiens
  misc_RNA (1)...(19): siRNA sense strand
aauaaucagugcucuacaa

SEQ ID NO: 133795 - RNA, 19 nt, Homo sapiens
  misc_RNA (1)...(19): siRNA sense strand
cuaaccaucuggaaccaaa

SEQ ID NO: 133796 - RNA, 19 nt, Homo sapiens
  misc_RNA (1)...(19): siRNA sense strand
caagagaaaucuguucaac

SEQ ID NO: 133797 - RNA, 19 nt, Homo sapiens
  misc_RNA (1)...(19): siRNA sense strand
ucugucauaugcaucuuua

SEQ ID NO: 133798 - RNA, 19 nt, Homo sapiens
  misc_RNA (1)...(19): siRNA sense strand
acacagagggcgaauauca

SEQ ID NO: 133799 - RNA, 19 nt, Homo sapiens
  misc_RNA (1)...(19): siRNA sense strand
gauaugcuuugucgaugug

SEQ ID NO: 133800 - RNA, 19 nt, Homo sapiens
  misc_RNA (1)...(19): siRNA sense strand
gaaccugcauaauauuacu

SEQ ID NO: 133801 - RNA, 19 nt, Homo sapiens
  misc_RNA (1)...(19): siRNA sense strand
ccgauuugauugauucuug

SEQ ID NO: 133802 - RNA, 19 nt, Homo sapiens
  misc_RNA (1)...(19): siRNA sense strand
ggaaaucaaggagaaguug

SEQ ID NO: 133803 - RNA, 19 nt, Homo sapiens
  misc_RNA (1)...(19): siRNA sense strand
agagagagagcaaagaauu

SEQ ID NO: 133804 - RNA, 19 nt, Homo sapiens
  misc_RNA (1)...(19): siRNA sense strand
gcugcucgcuaaccuguga

SEQ ID NO: 133805 - RNA, 19 nt, Homo sapiens
  misc_RNA (1)...(19): siRNA sense strand
ccaggagcaucaagaacuu

SEQ ID NO: 133806 - RNA, 19 nt, Homo sapiens
  misc_RNA (1)...(19): siRNA sense strand
ugucaaacaucguucuaau

SEQ ID NO: 133807 - RNA, 19 nt, Homo sapiens
  misc_RNA (1)...(19): siRNA sense strand
caaagcaugcagcaauaaa

SEQ ID NO: 133808 - RNA, 19 nt, Homo sapiens
  misc_RNA (1)...(19): siRNA sense strand
gugaggagaaggagacuaa

SEQ ID NO: 133809 - RNA, 19 nt, Homo sapiens
  misc_RNA (1)...(19): siRNA sense strand
gauuguguccgauuugauu

SEQ ID NO: 133810 - RNA, 19 nt, Homo sapiens
  misc_RNA (1)...(19): siRNA sense strand
ucaaacaagcucccucuga

SEQ ID NO: 133811 - RNA, 19 nt, Homo sapiens
  misc_RNA (1)...(19): siRNA sense strand
uguaggaggucuucuucaa

SEQ ID NO: 133812 - RNA, 19 nt, Homo sapiens
  misc_RNA (1)...(19): siRNA sense strand
ugaugaagcucugccuuau

SEQ ID NO: 133813 - RNA, 19 nt, Homo sapiens
  misc_RNA (1)...(19): siRNA sense strand
aaagauacaugugaagaag

SEQ ID NO: 133814 - RNA, 19 nt, Homo sapiens
  misc_RNA (1)...(19): siRNA sense strand
aggagaaguuggaagguaa

SEQ ID NO: 133815 - RNA, 19 nt, Homo sapiens
  misc_RNA (1)...(19): siRNA sense strand
cgacuaucuucucugguaa

SEQ ID NO: 133816 - RNA, 19 nt, Homo sapiens
  misc_RNA (1)...(19): siRNA sense strand
gaucaagugaacauagauu

SEQ ID NO: 133817 - RNA, 19 nt, Homo sapiens
  misc_RNA (1)...(19): siRNA sense strand
ccagagagagagcaaagaa

SEQ ID NO: 133818 - RNA, 19 nt, Homo sapiens
  misc_RNA (1)...(19): siRNA sense strand
ugggaaagguggccaggaa

SEQ ID NO: 133819 - RNA, 19 nt, Homo sapiens
  misc_RNA (1)...(19): siRNA sense strand
ucaugaaguuugccaagga

SEQ ID NO: 133820 - RNA, 19 nt, Homo sapiens
  misc_RNA (1)...(19): siRNA sense strand
gcucagaguacucaauaug

SEQ ID NO: 133821 - RNA, 19 nt, Homo sapiens
  misc_RNA (1)...(19): siRNA sense strand
cagcaucugugguccugaa

SEQ ID NO: 133822 - RNA, 19 nt, Homo sapiens
  misc_RNA (1)...(19): siRNA sense strand
agaaguaugccuuggguuu

SEQ ID NO: 133823 - RNA, 19 nt, Homo sapiens
  misc_RNA (1)...(19): siRNA sense strand
ucuuggacaugaaguaauu

SEQ ID NO: 133824 - RNA, 19 nt, Homo sapiens
  misc_RNA (1)...(19): siRNA sense strand
gcaagcgaacgggcaauuu

SEQ ID NO: 133825 - RNA, 19 nt, Homo sapiens
  misc_RNA (1)...(19): siRNA sense strand
ugaauucuccaccaugaaa

SEQ ID NO: 133826 - RNA, 19 nt, Homo sapiens
  misc_RNA (1)...(19): siRNA sense strand
gaucccaaaugcaggaauc

SEQ ID NO: 133827 - RNA, 19 nt, Homo sapiens
  misc_RNA (1)...(19): siRNA sense strand
aaggagaaguuggaaggua

SEQ ID NO: 133828 - RNA, 19 nt, Homo sapiens
  misc_RNA (1)...(19): siRNA sense strand
uggacuggcugcucgcuaa

SEQ ID NO: 133829 - RNA, 19 nt, Homo sapiens
  misc_RNA (1)...(19): siRNA sense strand
cuacaaauagcuugcagaa

SEQ ID NO: 133830 - RNA, 19 nt, Homo sapiens
  misc_RNA (1)...(19): siRNA sense strand
cugaugauauugacugguu

SEQ ID NO: 133831 - RNA, 19 nt, Homo sapiens
  misc_RNA (1)...(19): siRNA sense strand
gauugucucugcccuuaag

SEQ ID NO: 133832 - RNA, 19 nt, Homo sapiens
  misc_RNA (1)...(19): siRNA sense strand
accaaagcaugcagcaaua

SEQ ID NO: 133833 - RNA, 19 nt, Homo sapiens
  misc_RNA (1)...(19): siRNA sense strand
gcaggaaucagagucuuga

SEQ ID NO: 133834 - RNA, 19 nt, Homo sapiens
  misc_RNA (1)...(19): siRNA sense strand
agacacagagggcgaauau

SEQ ID NO: 133835 - RNA, 19 nt, Homo sapiens
  misc_RNA (1)...(19): siRNA sense strand
gaagcucugccuuaucaug

SEQ ID NO: 133836 - RNA, 19 nt, Homo sapiens
  misc_RNA (1)...(19): siRNA sense strand
cagaaacugcuuaaugaga

SEQ ID NO: 133837 - RNA, 19 nt, Homo sapiens
  misc_RNA (1)...(19): siRNA sense strand
cugauugucucugcccuua

SEQ ID NO: 133838 - RNA, 19 nt, Homo sapiens
  misc_RNA (1)...(19): siRNA sense strand
ggaacugacagcugcagaa

SEQ ID NO: 133839 - RNA, 19 nt, Homo sapiens
  misc_RNA (1)...(19): siRNA sense strand
ugaaauggccuaugaagcu

SEQ ID NO: 133840 - RNA, 19 nt, Homo sapiens
  misc_RNA (1)...(19): siRNA sense strand
gaaagucggugaacacauu

SEQ ID NO: 133841 - RNA, 19 nt, Homo sapiens
  misc_RNA (1)...(19): siRNA sense strand
caugaaagcugaaaugaaa

SEQ ID NO: 133842 - RNA, 19 nt, Homo sapiens
  misc_RNA (1)...(19): siRNA sense strand
gaagaagacuguccugguu

SEQ ID NO: 133843 - RNA, 19 nt, Homo sapiens
  misc_RNA (1)...(19): siRNA sense strand
ugaagaaccugcauaauau

SEQ ID NO: 133844 - RNA, 19 nt, Homo sapiens
  misc_RNA (1)...(19): siRNA sense strand
gaacagaccucaaaaccua

SEQ ID NO: 133845 - RNA, 19 nt, Homo sapiens
  misc_RNA (1)...(19): siRNA sense strand
caagauugcuucugaaaug

SEQ ID NO: 133846 - RNA, 19 nt, Homo sapiens
  misc_RNA (1)...(19): siRNA sense strand
ucagugaucuccagaagua

SEQ ID NO: 133847 - RNA, 19 nt, Homo sapiens
  misc_RNA (1)...(19): siRNA sense strand
aaucagugcucuacaaaua

SEQ ID NO: 133848 - RNA, 19 nt, Homo sapiens
  misc_RNA (1)...(19): siRNA sense strand
gcaaggggcucaugguuua

SEQ ID NO: 133849 - RNA, 19 nt, Homo sapiens
  misc_RNA (1)...(19): siRNA sense strand
gaucaaugcuuccacagau

SEQ ID NO: 133850 - RNA, 19 nt, Homo sapiens
  misc_RNA (1)...(19): siRNA sense strand
caaacaagcucccucugau

SEQ ID NO: 133851 - RNA, 19 nt, Homo sapiens
  misc_RNA (1)...(19): siRNA sense strand
gggcaaagauacaugugaa

SEQ ID NO: 133852 - RNA, 19 nt, Homo sapiens
  misc_RNA (1)...(19): siRNA sense strand
gaucaggaccggaaaguga

SEQ ID NO: 133853 - RNA, 19 nt, Homo sapiens
  misc_RNA (1)...(19): siRNA sense strand
ugaaacaacuagaaucuca

SEQ ID NO: 133854 - RNA, 19 nt, Homo sapiens
  misc_RNA (1)...(19): siRNA sense strand
gaacaaagagagaaucagu

SEQ ID NO: 133855 - RNA, 19 nt, Homo sapiens
  misc_RNA (1)...(19): siRNA sense strand
ggaaucagagucuugaauu

SEQ ID NO: 133856 - RNA, 19 nt, Homo sapiens
  misc_RNA (1)...(19): siRNA sense strand
caaggacacugagaagaaa

SEQ ID NO: 133857 - RNA, 19 nt, Homo sapiens
  misc_RNA (1)...(19): siRNA sense strand
caagcagccucggcaaaua

SEQ ID NO: 133858 - RNA, 19 nt, Homo sapiens
  misc_RNA (1)...(19): siRNA sense strand
caagcgaacgggcaauuua

SEQ ID NO: 133859 - RNA, 19 nt, Homo sapiens
  misc_RNA (1)...(19): siRNA sense strand
ugacaaagcggaagaacaa

SEQ ID NO: 133860 - RNA, 19 nt, Homo sapiens
  misc_RNA (1)...(19): siRNA sense strand
gugaacacauucucaaaga

SEQ ID NO: 133861 - RNA, 19 nt, Homo sapiens
  misc_RNA (1)...(19): siRNA sense strand
gcucaugguuuaugcaaau

SEQ ID NO: 133862 - RNA, 19 nt, Homo sapiens
  misc_RNA (1)...(19): siRNA sense strand
aaaccuacgucuagaaaug

SEQ ID NO: 133863 - RNA, 19 nt, Homo sapiens
  misc_RNA (1)...(19): siRNA sense strand
gcaugaagaaccugcauaa

SEQ ID NO: 133864 - RNA, 19 nt, Homo sapiens
  misc_RNA (1)...(19): siRNA sense strand
ccgacuaucuucucuggua

SEQ ID NO: 133865 - RNA, 19 nt, Homo sapiens
  misc_RNA (1)...(19): siRNA sense strand
gagcaaaaguggagacaaa

SEQ ID NO: 133866 - RNA, 19 nt, Homo sapiens
  misc_RNA (1)...(19): siRNA sense strand
ccacagaacuaucaagacu

SEQ ID NO: 133867 - RNA, 19 nt, Homo sapiens
  misc_RNA (1)...(19): siRNA sense strand
agaaacugcuuaaugagaa

SEQ ID NO: 133868 - RNA, 19 nt, Homo sapiens
  misc_RNA (1)...(19): siRNA sense strand
cagggaagguggccagaaa

SEQ ID NO: 133869 - RNA, 19 nt, Homo sapiens
  misc_RNA (1)...(19): siRNA sense strand
gagagagagcaaagaauuu

SEQ ID NO: 133870 - RNA, 19 nt, Homo sapiens
  misc_RNA (1)...(19): siRNA sense strand
ucagaguacucaauaugaa

SEQ ID NO: 133871 - RNA, 19 nt, Homo sapiens
  misc_RNA (1)...(19): siRNA sense strand
gaagaaccugcauaauauu

SEQ ID NO: 133872 - RNA, 19 nt, Homo sapiens
  misc_RNA (1)...(19): siRNA sense strand
gagauuguguccgauuuga

SEQ ID NO: 133873 - RNA, 19 nt, Homo sapiens
  misc_RNA (1)...(19): siRNA sense strand
augaagaaccugcauaaua

SEQ ID NO: 133874 - RNA, 19 nt, Homo sapiens
  misc_RNA (1)...(19): siRNA sense strand
gaacugacagcugcagaaa

SEQ ID NO: 133875 - RNA, 19 nt, Homo sapiens
  misc_RNA (1)...(19): siRNA sense strand
cagauucacuggccaagga

SEQ ID NO: 133876 - RNA, 19 nt, Homo sapiens
  misc_RNA (1)...(19): siRNA sense strand
caagguggcuaccaaagca

SEQ ID NO: 133877 - RNA, 19 nt, Homo sapiens
  misc_RNA (1)...(19): siRNA sense strand
agagaaaucuguucaacca

SEQ ID NO: 133878 - RNA, 19 nt, Homo sapiens
  misc_RNA (1)...(19): siRNA sense strand
cuucugaaauggccuauga

SEQ ID NO: 133879 - RNA, 19 nt, Homo sapiens
  misc_RNA (1)...(19): siRNA sense strand
gauugcagccucccaguuu

SEQ ID NO: 133880 - RNA, 19 nt, Homo sapiens
  misc_RNA (1)...(19): siRNA sense strand
uucagaaacugcuuaauga

SEQ ID NO: 133881 - RNA, 19 nt, Homo sapiens
  misc_RNA (1)...(19): siRNA sense strand
gauggucucucucaugaag

SEQ ID NO: 133882 - RNA, 19 nt, Homo sapiens
  misc_RNA (1)...(19): siRNA sense strand
gcucagaaggcaacuuaaa

SEQ ID NO: 133883 - RNA, 19 nt, Homo sapiens
  misc_RNA (1)...(19): siRNA sense strand
gaacgggcaauuuauagau

SEQ ID NO: 133884 - RNA, 19 nt, Homo sapiens
  misc_RNA (1)...(19): siRNA sense strand
gcaaagauacaugugaaga

SEQ ID NO: 133885 - RNA, 19 nt, Homo sapiens
  misc_RNA (1)...(19): siRNA sense strand
auaaggaaaucaaggagaa

SEQ ID NO: 133886 - RNA, 19 nt, Homo sapiens
  misc_RNA (1)...(19): siRNA sense strand
ggacaaaggcaaaaugaaa

SEQ ID NO: 133887 - RNA, 19 nt, Homo sapiens
  misc_RNA (1)...(19): siRNA sense strand
cagcucagaaggcaacuua

SEQ ID NO: 133888 - RNA, 19 nt, Homo sapiens
  misc_RNA (1)...(19): siRNA sense strand
gugaugaagcucugccuua

SEQ ID NO: 133889 - RNA, 19 nt, Homo sapiens
  misc_RNA (1)...(19): siRNA sense strand
caaagauacaugugaagaa

SEQ ID NO: 133890 - RNA, 19 nt, Homo sapiens
  misc_RNA (1)...(19): siRNA sense strand
cccuuaagcugauccagua

SEQ ID NO: 133891 - RNA, 19 nt, Homo sapiens
  misc_RNA (1)...(19): siRNA sense strand
acugacagcugcagaaaug

SEQ ID NO: 133892 - RNA, 19 nt, Homo sapiens
  misc_RNA (1)...(19): siRNA sense strand
ucaaggacacugagaagaa

SEQ ID NO: 133893 - RNA, 19 nt, Homo sapiens
  misc_RNA (1)...(19): siRNA sense strand
caagaggucaugaaguuug

SEQ ID NO: 133894 - RNA, 19 nt, Homo sapiens
  misc_RNA (1)...(19): siRNA sense strand
aauaaucagugcucuacaa

SEQ ID NO: 133895 - RNA, 19 nt, Homo sapiens
  misc_RNA (1)...(19): siRNA sense strand
cuaaccaucuggaaccaaa

SEQ ID NO: 133896 - RNA, 19 nt, Homo sapiens
  misc_RNA (1)...(19): siRNA sense strand
caagagaaaucuguucaac

SEQ ID NO: 133897 - RNA, 19 nt, Homo sapiens
  misc_RNA (1)...(19): siRNA sense strand
ucugucauaugcaucuuua

SEQ ID NO: 133898 - RNA, 19 nt, Homo sapiens
  misc_RNA (1)...(19): siRNA sense strand
acacagagggcgaauauca

SEQ ID NO: 133899 - RNA, 19 nt, Homo sapiens
  misc_RNA (1)...(19): siRNA sense strand
gauaugcuuugucgaugug

SEQ ID NO: 133900 - RNA, 19 nt, Homo sapiens
  misc_RNA (1)...(19): siRNA sense strand
gaaccugcauaauauuacu

SEQ ID NO: 133901 - RNA, 19 nt, Homo sapiens
  misc_RNA (1)...(19): siRNA sense strand
ccgauuugauugauucuug

SEQ ID NO: 133902 - RNA, 19 nt, Homo sapiens
  misc_RNA (1)...(19): siRNA sense strand
ggaaaucaaggagaaguug

SEQ ID NO: 133903 - RNA, 19 nt, Homo sapiens
  misc_RNA (1)...(19): siRNA sense strand
agagagagagcaaagaauu

SEQ ID NO: 133904 - RNA, 19 nt, Homo sapiens
  misc_RNA (1)...(19): siRNA sense strand
gcugcucgcuaaccuguga

SEQ ID NO: 133905 - RNA, 19 nt, Homo sapiens
  misc_RNA (1)...(19): siRNA sense strand
ccaggagcaucaagaacuu

SEQ ID NO: 133906 - RNA, 19 nt, Homo sapiens
  misc_RNA (1)...(19): siRNA sense strand
ugucaaacaucguucuaau

SEQ ID NO: 133907 - RNA, 19 nt, Homo sapiens
  misc_RNA (1)...(19): siRNA sense strand
caaagcaugcagcaauaaa

SEQ ID NO: 133908 - RNA, 19 nt, Homo sapiens
  misc_RNA (1)...(19): siRNA sense strand
gugaggagaaggagacuaa

SEQ ID NO: 133909 - RNA, 19 nt, Homo sapiens
  misc_RNA (1)...(19): siRNA sense strand
gauuguguccgauuugauu

SEQ ID NO: 133910 - RNA, 19 nt, Homo sapiens
  misc_RNA (1)...(19): siRNA sense strand
ucaaacaagcucccucuga

SEQ ID NO: 133911 - RNA, 19 nt, Homo sapiens
  misc_RNA (1)...(19): siRNA sense strand
uguaggaggucuucuucaa

SEQ ID NO: 133912 - RNA, 19 nt, Homo sapiens
  misc_RNA (1)...(19): siRNA sense strand
ugaugaagcucugccuuau

SEQ ID NO: 133913 - RNA, 19 nt, Homo sapiens
  misc_RNA (1)...(19): siRNA sense strand
aaagauacaugugaagaag

SEQ ID NO: 133914 - RNA, 19 nt, Homo sapiens
  misc_RNA (1)...(19): siRNA sense strand
aggagaaguuggaagguaa

SEQ ID NO: 133915 - RNA, 19 nt, Homo sapiens
  misc_RNA (1)...(19): siRNA sense strand
cgacuaucuucucugguaa

SEQ ID NO: 133916 - RNA, 19 nt, Homo sapiens
  misc_RNA (1)...(19): siRNA sense strand
gaucaagugaacauagauu

SEQ ID NO: 133917 - RNA, 19 nt, Homo sapiens
  misc_RNA (1)...(19): siRNA sense strand
ccagagagagagcaaagaa

SEQ ID NO: 133918 - RNA, 19 nt, Homo sapiens
  misc_RNA (1)...(19): siRNA sense strand
ugggaaagguggccaggaa

SEQ ID NO: 133919 - RNA, 19 nt, Homo sapiens
  misc_RNA (1)...(19): siRNA sense strand
ucaugaaguuugccaagga

SEQ ID NO: 133920 - RNA, 19 nt, Homo sapiens
  misc_RNA (1)...(19): siRNA sense strand
gcucagaguacucaauaug

SEQ ID NO: 133921 - RNA, 19 nt, Homo sapiens
  misc_RNA (1)...(19): siRNA sense strand
cagcaucugugguccugaa

SEQ ID NO: 133922 - RNA, 19 nt, Homo sapiens
  misc_RNA (1)...(19): siRNA sense strand
agaaguaugccuuggguuu

SEQ ID NO: 133923 - RNA, 19 nt, Homo sapiens
  misc_RNA (1)...(19): siRNA sense strand
ucuuggacaugaaguaauu

SEQ ID NO: 133924 - RNA, 19 nt, Homo sapiens
  misc_RNA (1)...(19): siRNA sense strand
gcaagcgaacgggcaauuu

SEQ ID NO: 133925 - RNA, 19 nt, Homo sapiens
  misc_RNA (1)...(19): siRNA sense strand
ugaauucuccaccaugaaa

SEQ ID NO: 133926 - RNA, 19 nt, Homo sapiens
  misc_RNA (1)...(19): siRNA sense strand
gaucccaaaugcaggaauc

SEQ ID NO: 133927 - RNA, 19 nt, Homo sapiens
  misc_RNA (1)...(19): siRNA sense strand
aaggagaaguuggaaggua

SEQ ID NO: 133928 - RNA, 19 nt, Homo sapiens
  misc_RNA (1)...(19): siRNA sense strand
uggacuggcugcucgcuaa

SEQ ID NO: 133929 - RNA, 19 nt, Homo sapiens
  misc_RNA (1)...(19): siRNA sense strand
cuacaaauagcuugcagaa

SEQ ID NO: 133930 - RNA, 19 nt, Homo sapiens
  misc_RNA (1)...(19): siRNA sense strand
gauugucucugcccuuaag

SEQ ID NO: 133931 - RNA, 19 nt, Homo sapiens
  misc_RNA (1)...(19): siRNA sense strand
accaaagcaugcagcaaua

SEQ ID NO: 133932 - RNA, 19 nt, Homo sapiens
  misc_RNA (1)...(19): siRNA sense strand
cugaugauauugacugguu

SEQ ID NO: 133933 - RNA, 19 nt, Homo sapiens
  misc_RNA (1)...(19): siRNA sense strand
gcaggaaucagagucuuga

SEQ ID NO: 133934 - RNA, 19 nt, Homo sapiens
  misc_RNA (1)...(19): siRNA sense strand
agacacagagggcgaauau

SEQ ID NO: 133935 - RNA, 19 nt, Homo sapiens
  misc_RNA (1)...(19): siRNA sense strand
gaagcucugccuuaucaug

SEQ ID NO: 133936 - RNA, 19 nt, Homo sapiens
  misc_RNA (1)...(19): siRNA sense strand
cagaaacugcuuaaugaga

SEQ ID NO: 133937 - RNA, 19 nt, Homo sapiens
  misc_RNA (1)...(19): siRNA sense strand
cugauugucucugcccuua

SEQ ID NO: 133938 - RNA, 19 nt, Homo sapiens
  misc_RNA (1)...(19): siRNA sense strand
ggaacugacagcugcagaa

SEQ ID NO: 133939 - RNA, 19 nt, Homo sapiens
  misc_RNA (1)...(19): siRNA sense strand
ugaaauggccuaugaagcu

SEQ ID NO: 133940 - RNA, 19 nt, Homo sapiens
  misc_RNA (1)...(19): siRNA sense strand
gaacaggaaugucaaauau

SEQ ID NO: 133941 - RNA, 19 nt, Homo sapiens
  misc_RNA (1)...(19): siRNA sense strand
ugacagaacuuaccacuuu

SEQ ID NO: 133942 - RNA, 19 nt, Homo sapiens
  misc_RNA (1)...(19): siRNA sense strand
gaaagaggacucccaaauu

SEQ ID NO: 133943 - RNA, 19 nt, Homo sapiens
  misc_RNA (1)...(19): siRNA sense strand
ggaagaagcacgcggauaa

SEQ ID NO: 133944 - RNA, 19 nt, Homo sapiens
  misc_RNA (1)...(19): siRNA sense strand
ccaaccagcuucagucuaa

SEQ ID NO: 133945 - RNA, 19 nt, Homo sapiens
  misc_RNA (1)...(19): siRNA sense strand
gaagaagcuuuaaacaaug

SEQ ID NO: 133946 - RNA, 19 nt, Homo sapiens
  misc_RNA (1)...(19): siRNA sense strand
gaaccucucuucacauugu

SEQ ID NO: 133947 - RNA, 19 nt, Homo sapiens
  misc_RNA (1)...(19): siRNA sense strand
gaagugcguuccugaaguu

SEQ ID NO: 133948 - RNA, 19 nt, Homo sapiens
  misc_RNA (1)...(19): siRNA sense strand
cgacauggaugagaaauug

SEQ ID NO: 133949 - RNA, 19 nt, Homo sapiens
  misc_RNA (1)...(19): siRNA sense strand
gaagaaagaaggcaguuga

SEQ ID NO: 133950 - RNA, 19 nt, Homo sapiens
  misc_RNA (1)...(19): siRNA sense strand
gcacagcccugcacuacug

SEQ ID NO: 133951 - RNA, 19 nt, Homo sapiens
  misc_RNA (1)...(19): siRNA sense strand
gaucgaaccucucuucaca

SEQ ID NO: 133952 - RNA, 19 nt, Homo sapiens
  misc_RNA (1)...(19): siRNA sense strand
gaagugcuuugaccuuauu

SEQ ID NO: 133953 - RNA, 19 nt, Homo sapiens
  misc_RNA (1)...(19): siRNA sense strand
ugaaagcgcucuauaacug

SEQ ID NO: 133954 - RNA, 19 nt, Homo sapiens
  misc_RNA (1)...(19): siRNA sense strand
gcaaugacgucugcuguga

SEQ ID NO: 133955 - RNA, 19 nt, Homo sapiens
  misc_RNA (1)...(19): siRNA sense strand
aaagaggacucccaaauuc

SEQ ID NO: 133956 - RNA, 19 nt, Homo sapiens
  misc_RNA (1)...(19): siRNA sense strand
gaaauaagcggagcggaaa

SEQ ID NO: 133957 - RNA, 19 nt, Homo sapiens
  misc_RNA (1)...(19): siRNA sense strand
gagcggaaauugccgaaga

SEQ ID NO: 133958 - RNA, 19 nt, Homo sapiens
  misc_RNA (1)...(19): siRNA sense strand
ggaaauugccgaagagaug

SEQ ID NO: 133959 - RNA, 19 nt, Homo sapiens
  misc_RNA (1)...(19): siRNA sense strand
cuacauggcuuuccaccaa

SEQ ID NO: 133960 - RNA, 19 nt, Homo sapiens
  misc_RNA (1)...(19): siRNA sense strand
gcagagaugacccagauuu

SEQ ID NO: 133961 - RNA, 19 nt, Homo sapiens
  misc_RNA (1)...(19): siRNA sense strand
gaaccuggauaaacagaca

SEQ ID NO: 133962 - RNA, 19 nt, Homo sapiens
  misc_RNA (1)...(19): siRNA sense strand
gaagaaauccgugaaagca

SEQ ID NO: 133963 - RNA, 19 nt, Homo sapiens
  misc_RNA (1)...(19): siRNA sense strand
gaagacaaacucuguaagu

SEQ ID NO: 133964 - RNA, 19 nt, Homo sapiens
  misc_RNA (1)...(19): siRNA sense strand
gaauaugaauggcgacuac

SEQ ID NO: 133965 - RNA, 19 nt, Homo sapiens
  misc_RNA (1)...(19): siRNA sense strand
gaaagaaggcaguugauac

SEQ ID NO: 133966 - RNA, 19 nt, Homo sapiens
  misc_RNA (1)...(19): siRNA sense strand
gcgaguaucugcugaaggu

SEQ ID NO: 133967 - RNA, 19 nt, Homo sapiens
  misc_RNA (1)...(19): siRNA sense strand
ggaaugcaggcuuuaauga

SEQ ID NO: 133968 - RNA, 19 nt, Homo sapiens
  misc_RNA (1)...(19): siRNA sense strand
gcaaagcucaaccugcuaa

SEQ ID NO: 133969 - RNA, 19 nt, Homo sapiens
  misc_RNA (1)...(19): siRNA sense strand
aagaagugcuuugaccuua

SEQ ID NO: 133970 - RNA, 19 nt, Homo sapiens
  misc_RNA (1)...(19): siRNA sense strand
ggaaggacuaugaaacaaa

SEQ ID NO: 133971 - RNA, 19 nt, Homo sapiens
  misc_RNA (1)...(19): siRNA sense strand
ugaaagugaugacgacaug

SEQ ID NO: 133972 - RNA, 19 nt, Homo sapiens
  misc_RNA (1)...(19): siRNA sense strand
gaaggccuccaucgagaua

SEQ ID NO: 133973 - RNA, 19 nt, Homo sapiens
  misc_RNA (1)...(19): siRNA sense strand
cgacaugaaugcaagaaag

SEQ ID NO: 133974 - RNA, 19 nt, Homo sapiens
  misc_RNA (1)...(19): siRNA sense strand
gaaggacuaugaaacaaaa

SEQ ID NO: 133975 - RNA, 19 nt, Homo sapiens
  misc_RNA (1)...(19): siRNA sense strand
cuacggaucuucacacgau

SEQ ID NO: 133976 - RNA, 19 nt, Homo sapiens
  misc_RNA (1)...(19): siRNA sense strand
gcuccaagcuuaugcugau

SEQ ID NO: 133977 - RNA, 19 nt, Homo sapiens
  misc_RNA (1)...(19): siRNA sense strand
gaagaagugcuuugaccuu

SEQ ID NO: 133978 - RNA, 19 nt, Homo sapiens
  misc_RNA (1)...(19): siRNA sense strand
ugauacagcuucgagauau

SEQ ID NO: 133979 - RNA, 19 nt, Homo sapiens
  misc_RNA (1)...(19): siRNA sense strand
gagaggagauacgcaagga

SEQ ID NO: 133980 - RNA, 19 nt, Homo sapiens
  misc_RNA (1)...(19): siRNA sense strand
uccaagaacugacaaagga

SEQ ID NO: 133981 - RNA, 19 nt, Homo sapiens
  misc_RNA (1)...(19): siRNA sense strand
gcuuugaccuuauuucaca

SEQ ID NO: 133982 - RNA, 19 nt, Homo sapiens
  misc_RNA (1)...(19): siRNA sense strand
gauacagcuucgagauauu

SEQ ID NO: 133983 - RNA, 19 nt, Homo sapiens
  misc_RNA (1)...(19): siRNA sense strand
gcaaacgagucaggagaga

SEQ ID NO: 133984 - RNA, 19 nt, Homo sapiens
  misc_RNA (1)...(19): siRNA sense strand
gugggaaccuggauaaaca

SEQ ID NO: 133985 - RNA, 19 nt, Homo sapiens
  misc_RNA (1)...(19): siRNA sense strand
ucaaacaggcccaggauga

SEQ ID NO: 133986 - RNA, 19 nt, Homo sapiens
  misc_RNA (1)...(19): siRNA sense strand
ugaacaggaaugucaaaua

SEQ ID NO: 133987 - RNA, 19 nt, Homo sapiens
  misc_RNA (1)...(19): siRNA sense strand
gcuaacacccuguggaaga

SEQ ID NO: 133988 - RNA, 19 nt, Homo sapiens
  misc_RNA (1)...(19): siRNA sense strand
ggaagucgcaggcaaccaa

SEQ ID NO: 133989 - RNA, 19 nt, Homo sapiens
  misc_RNA (1)...(19): siRNA sense strand
cagagaugacccagauuua

SEQ ID NO: 133990 - RNA, 19 nt, Homo sapiens
  misc_RNA (1)...(19): siRNA sense strand
ggacaugagccggaugaaa

SEQ ID NO: 133991 - RNA, 19 nt, Homo sapiens
  misc_RNA (1)...(19): siRNA sense strand
cggcgaagcuucacagucu

SEQ ID NO: 133992 - RNA, 19 nt, Homo sapiens
  misc_RNA (1)...(19): siRNA sense strand
gaccuuauuucacaugaca

SEQ ID NO: 133993 - RNA, 19 nt, Homo sapiens
  misc_RNA (1)...(19): siRNA sense strand
cgucagagcacagcuuaua

SEQ ID NO: 133994 - RNA, 19 nt, Homo sapiens
  misc_RNA (1)...(19): siRNA sense strand
cauaaucuccuucccuuug

SEQ ID NO: 133995 - RNA, 19 nt, Homo sapiens
  misc_RNA (1)...(19): siRNA sense strand
ucgaaccucucuucacauu

SEQ ID NO: 133996 - RNA, 19 nt, Homo sapiens
  misc_RNA (1)...(19): siRNA sense strand
acaggaaugucaaauaugg

SEQ ID NO: 133997 - RNA, 19 nt, Homo sapiens
  misc_RNA (1)...(19): siRNA sense strand
ccggaugguucuuuacaaa

SEQ ID NO: 133998 - RNA, 19 nt, Homo sapiens
  misc_RNA (1)...(19): siRNA sense strand
gaaauccgcauugcagguu

SEQ ID NO: 133999 - RNA, 19 nt, Homo sapiens
  misc_RNA (1)...(19): siRNA sense strand
cagagaugcugcaaaccuu

SEQ ID NO: 134000 - RNA, 19 nt, Homo sapiens
  misc_RNA (1)...(19): siRNA sense strand
ggccagagaugcugcaaac

SEQ ID NO: 134001 - RNA, 19 nt, Homo sapiens
  misc_RNA (1)...(19): siRNA sense strand
agaaauccgugaaagcaau

SEQ ID NO: 134002 - RNA, 19 nt, Homo sapiens
  misc_RNA (1)...(19): siRNA sense strand
cgagauagcaaacgaguca

SEQ ID NO: 134003 - RNA, 19 nt, Homo sapiens
  misc_RNA (1)...(19): siRNA sense strand
ggaugacaauacuggagaa

SEQ ID NO: 134004 - RNA, 19 nt, Homo sapiens
  misc_RNA (1)...(19): siRNA sense strand
guggaaagccucaaaccuu

SEQ ID NO: 134005 - RNA, 19 nt, Homo sapiens
  misc_RNA (1)...(19): siRNA sense strand
gggugaaagcgcucuauaa

SEQ ID NO: 134006 - RNA, 19 nt, Homo sapiens
  misc_RNA (1)...(19): siRNA sense strand
gcaagaaaggacuacauca

SEQ ID NO: 134007 - RNA, 19 nt, Homo sapiens
  misc_RNA (1)...(19): siRNA sense strand
ggcccaggaugaagaaaga

SEQ ID NO: 134008 - RNA, 19 nt, Homo sapiens
  misc_RNA (1)...(19): siRNA sense strand
gaaggucaacgaaaucaag

SEQ ID NO: 134009 - RNA, 19 nt, Homo sapiens
  misc_RNA (1)...(19): siRNA sense strand
gucuaacgcuguaucuuug

SEQ ID NO: 134010 - RNA, 19 nt, Homo sapiens
  misc_RNA (1)...(19): siRNA sense strand
ggagauacgcaaggaagaa

SEQ ID NO: 134011 - RNA, 19 nt, Homo sapiens
  misc_RNA (1)...(19): siRNA sense strand
gaacggcagccucuacaag

SEQ ID NO: 134012 - RNA, 19 nt, Homo sapiens
  misc_RNA (1)...(19): siRNA sense strand
gguccucuguccaaugcua

SEQ ID NO: 134013 - RNA, 19 nt, Homo sapiens
  misc_RNA (1)...(19): siRNA sense strand
acgaagaccuggaugaaag

SEQ ID NO: 134014 - RNA, 19 nt, Homo sapiens
  misc_RNA (1)...(19): siRNA sense strand
cgaaaaguguggcagaaaa

SEQ ID NO: 134015 - RNA, 19 nt, Homo sapiens
  misc_RNA (1)...(19): siRNA sense strand
agaaagaaggcaguugaua

SEQ ID NO: 134016 - RNA, 19 nt, Homo sapiens
  misc_RNA (1)...(19): siRNA sense strand
gggaugauucggacugaaa

SEQ ID NO: 134017 - RNA, 19 nt, Homo sapiens
  misc_RNA (1)...(19): siRNA sense strand
gacaugagccggaugaaac

SEQ ID NO: 134018 - RNA, 19 nt, Homo sapiens
  misc_RNA (1)...(19): siRNA sense strand
aaugcaggcuuuaaugaga

SEQ ID NO: 134019 - RNA, 19 nt, Homo sapiens
  misc_RNA (1)...(19): siRNA sense strand
uaacaucguccaagaacug

SEQ ID NO: 134020 - RNA, 19 nt, Homo sapiens
  misc_RNA (1)...(19): siRNA sense strand
uaaccggccuccugcaaag

SEQ ID NO: 134021 - RNA, 19 nt, Homo sapiens
  misc_RNA (1)...(19): siRNA sense strand
ugaacaacauaaucuccuu

SEQ ID NO: 134022 - RNA, 19 nt, Homo sapiens
  misc_RNA (1)...(19): siRNA sense strand
gcgcauucccggugucauu

SEQ ID NO: 134023 - RNA, 19 nt, Homo sapiens
  misc_RNA (1)...(19): siRNA sense strand
ccgaugagcucaccuucuc

SEQ ID NO: 134024 - RNA, 19 nt, Homo sapiens
  misc_RNA (1)...(19): siRNA sense strand
gaaagcgcucuauaacugu

SEQ ID NO: 134025 - RNA, 19 nt, Homo sapiens
  misc_RNA (1)...(19): siRNA sense strand
ugacccagauuuaggaagu

SEQ ID NO: 134026 - RNA, 19 nt, Homo sapiens
  misc_RNA (1)...(19): siRNA sense strand
aaaauaacaucguccaaga

SEQ ID NO: 134027 - RNA, 19 nt, Homo sapiens
  misc_RNA (1)...(19): siRNA sense strand
agaaagaggacucccaaau

SEQ ID NO: 134028 - RNA, 19 nt, Homo sapiens
  misc_RNA (1)...(19): siRNA sense strand
cauugcagguugaacagaa

SEQ ID NO: 134029 - RNA, 19 nt, Homo sapiens
  misc_RNA (1)...(19): siRNA sense strand
gaugauucggacugaaaua

SEQ ID NO: 134030 - RNA, 19 nt, Homo sapiens
  misc_RNA (1)...(19): siRNA sense strand
ggaccugaaaggagugaaa

SEQ ID NO: 134031 - RNA, 19 nt, Homo sapiens
  misc_RNA (1)...(19): siRNA sense strand
gggaaugcaggcuuuaaug

SEQ ID NO: 134032 - RNA, 19 nt, Homo sapiens
  misc_RNA (1)...(19): siRNA sense strand
gaccaacccugaggagaag

SEQ ID NO: 134033 - RNA, 19 nt, Homo sapiens
  misc_RNA (1)...(19): siRNA sense strand
aaagaaggcaguugauaca

SEQ ID NO: 134034 - RNA, 19 nt, Homo sapiens
  misc_RNA (1)...(19): siRNA sense strand
gaacugacaaaggagauca

SEQ ID NO: 134035 - RNA, 19 nt, Homo sapiens
  misc_RNA (1)...(19): siRNA sense strand
gcacuuuaucgcugacuga

SEQ ID NO: 134036 - RNA, 19 nt, Homo sapiens
  misc_RNA (1)...(19): siRNA sense strand
ccacgaagaccuggaugaa

SEQ ID NO: 134037 - RNA, 19 nt, Homo sapiens
  misc_RNA (1)...(19): siRNA sense strand
gcugcugacccaagccuua

SEQ ID NO: 134038 - RNA, 19 nt, Homo sapiens
  misc_RNA (1)...(19): siRNA sense strand
gauccuacauggcuuucca

SEQ ID NO: 134039 - RNA, 19 nt, Homo sapiens
  misc_RNA (1)...(19): siRNA sense strand
ucucagaagugcagaggau

SEQ ID NO: 134040 - RNA, 19 nt, Homo sapiens
  misc_RNA (1)...(19): siRNA sense strand
caacgucacugaugauaug

SEQ ID NO: 134041 - RNA, 19 nt, Homo sapiens
  misc_RNA (1)...(19): siRNA sense strand
ggagagaaaugggagaauu

SEQ ID NO: 134042 - RNA, 19 nt, Homo sapiens
  misc_RNA (1)...(19): siRNA sense strand
gcagcugucuuuacuaaug

SEQ ID NO: 134043 - RNA, 19 nt, Homo sapiens
  misc_RNA (1)...(19): siRNA sense strand
gaaguaauuugaagagagu

SEQ ID NO: 134044 - RNA, 19 nt, Homo sapiens
  misc_RNA (1)...(19): siRNA sense strand
gcaaaggacugggccgaaa

SEQ ID NO: 134045 - RNA, 19 nt, Homo sapiens
  misc_RNA (1)...(19): siRNA sense strand
cgaaagagccaauaacuca

SEQ ID NO: 134046 - RNA, 19 nt, Homo sapiens
  misc_RNA (1)...(19): siRNA sense strand
uagcagcugucuuuacuaa

SEQ ID NO: 134047 - RNA, 19 nt, Homo sapiens
  misc_RNA (1)...(19): siRNA sense strand
ggaugaaguuaucgaaaga

SEQ ID NO: 134048 - RNA, 19 nt, Homo sapiens
  misc_RNA (1)...(19): siRNA sense strand
ggacagaucaucccaugga

SEQ ID NO: 134049 - RNA, 19 nt, Homo sapiens
  misc_RNA (1)...(19): siRNA sense strand
gccaauaacucagacuuug

SEQ ID NO: 134050 - RNA, 19 nt, Homo sapiens
  misc_RNA (1)...(19): siRNA sense strand
ggauaagcuugcagacuug

SEQ ID NO: 134051 - RNA, 19 nt, Homo sapiens
  misc_RNA (1)...(19): siRNA sense strand
gauucaagaugucuggaaa

SEQ ID NO: 134052 - RNA, 19 nt, Homo sapiens
  misc_RNA (1)...(19): siRNA sense strand
uggauaagcuugcagacuu

SEQ ID NO: 134053 - RNA, 19 nt, Homo sapiens
  misc_RNA (1)...(19): siRNA sense strand
gauuuaagacgauggauga

SEQ ID NO: 134054 - RNA, 19 nt, Homo sapiens
  misc_RNA (1)...(19): siRNA sense strand
ccaagaagcagcuggaaga

SEQ ID NO: 134055 - RNA, 19 nt, Homo sapiens
  misc_RNA (1)...(19): siRNA sense strand
gacgauggaugaaguuauc

SEQ ID NO: 134056 - RNA, 19 nt, Homo sapiens
  misc_RNA (1)...(19): siRNA sense strand
uacaagacaugaacccauu

SEQ ID NO: 134057 - RNA, 19 nt, Homo sapiens
  misc_RNA (1)...(19): siRNA sense strand
uuaagacggugacaguaaa

SEQ ID NO: 134058 - RNA, 19 nt, Homo sapiens
  misc_RNA (1)...(19): siRNA sense strand
gcuggaauguggaggcaaa

SEQ ID NO: 134059 - RNA, 19 nt, Homo sapiens
  misc_RNA (1)...(19): siRNA sense strand
ggaagaaguaauuugaaga

SEQ ID NO: 134060 - RNA, 19 nt, Homo sapiens
  misc_RNA (1)...(19): siRNA sense strand
agaagcagcuggaagaagu

SEQ ID NO: 134061 - RNA, 19 nt, Homo sapiens
  misc_RNA (1)...(19): siRNA sense strand
ggagaucuuuggcccuguu

SEQ ID NO: 134062 - RNA, 19 nt, Homo sapiens
  misc_RNA (1)...(19): siRNA sense strand
ggcaaaaguccuaauauua

SEQ ID NO: 134063 - RNA, 19 nt, Homo sapiens
  misc_RNA (1)...(19): siRNA sense strand
cuguuuggaucaauuguua

SEQ ID NO: 134064 - RNA, 19 nt, Homo sapiens
  misc_RNA (1)...(19): siRNA sense strand
gauggaugcuucagaaagg

SEQ ID NO: 134065 - RNA, 19 nt, Homo sapiens
  misc_RNA (1)...(19): siRNA sense strand
gauaagaaacaguacaaca

SEQ ID NO: 134066 - RNA, 19 nt, Homo sapiens
  misc_RNA (1)...(19): siRNA sense strand
ggacagggcaguucuugca

SEQ ID NO: 134067 - RNA, 19 nt, Homo sapiens
  misc_RNA (1)...(19): siRNA sense strand
guuaagacggugacaguaa

SEQ ID NO: 134068 - RNA, 19 nt, Homo sapiens
  misc_RNA (1)...(19): siRNA sense strand
gaagaaguaauuugaagag

SEQ ID NO: 134069 - RNA, 19 nt, Homo sapiens
  misc_RNA (1)...(19): siRNA sense strand
gcagcuggaagaaguaauu

SEQ ID NO: 134070 - RNA, 19 nt, Homo sapiens
  misc_RNA (1)...(19): siRNA sense strand
gcuggaagaaguaauuuga

SEQ ID NO: 134071 - RNA, 19 nt, Homo sapiens
  misc_RNA (1)...(19): siRNA sense strand
ggaugaccauuccuguaga

SEQ ID NO: 134072 - RNA, 19 nt, Homo sapiens
  misc_RNA (1)...(19): siRNA sense strand
cgggaguacucagaaguua

SEQ ID NO: 134073 - RNA, 19 nt, Homo sapiens
  misc_RNA (1)...(19): siRNA sense strand
cacagugucuucugcaaug

SEQ ID NO: 134074 - RNA, 19 nt, Homo sapiens
  misc_RNA (1)...(19): siRNA sense strand
gcuuugugcuguggcaaua

SEQ ID NO: 134075 - RNA, 19 nt, Homo sapiens
  misc_RNA (1)...(19): siRNA sense strand
aaggauggaugcuucagaa

SEQ ID NO: 134076 - RNA, 19 nt, Homo sapiens
  misc_RNA (1)...(19): siRNA sense strand
gcugauguuugccuggaaa

SEQ ID NO: 134077 - RNA, 19 nt, Homo sapiens
  misc_RNA (1)...(19): siRNA sense strand
cagcugucuuuacuaauga

SEQ ID NO: 134078 - RNA, 19 nt, Homo sapiens
  misc_RNA (1)...(19): siRNA sense strand
uuaagacgauggaugaagu

SEQ ID NO: 134079 - RNA, 19 nt, Homo sapiens
  misc_RNA (1)...(19): siRNA sense strand
ggaaaugggagagaaaugg

SEQ ID NO: 134080 - RNA, 19 nt, Homo sapiens
  misc_RNA (1)...(19): siRNA sense strand
gggacuguuuggaucaauu

SEQ ID NO: 134081 - RNA, 19 nt, Homo sapiens
  misc_RNA (1)...(19): siRNA sense strand
gaagcagcuggaagaagua

SEQ ID NO: 134082 - RNA, 19 nt, Homo sapiens
  misc_RNA (1)...(19): siRNA sense strand
guccaucuaugaggaguuu

SEQ ID NO: 134083 - RNA, 19 nt, Homo sapiens
  misc_RNA (1)...(19): siRNA sense strand
gaugaccauuccuguagau

SEQ ID NO: 134084 - RNA, 19 nt, Homo sapiens
  misc_RNA (1)...(19): siRNA sense strand
aagaaacaguacaacaaga

SEQ ID NO: 134085 - RNA, 19 nt, Homo sapiens
  misc_RNA (1)...(19): siRNA sense strand
aaccauuccugcaagcuuu

SEQ ID NO: 134086 - RNA, 19 nt, Homo sapiens
  misc_RNA (1)...(19): siRNA sense strand
acucguagcagcugucuuu

SEQ ID NO: 134087 - RNA, 19 nt, Homo sapiens
  misc_RNA (1)...(19): siRNA sense strand
gggcaguucuugcaaccau

SEQ ID NO: 134088 - RNA, 19 nt, Homo sapiens
  misc_RNA (1)...(19): siRNA sense strand
gacagaucaucccauggaa

SEQ ID NO: 134089 - RNA, 19 nt, Homo sapiens
  misc_RNA (1)...(19): siRNA sense strand
gggaugaccauuccuguag

SEQ ID NO: 134090 - RNA, 19 nt, Homo sapiens
  misc_RNA (1)...(19): siRNA sense strand
gcagagcaaacaccacuca

SEQ ID NO: 134091 - RNA, 19 nt, Homo sapiens
  misc_RNA (1)...(19): siRNA sense strand
ggacuguuuggaucaauug

SEQ ID NO: 134092 - RNA, 19 nt, Homo sapiens
  misc_RNA (1)...(19): siRNA sense strand
gaaacaguacaacaagauc

SEQ ID NO: 134093 - RNA, 19 nt, Homo sapiens
  misc_RNA (1)...(19): siRNA sense strand
uaagaaacaguacaacaag

SEQ ID NO: 134094 - RNA, 19 nt, Homo sapiens
  misc_RNA (1)...(19): siRNA sense strand
caucaaaaccuuucgauau

SEQ ID NO: 134095 - RNA, 19 nt, Homo sapiens
  misc_RNA (1)...(19): siRNA sense strand
ggaguacucagaaguuaag

SEQ ID NO: 134096 - RNA, 19 nt, Homo sapiens
  misc_RNA (1)...(19): siRNA sense strand
cguagcagcugucuuuacu

SEQ ID NO: 134097 - RNA, 19 nt, Homo sapiens
  misc_RNA (1)...(19): siRNA sense strand
ggaauguggaggcaaagga

SEQ ID NO: 134098 - RNA, 19 nt, Homo sapiens
  misc_RNA (1)...(19): siRNA sense strand
uggaagaaguaauuugaag

SEQ ID NO: 134099 - RNA, 19 nt, Homo sapiens
  misc_RNA (1)...(19): siRNA sense strand
gaucaucccauggaacuuc

SEQ ID NO: 134100 - RNA, 19 nt, Homo sapiens
  misc_RNA (1)...(19): siRNA sense strand
ugggagcccucaucaagga

SEQ ID NO: 134101 - RNA, 19 nt, Homo sapiens
  misc_RNA (1)...(19): siRNA sense strand
caauaacucagacuuugga

SEQ ID NO: 134102 - RNA, 19 nt, Homo sapiens
  misc_RNA (1)...(19): siRNA sense strand
uggaugaaguuaucgaaag

SEQ ID NO: 134103 - RNA, 19 nt, Homo sapiens
  misc_RNA (1)...(19): siRNA sense strand
gguguguucuucaaucaag

SEQ ID NO: 134104 - RNA, 19 nt, Homo sapiens
  misc_RNA (1)...(19): siRNA sense strand
ggacgucuguuggauaagc

SEQ ID NO: 134105 - RNA, 19 nt, Homo sapiens
  misc_RNA (1)...(19): siRNA sense strand
ggagacuauuuuaccuuua

SEQ ID NO: 134106 - RNA, 19 nt, Homo sapiens
  misc_RNA (1)...(19): siRNA sense strand
ggaaagcuuauccaagaag

SEQ ID NO: 134107 - RNA, 19 nt, Homo sapiens
  misc_RNA (1)...(19): siRNA sense strand
gggaguacucagaaguuaa

SEQ ID NO: 134108 - RNA, 19 nt, Homo sapiens
  misc_RNA (1)...(19): siRNA sense strand
ucauugagcccacaguguu

SEQ ID NO: 134109 - RNA, 19 nt, Homo sapiens
  misc_RNA (1)...(19): siRNA sense strand
ggggacgucuguuggauaa

SEQ ID NO: 134110 - RNA, 19 nt, Homo sapiens
  misc_RNA (1)...(19): siRNA sense strand
guagauggagacuauuuua

SEQ ID NO: 134111 - RNA, 19 nt, Homo sapiens
  misc_RNA (1)...(19): siRNA sense strand
ggauggaugcuucagaaag

SEQ ID NO: 134112 - RNA, 19 nt, Homo sapiens
  misc_RNA (1)...(19): siRNA sense strand
caugggagcccucaucaag

SEQ ID NO: 134113 - RNA, 19 nt, Homo sapiens
  misc_RNA (1)...(19): siRNA sense strand
gaugcugacuuggacuaug

SEQ ID NO: 134114 - RNA, 19 nt, Homo sapiens
  misc_RNA (1)...(19): siRNA sense strand
uaugaggaguuugugagaa

SEQ ID NO: 134115 - RNA, 19 nt, Homo sapiens
  misc_RNA (1)...(19): siRNA sense strand
gcaaccauggaaucccuaa

SEQ ID NO: 134116 - RNA, 19 nt, Homo sapiens
  misc_RNA (1)...(19): siRNA sense strand
ggaggcaaaaguccuaaua

SEQ ID NO: 134117 - RNA, 19 nt, Homo sapiens
  misc_RNA (1)...(19): siRNA sense strand
uuuccaacgucacugauga

SEQ ID NO: 134118 - RNA, 19 nt, Homo sapiens
  misc_RNA (1)...(19): siRNA sense strand
caggguguguucuucaauc

SEQ ID NO: 134119 - RNA, 19 nt, Homo sapiens
  misc_RNA (1)...(19): siRNA sense strand
aggcugggcugauaaaauu

SEQ ID NO: 134120 - RNA, 19 nt, Homo sapiens
  misc_RNA (1)...(19): siRNA sense strand
aaagagccaauaacucaga

SEQ ID NO: 134121 - RNA, 19 nt, Homo sapiens
  misc_RNA (1)...(19): siRNA sense strand
caagaagcagcuggaagaa

SEQ ID NO: 134122 - RNA, 19 nt, Homo sapiens
  misc_RNA (1)...(19): siRNA sense strand
gauggaugaaguuaucgaa

SEQ ID NO: 134123 - RNA, 19 nt, Homo sapiens
  misc_RNA (1)...(19): siRNA sense strand
gcgggaguacucagaaguu

SEQ ID NO: 134124 - RNA, 19 nt, Homo sapiens
  misc_RNA (1)...(19): siRNA sense strand
ggauucaagaugucuggaa

SEQ ID NO: 134125 - RNA, 19 nt, Homo sapiens
  misc_RNA (1)...(19): siRNA sense strand
gagccaauaacucagacuu

SEQ ID NO: 134126 - RNA, 19 nt, Homo sapiens
  misc_RNA (1)...(19): siRNA sense strand
uccuguagauggagacuau

SEQ ID NO: 134127 - RNA, 19 nt, Homo sapiens
  misc_RNA (1)...(19): siRNA sense strand
uacgcaggcugggcugaua

SEQ ID NO: 134128 - RNA, 19 nt, Homo sapiens
  misc_RNA (1)...(19): siRNA sense strand
ggcuuucucucuugguuca

SEQ ID NO: 134129 - RNA, 19 nt, Homo sapiens
  misc_RNA (1)...(19): siRNA sense strand
ccgccuggcuuucucucuu

SEQ ID NO: 134130 - RNA, 19 nt, Homo sapiens
  misc_RNA (1)...(19): siRNA sense strand
agaaacaguacaacaagau

SEQ ID NO: 134131 - RNA, 19 nt, Homo sapiens
  misc_RNA (1)...(19): siRNA sense strand
gauguuugccuggaaaaua

SEQ ID NO: 134132 - RNA, 19 nt, Homo sapiens
  misc_RNA (1)...(19): siRNA sense strand
aggcaaaaguccuaauauu

SEQ ID NO: 134133 - RNA, 19 nt, Homo sapiens
  misc_RNA (1)...(19): siRNA sense strand
ugcaggcucucgcaucuuc

SEQ ID NO: 134134 - RNA, 19 nt, Homo sapiens
  misc_RNA (1)...(19): siRNA sense strand
uucaagaugucuggaaaug

SEQ ID NO: 134135 - RNA, 19 nt, Homo sapiens
  misc_RNA (1)...(19): siRNA sense strand
ucaacaaggcccucacagu

SEQ ID NO: 134136 - RNA, 19 nt, Homo sapiens
  misc_RNA (1)...(19): siRNA sense strand
cauggaaucccuaaauggu

SEQ ID NO: 134137 - RNA, 19 nt, Homo sapiens
  misc_RNA (1)...(19): siRNA sense strand
uggcaaaccauuccugcaa

SEQ ID NO: 134138 - RNA, 19 nt, Homo sapiens
  misc_RNA (1)...(19): siRNA sense strand
ucuggaacuuggaggcaaa

SEQ ID NO: 134139 - RNA, 19 nt, Homo sapiens
  misc_RNA (1)...(19): siRNA sense strand
ggaggaguccaucuaugag

SEQ ID NO: 134140 - RNA, 19 nt, Homo sapiens
  misc_RNA (1)...(19): siRNA sense strand
caacgucacugaugauaug

SEQ ID NO: 134141 - RNA, 19 nt, Homo sapiens
  misc_RNA (1)...(19): siRNA sense strand
ggagagaaaugggagaauu

SEQ ID NO: 134142 - RNA, 19 nt, Homo sapiens
  misc_RNA (1)...(19): siRNA sense strand
gcagcugucuuuacuaaug

SEQ ID NO: 134143 - RNA, 19 nt, Homo sapiens
  misc_RNA (1)...(19): siRNA sense strand
gaaguaauuugaagagagu

SEQ ID NO: 134144 - RNA, 19 nt, Homo sapiens
  misc_RNA (1)...(19): siRNA sense strand
gcaaaggacugggccgaaa

SEQ ID NO: 134145 - RNA, 19 nt, Homo sapiens
  misc_RNA (1)...(19): siRNA sense strand
cgaaagagccaauaacuca

SEQ ID NO: 134146 - RNA, 19 nt, Homo sapiens
  misc_RNA (1)...(19): siRNA sense strand
uagcagcugucuuuacuaa

SEQ ID NO: 134147 - RNA, 19 nt, Homo sapiens
  misc_RNA (1)...(19): siRNA sense strand
ggaugaaguuaucgaaaga

SEQ ID NO: 134148 - RNA, 19 nt, Homo sapiens
  misc_RNA (1)...(19): siRNA sense strand
ggacagaucaucccaugga

SEQ ID NO: 134149 - RNA, 19 nt, Homo sapiens
  misc_RNA (1)...(19): siRNA sense strand
gccaauaacucagacuuug

SEQ ID NO: 134150 - RNA, 19 nt, Homo sapiens
  misc_RNA (1)...(19): siRNA sense strand
ggauaagcuugcagacuug

SEQ ID NO: 134151 - RNA, 19 nt, Homo sapiens
  misc_RNA (1)...(19): siRNA sense strand
gauucaagaugucuggaaa

SEQ ID NO: 134152 - RNA, 19 nt, Homo sapiens
  misc_RNA (1)...(19): siRNA sense strand
uggauaagcuugcagacuu

SEQ ID NO: 134153 - RNA, 19 nt, Homo sapiens
  misc_RNA (1)...(19): siRNA sense strand
gauuuaagacgauggauga

SEQ ID NO: 134154 - RNA, 19 nt, Homo sapiens
  misc_RNA (1)...(19): siRNA sense strand
ccaagaagcagcuggaaga

SEQ ID NO: 134155 - RNA, 19 nt, Homo sapiens
  misc_RNA (1)...(19): siRNA sense strand
gacgauggaugaaguuauc

SEQ ID NO: 134156 - RNA, 19 nt, Homo sapiens
  misc_RNA (1)...(19): siRNA sense strand
uacaagacaugaacccauu

SEQ ID NO: 134157 - RNA, 19 nt, Homo sapiens
  misc_RNA (1)...(19): siRNA sense strand
uuaagacggugacaguaaa

SEQ ID NO: 134158 - RNA, 19 nt, Homo sapiens
  misc_RNA (1)...(19): siRNA sense strand
gcuggaauguggaggcaaa

SEQ ID NO: 134159 - RNA, 19 nt, Homo sapiens
  misc_RNA (1)...(19): siRNA sense strand
ggaagaaguaauuugaaga

SEQ ID NO: 134160 - RNA, 19 nt, Homo sapiens
  misc_RNA (1)...(19): siRNA sense strand
agaagcagcuggaagaagu

SEQ ID NO: 134161 - RNA, 19 nt, Homo sapiens
  misc_RNA (1)...(19): siRNA sense strand
ggagaucuuuggcccuguu

SEQ ID NO: 134162 - RNA, 19 nt, Homo sapiens
  misc_RNA (1)...(19): siRNA sense strand
ggcaaaaguccuaauauua

SEQ ID NO: 134163 - RNA, 19 nt, Homo sapiens
  misc_RNA (1)...(19): siRNA sense strand
cuguuuggaucaauuguua

SEQ ID NO: 134164 - RNA, 19 nt, Homo sapiens
  misc_RNA (1)...(19): siRNA sense strand
gauggaugcuucagaaagg

SEQ ID NO: 134165 - RNA, 19 nt, Homo sapiens
  misc_RNA (1)...(19): siRNA sense strand
gauaagaaacaguacaaca

SEQ ID NO: 134166 - RNA, 19 nt, Homo sapiens
  misc_RNA (1)...(19): siRNA sense strand
ggacagggcaguucuugca

SEQ ID NO: 134167 - RNA, 19 nt, Homo sapiens
  misc_RNA (1)...(19): siRNA sense strand
guuaagacggugacaguaa

SEQ ID NO: 134168 - RNA, 19 nt, Homo sapiens
  misc_RNA (1)...(19): siRNA sense strand
gaagaaguaauuugaagag

SEQ ID NO: 134169 - RNA, 19 nt, Homo sapiens
  misc_RNA (1)...(19): siRNA sense strand
gcagcuggaagaaguaauu

SEQ ID NO: 134170 - RNA, 19 nt, Homo sapiens
  misc_RNA (1)...(19): siRNA sense strand
gcuggaagaaguaauuuga

SEQ ID NO: 134171 - RNA, 19 nt, Homo sapiens
  misc_RNA (1)...(19): siRNA sense strand
ggaugaccauuccuguaga

SEQ ID NO: 134172 - RNA, 19 nt, Homo sapiens
  misc_RNA (1)...(19): siRNA sense strand
cgggaguacucagaaguua

SEQ ID NO: 134173 - RNA, 19 nt, Homo sapiens
  misc_RNA (1)...(19): siRNA sense strand
cacagugucuucugcaaug

SEQ ID NO: 134174 - RNA, 19 nt, Homo sapiens
  misc_RNA (1)...(19): siRNA sense strand
gcuuugugcuguggcaaua

SEQ ID NO: 134175 - RNA, 19 nt, Homo sapiens
  misc_RNA (1)...(19): siRNA sense strand
aaggauggaugcuucagaa

SEQ ID NO: 134176 - RNA, 19 nt, Homo sapiens
  misc_RNA (1)...(19): siRNA sense strand
gcugauguuugccuggaaa

SEQ ID NO: 134177 - RNA, 19 nt, Homo sapiens
  misc_RNA (1)...(19): siRNA sense strand
cagcugucuuuacuaauga

SEQ ID NO: 134178 - RNA, 19 nt, Homo sapiens
  misc_RNA (1)...(19): siRNA sense strand
uuaagacgauggaugaagu

SEQ ID NO: 134179 - RNA, 19 nt, Homo sapiens
  misc_RNA (1)...(19): siRNA sense strand
ggaaaugggagagaaaugg

SEQ ID NO: 134180 - RNA, 19 nt, Homo sapiens
  misc_RNA (1)...(19): siRNA sense strand
gggacuguuuggaucaauu

SEQ ID NO: 134181 - RNA, 19 nt, Homo sapiens
  misc_RNA (1)...(19): siRNA sense strand
gaagcagcuggaagaagua

SEQ ID NO: 134182 - RNA, 19 nt, Homo sapiens
  misc_RNA (1)...(19): siRNA sense strand
guccaucuaugaggaguuu

SEQ ID NO: 134183 - RNA, 19 nt, Homo sapiens
  misc_RNA (1)...(19): siRNA sense strand
gaugaccauuccuguagau

SEQ ID NO: 134184 - RNA, 19 nt, Homo sapiens
  misc_RNA (1)...(19): siRNA sense strand
aagaaacaguacaacaaga

SEQ ID NO: 134185 - RNA, 19 nt, Homo sapiens
  misc_RNA (1)...(19): siRNA sense strand
aaccauuccugcaagcuuu

SEQ ID NO: 134186 - RNA, 19 nt, Homo sapiens
  misc_RNA (1)...(19): siRNA sense strand
acucguagcagcugucuuu

SEQ ID NO: 134187 - RNA, 19 nt, Homo sapiens
  misc_RNA (1)...(19): siRNA sense strand
gggcaguucuugcaaccau

SEQ ID NO: 134188 - RNA, 19 nt, Homo sapiens
  misc_RNA (1)...(19): siRNA sense strand
gacagaucaucccauggaa

SEQ ID NO: 134189 - RNA, 19 nt, Homo sapiens
  misc_RNA (1)...(19): siRNA sense strand
gggaugaccauuccuguag

SEQ ID NO: 134190 - RNA, 19 nt, Homo sapiens
  misc_RNA (1)...(19): siRNA sense strand
gcagagcaaacaccacuca

SEQ ID NO: 134191 - RNA, 19 nt, Homo sapiens
  misc_RNA (1)...(19): siRNA sense strand
ggacuguuuggaucaauug

SEQ ID NO: 134192 - RNA, 19 nt, Homo sapiens
  misc_RNA (1)...(19): siRNA sense strand
gaaacaguacaacaagauc

SEQ ID NO: 134193 - RNA, 19 nt, Homo sapiens
  misc_RNA (1)...(19): siRNA sense strand
uaagaaacaguacaacaag

SEQ ID NO: 134194 - RNA, 19 nt, Homo sapiens
  misc_RNA (1)...(19): siRNA sense strand
caucaaaaccuuucgauau

SEQ ID NO: 134195 - RNA, 19 nt, Homo sapiens
  misc_RNA (1)...(19): siRNA sense strand
ggaguacucagaaguuaag

SEQ ID NO: 134196 - RNA, 19 nt, Homo sapiens
  misc_RNA (1)...(19): siRNA sense strand
cguagcagcugucuuuacu

SEQ ID NO: 134197 - RNA, 19 nt, Homo sapiens
  misc_RNA (1)...(19): siRNA sense strand
ggaauguggaggcaaagga

SEQ ID NO: 134198 - RNA, 19 nt, Homo sapiens
  misc_RNA (1)...(19): siRNA sense strand
uggaagaaguaauuugaag

SEQ ID NO: 134199 - RNA, 19 nt, Homo sapiens
  misc_RNA (1)...(19): siRNA sense strand
gaucaucccauggaacuuc

SEQ ID NO: 134200 - RNA, 19 nt, Homo sapiens
  misc_RNA (1)...(19): siRNA sense strand
ugggagcccucaucaagga

SEQ ID NO: 134201 - RNA, 19 nt, Homo sapiens
  misc_RNA (1)...(19): siRNA sense strand
caauaacucagacuuugga

SEQ ID NO: 134202 - RNA, 19 nt, Homo sapiens
  misc_RNA (1)...(19): siRNA sense strand
uggaugaaguuaucgaaag

SEQ ID NO: 134203 - RNA, 19 nt, Homo sapiens
  misc_RNA (1)...(19): siRNA sense strand
gguguguucuucaaucaag

SEQ ID NO: 134204 - RNA, 19 nt, Homo sapiens
  misc_RNA (1)...(19): siRNA sense strand
ggacgucuguuggauaagc

SEQ ID NO: 134205 - RNA, 19 nt, Homo sapiens
  misc_RNA (1)...(19): siRNA sense strand
ggagacuauuuuaccuuua

SEQ ID NO: 134206 - RNA, 19 nt, Homo sapiens
  misc_RNA (1)...(19): siRNA sense strand
ggaaagcuuauccaagaag

SEQ ID NO: 134207 - RNA, 19 nt, Homo sapiens
  misc_RNA (1)...(19): siRNA sense strand
gggaguacucagaaguuaa

SEQ ID NO: 134208 - RNA, 19 nt, Homo sapiens
  misc_RNA (1)...(19): siRNA sense strand
ucauugagcccacaguguu

SEQ ID NO: 134209 - RNA, 19 nt, Homo sapiens
  misc_RNA (1)...(19): siRNA sense strand
ggggacgucuguuggauaa

SEQ ID NO: 134210 - RNA, 19 nt, Homo sapiens
  misc_RNA (1)...(19): siRNA sense strand
guagauggagacuauuuua

SEQ ID NO: 134211 - RNA, 19 nt, Homo sapiens
  misc_RNA (1)...(19): siRNA sense strand
ggauggaugcuucagaaag

SEQ ID NO: 134212 - RNA, 19 nt, Homo sapiens
  misc_RNA (1)...(19): siRNA sense strand
caugggagcccucaucaag

SEQ ID NO: 134213 - RNA, 19 nt, Homo sapiens
  misc_RNA (1)...(19): siRNA sense strand
gaugcugacuuggacuaug

SEQ ID NO: 134214 - RNA, 19 nt, Homo sapiens
  misc_RNA (1)...(19): siRNA sense strand
uaugaggaguuugugagaa

SEQ ID NO: 134215 - RNA, 19 nt, Homo sapiens
  misc_RNA (1)...(19): siRNA sense strand
gcaaccauggaaucccuaa

SEQ ID NO: 134216 - RNA, 19 nt, Homo sapiens
  misc_RNA (1)...(19): siRNA sense strand
ggaggcaaaaguccuaaua

SEQ ID NO: 134217 - RNA, 19 nt, Homo sapiens
  misc_RNA (1)...(19): siRNA sense strand
uuuccaacgucacugauga

SEQ ID NO: 134218 - RNA, 19 nt, Homo sapiens
  misc_RNA (1)...(19): siRNA sense strand
caggguguguucuucaauc

SEQ ID NO: 134219 - RNA, 19 nt, Homo sapiens
  misc_RNA (1)...(19): siRNA sense strand
aggcugggcugauaaaauu

SEQ ID NO: 134220 - RNA, 19 nt, Homo sapiens
  misc_RNA (1)...(19): siRNA sense strand
aaagagccaauaacucaga

SEQ ID NO: 134221 - RNA, 19 nt, Homo sapiens
  misc_RNA (1)...(19): siRNA sense strand
caagaagcagcuggaagaa

SEQ ID NO: 134222 - RNA, 19 nt, Homo sapiens
  misc_RNA (1)...(19): siRNA sense strand
gauggaugaaguuaucgaa

SEQ ID NO: 134223 - RNA, 19 nt, Homo sapiens
  misc_RNA (1)...(19): siRNA sense strand
gcgggaguacucagaaguu

SEQ ID NO: 134224 - RNA, 19 nt, Homo sapiens
  misc_RNA (1)...(19): siRNA sense strand
ggauucaagaugucuggaa

SEQ ID NO: 134225 - RNA, 19 nt, Homo sapiens
  misc_RNA (1)...(19): siRNA sense strand
gagccaauaacucagacuu

SEQ ID NO: 134226 - RNA, 19 nt, Homo sapiens
  misc_RNA (1)...(19): siRNA sense strand
uccuguagauggagacuau

SEQ ID NO: 134227 - RNA, 19 nt, Homo sapiens
  misc_RNA (1)...(19): siRNA sense strand
uacgcaggcugggcugaua

SEQ ID NO: 134228 - RNA, 19 nt, Homo sapiens
  misc_RNA (1)...(19): siRNA sense strand
ggcuuucucucuugguuca

SEQ ID NO: 134229 - RNA, 19 nt, Homo sapiens
  misc_RNA (1)...(19): siRNA sense strand
ccgccuggcuuucucucuu

SEQ ID NO: 134230 - RNA, 19 nt, Homo sapiens
  misc_RNA (1)...(19): siRNA sense strand
agaaacaguacaacaagau

SEQ ID NO: 134231 - RNA, 19 nt, Homo sapiens
  misc_RNA (1)...(19): siRNA sense strand
gauguuugccuggaaaaua

SEQ ID NO: 134232 - RNA, 19 nt, Homo sapiens
  misc_RNA (1)...(19): siRNA sense strand
aggcaaaaguccuaauauu

SEQ ID NO: 134233 - RNA, 19 nt, Homo sapiens
  misc_RNA (1)...(19): siRNA sense strand
ugcaggcucucgcaucuuc

SEQ ID NO: 134234 - RNA, 19 nt, Homo sapiens
  misc_RNA (1)...(19): siRNA sense strand
uucaagaugucuggaaaug

SEQ ID NO: 134235 - RNA, 19 nt, Homo sapiens
  misc_RNA (1)...(19): siRNA sense strand
ucaacaaggcccucacagu

SEQ ID NO: 134236 - RNA, 19 nt, Homo sapiens
  misc_RNA (1)...(19): siRNA sense strand
cauggaaucccuaaauggu

SEQ ID NO: 134237 - RNA, 19 nt, Homo sapiens
  misc_RNA (1)...(19): siRNA sense strand
uggcaaaccauuccugcaa

SEQ ID NO: 134238 - RNA, 19 nt, Homo sapiens
  misc_RNA (1)...(19): siRNA sense strand
ucuggaacuuggaggcaaa

SEQ ID NO: 134239 - RNA, 19 nt, Homo sapiens
  misc_RNA (1)...(19): siRNA sense strand
ggaggaguccaucuaugag

SEQ ID NO: 134240 - RNA, 19 nt, Homo sapiens
  misc_RNA (1)...(19): siRNA sense strand
caacgucacugaugauaug

SEQ ID NO: 134241 - RNA, 19 nt, Homo sapiens
  misc_RNA (1)...(19): siRNA sense strand
ggagagaaaugggagaauu

SEQ ID NO: 134242 - RNA, 19 nt, Homo sapiens
  misc_RNA (1)...(19): siRNA sense strand
gcagcugucuuuacuaaug

SEQ ID NO: 134243 - RNA, 19 nt, Homo sapiens
  misc_RNA (1)...(19): siRNA sense strand
gaaguaauuugaagagagu

SEQ ID NO: 134244 - RNA, 19 nt, Homo sapiens
  misc_RNA (1)...(19): siRNA sense strand
gcaaaggacugggccgaaa

SEQ ID NO: 134245 - RNA, 19 nt, Homo sapiens
  misc_RNA (1)...(19): siRNA sense strand
cgaaagagccaauaacuca

SEQ ID NO: 134246 - RNA, 19 nt, Homo sapiens
  misc_RNA (1)...(19): siRNA sense strand
uagcagcugucuuuacuaa

SEQ ID NO: 134247 - RNA, 19 nt, Homo sapiens
  misc_RNA (1)...(19): siRNA sense strand
ggaugaaguuaucgaaaga

SEQ ID NO: 134248 - RNA, 19 nt, Homo sapiens
  misc_RNA (1)...(19): siRNA sense strand
ggacagaucaucccaugga

SEQ ID NO: 134249 - RNA, 19 nt, Homo sapiens
  misc_RNA (1)...(19): siRNA sense strand
gccaauaacucagacuuug

SEQ ID NO: 134250 - RNA, 19 nt, Homo sapiens
  misc_RNA (1)...(19): siRNA sense strand
ggauaagcuugcagacuug

SEQ ID NO: 134251 - RNA, 19 nt, Homo sapiens
  misc_RNA (1)...(19): siRNA sense strand
gauucaagaugucuggaaa

SEQ ID NO: 134252 - RNA, 19 nt, Homo sapiens
  misc_RNA (1)...(19): siRNA sense strand
uggauaagcuugcagacuu

SEQ ID NO: 134253 - RNA, 19 nt, Homo sapiens
  misc_RNA (1)...(19): siRNA sense strand
gauuuaagacgauggauga

SEQ ID NO: 134254 - RNA, 19 nt, Homo sapiens
  misc_RNA (1)...(19): siRNA sense strand
ccaagaagcagcuggaaga

SEQ ID NO: 134255 - RNA, 19 nt, Homo sapiens
  misc_RNA (1)...(19): siRNA sense strand
gacgauggaugaaguuauc

SEQ ID NO: 134256 - RNA, 19 nt, Homo sapiens
  misc_RNA (1)...(19): siRNA sense strand
uacaagacaugaacccauu

SEQ ID NO: 134257 - RNA, 19 nt, Homo sapiens
  misc_RNA (1)...(19): siRNA sense strand
uuaagacggugacaguaaa

SEQ ID NO: 134258 - RNA, 19 nt, Homo sapiens
  misc_RNA (1)...(19): siRNA sense strand
gcuggaauguggaggcaaa

SEQ ID NO: 134259 - RNA, 19 nt, Homo sapiens
  misc_RNA (1)...(19): siRNA sense strand
ggaagaaguaauuugaaga

SEQ ID NO: 134260 - RNA, 19 nt, Homo sapiens
  misc_RNA (1)...(19): siRNA sense strand
agaagcagcuggaagaagu

SEQ ID NO: 134261 - RNA, 19 nt, Homo sapiens
  misc_RNA (1)...(19): siRNA sense strand
ggagaucuuuggcccuguu

SEQ ID NO: 134262 - RNA, 19 nt, Homo sapiens
  misc_RNA (1)...(19): siRNA sense strand
ggcaaaaguccuaauauua

SEQ ID NO: 134263 - RNA, 19 nt, Homo sapiens
  misc_RNA (1)...(19): siRNA sense strand
cuguuuggaucaauuguua

SEQ ID NO: 134264 - RNA, 19 nt, Homo sapiens
  misc_RNA (1)...(19): siRNA sense strand
gauaagaaacaguacaaca

SEQ ID NO: 134265 - RNA, 19 nt, Homo sapiens
  misc_RNA (1)...(19): siRNA sense strand
ggacagggcaguucuugca

SEQ ID NO: 134266 - RNA, 19 nt, Homo sapiens
  misc_RNA (1)...(19): siRNA sense strand
guuaagacggugacaguaa

SEQ ID NO: 134267 - RNA, 19 nt, Homo sapiens
  misc_RNA (1)...(19): siRNA sense strand
gaagaaguaauuugaagag

SEQ ID NO: 134268 - RNA, 19 nt, Homo sapiens
  misc_RNA (1)...(19): siRNA sense strand
gcagcuggaagaaguaauu

SEQ ID NO: 134269 - RNA, 19 nt, Homo sapiens
  misc_RNA (1)...(19): siRNA sense strand
gcuggaagaaguaauuuga

SEQ ID NO: 134270 - RNA, 19 nt, Homo sapiens
  misc_RNA (1)...(19): siRNA sense strand
ggaugaccauuccuguaga

SEQ ID NO: 134271 - RNA, 19 nt, Homo sapiens
  misc_RNA (1)...(19): siRNA sense strand
cgggaguacucagaaguua

SEQ ID NO: 134272 - RNA, 19 nt, Homo sapiens
  misc_RNA (1)...(19): siRNA sense strand
cacagugucuucugcaaug

SEQ ID NO: 134273 - RNA, 19 nt, Homo sapiens
  misc_RNA (1)...(19): siRNA sense strand
gcuuugugcuguggcaaua

SEQ ID NO: 134274 - RNA, 19 nt, Homo sapiens
  misc_RNA (1)...(19): siRNA sense strand
gcugauguuugccuggaaa

SEQ ID NO: 134275 - RNA, 19 nt, Homo sapiens
  misc_RNA (1)...(19): siRNA sense strand
cagcugucuuuacuaauga

SEQ ID NO: 134276 - RNA, 19 nt, Homo sapiens
  misc_RNA (1)...(19): siRNA sense strand
uuaagacgauggaugaagu

SEQ ID NO: 134277 - RNA, 19 nt, Homo sapiens
  misc_RNA (1)...(19): siRNA sense strand
ggaaaugggagagaaaugg

SEQ ID NO: 134278 - RNA, 19 nt, Homo sapiens
  misc_RNA (1)...(19): siRNA sense strand
gggacuguuuggaucaauu

SEQ ID NO: 134279 - RNA, 19 nt, Homo sapiens
  misc_RNA (1)...(19): siRNA sense strand
gaagcagcuggaagaagua

SEQ ID NO: 134280 - RNA, 19 nt, Homo sapiens
  misc_RNA (1)...(19): siRNA sense strand
guccaucuaugaggaguuu

SEQ ID NO: 134281 - RNA, 19 nt, Homo sapiens
  misc_RNA (1)...(19): siRNA sense strand
gaugaccauuccuguagau

SEQ ID NO: 134282 - RNA, 19 nt, Homo sapiens
  misc_RNA (1)...(19): siRNA sense strand
aagaaacaguacaacaaga

SEQ ID NO: 134283 - RNA, 19 nt, Homo sapiens
  misc_RNA (1)...(19): siRNA sense strand
gggaugaccauuccuguag

SEQ ID NO: 134284 - RNA, 19 nt, Homo sapiens
  misc_RNA (1)...(19): siRNA sense strand
gggcaguucuugcaaccau

SEQ ID NO: 134285 - RNA, 19 nt, Homo sapiens
  misc_RNA (1)...(19): siRNA sense strand
acucguagcagcugucuuu

SEQ ID NO: 134286 - RNA, 19 nt, Homo sapiens
  misc_RNA (1)...(19): siRNA sense strand
aaccauuccugcaagcuuu

SEQ ID NO: 134287 - RNA, 19 nt, Homo sapiens
  misc_RNA (1)...(19): siRNA sense strand
gacagaucaucccauggaa

SEQ ID NO: 134288 - RNA, 19 nt, Homo sapiens
  misc_RNA (1)...(19): siRNA sense strand
gcagagcaaacaccacuca

SEQ ID NO: 134289 - RNA, 19 nt, Homo sapiens
  misc_RNA (1)...(19): siRNA sense strand
ggacuguuuggaucaauug

SEQ ID NO: 134290 - RNA, 19 nt, Homo sapiens
  misc_RNA (1)...(19): siRNA sense strand
gaaacaguacaacaagauc

SEQ ID NO: 134291 - RNA, 19 nt, Homo sapiens
  misc_RNA (1)...(19): siRNA sense strand
uaagaaacaguacaacaag

SEQ ID NO: 134292 - RNA, 19 nt, Homo sapiens
  misc_RNA (1)...(19): siRNA sense strand
caucaaaaccuuucgauau

SEQ ID NO: 134293 - RNA, 19 nt, Homo sapiens
  misc_RNA (1)...(19): siRNA sense strand
ggaguacucagaaguuaag

SEQ ID NO: 134294 - RNA, 19 nt, Homo sapiens
  misc_RNA (1)...(19): siRNA sense strand
cguagcagcugucuuuacu

SEQ ID NO: 134295 - RNA, 19 nt, Homo sapiens
  misc_RNA (1)...(19): siRNA sense strand
ggaauguggaggcaaagga

SEQ ID NO: 134296 - RNA, 19 nt, Homo sapiens
  misc_RNA (1)...(19): siRNA sense strand
uggaagaaguaauuugaag

SEQ ID NO: 134297 - RNA, 19 nt, Homo sapiens
  misc_RNA (1)...(19): siRNA sense strand
gaucaucccauggaacuuc

SEQ ID NO: 134298 - RNA, 19 nt, Homo sapiens
  misc_RNA (1)...(19): siRNA sense strand
ugggagcccucaucaagga

SEQ ID NO: 134299 - RNA, 19 nt, Homo sapiens
  misc_RNA (1)...(19): siRNA sense strand
caauaacucagacuuugga

SEQ ID NO: 134300 - RNA, 19 nt, Homo sapiens
  misc_RNA (1)...(19): siRNA sense strand
ggacgucuguuggauaagc

SEQ ID NO: 134301 - RNA, 19 nt, Homo sapiens
  misc_RNA (1)...(19): siRNA sense strand
uggaugaaguuaucgaaag

SEQ ID NO: 134302 - RNA, 19 nt, Homo sapiens
  misc_RNA (1)...(19): siRNA sense strand
gguguguucuucaaucaag

SEQ ID NO: 134303 - RNA, 19 nt, Homo sapiens
  misc_RNA (1)...(19): siRNA sense strand
ggagacuauuuuaccuuua

SEQ ID NO: 134304 - RNA, 19 nt, Homo sapiens
  misc_RNA (1)...(19): siRNA sense strand
ggaaagcuuauccaagaag

SEQ ID NO: 134305 - RNA, 19 nt, Homo sapiens
  misc_RNA (1)...(19): siRNA sense strand
gggaguacucagaaguuaa

SEQ ID NO: 134306 - RNA, 19 nt, Homo sapiens
  misc_RNA (1)...(19): siRNA sense strand
ucauugagcccacaguguu

SEQ ID NO: 134307 - RNA, 19 nt, Homo sapiens
  misc_RNA (1)...(19): siRNA sense strand
ggggacgucuguuggauaa

SEQ ID NO: 134308 - RNA, 19 nt, Homo sapiens
  misc_RNA (1)...(19): siRNA sense strand
guagauggagacuauuuua

SEQ ID NO: 134309 - RNA, 19 nt, Homo sapiens
  misc_RNA (1)...(19): siRNA sense strand
caugggagcccucaucaag

SEQ ID NO: 134310 - RNA, 19 nt, Homo sapiens
  misc_RNA (1)...(19): siRNA sense strand
gaugcugacuuggacuaug

SEQ ID NO: 134311 - RNA, 19 nt, Homo sapiens
  misc_RNA (1)...(19): siRNA sense strand
gcaaccauggaaucccuaa

SEQ ID NO: 134312 - RNA, 19 nt, Homo sapiens
  misc_RNA (1)...(19): siRNA sense strand
uaugaggaguuugugagaa

SEQ ID NO: 134313 - RNA, 19 nt, Homo sapiens
  misc_RNA (1)...(19): siRNA sense strand
ggaggcaaaaguccuaaua

SEQ ID NO: 134314 - RNA, 19 nt, Homo sapiens
  misc_RNA (1)...(19): siRNA sense strand
uuuccaacgucacugauga

SEQ ID NO: 134315 - RNA, 19 nt, Homo sapiens
  misc_RNA (1)...(19): siRNA sense strand
caggguguguucuucaauc

SEQ ID NO: 134316 - RNA, 19 nt, Homo sapiens
  misc_RNA (1)...(19): siRNA sense strand
caagaagcagcuggaagaa

SEQ ID NO: 134317 - RNA, 19 nt, Homo sapiens
  misc_RNA (1)...(19): siRNA sense strand
aaagagccaauaacucaga

SEQ ID NO: 134318 - RNA, 19 nt, Homo sapiens
  misc_RNA (1)...(19): siRNA sense strand
aggcugggcugauaaaauu

SEQ ID NO: 134319 - RNA, 19 nt, Homo sapiens
  misc_RNA (1)...(19): siRNA sense strand
gauggaugaaguuaucgaa

SEQ ID NO: 134320 - RNA, 19 nt, Homo sapiens
  misc_RNA (1)...(19): siRNA sense strand
gcgggaguacucagaaguu

SEQ ID NO: 134321 - RNA, 19 nt, Homo sapiens
  misc_RNA (1)...(19): siRNA sense strand
ggauucaagaugucuggaa

SEQ ID NO: 134322 - RNA, 19 nt, Homo sapiens
  misc_RNA (1)...(19): siRNA sense strand
gagccaauaacucagacuu

SEQ ID NO: 134323 - RNA, 19 nt, Homo sapiens
  misc_RNA (1)...(19): siRNA sense strand
agaaacaguacaacaagau

SEQ ID NO: 134324 - RNA, 19 nt, Homo sapiens
  misc_RNA (1)...(19): siRNA sense strand
uacgcaggcugggcugaua

SEQ ID NO: 134325 - RNA, 19 nt, Homo sapiens
  misc_RNA (1)...(19): siRNA sense strand
uccuguagauggagacuau

SEQ ID NO: 134326 - RNA, 19 nt, Homo sapiens
  misc_RNA (1)...(19): siRNA sense strand
gauguuugccuggaaaaua

SEQ ID NO: 134327 - RNA, 19 nt, Homo sapiens
  misc_RNA (1)...(19): siRNA sense strand
aggcaaaaguccuaauauu

SEQ ID NO: 134328 - RNA, 19 nt, Homo sapiens
  misc_RNA (1)...(19): siRNA sense strand
cauggaaucccuaaauggu

SEQ ID NO: 134329 - RNA, 19 nt, Homo sapiens
  misc_RNA (1)...(19): siRNA sense strand
uggcaaaccauuccugcaa

SEQ ID NO: 134330 - RNA, 19 nt, Homo sapiens
  misc_RNA (1)...(19): siRNA sense strand
uucaagaugucuggaaaug

SEQ ID NO: 134331 - RNA, 19 nt, Homo sapiens
  misc_RNA (1)...(19): siRNA sense strand
ucaacaaggcccucacagu

SEQ ID NO: 134332 - RNA, 19 nt, Homo sapiens
  misc_RNA (1)...(19): siRNA sense strand
ugcaggcucucgcaucuuc

SEQ ID NO: 134333 - RNA, 19 nt, Homo sapiens
  misc_RNA (1)...(19): siRNA sense strand
ucuggaacuuggaggcaaa

SEQ ID NO: 134334 - RNA, 19 nt, Homo sapiens
  misc_RNA (1)...(19): siRNA sense strand
ggaggaguccaucuaugag

SEQ ID NO: 134335 - RNA, 19 nt, Homo sapiens
  misc_RNA (1)...(19): siRNA sense strand
accauggaaucccuaaaug

SEQ ID NO: 134336 - RNA, 19 nt, Homo sapiens
  misc_RNA (1)...(19): siRNA sense strand
aaugcaagcugggacuguu

SEQ ID NO: 134337 - RNA, 19 nt, Homo sapiens
  misc_RNA (1)...(19): siRNA sense strand
gaggaguuugugagaagaa

SEQ ID NO: 134338 - RNA, 19 nt, Homo sapiens
  misc_RNA (1)...(19): siRNA sense strand
uaagacgauggaugaaguu

SEQ ID NO: 134339 - RNA, 19 nt, Homo sapiens
  misc_RNA (1)...(19): siRNA sense strand
cauugagcccacaguguuu

SEQ ID NO: 134340 - RNA, 19 nt, Homo sapiens
  misc_RNA (1)...(19): siRNA sense strand
gauggacgcucagaugaaa

SEQ ID NO: 134341 - RNA, 19 nt, Homo sapiens
  misc_RNA (1)...(19): siRNA sense strand
gacacuaccuucucccauu

SEQ ID NO: 134342 - RNA, 19 nt, Homo sapiens
  misc_RNA (1)...(19): siRNA sense strand
gaggugagacccaaagaaa

SEQ ID NO: 134343 - RNA, 19 nt, Homo sapiens
  misc_RNA (1)...(19): siRNA sense strand
caaccuacauguucaaagg

SEQ ID NO: 134344 - RNA, 19 nt, Homo sapiens
  misc_RNA (1)...(19): siRNA sense strand
caggagcaauucgccauua

SEQ ID NO: 134345 - RNA, 19 nt, Homo sapiens
  misc_RNA (1)...(19): siRNA sense strand
ccauuacucugaaguccua

SEQ ID NO: 134346 - RNA, 19 nt, Homo sapiens
  misc_RNA (1)...(19): siRNA sense strand
ucaaaggcaucaucagcuu

SEQ ID NO: 134347 - RNA, 19 nt, Homo sapiens
  misc_RNA (1)...(19): siRNA sense strand
acacuaccuucucccauuu

SEQ ID NO: 134348 - RNA, 19 nt, Homo sapiens
  misc_RNA (1)...(19): siRNA sense strand
caacgcagaugaggaaguc

SEQ ID NO: 134349 - RNA, 19 nt, Homo sapiens
  misc_RNA (1)...(19): siRNA sense strand
ccaaaucugccguguaugu

SEQ ID NO: 134350 - RNA, 19 nt, Homo sapiens
  misc_RNA (1)...(19): siRNA sense strand
ggcuaucacuucaauguca

SEQ ID NO: 134351 - RNA, 19 nt, Homo sapiens
  misc_RNA (1)...(19): siRNA sense strand
ggaggaguaugugcugaug

SEQ ID NO: 134352 - RNA, 19 nt, Homo sapiens
  misc_RNA (1)...(19): siRNA sense strand
acucugaaguccuacauug

SEQ ID NO: 134353 - RNA, 19 nt, Homo sapiens
  misc_RNA (1)...(19): siRNA sense strand
gaggagcagcggaugauga

SEQ ID NO: 134354 - RNA, 19 nt, Homo sapiens
  misc_RNA (1)...(19): siRNA sense strand
ucucccauuucaagaauuu

SEQ ID NO: 134355 - RNA, 19 nt, Homo sapiens
  misc_RNA (1)...(19): siRNA sense strand
ggaggugagacccaaagaa

SEQ ID NO: 134356 - RNA, 19 nt, Homo sapiens
  misc_RNA (1)...(19): siRNA sense strand
gacaguggcgggaaagaga

SEQ ID NO: 134357 - RNA, 19 nt, Homo sapiens
  misc_RNA (1)...(19): siRNA sense strand
gagcuccgcagcaucaaug

SEQ ID NO: 134358 - RNA, 19 nt, Homo sapiens
  misc_RNA (1)...(19): siRNA sense strand
ggcagugucuggaacuaca

SEQ ID NO: 134359 - RNA, 19 nt, Homo sapiens
  misc_RNA (1)...(19): siRNA sense strand
cgagcugugucaacugaga

SEQ ID NO: 134360 - RNA, 19 nt, Homo sapiens
  misc_RNA (1)...(19): siRNA sense strand
uggagcccaugcugaaauu

SEQ ID NO: 134361 - RNA, 19 nt, Homo sapiens
  misc_RNA (1)...(19): siRNA sense strand
ugucaacgcagaugaggaa

SEQ ID NO: 134362 - RNA, 19 nt, Homo sapiens
  misc_RNA (1)...(19): siRNA sense strand
gcaggagcaauucgccauu

SEQ ID NO: 134363 - RNA, 19 nt, Homo sapiens
  misc_RNA (1)...(19): siRNA sense strand
caauucgccauuacucuga

SEQ ID NO: 134364 - RNA, 19 nt, Homo sapiens
  misc_RNA (1)...(19): siRNA sense strand
ucugaaguccuacauugaa

SEQ ID NO: 134365 - RNA, 19 nt, Homo sapiens
  misc_RNA (1)...(19): siRNA sense strand
ucaccgagcuccgcagcau

SEQ ID NO: 134366 - RNA, 19 nt, Homo sapiens
  misc_RNA (1)...(19): siRNA sense strand
caaagaaagcuggaaccau

SEQ ID NO: 134367 - RNA, 19 nt, Homo sapiens
  misc_RNA (1)...(19): siRNA sense strand
ccccaaaucugccguguau

SEQ ID NO: 134368 - RNA, 19 nt, Homo sapiens
  misc_RNA (1)...(19): siRNA sense strand
gagcaauucgccauuacuc

SEQ ID NO: 134369 - RNA, 19 nt, Homo sapiens
  misc_RNA (1)...(19): siRNA sense strand
uugccaaagucaucuccua

SEQ ID NO: 134370 - RNA, 19 nt, Homo sapiens
  misc_RNA (1)...(19): siRNA sense strand
gcuaucacuucaaugucau

SEQ ID NO: 134371 - RNA, 19 nt, Homo sapiens
  misc_RNA (1)...(19): siRNA sense strand
cugaaguccuacauugaau

SEQ ID NO: 134372 - RNA, 19 nt, Homo sapiens
  misc_RNA (1)...(19): siRNA sense strand
cuggagagcggcaugaaga

SEQ ID NO: 134373 - RNA, 19 nt, Homo sapiens
  misc_RNA (1)...(19): siRNA sense strand
ggugagacccaaagaaagc

SEQ ID NO: 134374 - RNA, 19 nt, Homo sapiens
  misc_RNA (1)...(19): siRNA sense strand
ggaguuguucggcaucaca

SEQ ID NO: 134375 - RNA, 19 nt, Homo sapiens
  misc_RNA (1)...(19): siRNA sense strand
ugaaggaugcaagggcuuu

SEQ ID NO: 134376 - RNA, 19 nt, Homo sapiens
  misc_RNA (1)...(19): siRNA sense strand
ugauggacgcucagaugaa

SEQ ID NO: 134377 - RNA, 19 nt, Homo sapiens
  misc_RNA (1)...(19): siRNA sense strand
uccugaagaucauggcuau

SEQ ID NO: 134378 - RNA, 19 nt, Homo sapiens
  misc_RNA (1)...(19): siRNA sense strand
caaaucugccguguaugug

SEQ ID NO: 134379 - RNA, 19 nt, Homo sapiens
  misc_RNA (1)...(19): siRNA sense strand
gaugaaaaccuuugacacu

SEQ ID NO: 134380 - RNA, 19 nt, Homo sapiens
  misc_RNA (1)...(19): siRNA sense strand
aggaguaugugcugaugca

SEQ ID NO: 134381 - RNA, 19 nt, Homo sapiens
  misc_RNA (1)...(19): siRNA sense strand
gauggacgcucagaugaaa

SEQ ID NO: 134382 - RNA, 19 nt, Homo sapiens
  misc_RNA (1)...(19): siRNA sense strand
gacacuaccuucucccauu

SEQ ID NO: 134383 - RNA, 19 nt, Homo sapiens
  misc_RNA (1)...(19): siRNA sense strand
gaggugagacccaaagaaa

SEQ ID NO: 134384 - RNA, 19 nt, Homo sapiens
  misc_RNA (1)...(19): siRNA sense strand
caaccuacauguucaaagg

SEQ ID NO: 134385 - RNA, 19 nt, Homo sapiens
  misc_RNA (1)...(19): siRNA sense strand
caggagcaauucgccauua

SEQ ID NO: 134386 - RNA, 19 nt, Homo sapiens
  misc_RNA (1)...(19): siRNA sense strand
ccauuacucugaaguccua

SEQ ID NO: 134387 - RNA, 19 nt, Homo sapiens
  misc_RNA (1)...(19): siRNA sense strand
ucaaaggcaucaucagcuu

SEQ ID NO: 134388 - RNA, 19 nt, Homo sapiens
  misc_RNA (1)...(19): siRNA sense strand
acacuaccuucucccauuu

SEQ ID NO: 134389 - RNA, 19 nt, Homo sapiens
  misc_RNA (1)...(19): siRNA sense strand
caacgcagaugaggaaguc

SEQ ID NO: 134390 - RNA, 19 nt, Homo sapiens
  misc_RNA (1)...(19): siRNA sense strand
ccaaaucugccguguaugu

SEQ ID NO: 134391 - RNA, 19 nt, Homo sapiens
  misc_RNA (1)...(19): siRNA sense strand
ggcuaucacuucaauguca

SEQ ID NO: 134392 - RNA, 19 nt, Homo sapiens
  misc_RNA (1)...(19): siRNA sense strand
ggaggaguaugugcugaug

SEQ ID NO: 134393 - RNA, 19 nt, Homo sapiens
  misc_RNA (1)...(19): siRNA sense strand
acucugaaguccuacauug

SEQ ID NO: 134394 - RNA, 19 nt, Homo sapiens
  misc_RNA (1)...(19): siRNA sense strand
gaggagcagcggaugauga

SEQ ID NO: 134395 - RNA, 19 nt, Homo sapiens
  misc_RNA (1)...(19): siRNA sense strand
caagaggcccagaagcaaa

SEQ ID NO: 134396 - RNA, 19 nt, Homo sapiens
  misc_RNA (1)...(19): siRNA sense strand
ucucccauuucaagaauuu

SEQ ID NO: 134397 - RNA, 19 nt, Homo sapiens
  misc_RNA (1)...(19): siRNA sense strand
ggaggugagacccaaagaa

SEQ ID NO: 134398 - RNA, 19 nt, Homo sapiens
  misc_RNA (1)...(19): siRNA sense strand
gacaguggcgggaaagaga

SEQ ID NO: 134399 - RNA, 19 nt, Homo sapiens
  misc_RNA (1)...(19): siRNA sense strand
gagcuccgcagcaucaaug

SEQ ID NO: 134400 - RNA, 19 nt, Homo sapiens
  misc_RNA (1)...(19): siRNA sense strand
ggcagugucuggaacuaca

SEQ ID NO: 134401 - RNA, 19 nt, Homo sapiens
  misc_RNA (1)...(19): siRNA sense strand
cgagcugugucaacugaga

SEQ ID NO: 134402 - RNA, 19 nt, Homo sapiens
  misc_RNA (1)...(19): siRNA sense strand
uggagcccaugcugaaauu

SEQ ID NO: 134403 - RNA, 19 nt, Homo sapiens
  misc_RNA (1)...(19): siRNA sense strand
ugucaacgcagaugaggaa

SEQ ID NO: 134404 - RNA, 19 nt, Homo sapiens
  misc_RNA (1)...(19): siRNA sense strand
gcaggagcaauucgccauu

SEQ ID NO: 134405 - RNA, 19 nt, Homo sapiens
  misc_RNA (1)...(19): siRNA sense strand
ccaagaggcccagaagcaa

SEQ ID NO: 134406 - RNA, 19 nt, Homo sapiens
  misc_RNA (1)...(19): siRNA sense strand
caauucgccauuacucuga

SEQ ID NO: 134407 - RNA, 19 nt, Homo sapiens
  misc_RNA (1)...(19): siRNA sense strand
ucugaaguccuacauugaa

SEQ ID NO: 134408 - RNA, 19 nt, Homo sapiens
  misc_RNA (1)...(19): siRNA sense strand
ucaccgagcuccgcagcau

SEQ ID NO: 134409 - RNA, 19 nt, Homo sapiens
  misc_RNA (1)...(19): siRNA sense strand
ccccaaaucugccguguau

SEQ ID NO: 134410 - RNA, 19 nt, Homo sapiens
  misc_RNA (1)...(19): siRNA sense strand
gagcaauucgccauuacuc

SEQ ID NO: 134411 - RNA, 19 nt, Homo sapiens
  misc_RNA (1)...(19): siRNA sense strand
uugccaaagucaucuccua

SEQ ID NO: 134412 - RNA, 19 nt, Homo sapiens
  misc_RNA (1)...(19): siRNA sense strand
caaagaaagcuggaaccau

SEQ ID NO: 134413 - RNA, 19 nt, Homo sapiens
  misc_RNA (1)...(19): siRNA sense strand
gcuaucacuucaaugucau

SEQ ID NO: 134414 - RNA, 19 nt, Homo sapiens
  misc_RNA (1)...(19): siRNA sense strand
cugaaguccuacauugaau

SEQ ID NO: 134415 - RNA, 19 nt, Homo sapiens
  misc_RNA (1)...(19): siRNA sense strand
cuggagagcggcaugaaga

SEQ ID NO: 134416 - RNA, 19 nt, Homo sapiens
  misc_RNA (1)...(19): siRNA sense strand
ggugagacccaaagaaagc

SEQ ID NO: 134417 - RNA, 19 nt, Homo sapiens
  misc_RNA (1)...(19): siRNA sense strand
ggaguuguucggcaucaca

SEQ ID NO: 134418 - RNA, 19 nt, Homo sapiens
  misc_RNA (1)...(19): siRNA sense strand
ugaaggaugcaagggcuuu

SEQ ID NO: 134419 - RNA, 19 nt, Homo sapiens
  misc_RNA (1)...(19): siRNA sense strand
caaaucugccguguaugug

SEQ ID NO: 134420 - RNA, 19 nt, Homo sapiens
  misc_RNA (1)...(19): siRNA sense strand
uccugaagaucauggcuau

SEQ ID NO: 134421 - RNA, 19 nt, Homo sapiens
  misc_RNA (1)...(19): siRNA sense strand
ugauggacgcucagaugaa

SEQ ID NO: 134422 - RNA, 19 nt, Homo sapiens
  misc_RNA (1)...(19): siRNA sense strand
gaugaaaaccuuugacacu

SEQ ID NO: 134423 - RNA, 19 nt, Homo sapiens
  misc_RNA (1)...(19): siRNA sense strand
aggaguaugugcugaugca

SEQ ID NO: 134424 - RNA, 19 nt, Homo sapiens
  misc_RNA (1)...(19): siRNA sense strand
gauggacgcucagaugaaa

SEQ ID NO: 134425 - RNA, 19 nt, Homo sapiens
  misc_RNA (1)...(19): siRNA sense strand
gacacuaccuucucccauu

SEQ ID NO: 134426 - RNA, 19 nt, Homo sapiens
  misc_RNA (1)...(19): siRNA sense strand
gaggugagacccaaagaaa

SEQ ID NO: 134427 - RNA, 19 nt, Homo sapiens
  misc_RNA (1)...(19): siRNA sense strand
caaccuacauguucaaagg

SEQ ID NO: 134428 - RNA, 19 nt, Homo sapiens
  misc_RNA (1)...(19): siRNA sense strand
caggagcaauucgccauua

SEQ ID NO: 134429 - RNA, 19 nt, Homo sapiens
  misc_RNA (1)...(19): siRNA sense strand
ccauuacucugaaguccua

SEQ ID NO: 134430 - RNA, 19 nt, Homo sapiens
  misc_RNA (1)...(19): siRNA sense strand
ucaaaggcaucaucagcuu

SEQ ID NO: 134431 - RNA, 19 nt, Homo sapiens
  misc_RNA (1)...(19): siRNA sense strand
acacuaccuucucccauuu

SEQ ID NO: 134432 - RNA, 19 nt, Homo sapiens
  misc_RNA (1)...(19): siRNA sense strand
caacgcagaugaggaaguc

SEQ ID NO: 134433 - RNA, 19 nt, Homo sapiens
  misc_RNA (1)...(19): siRNA sense strand
ccaaaucugccguguaugu

SEQ ID NO: 134434 - RNA, 19 nt, Homo sapiens
  misc_RNA (1)...(19): siRNA sense strand
ggcuaucacuucaauguca

SEQ ID NO: 134435 - RNA, 19 nt, Homo sapiens
  misc_RNA (1)...(19): siRNA sense strand
ggaggaguaugugcugaug

SEQ ID NO: 134436 - RNA, 19 nt, Homo sapiens
  misc_RNA (1)...(19): siRNA sense strand
acucugaaguccuacauug

SEQ ID NO: 134437 - RNA, 19 nt, Homo sapiens
  misc_RNA (1)...(19): siRNA sense strand
gaggagcagcggaugauga

SEQ ID NO: 134438 - RNA, 19 nt, Homo sapiens
  misc_RNA (1)...(19): siRNA sense strand
ucucccauuucaagaauuu

SEQ ID NO: 134439 - RNA, 19 nt, Homo sapiens
  misc_RNA (1)...(19): siRNA sense strand
ggaggugagacccaaagaa

SEQ ID NO: 134440 - RNA, 19 nt, Homo sapiens
  misc_RNA (1)...(19): siRNA sense strand
gacaguggcgggaaagaga

SEQ ID NO: 134441 - RNA, 19 nt, Homo sapiens
  misc_RNA (1)...(19): siRNA sense strand
gagcuccgcagcaucaaug

SEQ ID NO: 134442 - RNA, 19 nt, Homo sapiens
  misc_RNA (1)...(19): siRNA sense strand
ggcagugucuggaacuaca

SEQ ID NO: 134443 - RNA, 19 nt, Homo sapiens
  misc_RNA (1)...(19): siRNA sense strand
cgagcugugucaacugaga

SEQ ID NO: 134444 - RNA, 19 nt, Homo sapiens
  misc_RNA (1)...(19): siRNA sense strand
uggagcccaugcugaaauu

SEQ ID NO: 134445 - RNA, 19 nt, Homo sapiens
  misc_RNA (1)...(19): siRNA sense strand
ugucaacgcagaugaggaa

SEQ ID NO: 134446 - RNA, 19 nt, Homo sapiens
  misc_RNA (1)...(19): siRNA sense strand
gcaggagcaauucgccauu

SEQ ID NO: 134447 - RNA, 19 nt, Homo sapiens
  misc_RNA (1)...(19): siRNA sense strand
caauucgccauuacucuga

SEQ ID NO: 134448 - RNA, 19 nt, Homo sapiens
  misc_RNA (1)...(19): siRNA sense strand
ucugaaguccuacauugaa

SEQ ID NO: 134449 - RNA, 19 nt, Homo sapiens
  misc_RNA (1)...(19): siRNA sense strand
ucaccgagcuccgcagcau

SEQ ID NO: 134450 - RNA, 19 nt, Homo sapiens
  misc_RNA (1)...(19): siRNA sense strand
caaagaaagcuggaaccau

SEQ ID NO: 134451 - RNA, 19 nt, Homo sapiens
  misc_RNA (1)...(19): siRNA sense strand
ccccaaaucugccguguau

SEQ ID NO: 134452 - RNA, 19 nt, Homo sapiens
  misc_RNA (1)...(19): siRNA sense strand
gagcaauucgccauuacuc

SEQ ID NO: 134453 - RNA, 19 nt, Homo sapiens
  misc_RNA (1)...(19): siRNA sense strand
uugccaaagucaucuccua

SEQ ID NO: 134454 - RNA, 19 nt, Homo sapiens
  misc_RNA (1)...(19): siRNA sense strand
gcuaucacuucaaugucau

SEQ ID NO: 134455 - RNA, 19 nt, Homo sapiens
  misc_RNA (1)...(19): siRNA sense strand
cugaaguccuacauugaau

SEQ ID NO: 134456 - RNA, 19 nt, Homo sapiens
  misc_RNA (1)...(19): siRNA sense strand
cuggagagcggcaugaaga

SEQ ID NO: 134457 - RNA, 19 nt, Homo sapiens
  misc_RNA (1)...(19): siRNA sense strand
ggugagacccaaagaaagc

SEQ ID NO: 134458 - RNA, 19 nt, Homo sapiens
  misc_RNA (1)...(19): siRNA sense strand
ggaguuguucggcaucaca

SEQ ID NO: 134459 - RNA, 19 nt, Homo sapiens
  misc_RNA (1)...(19): siRNA sense strand
ugaaggaugcaagggcuuu

SEQ ID NO: 134460 - RNA, 19 nt, Homo sapiens
  misc_RNA (1)...(19): siRNA sense strand
ugauggacgcucagaugaa

SEQ ID NO: 134461 - RNA, 19 nt, Homo sapiens
  misc_RNA (1)...(19): siRNA sense strand
uccugaagaucauggcuau

SEQ ID NO: 134462 - RNA, 19 nt, Homo sapiens
  misc_RNA (1)...(19): siRNA sense strand
caaaucugccguguaugug

SEQ ID NO: 134463 - RNA, 19 nt, Homo sapiens
  misc_RNA (1)...(19): siRNA sense strand
gaugaaaaccuuugacacu

SEQ ID NO: 134464 - RNA, 19 nt, Homo sapiens
  misc_RNA (1)...(19): siRNA sense strand
aggaguaugugcugaugca

SEQ ID NO: 134465 - RNA, 19 nt, Homo sapiens
  misc_RNA (1)...(19): siRNA sense strand
gaacaucgauccuaagcua

SEQ ID NO: 134466 - RNA, 19 nt, Homo sapiens
  misc_RNA (1)...(19): siRNA sense strand
gagcaaagcuaaauauuca

SEQ ID NO: 134467 - RNA, 19 nt, Homo sapiens
  misc_RNA (1)...(19): siRNA sense strand
ccaaagagcugcacgguau

SEQ ID NO: 134468 - RNA, 19 nt, Homo sapiens
  misc_RNA (1)...(19): siRNA sense strand
caaacugaguauuguguua

SEQ ID NO: 134469 - RNA, 19 nt, Homo sapiens
  misc_RNA (1)...(19): siRNA sense strand
guauauaccuuacuaguag

SEQ ID NO: 134470 - RNA, 19 nt, Homo sapiens
  misc_RNA (1)...(19): siRNA sense strand
gaugaacgauaaugacaaa

SEQ ID NO: 134471 - RNA, 19 nt, Homo sapiens
  misc_RNA (1)...(19): siRNA sense strand
gaacgagcccacuaaauga

SEQ ID NO: 134472 - RNA, 19 nt, Homo sapiens
  misc_RNA (1)...(19): siRNA sense strand
aaacggagacuacaucaua

SEQ ID NO: 134473 - RNA, 19 nt, Homo sapiens
  misc_RNA (1)...(19): siRNA sense strand
gagaauccaucccauccua

SEQ ID NO: 134474 - RNA, 19 nt, Homo sapiens
  misc_RNA (1)...(19): siRNA sense strand
gagcccaucuggagaauga

SEQ ID NO: 134475 - RNA, 19 nt, Homo sapiens
  misc_RNA (1)...(19): siRNA sense strand
gaaaguguaucuccuguac

SEQ ID NO: 134476 - RNA, 19 nt, Homo sapiens
  misc_RNA (1)...(19): siRNA sense strand
gagcagaauuauguugaua

SEQ ID NO: 134477 - RNA, 19 nt, Homo sapiens
  misc_RNA (1)...(19): siRNA sense strand
uggcuaagguguauaauug

SEQ ID NO: 134478 - RNA, 19 nt, Homo sapiens
  misc_RNA (1)...(19): siRNA sense strand
guugauaaauuccgagaaa

SEQ ID NO: 134479 - RNA, 19 nt, Homo sapiens
  misc_RNA (1)...(19): siRNA sense strand
gcagcaaucucaggacgua

SEQ ID NO: 134480 - RNA, 19 nt, Homo sapiens
  misc_RNA (1)...(19): siRNA sense strand
aaucagaaaugccaacaaa

SEQ ID NO: 134481 - RNA, 19 nt, Homo sapiens
  misc_RNA (1)...(19): siRNA sense strand
gauccugaaucguaagaaa

SEQ ID NO: 134482 - RNA, 19 nt, Homo sapiens
  misc_RNA (1)...(19): siRNA sense strand
gaaagcaggagcaaagcua

SEQ ID NO: 134483 - RNA, 19 nt, Homo sapiens
  misc_RNA (1)...(19): siRNA sense strand
gcuacaacauuccagcuuu

SEQ ID NO: 134484 - RNA, 19 nt, Homo sapiens
  misc_RNA (1)...(19): siRNA sense strand
gcagacaccugagcgcauu

SEQ ID NO: 134485 - RNA, 19 nt, Homo sapiens
  misc_RNA (1)...(19): siRNA sense strand
gaagguuagugcacauuuc

SEQ ID NO: 134486 - RNA, 19 nt, Homo sapiens
  misc_RNA (1)...(19): siRNA sense strand
agaaggaagagcagaauua

SEQ ID NO: 134487 - RNA, 19 nt, Homo sapiens
  misc_RNA (1)...(19): siRNA sense strand
gaauggugguggugaaugu

SEQ ID NO: 134488 - RNA, 19 nt, Homo sapiens
  misc_RNA (1)...(19): siRNA sense strand
uaucaugguuguccaagaa

SEQ ID NO: 134489 - RNA, 19 nt, Homo sapiens
  misc_RNA (1)...(19): siRNA sense strand
gaagagcccaucuggagaa

SEQ ID NO: 134490 - RNA, 19 nt, Homo sapiens
  misc_RNA (1)...(19): siRNA sense strand
gacagccucuucugcgaua

SEQ ID NO: 134491 - RNA, 19 nt, Homo sapiens
  misc_RNA (1)...(19): siRNA sense strand
cgaacgagcccacuaaaug

SEQ ID NO: 134492 - RNA, 19 nt, Homo sapiens
  misc_RNA (1)...(19): siRNA sense strand
gucagcagcucuacauuga

SEQ ID NO: 134493 - RNA, 19 nt, Homo sapiens
  misc_RNA (1)...(19): siRNA sense strand
ggaagcagcgacagcagua

SEQ ID NO: 134494 - RNA, 19 nt, Homo sapiens
  misc_RNA (1)...(19): siRNA sense strand
caaggcagaugauguccaa

SEQ ID NO: 134495 - RNA, 19 nt, Homo sapiens
  misc_RNA (1)...(19): siRNA sense strand
cugaagagcuacaacauuc

SEQ ID NO: 134496 - RNA, 19 nt, Homo sapiens
  misc_RNA (1)...(19): siRNA sense strand
guacaaauacaacuucuuc

SEQ ID NO: 134497 - RNA, 19 nt, Homo sapiens
  misc_RNA (1)...(19): siRNA sense strand
gaacaacuggacccaaaga

SEQ ID NO: 134498 - RNA, 19 nt, Homo sapiens
  misc_RNA (1)...(19): siRNA sense strand
gaaggaagagcagaauuau

SEQ ID NO: 134499 - RNA, 19 nt, Homo sapiens
  misc_RNA (1)...(19): siRNA sense strand
ugacaaagacauaacagaa

SEQ ID NO: 134500 - RNA, 19 nt, Homo sapiens
  misc_RNA (1)...(19): siRNA sense strand
gaacgauaaugacaaagac

SEQ ID NO: 134501 - RNA, 19 nt, Homo sapiens
  misc_RNA (1)...(19): siRNA sense strand
ggagcaaagcuaaauauuc

SEQ ID NO: 134502 - RNA, 19 nt, Homo sapiens
  misc_RNA (1)...(19): siRNA sense strand
caagaaagcaggagcaaag

SEQ ID NO: 134503 - RNA, 19 nt, Homo sapiens
  misc_RNA (1)...(19): siRNA sense strand
caacauuccagcuuugaaa

SEQ ID NO: 134504 - RNA, 19 nt, Homo sapiens
  misc_RNA (1)...(19): siRNA sense strand
gaagacagaaagcaagaga

SEQ ID NO: 134505 - RNA, 19 nt, Homo sapiens
  misc_RNA (1)...(19): siRNA sense strand
gagaaaagauccugucauc

SEQ ID NO: 134506 - RNA, 19 nt, Homo sapiens
  misc_RNA (1)...(19): siRNA sense strand
gaagagcagaauuauguug

SEQ ID NO: 134507 - RNA, 19 nt, Homo sapiens
  misc_RNA (1)...(19): siRNA sense strand
gaaagcaagagaaguguca

SEQ ID NO: 134508 - RNA, 19 nt, Homo sapiens
  misc_RNA (1)...(19): siRNA sense strand
gguuaaagaaguuguacua

SEQ ID NO: 134509 - RNA, 19 nt, Homo sapiens
  misc_RNA (1)...(19): siRNA sense strand
ugaacaggcugcuuugauc

SEQ ID NO: 134510 - RNA, 19 nt, Homo sapiens
  misc_RNA (1)...(19): siRNA sense strand
ucagaaaugccaacaaaug

SEQ ID NO: 134511 - RNA, 19 nt, Homo sapiens
  misc_RNA (1)...(19): siRNA sense strand
gcacagcccauccuaucaa

SEQ ID NO: 134512 - RNA, 19 nt, Homo sapiens
  misc_RNA (1)...(19): siRNA sense strand
gcuuugauccugaaucgua

SEQ ID NO: 134513 - RNA, 19 nt, Homo sapiens
  misc_RNA (1)...(19): siRNA sense strand
gcuaagguguauaauugga

SEQ ID NO: 134514 - RNA, 19 nt, Homo sapiens
  misc_RNA (1)...(19): siRNA sense strand
ugagaggguuaaagaaguu

SEQ ID NO: 134515 - RNA, 19 nt, Homo sapiens
  misc_RNA (1)...(19): siRNA sense strand
gcaggagcaaagcuaaaua

SEQ ID NO: 134516 - RNA, 19 nt, Homo sapiens
  misc_RNA (1)...(19): siRNA sense strand
gaacagcaagaucgaaaca

SEQ ID NO: 134517 - RNA, 19 nt, Homo sapiens
  misc_RNA (1)...(19): siRNA sense strand
uggaacaacuggacccaaa

SEQ ID NO: 134518 - RNA, 19 nt, Homo sapiens
  misc_RNA (1)...(19): siRNA sense strand
uugaggagcuggccacuau

SEQ ID NO: 134519 - RNA, 19 nt, Homo sapiens
  misc_RNA (1)...(19): siRNA sense strand
cgacagcaguauauaccuu

SEQ ID NO: 134520 - RNA, 19 nt, Homo sapiens
  misc_RNA (1)...(19): siRNA sense strand
gagcacagcccauccuauc

SEQ ID NO: 134521 - RNA, 19 nt, Homo sapiens
  misc_RNA (1)...(19): siRNA sense strand
ugaaugugcuccggugaaa

SEQ ID NO: 134522 - RNA, 19 nt, Homo sapiens
  misc_RNA (1)...(19): siRNA sense strand
ccacggcgaugcugagcuu

SEQ ID NO: 134523 - RNA, 19 nt, Homo sapiens
  misc_RNA (1)...(19): siRNA sense strand
ggagcuggcuaagguguau

SEQ ID NO: 134524 - RNA, 19 nt, Homo sapiens
  misc_RNA (1)...(19): siRNA sense strand
ugaagaacuuaucaugguu

SEQ ID NO: 134525 - RNA, 19 nt, Homo sapiens
  misc_RNA (1)...(19): siRNA sense strand
ggaagguuagugcacauuu

SEQ ID NO: 134526 - RNA, 19 nt, Homo sapiens
  misc_RNA (1)...(19): siRNA sense strand
aagaauccaucccauccua

SEQ ID NO: 134527 - RNA, 19 nt, Homo sapiens
  misc_RNA (1)...(19): siRNA sense strand
aagaauccaucccauccua

SEQ ID NO: 134528 - RNA, 19 nt, Homo sapiens
  misc_RNA (1)...(19): siRNA sense strand
gcucacccuugcaguuaaa

SEQ ID NO: 134529 - RNA, 19 nt, Homo sapiens
  misc_RNA (1)...(19): siRNA sense strand
acagcaagaucgaaacaga

SEQ ID NO: 134530 - RNA, 19 nt, Homo sapiens
  misc_RNA (1)...(19): siRNA sense strand
gaccaaaucaucauucaag

SEQ ID NO: 134531 - RNA, 19 nt, Homo sapiens
  misc_RNA (1)...(19): siRNA sense strand
ggacagcagccacagugaa

SEQ ID NO: 134532 - RNA, 19 nt, Homo sapiens
  misc_RNA (1)...(19): siRNA sense strand
gacaaagacauaacagaau

SEQ ID NO: 134533 - RNA, 19 nt, Homo sapiens
  misc_RNA (1)...(19): siRNA sense strand
gacagcaguauauaccuua

SEQ ID NO: 134534 - RNA, 19 nt, Homo sapiens
  misc_RNA (1)...(19): siRNA sense strand
gaucgccucccaugaagaa

SEQ ID NO: 134535 - RNA, 19 nt, Homo sapiens
  misc_RNA (1)...(19): siRNA sense strand
gaucgccucccaugaagaa

SEQ ID NO: 134536 - RNA, 19 nt, Homo sapiens
  misc_RNA (1)...(19): siRNA sense strand
gggcacccguucauuacuu

SEQ ID NO: 134537 - RNA, 19 nt, Homo sapiens
  misc_RNA (1)...(19): siRNA sense strand
gcagcaccauuguccaugu

SEQ ID NO: 134538 - RNA, 19 nt, Homo sapiens
  misc_RNA (1)...(19): siRNA sense strand
cuacaacauuccagcuuug

SEQ ID NO: 134539 - RNA, 19 nt, Homo sapiens
  misc_RNA (1)...(19): siRNA sense strand
aaaccaagcacucuagaug

SEQ ID NO: 134540 - RNA, 19 nt, Homo sapiens
  misc_RNA (1)...(19): siRNA sense strand
gacugucacucaagaaauc

SEQ ID NO: 134541 - RNA, 19 nt, Homo sapiens
  misc_RNA (1)...(19): siRNA sense strand
cuaguaguguuuauucuuc

SEQ ID NO: 134542 - RNA, 19 nt, Homo sapiens
  misc_RNA (1)...(19): siRNA sense strand
gaucagaugagaaggaaca

SEQ ID NO: 134543 - RNA, 19 nt, Homo sapiens
  misc_RNA (1)...(19): siRNA sense strand
ggucagcagcucuacauug

SEQ ID NO: 134544 - RNA, 19 nt, Homo sapiens
  misc_RNA (1)...(19): siRNA sense strand
caucauuggucggcauaaa

SEQ ID NO: 134545 - RNA, 19 nt, Homo sapiens
  misc_RNA (1)...(19): siRNA sense strand
gugcuccggugaaaccuuu

SEQ ID NO: 134546 - RNA, 19 nt, Homo sapiens
  misc_RNA (1)...(19): siRNA sense strand
cugaagaacuuaucauggu

SEQ ID NO: 134547 - RNA, 19 nt, Homo sapiens
  misc_RNA (1)...(19): siRNA sense strand
ucuaaaaucucccaaaaug

SEQ ID NO: 134548 - RNA, 19 nt, Homo sapiens
  misc_RNA (1)...(19): siRNA sense strand
gcccacaaacugaguauug

SEQ ID NO: 134549 - RNA, 19 nt, Homo sapiens
  misc_RNA (1)...(19): siRNA sense strand
cagaucagaugagaaggaa

SEQ ID NO: 134550 - RNA, 19 nt, Homo sapiens
  misc_RNA (1)...(19): siRNA sense strand
cagcucacccuugcaguua

SEQ ID NO: 134551 - RNA, 19 nt, Homo sapiens
  misc_RNA (1)...(19): siRNA sense strand
cagcagcucuacauugagu

SEQ ID NO: 134552 - RNA, 19 nt, Homo sapiens
  misc_RNA (1)...(19): siRNA sense strand
ccacagcguucaagcaaac

SEQ ID NO: 134553 - RNA, 19 nt, Homo sapiens
  misc_RNA (1)...(19): siRNA sense strand
gguagaagacagcuguuga

SEQ ID NO: 134554 - RNA, 19 nt, Homo sapiens
  misc_RNA (1)...(19): siRNA sense strand
caagaaaucgacauucaag

SEQ ID NO: 134555 - RNA, 19 nt, Homo sapiens
  misc_RNA (1)...(19): siRNA sense strand
aggaagagcagaauuaugu

SEQ ID NO: 134556 - RNA, 19 nt, Homo sapiens
  misc_RNA (1)...(19): siRNA sense strand
cuuacaagcugguuugcaa

SEQ ID NO: 134557 - RNA, 19 nt, Homo sapiens
  misc_RNA (1)...(19): siRNA sense strand
gaauuggaaucggaaccuu

SEQ ID NO: 134558 - RNA, 19 nt, Homo sapiens
  misc_RNA (1)...(19): siRNA sense strand
gaaaagcuagaaaguauga

SEQ ID NO: 134559 - RNA, 19 nt, Homo sapiens
  misc_RNA (1)...(19): siRNA sense strand
cagaagaagacaaacagaa

SEQ ID NO: 134560 - RNA, 19 nt, Homo sapiens
  misc_RNA (1)...(19): siRNA sense strand
gagcugcacgguaugaaug

SEQ ID NO: 134561 - RNA, 19 nt, Homo sapiens
  misc_RNA (1)...(19): siRNA sense strand
gaacacgugcccacaaacu

SEQ ID NO: 134562 - RNA, 19 nt, Homo sapiens
  misc_RNA (1)...(19): siRNA sense strand
cauccucccuuugaacauu

SEQ ID NO: 134563 - RNA, 19 nt, Homo sapiens
  misc_RNA (1)...(19): siRNA sense strand
uggaaaagcuagaaaguau

SEQ ID NO: 134564 - RNA, 19 nt, Homo sapiens
  misc_RNA (1)...(19): siRNA sense strand
gccagacugucacucaaga

SEQ ID NO: 134565 - RNA, 19 nt, Homo sapiens
  misc_RNA (1)...(19): siRNA sense strand
ugucugaccuugaauauua

SEQ ID NO: 134566 - RNA, 19 nt, Homo sapiens
  misc_RNA (1)...(19): siRNA sense strand
aaagagagcucagaaauau

SEQ ID NO: 134567 - RNA, 19 nt, Homo sapiens
  misc_RNA (1)...(19): siRNA sense strand
gaaaccaaguuccucuuaa

SEQ ID NO: 134568 - RNA, 19 nt, Homo sapiens
  misc_RNA (1)...(19): siRNA sense strand
ccaguucgauguugugaua

SEQ ID NO: 134569 - RNA, 19 nt, Homo sapiens
  misc_RNA (1)...(19): siRNA sense strand
caauggcgcuguuauuuga

SEQ ID NO: 134570 - RNA, 19 nt, Homo sapiens
  misc_RNA (1)...(19): siRNA sense strand
ggaaugucgucccaaguuu

SEQ ID NO: 134571 - RNA, 19 nt, Homo sapiens
  misc_RNA (1)...(19): siRNA sense strand
gagaaggcccagcuuguua

SEQ ID NO: 134572 - RNA, 19 nt, Homo sapiens
  misc_RNA (1)...(19): siRNA sense strand
uaaagagagcucagaaaua

SEQ ID NO: 134573 - RNA, 19 nt, Homo sapiens
  misc_RNA (1)...(19): siRNA sense strand
gaacaccuuugcacuacuu

SEQ ID NO: 134574 - RNA, 19 nt, Homo sapiens
  misc_RNA (1)...(19): siRNA sense strand
guacauugcuuguguuugg

SEQ ID NO: 134575 - RNA, 19 nt, Homo sapiens
  misc_RNA (1)...(19): siRNA sense strand
cagaacauguuggaaauaa

SEQ ID NO: 134576 - RNA, 19 nt, Homo sapiens
  misc_RNA (1)...(19): siRNA sense strand
gaguguggauccuuuauau

SEQ ID NO: 134577 - RNA, 19 nt, Homo sapiens
  misc_RNA (1)...(19): siRNA sense strand
aaaccaaguuccucuuaaa

SEQ ID NO: 134578 - RNA, 19 nt, Homo sapiens
  misc_RNA (1)...(19): siRNA sense strand
guaaagagagcucagaaau

SEQ ID NO: 134579 - RNA, 19 nt, Homo sapiens
  misc_RNA (1)...(19): siRNA sense strand
uaaaagacauccucaaaug

SEQ ID NO: 134580 - RNA, 19 nt, Homo sapiens
  misc_RNA (1)...(19): siRNA sense strand
gaggaauacugcacggauu

SEQ ID NO: 134581 - RNA, 19 nt, Homo sapiens
  misc_RNA (1)...(19): siRNA sense strand
cgaccucccugaacacuug

SEQ ID NO: 134582 - RNA, 19 nt, Homo sapiens
  misc_RNA (1)...(19): siRNA sense strand
gaauccaguuaucaucaaa

SEQ ID NO: 134583 - RNA, 19 nt, Homo sapiens
  misc_RNA (1)...(19): siRNA sense strand
uccaaugacuuauuuguug

SEQ ID NO: 134584 - RNA, 19 nt, Homo sapiens
  misc_RNA (1)...(19): siRNA sense strand
ugucauugccguugucuua

SEQ ID NO: 134585 - RNA, 19 nt, Homo sapiens
  misc_RNA (1)...(19): siRNA sense strand
aggcauugaucgugaauuu

SEQ ID NO: 134586 - RNA, 19 nt, Homo sapiens
  misc_RNA (1)...(19): siRNA sense strand
ggaagcagguggcagaaaa

SEQ ID NO: 134587 - RNA, 19 nt, Homo sapiens
  misc_RNA (1)...(19): siRNA sense strand
guuaaacagugcaccaguu

SEQ ID NO: 134588 - RNA, 19 nt, Homo sapiens
  misc_RNA (1)...(19): siRNA sense strand
ugacuuauuuguugcuguu

SEQ ID NO: 134589 - RNA, 19 nt, Homo sapiens
  misc_RNA (1)...(19): siRNA sense strand
ccagaacaccuuugcacua

SEQ ID NO: 134590 - RNA, 19 nt, Homo sapiens
  misc_RNA (1)...(19): siRNA sense strand
aggcccagcuuguuauuaa

SEQ ID NO: 134591 - RNA, 19 nt, Homo sapiens
  misc_RNA (1)...(19): siRNA sense strand
ggaguguggauccuuuaua

SEQ ID NO: 134592 - RNA, 19 nt, Homo sapiens
  misc_RNA (1)...(19): siRNA sense strand
gaaguucuccaguaaaguc

SEQ ID NO: 134593 - RNA, 19 nt, Homo sapiens
  misc_RNA (1)...(19): siRNA sense strand
ugucggcgcugugugguua

SEQ ID NO: 134594 - RNA, 19 nt, Homo sapiens
  misc_RNA (1)...(19): siRNA sense strand
gugcaccaguugagggaua

SEQ ID NO: 134595 - RNA, 19 nt, Homo sapiens
  misc_RNA (1)...(19): siRNA sense strand
ccaguuaucaucaaagaga

SEQ ID NO: 134596 - RNA, 19 nt, Homo sapiens
  misc_RNA (1)...(19): siRNA sense strand
gauuucaacuggcuucaag

SEQ ID NO: 134597 - RNA, 19 nt, Homo sapiens
  misc_RNA (1)...(19): siRNA sense strand
ccaaaacauuucaggauuu

SEQ ID NO: 134598 - RNA, 19 nt, Homo sapiens
  misc_RNA (1)...(19): siRNA sense strand
ugagggauauucagaacau

SEQ ID NO: 134599 - RNA, 19 nt, Homo sapiens
  misc_RNA (1)...(19): siRNA sense strand
ccaaguacgauccuccuuu

SEQ ID NO: 134600 - RNA, 19 nt, Homo sapiens
  misc_RNA (1)...(19): siRNA sense strand
agacaucaauggcgcuguu

SEQ ID NO: 134601 - RNA, 19 nt, Homo sapiens
  misc_RNA (1)...(19): siRNA sense strand
gaccaugcauaaugugaca

SEQ ID NO: 134602 - RNA, 19 nt, Homo sapiens
  misc_RNA (1)...(19): siRNA sense strand
ccuuugacauccuucagua

SEQ ID NO: 134603 - RNA, 19 nt, Homo sapiens
  misc_RNA (1)...(19): siRNA sense strand
caaguacgauccuccuuuu

SEQ ID NO: 134604 - RNA, 19 nt, Homo sapiens
  misc_RNA (1)...(19): siRNA sense strand
gaaugucgucccaaguuug

SEQ ID NO: 134605 - RNA, 19 nt, Homo sapiens
  misc_RNA (1)...(19): siRNA sense strand
cggaaguucuccaguaaag

SEQ ID NO: 134606 - RNA, 19 nt, Homo sapiens
  misc_RNA (1)...(19): siRNA sense strand
cagaacaccuuugcacuac

SEQ ID NO: 134607 - RNA, 19 nt, Homo sapiens
  misc_RNA (1)...(19): siRNA sense strand
ugaauccaguuaucaucaa

SEQ ID NO: 134608 - RNA, 19 nt, Homo sapiens
  misc_RNA (1)...(19): siRNA sense strand
gauguugugauaagguuaa

SEQ ID NO: 134609 - RNA, 19 nt, Homo sapiens
  misc_RNA (1)...(19): siRNA sense strand
caucaauggcgcuguuauu

SEQ ID NO: 134610 - RNA, 19 nt, Homo sapiens
  misc_RNA (1)...(19): siRNA sense strand
aagagggaguggugaaaga

SEQ ID NO: 134611 - RNA, 19 nt, Homo sapiens
  misc_RNA (1)...(19): siRNA sense strand
ucaauggcgcuguuauuug

SEQ ID NO: 134612 - RNA, 19 nt, Homo sapiens
  misc_RNA (1)...(19): siRNA sense strand
ccaaguuccucuuaaagcu

SEQ ID NO: 134613 - RNA, 19 nt, Homo sapiens
  misc_RNA (1)...(19): siRNA sense strand
gaaggcccagcuuguuauu

SEQ ID NO: 134614 - RNA, 19 nt, Homo sapiens
  misc_RNA (1)...(19): siRNA sense strand
ggauaugaccucaaucaac

SEQ ID NO: 134615 - RNA, 19 nt, Homo sapiens
  misc_RNA (1)...(19): siRNA sense strand
gugaagcugaguccaagua

SEQ ID NO: 134616 - RNA, 19 nt, Homo sapiens
  misc_RNA (1)...(19): siRNA sense strand
gccacacccugaaccaguu

SEQ ID NO: 134617 - RNA, 19 nt, Homo sapiens
  misc_RNA (1)...(19): siRNA sense strand
caaagagggaguggugaaa

SEQ ID NO: 134618 - RNA, 19 nt, Homo sapiens
  misc_RNA (1)...(19): siRNA sense strand
guacucagagccucaguca

SEQ ID NO: 134619 - RNA, 19 nt, Homo sapiens
  misc_RNA (1)...(19): siRNA sense strand
guacgacucuucuuuugga

SEQ ID NO: 134620 - RNA, 19 nt, Homo sapiens
  misc_RNA (1)...(19): siRNA sense strand
uccggaaguucuccaguaa

SEQ ID NO: 134621 - RNA, 19 nt, Homo sapiens
  misc_RNA (1)...(19): siRNA sense strand
ugacaacggaaaccaaguu

SEQ ID NO: 134622 - RNA, 19 nt, Homo sapiens
  misc_RNA (1)...(19): siRNA sense strand
gucaaugcauggcugcuau

SEQ ID NO: 134623 - RNA, 19 nt, Homo sapiens
  misc_RNA (1)...(19): siRNA sense strand
gccaaaacauuucaggauu

SEQ ID NO: 134624 - RNA, 19 nt, Homo sapiens
  misc_RNA (1)...(19): siRNA sense strand
ugacauccuucaguacuca

SEQ ID NO: 134625 - RNA, 19 nt, Homo sapiens
  misc_RNA (1)...(19): siRNA sense strand
aggaauacugcacggauua

SEQ ID NO: 134626 - RNA, 19 nt, Homo sapiens
  misc_RNA (1)...(19): siRNA sense strand
gguauagcguggacuuacu

SEQ ID NO: 134627 - RNA, 19 nt, Homo sapiens
  misc_RNA (1)...(19): siRNA sense strand
ucaaagagggaguggugaa

SEQ ID NO: 134628 - RNA, 19 nt, Homo sapiens
  misc_RNA (1)...(19): siRNA sense strand
cauaaugugacaacggaaa

SEQ ID NO: 134629 - RNA, 19 nt, Homo sapiens
  misc_RNA (1)...(19): siRNA sense strand
uuucagaccaugcauaaug

SEQ ID NO: 134630 - RNA, 19 nt, Homo sapiens
  misc_RNA (1)...(19): siRNA sense strand
gcauggcugcuaugaacuu

SEQ ID NO: 134631 - RNA, 19 nt, Homo sapiens
  misc_RNA (1)...(19): siRNA sense strand
ggcccagcuuguuauuaaa

SEQ ID NO: 134632 - RNA, 19 nt, Homo sapiens
  misc_RNA (1)...(19): siRNA sense strand
uuccggaaguucuccagua

SEQ ID NO: 134633 - RNA, 19 nt, Homo sapiens
  misc_RNA (1)...(19): siRNA sense strand
acucagagccucagucaag

SEQ ID NO: 134634 - RNA, 19 nt, Homo sapiens
  misc_RNA (1)...(19): siRNA sense strand
aaaggaaacccugccauuc

SEQ ID NO: 134635 - RNA, 19 nt, Homo sapiens
  misc_RNA (1)...(19): siRNA sense strand
ucagaacauguuggaaaua

SEQ ID NO: 134636 - RNA, 19 nt, Homo sapiens
  misc_RNA (1)...(19): siRNA sense strand
gcguggacuuacucccuuu

SEQ ID NO: 134637 - RNA, 19 nt, Homo sapiens
  misc_RNA (1)...(19): siRNA sense strand
gcacuacuucgacagucaa

SEQ ID NO: 134638 - RNA, 19 nt, Homo sapiens
  misc_RNA (1)...(19): siRNA sense strand
uuaaacagugcaccaguug

SEQ ID NO: 134639 - RNA, 19 nt, Homo sapiens
  misc_RNA (1)...(19): siRNA sense strand
gcauugaucgugaauuuug

SEQ ID NO: 134640 - RNA, 19 nt, Homo sapiens
  misc_RNA (1)...(19): siRNA sense strand
gagccucagucaagguucu

SEQ ID NO: 134641 - RNA, 19 nt, Homo sapiens
  misc_RNA (1)...(19): siRNA sense strand
gggauauucagaacauguu

SEQ ID NO: 134642 - RNA, 19 nt, Homo sapiens
  misc_RNA (1)...(19): siRNA sense strand
uccuuuauauccucaaguu

SEQ ID NO: 134643 - RNA, 19 nt, Homo sapiens
  misc_RNA (1)...(19): siRNA sense strand
cauggcugcuaugaacuuu

SEQ ID NO: 134644 - RNA, 19 nt, Homo sapiens
  misc_RNA (1)...(19): siRNA sense strand
gaauacugcacggauuaga

SEQ ID NO: 134645 - RNA, 19 nt, Homo sapiens
  misc_RNA (1)...(19): siRNA sense strand
uaaaguccagacccucuug

SEQ ID NO: 134646 - RNA, 19 nt, Homo sapiens
  misc_RNA (1)...(19): siRNA sense strand
gauaagaacguccccacaa

SEQ ID NO: 134647 - RNA, 19 nt, Homo sapiens
  misc_RNA (1)...(19): siRNA sense strand
aggaaacccugccauucug

SEQ ID NO: 134648 - RNA, 19 nt, Homo sapiens
  misc_RNA (1)...(19): siRNA sense strand
guugagggauauucagaac

SEQ ID NO: 134649 - RNA, 19 nt, Homo sapiens
  misc_RNA (1)...(19): siRNA sense strand
gacaucaauggcgcuguua

SEQ ID NO: 134650 - RNA, 19 nt, Homo sapiens
  misc_RNA (1)...(19): siRNA sense strand
augcauggcugcuaugaac

SEQ ID NO: 134651 - RNA, 19 nt, Homo sapiens
  misc_RNA (1)...(19): siRNA sense strand
aaaucccacugcagccaaa

SEQ ID NO: 134652 - RNA, 19 nt, Homo sapiens
  misc_RNA (1)...(19): siRNA sense strand
uucagaacauguuggaaau

SEQ ID NO: 134653 - RNA, 19 nt, Homo sapiens
  misc_RNA (1)...(19): siRNA sense strand
auucagaacauguuggaaa

SEQ ID NO: 134654 - RNA, 19 nt, Homo sapiens
  misc_RNA (1)...(19): siRNA sense strand
ggauauucagaacauguug

SEQ ID NO: 134655 - RNA, 19 nt, Homo sapiens
  misc_RNA (1)...(19): siRNA sense strand
gauccuuuauauccucaag

SEQ ID NO: 134656 - RNA, 19 nt, Homo sapiens
  misc_RNA (1)...(19): siRNA sense strand
ucgauguugugauaagguu

SEQ ID NO: 134657 - RNA, 19 nt, Homo sapiens
  misc_RNA (1)...(19): siRNA sense strand
gagcacgaccucccugaac

SEQ ID NO: 134658 - RNA, 19 nt, Homo sapiens
  misc_RNA (1)...(19): siRNA sense strand
guaaaguccagacccucuu

SEQ ID NO: 134659 - RNA, 19 nt, Homo sapiens
  misc_RNA (1)...(19): siRNA sense strand
ggaauacugcacggauuag

SEQ ID NO: 134660 - RNA, 19 nt, Homo sapiens
  misc_RNA (1)...(19): siRNA sense strand
gaucucaguggaggcauug

SEQ ID NO: 134661 - RNA, 19 nt, Homo sapiens
  misc_RNA (1)...(19): siRNA sense strand
uguaaagagagcucagaaa

SEQ ID NO: 134662 - RNA, 19 nt, Homo sapiens
  misc_RNA (1)...(19): siRNA sense strand
aggaaugucgucccaaguu

SEQ ID NO: 134663 - RNA, 19 nt, Homo sapiens
  misc_RNA (1)...(19): siRNA sense strand
caaguuugccaagacauca

SEQ ID NO: 134664 - RNA, 19 nt, Homo sapiens
  misc_RNA (1)...(19): siRNA sense strand
guugugauaagguuaaaca

SEQ ID NO: 134665 - RNA, 19 nt, Homo sapiens
  misc_RNA (1)...(19): siRNA sense strand
gcacuuuccuccagcaaca

SEQ ID NO: 134666 - RNA, 19 nt, Homo sapiens
  misc_RNA (1)...(19): siRNA sense strand
guccugagaucuucaccuu

SEQ ID NO: 134667 - RNA, 19 nt, Homo sapiens
  misc_RNA (1)...(19): siRNA sense strand
cucgagcccuuuaaucuga

SEQ ID NO: 134668 - RNA, 19 nt, Homo sapiens
  misc_RNA (1)...(19): siRNA sense strand
cuucggagcccucggacua

SEQ ID NO: 134669 - RNA, 19 nt, Homo sapiens
  misc_RNA (1)...(19): siRNA sense strand
gcucuggaccucagcacuu

SEQ ID NO: 134670 - RNA, 19 nt, Homo sapiens
  misc_RNA (1)...(19): siRNA sense strand
gaaccgaacccagccaaaa

SEQ ID NO: 134671 - RNA, 19 nt, Homo sapiens
  misc_RNA (1)...(19): siRNA sense strand
ggaaccgaacccagccaaa

SEQ ID NO: 134672 - RNA, 19 nt, Homo sapiens
  misc_RNA (1)...(19): siRNA sense strand
gcuccgguccugagaucuu

SEQ ID NO: 134673 - RNA, 19 nt, Homo sapiens
  misc_RNA (1)...(19): siRNA sense strand
gcacuuuccuccagcaaca

SEQ ID NO: 134674 - RNA, 19 nt, Homo sapiens
  misc_RNA (1)...(19): siRNA sense strand
guccugagaucuucaccuu

SEQ ID NO: 134675 - RNA, 19 nt, Homo sapiens
  misc_RNA (1)...(19): siRNA sense strand
cucgagcccuuuaaucuga

SEQ ID NO: 134676 - RNA, 19 nt, Homo sapiens
  misc_RNA (1)...(19): siRNA sense strand
cuucggagcccucggacua

SEQ ID NO: 134677 - RNA, 19 nt, Homo sapiens
  misc_RNA (1)...(19): siRNA sense strand
gcucuggaccucagcacuu

SEQ ID NO: 134678 - RNA, 19 nt, Homo sapiens
  misc_RNA (1)...(19): siRNA sense strand
gaaccgaacccagccaaaa

SEQ ID NO: 134679 - RNA, 19 nt, Homo sapiens
  misc_RNA (1)...(19): siRNA sense strand
ggaaccgaacccagccaaa

SEQ ID NO: 134680 - RNA, 19 nt, Homo sapiens
  misc_RNA (1)...(19): siRNA sense strand
gcuccgguccugagaucuu

SEQ ID NO: 134681 - RNA, 19 nt, Homo sapiens
  misc_RNA (1)...(19): siRNA sense strand
ggaagaagaugcucagauu

SEQ ID NO: 134682 - RNA, 19 nt, Homo sapiens
  misc_RNA (1)...(19): siRNA sense strand
gaagagcccucccaaagga

SEQ ID NO: 134683 - RNA, 19 nt, Homo sapiens
  misc_RNA (1)...(19): siRNA sense strand
ucaaagagcucgagagaca

SEQ ID NO: 134684 - RNA, 19 nt, Homo sapiens
  misc_RNA (1)...(19): siRNA sense strand
ggagggcgaugacauuaaa

SEQ ID NO: 134685 - RNA, 19 nt, Homo sapiens
  misc_RNA (1)...(19): siRNA sense strand
cuaaagaacuucagacugu

SEQ ID NO: 134686 - RNA, 19 nt, Homo sapiens
  misc_RNA (1)...(19): siRNA sense strand
ugaaagucauugaagcuua

SEQ ID NO: 134687 - RNA, 19 nt, Homo sapiens
  misc_RNA (1)...(19): siRNA sense strand
gcagaccagugagaaguua

SEQ ID NO: 134688 - RNA, 19 nt, Homo sapiens
  misc_RNA (1)...(19): siRNA sense strand
guaguaagagcaaaguuua

SEQ ID NO: 134689 - RNA, 19 nt, Homo sapiens
  misc_RNA (1)...(19): siRNA sense strand
agagacacauggaggauua

SEQ ID NO: 134690 - RNA, 19 nt, Homo sapiens
  misc_RNA (1)...(19): siRNA sense strand
gaaguuaaguucagcaaac

SEQ ID NO: 134691 - RNA, 19 nt, Homo sapiens
  misc_RNA (1)...(19): siRNA sense strand
aaacgaaggucacgucugu

SEQ ID NO: 134692 - RNA, 19 nt, Homo sapiens
  misc_RNA (1)...(19): siRNA sense strand
agacugugcuuucaacgua

SEQ ID NO: 134693 - RNA, 19 nt, Homo sapiens
  misc_RNA (1)...(19): siRNA sense strand
uagcaacaaucaacuggua

SEQ ID NO: 134694 - RNA, 19 nt, Homo sapiens
  misc_RNA (1)...(19): siRNA sense strand
gaaagucauugaagcuuac

SEQ ID NO: 134695 - RNA, 19 nt, Homo sapiens
  misc_RNA (1)...(19): siRNA sense strand
ggacgagcuuuccuucuca

SEQ ID NO: 134696 - RNA, 19 nt, Homo sapiens
  misc_RNA (1)...(19): siRNA sense strand
gcacagcugcuuuggaaga

SEQ ID NO: 134697 - RNA, 19 nt, Homo sapiens
  misc_RNA (1)...(19): siRNA sense strand
ucaugcgccuggauaaaua

SEQ ID NO: 134698 - RNA, 19 nt, Homo sapiens
  misc_RNA (1)...(19): siRNA sense strand
gagcaugauugagcggaua

SEQ ID NO: 134699 - RNA, 19 nt, Homo sapiens
  misc_RNA (1)...(19): siRNA sense strand
gguaguaagagcaaaguuu

SEQ ID NO: 134700 - RNA, 19 nt, Homo sapiens
  misc_RNA (1)...(19): siRNA sense strand
acaaggaggaucuuaguaa

SEQ ID NO: 134701 - RNA, 19 nt, Homo sapiens
  misc_RNA (1)...(19): siRNA sense strand
gauaauagcaacaaucaac

SEQ ID NO: 134702 - RNA, 19 nt, Homo sapiens
  misc_RNA (1)...(19): siRNA sense strand
aaugggaaaucuagaagaa

SEQ ID NO: 134703 - RNA, 19 nt, Homo sapiens
  misc_RNA (1)...(19): siRNA sense strand
gaaauaucagggagcauga

SEQ ID NO: 134704 - RNA, 19 nt, Homo sapiens
  misc_RNA (1)...(19): siRNA sense strand
ggaacacagugaggaguug

SEQ ID NO: 134705 - RNA, 19 nt, Homo sapiens
  misc_RNA (1)...(19): siRNA sense strand
gcccgaagcucagcagaga

SEQ ID NO: 134706 - RNA, 19 nt, Homo sapiens
  misc_RNA (1)...(19): siRNA sense strand
ccauaaagccucauucagu

SEQ ID NO: 134707 - RNA, 19 nt, Homo sapiens
  misc_RNA (1)...(19): siRNA sense strand
guucagcaaacauuucaua

SEQ ID NO: 134708 - RNA, 19 nt, Homo sapiens
  misc_RNA (1)...(19): siRNA sense strand
ggaguucgcgucccggaaa

SEQ ID NO: 134709 - RNA, 19 nt, Homo sapiens
  misc_RNA (1)...(19): siRNA sense strand
gaaugacaaucacaaagcu

SEQ ID NO: 134710 - RNA, 19 nt, Homo sapiens
  misc_RNA (1)...(19): siRNA sense strand
gaugaguggcuuuaucuau

SEQ ID NO: 134711 - RNA, 19 nt, Homo sapiens
  misc_RNA (1)...(19): siRNA sense strand
gaacuucagacugugcuuu

SEQ ID NO: 134712 - RNA, 19 nt, Homo sapiens
  misc_RNA (1)...(19): siRNA sense strand
cuucuacucuucccaaaug

SEQ ID NO: 134713 - RNA, 19 nt, Homo sapiens
  misc_RNA (1)...(19): siRNA sense strand
ggaggauuaucauacagau

SEQ ID NO: 134714 - RNA, 19 nt, Homo sapiens
  misc_RNA (1)...(19): siRNA sense strand
ugggaaaucuagaagaaau

SEQ ID NO: 134715 - RNA, 19 nt, Homo sapiens
  misc_RNA (1)...(19): siRNA sense strand
gcucguacagucuuuagaa

SEQ ID NO: 134716 - RNA, 19 nt, Homo sapiens
  misc_RNA (1)...(19): siRNA sense strand
gaagaagaugcucagauuc

SEQ ID NO: 134717 - RNA, 19 nt, Homo sapiens
  misc_RNA (1)...(19): siRNA sense strand
ggauauuagugucgugcaa

SEQ ID NO: 134718 - RNA, 19 nt, Homo sapiens
  misc_RNA (1)...(19): siRNA sense strand
caaaagcuauuacaaugug

SEQ ID NO: 134719 - RNA, 19 nt, Homo sapiens
  misc_RNA (1)...(19): siRNA sense strand
cauggaggauuaucauaca

SEQ ID NO: 134720 - RNA, 19 nt, Homo sapiens
  misc_RNA (1)...(19): siRNA sense strand
gggaaaucuagaagaaaua

SEQ ID NO: 134721 - RNA, 19 nt, Homo sapiens
  misc_RNA (1)...(19): siRNA sense strand
acaauguggugcuacagaa

SEQ ID NO: 134722 - RNA, 19 nt, Homo sapiens
  misc_RNA (1)...(19): siRNA sense strand
gagagucggaggcugcuuu

SEQ ID NO: 134723 - RNA, 19 nt, Homo sapiens
  misc_RNA (1)...(19): siRNA sense strand
acaaucaacugguaguaag

SEQ ID NO: 134724 - RNA, 19 nt, Homo sapiens
  misc_RNA (1)...(19): siRNA sense strand
ugaguggcuuuaucuauca

SEQ ID NO: 134725 - RNA, 19 nt, Homo sapiens
  misc_RNA (1)...(19): siRNA sense strand
ggaagaggaaagagcuuga

SEQ ID NO: 134726 - RNA, 19 nt, Homo sapiens
  misc_RNA (1)...(19): siRNA sense strand
ucauacagauagacaagau

SEQ ID NO: 134727 - RNA, 19 nt, Homo sapiens
  misc_RNA (1)...(19): siRNA sense strand
ccagugagaaguuaaguuc

SEQ ID NO: 134728 - RNA, 19 nt, Homo sapiens
  misc_RNA (1)...(19): siRNA sense strand
gaagugaggaaaagaauga

SEQ ID NO: 134729 - RNA, 19 nt, Homo sapiens
  misc_RNA (1)...(19): siRNA sense strand
caacaaucaacugguagua

SEQ ID NO: 134730 - RNA, 19 nt, Homo sapiens
  misc_RNA (1)...(19): siRNA sense strand
cccuguaccucacguauug

SEQ ID NO: 134731 - RNA, 19 nt, Homo sapiens
  misc_RNA (1)...(19): siRNA sense strand
ggagacgucauccauguca

SEQ ID NO: 134732 - RNA, 19 nt, Homo sapiens
  misc_RNA (1)...(19): siRNA sense strand
cagcugcucucugcuacaa

SEQ ID NO: 134733 - RNA, 19 nt, Homo sapiens
  misc_RNA (1)...(19): siRNA sense strand
aaggagacgucauccaugu

SEQ ID NO: 134734 - RNA, 19 nt, Homo sapiens
  misc_RNA (1)...(19): siRNA sense strand
ugaauguccucacggaaca

SEQ ID NO: 134735 - RNA, 19 nt, Homo sapiens
  misc_RNA (1)...(19): siRNA sense strand
gcaaaugcucguacagucu

SEQ ID NO: 134736 - RNA, 19 nt, Homo sapiens
  misc_RNA (1)...(19): siRNA sense strand
gcaacaaccagcaggaucu

SEQ ID NO: 134737 - RNA, 19 nt, Homo sapiens
  misc_RNA (1)...(19): siRNA sense strand
ggaaugacaaucacaaagc

SEQ ID NO: 134738 - RNA, 19 nt, Homo sapiens
  misc_RNA (1)...(19): siRNA sense strand
auccauggcugccuucaaa

SEQ ID NO: 134739 - RNA, 19 nt, Homo sapiens
  misc_RNA (1)...(19): siRNA sense strand
acccuacgcugcucaaaga

SEQ ID NO: 134740 - RNA, 19 nt, Homo sapiens
  misc_RNA (1)...(19): siRNA sense strand
gccugugucucccaaauca

SEQ ID NO: 134741 - RNA, 19 nt, Homo sapiens
  misc_RNA (1)...(19): siRNA sense strand
cagcugcuuuggaagaaga

SEQ ID NO: 134742 - RNA, 19 nt, Homo sapiens
  misc_RNA (1)...(19): siRNA sense strand
caugauugagcggauauua

SEQ ID NO: 134743 - RNA, 19 nt, Homo sapiens
  misc_RNA (1)...(19): siRNA sense strand
caaaugcucguacagucuu

SEQ ID NO: 134744 - RNA, 19 nt, Homo sapiens
  misc_RNA (1)...(19): siRNA sense strand
ccaaugaggacgagcuuuc

SEQ ID NO: 134745 - RNA, 19 nt, Homo sapiens
  misc_RNA (1)...(19): siRNA sense strand
guuaaguucagcaaacauu

SEQ ID NO: 134746 - RNA, 19 nt, Homo sapiens
  misc_RNA (1)...(19): siRNA sense strand
caaggcaaacacucaauuc

SEQ ID NO: 134747 - RNA, 19 nt, Homo sapiens
  misc_RNA (1)...(19): siRNA sense strand
aauauguucuuuccagcaa

SEQ ID NO: 134748 - RNA, 19 nt, Homo sapiens
  misc_RNA (1)...(19): siRNA sense strand
guaagagcccuaagaccau

SEQ ID NO: 134749 - RNA, 19 nt, Homo sapiens
  misc_RNA (1)...(19): siRNA sense strand
gggagggcgaugacauuaa

SEQ ID NO: 134750 - RNA, 19 nt, Homo sapiens
  misc_RNA (1)...(19): siRNA sense strand
uuagaagaaugcaccaagu

SEQ ID NO: 134751 - RNA, 19 nt, Homo sapiens
  misc_RNA (1)...(19): siRNA sense strand
aaacaaggcaaacacucaa

SEQ ID NO: 134752 - RNA, 19 nt, Homo sapiens
  misc_RNA (1)...(19): siRNA sense strand
caacugguaguaagagcaa

SEQ ID NO: 134753 - RNA, 19 nt, Homo sapiens
  misc_RNA (1)...(19): siRNA sense strand
uaggaugaguggcuuuauc

SEQ ID NO: 134754 - RNA, 19 nt, Homo sapiens
  misc_RNA (1)...(19): siRNA sense strand
cuacucuucccaaauguuu

SEQ ID NO: 134755 - RNA, 19 nt, Homo sapiens
  misc_RNA (1)...(19): siRNA sense strand
acagauagacaagauauuc

SEQ ID NO: 134756 - RNA, 19 nt, Homo sapiens
  misc_RNA (1)...(19): siRNA sense strand
agaagaaugcaccaaguug

SEQ ID NO: 134757 - RNA, 19 nt, Homo sapiens
  misc_RNA (1)...(19): siRNA sense strand
ggccauugcagaccaguga

SEQ ID NO: 134758 - RNA, 19 nt, Homo sapiens
  misc_RNA (1)...(19): siRNA sense strand
ggucaaggccagcgagaag

SEQ ID NO: 134759 - RNA, 19 nt, Homo sapiens
  misc_RNA (1)...(19): siRNA sense strand
cgacaggaaugacaaucac

SEQ ID NO: 134760 - RNA, 19 nt, Homo sapiens
  misc_RNA (1)...(19): siRNA sense strand
uagaagaaugcaccaaguu

SEQ ID NO: 134761 - RNA, 19 nt, Homo sapiens
  misc_RNA (1)...(19): siRNA sense strand
gggaguucauggagaccaa

SEQ ID NO: 134762 - RNA, 19 nt, Homo sapiens
  misc_RNA (1)...(19): siRNA sense strand
ggaugaguggcuuuaucua

SEQ ID NO: 134763 - RNA, 19 nt, Homo sapiens
  misc_RNA (1)...(19): siRNA sense strand
ugauacgacugccauaaac

SEQ ID NO: 134764 - RNA, 19 nt, Homo sapiens
  misc_RNA (1)...(19): siRNA sense strand
ccgauaauagcaacaauca

SEQ ID NO: 134765 - RNA, 19 nt, Homo sapiens
  misc_RNA (1)...(19): siRNA sense strand
gagcaccuacagaagcaaa

SEQ ID NO: 134766 - RNA, 19 nt, Homo sapiens
  misc_RNA (1)...(19): siRNA sense strand
gaccgauaauagcaacaau

SEQ ID NO: 134767 - RNA, 19 nt, Homo sapiens
  misc_RNA (1)...(19): siRNA sense strand
guggugcuacagaauauuu

SEQ ID NO: 134768 - RNA, 19 nt, Homo sapiens
  misc_RNA (1)...(19): siRNA sense strand
gcaagcacgcagacagcaa

SEQ ID NO: 134769 - RNA, 19 nt, Homo sapiens
  misc_RNA (1)...(19): siRNA sense strand
gcaacaaucaacugguagu

SEQ ID NO: 134770 - RNA, 19 nt, Homo sapiens
  misc_RNA (1)...(19): siRNA sense strand
gagagacacauggaggauu

SEQ ID NO: 134771 - RNA, 19 nt, Homo sapiens
  misc_RNA (1)...(19): siRNA sense strand
cugaagagcccucccaaag

SEQ ID NO: 134772 - RNA, 19 nt, Homo sapiens
  misc_RNA (1)...(19): siRNA sense strand
gagaaguuaaguucagcaa

SEQ ID NO: 134773 - RNA, 19 nt, Homo sapiens
  misc_RNA (1)...(19): siRNA sense strand
ugauugagcggauauuagu

SEQ ID NO: 134774 - RNA, 19 nt, Homo sapiens
  misc_RNA (1)...(19): siRNA sense strand
gggcaacgucacuuacaug

SEQ ID NO: 134775 - RNA, 19 nt, Homo sapiens
  misc_RNA (1)...(19): siRNA sense strand
gacgagcuuuccuucucaa

SEQ ID NO: 134776 - RNA, 19 nt, Homo sapiens
  misc_RNA (1)...(19): siRNA sense strand
aauguggugcuacagaaua

SEQ ID NO: 134777 - RNA, 19 nt, Homo sapiens
  misc_RNA (1)...(19): siRNA sense strand
uaaguucagcaaacauuuc

SEQ ID NO: 134778 - RNA, 19 nt, Homo sapiens
  misc_RNA (1)...(19): siRNA sense strand
caccauaaagccucauuca

SEQ ID NO: 134779 - RNA, 19 nt, Homo sapiens
  misc_RNA (1)...(19): siRNA sense strand
gaacugggagggcgaugac

SEQ ID NO: 134780 - RNA, 19 nt, Homo sapiens
  misc_RNA (1)...(19): siRNA sense strand
acaaggcaaacacucaauu

SEQ ID NO: 134781 - RNA, 19 nt, Homo sapiens
  misc_RNA (1)...(19): siRNA sense strand
ggaagaagaugcucagauu

SEQ ID NO: 134782 - RNA, 19 nt, Homo sapiens
  misc_RNA (1)...(19): siRNA sense strand
gaagagcccucccaaagga

SEQ ID NO: 134783 - RNA, 19 nt, Homo sapiens
  misc_RNA (1)...(19): siRNA sense strand
ucaaagagcucgagagaca

SEQ ID NO: 134784 - RNA, 19 nt, Homo sapiens
  misc_RNA (1)...(19): siRNA sense strand
ggagggcgaugacauuaaa

SEQ ID NO: 134785 - RNA, 19 nt, Homo sapiens
  misc_RNA (1)...(19): siRNA sense strand
cuaaagaacuucagacugu

SEQ ID NO: 134786 - RNA, 19 nt, Homo sapiens
  misc_RNA (1)...(19): siRNA sense strand
ugaaagucauugaagcuua

SEQ ID NO: 134787 - RNA, 19 nt, Homo sapiens
  misc_RNA (1)...(19): siRNA sense strand
gcagaccagugagaaguua

SEQ ID NO: 134788 - RNA, 19 nt, Homo sapiens
  misc_RNA (1)...(19): siRNA sense strand
guaguaagagcaaaguuua

SEQ ID NO: 134789 - RNA, 19 nt, Homo sapiens
  misc_RNA (1)...(19): siRNA sense strand
agagacacauggaggauua

SEQ ID NO: 134790 - RNA, 19 nt, Homo sapiens
  misc_RNA (1)...(19): siRNA sense strand
gaaguuaaguucagcaaac

SEQ ID NO: 134791 - RNA, 19 nt, Homo sapiens
  misc_RNA (1)...(19): siRNA sense strand
aaacgaaggucacgucugu

SEQ ID NO: 134792 - RNA, 19 nt, Homo sapiens
  misc_RNA (1)...(19): siRNA sense strand
agacugugcuuucaacgua

SEQ ID NO: 134793 - RNA, 19 nt, Homo sapiens
  misc_RNA (1)...(19): siRNA sense strand
uagcaacaaucaacuggua

SEQ ID NO: 134794 - RNA, 19 nt, Homo sapiens
  misc_RNA (1)...(19): siRNA sense strand
gaaagucauugaagcuuac

SEQ ID NO: 134795 - RNA, 19 nt, Homo sapiens
  misc_RNA (1)...(19): siRNA sense strand
ggacgagcuuuccuucuca

SEQ ID NO: 134796 - RNA, 19 nt, Homo sapiens
  misc_RNA (1)...(19): siRNA sense strand
gcacagcugcuuuggaaga

SEQ ID NO: 134797 - RNA, 19 nt, Homo sapiens
  misc_RNA (1)...(19): siRNA sense strand
ucaugcgccuggauaaaua

SEQ ID NO: 134798 - RNA, 19 nt, Homo sapiens
  misc_RNA (1)...(19): siRNA sense strand
gagcaugauugagcggaua

SEQ ID NO: 134799 - RNA, 19 nt, Homo sapiens
  misc_RNA (1)...(19): siRNA sense strand
gguaguaagagcaaaguuu

SEQ ID NO: 134800 - RNA, 19 nt, Homo sapiens
  misc_RNA (1)...(19): siRNA sense strand
acaaggaggaucuuaguaa

SEQ ID NO: 134801 - RNA, 19 nt, Homo sapiens
  misc_RNA (1)...(19): siRNA sense strand
gauaauagcaacaaucaac

SEQ ID NO: 134802 - RNA, 19 nt, Homo sapiens
  misc_RNA (1)...(19): siRNA sense strand
guuuggacaugaccgauaa

SEQ ID NO: 134803 - RNA, 19 nt, Homo sapiens
  misc_RNA (1)...(19): siRNA sense strand
gaaauaucagggagcauga

SEQ ID NO: 134804 - RNA, 19 nt, Homo sapiens
  misc_RNA (1)...(19): siRNA sense strand
ggaacacagugaggaguug

SEQ ID NO: 134805 - RNA, 19 nt, Homo sapiens
  misc_RNA (1)...(19): siRNA sense strand
gcccgaagcucagcagaga

SEQ ID NO: 134806 - RNA, 19 nt, Homo sapiens
  misc_RNA (1)...(19): siRNA sense strand
aaugggaaaucuagaagaa

SEQ ID NO: 134807 - RNA, 19 nt, Homo sapiens
  misc_RNA (1)...(19): siRNA sense strand
uuaacaagguccucaguuc

SEQ ID NO: 134808 - RNA, 19 nt, Homo sapiens
  misc_RNA (1)...(19): siRNA sense strand
ccauaaagccucauucagu

SEQ ID NO: 134809 - RNA, 19 nt, Homo sapiens
  misc_RNA (1)...(19): siRNA sense strand
uaaaguaacagcagacauc

SEQ ID NO: 134810 - RNA, 19 nt, Homo sapiens
  misc_RNA (1)...(19): siRNA sense strand
guucagcaaacauuucaua

SEQ ID NO: 134811 - RNA, 19 nt, Homo sapiens
  misc_RNA (1)...(19): siRNA sense strand
ggaguucgcgucccggaaa

SEQ ID NO: 134812 - RNA, 19 nt, Homo sapiens
  misc_RNA (1)...(19): siRNA sense strand
gaaugacaaucacaaagcu

SEQ ID NO: 134813 - RNA, 19 nt, Homo sapiens
  misc_RNA (1)...(19): siRNA sense strand
gaugaguggcuuuaucuau

SEQ ID NO: 134814 - RNA, 19 nt, Homo sapiens
  misc_RNA (1)...(19): siRNA sense strand
ggacaugaccgauaauagc

SEQ ID NO: 134815 - RNA, 19 nt, Homo sapiens
  misc_RNA (1)...(19): siRNA sense strand
cuucuacucuucccaaaug

SEQ ID NO: 134816 - RNA, 19 nt, Homo sapiens
  misc_RNA (1)...(19): siRNA sense strand
ggaggauuaucauacagau

SEQ ID NO: 134817 - RNA, 19 nt, Homo sapiens
  misc_RNA (1)...(19): siRNA sense strand
ugggaaaucuagaagaaau

SEQ ID NO: 134818 - RNA, 19 nt, Homo sapiens
  misc_RNA (1)...(19): siRNA sense strand
gaacuucagacugugcuuu

SEQ ID NO: 134819 - RNA, 19 nt, Homo sapiens
  misc_RNA (1)...(19): siRNA sense strand
gcccucgucucaccgcaua

SEQ ID NO: 134820 - RNA, 19 nt, Homo sapiens
  misc_RNA (1)...(19): siRNA sense strand
gaagaagaugcucagauuc

SEQ ID NO: 134821 - RNA, 19 nt, Homo sapiens
  misc_RNA (1)...(19): siRNA sense strand
ggauauuagugucgugcaa

SEQ ID NO: 134822 - RNA, 19 nt, Homo sapiens
  misc_RNA (1)...(19): siRNA sense strand
gcucguacagucuuuagaa

SEQ ID NO: 134823 - RNA, 19 nt, Homo sapiens
  misc_RNA (1)...(19): siRNA sense strand
uaucggaguuuggacauga

SEQ ID NO: 134824 - RNA, 19 nt, Homo sapiens
  misc_RNA (1)...(19): siRNA sense strand
caaaagcuauuacaaugug

SEQ ID NO: 134825 - RNA, 19 nt, Homo sapiens
  misc_RNA (1)...(19): siRNA sense strand
cauggaggauuaucauaca

SEQ ID NO: 134826 - RNA, 19 nt, Homo sapiens
  misc_RNA (1)...(19): siRNA sense strand
gggaaaucuagaagaaaua

SEQ ID NO: 134827 - RNA, 19 nt, Homo sapiens
  misc_RNA (1)...(19): siRNA sense strand
acaauguggugcuacagaa

SEQ ID NO: 134828 - RNA, 19 nt, Homo sapiens
  misc_RNA (1)...(19): siRNA sense strand
acaaucaacugguaguaag

SEQ ID NO: 134829 - RNA, 19 nt, Homo sapiens
  misc_RNA (1)...(19): siRNA sense strand
ugaguggcuuuaucuauca

SEQ ID NO: 134830 - RNA, 19 nt, Homo sapiens
  misc_RNA (1)...(19): siRNA sense strand
ggaagaggaaagagcuuga

SEQ ID NO: 134831 - RNA, 19 nt, Homo sapiens
  misc_RNA (1)...(19): siRNA sense strand
ucauacagauagacaagau

SEQ ID NO: 134832 - RNA, 19 nt, Homo sapiens
  misc_RNA (1)...(19): siRNA sense strand
gagagucggaggcugcuuu

SEQ ID NO: 134833 - RNA, 19 nt, Homo sapiens
  misc_RNA (1)...(19): siRNA sense strand
ccagugagaaguuaaguuc

SEQ ID NO: 134834 - RNA, 19 nt, Homo sapiens
  misc_RNA (1)...(19): siRNA sense strand
gaagugaggaaaagaauga

SEQ ID NO: 134835 - RNA, 19 nt, Homo sapiens
  misc_RNA (1)...(19): siRNA sense strand
caacaaucaacugguagua

SEQ ID NO: 134836 - RNA, 19 nt, Homo sapiens
  misc_RNA (1)...(19): siRNA sense strand
cccuguaccucacguauug

SEQ ID NO: 134837 - RNA, 19 nt, Homo sapiens
  misc_RNA (1)...(19): siRNA sense strand
aaggagacgucauccaugu

SEQ ID NO: 134838 - RNA, 19 nt, Homo sapiens
  misc_RNA (1)...(19): siRNA sense strand
cagcugcucucugcuacaa

SEQ ID NO: 134839 - RNA, 19 nt, Homo sapiens
  misc_RNA (1)...(19): siRNA sense strand
gguccucaguuccuuagug

SEQ ID NO: 134840 - RNA, 19 nt, Homo sapiens
  misc_RNA (1)...(19): siRNA sense strand
ugaauguccucacggaaca

SEQ ID NO: 134841 - RNA, 19 nt, Homo sapiens
  misc_RNA (1)...(19): siRNA sense strand
guccucaguuccuuaguga

SEQ ID NO: 134842 - RNA, 19 nt, Homo sapiens
  misc_RNA (1)...(19): siRNA sense strand
ggagacgucauccauguca

SEQ ID NO: 134843 - RNA, 19 nt, Homo sapiens
  misc_RNA (1)...(19): siRNA sense strand
gcaaaugcucguacagucu

SEQ ID NO: 134844 - RNA, 19 nt, Homo sapiens
  misc_RNA (1)...(19): siRNA sense strand
gcaacaaccagcaggaucu

SEQ ID NO: 134845 - RNA, 19 nt, Homo sapiens
  misc_RNA (1)...(19): siRNA sense strand
ggaaugacaaucacaaagc

SEQ ID NO: 134846 - RNA, 19 nt, Homo sapiens
  misc_RNA (1)...(19): siRNA sense strand
auccauggcugccuucaaa

SEQ ID NO: 134847 - RNA, 19 nt, Homo sapiens
  misc_RNA (1)...(19): siRNA sense strand
acccuacgcugcucaaaga

SEQ ID NO: 134848 - RNA, 19 nt, Homo sapiens
  misc_RNA (1)...(19): siRNA sense strand
gccugugucucccaaauca

SEQ ID NO: 134849 - RNA, 19 nt, Homo sapiens
  misc_RNA (1)...(19): siRNA sense strand
cagcugcuuuggaagaaga

SEQ ID NO: 134850 - RNA, 19 nt, Homo sapiens
  misc_RNA (1)...(19): siRNA sense strand
caugauugagcggauauua

SEQ ID NO: 134851 - RNA, 19 nt, Homo sapiens
  misc_RNA (1)...(19): siRNA sense strand
ccaaugaggacgagcuuuc

SEQ ID NO: 134852 - RNA, 19 nt, Homo sapiens
  misc_RNA (1)...(19): siRNA sense strand
caaaugcucguacagucuu

SEQ ID NO: 134853 - RNA, 19 nt, Homo sapiens
  misc_RNA (1)...(19): siRNA sense strand
guuaaguucagcaaacauu

SEQ ID NO: 134854 - RNA, 19 nt, Homo sapiens
  misc_RNA (1)...(19): siRNA sense strand
caaggcaaacacucaauuc

SEQ ID NO: 134855 - RNA, 19 nt, Homo sapiens
  misc_RNA (1)...(19): siRNA sense strand
aauauguucuuuccagcaa

SEQ ID NO: 134856 - RNA, 19 nt, Homo sapiens
  misc_RNA (1)...(19): siRNA sense strand
gagcaacauccgcgaguuc

SEQ ID NO: 134857 - RNA, 19 nt, Homo sapiens
  misc_RNA (1)...(19): siRNA sense strand
guaagagcccuaagaccau

SEQ ID NO: 134858 - RNA, 19 nt, Homo sapiens
  misc_RNA (1)...(19): siRNA sense strand
gggagggcgaugacauuaa

SEQ ID NO: 134859 - RNA, 19 nt, Homo sapiens
  misc_RNA (1)...(19): siRNA sense strand
caacugguaguaagagcaa

SEQ ID NO: 134860 - RNA, 19 nt, Homo sapiens
  misc_RNA (1)...(19): siRNA sense strand
aaacaaggcaaacacucaa

SEQ ID NO: 134861 - RNA, 19 nt, Homo sapiens
  misc_RNA (1)...(19): siRNA sense strand
uaggaugaguggcuuuauc

SEQ ID NO: 134862 - RNA, 19 nt, Homo sapiens
  misc_RNA (1)...(19): siRNA sense strand
cuacucuucccaaauguuu

SEQ ID NO: 134863 - RNA, 19 nt, Homo sapiens
  misc_RNA (1)...(19): siRNA sense strand
acagauagacaagauauuc

SEQ ID NO: 134864 - RNA, 19 nt, Homo sapiens
  misc_RNA (1)...(19): siRNA sense strand
agaagaaugcaccaaguug

SEQ ID NO: 134865 - RNA, 19 nt, Homo sapiens
  misc_RNA (1)...(19): siRNA sense strand
uuagaagaaugcaccaagu

SEQ ID NO: 134866 - RNA, 19 nt, Homo sapiens
  misc_RNA (1)...(19): siRNA sense strand
ggucaaggccagcgagaag

SEQ ID NO: 134867 - RNA, 19 nt, Homo sapiens
  misc_RNA (1)...(19): siRNA sense strand
cgacaggaaugacaaucac

SEQ ID NO: 134868 - RNA, 19 nt, Homo sapiens
  misc_RNA (1)...(19): siRNA sense strand
gcgagugccugagcaacau

SEQ ID NO: 134869 - RNA, 19 nt, Homo sapiens
  misc_RNA (1)...(19): siRNA sense strand
uagaagaaugcaccaaguu

SEQ ID NO: 134870 - RNA, 19 nt, Homo sapiens
  misc_RNA (1)...(19): siRNA sense strand
ggccauugcagaccaguga

SEQ ID NO: 134871 - RNA, 19 nt, Homo sapiens
  misc_RNA (1)...(19): siRNA sense strand
ccgauaauagcaacaauca

SEQ ID NO: 134872 - RNA, 19 nt, Homo sapiens
  misc_RNA (1)...(19): siRNA sense strand
ggaugaguggcuuuaucua

SEQ ID NO: 134873 - RNA, 19 nt, Homo sapiens
  misc_RNA (1)...(19): siRNA sense strand
gggaguucauggagaccaa

SEQ ID NO: 134874 - RNA, 19 nt, Homo sapiens
  misc_RNA (1)...(19): siRNA sense strand
ugauacgacugccauaaac

SEQ ID NO: 134875 - RNA, 19 nt, Homo sapiens
  misc_RNA (1)...(19): siRNA sense strand
gaccgauaauagcaacaau

SEQ ID NO: 134876 - RNA, 19 nt, Homo sapiens
  misc_RNA (1)...(19): siRNA sense strand
gagcaccuacagaagcaaa

SEQ ID NO: 134877 - RNA, 19 nt, Homo sapiens
  misc_RNA (1)...(19): siRNA sense strand
gacaugaccgauaauagca

SEQ ID NO: 134878 - RNA, 19 nt, Homo sapiens
  misc_RNA (1)...(19): siRNA sense strand
gcaagcacgcagacagcaa

SEQ ID NO: 134879 - RNA, 19 nt, Homo sapiens
  misc_RNA (1)...(19): siRNA sense strand
gagagacacauggaggauu

SEQ ID NO: 134880 - RNA, 19 nt, Homo sapiens
  misc_RNA (1)...(19): siRNA sense strand
guggugcuacagaauauuu

SEQ ID NO: 134881 - RNA, 19 nt, Homo sapiens
  misc_RNA (1)...(19): siRNA sense strand
gaauagaacuucagagaaa

SEQ ID NO: 134882 - RNA, 19 nt, Homo sapiens
  misc_RNA (1)...(19): siRNA sense strand
ggacaucacugaauucaaa

SEQ ID NO: 134883 - RNA, 19 nt, Homo sapiens
  misc_RNA (1)...(19): siRNA sense strand
gaacagaucucacgcauac

SEQ ID NO: 134884 - RNA, 19 nt, Homo sapiens
  misc_RNA (1)...(19): siRNA sense strand
gaaagguccuguauguuaa

SEQ ID NO: 134885 - RNA, 19 nt, Homo sapiens
  misc_RNA (1)...(19): siRNA sense strand
gaaaggauagcacaaauaa

SEQ ID NO: 134886 - RNA, 19 nt, Homo sapiens
  misc_RNA (1)...(19): siRNA sense strand
gaaaugcaguucaagaaau

SEQ ID NO: 134887 - RNA, 19 nt, Homo sapiens
  misc_RNA (1)...(19): siRNA sense strand
ugacaaaccucuuaggauu

SEQ ID NO: 134888 - RNA, 19 nt, Homo sapiens
  misc_RNA (1)...(19): siRNA sense strand
ggaacgggcuggaguuaaa

SEQ ID NO: 134889 - RNA, 19 nt, Homo sapiens
  misc_RNA (1)...(19): siRNA sense strand
ggaaaugguguuagaguua

SEQ ID NO: 134890 - RNA, 19 nt, Homo sapiens
  misc_RNA (1)...(19): siRNA sense strand
gaacacuggugcugacaaa

SEQ ID NO: 134891 - RNA, 19 nt, Homo sapiens
  misc_RNA (1)...(19): siRNA sense strand
gaaaugguguuagaguuaa

SEQ ID NO: 134892 - RNA, 19 nt, Homo sapiens
  misc_RNA (1)...(19): siRNA sense strand
gcagggacaucacugaauu

SEQ ID NO: 134893 - RNA, 19 nt, Homo sapiens
  misc_RNA (1)...(19): siRNA sense strand
caaagcagaucuguaauga

SEQ ID NO: 134894 - RNA, 19 nt, Homo sapiens
  misc_RNA (1)...(19): siRNA sense strand
ccagaaagguccuguaugu

SEQ ID NO: 134895 - RNA, 19 nt, Homo sapiens
  misc_RNA (1)...(19): siRNA sense strand
cagcaaagcagaucuguaa

SEQ ID NO: 134896 - RNA, 19 nt, Homo sapiens
  misc_RNA (1)...(19): siRNA sense strand
agaaagguccuguauguua

SEQ ID NO: 134897 - RNA, 19 nt, Homo sapiens
  misc_RNA (1)...(19): siRNA sense strand
ccaaggaaaugguguuaga

SEQ ID NO: 134898 - RNA, 19 nt, Homo sapiens
  misc_RNA (1)...(19): siRNA sense strand
caacuacaacucaaacuaa

SEQ ID NO: 134899 - RNA, 19 nt, Homo sapiens
  misc_RNA (1)...(19): siRNA sense strand
gcagucuggugcaagaaua

SEQ ID NO: 134900 - RNA, 19 nt, Homo sapiens
  misc_RNA (1)...(19): siRNA sense strand
gagaaauccuccaccaaau

SEQ ID NO: 134901 - RNA, 19 nt, Homo sapiens
  misc_RNA (1)...(19): siRNA sense strand
gaguaugggucaagaauag

SEQ ID NO: 134902 - RNA, 19 nt, Homo sapiens
  misc_RNA (1)...(19): siRNA sense strand
gaaaguugcuccucaaaau

SEQ ID NO: 134903 - RNA, 19 nt, Homo sapiens
  misc_RNA (1)...(19): siRNA sense strand
ggaagaguacuacaagaaa

SEQ ID NO: 134904 - RNA, 19 nt, Homo sapiens
  misc_RNA (1)...(19): siRNA sense strand
ucaacaugcugcagaaauu

SEQ ID NO: 134905 - RNA, 19 nt, Homo sapiens
  misc_RNA (1)...(19): siRNA sense strand
gaaaugaagggauagaugu

SEQ ID NO: 134906 - RNA, 19 nt, Homo sapiens
  misc_RNA (1)...(19): siRNA sense strand
ggaaaugcaguucaagaaa

SEQ ID NO: 134907 - RNA, 19 nt, Homo sapiens
  misc_RNA (1)...(19): siRNA sense strand
acagauagcuccugacagu

SEQ ID NO: 134908 - RNA, 19 nt, Homo sapiens
  misc_RNA (1)...(19): siRNA sense strand
gacaacaagcagccuauua

SEQ ID NO: 134909 - RNA, 19 nt, Homo sapiens
  misc_RNA (1)...(19): siRNA sense strand
ucagagaaguucggaauga

SEQ ID NO: 134910 - RNA, 19 nt, Homo sapiens
  misc_RNA (1)...(19): siRNA sense strand
gacaacacccgaaaggaua

SEQ ID NO: 134911 - RNA, 19 nt, Homo sapiens
  misc_RNA (1)...(19): siRNA sense strand
ucaaccagaugcuaagaaa

SEQ ID NO: 134912 - RNA, 19 nt, Homo sapiens
  misc_RNA (1)...(19): siRNA sense strand
gacaaaccucuuaggauua

SEQ ID NO: 134913 - RNA, 19 nt, Homo sapiens
  misc_RNA (1)...(19): siRNA sense strand
uaagaaaguugcuccucaa

SEQ ID NO: 134914 - RNA, 19 nt, Homo sapiens
  misc_RNA (1)...(19): siRNA sense strand
acaggaaucuggaugcaaa

SEQ ID NO: 134915 - RNA, 19 nt, Homo sapiens
  misc_RNA (1)...(19): siRNA sense strand
aagcagaucuguaaugaca

SEQ ID NO: 134916 - RNA, 19 nt, Homo sapiens
  misc_RNA (1)...(19): siRNA sense strand
gcaaagcagaucuguaaug

SEQ ID NO: 134917 - RNA, 19 nt, Homo sapiens
  misc_RNA (1)...(19): siRNA sense strand
ucaaggcgguuucagagaa

SEQ ID NO: 134918 - RNA, 19 nt, Homo sapiens
  misc_RNA (1)...(19): siRNA sense strand
aaagauugguggcccagua

SEQ ID NO: 134919 - RNA, 19 nt, Homo sapiens
  misc_RNA (1)...(19): siRNA sense strand
ggacaacacccgaaaggau

SEQ ID NO: 134920 - RNA, 19 nt, Homo sapiens
  misc_RNA (1)...(19): siRNA sense strand
caacaugcugcagaaauua

SEQ ID NO: 134921 - RNA, 19 nt, Homo sapiens
  misc_RNA (1)...(19): siRNA sense strand
gacagaagaauacaaaguu

SEQ ID NO: 134922 - RNA, 19 nt, Homo sapiens
  misc_RNA (1)...(19): siRNA sense strand
cuuauuacgcucacuauua

SEQ ID NO: 134923 - RNA, 19 nt, Homo sapiens
  misc_RNA (1)...(19): siRNA sense strand
aaaaggaggugaaaccaua

SEQ ID NO: 134924 - RNA, 19 nt, Homo sapiens
  misc_RNA (1)...(19): siRNA sense strand
gguguucgcauucaguuua

SEQ ID NO: 134925 - RNA, 19 nt, Homo sapiens
  misc_RNA (1)...(19): siRNA sense strand
gcuccuggcuuccaucaug

SEQ ID NO: 134926 - RNA, 19 nt, Homo sapiens
  misc_RNA (1)...(19): siRNA sense strand
cgaaaggauagcacaaaua

SEQ ID NO: 134927 - RNA, 19 nt, Homo sapiens
  misc_RNA (1)...(19): siRNA sense strand
cauacaacccugcaccuua

SEQ ID NO: 134928 - RNA, 19 nt, Homo sapiens
  misc_RNA (1)...(19): siRNA sense strand
ccaaaugcagauccuaaua

SEQ ID NO: 134929 - RNA, 19 nt, Homo sapiens
  misc_RNA (1)...(19): siRNA sense strand
cagaggaggugaacagauc

SEQ ID NO: 134930 - RNA, 19 nt, Homo sapiens
  misc_RNA (1)...(19): siRNA sense strand
cugcagaaauuauuacaga

SEQ ID NO: 134931 - RNA, 19 nt, Homo sapiens
  misc_RNA (1)...(19): siRNA sense strand
ggaaaugaagggauagaug

SEQ ID NO: 134932 - RNA, 19 nt, Homo sapiens
  misc_RNA (1)...(19): siRNA sense strand
gagaaguucggaaugagua

SEQ ID NO: 134933 - RNA, 19 nt, Homo sapiens
  misc_RNA (1)...(19): siRNA sense strand
ggagacccauauaaaguuc

SEQ ID NO: 134934 - RNA, 19 nt, Homo sapiens
  misc_RNA (1)...(19): siRNA sense strand
gaagaguacuacaagaaaa

SEQ ID NO: 134935 - RNA, 19 nt, Homo sapiens
  misc_RNA (1)...(19): siRNA sense strand
caaaugcagauccuaauau

SEQ ID NO: 134936 - RNA, 19 nt, Homo sapiens
  misc_RNA (1)...(19): siRNA sense strand
gagaucaaccagaugcuaa

SEQ ID NO: 134937 - RNA, 19 nt, Homo sapiens
  misc_RNA (1)...(19): siRNA sense strand
ugggaaaacuggauuaaua

SEQ ID NO: 134938 - RNA, 19 nt, Homo sapiens
  misc_RNA (1)...(19): siRNA sense strand
gaauucaaaugacuauggu

SEQ ID NO: 134939 - RNA, 19 nt, Homo sapiens
  misc_RNA (1)...(19): siRNA sense strand
gggaagaguacuacaagaa

SEQ ID NO: 134940 - RNA, 19 nt, Homo sapiens
  misc_RNA (1)...(19): siRNA sense strand
cagcuggacagguugauua

SEQ ID NO: 134941 - RNA, 19 nt, Homo sapiens
  misc_RNA (1)...(19): siRNA sense strand
ggaaaugcauauccacacu

SEQ ID NO: 134942 - RNA, 19 nt, Homo sapiens
  misc_RNA (1)...(19): siRNA sense strand
gggagaaacuauuaaacag

SEQ ID NO: 134943 - RNA, 19 nt, Homo sapiens
  misc_RNA (1)...(19): siRNA sense strand
ucaaaugacuaugguuaug

SEQ ID NO: 134944 - RNA, 19 nt, Homo sapiens
  misc_RNA (1)...(19): siRNA sense strand
gaaaaugggucaggcaguu

SEQ ID NO: 134945 - RNA, 19 nt, Homo sapiens
  misc_RNA (1)...(19): siRNA sense strand
gggaaaugcaguucaagaa

SEQ ID NO: 134946 - RNA, 19 nt, Homo sapiens
  misc_RNA (1)...(19): siRNA sense strand
gcaagaauagaacuucaga

SEQ ID NO: 134947 - RNA, 19 nt, Homo sapiens
  misc_RNA (1)...(19): siRNA sense strand
gaaugaguaugggucaaga

SEQ ID NO: 134948 - RNA, 19 nt, Homo sapiens
  misc_RNA (1)...(19): siRNA sense strand
gaaauggagagaugaucaa

SEQ ID NO: 134949 - RNA, 19 nt, Homo sapiens
  misc_RNA (1)...(19): siRNA sense strand
auacaacccugcaccuuau

SEQ ID NO: 134950 - RNA, 19 nt, Homo sapiens
  misc_RNA (1)...(19): siRNA sense strand
aaaugcagauccuaauaug

SEQ ID NO: 134951 - RNA, 19 nt, Homo sapiens
  misc_RNA (1)...(19): siRNA sense strand
gaaguguucaggcugguaa

SEQ ID NO: 134952 - RNA, 19 nt, Homo sapiens
  misc_RNA (1)...(19): siRNA sense strand
cagauggaaugguuggauu

SEQ ID NO: 134953 - RNA, 19 nt, Homo sapiens
  misc_RNA (1)...(19): siRNA sense strand
agagaaauccuccaccaaa

SEQ ID NO: 134954 - RNA, 19 nt, Homo sapiens
  misc_RNA (1)...(19): siRNA sense strand
aggaggaaaugaagggaua

SEQ ID NO: 134955 - RNA, 19 nt, Homo sapiens
  misc_RNA (1)...(19): siRNA sense strand
gaauacaaaguuccagaug

SEQ ID NO: 134956 - RNA, 19 nt, Homo sapiens
  misc_RNA (1)...(19): siRNA sense strand
gcaggaacggauccaaauu

SEQ ID NO: 134957 - RNA, 19 nt, Homo sapiens
  misc_RNA (1)...(19): siRNA sense strand
aagauuugcuguuggcauu

SEQ ID NO: 134958 - RNA, 19 nt, Homo sapiens
  misc_RNA (1)...(19): siRNA sense strand
caacaagcagccuauuaug

SEQ ID NO: 134959 - RNA, 19 nt, Homo sapiens
  misc_RNA (1)...(19): siRNA sense strand
acaaggagaucagcagaau

SEQ ID NO: 134960 - RNA, 19 nt, Homo sapiens
  misc_RNA (1)...(19): siRNA sense strand
gaagaaauggagagaugau

SEQ ID NO: 134961 - RNA, 19 nt, Homo sapiens
  misc_RNA (1)...(19): siRNA sense strand
caaggcaggauuagucauu

SEQ ID NO: 134962 - RNA, 19 nt, Homo sapiens
  misc_RNA (1)...(19): siRNA sense strand
aggaagaaauggagagaug

SEQ ID NO: 134963 - RNA, 19 nt, Homo sapiens
  misc_RNA (1)...(19): siRNA sense strand
uuacaggagacccauauaa

SEQ ID NO: 134964 - RNA, 19 nt, Homo sapiens
  misc_RNA (1)...(19): siRNA sense strand
ccaacuacaacucaaacua

SEQ ID NO: 134965 - RNA, 19 nt, Homo sapiens
  misc_RNA (1)...(19): siRNA sense strand
gcaccaacuacaacucaaa

SEQ ID NO: 134966 - RNA, 19 nt, Homo sapiens
  misc_RNA (1)...(19): siRNA sense strand
ccgaaaggauagcacaaau

SEQ ID NO: 134967 - RNA, 19 nt, Homo sapiens
  misc_RNA (1)...(19): siRNA sense strand
caacaggaaucuggaugca

SEQ ID NO: 134968 - RNA, 19 nt, Homo sapiens
  misc_RNA (1)...(19): siRNA sense strand
acaacaagcagccuauuau

SEQ ID NO: 134969 - RNA, 19 nt, Homo sapiens
  misc_RNA (1)...(19): siRNA sense strand
acagaagaauacaaaguuc

SEQ ID NO: 134970 - RNA, 19 nt, Homo sapiens
  misc_RNA (1)...(19): siRNA sense strand
cagguggucagccagauua

SEQ ID NO: 134971 - RNA, 19 nt, Homo sapiens
  misc_RNA (1)...(19): siRNA sense strand
ucaaacuaauggacaagga

SEQ ID NO: 134972 - RNA, 19 nt, Homo sapiens
  misc_RNA (1)...(19): siRNA sense strand
ggagaucaaccagaugcua

SEQ ID NO: 134973 - RNA, 19 nt, Homo sapiens
  misc_RNA (1)...(19): siRNA sense strand
aagaauagaacuucagaga

SEQ ID NO: 134974 - RNA, 19 nt, Homo sapiens
  misc_RNA (1)...(19): siRNA sense strand
aaggauagcacaaauaaca

SEQ ID NO: 134975 - RNA, 19 nt, Homo sapiens
  misc_RNA (1)...(19): siRNA sense strand
ggaagaaauggagagauga

SEQ ID NO: 134976 - RNA, 19 nt, Homo sapiens
  misc_RNA (1)...(19): siRNA sense strand
ggucaagaauaggaggaaa

SEQ ID NO: 134977 - RNA, 19 nt, Homo sapiens
  misc_RNA (1)...(19): siRNA sense strand
uuuagaagauggagaucaa

SEQ ID NO: 134978 - RNA, 19 nt, Homo sapiens
  misc_RNA (1)...(19): siRNA sense strand
gcaggugcaccaacuacaa

SEQ ID NO: 134979 - RNA, 19 nt, Homo sapiens
  misc_RNA (1)...(19): siRNA sense strand
gaaauccuccaccaaaugc

SEQ ID NO: 134980 - RNA, 19 nt, Homo sapiens
  misc_RNA (1)...(19): siRNA sense strand
aagaauaggaggaaaugaa

SEQ ID NO: 134981 - RNA, 19 nt, Homo sapiens
  misc_RNA (1)...(19): siRNA sense strand
gaagaaaccuuugaaauug

SEQ ID NO: 134982 - RNA, 19 nt, Homo sapiens
  misc_RNA (1)...(19): siRNA sense strand
gaaaguggcuucaaagauc

SEQ ID NO: 134983 - RNA, 19 nt, Homo sapiens
  misc_RNA (1)...(19): siRNA sense strand
ggaagaaaccuuugaaauu

SEQ ID NO: 134984 - RNA, 19 nt, Homo sapiens
  misc_RNA (1)...(19): siRNA sense strand
uaaaguagcuucacucucu

SEQ ID NO: 134985 - RNA, 19 nt, Homo sapiens
  misc_RNA (1)...(19): siRNA sense strand
guagauggcuugcaagaga

SEQ ID NO: 134986 - RNA, 19 nt, Homo sapiens
  misc_RNA (1)...(19): siRNA sense strand
gagcagacauuaaagacaa

SEQ ID NO: 134987 - RNA, 19 nt, Homo sapiens
  misc_RNA (1)...(19): siRNA sense strand
gaauaaagccaaugaacuu

SEQ ID NO: 134988 - RNA, 19 nt, Homo sapiens
  misc_RNA (1)...(19): siRNA sense strand
gaaugaaagugacaugaug

SEQ ID NO: 134989 - RNA, 19 nt, Homo sapiens
  misc_RNA (1)...(19): siRNA sense strand
ggucaucccugaaucugua

SEQ ID NO: 134990 - RNA, 19 nt, Homo sapiens
  misc_RNA (1)...(19): siRNA sense strand
uggaagagcccaucaauaa

SEQ ID NO: 134991 - RNA, 19 nt, Homo sapiens
  misc_RNA (1)...(19): siRNA sense strand
gcuacaagcuuacuucugu

SEQ ID NO: 134992 - RNA, 19 nt, Homo sapiens
  misc_RNA (1)...(19): siRNA sense strand
gaagauaucucagcaaagc

SEQ ID NO: 134993 - RNA, 19 nt, Homo sapiens
  misc_RNA (1)...(19): siRNA sense strand
cagaagauaucucagcaaa

SEQ ID NO: 134994 - RNA, 19 nt, Homo sapiens
  misc_RNA (1)...(19): siRNA sense strand
ggaacgagguaacaguuga

SEQ ID NO: 134995 - RNA, 19 nt, Homo sapiens
  misc_RNA (1)...(19): siRNA sense strand
guaucaaagugcucuauuu

SEQ ID NO: 134996 - RNA, 19 nt, Homo sapiens
  misc_RNA (1)...(19): siRNA sense strand
caaauuguaugaagcaugu

SEQ ID NO: 134997 - RNA, 19 nt, Homo sapiens
  misc_RNA (1)...(19): siRNA sense strand
gcagcuaggugccauuaug

SEQ ID NO: 134998 - RNA, 19 nt, Homo sapiens
  misc_RNA (1)...(19): siRNA sense strand
gcugagagacauuauuaua

SEQ ID NO: 134999 - RNA, 19 nt, Homo sapiens
  misc_RNA (1)...(19): siRNA sense strand
gaacaugccagaagauauc

SEQ ID NO: 135000 - RNA, 19 nt, Homo sapiens
  misc_RNA (1)...(19): siRNA sense strand
guacauuggugauucugaa

SEQ ID NO: 135001 - RNA, 19 nt, Homo sapiens
  misc_RNA (1)...(19): siRNA sense strand
gaaaaucuaugaugcucua

SEQ ID NO: 135002 - RNA, 19 nt, Homo sapiens
  misc_RNA (1)...(19): siRNA sense strand
ggaagagcccaucaauaaa

SEQ ID NO: 135003 - RNA, 19 nt, Homo sapiens
  misc_RNA (1)...(19): siRNA sense strand
gguaacaguugacaaaugg

SEQ ID NO: 135004 - RNA, 19 nt, Homo sapiens
  misc_RNA (1)...(19): siRNA sense strand
uagcugagagacauuauua

SEQ ID NO: 135005 - RNA, 19 nt, Homo sapiens
  misc_RNA (1)...(19): siRNA sense strand
cuauggaccugcauggaua

SEQ ID NO: 135006 - RNA, 19 nt, Homo sapiens
  misc_RNA (1)...(19): siRNA sense strand
gaagcuugaugucuacugu

SEQ ID NO: 135007 - RNA, 19 nt, Homo sapiens
  misc_RNA (1)...(19): siRNA sense strand
gcagugggauguuacuauc

SEQ ID NO: 135008 - RNA, 19 nt, Homo sapiens
  misc_RNA (1)...(19): siRNA sense strand
cucauaaacugguggauuu

SEQ ID NO: 135009 - RNA, 19 nt, Homo sapiens
  misc_RNA (1)...(19): siRNA sense strand
uuagcaagcuguguaauga

SEQ ID NO: 135010 - RNA, 19 nt, Homo sapiens
  misc_RNA (1)...(19): siRNA sense strand
ggaagacccuuuuguuaug

SEQ ID NO: 135011 - RNA, 19 nt, Homo sapiens
  misc_RNA (1)...(19): siRNA sense strand
guaauccugugucuugguu

SEQ ID NO: 135012 - RNA, 19 nt, Homo sapiens
  misc_RNA (1)...(19): siRNA sense strand
gcaaguuguuuaccuguac

SEQ ID NO: 135013 - RNA, 19 nt, Homo sapiens
  misc_RNA (1)...(19): siRNA sense strand
cagggaauuugaaguagaa

SEQ ID NO: 135014 - RNA, 19 nt, Homo sapiens
  misc_RNA (1)...(19): siRNA sense strand
gaagagcccaucaauaaaa

SEQ ID NO: 135015 - RNA, 19 nt, Homo sapiens
  misc_RNA (1)...(19): siRNA sense strand
cgagguaacaguugacaaa

SEQ ID NO: 135016 - RNA, 19 nt, Homo sapiens
  misc_RNA (1)...(19): siRNA sense strand
gcaaagccacaacacuuga

SEQ ID NO: 135017 - RNA, 19 nt, Homo sapiens
  misc_RNA (1)...(19): siRNA sense strand
gcaagagaaucuggaugug

SEQ ID NO: 135018 - RNA, 19 nt, Homo sapiens
  misc_RNA (1)...(19): siRNA sense strand
aaaugaacaugccagaaga

SEQ ID NO: 135019 - RNA, 19 nt, Homo sapiens
  misc_RNA (1)...(19): siRNA sense strand
ccaaugaacuuuucuaucu

SEQ ID NO: 135020 - RNA, 19 nt, Homo sapiens
  misc_RNA (1)...(19): siRNA sense strand
caagcuguguaaugaagaa

SEQ ID NO: 135021 - RNA, 19 nt, Homo sapiens
  misc_RNA (1)...(19): siRNA sense strand
cuaguaauccugugucuug

SEQ ID NO: 135022 - RNA, 19 nt, Homo sapiens
  misc_RNA (1)...(19): siRNA sense strand
gaaacggucaucccugaau

SEQ ID NO: 135023 - RNA, 19 nt, Homo sapiens
  misc_RNA (1)...(19): siRNA sense strand
cagcaaagccacaacacuu

SEQ ID NO: 135024 - RNA, 19 nt, Homo sapiens
  misc_RNA (1)...(19): siRNA sense strand
guaaugaagaacaggaauu

SEQ ID NO: 135025 - RNA, 19 nt, Homo sapiens
  misc_RNA (1)...(19): siRNA sense strand
cagcaacaguaucaaagug

SEQ ID NO: 135026 - RNA, 19 nt, Homo sapiens
  misc_RNA (1)...(19): siRNA sense strand
gaaucuggaugugguagug

SEQ ID NO: 135027 - RNA, 19 nt, Homo sapiens
  misc_RNA (1)...(19): siRNA sense strand
gaacgcauccaccuacucu

SEQ ID NO: 135028 - RNA, 19 nt, Homo sapiens
  misc_RNA (1)...(19): siRNA sense strand
aaaaugugcuacaagcuua

SEQ ID NO: 135029 - RNA, 19 nt, Homo sapiens
  misc_RNA (1)...(19): siRNA sense strand
cacgaaaacuggacaaauu

SEQ ID NO: 135030 - RNA, 19 nt, Homo sapiens
  misc_RNA (1)...(19): siRNA sense strand
ccacacagcccuuggucuu

SEQ ID NO: 135031 - RNA, 19 nt, Homo sapiens
  misc_RNA (1)...(19): siRNA sense strand
gcauccaccuacucugcua

SEQ ID NO: 135032 - RNA, 19 nt, Homo sapiens
  misc_RNA (1)...(19): siRNA sense strand
ggauuagaauaugguuuga

SEQ ID NO: 135033 - RNA, 19 nt, Homo sapiens
  misc_RNA (1)...(19): siRNA sense strand
gguuugcagugggauguua

SEQ ID NO: 135034 - RNA, 19 nt, Homo sapiens
  misc_RNA (1)...(19): siRNA sense strand
ugaagcaugucguuaccuu

SEQ ID NO: 135035 - RNA, 19 nt, Homo sapiens
  misc_RNA (1)...(19): siRNA sense strand
gcccaucaauaaaagauua

SEQ ID NO: 135036 - RNA, 19 nt, Homo sapiens
  misc_RNA (1)...(19): siRNA sense strand
gaaaugaaugaaagugaca

SEQ ID NO: 135037 - RNA, 19 nt, Homo sapiens
  misc_RNA (1)...(19): siRNA sense strand
ggaaaugucacagucuuca

SEQ ID NO: 135038 - RNA, 19 nt, Homo sapiens
  misc_RNA (1)...(19): siRNA sense strand
gauggcugcuuacuucaca

SEQ ID NO: 135039 - RNA, 19 nt, Homo sapiens
  misc_RNA (1)...(19): siRNA sense strand
cuuugaagcuugaugucua

SEQ ID NO: 135040 - RNA, 19 nt, Homo sapiens
  misc_RNA (1)...(19): siRNA sense strand
gggcuuacgccauuggaaa

SEQ ID NO: 135041 - RNA, 19 nt, Homo sapiens
  misc_RNA (1)...(19): siRNA sense strand
ucagggaauuugaaguaga

SEQ ID NO: 135042 - RNA, 19 nt, Homo sapiens
  misc_RNA (1)...(19): siRNA sense strand
cuacucugcuauuggauau

SEQ ID NO: 135043 - RNA, 19 nt, Homo sapiens
  misc_RNA (1)...(19): siRNA sense strand
cauuugcgguggagaguga

SEQ ID NO: 135044 - RNA, 19 nt, Homo sapiens
  misc_RNA (1)...(19): siRNA sense strand
caccuacucugcuauugga

SEQ ID NO: 135045 - RNA, 19 nt, Homo sapiens
  misc_RNA (1)...(19): siRNA sense strand
gaccagcaacaguaucaaa

SEQ ID NO: 135046 - RNA, 19 nt, Homo sapiens
  misc_RNA (1)...(19): siRNA sense strand
aaugguuucuugaugcuuu

SEQ ID NO: 135047 - RNA, 19 nt, Homo sapiens
  misc_RNA (1)...(19): siRNA sense strand
gcuguauauuggauuagaa

SEQ ID NO: 135048 - RNA, 19 nt, Homo sapiens
  misc_RNA (1)...(19): siRNA sense strand
uaaugaagaacaggaauug

SEQ ID NO: 135049 - RNA, 19 nt, Homo sapiens
  misc_RNA (1)...(19): siRNA sense strand
aaacggggcuuacgccauu

SEQ ID NO: 135050 - RNA, 19 nt, Homo sapiens
  misc_RNA (1)...(19): siRNA sense strand
augcugaggccuuggauua

SEQ ID NO: 135051 - RNA, 19 nt, Homo sapiens
  misc_RNA (1)...(19): siRNA sense strand
cccaggacaucuauugguu

SEQ ID NO: 135052 - RNA, 19 nt, Homo sapiens
  misc_RNA (1)...(19): siRNA sense strand
gaaaugucacagucuucaa

SEQ ID NO: 135053 - RNA, 19 nt, Homo sapiens
  misc_RNA (1)...(19): siRNA sense strand
ccacaacacuugagaaaac

SEQ ID NO: 135054 - RNA, 19 nt, Homo sapiens
  misc_RNA (1)...(19): siRNA sense strand
gauaaaguagcuucacucu

SEQ ID NO: 135055 - RNA, 19 nt, Homo sapiens
  misc_RNA (1)...(19): siRNA sense strand
gcaauugggaacgagguaa

SEQ ID NO: 135056 - RNA, 19 nt, Homo sapiens
  misc_RNA (1)...(19): siRNA sense strand
ugucacagucuucaauaaa

SEQ ID NO: 135057 - RNA, 19 nt, Homo sapiens
  misc_RNA (1)...(19): siRNA sense strand
uggaagaaaccuuugaaau

SEQ ID NO: 135058 - RNA, 19 nt, Homo sapiens
  misc_RNA (1)...(19): siRNA sense strand
aaaacagacugcagaagaa

SEQ ID NO: 135059 - RNA, 19 nt, Homo sapiens
  misc_RNA (1)...(19): siRNA sense strand
acacagcccuuggucuuag

SEQ ID NO: 135060 - RNA, 19 nt, Homo sapiens
  misc_RNA (1)...(19): siRNA sense strand
uaauaagccuagugaaacg

SEQ ID NO: 135061 - RNA, 19 nt, Homo sapiens
  misc_RNA (1)...(19): siRNA sense strand
gucacagucuucaauaaag

SEQ ID NO: 135062 - RNA, 19 nt, Homo sapiens
  misc_RNA (1)...(19): siRNA sense strand
aacaggaauugcugcguuu

SEQ ID NO: 135063 - RNA, 19 nt, Homo sapiens
  misc_RNA (1)...(19): siRNA sense strand
uggaugugguagugucuuu

SEQ ID NO: 135064 - RNA, 19 nt, Homo sapiens
  misc_RNA (1)...(19): siRNA sense strand
uagauggcuugcaagagaa

SEQ ID NO: 135065 - RNA, 19 nt, Homo sapiens
  misc_RNA (1)...(19): siRNA sense strand
gcaggcccuugauguucuu

SEQ ID NO: 135066 - RNA, 19 nt, Homo sapiens
  misc_RNA (1)...(19): siRNA sense strand
aaugggaaccuuuguugaa

SEQ ID NO: 135067 - RNA, 19 nt, Homo sapiens
  misc_RNA (1)...(19): siRNA sense strand
ggucggcgugguugcauuu

SEQ ID NO: 135068 - RNA, 19 nt, Homo sapiens
  misc_RNA (1)...(19): siRNA sense strand
cagauaaaguagcuucacu

SEQ ID NO: 135069 - RNA, 19 nt, Homo sapiens
  misc_RNA (1)...(19): siRNA sense strand
ccagcaggcccuugauguu

SEQ ID NO: 135070 - RNA, 19 nt, Homo sapiens
  misc_RNA (1)...(19): siRNA sense strand
aaacagacugcagaagaaa

SEQ ID NO: 135071 - RNA, 19 nt, Homo sapiens
  misc_RNA (1)...(19): siRNA sense strand
uuaaagcaauugggaacga

SEQ ID NO: 135072 - RNA, 19 nt, Homo sapiens
  misc_RNA (1)...(19): siRNA sense strand
agcgauggcugcuuacuuc

SEQ ID NO: 135073 - RNA, 19 nt, Homo sapiens
  misc_RNA (1)...(19): siRNA sense strand
aaacggucaucccugaauc

SEQ ID NO: 135074 - RNA, 19 nt, Homo sapiens
  misc_RNA (1)...(19): siRNA sense strand
ggaugugguagugucuuua

SEQ ID NO: 135075 - RNA, 19 nt, Homo sapiens
  misc_RNA (1)...(19): siRNA sense strand
cauacaaugaagacacuaa

SEQ ID NO: 135076 - RNA, 19 nt, Homo sapiens
  misc_RNA (1)...(19): siRNA sense strand
ggagcagacauuaaagaca

SEQ ID NO: 135077 - RNA, 19 nt, Homo sapiens
  misc_RNA (1)...(19): siRNA sense strand
uggauuagaauaugguuug

SEQ ID NO: 135078 - RNA, 19 nt, Homo sapiens
  misc_RNA (1)...(19): siRNA sense strand
ugaauaaagccaaugaacu

SEQ ID NO: 135079 - RNA, 19 nt, Homo sapiens
  misc_RNA (1)...(19): siRNA sense strand
ugaaugaaagugacaugau

SEQ ID NO: 135080 - RNA, 19 nt, Homo sapiens
  misc_RNA (1)...(19): siRNA sense strand
guaugaagcaugucguuac

SEQ ID NO: 135081 - RNA, 19 nt, Homo sapiens
  misc_RNA (1)...(19): siRNA sense strand
gaugaucgcugcauaaaua

SEQ ID NO: 135082 - RNA, 19 nt, Homo sapiens
  misc_RNA (1)...(19): siRNA sense strand
gcaagaggcuuuagaaucu

SEQ ID NO: 135083 - RNA, 19 nt, Homo sapiens
  misc_RNA (1)...(19): siRNA sense strand
caaacagacuccaucauuu

SEQ ID NO: 135084 - RNA, 19 nt, Homo sapiens
  misc_RNA (1)...(19): siRNA sense strand
ugaaacaaauggacgaaua

SEQ ID NO: 135085 - RNA, 19 nt, Homo sapiens
  misc_RNA (1)...(19): siRNA sense strand
guaaucauguugccaaauu

SEQ ID NO: 135086 - RNA, 19 nt, Homo sapiens
  misc_RNA (1)...(19): siRNA sense strand
ggaauaugguuuaucugua

SEQ ID NO: 135087 - RNA, 19 nt, Homo sapiens
  misc_RNA (1)...(19): siRNA sense strand
gcucauguuugccuaauaa

SEQ ID NO: 135088 - RNA, 19 nt, Homo sapiens
  misc_RNA (1)...(19): siRNA sense strand
gcauaaauaucaccaaaca

SEQ ID NO: 135089 - RNA, 19 nt, Homo sapiens
  misc_RNA (1)...(19): siRNA sense strand
gcacagugguauagugaaa

SEQ ID NO: 135090 - RNA, 19 nt, Homo sapiens
  misc_RNA (1)...(19): siRNA sense strand
gaacacagcacuaaauaca

SEQ ID NO: 135091 - RNA, 19 nt, Homo sapiens
  misc_RNA (1)...(19): siRNA sense strand
aaagaggacuucagagauu

SEQ ID NO: 135092 - RNA, 19 nt, Homo sapiens
  misc_RNA (1)...(19): siRNA sense strand
caaagagggucaaggaaau

SEQ ID NO: 135093 - RNA, 19 nt, Homo sapiens
  misc_RNA (1)...(19): siRNA sense strand
gaagauauaggaaaguuga

SEQ ID NO: 135094 - RNA, 19 nt, Homo sapiens
  misc_RNA (1)...(19): siRNA sense strand
cauauggacuaguugguua

SEQ ID NO: 135095 - RNA, 19 nt, Homo sapiens
  misc_RNA (1)...(19): siRNA sense strand
gaacauccaguaauagaau

SEQ ID NO: 135096 - RNA, 19 nt, Homo sapiens
  misc_RNA (1)...(19): siRNA sense strand
ggauugugaucauagcuaa

SEQ ID NO: 135097 - RNA, 19 nt, Homo sapiens
  misc_RNA (1)...(19): siRNA sense strand
ggugaaagaugauuauguc

SEQ ID NO: 135098 - RNA, 19 nt, Homo sapiens
  misc_RNA (1)...(19): siRNA sense strand
ggguagauauccaggagua

SEQ ID NO: 135099 - RNA, 19 nt, Homo sapiens
  misc_RNA (1)...(19): siRNA sense strand
gaauaugguuuggauacaa

SEQ ID NO: 135100 - RNA, 19 nt, Homo sapiens
  misc_RNA (1)...(19): siRNA sense strand
gauuuuagcucgugccuua

SEQ ID NO: 135101 - RNA, 19 nt, Homo sapiens
  misc_RNA (1)...(19): siRNA sense strand
ccaaacagacuccaucauu

SEQ ID NO: 135102 - RNA, 19 nt, Homo sapiens
  misc_RNA (1)...(19): siRNA sense strand
caaggaaauuuaccuguuc

SEQ ID NO: 135103 - RNA, 19 nt, Homo sapiens
  misc_RNA (1)...(19): siRNA sense strand
uaggaaaguugaagucuug

SEQ ID NO: 135104 - RNA, 19 nt, Homo sapiens
  misc_RNA (1)...(19): siRNA sense strand
ucaaggaaauuuaccuguu

SEQ ID NO: 135105 - RNA, 19 nt, Homo sapiens
  misc_RNA (1)...(19): siRNA sense strand
gguauugguucguuuacaa

SEQ ID NO: 135106 - RNA, 19 nt, Homo sapiens
  misc_RNA (1)...(19): siRNA sense strand
ugggaaagcugcucaagga

SEQ ID NO: 135107 - RNA, 19 nt, Homo sapiens
  misc_RNA (1)...(19): siRNA sense strand
caagcaguauugaagauau

SEQ ID NO: 135108 - RNA, 19 nt, Homo sapiens
  misc_RNA (1)...(19): siRNA sense strand
ugaagaauaugguuuggau

SEQ ID NO: 135109 - RNA, 19 nt, Homo sapiens
  misc_RNA (1)...(19): siRNA sense strand
cacaauuccugauaugauu

SEQ ID NO: 135110 - RNA, 19 nt, Homo sapiens
  misc_RNA (1)...(19): siRNA sense strand
ccaaagagggucaaggaaa

SEQ ID NO: 135111 - RNA, 19 nt, Homo sapiens
  misc_RNA (1)...(19): siRNA sense strand
ugaagaagauauaggaaag

SEQ ID NO: 135112 - RNA, 19 nt, Homo sapiens
  misc_RNA (1)...(19): siRNA sense strand
ggacaauccagauaaugaa

SEQ ID NO: 135113 - RNA, 19 nt, Homo sapiens
  misc_RNA (1)...(19): siRNA sense strand
cacaggaacugaaauucuu

SEQ ID NO: 135114 - RNA, 19 nt, Homo sapiens
  misc_RNA (1)...(19): siRNA sense strand
uaccauugcugcauucuug

SEQ ID NO: 135115 - RNA, 19 nt, Homo sapiens
  misc_RNA (1)...(19): siRNA sense strand
ccaaauugcugcaguccau

SEQ ID NO: 135116 - RNA, 19 nt, Homo sapiens
  misc_RNA (1)...(19): siRNA sense strand
ggacuucagagauuugauu

SEQ ID NO: 135117 - RNA, 19 nt, Homo sapiens
  misc_RNA (1)...(19): siRNA sense strand
gauaagccauuuccugaac

SEQ ID NO: 135118 - RNA, 19 nt, Homo sapiens
  misc_RNA (1)...(19): siRNA sense strand
ggacuaguugguuauauga

SEQ ID NO: 135119 - RNA, 19 nt, Homo sapiens
  misc_RNA (1)...(19): siRNA sense strand
ucacuacgcuuagcagaug

SEQ ID NO: 135120 - RNA, 19 nt, Homo sapiens
  misc_RNA (1)...(19): siRNA sense strand
gaagaugcuggaaacaauu

SEQ ID NO: 135121 - RNA, 19 nt, Homo sapiens
  misc_RNA (1)...(19): siRNA sense strand
gaagcaguaucggcaagaa

SEQ ID NO: 135122 - RNA, 19 nt, Homo sapiens
  misc_RNA (1)...(19): siRNA sense strand
ucaggaauaugguuuaucu

SEQ ID NO: 135123 - RNA, 19 nt, Homo sapiens
  misc_RNA (1)...(19): siRNA sense strand
gcagauucaggcaaauaua

SEQ ID NO: 135124 - RNA, 19 nt, Homo sapiens
  misc_RNA (1)...(19): siRNA sense strand
gcacaauuccugauaugau

SEQ ID NO: 135125 - RNA, 19 nt, Homo sapiens
  misc_RNA (1)...(19): siRNA sense strand
cagaagaugaagagaauuu

SEQ ID NO: 135126 - RNA, 19 nt, Homo sapiens
  misc_RNA (1)...(19): siRNA sense strand
agaagaugcuggaaacaau

SEQ ID NO: 135127 - RNA, 19 nt, Homo sapiens
  misc_RNA (1)...(19): siRNA sense strand
uaaugaugaucgcugcaua

SEQ ID NO: 135128 - RNA, 19 nt, Homo sapiens
  misc_RNA (1)...(19): siRNA sense strand
caaauggacgaauaccuaa

SEQ ID NO: 135129 - RNA, 19 nt, Homo sapiens
  misc_RNA (1)...(19): siRNA sense strand
guuacgggcuguugauaga

SEQ ID NO: 135130 - RNA, 19 nt, Homo sapiens
  misc_RNA (1)...(19): siRNA sense strand
auccuuagcugaagaauau

SEQ ID NO: 135131 - RNA, 19 nt, Homo sapiens
  misc_RNA (1)...(19): siRNA sense strand
gugaacacagcacuaaaua

SEQ ID NO: 135132 - RNA, 19 nt, Homo sapiens
  misc_RNA (1)...(19): siRNA sense strand
uaggacauauggacuaguu

SEQ ID NO: 135133 - RNA, 19 nt, Homo sapiens
  misc_RNA (1)...(19): siRNA sense strand
gaagaauaugguuuggaua

SEQ ID NO: 135134 - RNA, 19 nt, Homo sapiens
  misc_RNA (1)...(19): siRNA sense strand
cagcaauucugcauuucuu

SEQ ID NO: 135135 - RNA, 19 nt, Homo sapiens
  misc_RNA (1)...(19): siRNA sense strand
gcacuaaauacaacucaga

SEQ ID NO: 135136 - RNA, 19 nt, Homo sapiens
  misc_RNA (1)...(19): siRNA sense strand
ucagagauuugauuagaca

SEQ ID NO: 135137 - RNA, 19 nt, Homo sapiens
  misc_RNA (1)...(19): siRNA sense strand
acaaauggacgaauaccua

SEQ ID NO: 135138 - RNA, 19 nt, Homo sapiens
  misc_RNA (1)...(19): siRNA sense strand
cagaguccauuucagagaa

SEQ ID NO: 135139 - RNA, 19 nt, Homo sapiens
  misc_RNA (1)...(19): siRNA sense strand
gagaagaugcuggaaacaa

SEQ ID NO: 135140 - RNA, 19 nt, Homo sapiens
  misc_RNA (1)...(19): siRNA sense strand
ucacaaacuucagcaacuu

SEQ ID NO: 135141 - RNA, 19 nt, Homo sapiens
  misc_RNA (1)...(19): siRNA sense strand
gaggcacaauuccugauau

SEQ ID NO: 135142 - RNA, 19 nt, Homo sapiens
  misc_RNA (1)...(19): siRNA sense strand
uuuagaaucugcucauguu

SEQ ID NO: 135143 - RNA, 19 nt, Homo sapiens
  misc_RNA (1)...(19): siRNA sense strand
cuucagagauuugauuaga

SEQ ID NO: 135144 - RNA, 19 nt, Homo sapiens
  misc_RNA (1)...(19): siRNA sense strand
cauacuccauggauuguga

SEQ ID NO: 135145 - RNA, 19 nt, Homo sapiens
  misc_RNA (1)...(19): siRNA sense strand
acucagaucccaagcagua

SEQ ID NO: 135146 - RNA, 19 nt, Homo sapiens
  misc_RNA (1)...(19): siRNA sense strand
caagaggucaucaaaauaa

SEQ ID NO: 135147 - RNA, 19 nt, Homo sapiens
  misc_RNA (1)...(19): siRNA sense strand
gcaaaacguuuaccgugaa

SEQ ID NO: 135148 - RNA, 19 nt, Homo sapiens
  misc_RNA (1)...(19): siRNA sense strand
uagguuuacuguuguaguu

SEQ ID NO: 135149 - RNA, 19 nt, Homo sapiens
  misc_RNA (1)...(19): siRNA sense strand
ucaaggagcagaaguacga

SEQ ID NO: 135150 - RNA, 19 nt, Homo sapiens
  misc_RNA (1)...(19): siRNA sense strand
cugcauaaauaucaccaaa

SEQ ID NO: 135151 - RNA, 19 nt, Homo sapiens
  misc_RNA (1)...(19): siRNA sense strand
gaaacaaauggacgaauac

SEQ ID NO: 135152 - RNA, 19 nt, Homo sapiens
  misc_RNA (1)...(19): siRNA sense strand
ggcaagaggcuuuagaauc

SEQ ID NO: 135153 - RNA, 19 nt, Homo sapiens
  misc_RNA (1)...(19): siRNA sense strand
gccauuuccugaacugaga

SEQ ID NO: 135154 - RNA, 19 nt, Homo sapiens
  misc_RNA (1)...(19): siRNA sense strand
uaucuguaauggugaaaga

SEQ ID NO: 135155 - RNA, 19 nt, Homo sapiens
  misc_RNA (1)...(19): siRNA sense strand
gauccuuagcugaagaaua

SEQ ID NO: 135156 - RNA, 19 nt, Homo sapiens
  misc_RNA (1)...(19): siRNA sense strand
cauguuugccuaauaaaug

SEQ ID NO: 135157 - RNA, 19 nt, Homo sapiens
  misc_RNA (1)...(19): siRNA sense strand
gaaaguugaagucuugucu

SEQ ID NO: 135158 - RNA, 19 nt, Homo sapiens
  misc_RNA (1)...(19): siRNA sense strand
uaaacaacaggguagauau

SEQ ID NO: 135159 - RNA, 19 nt, Homo sapiens
  misc_RNA (1)...(19): siRNA sense strand
ccagguauugguucguuua

SEQ ID NO: 135160 - RNA, 19 nt, Homo sapiens
  misc_RNA (1)...(19): siRNA sense strand
gaucgcugcauaaauauca

SEQ ID NO: 135161 - RNA, 19 nt, Homo sapiens
  misc_RNA (1)...(19): siRNA sense strand
uccagaagaugaagagaau

SEQ ID NO: 135162 - RNA, 19 nt, Homo sapiens
  misc_RNA (1)...(19): siRNA sense strand
acacagcacuaaauacaac

SEQ ID NO: 135163 - RNA, 19 nt, Homo sapiens
  misc_RNA (1)...(19): siRNA sense strand
ggauacaauuaacaaggau

SEQ ID NO: 135164 - RNA, 19 nt, Homo sapiens
  misc_RNA (1)...(19): siRNA sense strand
uggauacaauuaacaagga

SEQ ID NO: 135165 - RNA, 19 nt, Homo sapiens
  misc_RNA (1)...(19): siRNA sense strand
gagaacauuuucaguccua

SEQ ID NO: 135166 - RNA, 19 nt, Homo sapiens
  misc_RNA (1)...(19): siRNA sense strand
aagaggacuucagagauuu

SEQ ID NO: 135167 - RNA, 19 nt, Homo sapiens
  misc_RNA (1)...(19): siRNA sense strand
cacauaccauugcugcauu

SEQ ID NO: 135168 - RNA, 19 nt, Homo sapiens
  misc_RNA (1)...(19): siRNA sense strand
augauuauguccacgaauu

SEQ ID NO: 135169 - RNA, 19 nt, Homo sapiens
  misc_RNA (1)...(19): siRNA sense strand
uaaucauguugccaaauug

SEQ ID NO: 135170 - RNA, 19 nt, Homo sapiens
  misc_RNA (1)...(19): siRNA sense strand
gacuucagagauuugauua

SEQ ID NO: 135171 - RNA, 19 nt, Homo sapiens
  misc_RNA (1)...(19): siRNA sense strand
agaauuaaauagcgauguc

SEQ ID NO: 135172 - RNA, 19 nt, Homo sapiens
  misc_RNA (1)...(19): siRNA sense strand
aggaguaucuaacuaucaa

SEQ ID NO: 135173 - RNA, 19 nt, Homo sapiens
  misc_RNA (1)...(19): siRNA sense strand
gacaauccagauaaugaaa

SEQ ID NO: 135174 - RNA, 19 nt, Homo sapiens
  misc_RNA (1)...(19): siRNA sense strand
ggccaaagagggucaagga

SEQ ID NO: 135175 - RNA, 19 nt, Homo sapiens
  misc_RNA (1)...(19): siRNA sense strand
ccaagcaguauugaagaua

SEQ ID NO: 135176 - RNA, 19 nt, Homo sapiens
  misc_RNA (1)...(19): siRNA sense strand
guugaagucuugucucacu

SEQ ID NO: 135177 - RNA, 19 nt, Homo sapiens
  misc_RNA (1)...(19): siRNA sense strand
ccaggaguaucuaacuauc

SEQ ID NO: 135178 - RNA, 19 nt, Homo sapiens
  misc_RNA (1)...(19): siRNA sense strand
cagauucaggcaaauauau

SEQ ID NO: 135179 - RNA, 19 nt, Homo sapiens
  misc_RNA (1)...(19): siRNA sense strand
ugauaugauugcagauuca

SEQ ID NO: 135180 - RNA, 19 nt, Homo sapiens
  misc_RNA (1)...(19): siRNA sense strand
cgaggcacaauuccugaua

SEQ ID NO: 135181 - RNA, 19 nt, Homo sapiens
  misc_RNA (1)...(19): siRNA sense strand
gaagaagccuuuuauguua

SEQ ID NO: 135182 - RNA, 19 nt, Homo sapiens
  misc_RNA (1)...(19): siRNA sense strand
gaugguaucucauucagua

SEQ ID NO: 135183 - RNA, 19 nt, Homo sapiens
  misc_RNA (1)...(19): siRNA sense strand
ccaaacaucuccuugcauu

SEQ ID NO: 135184 - RNA, 19 nt, Homo sapiens
  misc_RNA (1)...(19): siRNA sense strand
gguaauaaccaacuuguaa

SEQ ID NO: 135185 - RNA, 19 nt, Homo sapiens
  misc_RNA (1)...(19): siRNA sense strand
caacugaggacaaggauuu

SEQ ID NO: 135186 - RNA, 19 nt, Homo sapiens
  misc_RNA (1)...(19): siRNA sense strand
caacagaaacagauagaaa

SEQ ID NO: 135187 - RNA, 19 nt, Homo sapiens
  misc_RNA (1)...(19): siRNA sense strand
gaggaugaccuugacauua

SEQ ID NO: 135188 - RNA, 19 nt, Homo sapiens
  misc_RNA (1)...(19): siRNA sense strand
ugaagaagguguaaaggau

SEQ ID NO: 135189 - RNA, 19 nt, Homo sapiens
  misc_RNA (1)...(19): siRNA sense strand
caacugaaccagaggauga

SEQ ID NO: 135190 - RNA, 19 nt, Homo sapiens
  misc_RNA (1)...(19): siRNA sense strand
gacuugaacuucuuuaauc

SEQ ID NO: 135191 - RNA, 19 nt, Homo sapiens
  misc_RNA (1)...(19): siRNA sense strand
gaaagaugaagcucuagaa

SEQ ID NO: 135192 - RNA, 19 nt, Homo sapiens
  misc_RNA (1)...(19): siRNA sense strand
caugaaaccuccacaaguc

SEQ ID NO: 135193 - RNA, 19 nt, Homo sapiens
  misc_RNA (1)...(19): siRNA sense strand
gauguucuguugccaguau

SEQ ID NO: 135194 - RNA, 19 nt, Homo sapiens
  misc_RNA (1)...(19): siRNA sense strand
agaugaagcucuagaagau

SEQ ID NO: 135195 - RNA, 19 nt, Homo sapiens
  misc_RNA (1)...(19): siRNA sense strand
gaaggacacacgacucuau

SEQ ID NO: 135196 - RNA, 19 nt, Homo sapiens
  misc_RNA (1)...(19): siRNA sense strand
gaaagagacuacacauacg

SEQ ID NO: 135197 - RNA, 19 nt, Homo sapiens
  misc_RNA (1)...(19): siRNA sense strand
ggguacaagugguucuaua

SEQ ID NO: 135198 - RNA, 19 nt, Homo sapiens
  misc_RNA (1)...(19): siRNA sense strand
ggacaaggauuuggaagcu

SEQ ID NO: 135199 - RNA, 19 nt, Homo sapiens
  misc_RNA (1)...(19): siRNA sense strand
ugaugaagcugaagaaggu

SEQ ID NO: 135200 - RNA, 19 nt, Homo sapiens
  misc_RNA (1)...(19): siRNA sense strand
ggaaaagaauccagauaug

SEQ ID NO: 135201 - RNA, 19 nt, Homo sapiens
  misc_RNA (1)...(19): siRNA sense strand
aggaugaccuugacauuau

SEQ ID NO: 135202 - RNA, 19 nt, Homo sapiens
  misc_RNA (1)...(19): siRNA sense strand
agaugaggaugaaauacua

SEQ ID NO: 135203 - RNA, 19 nt, Homo sapiens
  misc_RNA (1)...(19): siRNA sense strand
gacauuaugcuuggcaaua

SEQ ID NO: 135204 - RNA, 19 nt, Homo sapiens
  misc_RNA (1)...(19): siRNA sense strand
gauagaaaaugucuugaga

SEQ ID NO: 135205 - RNA, 19 nt, Homo sapiens
  misc_RNA (1)...(19): siRNA sense strand
gaaauacuagagaaagaug

SEQ ID NO: 135206 - RNA, 19 nt, Homo sapiens
  misc_RNA (1)...(19): siRNA sense strand
ggacacacgacucuauuuc

SEQ ID NO: 135207 - RNA, 19 nt, Homo sapiens
  misc_RNA (1)...(19): siRNA sense strand
cauucuagauguucuguug

SEQ ID NO: 135208 - RNA, 19 nt, Homo sapiens
  misc_RNA (1)...(19): siRNA sense strand
gaagguguaaaggaucuua

SEQ ID NO: 135209 - RNA, 19 nt, Homo sapiens
  misc_RNA (1)...(19): siRNA sense strand
acaagugguucuauagaug

SEQ ID NO: 135210 - RNA, 19 nt, Homo sapiens
  misc_RNA (1)...(19): siRNA sense strand
cagaaagagacuacacaua

SEQ ID NO: 135211 - RNA, 19 nt, Homo sapiens
  misc_RNA (1)...(19): siRNA sense strand
gaaacccagccuucagaaa

SEQ ID NO: 135212 - RNA, 19 nt, Homo sapiens
  misc_RNA (1)...(19): siRNA sense strand
guacaagugguucuauaga

SEQ ID NO: 135213 - RNA, 19 nt, Homo sapiens
  misc_RNA (1)...(19): siRNA sense strand
agaagaagaagaagccuuu

SEQ ID NO: 135214 - RNA, 19 nt, Homo sapiens
  misc_RNA (1)...(19): siRNA sense strand
ggaaauuugucaugaaacc

SEQ ID NO: 135215 - RNA, 19 nt, Homo sapiens
  misc_RNA (1)...(19): siRNA sense strand
agaaagagacuacacauac

SEQ ID NO: 135216 - RNA, 19 nt, Homo sapiens
  misc_RNA (1)...(19): siRNA sense strand
ggaugaccuugacauuaug

SEQ ID NO: 135217 - RNA, 19 nt, Homo sapiens
  misc_RNA (1)...(19): siRNA sense strand
caacuuguaaucaaaggaa

SEQ ID NO: 135218 - RNA, 19 nt, Homo sapiens
  misc_RNA (1)...(19): siRNA sense strand
gaagauuccaacagaaaca

SEQ ID NO: 135219 - RNA, 19 nt, Homo sapiens
  misc_RNA (1)...(19): siRNA sense strand
cuagaugacuugaacuucu

SEQ ID NO: 135220 - RNA, 19 nt, Homo sapiens
  misc_RNA (1)...(19): siRNA sense strand
aaacuugucauucuagaug

SEQ ID NO: 135221 - RNA, 19 nt, Homo sapiens
  misc_RNA (1)...(19): siRNA sense strand
gcccaaacaucuccuugca

SEQ ID NO: 135222 - RNA, 19 nt, Homo sapiens
  misc_RNA (1)...(19): siRNA sense strand
gaagaggacacuaggaaaa

SEQ ID NO: 135223 - RNA, 19 nt, Homo sapiens
  misc_RNA (1)...(19): siRNA sense strand
cgaaacuugucauucuaga

SEQ ID NO: 135224 - RNA, 19 nt, Homo sapiens
  misc_RNA (1)...(19): siRNA sense strand
ggaugaaauacuagagaaa

SEQ ID NO: 135225 - RNA, 19 nt, Homo sapiens
  misc_RNA (1)...(19): siRNA sense strand
uagaugacuugaacuucuu

SEQ ID NO: 135226 - RNA, 19 nt, Homo sapiens
  misc_RNA (1)...(19): siRNA sense strand
aauguuaaguucccagaug

SEQ ID NO: 135227 - RNA, 19 nt, Homo sapiens
  misc_RNA (1)...(19): siRNA sense strand
ggaaacccagccuucagaa

SEQ ID NO: 135228 - RNA, 19 nt, Homo sapiens
  misc_RNA (1)...(19): siRNA sense strand
gaggaugaaauacuagaga

SEQ ID NO: 135229 - RNA, 19 nt, Homo sapiens
  misc_RNA (1)...(19): siRNA sense strand
ugauauugaugaagcugaa

SEQ ID NO: 135230 - RNA, 19 nt, Homo sapiens
  misc_RNA (1)...(19): siRNA sense strand
uacaagugguucuauagau

SEQ ID NO: 135231 - RNA, 19 nt, Homo sapiens
  misc_RNA (1)...(19): siRNA sense strand
ccacaagucguccgaguag

SEQ ID NO: 135232 - RNA, 19 nt, Homo sapiens
  misc_RNA (1)...(19): siRNA sense strand
ucuagaagaugaagacaac

SEQ ID NO: 135233 - RNA, 19 nt, Homo sapiens
  misc_RNA (1)...(19): siRNA sense strand
gaaaaggaaauuugucaug

SEQ ID NO: 135234 - RNA, 19 nt, Homo sapiens
  misc_RNA (1)...(19): siRNA sense strand
gugguucuauagaugguaa

SEQ ID NO: 135235 - RNA, 19 nt, Homo sapiens
  misc_RNA (1)...(19): siRNA sense strand
ggauuuggaagcugaugaa

SEQ ID NO: 135236 - RNA, 19 nt, Homo sapiens
  misc_RNA (1)...(19): siRNA sense strand
acgaggagcugcugaaucg

SEQ ID NO: 135237 - RNA, 19 nt, Homo sapiens
  misc_RNA (1)...(19): siRNA sense strand
augaagcucuagaagauga

SEQ ID NO: 135238 - RNA, 19 nt, Homo sapiens
  misc_RNA (1)...(19): siRNA sense strand
gaugaaauacuagagaaag

SEQ ID NO: 135239 - RNA, 19 nt, Homo sapiens
  misc_RNA (1)...(19): siRNA sense strand
cugaugaucuagaugacuu

SEQ ID NO: 135240 - RNA, 19 nt, Homo sapiens
  misc_RNA (1)...(19): siRNA sense strand
gguaucucauucaguaauc

SEQ ID NO: 135241 - RNA, 19 nt, Homo sapiens
  misc_RNA (1)...(19): siRNA sense strand
gaauuggguacaagugguu

SEQ ID NO: 135242 - RNA, 19 nt, Homo sapiens
  misc_RNA (1)...(19): siRNA sense strand
uuuggaagcugaugaagag

SEQ ID NO: 135243 - RNA, 19 nt, Homo sapiens
  misc_RNA (1)...(19): siRNA sense strand
ggaaggggauacccaaaca

SEQ ID NO: 135244 - RNA, 19 nt, Homo sapiens
  misc_RNA (1)...(19): siRNA sense strand
aggaugaaauacuagagaa

SEQ ID NO: 135245 - RNA, 19 nt, Homo sapiens
  misc_RNA (1)...(19): siRNA sense strand
ugaagaggacacuaggaaa

SEQ ID NO: 135246 - RNA, 19 nt, Homo sapiens
  misc_RNA (1)...(19): siRNA sense strand
gaaacuugucauucuagau

SEQ ID NO: 135247 - RNA, 19 nt, Homo sapiens
  misc_RNA (1)...(19): siRNA sense strand
caaacaucuccuugcauuu

SEQ ID NO: 135248 - RNA, 19 nt, Homo sapiens
  misc_RNA (1)...(19): siRNA sense strand
gcugcugaaucgaguguuc

SEQ ID NO: 135249 - RNA, 19 nt, Homo sapiens
  misc_RNA (1)...(19): siRNA sense strand
agaagaagccuuuuauguu

SEQ ID NO: 135250 - RNA, 19 nt, Homo sapiens
  misc_RNA (1)...(19): siRNA sense strand
gguacaagugguucuauag

SEQ ID NO: 135251 - RNA, 19 nt, Homo sapiens
  misc_RNA (1)...(19): siRNA sense strand
gguguaaaggaucuuaaga

SEQ ID NO: 135252 - RNA, 19 nt, Homo sapiens
  misc_RNA (1)...(19): siRNA sense strand
aaagaauccagauaugguu

SEQ ID NO: 135253 - RNA, 19 nt, Homo sapiens
  misc_RNA (1)...(19): siRNA sense strand
gggaaaagaauccagauau

SEQ ID NO: 135254 - RNA, 19 nt, Homo sapiens
  misc_RNA (1)...(19): siRNA sense strand
aagaugaagcucuagaaga

SEQ ID NO: 135255 - RNA, 19 nt, Homo sapiens
  misc_RNA (1)...(19): siRNA sense strand
ugaucuagaugacuugaac

SEQ ID NO: 135256 - RNA, 19 nt, Homo sapiens
  misc_RNA (1)...(19): siRNA sense strand
cuacuaugagcaagaagaa

SEQ ID NO: 135257 - RNA, 19 nt, Homo sapiens
  misc_RNA (1)...(19): siRNA sense strand
gauccuacuaugagcaaga

SEQ ID NO: 135258 - RNA, 19 nt, Homo sapiens
  misc_RNA (1)...(19): siRNA sense strand
aaacaucuccuugcauuuu

SEQ ID NO: 135259 - RNA, 19 nt, Homo sapiens
  misc_RNA (1)...(19): siRNA sense strand
gagaaaaggaaauuuguca

SEQ ID NO: 135260 - RNA, 19 nt, Homo sapiens
  misc_RNA (1)...(19): siRNA sense strand
gaaaagaauccagauaugg

SEQ ID NO: 135261 - RNA, 19 nt, Homo sapiens
  misc_RNA (1)...(19): siRNA sense strand
gaagaugaagacaacaaaa

SEQ ID NO: 135262 - RNA, 19 nt, Homo sapiens
  misc_RNA (1)...(19): siRNA sense strand
agaagaugaagacaacaaa

SEQ ID NO: 135263 - RNA, 19 nt, Homo sapiens
  misc_RNA (1)...(19): siRNA sense strand
uagaagaugaagacaacaa

SEQ ID NO: 135264 - RNA, 19 nt, Homo sapiens
  misc_RNA (1)...(19): siRNA sense strand
gaugacuugaacuucuuua

SEQ ID NO: 135265 - RNA, 19 nt, Homo sapiens
  misc_RNA (1)...(19): siRNA sense strand
aaaagaugcuucugaugau

SEQ ID NO: 135266 - RNA, 19 nt, Homo sapiens
  misc_RNA (1)...(19): siRNA sense strand
aaagaugcuucugaugauc

SEQ ID NO: 135267 - RNA, 19 nt, Homo sapiens
  misc_RNA (1)...(19): siRNA sense strand
gaagaagaagccuuuuaug

SEQ ID NO: 135268 - RNA, 19 nt, Homo sapiens
  misc_RNA (1)...(19): siRNA sense strand
guucccagaugaggaugaa

SEQ ID NO: 135269 - RNA, 19 nt, Homo sapiens
  misc_RNA (1)...(19): siRNA sense strand
gaagcugaagaagguguaa

SEQ ID NO: 135270 - RNA, 19 nt, Homo sapiens
  misc_RNA (1)...(19): siRNA sense strand
ucaugaaaccuccacaagu

SEQ ID NO: 135271 - RNA, 19 nt, Homo sapiens
  misc_RNA (1)...(19): siRNA sense strand
cggacacaauccugcagaa

SEQ ID NO: 135272 - RNA, 19 nt, Homo sapiens
  misc_RNA (1)...(19): siRNA sense strand
uagaaaaugucuugagaag

SEQ ID NO: 135273 - RNA, 19 nt, Homo sapiens
  misc_RNA (1)...(19): siRNA sense strand
ccgaguaggaaccaagaaa

SEQ ID NO: 135274 - RNA, 19 nt, Homo sapiens
  misc_RNA (1)...(19): siRNA sense strand
aagaagguguaaaggaucu

SEQ ID NO: 135275 - RNA, 19 nt, Homo sapiens
  misc_RNA (1)...(19): siRNA sense strand
gccgaucaccggacacaau

SEQ ID NO: 135276 - RNA, 19 nt, Homo sapiens
  misc_RNA (1)...(19): siRNA sense strand
gaugaagaggacacuagga

SEQ ID NO: 135277 - RNA, 19 nt, Homo sapiens
  misc_RNA (1)...(19): siRNA sense strand
aaacccagccuucagaaac

SEQ ID NO: 135278 - RNA, 19 nt, Homo sapiens
  misc_RNA (1)...(19): siRNA sense strand
uaaguucccagaugaggau

SEQ ID NO: 135279 - RNA, 19 nt, Homo sapiens
  misc_RNA (1)...(19): siRNA sense strand
aaagagacuacacauacga

SEQ ID NO: 135280 - RNA, 19 nt, Homo sapiens
  misc_RNA (1)...(19): siRNA sense strand
ggacacaauccugcagaag

SEQ ID NO: 135281 - RNA, 19 nt, Homo sapiens
  misc_RNA (1)...(19): siRNA sense strand
gcagacagcuucucaauau

SEQ ID NO: 135282 - RNA, 19 nt, Homo sapiens
  misc_RNA (1)...(19): siRNA sense strand
gcacauuccuugacuauau

SEQ ID NO: 135283 - RNA, 19 nt, Homo sapiens
  misc_RNA (1)...(19): siRNA sense strand
cagaaaggauuaagaauug

SEQ ID NO: 135284 - RNA, 19 nt, Homo sapiens
  misc_RNA (1)...(19): siRNA sense strand
ccauuaagguggaguguua

SEQ ID NO: 135285 - RNA, 19 nt, Homo sapiens
  misc_RNA (1)...(19): siRNA sense strand
gcagguaucacaugaauuu

SEQ ID NO: 135286 - RNA, 19 nt, Homo sapiens
  misc_RNA (1)...(19): siRNA sense strand
ucacaugaauuuccaauga

SEQ ID NO: 135287 - RNA, 19 nt, Homo sapiens
  misc_RNA (1)...(19): siRNA sense strand
gauaagauguuuccagcuu

SEQ ID NO: 135288 - RNA, 19 nt, Homo sapiens
  misc_RNA (1)...(19): siRNA sense strand
gcacagaaaggauuaagaa

SEQ ID NO: 135289 - RNA, 19 nt, Homo sapiens
  misc_RNA (1)...(19): siRNA sense strand
gaaacuggcuaaugguuca

SEQ ID NO: 135290 - RNA, 19 nt, Homo sapiens
  misc_RNA (1)...(19): siRNA sense strand
gauggaaacuggcuaaugg

SEQ ID NO: 135291 - RNA, 19 nt, Homo sapiens
  misc_RNA (1)...(19): siRNA sense strand
gaaguggccaucagagaua

SEQ ID NO: 135292 - RNA, 19 nt, Homo sapiens
  misc_RNA (1)...(19): siRNA sense strand
gagugaugaugacuucuua

SEQ ID NO: 135293 - RNA, 19 nt, Homo sapiens
  misc_RNA (1)...(19): siRNA sense strand
ccaauggcguuaaugagua

SEQ ID NO: 135294 - RNA, 19 nt, Homo sapiens
  misc_RNA (1)...(19): siRNA sense strand
aagcucaccuguugaauuu

SEQ ID NO: 135295 - RNA, 19 nt, Homo sapiens
  misc_RNA (1)...(19): siRNA sense strand
ggacuucacuggcuccaau

SEQ ID NO: 135296 - RNA, 19 nt, Homo sapiens
  misc_RNA (1)...(19): siRNA sense strand
ucacaaagguggcgcugaa

SEQ ID NO: 135297 - RNA, 19 nt, Homo sapiens
  misc_RNA (1)...(19): siRNA sense strand
gaauucagguguuaucagu

SEQ ID NO: 135298 - RNA, 19 nt, Homo sapiens
  misc_RNA (1)...(19): siRNA sense strand
gaggaugucagcugaauuu

SEQ ID NO: 135299 - RNA, 19 nt, Homo sapiens
  misc_RNA (1)...(19): siRNA sense strand
gugaaacagugugagauua

SEQ ID NO: 135300 - RNA, 19 nt, Homo sapiens
  misc_RNA (1)...(19): siRNA sense strand
ucagagauauuguccaguu

SEQ ID NO: 135301 - RNA, 19 nt, Homo sapiens
  misc_RNA (1)...(19): siRNA sense strand
aaagggagcauuacgauuu

SEQ ID NO: 135302 - RNA, 19 nt, Homo sapiens
  misc_RNA (1)...(19): siRNA sense strand
caucauaauuguuggaguu

SEQ ID NO: 135303 - RNA, 19 nt, Homo sapiens
  misc_RNA (1)...(19): siRNA sense strand
ucacagaccuugaugaaac

SEQ ID NO: 135304 - RNA, 19 nt, Homo sapiens
  misc_RNA (1)...(19): siRNA sense strand
ggacuggucauucaagauu

SEQ ID NO: 135305 - RNA, 19 nt, Homo sapiens
  misc_RNA (1)...(19): siRNA sense strand
caaauuguuuccagcaaga

SEQ ID NO: 135306 - RNA, 19 nt, Homo sapiens
  misc_RNA (1)...(19): siRNA sense strand
gaagcucaccuguugaauu

SEQ ID NO: 135307 - RNA, 19 nt, Homo sapiens
  misc_RNA (1)...(19): siRNA sense strand
gcucaccuguugaauuuga

SEQ ID NO: 135308 - RNA, 19 nt, Homo sapiens
  misc_RNA (1)...(19): siRNA sense strand
guggugggcuacuucaaua

SEQ ID NO: 135309 - RNA, 19 nt, Homo sapiens
  misc_RNA (1)...(19): siRNA sense strand
gaugaaaccagacaagcua

SEQ ID NO: 135310 - RNA, 19 nt, Homo sapiens
  misc_RNA (1)...(19): siRNA sense strand
cagacaagcuauaguuaau

SEQ ID NO: 135311 - RNA, 19 nt, Homo sapiens
  misc_RNA (1)...(19): siRNA sense strand
gaauguacccuuggacaaa

SEQ ID NO: 135312 - RNA, 19 nt, Homo sapiens
  misc_RNA (1)...(19): siRNA sense strand
agaguggucuuguuugaaa

SEQ ID NO: 135313 - RNA, 19 nt, Homo sapiens
  misc_RNA (1)...(19): siRNA sense strand
caacuugaauccuguuugg

SEQ ID NO: 135314 - RNA, 19 nt, Homo sapiens
  misc_RNA (1)...(19): siRNA sense strand
uaaaucacguggccagguu

SEQ ID NO: 135315 - RNA, 19 nt, Homo sapiens
  misc_RNA (1)...(19): siRNA sense strand
uacaagaauucagguguua

SEQ ID NO: 135316 - RNA, 19 nt, Homo sapiens
  misc_RNA (1)...(19): siRNA sense strand
uccagaagcucaccuguug

SEQ ID NO: 135317 - RNA, 19 nt, Homo sapiens
  misc_RNA (1)...(19): siRNA sense strand
gaauacaaguggucaacag

SEQ ID NO: 135318 - RNA, 19 nt, Homo sapiens
  misc_RNA (1)...(19): siRNA sense strand
cuauugagcugagugauga

SEQ ID NO: 135319 - RNA, 19 nt, Homo sapiens
  misc_RNA (1)...(19): siRNA sense strand
ggucuugucuuccucagau

SEQ ID NO: 135320 - RNA, 19 nt, Homo sapiens
  misc_RNA (1)...(19): siRNA sense strand
gguggaguguuaugauuau

SEQ ID NO: 135321 - RNA, 19 nt, Homo sapiens
  misc_RNA (1)...(19): siRNA sense strand
gaacuucaacccauccaau

SEQ ID NO: 135322 - RNA, 19 nt, Homo sapiens
  misc_RNA (1)...(19): siRNA sense strand
uaauagaguggucuuguuu

SEQ ID NO: 135323 - RNA, 19 nt, Homo sapiens
  misc_RNA (1)...(19): siRNA sense strand
cacauuccuugacuauaua

SEQ ID NO: 135324 - RNA, 19 nt, Homo sapiens
  misc_RNA (1)...(19): siRNA sense strand
gaaacagugugagauuaca

SEQ ID NO: 135325 - RNA, 19 nt, Homo sapiens
  misc_RNA (1)...(19): siRNA sense strand
cuacaagaauucagguguu

SEQ ID NO: 135326 - RNA, 19 nt, Homo sapiens
  misc_RNA (1)...(19): siRNA sense strand
ggucuuguuugaaauggaa

SEQ ID NO: 135327 - RNA, 19 nt, Homo sapiens
  misc_RNA (1)...(19): siRNA sense strand
gagauauuguccaguuugu

SEQ ID NO: 135328 - RNA, 19 nt, Homo sapiens
  misc_RNA (1)...(19): siRNA sense strand
agacagcuucucaauauuu

SEQ ID NO: 135329 - RNA, 19 nt, Homo sapiens
  misc_RNA (1)...(19): siRNA sense strand
gacuggucauucaagauua

SEQ ID NO: 135330 - RNA, 19 nt, Homo sapiens
  misc_RNA (1)...(19): siRNA sense strand
ucucuuaacucacuguguu

SEQ ID NO: 135331 - RNA, 19 nt, Homo sapiens
  misc_RNA (1)...(19): siRNA sense strand
gcugagugaugaugacuuc

SEQ ID NO: 135332 - RNA, 19 nt, Homo sapiens
  misc_RNA (1)...(19): siRNA sense strand
ccagacaagcuauaguuaa

SEQ ID NO: 135333 - RNA, 19 nt, Homo sapiens
  misc_RNA (1)...(19): siRNA sense strand
ggaucuauuuggaaaguca

SEQ ID NO: 135334 - RNA, 19 nt, Homo sapiens
  misc_RNA (1)...(19): siRNA sense strand
gcguaucggucuugucuuc

SEQ ID NO: 135335 - RNA, 19 nt, Homo sapiens
  misc_RNA (1)...(19): siRNA sense strand
gagcgcacagaaaggauua

SEQ ID NO: 135336 - RNA, 19 nt, Homo sapiens
  misc_RNA (1)...(19): siRNA sense strand
gaagugguucagaaauuga

SEQ ID NO: 135337 - RNA, 19 nt, Homo sapiens
  misc_RNA (1)...(19): siRNA sense strand
cacaugaauuuccaaugaa

SEQ ID NO: 135338 - RNA, 19 nt, Homo sapiens
  misc_RNA (1)...(19): siRNA sense strand
uuacggagauauggacaaa

SEQ ID NO: 135339 - RNA, 19 nt, Homo sapiens
  misc_RNA (1)...(19): siRNA sense strand
caauggcguuaaugaguau

SEQ ID NO: 135340 - RNA, 19 nt, Homo sapiens
  misc_RNA (1)...(19): siRNA sense strand
caagaacccagccacgaaa

SEQ ID NO: 135341 - RNA, 19 nt, Homo sapiens
  misc_RNA (1)...(19): siRNA sense strand
gacaagcuauaguuaaugc

SEQ ID NO: 135342 - RNA, 19 nt, Homo sapiens
  misc_RNA (1)...(19): siRNA sense strand
gaacauuucagaccaccau

SEQ ID NO: 135343 - RNA, 19 nt, Homo sapiens
  misc_RNA (1)...(19): siRNA sense strand
ccagaaugcuccaaaagaa

SEQ ID NO: 135344 - RNA, 19 nt, Homo sapiens
  misc_RNA (1)...(19): siRNA sense strand
cagagauauuguccaguuu

SEQ ID NO: 135345 - RNA, 19 nt, Homo sapiens
  misc_RNA (1)...(19): siRNA sense strand
gauaauagaguggucuugu

SEQ ID NO: 135346 - RNA, 19 nt, Homo sapiens
  misc_RNA (1)...(19): siRNA sense strand
gaacccagccacgaaacaa

SEQ ID NO: 135347 - RNA, 19 nt, Homo sapiens
  misc_RNA (1)...(19): siRNA sense strand
ccaagaacccagccacgaa

SEQ ID NO: 135348 - RNA, 19 nt, Homo sapiens
  misc_RNA (1)...(19): siRNA sense strand
aaagaagccuccagaagcu

SEQ ID NO: 135349 - RNA, 19 nt, Homo sapiens
  misc_RNA (1)...(19): siRNA sense strand
auagaguggucuuguuuga

SEQ ID NO: 135350 - RNA, 19 nt, Homo sapiens
  misc_RNA (1)...(19): siRNA sense strand
cauaauuguuggaguugga

SEQ ID NO: 135351 - RNA, 19 nt, Homo sapiens
  misc_RNA (1)...(19): siRNA sense strand
gggaggaugucagcugaau

SEQ ID NO: 135352 - RNA, 19 nt, Homo sapiens
  misc_RNA (1)...(19): siRNA sense strand
caaagguggcgcugaaugu

SEQ ID NO: 135353 - RNA, 19 nt, Homo sapiens
  misc_RNA (1)...(19): siRNA sense strand
ucuauggaccaacuaauuu

SEQ ID NO: 135354 - RNA, 19 nt, Homo sapiens
  misc_RNA (1)...(19): siRNA sense strand
gaaaccagacaagcuauag

SEQ ID NO: 135355 - RNA, 19 nt, Homo sapiens
  misc_RNA (1)...(19): siRNA sense strand
gcaggaaaagggagcauua

SEQ ID NO: 135356 - RNA, 19 nt, Homo sapiens
  misc_RNA (1)...(19): siRNA sense strand
ugacugcucucuggucugu

SEQ ID NO: 135357 - RNA, 19 nt, Homo sapiens
  misc_RNA (1)...(19): siRNA sense strand
caaguggucaacaguggua

SEQ ID NO: 135358 - RNA, 19 nt, Homo sapiens
  misc_RNA (1)...(19): siRNA sense strand
auaauagaguggucuuguu

SEQ ID NO: 135359 - RNA, 19 nt, Homo sapiens
  misc_RNA (1)...(19): siRNA sense strand
uuuaugacaucgacaacaa

SEQ ID NO: 135360 - RNA, 19 nt, Homo sapiens
  misc_RNA (1)...(19): siRNA sense strand
gaaacaacagaagcaguga

SEQ ID NO: 135361 - RNA, 19 nt, Homo sapiens
  misc_RNA (1)...(19): siRNA sense strand
ucagacaguuccagaaugc

SEQ ID NO: 135362 - RNA, 19 nt, Homo sapiens
  misc_RNA (1)...(19): siRNA sense strand
gcucagauaccuccucagu

SEQ ID NO: 135363 - RNA, 19 nt, Homo sapiens
  misc_RNA (1)...(19): siRNA sense strand
ggauuaagaauugcuugaa

SEQ ID NO: 135364 - RNA, 19 nt, Homo sapiens
  misc_RNA (1)...(19): siRNA sense strand
cagacucccuucauuacau

SEQ ID NO: 135365 - RNA, 19 nt, Homo sapiens
  misc_RNA (1)...(19): siRNA sense strand
aaagauauagggucaaagu

SEQ ID NO: 135366 - RNA, 19 nt, Homo sapiens
  misc_RNA (1)...(19): siRNA sense strand
gagguugagcgcacagaaa

SEQ ID NO: 135367 - RNA, 19 nt, Homo sapiens
  misc_RNA (1)...(19): siRNA sense strand
cagacagcuucucaauauu

SEQ ID NO: 135368 - RNA, 19 nt, Homo sapiens
  misc_RNA (1)...(19): siRNA sense strand
uggcagguaucacaugaau

SEQ ID NO: 135369 - RNA, 19 nt, Homo sapiens
  misc_RNA (1)...(19): siRNA sense strand
ucuccagacucccuucauu

SEQ ID NO: 135370 - RNA, 19 nt, Homo sapiens
  misc_RNA (1)...(19): siRNA sense strand
gaugucagcugaauuuuac

SEQ ID NO: 135371 - RNA, 19 nt, Homo sapiens
  misc_RNA (1)...(19): siRNA sense strand
ugaaagaagccuccagaag

SEQ ID NO: 135372 - RNA, 19 nt, Homo sapiens
  misc_RNA (1)...(19): siRNA sense strand
aaugaugggucacaugauc

SEQ ID NO: 135373 - RNA, 19 nt, Homo sapiens
  misc_RNA (1)...(19): siRNA sense strand
aagguggaguguuaugauu

SEQ ID NO: 135374 - RNA, 19 nt, Homo sapiens
  misc_RNA (1)...(19): siRNA sense strand
ugggcuacuucaauacaua

SEQ ID NO: 135375 - RNA, 19 nt, Homo sapiens
  misc_RNA (1)...(19): siRNA sense strand
ggauggugaugguggaagu

SEQ ID NO: 135376 - RNA, 19 nt, Homo sapiens
  misc_RNA (1)...(19): siRNA sense strand
gguaucacaugaauuucca

SEQ ID NO: 135377 - RNA, 19 nt, Homo sapiens
  misc_RNA (1)...(19): siRNA sense strand
cagaagcucaccuguugaa

SEQ ID NO: 135378 - RNA, 19 nt, Homo sapiens
  misc_RNA (1)...(19): siRNA sense strand
acaaugaugggucacauga

SEQ ID NO: 135379 - RNA, 19 nt, Homo sapiens
  misc_RNA (1)...(19): siRNA sense strand
agugugagauuacaguaga

SEQ ID NO: 135380 - RNA, 19 nt, Homo sapiens
  misc_RNA (1)...(19): siRNA sense strand
auaagauguuuccagcuuu

SEQ ID NO: 135381 - RNA, 19 nt, Homo sapiens
  misc_RNA (1)...(19): siRNA sense strand
gauauauccuccugaagua

SEQ ID NO: 135382 - RNA, 19 nt, Homo sapiens
  misc_RNA (1)...(19): siRNA sense strand
gaaccuggcuaaguacgua

SEQ ID NO: 135383 - RNA, 19 nt, Homo sapiens
  misc_RNA (1)...(19): siRNA sense strand
ucacaagaaucagguguua

SEQ ID NO: 135384 - RNA, 19 nt, Homo sapiens
  misc_RNA (1)...(19): siRNA sense strand
gcagauccauucuugaaau

SEQ ID NO: 135385 - RNA, 19 nt, Homo sapiens
  misc_RNA (1)...(19): siRNA sense strand
ugaagcagauccauucuug

SEQ ID NO: 135386 - RNA, 19 nt, Homo sapiens
  misc_RNA (1)...(19): siRNA sense strand
ggacugagaaccuggcuaa

SEQ ID NO: 135387 - RNA, 19 nt, Homo sapiens
  misc_RNA (1)...(19): siRNA sense strand
cauaaagcguaccuugaua

SEQ ID NO: 135388 - RNA, 19 nt, Homo sapiens
  misc_RNA (1)...(19): siRNA sense strand
cugagaaccuggcuaagua

SEQ ID NO: 135389 - RNA, 19 nt, Homo sapiens
  misc_RNA (1)...(19): siRNA sense strand
cagaaacccuugcugcauu

SEQ ID NO: 135390 - RNA, 19 nt, Homo sapiens
  misc_RNA (1)...(19): siRNA sense strand
gagcagagacccuguaucu

SEQ ID NO: 135391 - RNA, 19 nt, Homo sapiens
  misc_RNA (1)...(19): siRNA sense strand
cagauccauucuugaaaua

SEQ ID NO: 135392 - RNA, 19 nt, Homo sapiens
  misc_RNA (1)...(19): siRNA sense strand
gacugaauaugcugaagaa

SEQ ID NO: 135393 - RNA, 19 nt, Homo sapiens
  misc_RNA (1)...(19): siRNA sense strand
cuacauggaugaacuagag

SEQ ID NO: 135394 - RNA, 19 nt, Homo sapiens
  misc_RNA (1)...(19): siRNA sense strand
uagggaagcugaaauaagg

SEQ ID NO: 135395 - RNA, 19 nt, Homo sapiens
  misc_RNA (1)...(19): siRNA sense strand
caaacuauacugugaacaa

SEQ ID NO: 135396 - RNA, 19 nt, Homo sapiens
  misc_RNA (1)...(19): siRNA sense strand
agagauauauccuccugaa

SEQ ID NO: 135397 - RNA, 19 nt, Homo sapiens
  misc_RNA (1)...(19): siRNA sense strand
uaaagcguaccuugauaua

SEQ ID NO: 135398 - RNA, 19 nt, Homo sapiens
  misc_RNA (1)...(19): siRNA sense strand
gcaaggguuugacaucuac

SEQ ID NO: 135399 - RNA, 19 nt, Homo sapiens
  misc_RNA (1)...(19): siRNA sense strand
guaucuggcugucaacuuc

SEQ ID NO: 135400 - RNA, 19 nt, Homo sapiens
  misc_RNA (1)...(19): siRNA sense strand
gcaaucauguacccuggau

SEQ ID NO: 135401 - RNA, 19 nt, Homo sapiens
  misc_RNA (1)...(19): siRNA sense strand
gauccauucuugaaauauc

SEQ ID NO: 135402 - RNA, 19 nt, Homo sapiens
  misc_RNA (1)...(19): siRNA sense strand
acaagaaucagguguuauu

SEQ ID NO: 135403 - RNA, 19 nt, Homo sapiens
  misc_RNA (1)...(19): siRNA sense strand
ggagccaccugcaguucuu

SEQ ID NO: 135404 - RNA, 19 nt, Homo sapiens
  misc_RNA (1)...(19): siRNA sense strand
ccaaagcacacuacaugaa

SEQ ID NO: 135405 - RNA, 19 nt, Homo sapiens
  misc_RNA (1)...(19): siRNA sense strand
gcucccagauuucgucuuc

SEQ ID NO: 135406 - RNA, 19 nt, Homo sapiens
  misc_RNA (1)...(19): siRNA sense strand
ggacagguuccuuucaugu

SEQ ID NO: 135407 - RNA, 19 nt, Homo sapiens
  misc_RNA (1)...(19): siRNA sense strand
agaaacccuugcugcauuu

SEQ ID NO: 135408 - RNA, 19 nt, Homo sapiens
  misc_RNA (1)...(19): siRNA sense strand
gcagagcugagucuacuug

SEQ ID NO: 135409 - RNA, 19 nt, Homo sapiens
  misc_RNA (1)...(19): siRNA sense strand
ucccgaugcuugucagaua

SEQ ID NO: 135410 - RNA, 19 nt, Homo sapiens
  misc_RNA (1)...(19): siRNA sense strand
gaaggcaugcgcacgauuc

SEQ ID NO: 135411 - RNA, 19 nt, Homo sapiens
  misc_RNA (1)...(19): siRNA sense strand
gaaagcacucccugacugu

SEQ ID NO: 135412 - RNA, 19 nt, Homo sapiens
  misc_RNA (1)...(19): siRNA sense strand
gagaggggauggcauuuga

SEQ ID NO: 135413 - RNA, 19 nt, Homo sapiens
  misc_RNA (1)...(19): siRNA sense strand
gacagguuccuuucaugua

SEQ ID NO: 135414 - RNA, 19 nt, Homo sapiens
  misc_RNA (1)...(19): siRNA sense strand
acagguuccuuucauguau

SEQ ID NO: 135415 - RNA, 19 nt, Homo sapiens
  misc_RNA (1)...(19): siRNA sense strand
caguucuucuucuacaaua

SEQ ID NO: 135416 - RNA, 19 nt, Homo sapiens
  misc_RNA (1)...(19): siRNA sense strand
gguuugacaucuacaugga

SEQ ID NO: 135417 - RNA, 19 nt, Homo sapiens
  misc_RNA (1)...(19): siRNA sense strand
gagcugagucuacuugaag

SEQ ID NO: 135418 - RNA, 19 nt, Homo sapiens
  misc_RNA (1)...(19): siRNA sense strand
gaagaagcagccagacauc

SEQ ID NO: 135419 - RNA, 19 nt, Homo sapiens
  misc_RNA (1)...(19): siRNA sense strand
ggauggcauuugaggaugu

SEQ ID NO: 135420 - RNA, 19 nt, Homo sapiens
  misc_RNA (1)...(19): siRNA sense strand
gcaauuagggagaaguaca

SEQ ID NO: 135421 - RNA, 19 nt, Homo sapiens
  misc_RNA (1)...(19): siRNA sense strand
ucauguaugucuguucuga

SEQ ID NO: 135422 - RNA, 19 nt, Homo sapiens
  misc_RNA (1)...(19): siRNA sense strand
aaagcacacuacaugaaga

SEQ ID NO: 135423 - RNA, 19 nt, Homo sapiens
  misc_RNA (1)...(19): siRNA sense strand
gaaacugcagcucguagga

SEQ ID NO: 135424 - RNA, 19 nt, Homo sapiens
  misc_RNA (1)...(19): siRNA sense strand
cauuugaggauguguauga

SEQ ID NO: 135425 - RNA, 19 nt, Homo sapiens
  misc_RNA (1)...(19): siRNA sense strand
aagcagauccauucuugaa

SEQ ID NO: 135426 - RNA, 19 nt, Homo sapiens
  misc_RNA (1)...(19): siRNA sense strand
gaacacuugcuucugaaag

SEQ ID NO: 135427 - RNA, 19 nt, Homo sapiens
  misc_RNA (1)...(19): siRNA sense strand
ggauguguaugaaguagac

SEQ ID NO: 135428 - RNA, 19 nt, Homo sapiens
  misc_RNA (1)...(19): siRNA sense strand
gaguugugcuggcuacagu

SEQ ID NO: 135429 - RNA, 19 nt, Homo sapiens
  misc_RNA (1)...(19): siRNA sense strand
cguggagucugaagcaaug

SEQ ID NO: 135430 - RNA, 19 nt, Homo sapiens
  misc_RNA (1)...(19): siRNA sense strand
aguacaaggcuucaaagua

SEQ ID NO: 135431 - RNA, 19 nt, Homo sapiens
  misc_RNA (1)...(19): siRNA sense strand
ccaaccaguuucuccuuca

SEQ ID NO: 135432 - RNA, 19 nt, Homo sapiens
  misc_RNA (1)...(19): siRNA sense strand
caaagcacacuacaugaag

SEQ ID NO: 135433 - RNA, 19 nt, Homo sapiens
  misc_RNA (1)...(19): siRNA sense strand
gaggauguguaugaaguag

SEQ ID NO: 135434 - RNA, 19 nt, Homo sapiens
  misc_RNA (1)...(19): siRNA sense strand
gcaguucuucuucuacaau

SEQ ID NO: 135435 - RNA, 19 nt, Homo sapiens
  misc_RNA (1)...(19): siRNA sense strand
ucaaaguaccugugugugu

SEQ ID NO: 135436 - RNA, 19 nt, Homo sapiens
  misc_RNA (1)...(19): siRNA sense strand
ucauaaagcguaccuugau

SEQ ID NO: 135437 - RNA, 19 nt, Homo sapiens
  misc_RNA (1)...(19): siRNA sense strand
gaagcagauccauucuuga

SEQ ID NO: 135438 - RNA, 19 nt, Homo sapiens
  misc_RNA (1)...(19): siRNA sense strand
uagcagagcugagucuacu

SEQ ID NO: 135439 - RNA, 19 nt, Homo sapiens
  misc_RNA (1)...(19): siRNA sense strand
cucccagucugaagauaua

SEQ ID NO: 135440 - RNA, 19 nt, Homo sapiens
  misc_RNA (1)...(19): siRNA sense strand
guagacaccggcacacuca

SEQ ID NO: 135441 - RNA, 19 nt, Homo sapiens
  misc_RNA (1)...(19): siRNA sense strand
auggaacacuugcuucuga

SEQ ID NO: 135442 - RNA, 19 nt, Homo sapiens
  misc_RNA (1)...(19): siRNA sense strand
caacacaguuuccccuaug

SEQ ID NO: 135443 - RNA, 19 nt, Homo sapiens
  misc_RNA (1)...(19): siRNA sense strand
gaaacccuugcugcauuua

SEQ ID NO: 135444 - RNA, 19 nt, Homo sapiens
  misc_RNA (1)...(19): siRNA sense strand
aaacuauacugugaacaag

SEQ ID NO: 135445 - RNA, 19 nt, Homo sapiens
  misc_RNA (1)...(19): siRNA sense strand
guacguagcagagcugagu

SEQ ID NO: 135446 - RNA, 19 nt, Homo sapiens
  misc_RNA (1)...(19): siRNA sense strand
ggaacacuugcuucugaaa

SEQ ID NO: 135447 - RNA, 19 nt, Homo sapiens
  misc_RNA (1)...(19): siRNA sense strand
ccuuagggaagcugaaaua

SEQ ID NO: 135448 - RNA, 19 nt, Homo sapiens
  misc_RNA (1)...(19): siRNA sense strand
ucauguacccuggaucuuu

SEQ ID NO: 135449 - RNA, 19 nt, Homo sapiens
  misc_RNA (1)...(19): siRNA sense strand
uaaaugugacugaauaugc

SEQ ID NO: 135450 - RNA, 19 nt, Homo sapiens
  misc_RNA (1)...(19): siRNA sense strand
uacaggguauucauuaagu

SEQ ID NO: 135451 - RNA, 19 nt, Homo sapiens
  misc_RNA (1)...(19): siRNA sense strand
ugaagaagcagccagacau

SEQ ID NO: 135452 - RNA, 19 nt, Homo sapiens
  misc_RNA (1)...(19): siRNA sense strand
cgaccucagcaagcaauua

SEQ ID NO: 135453 - RNA, 19 nt, Homo sapiens
  misc_RNA (1)...(19): siRNA sense strand
caauuagggagaaguacaa

SEQ ID NO: 135454 - RNA, 19 nt, Homo sapiens
  misc_RNA (1)...(19): siRNA sense strand
acagaugugauaaauguga

SEQ ID NO: 135455 - RNA, 19 nt, Homo sapiens
  misc_RNA (1)...(19): siRNA sense strand
ccgaugauacauacacaaa

SEQ ID NO: 135456 - RNA, 19 nt, Homo sapiens
  misc_RNA (1)...(19): siRNA sense strand
caagcaaggguuugacauc

SEQ ID NO: 135457 - RNA, 19 nt, Homo sapiens
  misc_RNA (1)...(19): siRNA sense strand
cuggcaaacuauacuguga

SEQ ID NO: 135458 - RNA, 19 nt, Homo sapiens
  misc_RNA (1)...(19): siRNA sense strand
agauauauccuccugaagu

SEQ ID NO: 135459 - RNA, 19 nt, Homo sapiens
  misc_RNA (1)...(19): siRNA sense strand
cacacuacaugaagaagca

SEQ ID NO: 135460 - RNA, 19 nt, Homo sapiens
  misc_RNA (1)...(19): siRNA sense strand
cugaauaugcugaagaaau

SEQ ID NO: 135461 - RNA, 19 nt, Homo sapiens
  misc_RNA (1)...(19): siRNA sense strand
ugugauaaaugugacugaa

SEQ ID NO: 135462 - RNA, 19 nt, Homo sapiens
  misc_RNA (1)...(19): siRNA sense strand
aaauaucuuccuucacuga

SEQ ID NO: 135463 - RNA, 19 nt, Homo sapiens
  misc_RNA (1)...(19): siRNA sense strand
agcaaggguuugacaucua

SEQ ID NO: 135464 - RNA, 19 nt, Homo sapiens
  misc_RNA (1)...(19): siRNA sense strand
gaccucagcaagcaauuag

SEQ ID NO: 135465 - RNA, 19 nt, Homo sapiens
  misc_RNA (1)...(19): siRNA sense strand
gaucugacaguaccaacca

SEQ ID NO: 135466 - RNA, 19 nt, Homo sapiens
  misc_RNA (1)...(19): siRNA sense strand
gaugauacauacacaaaac

SEQ ID NO: 135467 - RNA, 19 nt, Homo sapiens
  misc_RNA (1)...(19): siRNA sense strand
ggaaggcaugcgcacgauu

SEQ ID NO: 135468 - RNA, 19 nt, Homo sapiens
  misc_RNA (1)...(19): siRNA sense strand
ugacugaauaugcugaaga

SEQ ID NO: 135469 - RNA, 19 nt, Homo sapiens
  misc_RNA (1)...(19): siRNA sense strand
cugaagauauauccagucu

SEQ ID NO: 135470 - RNA, 19 nt, Homo sapiens
  misc_RNA (1)...(19): siRNA sense strand
cauguacccuggaucuuuu

SEQ ID NO: 135471 - RNA, 19 nt, Homo sapiens
  misc_RNA (1)...(19): siRNA sense strand
gcaagcaauuagggagaag

SEQ ID NO: 135472 - RNA, 19 nt, Homo sapiens
  misc_RNA (1)...(19): siRNA sense strand
cagguguuauucuggauca

SEQ ID NO: 135473 - RNA, 19 nt, Homo sapiens
  misc_RNA (1)...(19): siRNA sense strand
agagcugagucuacuugaa

SEQ ID NO: 135474 - RNA, 19 nt, Homo sapiens
  misc_RNA (1)...(19): siRNA sense strand
accaguuucuccuucagua

SEQ ID NO: 135475 - RNA, 19 nt, Homo sapiens
  misc_RNA (1)...(19): siRNA sense strand
uauccagucuuggcacaga

SEQ ID NO: 135476 - RNA, 19 nt, Homo sapiens
  misc_RNA (1)...(19): siRNA sense strand
aagcaaggguuugacaucu

SEQ ID NO: 135477 - RNA, 19 nt, Homo sapiens
  misc_RNA (1)...(19): siRNA sense strand
ggcaaacuauacugugaac

SEQ ID NO: 135478 - RNA, 19 nt, Homo sapiens
  misc_RNA (1)...(19): siRNA sense strand
gagucuacuugaagcagau

SEQ ID NO: 135479 - RNA, 19 nt, Homo sapiens
  misc_RNA (1)...(19): siRNA sense strand
uggaacacuugcuucugaa

SEQ ID NO: 135480 - RNA, 19 nt, Homo sapiens
  misc_RNA (1)...(19): siRNA sense strand
aaaugugacugaauaugcu

SEQ ID NO: 135481 - RNA, 19 nt, Homo sapiens
  misc_RNA (1)...(19): siRNA sense strand
ccacacaacuggucucaua

SEQ ID NO: 135482 - RNA, 19 nt, Homo sapiens
  misc_RNA (1)...(19): siRNA sense strand
gaucugaggucaucaagaa

SEQ ID NO: 135483 - RNA, 19 nt, Homo sapiens
  misc_RNA (1)...(19): siRNA sense strand
ggucucagcucaggaauua

SEQ ID NO: 135484 - RNA, 19 nt, Homo sapiens
  misc_RNA (1)...(19): siRNA sense strand
ccagaaaccuagauaagaa

SEQ ID NO: 135485 - RNA, 19 nt, Homo sapiens
  misc_RNA (1)...(19): siRNA sense strand
caacuggucucauacuuca

SEQ ID NO: 135486 - RNA, 19 nt, Homo sapiens
  misc_RNA (1)...(19): siRNA sense strand
ggacuucacuggcuccaau

SEQ ID NO: 135487 - RNA, 19 nt, Homo sapiens
  misc_RNA (1)...(19): siRNA sense strand
guacagaucugaggucauc

SEQ ID NO: 135488 - RNA, 19 nt, Homo sapiens
  misc_RNA (1)...(19): siRNA sense strand
aaaggacaaucguguagua

SEQ ID NO: 135489 - RNA, 19 nt, Homo sapiens
  misc_RNA (1)...(19): siRNA sense strand
gcaggucucgcaugaauuu

SEQ ID NO: 135490 - RNA, 19 nt, Homo sapiens
  misc_RNA (1)...(19): siRNA sense strand
caagaacucuggaacuauc

SEQ ID NO: 135491 - RNA, 19 nt, Homo sapiens
  misc_RNA (1)...(19): siRNA sense strand
caacaggggucaaugagua

SEQ ID NO: 135492 - RNA, 19 nt, Homo sapiens
  misc_RNA (1)...(19): siRNA sense strand
uacaagaacucuggaacua

SEQ ID NO: 135493 - RNA, 19 nt, Homo sapiens
  misc_RNA (1)...(19): siRNA sense strand
gcugagggaugaugacuuc

SEQ ID NO: 135494 - RNA, 19 nt, Homo sapiens
  misc_RNA (1)...(19): siRNA sense strand
gcaugaauuugccuugaau

SEQ ID NO: 135495 - RNA, 19 nt, Homo sapiens
  misc_RNA (1)...(19): siRNA sense strand
gagggaugaugacuuccua

SEQ ID NO: 135496 - RNA, 19 nt, Homo sapiens
  misc_RNA (1)...(19): siRNA sense strand
ggacaucggcuccaagucu

SEQ ID NO: 135497 - RNA, 19 nt, Homo sapiens
  misc_RNA (1)...(19): siRNA sense strand
cgccagagcugagggauga

SEQ ID NO: 135498 - RNA, 19 nt, Homo sapiens
  misc_RNA (1)...(19): siRNA sense strand
ggaacuauccgugucaaga

SEQ ID NO: 135499 - RNA, 19 nt, Homo sapiens
  misc_RNA (1)...(19): siRNA sense strand
gaacuauccgugucaagau

SEQ ID NO: 135500 - RNA, 19 nt, Homo sapiens
  misc_RNA (1)...(19): siRNA sense strand
caagauuugucggguagaa

SEQ ID NO: 135501 - RNA, 19 nt, Homo sapiens
  misc_RNA (1)...(19): siRNA sense strand
gcagcgugguucaggacua

SEQ ID NO: 135502 - RNA, 19 nt, Homo sapiens
  misc_RNA (1)...(19): siRNA sense strand
gcuguucccugcauuugga

SEQ ID NO: 135503 - RNA, 19 nt, Homo sapiens
  misc_RNA (1)...(19): siRNA sense strand
agaaacagaguacuccuuu

SEQ ID NO: 135504 - RNA, 19 nt, Homo sapiens
  misc_RNA (1)...(19): siRNA sense strand
gguagaggccagaaaccua

SEQ ID NO: 135505 - RNA, 19 nt, Homo sapiens
  misc_RNA (1)...(19): siRNA sense strand
gugcaaugcuccgauuaug

SEQ ID NO: 135506 - RNA, 19 nt, Homo sapiens
  misc_RNA (1)...(19): siRNA sense strand
uggcaggucucgcaugaau

SEQ ID NO: 135507 - RNA, 19 nt, Homo sapiens
  misc_RNA (1)...(19): siRNA sense strand
ggacaaucguguaguaacc

SEQ ID NO: 135508 - RNA, 19 nt, Homo sapiens
  misc_RNA (1)...(19): siRNA sense strand
cuauggcccuaccaacuuu

SEQ ID NO: 135509 - RNA, 19 nt, Homo sapiens
  misc_RNA (1)...(19): siRNA sense strand
gaaugcauccacccugaga

SEQ ID NO: 135510 - RNA, 19 nt, Homo sapiens
  misc_RNA (1)...(19): siRNA sense strand
gccagaaaccuagauaaga

SEQ ID NO: 135511 - RNA, 19 nt, Homo sapiens
  misc_RNA (1)...(19): siRNA sense strand
gcuacgcuuuggaaucuau

SEQ ID NO: 135512 - RNA, 19 nt, Homo sapiens
  misc_RNA (1)...(19): siRNA sense strand
gugaccaucucauugacaa

SEQ ID NO: 135513 - RNA, 19 nt, Homo sapiens
  misc_RNA (1)...(19): siRNA sense strand
gaugggaggcugucagauc

SEQ ID NO: 135514 - RNA, 19 nt, Homo sapiens
  misc_RNA (1)...(19): siRNA sense strand
gacaagcuguucccugcau

SEQ ID NO: 135515 - RNA, 19 nt, Homo sapiens
  misc_RNA (1)...(19): siRNA sense strand
ggacugccucgcaauacuu

SEQ ID NO: 135516 - RNA, 19 nt, Homo sapiens
  misc_RNA (1)...(19): siRNA sense strand
gacccacucugcguccuuu

SEQ ID NO: 135517 - RNA, 19 nt, Homo sapiens
  misc_RNA (1)...(19): siRNA sense strand
caacuuugcacccaucauc

SEQ ID NO: 135518 - RNA, 19 nt, Homo sapiens
  misc_RNA (1)...(19): siRNA sense strand
ccaugucagugaucauugu

SEQ ID NO: 135519 - RNA, 19 nt, Homo sapiens
  misc_RNA (1)...(19): siRNA sense strand
gagcuuggccggacugaac

SEQ ID NO: 135520 - RNA, 19 nt, Homo sapiens
  misc_RNA (1)...(19): siRNA sense strand
ccucgaaccugcccauguc

SEQ ID NO: 135521 - RNA, 19 nt, Homo sapiens
  misc_RNA (1)...(19): siRNA sense strand
ggaauuaaaggacaaucgu

SEQ ID NO: 135522 - RNA, 19 nt, Homo sapiens
  misc_RNA (1)...(19): siRNA sense strand
caggugcaaugcuccgauu

SEQ ID NO: 135523 - RNA, 19 nt, Homo sapiens
  misc_RNA (1)...(19): siRNA sense strand
ucgcagaagugcccacaca

SEQ ID NO: 135524 - RNA, 19 nt, Homo sapiens
  misc_RNA (1)...(19): siRNA sense strand
ucucagcucaggaauuaaa

SEQ ID NO: 135525 - RNA, 19 nt, Homo sapiens
  misc_RNA (1)...(19): siRNA sense strand
aaacagaguacuccuuucu

SEQ ID NO: 135526 - RNA, 19 nt, Homo sapiens
  misc_RNA (1)...(19): siRNA sense strand
cagcuugaguaccgcuuug

SEQ ID NO: 135527 - RNA, 19 nt, Homo sapiens
  misc_RNA (1)...(19): siRNA sense strand
cacaacuggucucauacuu

SEQ ID NO: 135528 - RNA, 19 nt, Homo sapiens
  misc_RNA (1)...(19): siRNA sense strand
cgcaauacuucaugcuguu

SEQ ID NO: 135529 - RNA, 19 nt, Homo sapiens
  misc_RNA (1)...(19): siRNA sense strand
guacuccuuucuggacuau

SEQ ID NO: 135530 - RNA, 19 nt, Homo sapiens
  misc_RNA (1)...(19): siRNA sense strand
gauuguguccagccaggua

SEQ ID NO: 135531 - RNA, 19 nt, Homo sapiens
  misc_RNA (1)...(19): siRNA sense strand
ggagguagaggccagaaac

SEQ ID NO: 135532 - RNA, 19 nt, Homo sapiens
  misc_RNA (1)...(19): siRNA sense strand
cgcaugaauuugccuugaa

SEQ ID NO: 135533 - RNA, 19 nt, Homo sapiens
  misc_RNA (1)...(19): siRNA sense strand
ugguucagcuguccauuuc

SEQ ID NO: 135534 - RNA, 19 nt, Homo sapiens
  misc_RNA (1)...(19): siRNA sense strand
cagcgugguucaggacuau

SEQ ID NO: 135535 - RNA, 19 nt, Homo sapiens
  misc_RNA (1)...(19): siRNA sense strand
gaggccagaaaccuagaua

SEQ ID NO: 135536 - RNA, 19 nt, Homo sapiens
  misc_RNA (1)...(19): siRNA sense strand
caagcuguucccugcauuu

SEQ ID NO: 135537 - RNA, 19 nt, Homo sapiens
  misc_RNA (1)...(19): siRNA sense strand
ggucaaugaguaccugaug

SEQ ID NO: 135538 - RNA, 19 nt, Homo sapiens
  misc_RNA (1)...(19): siRNA sense strand
cggcugaguuugaaugcau

SEQ ID NO: 135539 - RNA, 19 nt, Homo sapiens
  misc_RNA (1)...(19): siRNA sense strand
ggcagucccggcugaguuu

SEQ ID NO: 135540 - RNA, 19 nt, Homo sapiens
  misc_RNA (1)...(19): siRNA sense strand
cauggaagcguuucucagu

SEQ ID NO: 135541 - RNA, 19 nt, Homo sapiens
  misc_RNA (1)...(19): siRNA sense strand
ggccagaaaccuagauaag

SEQ ID NO: 135542 - RNA, 19 nt, Homo sapiens
  misc_RNA (1)...(19): siRNA sense strand
gcccugaguucuccaagac

SEQ ID NO: 135543 - RNA, 19 nt, Homo sapiens
  misc_RNA (1)...(19): siRNA sense strand
uguggguggugcugacuuu

SEQ ID NO: 135544 - RNA, 19 nt, Homo sapiens
  misc_RNA (1)...(19): siRNA sense strand
acaaggacaucggcuccaa

SEQ ID NO: 135545 - RNA, 19 nt, Homo sapiens
  misc_RNA (1)...(19): siRNA sense strand
ccugugaccaucucauuga

SEQ ID NO: 135546 - RNA, 19 nt, Homo sapiens
  misc_RNA (1)...(19): siRNA sense strand
ccgccagggugaugggaaa

SEQ ID NO: 135547 - RNA, 19 nt, Homo sapiens
  misc_RNA (1)...(19): siRNA sense strand
gcagaagugcccacacaac

SEQ ID NO: 135548 - RNA, 19 nt, Homo sapiens
  misc_RNA (1)...(19): siRNA sense strand
gcaauacuucaugcuguug

SEQ ID NO: 135549 - RNA, 19 nt, Homo sapiens
  misc_RNA (1)...(19): siRNA sense strand
gcaggcauccagggcauug

SEQ ID NO: 135550 - RNA, 19 nt, Homo sapiens
  misc_RNA (1)...(19): siRNA sense strand
ucgcaugaauuugccuuga

SEQ ID NO: 135551 - RNA, 19 nt, Homo sapiens
  misc_RNA (1)...(19): siRNA sense strand
cuccaagacucuacagcuu

SEQ ID NO: 135552 - RNA, 19 nt, Homo sapiens
  misc_RNA (1)...(19): siRNA sense strand
ggugcaaugcuccgauuau

SEQ ID NO: 135553 - RNA, 19 nt, Homo sapiens
  misc_RNA (1)...(19): siRNA sense strand
gggacugccucgcaauacu

SEQ ID NO: 135554 - RNA, 19 nt, Homo sapiens
  misc_RNA (1)...(19): siRNA sense strand
acuggcaggucucgcauga

SEQ ID NO: 135555 - RNA, 19 nt, Homo sapiens
  misc_RNA (1)...(19): siRNA sense strand
ucaccugacucccuacacu

SEQ ID NO: 135556 - RNA, 19 nt, Homo sapiens
  misc_RNA (1)...(19): siRNA sense strand
gcgacauugugcaguuugu

SEQ ID NO: 135557 - RNA, 19 nt, Homo sapiens
  misc_RNA (1)...(19): siRNA sense strand
uaguaaccauggagguaga

SEQ ID NO: 135558 - RNA, 19 nt, Homo sapiens
  misc_RNA (1)...(19): siRNA sense strand
gcccaugucagugaucauu

SEQ ID NO: 135559 - RNA, 19 nt, Homo sapiens
  misc_RNA (1)...(19): siRNA sense strand
gaacaaccugaacccuaca

SEQ ID NO: 135560 - RNA, 19 nt, Homo sapiens
  misc_RNA (1)...(19): siRNA sense strand
gaaaccuagauaagaagga

SEQ ID NO: 135561 - RNA, 19 nt, Homo sapiens
  misc_RNA (1)...(19): siRNA sense strand
gcuuugagacaguccagaa

SEQ ID NO: 135562 - RNA, 19 nt, Homo sapiens
  misc_RNA (1)...(19): siRNA sense strand
aacuauccgugucaagauu

SEQ ID NO: 135563 - RNA, 19 nt, Homo sapiens
  misc_RNA (1)...(19): siRNA sense strand
agaccgugcucgcagaagu

SEQ ID NO: 135564 - RNA, 19 nt, Homo sapiens
  misc_RNA (1)...(19): siRNA sense strand
ccgcgacauugugcaguuu

SEQ ID NO: 135565 - RNA, 19 nt, Homo sapiens
  misc_RNA (1)...(19): siRNA sense strand
gaggcugucagaucaacuu

SEQ ID NO: 135566 - RNA, 19 nt, Homo sapiens
  misc_RNA (1)...(19): siRNA sense strand
gcuuuggaaucuaugacau

SEQ ID NO: 135567 - RNA, 19 nt, Homo sapiens
  misc_RNA (1)...(19): siRNA sense strand
cgacauugugcaguuugua

SEQ ID NO: 135568 - RNA, 19 nt, Homo sapiens
  misc_RNA (1)...(19): siRNA sense strand
uguaguaaccauggaggua

SEQ ID NO: 135569 - RNA, 19 nt, Homo sapiens
  misc_RNA (1)...(19): siRNA sense strand
gcugucagaucaacuucac

SEQ ID NO: 135570 - RNA, 19 nt, Homo sapiens
  misc_RNA (1)...(19): siRNA sense strand
uuaaaggacaaucguguag

SEQ ID NO: 135571 - RNA, 19 nt, Homo sapiens
  misc_RNA (1)...(19): siRNA sense strand
ucuauggcccuaccaacuu

SEQ ID NO: 135572 - RNA, 19 nt, Homo sapiens
  misc_RNA (1)...(19): siRNA sense strand
augggaggcugucagauca

SEQ ID NO: 135573 - RNA, 19 nt, Homo sapiens
  misc_RNA (1)...(19): siRNA sense strand
ccagggugaugggaaaugg

SEQ ID NO: 135574 - RNA, 19 nt, Homo sapiens
  misc_RNA (1)...(19): siRNA sense strand
cagcucaggaauuaaagga

SEQ ID NO: 135575 - RNA, 19 nt, Homo sapiens
  misc_RNA (1)...(19): siRNA sense strand
cagaagugcccacacaacu

SEQ ID NO: 135576 - RNA, 19 nt, Homo sapiens
  misc_RNA (1)...(19): siRNA sense strand
acaagcuguucccugcauu

SEQ ID NO: 135577 - RNA, 19 nt, Homo sapiens
  misc_RNA (1)...(19): siRNA sense strand
aagaaaagcuacaagaacu

SEQ ID NO: 135578 - RNA, 19 nt, Homo sapiens
  misc_RNA (1)...(19): siRNA sense strand
gcauccacccugagaagca

SEQ ID NO: 135579 - RNA, 19 nt, Homo sapiens
  misc_RNA (1)...(19): siRNA sense strand
acuccuuucuggacuaugu

SEQ ID NO: 135580 - RNA, 19 nt, Homo sapiens
  misc_RNA (1)...(19): siRNA sense strand
ggguggugcugacuuugag

SEQ ID NO: 135581 - RNA, 19 nt, Homo sapiens
  misc_RNA (1)...(19): siRNA sense strand
ccacacaacuggucucaua

SEQ ID NO: 135582 - RNA, 19 nt, Homo sapiens
  misc_RNA (1)...(19): siRNA sense strand
gaucugaggucaucaagaa

SEQ ID NO: 135583 - RNA, 19 nt, Homo sapiens
  misc_RNA (1)...(19): siRNA sense strand
ggucucagcucaggaauua

SEQ ID NO: 135584 - RNA, 19 nt, Homo sapiens
  misc_RNA (1)...(19): siRNA sense strand
ccagaaaccuagauaagaa

SEQ ID NO: 135585 - RNA, 19 nt, Homo sapiens
  misc_RNA (1)...(19): siRNA sense strand
caacuggucucauacuuca

SEQ ID NO: 135586 - RNA, 19 nt, Homo sapiens
  misc_RNA (1)...(19): siRNA sense strand
ggacuucacuggcuccaau

SEQ ID NO: 135587 - RNA, 19 nt, Homo sapiens
  misc_RNA (1)...(19): siRNA sense strand
guacagaucugaggucauc

SEQ ID NO: 135588 - RNA, 19 nt, Homo sapiens
  misc_RNA (1)...(19): siRNA sense strand
aaaggacaaucguguagua

SEQ ID NO: 135589 - RNA, 19 nt, Homo sapiens
  misc_RNA (1)...(19): siRNA sense strand
gcaggucucgcaugaauuu

SEQ ID NO: 135590 - RNA, 19 nt, Homo sapiens
  misc_RNA (1)...(19): siRNA sense strand
caagaacucuggaacuauc

SEQ ID NO: 135591 - RNA, 19 nt, Homo sapiens
  misc_RNA (1)...(19): siRNA sense strand
caacaggggucaaugagua

SEQ ID NO: 135592 - RNA, 19 nt, Homo sapiens
  misc_RNA (1)...(19): siRNA sense strand
uacaagaacucuggaacua

SEQ ID NO: 135593 - RNA, 19 nt, Homo sapiens
  misc_RNA (1)...(19): siRNA sense strand
gcugagggaugaugacuuc

SEQ ID NO: 135594 - RNA, 19 nt, Homo sapiens
  misc_RNA (1)...(19): siRNA sense strand
gcaugaauuugccuugaau

SEQ ID NO: 135595 - RNA, 19 nt, Homo sapiens
  misc_RNA (1)...(19): siRNA sense strand
gagggaugaugacuuccua

SEQ ID NO: 135596 - RNA, 19 nt, Homo sapiens
  misc_RNA (1)...(19): siRNA sense strand
ggacaucggcuccaagucu

SEQ ID NO: 135597 - RNA, 19 nt, Homo sapiens
  misc_RNA (1)...(19): siRNA sense strand
cgccagagcugagggauga

SEQ ID NO: 135598 - RNA, 19 nt, Homo sapiens
  misc_RNA (1)...(19): siRNA sense strand
ggaacuauccgugucaaga

SEQ ID NO: 135599 - RNA, 19 nt, Homo sapiens
  misc_RNA (1)...(19): siRNA sense strand
gaacuauccgugucaagau

SEQ ID NO: 135600 - RNA, 19 nt, Homo sapiens
  misc_RNA (1)...(19): siRNA sense strand
caagauuugucggguagaa

SEQ ID NO: 135601 - RNA, 19 nt, Homo sapiens
  misc_RNA (1)...(19): siRNA sense strand
gcagcgugguucaggacua

SEQ ID NO: 135602 - RNA, 19 nt, Homo sapiens
  misc_RNA (1)...(19): siRNA sense strand
gcuguucccugcauuugga

SEQ ID NO: 135603 - RNA, 19 nt, Homo sapiens
  misc_RNA (1)...(19): siRNA sense strand
agaaacagaguacuccuuu

SEQ ID NO: 135604 - RNA, 19 nt, Homo sapiens
  misc_RNA (1)...(19): siRNA sense strand
gguagaggccagaaaccua

SEQ ID NO: 135605 - RNA, 19 nt, Homo sapiens
  misc_RNA (1)...(19): siRNA sense strand
gugcaaugcuccgauuaug

SEQ ID NO: 135606 - RNA, 19 nt, Homo sapiens
  misc_RNA (1)...(19): siRNA sense strand
uggcaggucucgcaugaau

SEQ ID NO: 135607 - RNA, 19 nt, Homo sapiens
  misc_RNA (1)...(19): siRNA sense strand
ggacaaucguguaguaacc

SEQ ID NO: 135608 - RNA, 19 nt, Homo sapiens
  misc_RNA (1)...(19): siRNA sense strand
cuauggcccuaccaacuuu

SEQ ID NO: 135609 - RNA, 19 nt, Homo sapiens
  misc_RNA (1)...(19): siRNA sense strand
gaaugcauccacccugaga

SEQ ID NO: 135610 - RNA, 19 nt, Homo sapiens
  misc_RNA (1)...(19): siRNA sense strand
gccagaaaccuagauaaga

SEQ ID NO: 135611 - RNA, 19 nt, Homo sapiens
  misc_RNA (1)...(19): siRNA sense strand
gcuacgcuuuggaaucuau

SEQ ID NO: 135612 - RNA, 19 nt, Homo sapiens
  misc_RNA (1)...(19): siRNA sense strand
gugaccaucucauugacaa

SEQ ID NO: 135613 - RNA, 19 nt, Homo sapiens
  misc_RNA (1)...(19): siRNA sense strand
gaugggaggcugucagauc

SEQ ID NO: 135614 - RNA, 19 nt, Homo sapiens
  misc_RNA (1)...(19): siRNA sense strand
gacaagcuguucccugcau

SEQ ID NO: 135615 - RNA, 19 nt, Homo sapiens
  misc_RNA (1)...(19): siRNA sense strand
ggacugccucgcaauacuu

SEQ ID NO: 135616 - RNA, 19 nt, Homo sapiens
  misc_RNA (1)...(19): siRNA sense strand
gacccacucugcguccuuu

SEQ ID NO: 135617 - RNA, 19 nt, Homo sapiens
  misc_RNA (1)...(19): siRNA sense strand
caacuuugcacccaucauc

SEQ ID NO: 135618 - RNA, 19 nt, Homo sapiens
  misc_RNA (1)...(19): siRNA sense strand
ccaugucagugaucauugu

SEQ ID NO: 135619 - RNA, 19 nt, Homo sapiens
  misc_RNA (1)...(19): siRNA sense strand
gagcuuggccggacugaac

SEQ ID NO: 135620 - RNA, 19 nt, Homo sapiens
  misc_RNA (1)...(19): siRNA sense strand
ccucgaaccugcccauguc

SEQ ID NO: 135621 - RNA, 19 nt, Homo sapiens
  misc_RNA (1)...(19): siRNA sense strand
ggaauuaaaggacaaucgu

SEQ ID NO: 135622 - RNA, 19 nt, Homo sapiens
  misc_RNA (1)...(19): siRNA sense strand
caggugcaaugcuccgauu

SEQ ID NO: 135623 - RNA, 19 nt, Homo sapiens
  misc_RNA (1)...(19): siRNA sense strand
ucgcagaagugcccacaca

SEQ ID NO: 135624 - RNA, 19 nt, Homo sapiens
  misc_RNA (1)...(19): siRNA sense strand
ucucagcucaggaauuaaa

SEQ ID NO: 135625 - RNA, 19 nt, Homo sapiens
  misc_RNA (1)...(19): siRNA sense strand
aaacagaguacuccuuucu

SEQ ID NO: 135626 - RNA, 19 nt, Homo sapiens
  misc_RNA (1)...(19): siRNA sense strand
cagcuugaguaccgcuuug

SEQ ID NO: 135627 - RNA, 19 nt, Homo sapiens
  misc_RNA (1)...(19): siRNA sense strand
cacaacuggucucauacuu

SEQ ID NO: 135628 - RNA, 19 nt, Homo sapiens
  misc_RNA (1)...(19): siRNA sense strand
cgcaauacuucaugcuguu

SEQ ID NO: 135629 - RNA, 19 nt, Homo sapiens
  misc_RNA (1)...(19): siRNA sense strand
guacuccuuucuggacuau

SEQ ID NO: 135630 - RNA, 19 nt, Homo sapiens
  misc_RNA (1)...(19): siRNA sense strand
gauuguguccagccaggua

SEQ ID NO: 135631 - RNA, 19 nt, Homo sapiens
  misc_RNA (1)...(19): siRNA sense strand
ggagguagaggccagaaac

SEQ ID NO: 135632 - RNA, 19 nt, Homo sapiens
  misc_RNA (1)...(19): siRNA sense strand
cgcaugaauuugccuugaa

SEQ ID NO: 135633 - RNA, 19 nt, Homo sapiens
  misc_RNA (1)...(19): siRNA sense strand
ugguucagcuguccauuuc

SEQ ID NO: 135634 - RNA, 19 nt, Homo sapiens
  misc_RNA (1)...(19): siRNA sense strand
cagcgugguucaggacuau

SEQ ID NO: 135635 - RNA, 19 nt, Homo sapiens
  misc_RNA (1)...(19): siRNA sense strand
gaggccagaaaccuagaua

SEQ ID NO: 135636 - RNA, 19 nt, Homo sapiens
  misc_RNA (1)...(19): siRNA sense strand
caagcuguucccugcauuu

SEQ ID NO: 135637 - RNA, 19 nt, Homo sapiens
  misc_RNA (1)...(19): siRNA sense strand
ggucaaugaguaccugaug

SEQ ID NO: 135638 - RNA, 19 nt, Homo sapiens
  misc_RNA (1)...(19): siRNA sense strand
cggcugaguuugaaugcau

SEQ ID NO: 135639 - RNA, 19 nt, Homo sapiens
  misc_RNA (1)...(19): siRNA sense strand
ggcagucccggcugaguuu

SEQ ID NO: 135640 - RNA, 19 nt, Homo sapiens
  misc_RNA (1)...(19): siRNA sense strand
cauggaagcguuucucagu

SEQ ID NO: 135641 - RNA, 19 nt, Homo sapiens
  misc_RNA (1)...(19): siRNA sense strand
ggccagaaaccuagauaag

SEQ ID NO: 135642 - RNA, 19 nt, Homo sapiens
  misc_RNA (1)...(19): siRNA sense strand
gcccugaguucuccaagac

SEQ ID NO: 135643 - RNA, 19 nt, Homo sapiens
  misc_RNA (1)...(19): siRNA sense strand
uguggguggugcugacuuu

SEQ ID NO: 135644 - RNA, 19 nt, Homo sapiens
  misc_RNA (1)...(19): siRNA sense strand
acaaggacaucggcuccaa

SEQ ID NO: 135645 - RNA, 19 nt, Homo sapiens
  misc_RNA (1)...(19): siRNA sense strand
ccugugaccaucucauuga

SEQ ID NO: 135646 - RNA, 19 nt, Homo sapiens
  misc_RNA (1)...(19): siRNA sense strand
ccgccagggugaugggaaa

SEQ ID NO: 135647 - RNA, 19 nt, Homo sapiens
  misc_RNA (1)...(19): siRNA sense strand
gcagaagugcccacacaac

SEQ ID NO: 135648 - RNA, 19 nt, Homo sapiens
  misc_RNA (1)...(19): siRNA sense strand
gcaauacuucaugcuguug

SEQ ID NO: 135649 - RNA, 19 nt, Homo sapiens
  misc_RNA (1)...(19): siRNA sense strand
gcaggcauccagggcauug

SEQ ID NO: 135650 - RNA, 19 nt, Homo sapiens
  misc_RNA (1)...(19): siRNA sense strand
ucgcaugaauuugccuuga

SEQ ID NO: 135651 - RNA, 19 nt, Homo sapiens
  misc_RNA (1)...(19): siRNA sense strand
cuccaagacucuacagcuu

SEQ ID NO: 135652 - RNA, 19 nt, Homo sapiens
  misc_RNA (1)...(19): siRNA sense strand
ggugcaaugcuccgauuau

SEQ ID NO: 135653 - RNA, 19 nt, Homo sapiens
  misc_RNA (1)...(19): siRNA sense strand
gggacugccucgcaauacu

SEQ ID NO: 135654 - RNA, 19 nt, Homo sapiens
  misc_RNA (1)...(19): siRNA sense strand
acuggcaggucucgcauga

SEQ ID NO: 135655 - RNA, 19 nt, Homo sapiens
  misc_RNA (1)...(19): siRNA sense strand
ucaccugacucccuacacu

SEQ ID NO: 135656 - RNA, 19 nt, Homo sapiens
  misc_RNA (1)...(19): siRNA sense strand
gcgacauugugcaguuugu

SEQ ID NO: 135657 - RNA, 19 nt, Homo sapiens
  misc_RNA (1)...(19): siRNA sense strand
uaguaaccauggagguaga

SEQ ID NO: 135658 - RNA, 19 nt, Homo sapiens
  misc_RNA (1)...(19): siRNA sense strand
gcccaugucagugaucauu

SEQ ID NO: 135659 - RNA, 19 nt, Homo sapiens
  misc_RNA (1)...(19): siRNA sense strand
gaacaaccugaacccuaca

SEQ ID NO: 135660 - RNA, 19 nt, Homo sapiens
  misc_RNA (1)...(19): siRNA sense strand
gaaaccuagauaagaagga

SEQ ID NO: 135661 - RNA, 19 nt, Homo sapiens
  misc_RNA (1)...(19): siRNA sense strand
gcuuugagacaguccagaa

SEQ ID NO: 135662 - RNA, 19 nt, Homo sapiens
  misc_RNA (1)...(19): siRNA sense strand
aacuauccgugucaagauu

SEQ ID NO: 135663 - RNA, 19 nt, Homo sapiens
  misc_RNA (1)...(19): siRNA sense strand
agaccgugcucgcagaagu

SEQ ID NO: 135664 - RNA, 19 nt, Homo sapiens
  misc_RNA (1)...(19): siRNA sense strand
ccgcgacauugugcaguuu

SEQ ID NO: 135665 - RNA, 19 nt, Homo sapiens
  misc_RNA (1)...(19): siRNA sense strand
gaggcugucagaucaacuu

SEQ ID NO: 135666 - RNA, 19 nt, Homo sapiens
  misc_RNA (1)...(19): siRNA sense strand
gcuuuggaaucuaugacau

SEQ ID NO: 135667 - RNA, 19 nt, Homo sapiens
  misc_RNA (1)...(19): siRNA sense strand
cgacauugugcaguuugua

SEQ ID NO: 135668 - RNA, 19 nt, Homo sapiens
  misc_RNA (1)...(19): siRNA sense strand
uguaguaaccauggaggua

SEQ ID NO: 135669 - RNA, 19 nt, Homo sapiens
  misc_RNA (1)...(19): siRNA sense strand
gcugucagaucaacuucac

SEQ ID NO: 135670 - RNA, 19 nt, Homo sapiens
  misc_RNA (1)...(19): siRNA sense strand
uuaaaggacaaucguguag

SEQ ID NO: 135671 - RNA, 19 nt, Homo sapiens
  misc_RNA (1)...(19): siRNA sense strand
ucuauggcccuaccaacuu

SEQ ID NO: 135672 - RNA, 19 nt, Homo sapiens
  misc_RNA (1)...(19): siRNA sense strand
augggaggcugucagauca

SEQ ID NO: 135673 - RNA, 19 nt, Homo sapiens
  misc_RNA (1)...(19): siRNA sense strand
ccagggugaugggaaaugg

SEQ ID NO: 135674 - RNA, 19 nt, Homo sapiens
  misc_RNA (1)...(19): siRNA sense strand
cagcucaggaauuaaagga

SEQ ID NO: 135675 - RNA, 19 nt, Homo sapiens
  misc_RNA (1)...(19): siRNA sense strand
cagaagugcccacacaacu

SEQ ID NO: 135676 - RNA, 19 nt, Homo sapiens
  misc_RNA (1)...(19): siRNA sense strand
acaagcuguucccugcauu

SEQ ID NO: 135677 - RNA, 19 nt, Homo sapiens
  misc_RNA (1)...(19): siRNA sense strand
aagaaaagcuacaagaacu

SEQ ID NO: 135678 - RNA, 19 nt, Homo sapiens
  misc_RNA (1)...(19): siRNA sense strand
gcauccacccugagaagca

SEQ ID NO: 135679 - RNA, 19 nt, Homo sapiens
  misc_RNA (1)...(19): siRNA sense strand
acuccuuucuggacuaugu

SEQ ID NO: 135680 - RNA, 19 nt, Homo sapiens
  misc_RNA (1)...(19): siRNA sense strand
ggguggugcugacuuugag

SEQ ID NO: 135681 - RNA, 19 nt, Homo sapiens
  misc_RNA (1)...(19): siRNA sense strand
ccacacaacuggucucaua

SEQ ID NO: 135682 - RNA, 19 nt, Homo sapiens
  misc_RNA (1)...(19): siRNA sense strand
gaucugaggucaucaagaa

SEQ ID NO: 135683 - RNA, 19 nt, Homo sapiens
  misc_RNA (1)...(19): siRNA sense strand
ggucucagcucaggaauua

SEQ ID NO: 135684 - RNA, 19 nt, Homo sapiens
  misc_RNA (1)...(19): siRNA sense strand
ccagaaaccuagauaagaa

SEQ ID NO: 135685 - RNA, 19 nt, Homo sapiens
  misc_RNA (1)...(19): siRNA sense strand
caacuggucucauacuuca

SEQ ID NO: 135686 - RNA, 19 nt, Homo sapiens
  misc_RNA (1)...(19): siRNA sense strand
ggacuucacuggcuccaau

SEQ ID NO: 135687 - RNA, 19 nt, Homo sapiens
  misc_RNA (1)...(19): siRNA sense strand
guacagaucugaggucauc

SEQ ID NO: 135688 - RNA, 19 nt, Homo sapiens
  misc_RNA (1)...(19): siRNA sense strand
aaaggacaaucguguagua

SEQ ID NO: 135689 - RNA, 19 nt, Homo sapiens
  misc_RNA (1)...(19): siRNA sense strand
gcaggucucgcaugaauuu

SEQ ID NO: 135690 - RNA, 19 nt, Homo sapiens
  misc_RNA (1)...(19): siRNA sense strand
caagaacucuggaacuauc

SEQ ID NO: 135691 - RNA, 19 nt, Homo sapiens
  misc_RNA (1)...(19): siRNA sense strand
caacaggggucaaugagua

SEQ ID NO: 135692 - RNA, 19 nt, Homo sapiens
  misc_RNA (1)...(19): siRNA sense strand
uacaagaacucuggaacua

SEQ ID NO: 135693 - RNA, 19 nt, Homo sapiens
  misc_RNA (1)...(19): siRNA sense strand
gcugagggaugaugacuuc

SEQ ID NO: 135694 - RNA, 19 nt, Homo sapiens
  misc_RNA (1)...(19): siRNA sense strand
gcaugaauuugccuugaau

SEQ ID NO: 135695 - RNA, 19 nt, Homo sapiens
  misc_RNA (1)...(19): siRNA sense strand
gagggaugaugacuuccua

SEQ ID NO: 135696 - RNA, 19 nt, Homo sapiens
  misc_RNA (1)...(19): siRNA sense strand
ggacaucggcuccaagucu

SEQ ID NO: 135697 - RNA, 19 nt, Homo sapiens
  misc_RNA (1)...(19): siRNA sense strand
cgccagagcugagggauga

SEQ ID NO: 135698 - RNA, 19 nt, Homo sapiens
  misc_RNA (1)...(19): siRNA sense strand
ggaacuauccgugucaaga

SEQ ID NO: 135699 - RNA, 19 nt, Homo sapiens
  misc_RNA (1)...(19): siRNA sense strand
gaacuauccgugucaagau

SEQ ID NO: 135700 - RNA, 19 nt, Homo sapiens
  misc_RNA (1)...(19): siRNA sense strand
caagauuugucggguagaa

SEQ ID NO: 135701 - RNA, 19 nt, Homo sapiens
  misc_RNA (1)...(19): siRNA sense strand
gcagcgugguucaggacua

SEQ ID NO: 135702 - RNA, 19 nt, Homo sapiens
  misc_RNA (1)...(19): siRNA sense strand
gcuguucccugcauuugga

SEQ ID NO: 135703 - RNA, 19 nt, Homo sapiens
  misc_RNA (1)...(19): siRNA sense strand
agaaacagaguacuccuuu

SEQ ID NO: 135704 - RNA, 19 nt, Homo sapiens
  misc_RNA (1)...(19): siRNA sense strand
gguagaggccagaaaccua

SEQ ID NO: 135705 - RNA, 19 nt, Homo sapiens
  misc_RNA (1)...(19): siRNA sense strand
gugcaaugcuccgauuaug

SEQ ID NO: 135706 - RNA, 19 nt, Homo sapiens
  misc_RNA (1)...(19): siRNA sense strand
uggcaggucucgcaugaau

SEQ ID NO: 135707 - RNA, 19 nt, Homo sapiens
  misc_RNA (1)...(19): siRNA sense strand
ggacaaucguguaguaacc

SEQ ID NO: 135708 - RNA, 19 nt, Homo sapiens
  misc_RNA (1)...(19): siRNA sense strand
cuauggcccuaccaacuuu

SEQ ID NO: 135709 - RNA, 19 nt, Homo sapiens
  misc_RNA (1)...(19): siRNA sense strand
gaaugcauccacccugaga

SEQ ID NO: 135710 - RNA, 19 nt, Homo sapiens
  misc_RNA (1)...(19): siRNA sense strand
gccagaaaccuagauaaga

SEQ ID NO: 135711 - RNA, 19 nt, Homo sapiens
  misc_RNA (1)...(19): siRNA sense strand
gcuacgcuuuggaaucuau

SEQ ID NO: 135712 - RNA, 19 nt, Homo sapiens
  misc_RNA (1)...(19): siRNA sense strand
gugaccaucucauugacaa

SEQ ID NO: 135713 - RNA, 19 nt, Homo sapiens
  misc_RNA (1)...(19): siRNA sense strand
gaugggaggcugucagauc

SEQ ID NO: 135714 - RNA, 19 nt, Homo sapiens
  misc_RNA (1)...(19): siRNA sense strand
gacaagcuguucccugcau

SEQ ID NO: 135715 - RNA, 19 nt, Homo sapiens
  misc_RNA (1)...(19): siRNA sense strand
ggacugccucgcaauacuu

SEQ ID NO: 135716 - RNA, 19 nt, Homo sapiens
  misc_RNA (1)...(19): siRNA sense strand
gacccacucugcguccuuu

SEQ ID NO: 135717 - RNA, 19 nt, Homo sapiens
  misc_RNA (1)...(19): siRNA sense strand
caacuuugcacccaucauc

SEQ ID NO: 135718 - RNA, 19 nt, Homo sapiens
  misc_RNA (1)...(19): siRNA sense strand
ccaugucagugaucauugu

SEQ ID NO: 135719 - RNA, 19 nt, Homo sapiens
  misc_RNA (1)...(19): siRNA sense strand
gagcuuggccggacugaac

SEQ ID NO: 135720 - RNA, 19 nt, Homo sapiens
  misc_RNA (1)...(19): siRNA sense strand
ccucgaaccugcccauguc

SEQ ID NO: 135721 - RNA, 19 nt, Homo sapiens
  misc_RNA (1)...(19): siRNA sense strand
ggaauuaaaggacaaucgu

SEQ ID NO: 135722 - RNA, 19 nt, Homo sapiens
  misc_RNA (1)...(19): siRNA sense strand
caggugcaaugcuccgauu

SEQ ID NO: 135723 - RNA, 19 nt, Homo sapiens
  misc_RNA (1)...(19): siRNA sense strand
ucgcagaagugcccacaca

SEQ ID NO: 135724 - RNA, 19 nt, Homo sapiens
  misc_RNA (1)...(19): siRNA sense strand
ucucagcucaggaauuaaa

SEQ ID NO: 135725 - RNA, 19 nt, Homo sapiens
  misc_RNA (1)...(19): siRNA sense strand
aaacagaguacuccuuucu

SEQ ID NO: 135726 - RNA, 19 nt, Homo sapiens
  misc_RNA (1)...(19): siRNA sense strand
cagcuugaguaccgcuuug

SEQ ID NO: 135727 - RNA, 19 nt, Homo sapiens
  misc_RNA (1)...(19): siRNA sense strand
cacaacuggucucauacuu

SEQ ID NO: 135728 - RNA, 19 nt, Homo sapiens
  misc_RNA (1)...(19): siRNA sense strand
cgcaauacuucaugcuguu

SEQ ID NO: 135729 - RNA, 19 nt, Homo sapiens
  misc_RNA (1)...(19): siRNA sense strand
guacuccuuucuggacuau

SEQ ID NO: 135730 - RNA, 19 nt, Homo sapiens
  misc_RNA (1)...(19): siRNA sense strand
gauuguguccagccaggua

SEQ ID NO: 135731 - RNA, 19 nt, Homo sapiens
  misc_RNA (1)...(19): siRNA sense strand
ggagguagaggccagaaac

SEQ ID NO: 135732 - RNA, 19 nt, Homo sapiens
  misc_RNA (1)...(19): siRNA sense strand
cgcaugaauuugccuugaa

SEQ ID NO: 135733 - RNA, 19 nt, Homo sapiens
  misc_RNA (1)...(19): siRNA sense strand
ugguucagcuguccauuuc

SEQ ID NO: 135734 - RNA, 19 nt, Homo sapiens
  misc_RNA (1)...(19): siRNA sense strand
cagcgugguucaggacuau

SEQ ID NO: 135735 - RNA, 19 nt, Homo sapiens
  misc_RNA (1)...(19): siRNA sense strand
gaggccagaaaccuagaua

SEQ ID NO: 135736 - RNA, 19 nt, Homo sapiens
  misc_RNA (1)...(19): siRNA sense strand
caagcuguucccugcauuu

SEQ ID NO: 135737 - RNA, 19 nt, Homo sapiens
  misc_RNA (1)...(19): siRNA sense strand
ggucaaugaguaccugaug

SEQ ID NO: 135738 - RNA, 19 nt, Homo sapiens
  misc_RNA (1)...(19): siRNA sense strand
cggcugaguuugaaugcau

SEQ ID NO: 135739 - RNA, 19 nt, Homo sapiens
  misc_RNA (1)...(19): siRNA sense strand
ggcagucccggcugaguuu

SEQ ID NO: 135740 - RNA, 19 nt, Homo sapiens
  misc_RNA (1)...(19): siRNA sense strand
cauggaagcguuucucagu

SEQ ID NO: 135741 - RNA, 19 nt, Homo sapiens
  misc_RNA (1)...(19): siRNA sense strand
ggccagaaaccuagauaag

SEQ ID NO: 135742 - RNA, 19 nt, Homo sapiens
  misc_RNA (1)...(19): siRNA sense strand
gcccugaguucuccaagac

SEQ ID NO: 135743 - RNA, 19 nt, Homo sapiens
  misc_RNA (1)...(19): siRNA sense strand
uguggguggugcugacuuu

SEQ ID NO: 135744 - RNA, 19 nt, Homo sapiens
  misc_RNA (1)...(19): siRNA sense strand
acaaggacaucggcuccaa

SEQ ID NO: 135745 - RNA, 19 nt, Homo sapiens
  misc_RNA (1)...(19): siRNA sense strand
ccugugaccaucucauuga

SEQ ID NO: 135746 - RNA, 19 nt, Homo sapiens
  misc_RNA (1)...(19): siRNA sense strand
ccgccagggugaugggaaa

SEQ ID NO: 135747 - RNA, 19 nt, Homo sapiens
  misc_RNA (1)...(19): siRNA sense strand
gcagaagugcccacacaac

SEQ ID NO: 135748 - RNA, 19 nt, Homo sapiens
  misc_RNA (1)...(19): siRNA sense strand
gcaauacuucaugcuguug

SEQ ID NO: 135749 - RNA, 19 nt, Homo sapiens
  misc_RNA (1)...(19): siRNA sense strand
gcaggcauccagggcauug

SEQ ID NO: 135750 - RNA, 19 nt, Homo sapiens
  misc_RNA (1)...(19): siRNA sense strand
ucgcaugaauuugccuuga

SEQ ID NO: 135751 - RNA, 19 nt, Homo sapiens
  misc_RNA (1)...(19): siRNA sense strand
cuccaagacucuacagcuu

SEQ ID NO: 135752 - RNA, 19 nt, Homo sapiens
  misc_RNA (1)...(19): siRNA sense strand
ggugcaaugcuccgauuau

SEQ ID NO: 135753 - RNA, 19 nt, Homo sapiens
  misc_RNA (1)...(19): siRNA sense strand
gggacugccucgcaauacu

SEQ ID NO: 135754 - RNA, 19 nt, Homo sapiens
  misc_RNA (1)...(19): siRNA sense strand
acuggcaggucucgcauga

SEQ ID NO: 135755 - RNA, 19 nt, Homo sapiens
  misc_RNA (1)...(19): siRNA sense strand
ucaccugacucccuacacu

SEQ ID NO: 135756 - RNA, 19 nt, Homo sapiens
  misc_RNA (1)...(19): siRNA sense strand
gcgacauugugcaguuugu

SEQ ID NO: 135757 - RNA, 19 nt, Homo sapiens
  misc_RNA (1)...(19): siRNA sense strand
uaguaaccauggagguaga

SEQ ID NO: 135758 - RNA, 19 nt, Homo sapiens
  misc_RNA (1)...(19): siRNA sense strand
gcccaugucagugaucauu

SEQ ID NO: 135759 - RNA, 19 nt, Homo sapiens
  misc_RNA (1)...(19): siRNA sense strand
gaacaaccugaacccuaca

SEQ ID NO: 135760 - RNA, 19 nt, Homo sapiens
  misc_RNA (1)...(19): siRNA sense strand
gaaaccuagauaagaagga

SEQ ID NO: 135761 - RNA, 19 nt, Homo sapiens
  misc_RNA (1)...(19): siRNA sense strand
gcuuugagacaguccagaa

SEQ ID NO: 135762 - RNA, 19 nt, Homo sapiens
  misc_RNA (1)...(19): siRNA sense strand
aacuauccgugucaagauu

SEQ ID NO: 135763 - RNA, 19 nt, Homo sapiens
  misc_RNA (1)...(19): siRNA sense strand
agaccgugcucgcagaagu

SEQ ID NO: 135764 - RNA, 19 nt, Homo sapiens
  misc_RNA (1)...(19): siRNA sense strand
ccgcgacauugugcaguuu

SEQ ID NO: 135765 - RNA, 19 nt, Homo sapiens
  misc_RNA (1)...(19): siRNA sense strand
gaggcugucagaucaacuu

SEQ ID NO: 135766 - RNA, 19 nt, Homo sapiens
  misc_RNA (1)...(19): siRNA sense strand
gcuuuggaaucuaugacau

SEQ ID NO: 135767 - RNA, 19 nt, Homo sapiens
  misc_RNA (1)...(19): siRNA sense strand
cgacauugugcaguuugua

SEQ ID NO: 135768 - RNA, 19 nt, Homo sapiens
  misc_RNA (1)...(19): siRNA sense strand
uguaguaaccauggaggua

SEQ ID NO: 135769 - RNA, 19 nt, Homo sapiens
  misc_RNA (1)...(19): siRNA sense strand
gcugucagaucaacuucac

SEQ ID NO: 135770 - RNA, 19 nt, Homo sapiens
  misc_RNA (1)...(19): siRNA sense strand
uuaaaggacaaucguguag

SEQ ID NO: 135771 - RNA, 19 nt, Homo sapiens
  misc_RNA (1)...(19): siRNA sense strand
ucuauggcccuaccaacuu

SEQ ID NO: 135772 - RNA, 19 nt, Homo sapiens
  misc_RNA (1)...(19): siRNA sense strand
augggaggcugucagauca

SEQ ID NO: 135773 - RNA, 19 nt, Homo sapiens
  misc_RNA (1)...(19): siRNA sense strand
ccagggugaugggaaaugg

SEQ ID NO: 135774 - RNA, 19 nt, Homo sapiens
  misc_RNA (1)...(19): siRNA sense strand
cagcucaggaauuaaagga

SEQ ID NO: 135775 - RNA, 19 nt, Homo sapiens
  misc_RNA (1)...(19): siRNA sense strand
cagaagugcccacacaacu

SEQ ID NO: 135776 - RNA, 19 nt, Homo sapiens
  misc_RNA (1)...(19): siRNA sense strand
acaagcuguucccugcauu

SEQ ID NO: 135777 - RNA, 19 nt, Homo sapiens
  misc_RNA (1)...(19): siRNA sense strand
aagaaaagcuacaagaacu

SEQ ID NO: 135778 - RNA, 19 nt, Homo sapiens
  misc_RNA (1)...(19): siRNA sense strand
gcauccacccugagaagca

SEQ ID NO: 135779 - RNA, 19 nt, Homo sapiens
  misc_RNA (1)...(19): siRNA sense strand
acuccuuucuggacuaugu

SEQ ID NO: 135780 - RNA, 19 nt, Homo sapiens
  misc_RNA (1)...(19): siRNA sense strand
ggguggugcugacuuugag

SEQ ID NO: 135781 - RNA, 19 nt, Homo sapiens
  misc_RNA (1)...(19): siRNA sense strand
ccacacaacuggucucaua

SEQ ID NO: 135782 - RNA, 19 nt, Homo sapiens
  misc_RNA (1)...(19): siRNA sense strand
gaucugaggucaucaagaa

SEQ ID NO: 135783 - RNA, 19 nt, Homo sapiens
  misc_RNA (1)...(19): siRNA sense strand
ggucucagcucaggaauua

SEQ ID NO: 135784 - RNA, 19 nt, Homo sapiens
  misc_RNA (1)...(19): siRNA sense strand
ccagaaaccuagauaagaa

SEQ ID NO: 135785 - RNA, 19 nt, Homo sapiens
  misc_RNA (1)...(19): siRNA sense strand
caacuggucucauacuuca

SEQ ID NO: 135786 - RNA, 19 nt, Homo sapiens
  misc_RNA (1)...(19): siRNA sense strand
ggacuucacuggcuccaau

SEQ ID NO: 135787 - RNA, 19 nt, Homo sapiens
  misc_RNA (1)...(19): siRNA sense strand
guacagaucugaggucauc

SEQ ID NO: 135788 - RNA, 19 nt, Homo sapiens
  misc_RNA (1)...(19): siRNA sense strand
aaaggacaaucguguagua

SEQ ID NO: 135789 - RNA, 19 nt, Homo sapiens
  misc_RNA (1)...(19): siRNA sense strand
gcaggucucgcaugaauuu

SEQ ID NO: 135790 - RNA, 19 nt, Homo sapiens
  misc_RNA (1)...(19): siRNA sense strand
caagaacucuggaacuauc

SEQ ID NO: 135791 - RNA, 19 nt, Homo sapiens
  misc_RNA (1)...(19): siRNA sense strand
caacaggggucaaugagua

SEQ ID NO: 135792 - RNA, 19 nt, Homo sapiens
  misc_RNA (1)...(19): siRNA sense strand
uacaagaacucuggaacua

SEQ ID NO: 135793 - RNA, 19 nt, Homo sapiens
  misc_RNA (1)...(19): siRNA sense strand
gcugagggaugaugacuuc

SEQ ID NO: 135794 - RNA, 19 nt, Homo sapiens
  misc_RNA (1)...(19): siRNA sense strand
gcaugaauuugccuugaau

SEQ ID NO: 135795 - RNA, 19 nt, Homo sapiens
  misc_RNA (1)...(19): siRNA sense strand
gagggaugaugacuuccua

SEQ ID NO: 135796 - RNA, 19 nt, Homo sapiens
  misc_RNA (1)...(19): siRNA sense strand
ggacaucggcuccaagucu

SEQ ID NO: 135797 - RNA, 19 nt, Homo sapiens
  misc_RNA (1)...(19): siRNA sense strand
cgccagagcugagggauga

SEQ ID NO: 135798 - RNA, 19 nt, Homo sapiens
  misc_RNA (1)...(19): siRNA sense strand
ggaacuauccgugucaaga

SEQ ID NO: 135799 - RNA, 19 nt, Homo sapiens
  misc_RNA (1)...(19): siRNA sense strand
gaacuauccgugucaagau

SEQ ID NO: 135800 - RNA, 19 nt, Homo sapiens
  misc_RNA (1)...(19): siRNA sense strand
caagauuugucggguagaa

SEQ ID NO: 135801 - RNA, 19 nt, Homo sapiens
  misc_RNA (1)...(19): siRNA sense strand
gcagcgugguucaggacua

SEQ ID NO: 135802 - RNA, 19 nt, Homo sapiens
  misc_RNA (1)...(19): siRNA sense strand
gcuguucccugcauuugga

SEQ ID NO: 135803 - RNA, 19 nt, Homo sapiens
  misc_RNA (1)...(19): siRNA sense strand
agaaacagaguacuccuuu

SEQ ID NO: 135804 - RNA, 19 nt, Homo sapiens
  misc_RNA (1)...(19): siRNA sense strand
gguagaggccagaaaccua

SEQ ID NO: 135805 - RNA, 19 nt, Homo sapiens
  misc_RNA (1)...(19): siRNA sense strand
gugcaaugcuccgauuaug

SEQ ID NO: 135806 - RNA, 19 nt, Homo sapiens
  misc_RNA (1)...(19): siRNA sense strand
uggcaggucucgcaugaau

SEQ ID NO: 135807 - RNA, 19 nt, Homo sapiens
  misc_RNA (1)...(19): siRNA sense strand
ggacaaucguguaguaacc

SEQ ID NO: 135808 - RNA, 19 nt, Homo sapiens
  misc_RNA (1)...(19): siRNA sense strand
cuauggcccuaccaacuuu

SEQ ID NO: 135809 - RNA, 19 nt, Homo sapiens
  misc_RNA (1)...(19): siRNA sense strand
gaaugcauccacccugaga

SEQ ID NO: 135810 - RNA, 19 nt, Homo sapiens
  misc_RNA (1)...(19): siRNA sense strand
gccagaaaccuagauaaga

SEQ ID NO: 135811 - RNA, 19 nt, Homo sapiens
  misc_RNA (1)...(19): siRNA sense strand
gcuacgcuuuggaaucuau

SEQ ID NO: 135812 - RNA, 19 nt, Homo sapiens
  misc_RNA (1)...(19): siRNA sense strand
gugaccaucucauugacaa

SEQ ID NO: 135813 - RNA, 19 nt, Homo sapiens
  misc_RNA (1)...(19): siRNA sense strand
gaugggaggcugucagauc

SEQ ID NO: 135814 - RNA, 19 nt, Homo sapiens
  misc_RNA (1)...(19): siRNA sense strand
gacaagcuguucccugcau

SEQ ID NO: 135815 - RNA, 19 nt, Homo sapiens
  misc_RNA (1)...(19): siRNA sense strand
ggacugccucgcaauacuu

SEQ ID NO: 135816 - RNA, 19 nt, Homo sapiens
  misc_RNA (1)...(19): siRNA sense strand
gacccacucugcguccuuu

SEQ ID NO: 135817 - RNA, 19 nt, Homo sapiens
  misc_RNA (1)...(19): siRNA sense strand
caacuuugcacccaucauc

SEQ ID NO: 135818 - RNA, 19 nt, Homo sapiens
  misc_RNA (1)...(19): siRNA sense strand
ccaugucagugaucauugu

SEQ ID NO: 135819 - RNA, 19 nt, Homo sapiens
  misc_RNA (1)...(19): siRNA sense strand
gagcuuggccggacugaac

SEQ ID NO: 135820 - RNA, 19 nt, Homo sapiens
  misc_RNA (1)...(19): siRNA sense strand
ccucgaaccugcccauguc

SEQ ID NO: 135821 - RNA, 19 nt, Homo sapiens
  misc_RNA (1)...(19): siRNA sense strand
ggaauuaaaggacaaucgu

SEQ ID NO: 135822 - RNA, 19 nt, Homo sapiens
  misc_RNA (1)...(19): siRNA sense strand
caggugcaaugcuccgauu

SEQ ID NO: 135823 - RNA, 19 nt, Homo sapiens
  misc_RNA (1)...(19): siRNA sense strand
ucgcagaagugcccacaca

SEQ ID NO: 135824 - RNA, 19 nt, Homo sapiens
  misc_RNA (1)...(19): siRNA sense strand
ucucagcucaggaauuaaa

SEQ ID NO: 135825 - RNA, 19 nt, Homo sapiens
  misc_RNA (1)...(19): siRNA sense strand
aaacagaguacuccuuucu

SEQ ID NO: 135826 - RNA, 19 nt, Homo sapiens
  misc_RNA (1)...(19): siRNA sense strand
cagcuugaguaccgcuuug

SEQ ID NO: 135827 - RNA, 19 nt, Homo sapiens
  misc_RNA (1)...(19): siRNA sense strand
cacaacuggucucauacuu

SEQ ID NO: 135828 - RNA, 19 nt, Homo sapiens
  misc_RNA (1)...(19): siRNA sense strand
cgcaauacuucaugcuguu

SEQ ID NO: 135829 - RNA, 19 nt, Homo sapiens
  misc_RNA (1)...(19): siRNA sense strand
guacuccuuucuggacuau

SEQ ID NO: 135830 - RNA, 19 nt, Homo sapiens
  misc_RNA (1)...(19): siRNA sense strand
gauuguguccagccaggua

SEQ ID NO: 135831 - RNA, 19 nt, Homo sapiens
  misc_RNA (1)...(19): siRNA sense strand
ggagguagaggccagaaac

SEQ ID NO: 135832 - RNA, 19 nt, Homo sapiens
  misc_RNA (1)...(19): siRNA sense strand
cgcaugaauuugccuugaa

SEQ ID NO: 135833 - RNA, 19 nt, Homo sapiens
  misc_RNA (1)...(19): siRNA sense strand
ugguucagcuguccauuuc

SEQ ID NO: 135834 - RNA, 19 nt, Homo sapiens
  misc_RNA (1)...(19): siRNA sense strand
cagcgugguucaggacuau

SEQ ID NO: 135835 - RNA, 19 nt, Homo sapiens
  misc_RNA (1)...(19): siRNA sense strand
gaggccagaaaccuagaua

SEQ ID NO: 135836 - RNA, 19 nt, Homo sapiens
  misc_RNA (1)...(19): siRNA sense strand
caagcuguucccugcauuu

SEQ ID NO: 135837 - RNA, 19 nt, Homo sapiens
  misc_RNA (1)...(19): siRNA sense strand
ggucaaugaguaccugaug

SEQ ID NO: 135838 - RNA, 19 nt, Homo sapiens
  misc_RNA (1)...(19): siRNA sense strand
cggcugaguuugaaugcau

SEQ ID NO: 135839 - RNA, 19 nt, Homo sapiens
  misc_RNA (1)...(19): siRNA sense strand
ggcagucccggcugaguuu

SEQ ID NO: 135840 - RNA, 19 nt, Homo sapiens
  misc_RNA (1)...(19): siRNA sense strand
cauggaagcguuucucagu

SEQ ID NO: 135841 - RNA, 19 nt, Homo sapiens
  misc_RNA (1)...(19): siRNA sense strand
ggccagaaaccuagauaag

SEQ ID NO: 135842 - RNA, 19 nt, Homo sapiens
  misc_RNA (1)...(19): siRNA sense strand
gcccugaguucuccaagac

SEQ ID NO: 135843 - RNA, 19 nt, Homo sapiens
  misc_RNA (1)...(19): siRNA sense strand
uguggguggugcugacuuu

SEQ ID NO: 135844 - RNA, 19 nt, Homo sapiens
  misc_RNA (1)...(19): siRNA sense strand
acaaggacaucggcuccaa

SEQ ID NO: 135845 - RNA, 19 nt, Homo sapiens
  misc_RNA (1)...(19): siRNA sense strand
ccugugaccaucucauuga

SEQ ID NO: 135846 - RNA, 19 nt, Homo sapiens
  misc_RNA (1)...(19): siRNA sense strand
ccgccagggugaugggaaa

SEQ ID NO: 135847 - RNA, 19 nt, Homo sapiens
  misc_RNA (1)...(19): siRNA sense strand
gcagaagugcccacacaac

SEQ ID NO: 135848 - RNA, 19 nt, Homo sapiens
  misc_RNA (1)...(19): siRNA sense strand
gcaauacuucaugcuguug

SEQ ID NO: 135849 - RNA, 19 nt, Homo sapiens
  misc_RNA (1)...(19): siRNA sense strand
gcaggcauccagggcauug

SEQ ID NO: 135850 - RNA, 19 nt, Homo sapiens
  misc_RNA (1)...(19): siRNA sense strand
ucgcaugaauuugccuuga

SEQ ID NO: 135851 - RNA, 19 nt, Homo sapiens
  misc_RNA (1)...(19): siRNA sense strand
cuccaagacucuacagcuu

SEQ ID NO: 135852 - RNA, 19 nt, Homo sapiens
  misc_RNA (1)...(19): siRNA sense strand
ggugcaaugcuccgauuau

SEQ ID NO: 135853 - RNA, 19 nt, Homo sapiens
  misc_RNA (1)...(19): siRNA sense strand
gggacugccucgcaauacu

SEQ ID NO: 135854 - RNA, 19 nt, Homo sapiens
  misc_RNA (1)...(19): siRNA sense strand
acuggcaggucucgcauga

SEQ ID NO: 135855 - RNA, 19 nt, Homo sapiens
  misc_RNA (1)...(19): siRNA sense strand
ucaccugacucccuacacu

SEQ ID NO: 135856 - RNA, 19 nt, Homo sapiens
  misc_RNA (1)...(19): siRNA sense strand
gcgacauugugcaguuugu

SEQ ID NO: 135857 - RNA, 19 nt, Homo sapiens
  misc_RNA (1)...(19): siRNA sense strand
uaguaaccauggagguaga

SEQ ID NO: 135858 - RNA, 19 nt, Homo sapiens
  misc_RNA (1)...(19): siRNA sense strand
gcccaugucagugaucauu

SEQ ID NO: 135859 - RNA, 19 nt, Homo sapiens
  misc_RNA (1)...(19): siRNA sense strand
gaacaaccugaacccuaca

SEQ ID NO: 135860 - RNA, 19 nt, Homo sapiens
  misc_RNA (1)...(19): siRNA sense strand
gaaaccuagauaagaagga

SEQ ID NO: 135861 - RNA, 19 nt, Homo sapiens
  misc_RNA (1)...(19): siRNA sense strand
gcuuugagacaguccagaa

SEQ ID NO: 135862 - RNA, 19 nt, Homo sapiens
  misc_RNA (1)...(19): siRNA sense strand
aacuauccgugucaagauu

SEQ ID NO: 135863 - RNA, 19 nt, Homo sapiens
  misc_RNA (1)...(19): siRNA sense strand
agaccgugcucgcagaagu

SEQ ID NO: 135864 - RNA, 19 nt, Homo sapiens
  misc_RNA (1)...(19): siRNA sense strand
ccgcgacauugugcaguuu

SEQ ID NO: 135865 - RNA, 19 nt, Homo sapiens
  misc_RNA (1)...(19): siRNA sense strand
gaggcugucagaucaacuu

SEQ ID NO: 135866 - RNA, 19 nt, Homo sapiens
  misc_RNA (1)...(19): siRNA sense strand
gcuuuggaaucuaugacau

SEQ ID NO: 135867 - RNA, 19 nt, Homo sapiens
  misc_RNA (1)...(19): siRNA sense strand
cgacauugugcaguuugua

SEQ ID NO: 135868 - RNA, 19 nt, Homo sapiens
  misc_RNA (1)...(19): siRNA sense strand
uguaguaaccauggaggua

SEQ ID NO: 135869 - RNA, 19 nt, Homo sapiens
  misc_RNA (1)...(19): siRNA sense strand
gcugucagaucaacuucac

SEQ ID NO: 135870 - RNA, 19 nt, Homo sapiens
  misc_RNA (1)...(19): siRNA sense strand
uuaaaggacaaucguguag

SEQ ID NO: 135871 - RNA, 19 nt, Homo sapiens
  misc_RNA (1)...(19): siRNA sense strand
ucuauggcccuaccaacuu

SEQ ID NO: 135872 - RNA, 19 nt, Homo sapiens
  misc_RNA (1)...(19): siRNA sense strand
augggaggcugucagauca

SEQ ID NO: 135873 - RNA, 19 nt, Homo sapiens
  misc_RNA (1)...(19): siRNA sense strand
ccagggugaugggaaaugg

SEQ ID NO: 135874 - RNA, 19 nt, Homo sapiens
  misc_RNA (1)...(19): siRNA sense strand
cagcucaggaauuaaagga

SEQ ID NO: 135875 - RNA, 19 nt, Homo sapiens
  misc_RNA (1)...(19): siRNA sense strand
cagaagugcccacacaacu

SEQ ID NO: 135876 - RNA, 19 nt, Homo sapiens
  misc_RNA (1)...(19): siRNA sense strand
acaagcuguucccugcauu

SEQ ID NO: 135877 - RNA, 19 nt, Homo sapiens
  misc_RNA (1)...(19): siRNA sense strand
aagaaaagcuacaagaacu

SEQ ID NO: 135878 - RNA, 19 nt, Homo sapiens
  misc_RNA (1)...(19): siRNA sense strand
gcauccacccugagaagca

SEQ ID NO: 135879 - RNA, 19 nt, Homo sapiens
  misc_RNA (1)...(19): siRNA sense strand
acuccuuucuggacuaugu

SEQ ID NO: 135880 - RNA, 19 nt, Homo sapiens
  misc_RNA (1)...(19): siRNA sense strand
ggguggugcugacuuugag

SEQ ID NO: 135881 - RNA, 19 nt, Homo sapiens
  misc_RNA (1)...(19): siRNA sense strand
ccacacaacuggucucaua

SEQ ID NO: 135882 - RNA, 19 nt, Homo sapiens
  misc_RNA (1)...(19): siRNA sense strand
gaucugaggucaucaagaa

SEQ ID NO: 135883 - RNA, 19 nt, Homo sapiens
  misc_RNA (1)...(19): siRNA sense strand
ggucucagcucaggaauua

SEQ ID NO: 135884 - RNA, 19 nt, Homo sapiens
  misc_RNA (1)...(19): siRNA sense strand
ccagaaaccuagauaagaa

SEQ ID NO: 135885 - RNA, 19 nt, Homo sapiens
  misc_RNA (1)...(19): siRNA sense strand
caacuggucucauacuuca

SEQ ID NO: 135886 - RNA, 19 nt, Homo sapiens
  misc_RNA (1)...(19): siRNA sense strand
ggacuucacuggcuccaau

SEQ ID NO: 135887 - RNA, 19 nt, Homo sapiens
  misc_RNA (1)...(19): siRNA sense strand
guacagaucugaggucauc

SEQ ID NO: 135888 - RNA, 19 nt, Homo sapiens
  misc_RNA (1)...(19): siRNA sense strand
aaaggacaaucguguagua

SEQ ID NO: 135889 - RNA, 19 nt, Homo sapiens
  misc_RNA (1)...(19): siRNA sense strand
gcaggucucgcaugaauuu

SEQ ID NO: 135890 - RNA, 19 nt, Homo sapiens
  misc_RNA (1)...(19): siRNA sense strand
caagaacucuggaacuauc

SEQ ID NO: 135891 - RNA, 19 nt, Homo sapiens
  misc_RNA (1)...(19): siRNA sense strand
caacaggggucaaugagua

SEQ ID NO: 135892 - RNA, 19 nt, Homo sapiens
  misc_RNA (1)...(19): siRNA sense strand
uacaagaacucuggaacua

SEQ ID NO: 135893 - RNA, 19 nt, Homo sapiens
  misc_RNA (1)...(19): siRNA sense strand
gcugagggaugaugacuuc

SEQ ID NO: 135894 - RNA, 19 nt, Homo sapiens
  misc_RNA (1)...(19): siRNA sense strand
gcaugaauuugccuugaau

SEQ ID NO: 135895 - RNA, 19 nt, Homo sapiens
  misc_RNA (1)...(19): siRNA sense strand
gagggaugaugacuuccua

SEQ ID NO: 135896 - RNA, 19 nt, Homo sapiens
  misc_RNA (1)...(19): siRNA sense strand
ggacaucggcuccaagucu

SEQ ID NO: 135897 - RNA, 19 nt, Homo sapiens
  misc_RNA (1)...(19): siRNA sense strand
cgccagagcugagggauga

SEQ ID NO: 135898 - RNA, 19 nt, Homo sapiens
  misc_RNA (1)...(19): siRNA sense strand
ggaacuauccgugucaaga

SEQ ID NO: 135899 - RNA, 19 nt, Homo sapiens
  misc_RNA (1)...(19): siRNA sense strand
gaacuauccgugucaagau

SEQ ID NO: 135900 - RNA, 19 nt, Homo sapiens
  misc_RNA (1)...(19): siRNA sense strand
caagauuugucggguagaa

SEQ ID NO: 135901 - RNA, 19 nt, Homo sapiens
  misc_RNA (1)...(19): siRNA sense strand
gcagcgugguucaggacua

SEQ ID NO: 135902 - RNA, 19 nt, Homo sapiens
  misc_RNA (1)...(19): siRNA sense strand
gcuguucccugcauuugga

SEQ ID NO: 135903 - RNA, 19 nt, Homo sapiens
  misc_RNA (1)...(19): siRNA sense strand
agaaacagaguacuccuuu

SEQ ID NO: 135904 - RNA, 19 nt, Homo sapiens
  misc_RNA (1)...(19): siRNA sense strand
gguagaggccagaaaccua

SEQ ID NO: 135905 - RNA, 19 nt, Homo sapiens
  misc_RNA (1)...(19): siRNA sense strand
gugcaaugcuccgauuaug

SEQ ID NO: 135906 - RNA, 19 nt, Homo sapiens
  misc_RNA (1)...(19): siRNA sense strand
uggcaggucucgcaugaau

SEQ ID NO: 135907 - RNA, 19 nt, Homo sapiens
  misc_RNA (1)...(19): siRNA sense strand
ggacaaucguguaguaacc

SEQ ID NO: 135908 - RNA, 19 nt, Homo sapiens
  misc_RNA (1)...(19): siRNA sense strand
cuauggcccuaccaacuuu

SEQ ID NO: 135909 - RNA, 19 nt, Homo sapiens
  misc_RNA (1)...(19): siRNA sense strand
gaaugcauccacccugaga

SEQ ID NO: 135910 - RNA, 19 nt, Homo sapiens
  misc_RNA (1)...(19): siRNA sense strand
gccagaaaccuagauaaga

SEQ ID NO: 135911 - RNA, 19 nt, Homo sapiens
  misc_RNA (1)...(19): siRNA sense strand
gcuacgcuuuggaaucuau

SEQ ID NO: 135912 - RNA, 19 nt, Homo sapiens
  misc_RNA (1)...(19): siRNA sense strand
gugaccaucucauugacaa

SEQ ID NO: 135913 - RNA, 19 nt, Homo sapiens
  misc_RNA (1)...(19): siRNA sense strand
gaugggaggcugucagauc

SEQ ID NO: 135914 - RNA, 19 nt, Homo sapiens
  misc_RNA (1)...(19): siRNA sense strand
gacaagcuguucccugcau

SEQ ID NO: 135915 - RNA, 19 nt, Homo sapiens
  misc_RNA (1)...(19): siRNA sense strand
ggacugccucgcaauacuu

SEQ ID NO: 135916 - RNA, 19 nt, Homo sapiens
  misc_RNA (1)...(19): siRNA sense strand
gacccacucugcguccuuu

SEQ ID NO: 135917 - RNA, 19 nt, Homo sapiens
  misc_RNA (1)...(19): siRNA sense strand
caacuuugcacccaucauc

SEQ ID NO: 135918 - RNA, 19 nt, Homo sapiens
  misc_RNA (1)...(19): siRNA sense strand
ccaugucagugaucauugu

SEQ ID NO: 135919 - RNA, 19 nt, Homo sapiens
  misc_RNA (1)...(19): siRNA sense strand
gagcuuggccggacugaac

SEQ ID NO: 135920 - RNA, 19 nt, Homo sapiens
  misc_RNA (1)...(19): siRNA sense strand
ccucgaaccugcccauguc

SEQ ID NO: 135921 - RNA, 19 nt, Homo sapiens
  misc_RNA (1)...(19): siRNA sense strand
ggaauuaaaggacaaucgu

SEQ ID NO: 135922 - RNA, 19 nt, Homo sapiens
  misc_RNA (1)...(19): siRNA sense strand
caggugcaaugcuccgauu

SEQ ID NO: 135923 - RNA, 19 nt, Homo sapiens
  misc_RNA (1)...(19): siRNA sense strand
ucgcagaagugcccacaca

SEQ ID NO: 135924 - RNA, 19 nt, Homo sapiens
  misc_RNA (1)...(19): siRNA sense strand
ucucagcucaggaauuaaa

SEQ ID NO: 135925 - RNA, 19 nt, Homo sapiens
  misc_RNA (1)...(19): siRNA sense strand
aaacagaguacuccuuucu

SEQ ID NO: 135926 - RNA, 19 nt, Homo sapiens
  misc_RNA (1)...(19): siRNA sense strand
cagcuugaguaccgcuuug

SEQ ID NO: 135927 - RNA, 19 nt, Homo sapiens
  misc_RNA (1)...(19): siRNA sense strand
cacaacuggucucauacuu

SEQ ID NO: 135928 - RNA, 19 nt, Homo sapiens
  misc_RNA (1)...(19): siRNA sense strand
cgcaauacuucaugcuguu

SEQ ID NO: 135929 - RNA, 19 nt, Homo sapiens
  misc_RNA (1)...(19): siRNA sense strand
guacuccuuucuggacuau

SEQ ID NO: 135930 - RNA, 19 nt, Homo sapiens
  misc_RNA (1)...(19): siRNA sense strand
gauuguguccagccaggua

SEQ ID NO: 135931 - RNA, 19 nt, Homo sapiens
  misc_RNA (1)...(19): siRNA sense strand
ggagguagaggccagaaac

SEQ ID NO: 135932 - RNA, 19 nt, Homo sapiens
  misc_RNA (1)...(19): siRNA sense strand
cgcaugaauuugccuugaa

SEQ ID NO: 135933 - RNA, 19 nt, Homo sapiens
  misc_RNA (1)...(19): siRNA sense strand
ugguucagcuguccauuuc

SEQ ID NO: 135934 - RNA, 19 nt, Homo sapiens
  misc_RNA (1)...(19): siRNA sense strand
cagcgugguucaggacuau

SEQ ID NO: 135935 - RNA, 19 nt, Homo sapiens
  misc_RNA (1)...(19): siRNA sense strand
gaggccagaaaccuagaua

SEQ ID NO: 135936 - RNA, 19 nt, Homo sapiens
  misc_RNA (1)...(19): siRNA sense strand
caagcuguucccugcauuu

SEQ ID NO: 135937 - RNA, 19 nt, Homo sapiens
  misc_RNA (1)...(19): siRNA sense strand
ggucaaugaguaccugaug

SEQ ID NO: 135938 - RNA, 19 nt, Homo sapiens
  misc_RNA (1)...(19): siRNA sense strand
cggcugaguuugaaugcau

SEQ ID NO: 135939 - RNA, 19 nt, Homo sapiens
  misc_RNA (1)...(19): siRNA sense strand
ggcagucccggcugaguuu

SEQ ID NO: 135940 - RNA, 19 nt, Homo sapiens
  misc_RNA (1)...(19): siRNA sense strand
cauggaagcguuucucagu

SEQ ID NO: 135941 - RNA, 19 nt, Homo sapiens
  misc_RNA (1)...(19): siRNA sense strand
ggccagaaaccuagauaag

SEQ ID NO: 135942 - RNA, 19 nt, Homo sapiens
  misc_RNA (1)...(19): siRNA sense strand
gcccugaguucuccaagac

SEQ ID NO: 135943 - RNA, 19 nt, Homo sapiens
  misc_RNA (1)...(19): siRNA sense strand
uguggguggugcugacuuu

SEQ ID NO: 135944 - RNA, 19 nt, Homo sapiens
  misc_RNA (1)...(19): siRNA sense strand
acaaggacaucggcuccaa

SEQ ID NO: 135945 - RNA, 19 nt, Homo sapiens
  misc_RNA (1)...(19): siRNA sense strand
ccugugaccaucucauuga

SEQ ID NO: 135946 - RNA, 19 nt, Homo sapiens
  misc_RNA (1)...(19): siRNA sense strand
ccgccagggugaugggaaa

SEQ ID NO: 135947 - RNA, 19 nt, Homo sapiens
  misc_RNA (1)...(19): siRNA sense strand
gcagaagugcccacacaac

SEQ ID NO: 135948 - RNA, 19 nt, Homo sapiens
  misc_RNA (1)...(19): siRNA sense strand
gcaauacuucaugcuguug

SEQ ID NO: 135949 - RNA, 19 nt, Homo sapiens
  misc_RNA (1)...(19): siRNA sense strand
gcaggcauccagggcauug

SEQ ID NO: 135950 - RNA, 19 nt, Homo sapiens
  misc_RNA (1)...(19): siRNA sense strand
ucgcaugaauuugccuuga

SEQ ID NO: 135951 - RNA, 19 nt, Homo sapiens
  misc_RNA (1)...(19): siRNA sense strand
cuccaagacucuacagcuu

SEQ ID NO: 135952 - RNA, 19 nt, Homo sapiens
  misc_RNA (1)...(19): siRNA sense strand
ggugcaaugcuccgauuau

SEQ ID NO: 135953 - RNA, 19 nt, Homo sapiens
  misc_RNA (1)...(19): siRNA sense strand
gggacugccucgcaauacu

SEQ ID NO: 135954 - RNA, 19 nt, Homo sapiens
  misc_RNA (1)...(19): siRNA sense strand
acuggcaggucucgcauga

SEQ ID NO: 135955 - RNA, 19 nt, Homo sapiens
  misc_RNA (1)...(19): siRNA sense strand
ucaccugacucccuacacu

SEQ ID NO: 135956 - RNA, 19 nt, Homo sapiens
  misc_RNA (1)...(19): siRNA sense strand
gcgacauugugcaguuugu

SEQ ID NO: 135957 - RNA, 19 nt, Homo sapiens
  misc_RNA (1)...(19): siRNA sense strand
uaguaaccauggagguaga

SEQ ID NO: 135958 - RNA, 19 nt, Homo sapiens
  misc_RNA (1)...(19): siRNA sense strand
gcccaugucagugaucauu

SEQ ID NO: 135959 - RNA, 19 nt, Homo sapiens
  misc_RNA (1)...(19): siRNA sense strand
gaacaaccugaacccuaca

SEQ ID NO: 135960 - RNA, 19 nt, Homo sapiens
  misc_RNA (1)...(19): siRNA sense strand
gaaaccuagauaagaagga

SEQ ID NO: 135961 - RNA, 19 nt, Homo sapiens
  misc_RNA (1)...(19): siRNA sense strand
gcuuugagacaguccagaa

SEQ ID NO: 135962 - RNA, 19 nt, Homo sapiens
  misc_RNA (1)...(19): siRNA sense strand
aacuauccgugucaagauu

SEQ ID NO: 135963 - RNA, 19 nt, Homo sapiens
  misc_RNA (1)...(19): siRNA sense strand
agaccgugcucgcagaagu

SEQ ID NO: 135964 - RNA, 19 nt, Homo sapiens
  misc_RNA (1)...(19): siRNA sense strand
ccgcgacauugugcaguuu

SEQ ID NO: 135965 - RNA, 19 nt, Homo sapiens
  misc_RNA (1)...(19): siRNA sense strand
gaggcugucagaucaacuu

SEQ ID NO: 135966 - RNA, 19 nt, Homo sapiens
  misc_RNA (1)...(19): siRNA sense strand
gcuuuggaaucuaugacau

SEQ ID NO: 135967 - RNA, 19 nt, Homo sapiens
  misc_RNA (1)...(19): siRNA sense strand
cgacauugugcaguuugua

SEQ ID NO: 135968 - RNA, 19 nt, Homo sapiens
  misc_RNA (1)...(19): siRNA sense strand
uguaguaaccauggaggua

SEQ ID NO: 135969 - RNA, 19 nt, Homo sapiens
  misc_RNA (1)...(19): siRNA sense strand
gcugucagaucaacuucac

SEQ ID NO: 135970 - RNA, 19 nt, Homo sapiens
  misc_RNA (1)...(19): siRNA sense strand
uuaaaggacaaucguguag

SEQ ID NO: 135971 - RNA, 19 nt, Homo sapiens
  misc_RNA (1)...(19): siRNA sense strand
ucuauggcccuaccaacuu

SEQ ID NO: 135972 - RNA, 19 nt, Homo sapiens
  misc_RNA (1)...(19): siRNA sense strand
augggaggcugucagauca

SEQ ID NO: 135973 - RNA, 19 nt, Homo sapiens
  misc_RNA (1)...(19): siRNA sense strand
ccagggugaugggaaaugg

SEQ ID NO: 135974 - RNA, 19 nt, Homo sapiens
  misc_RNA (1)...(19): siRNA sense strand
cagcucaggaauuaaagga

SEQ ID NO: 135975 - RNA, 19 nt, Homo sapiens
  misc_RNA (1)...(19): siRNA sense strand
cagaagugcccacacaacu

SEQ ID NO: 135976 - RNA, 19 nt, Homo sapiens
  misc_RNA (1)...(19): siRNA sense strand
acaagcuguucccugcauu

SEQ ID NO: 135977 - RNA, 19 nt, Homo sapiens
  misc_RNA (1)...(19): siRNA sense strand
aagaaaagcuacaagaacu

SEQ ID NO: 135978 - RNA, 19 nt, Homo sapiens
  misc_RNA (1)...(19): siRNA sense strand
gcauccacccugagaagca

SEQ ID NO: 135979 - RNA, 19 nt, Homo sapiens
  misc_RNA (1)...(19): siRNA sense strand
acuccuuucuggacuaugu

SEQ ID NO: 135980 - RNA, 19 nt, Homo sapiens
  misc_RNA (1)...(19): siRNA sense strand
ggguggugcugacuuugag

SEQ ID NO: 135981 - RNA, 19 nt, Homo sapiens
  misc_RNA (1)...(19): siRNA sense strand
ccacacaacuggucucaua

SEQ ID NO: 135982 - RNA, 19 nt, Homo sapiens
  misc_RNA (1)...(19): siRNA sense strand
gaucugaggucaucaagaa

SEQ ID NO: 135983 - RNA, 19 nt, Homo sapiens
  misc_RNA (1)...(19): siRNA sense strand
ggucucagcucaggaauua

SEQ ID NO: 135984 - RNA, 19 nt, Homo sapiens
  misc_RNA (1)...(19): siRNA sense strand
ccagaaaccuagauaagaa

SEQ ID NO: 135985 - RNA, 19 nt, Homo sapiens
  misc_RNA (1)...(19): siRNA sense strand
caacuggucucauacuuca

SEQ ID NO: 135986 - RNA, 19 nt, Homo sapiens
  misc_RNA (1)...(19): siRNA sense strand
ggacuucacuggcuccaau

SEQ ID NO: 135987 - RNA, 19 nt, Homo sapiens
  misc_RNA (1)...(19): siRNA sense strand
guacagaucugaggucauc

SEQ ID NO: 135988 - RNA, 19 nt, Homo sapiens
  misc_RNA (1)...(19): siRNA sense strand
aaaggacaaucguguagua

SEQ ID NO: 135989 - RNA, 19 nt, Homo sapiens
  misc_RNA (1)...(19): siRNA sense strand
gcaggucucgcaugaauuu

SEQ ID NO: 135990 - RNA, 19 nt, Homo sapiens
  misc_RNA (1)...(19): siRNA sense strand
caagaacucuggaacuauc

SEQ ID NO: 135991 - RNA, 19 nt, Homo sapiens
  misc_RNA (1)...(19): siRNA sense strand
caacaggggucaaugagua

SEQ ID NO: 135992 - RNA, 19 nt, Homo sapiens
  misc_RNA (1)...(19): siRNA sense strand
uacaagaacucuggaacua

SEQ ID NO: 135993 - RNA, 19 nt, Homo sapiens
  misc_RNA (1)...(19): siRNA sense strand
gcugagggaugaugacuuc

SEQ ID NO: 135994 - RNA, 19 nt, Homo sapiens
  misc_RNA (1)...(19): siRNA sense strand
gcaugaauuugccuugaau

SEQ ID NO: 135995 - RNA, 19 nt, Homo sapiens
  misc_RNA (1)...(19): siRNA sense strand
gagggaugaugacuuccua

SEQ ID NO: 135996 - RNA, 19 nt, Homo sapiens
  misc_RNA (1)...(19): siRNA sense strand
ggacaucggcuccaagucu

SEQ ID NO: 135997 - RNA, 19 nt, Homo sapiens
  misc_RNA (1)...(19): siRNA sense strand
cgccagagcugagggauga

SEQ ID NO: 135998 - RNA, 19 nt, Homo sapiens
  misc_RNA (1)...(19): siRNA sense strand
ggaacuauccgugucaaga

SEQ ID NO: 135999 - RNA, 19 nt, Homo sapiens
  misc_RNA (1)...(19): siRNA sense strand
gaacuauccgugucaagau

SEQ ID NO: 136000 - RNA, 19 nt, Homo sapiens
  misc_RNA (1)...(19): siRNA sense strand
caagauuugucggguagaa

SEQ ID NO: 136001 - RNA, 19 nt, Homo sapiens
  misc_RNA (1)...(19): siRNA sense strand
gcagcgugguucaggacua

SEQ ID NO: 136002 - RNA, 19 nt, Homo sapiens
  misc_RNA (1)...(19): siRNA sense strand
gcuguucccugcauuugga

SEQ ID NO: 136003 - RNA, 19 nt, Homo sapiens
  misc_RNA (1)...(19): siRNA sense strand
agaaacagaguacuccuuu

SEQ ID NO: 136004 - RNA, 19 nt, Homo sapiens
  misc_RNA (1)...(19): siRNA sense strand
gguagaggccagaaaccua

SEQ ID NO: 136005 - RNA, 19 nt, Homo sapiens
  misc_RNA (1)...(19): siRNA sense strand
gugcaaugcuccgauuaug

SEQ ID NO: 136006 - RNA, 19 nt, Homo sapiens
  misc_RNA (1)...(19): siRNA sense strand
uggcaggucucgcaugaau

SEQ ID NO: 136007 - RNA, 19 nt, Homo sapiens
  misc_RNA (1)...(19): siRNA sense strand
ggacaaucguguaguaacc

SEQ ID NO: 136008 - RNA, 19 nt, Homo sapiens
  misc_RNA (1)...(19): siRNA sense strand
cuauggcccuaccaacuuu

SEQ ID NO: 136009 - RNA, 19 nt, Homo sapiens
  misc_RNA (1)...(19): siRNA sense strand
gaaugcauccacccugaga

SEQ ID NO: 136010 - RNA, 19 nt, Homo sapiens
  misc_RNA (1)...(19): siRNA sense strand
gccagaaaccuagauaaga

SEQ ID NO: 136011 - RNA, 19 nt, Homo sapiens
  misc_RNA (1)...(19): siRNA sense strand
gcuacgcuuuggaaucuau

SEQ ID NO: 136012 - RNA, 19 nt, Homo sapiens
  misc_RNA (1)...(19): siRNA sense strand
gugaccaucucauugacaa

SEQ ID NO: 136013 - RNA, 19 nt, Homo sapiens
  misc_RNA (1)...(19): siRNA sense strand
gaugggaggcugucagauc

SEQ ID NO: 136014 - RNA, 19 nt, Homo sapiens
  misc_RNA (1)...(19): siRNA sense strand
gacaagcuguucccugcau

SEQ ID NO: 136015 - RNA, 19 nt, Homo sapiens
  misc_RNA (1)...(19): siRNA sense strand
ggacugccucgcaauacuu

SEQ ID NO: 136016 - RNA, 19 nt, Homo sapiens
  misc_RNA (1)...(19): siRNA sense strand
gacccacucugcguccuuu

SEQ ID NO: 136017 - RNA, 19 nt, Homo sapiens
  misc_RNA (1)...(19): siRNA sense strand
caacuuugcacccaucauc

SEQ ID NO: 136018 - RNA, 19 nt, Homo sapiens
  misc_RNA (1)...(19): siRNA sense strand
ccaugucagugaucauugu

SEQ ID NO: 136019 - RNA, 19 nt, Homo sapiens
  misc_RNA (1)...(19): siRNA sense strand
gagcuuggccggacugaac

SEQ ID NO: 136020 - RNA, 19 nt, Homo sapiens
  misc_RNA (1)...(19): siRNA sense strand
ccucgaaccugcccauguc

SEQ ID NO: 136021 - RNA, 19 nt, Homo sapiens
  misc_RNA (1)...(19): siRNA sense strand
ggaauuaaaggacaaucgu

SEQ ID NO: 136022 - RNA, 19 nt, Homo sapiens
  misc_RNA (1)...(19): siRNA sense strand
caggugcaaugcuccgauu

SEQ ID NO: 136023 - RNA, 19 nt, Homo sapiens
  misc_RNA (1)...(19): siRNA sense strand
ucgcagaagugcccacaca

SEQ ID NO: 136024 - RNA, 19 nt, Homo sapiens
  misc_RNA (1)...(19): siRNA sense strand
ucucagcucaggaauuaaa

SEQ ID NO: 136025 - RNA, 19 nt, Homo sapiens
  misc_RNA (1)...(19): siRNA sense strand
aaacagaguacuccuuucu

SEQ ID NO: 136026 - RNA, 19 nt, Homo sapiens
  misc_RNA (1)...(19): siRNA sense strand
cagcuugaguaccgcuuug

SEQ ID NO: 136027 - RNA, 19 nt, Homo sapiens
  misc_RNA (1)...(19): siRNA sense strand
cacaacuggucucauacuu

SEQ ID NO: 136028 - RNA, 19 nt, Homo sapiens
  misc_RNA (1)...(19): siRNA sense strand
cgcaauacuucaugcuguu

SEQ ID NO: 136029 - RNA, 19 nt, Homo sapiens
  misc_RNA (1)...(19): siRNA sense strand
guacuccuuucuggacuau

SEQ ID NO: 136030 - RNA, 19 nt, Homo sapiens
  misc_RNA (1)...(19): siRNA sense strand
gauuguguccagccaggua

SEQ ID NO: 136031 - RNA, 19 nt, Homo sapiens
  misc_RNA (1)...(19): siRNA sense strand
ggagguagaggccagaaac

SEQ ID NO: 136032 - RNA, 19 nt, Homo sapiens
  misc_RNA (1)...(19): siRNA sense strand
cgcaugaauuugccuugaa

SEQ ID NO: 136033 - RNA, 19 nt, Homo sapiens
  misc_RNA (1)...(19): siRNA sense strand
ugguucagcuguccauuuc

SEQ ID NO: 136034 - RNA, 19 nt, Homo sapiens
  misc_RNA (1)...(19): siRNA sense strand
cagcgugguucaggacuau

SEQ ID NO: 136035 - RNA, 19 nt, Homo sapiens
  misc_RNA (1)...(19): siRNA sense strand
gaggccagaaaccuagaua

SEQ ID NO: 136036 - RNA, 19 nt, Homo sapiens
  misc_RNA (1)...(19): siRNA sense strand
caagcuguucccugcauuu

SEQ ID NO: 136037 - RNA, 19 nt, Homo sapiens
  misc_RNA (1)...(19): siRNA sense strand
ggucaaugaguaccugaug

SEQ ID NO: 136038 - RNA, 19 nt, Homo sapiens
  misc_RNA (1)...(19): siRNA sense strand
cggcugaguuugaaugcau

SEQ ID NO: 136039 - RNA, 19 nt, Homo sapiens
  misc_RNA (1)...(19): siRNA sense strand
ggcagucccggcugaguuu

SEQ ID NO: 136040 - RNA, 19 nt, Homo sapiens
  misc_RNA (1)...(19): siRNA sense strand
cauggaagcguuucucagu

SEQ ID NO: 136041 - RNA, 19 nt, Homo sapiens
  misc_RNA (1)...(19): siRNA sense strand
ggccagaaaccuagauaag

SEQ ID NO: 136042 - RNA, 19 nt, Homo sapiens
  misc_RNA (1)...(19): siRNA sense strand
gcccugaguucuccaagac

SEQ ID NO: 136043 - RNA, 19 nt, Homo sapiens
  misc_RNA (1)...(19): siRNA sense strand
uguggguggugcugacuuu

SEQ ID NO: 136044 - RNA, 19 nt, Homo sapiens
  misc_RNA (1)...(19): siRNA sense strand
acaaggacaucggcuccaa

SEQ ID NO: 136045 - RNA, 19 nt, Homo sapiens
  misc_RNA (1)...(19): siRNA sense strand
ccugugaccaucucauuga

SEQ ID NO: 136046 - RNA, 19 nt, Homo sapiens
  misc_RNA (1)...(19): siRNA sense strand
ccgccagggugaugggaaa

SEQ ID NO: 136047 - RNA, 19 nt, Homo sapiens
  misc_RNA (1)...(19): siRNA sense strand
gcagaagugcccacacaac

SEQ ID NO: 136048 - RNA, 19 nt, Homo sapiens
  misc_RNA (1)...(19): siRNA sense strand
gcaauacuucaugcuguug

SEQ ID NO: 136049 - RNA, 19 nt, Homo sapiens
  misc_RNA (1)...(19): siRNA sense strand
gcaggcauccagggcauug

SEQ ID NO: 136050 - RNA, 19 nt, Homo sapiens
  misc_RNA (1)...(19): siRNA sense strand
ucgcaugaauuugccuuga

SEQ ID NO: 136051 - RNA, 19 nt, Homo sapiens
  misc_RNA (1)...(19): siRNA sense strand
cuccaagacucuacagcuu

SEQ ID NO: 136052 - RNA, 19 nt, Homo sapiens
  misc_RNA (1)...(19): siRNA sense strand
ggugcaaugcuccgauuau

SEQ ID NO: 136053 - RNA, 19 nt, Homo sapiens
  misc_RNA (1)...(19): siRNA sense strand
gggacugccucgcaauacu

SEQ ID NO: 136054 - RNA, 19 nt, Homo sapiens
  misc_RNA (1)...(19): siRNA sense strand
acuggcaggucucgcauga

SEQ ID NO: 136055 - RNA, 19 nt, Homo sapiens
  misc_RNA (1)...(19): siRNA sense strand
ucaccugacucccuacacu

SEQ ID NO: 136056 - RNA, 19 nt, Homo sapiens
  misc_RNA (1)...(19): siRNA sense strand
gcgacauugugcaguuugu

SEQ ID NO: 136057 - RNA, 19 nt, Homo sapiens
  misc_RNA (1)...(19): siRNA sense strand
uaguaaccauggagguaga

SEQ ID NO: 136058 - RNA, 19 nt, Homo sapiens
  misc_RNA (1)...(19): siRNA sense strand
gcccaugucagugaucauu

SEQ ID NO: 136059 - RNA, 19 nt, Homo sapiens
  misc_RNA (1)...(19): siRNA sense strand
gaacaaccugaacccuaca

SEQ ID NO: 136060 - RNA, 19 nt, Homo sapiens
  misc_RNA (1)...(19): siRNA sense strand
gaaaccuagauaagaagga

SEQ ID NO: 136061 - RNA, 19 nt, Homo sapiens
  misc_RNA (1)...(19): siRNA sense strand
gcuuugagacaguccagaa

SEQ ID NO: 136062 - RNA, 19 nt, Homo sapiens
  misc_RNA (1)...(19): siRNA sense strand
aacuauccgugucaagauu

SEQ ID NO: 136063 - RNA, 19 nt, Homo sapiens
  misc_RNA (1)...(19): siRNA sense strand
agaccgugcucgcagaagu

SEQ ID NO: 136064 - RNA, 19 nt, Homo sapiens
  misc_RNA (1)...(19): siRNA sense strand
ccgcgacauugugcaguuu

SEQ ID NO: 136065 - RNA, 19 nt, Homo sapiens
  misc_RNA (1)...(19): siRNA sense strand
gaggcugucagaucaacuu

SEQ ID NO: 136066 - RNA, 19 nt, Homo sapiens
  misc_RNA (1)...(19): siRNA sense strand
gcuuuggaaucuaugacau

SEQ ID NO: 136067 - RNA, 19 nt, Homo sapiens
  misc_RNA (1)...(19): siRNA sense strand
cgacauugugcaguuugua

SEQ ID NO: 136068 - RNA, 19 nt, Homo sapiens
  misc_RNA (1)...(19): siRNA sense strand
uguaguaaccauggaggua

SEQ ID NO: 136069 - RNA, 19 nt, Homo sapiens
  misc_RNA (1)...(19): siRNA sense strand
gcugucagaucaacuucac

SEQ ID NO: 136070 - RNA, 19 nt, Homo sapiens
  misc_RNA (1)...(19): siRNA sense strand
uuaaaggacaaucguguag

SEQ ID NO: 136071 - RNA, 19 nt, Homo sapiens
  misc_RNA (1)...(19): siRNA sense strand
ucuauggcccuaccaacuu

SEQ ID NO: 136072 - RNA, 19 nt, Homo sapiens
  misc_RNA (1)...(19): siRNA sense strand
augggaggcugucagauca

SEQ ID NO: 136073 - RNA, 19 nt, Homo sapiens
  misc_RNA (1)...(19): siRNA sense strand
ccagggugaugggaaaugg

SEQ ID NO: 136074 - RNA, 19 nt, Homo sapiens
  misc_RNA (1)...(19): siRNA sense strand
cagcucaggaauuaaagga

SEQ ID NO: 136075 - RNA, 19 nt, Homo sapiens
  misc_RNA (1)...(19): siRNA sense strand
cagaagugcccacacaacu

SEQ ID NO: 136076 - RNA, 19 nt, Homo sapiens
  misc_RNA (1)...(19): siRNA sense strand
acaagcuguucccugcauu

SEQ ID NO: 136077 - RNA, 19 nt, Homo sapiens
  misc_RNA (1)...(19): siRNA sense strand
aagaaaagcuacaagaacu

SEQ ID NO: 136078 - RNA, 19 nt, Homo sapiens
  misc_RNA (1)...(19): siRNA sense strand
gcauccacccugagaagca

SEQ ID NO: 136079 - RNA, 19 nt, Homo sapiens
  misc_RNA (1)...(19): siRNA sense strand
acuccuuucuggacuaugu

SEQ ID NO: 136080 - RNA, 19 nt, Homo sapiens
  misc_RNA (1)...(19): siRNA sense strand
ggguggugcugacuuugag

SEQ ID NO: 136081 - RNA, 19 nt, Homo sapiens
  misc_RNA (1)...(19): siRNA sense strand
ccacacaacuggucucaua

SEQ ID NO: 136082 - RNA, 19 nt, Homo sapiens
  misc_RNA (1)...(19): siRNA sense strand
gaucugaggucaucaagaa

SEQ ID NO: 136083 - RNA, 19 nt, Homo sapiens
  misc_RNA (1)...(19): siRNA sense strand
ggucucagcucaggaauua

SEQ ID NO: 136084 - RNA, 19 nt, Homo sapiens
  misc_RNA (1)...(19): siRNA sense strand
ccagaaaccuagauaagaa

SEQ ID NO: 136085 - RNA, 19 nt, Homo sapiens
  misc_RNA (1)...(19): siRNA sense strand
caacuggucucauacuuca

SEQ ID NO: 136086 - RNA, 19 nt, Homo sapiens
  misc_RNA (1)...(19): siRNA sense strand
ggacuucacuggcuccaau

SEQ ID NO: 136087 - RNA, 19 nt, Homo sapiens
  misc_RNA (1)...(19): siRNA sense strand
guacagaucugaggucauc

SEQ ID NO: 136088 - RNA, 19 nt, Homo sapiens
  misc_RNA (1)...(19): siRNA sense strand
aaaggacaaucguguagua

SEQ ID NO: 136089 - RNA, 19 nt, Homo sapiens
  misc_RNA (1)...(19): siRNA sense strand
gcaggucucgcaugaauuu

SEQ ID NO: 136090 - RNA, 19 nt, Homo sapiens
  misc_RNA (1)...(19): siRNA sense strand
caagaacucuggaacuauc

SEQ ID NO: 136091 - RNA, 19 nt, Homo sapiens
  misc_RNA (1)...(19): siRNA sense strand
caacaggggucaaugagua

SEQ ID NO: 136092 - RNA, 19 nt, Homo sapiens
  misc_RNA (1)...(19): siRNA sense strand
uacaagaacucuggaacua

SEQ ID NO: 136093 - RNA, 19 nt, Homo sapiens
  misc_RNA (1)...(19): siRNA sense strand
gcugagggaugaugacuuc

SEQ ID NO: 136094 - RNA, 19 nt, Homo sapiens
  misc_RNA (1)...(19): siRNA sense strand
gcaugaauuugccuugaau

SEQ ID NO: 136095 - RNA, 19 nt, Homo sapiens
  misc_RNA (1)...(19): siRNA sense strand
gagggaugaugacuuccua

SEQ ID NO: 136096 - RNA, 19 nt, Homo sapiens
  misc_RNA (1)...(19): siRNA sense strand
ggacaucggcuccaagucu

SEQ ID NO: 136097 - RNA, 19 nt, Homo sapiens
  misc_RNA (1)...(19): siRNA sense strand
cgccagagcugagggauga

SEQ ID NO: 136098 - RNA, 19 nt, Homo sapiens
  misc_RNA (1)...(19): siRNA sense strand
ggaacuauccgugucaaga

SEQ ID NO: 136099 - RNA, 19 nt, Homo sapiens
  misc_RNA (1)...(19): siRNA sense strand
gaacuauccgugucaagau

SEQ ID NO: 136100 - RNA, 19 nt, Homo sapiens
  misc_RNA (1)...(19): siRNA sense strand
caagauuugucggguagaa

SEQ ID NO: 136101 - RNA, 19 nt, Homo sapiens
  misc_RNA (1)...(19): siRNA sense strand
gcagcgugguucaggacua

SEQ ID NO: 136102 - RNA, 19 nt, Homo sapiens
  misc_RNA (1)...(19): siRNA sense strand
gcuguucccugcauuugga

SEQ ID NO: 136103 - RNA, 19 nt, Homo sapiens
  misc_RNA (1)...(19): siRNA sense strand
agaaacagaguacuccuuu

SEQ ID NO: 136104 - RNA, 19 nt, Homo sapiens
  misc_RNA (1)...(19): siRNA sense strand
gguagaggccagaaaccua

SEQ ID NO: 136105 - RNA, 19 nt, Homo sapiens
  misc_RNA (1)...(19): siRNA sense strand
gugcaaugcuccgauuaug

SEQ ID NO: 136106 - RNA, 19 nt, Homo sapiens
  misc_RNA (1)...(19): siRNA sense strand
uggcaggucucgcaugaau

SEQ ID NO: 136107 - RNA, 19 nt, Homo sapiens
  misc_RNA (1)...(19): siRNA sense strand
ggacaaucguguaguaacc

SEQ ID NO: 136108 - RNA, 19 nt, Homo sapiens
  misc_RNA (1)...(19): siRNA sense strand
cuauggcccuaccaacuuu

SEQ ID NO: 136109 - RNA, 19 nt, Homo sapiens
  misc_RNA (1)...(19): siRNA sense strand
gaaugcauccacccugaga

SEQ ID NO: 136110 - RNA, 19 nt, Homo sapiens
  misc_RNA (1)...(19): siRNA sense strand
gccagaaaccuagauaaga

SEQ ID NO: 136111 - RNA, 19 nt, Homo sapiens
  misc_RNA (1)...(19): siRNA sense strand
gcuacgcuuuggaaucuau

SEQ ID NO: 136112 - RNA, 19 nt, Homo sapiens
  misc_RNA (1)...(19): siRNA sense strand
gugaccaucucauugacaa

SEQ ID NO: 136113 - RNA, 19 nt, Homo sapiens
  misc_RNA (1)...(19): siRNA sense strand
gaugggaggcugucagauc

SEQ ID NO: 136114 - RNA, 19 nt, Homo sapiens
  misc_RNA (1)...(19): siRNA sense strand
gacaagcuguucccugcau

SEQ ID NO: 136115 - RNA, 19 nt, Homo sapiens
  misc_RNA (1)...(19): siRNA sense strand
ggacugccucgcaauacuu

SEQ ID NO: 136116 - RNA, 19 nt, Homo sapiens
  misc_RNA (1)...(19): siRNA sense strand
gacccacucugcguccuuu

SEQ ID NO: 136117 - RNA, 19 nt, Homo sapiens
  misc_RNA (1)...(19): siRNA sense strand
caacuuugcacccaucauc

SEQ ID NO: 136118 - RNA, 19 nt, Homo sapiens
  misc_RNA (1)...(19): siRNA sense strand
ccaugucagugaucauugu

SEQ ID NO: 136119 - RNA, 19 nt, Homo sapiens
  misc_RNA (1)...(19): siRNA sense strand
gagcuuggccggacugaac

SEQ ID NO: 136120 - RNA, 19 nt, Homo sapiens
  misc_RNA (1)...(19): siRNA sense strand
ccucgaaccugcccauguc

SEQ ID NO: 136121 - RNA, 19 nt, Homo sapiens
  misc_RNA (1)...(19): siRNA sense strand
ggaauuaaaggacaaucgu

SEQ ID NO: 136122 - RNA, 19 nt, Homo sapiens
  misc_RNA (1)...(19): siRNA sense strand
caggugcaaugcuccgauu

SEQ ID NO: 136123 - RNA, 19 nt, Homo sapiens
  misc_RNA (1)...(19): siRNA sense strand
ucgcagaagugcccacaca

SEQ ID NO: 136124 - RNA, 19 nt, Homo sapiens
  misc_RNA (1)...(19): siRNA sense strand
ucucagcucaggaauuaaa

SEQ ID NO: 136125 - RNA, 19 nt, Homo sapiens
  misc_RNA (1)...(19): siRNA sense strand
aaacagaguacuccuuucu

SEQ ID NO: 136126 - RNA, 19 nt, Homo sapiens
  misc_RNA (1)...(19): siRNA sense strand
cagcuugaguaccgcuuug

SEQ ID NO: 136127 - RNA, 19 nt, Homo sapiens
  misc_RNA (1)...(19): siRNA sense strand
cacaacuggucucauacuu

SEQ ID NO: 136128 - RNA, 19 nt, Homo sapiens
  misc_RNA (1)...(19): siRNA sense strand
cgcaauacuucaugcuguu

SEQ ID NO: 136129 - RNA, 19 nt, Homo sapiens
  misc_RNA (1)...(19): siRNA sense strand
guacuccuuucuggacuau

SEQ ID NO: 136130 - RNA, 19 nt, Homo sapiens
  misc_RNA (1)...(19): siRNA sense strand
gauuguguccagccaggua

SEQ ID NO: 136131 - RNA, 19 nt, Homo sapiens
  misc_RNA (1)...(19): siRNA sense strand
ggagguagaggccagaaac

SEQ ID NO: 136132 - RNA, 19 nt, Homo sapiens
  misc_RNA (1)...(19): siRNA sense strand
cgcaugaauuugccuugaa

SEQ ID NO: 136133 - RNA, 19 nt, Homo sapiens
  misc_RNA (1)...(19): siRNA sense strand
ugguucagcuguccauuuc

SEQ ID NO: 136134 - RNA, 19 nt, Homo sapiens
  misc_RNA (1)...(19): siRNA sense strand
cagcgugguucaggacuau

SEQ ID NO: 136135 - RNA, 19 nt, Homo sapiens
  misc_RNA (1)...(19): siRNA sense strand
gaggccagaaaccuagaua

SEQ ID NO: 136136 - RNA, 19 nt, Homo sapiens
  misc_RNA (1)...(19): siRNA sense strand
caagcuguucccugcauuu

SEQ ID NO: 136137 - RNA, 19 nt, Homo sapiens
  misc_RNA (1)...(19): siRNA sense strand
ggucaaugaguaccugaug

SEQ ID NO: 136138 - RNA, 19 nt, Homo sapiens
  misc_RNA (1)...(19): siRNA sense strand
cggcugaguuugaaugcau

SEQ ID NO: 136139 - RNA, 19 nt, Homo sapiens
  misc_RNA (1)...(19): siRNA sense strand
ggcagucccggcugaguuu

SEQ ID NO: 136140 - RNA, 19 nt, Homo sapiens
  misc_RNA (1)...(19): siRNA sense strand
cauggaagcguuucucagu

SEQ ID NO: 136141 - RNA, 19 nt, Homo sapiens
  misc_RNA (1)...(19): siRNA sense strand
ggccagaaaccuagauaag

SEQ ID NO: 136142 - RNA, 19 nt, Homo sapiens
  misc_RNA (1)...(19): siRNA sense strand
gcccugaguucuccaagac

SEQ ID NO: 136143 - RNA, 19 nt, Homo sapiens
  misc_RNA (1)...(19): siRNA sense strand
uguggguggugcugacuuu

SEQ ID NO: 136144 - RNA, 19 nt, Homo sapiens
  misc_RNA (1)...(19): siRNA sense strand
acaaggacaucggcuccaa

SEQ ID NO: 136145 - RNA, 19 nt, Homo sapiens
  misc_RNA (1)...(19): siRNA sense strand
ccugugaccaucucauuga

SEQ ID NO: 136146 - RNA, 19 nt, Homo sapiens
  misc_RNA (1)...(19): siRNA sense strand
ccgccagggugaugggaaa

SEQ ID NO: 136147 - RNA, 19 nt, Homo sapiens
  misc_RNA (1)...(19): siRNA sense strand
gcagaagugcccacacaac

SEQ ID NO: 136148 - RNA, 19 nt, Homo sapiens
  misc_RNA (1)...(19): siRNA sense strand
gcaauacuucaugcuguug

SEQ ID NO: 136149 - RNA, 19 nt, Homo sapiens
  misc_RNA (1)...(19): siRNA sense strand
gcaggcauccagggcauug

SEQ ID NO: 136150 - RNA, 19 nt, Homo sapiens
  misc_RNA (1)...(19): siRNA sense strand
ucgcaugaauuugccuuga

SEQ ID NO: 136151 - RNA, 19 nt, Homo sapiens
  misc_RNA (1)...(19): siRNA sense strand
cuccaagacucuacagcuu

SEQ ID NO: 136152 - RNA, 19 nt, Homo sapiens
  misc_RNA (1)...(19): siRNA sense strand
ggugcaaugcuccgauuau

SEQ ID NO: 136153 - RNA, 19 nt, Homo sapiens
  misc_RNA (1)...(19): siRNA sense strand
gggacugccucgcaauacu

SEQ ID NO: 136154 - RNA, 19 nt, Homo sapiens
  misc_RNA (1)...(19): siRNA sense strand
acuggcaggucucgcauga

SEQ ID NO: 136155 - RNA, 19 nt, Homo sapiens
  misc_RNA (1)...(19): siRNA sense strand
ucaccugacucccuacacu

SEQ ID NO: 136156 - RNA, 19 nt, Homo sapiens
  misc_RNA (1)...(19): siRNA sense strand
gcgacauugugcaguuugu

SEQ ID NO: 136157 - RNA, 19 nt, Homo sapiens
  misc_RNA (1)...(19): siRNA sense strand
uaguaaccauggagguaga

SEQ ID NO: 136158 - RNA, 19 nt, Homo sapiens
  misc_RNA (1)...(19): siRNA sense strand
gcccaugucagugaucauu

SEQ ID NO: 136159 - RNA, 19 nt, Homo sapiens
  misc_RNA (1)...(19): siRNA sense strand
gaacaaccugaacccuaca

SEQ ID NO: 136160 - RNA, 19 nt, Homo sapiens
  misc_RNA (1)...(19): siRNA sense strand
gaaaccuagauaagaagga

SEQ ID NO: 136161 - RNA, 19 nt, Homo sapiens
  misc_RNA (1)...(19): siRNA sense strand
gcuuugagacaguccagaa

SEQ ID NO: 136162 - RNA, 19 nt, Homo sapiens
  misc_RNA (1)...(19): siRNA sense strand
aacuauccgugucaagauu

SEQ ID NO: 136163 - RNA, 19 nt, Homo sapiens
  misc_RNA (1)...(19): siRNA sense strand
agaccgugcucgcagaagu

SEQ ID NO: 136164 - RNA, 19 nt, Homo sapiens
  misc_RNA (1)...(19): siRNA sense strand
ccgcgacauugugcaguuu

SEQ ID NO: 136165 - RNA, 19 nt, Homo sapiens
  misc_RNA (1)...(19): siRNA sense strand
gaggcugucagaucaacuu

SEQ ID NO: 136166 - RNA, 19 nt, Homo sapiens
  misc_RNA (1)...(19): siRNA sense strand
gcuuuggaaucuaugacau

SEQ ID NO: 136167 - RNA, 19 nt, Homo sapiens
  misc_RNA (1)...(19): siRNA sense strand
cgacauugugcaguuugua

SEQ ID NO: 136168 - RNA, 19 nt, Homo sapiens
  misc_RNA (1)...(19): siRNA sense strand
uguaguaaccauggaggua

SEQ ID NO: 136169 - RNA, 19 nt, Homo sapiens
  misc_RNA (1)...(19): siRNA sense strand
gcugucagaucaacuucac

SEQ ID NO: 136170 - RNA, 19 nt, Homo sapiens
  misc_RNA (1)...(19): siRNA sense strand
uuaaaggacaaucguguag

SEQ ID NO: 136171 - RNA, 19 nt, Homo sapiens
  misc_RNA (1)...(19): siRNA sense strand
ucuauggcccuaccaacuu

SEQ ID NO: 136172 - RNA, 19 nt, Homo sapiens
  misc_RNA (1)...(19): siRNA sense strand
augggaggcugucagauca

SEQ ID NO: 136173 - RNA, 19 nt, Homo sapiens
  misc_RNA (1)...(19): siRNA sense strand
ccagggugaugggaaaugg

SEQ ID NO: 136174 - RNA, 19 nt, Homo sapiens
  misc_RNA (1)...(19): siRNA sense strand
cagcucaggaauuaaagga

SEQ ID NO: 136175 - RNA, 19 nt, Homo sapiens
  misc_RNA (1)...(19): siRNA sense strand
cagaagugcccacacaacu

SEQ ID NO: 136176 - RNA, 19 nt, Homo sapiens
  misc_RNA (1)...(19): siRNA sense strand
acaagcuguucccugcauu

SEQ ID NO: 136177 - RNA, 19 nt, Homo sapiens
  misc_RNA (1)...(19): siRNA sense strand
aagaaaagcuacaagaacu

SEQ ID NO: 136178 - RNA, 19 nt, Homo sapiens
  misc_RNA (1)...(19): siRNA sense strand
gcauccacccugagaagca

SEQ ID NO: 136179 - RNA, 19 nt, Homo sapiens
  misc_RNA (1)...(19): siRNA sense strand
acuccuuucuggacuaugu

SEQ ID NO: 136180 - RNA, 19 nt, Homo sapiens
  misc_RNA (1)...(19): siRNA sense strand
ggguggugcugacuuugag

SEQ ID NO: 136181 - RNA, 19 nt, Homo sapiens
  misc_RNA (1)...(19): siRNA sense strand
ccacacaacuggucucaua

SEQ ID NO: 136182 - RNA, 19 nt, Homo sapiens
  misc_RNA (1)...(19): siRNA sense strand
gaucugaggucaucaagaa

SEQ ID NO: 136183 - RNA, 19 nt, Homo sapiens
  misc_RNA (1)...(19): siRNA sense strand
ggucucagcucaggaauua

SEQ ID NO: 136184 - RNA, 19 nt, Homo sapiens
  misc_RNA (1)...(19): siRNA sense strand
ccagaaaccuagauaagaa

SEQ ID NO: 136185 - RNA, 19 nt, Homo sapiens
  misc_RNA (1)...(19): siRNA sense strand
caacuggucucauacuuca

SEQ ID NO: 136186 - RNA, 19 nt, Homo sapiens
  misc_RNA (1)...(19): siRNA sense strand
ggacuucacuggcuccaau

SEQ ID NO: 136187 - RNA, 19 nt, Homo sapiens
  misc_RNA (1)...(19): siRNA sense strand
guacagaucugaggucauc

SEQ ID NO: 136188 - RNA, 19 nt, Homo sapiens
  misc_RNA (1)...(19): siRNA sense strand
aaaggacaaucguguagua

SEQ ID NO: 136189 - RNA, 19 nt, Homo sapiens
  misc_RNA (1)...(19): siRNA sense strand
gcaggucucgcaugaauuu

SEQ ID NO: 136190 - RNA, 19 nt, Homo sapiens
  misc_RNA (1)...(19): siRNA sense strand
caagaacucuggaacuauc

SEQ ID NO: 136191 - RNA, 19 nt, Homo sapiens
  misc_RNA (1)...(19): siRNA sense strand
caacaggggucaaugagua

SEQ ID NO: 136192 - RNA, 19 nt, Homo sapiens
  misc_RNA (1)...(19): siRNA sense strand
uacaagaacucuggaacua

SEQ ID NO: 136193 - RNA, 19 nt, Homo sapiens
  misc_RNA (1)...(19): siRNA sense strand
gcugagggaugaugacuuc

SEQ ID NO: 136194 - RNA, 19 nt, Homo sapiens
  misc_RNA (1)...(19): siRNA sense strand
gcaugaauuugccuugaau

SEQ ID NO: 136195 - RNA, 19 nt, Homo sapiens
  misc_RNA (1)...(19): siRNA sense strand
gagggaugaugacuuccua

SEQ ID NO: 136196 - RNA, 19 nt, Homo sapiens
  misc_RNA (1)...(19): siRNA sense strand
ggacaucggcuccaagucu

SEQ ID NO: 136197 - RNA, 19 nt, Homo sapiens
  misc_RNA (1)...(19): siRNA sense strand
cgccagagcugagggauga

SEQ ID NO: 136198 - RNA, 19 nt, Homo sapiens
  misc_RNA (1)...(19): siRNA sense strand
ggaacuauccgugucaaga

SEQ ID NO: 136199 - RNA, 19 nt, Homo sapiens
  misc_RNA (1)...(19): siRNA sense strand
gaacuauccgugucaagau

SEQ ID NO: 136200 - RNA, 19 nt, Homo sapiens
  misc_RNA (1)...(19): siRNA sense strand
caagauuugucggguagaa

SEQ ID NO: 136201 - RNA, 19 nt, Homo sapiens
  misc_RNA (1)...(19): siRNA sense strand
gcagcgugguucaggacua

SEQ ID NO: 136202 - RNA, 19 nt, Homo sapiens
  misc_RNA (1)...(19): siRNA sense strand
gcuguucccugcauuugga

SEQ ID NO: 136203 - RNA, 19 nt, Homo sapiens
  misc_RNA (1)...(19): siRNA sense strand
agaaacagaguacuccuuu

SEQ ID NO: 136204 - RNA, 19 nt, Homo sapiens
  misc_RNA (1)...(19): siRNA sense strand
gguagaggccagaaaccua

SEQ ID NO: 136205 - RNA, 19 nt, Homo sapiens
  misc_RNA (1)...(19): siRNA sense strand
gugcaaugcuccgauuaug

SEQ ID NO: 136206 - RNA, 19 nt, Homo sapiens
  misc_RNA (1)...(19): siRNA sense strand
uggcaggucucgcaugaau

SEQ ID NO: 136207 - RNA, 19 nt, Homo sapiens
  misc_RNA (1)...(19): siRNA sense strand
ggacaaucguguaguaacc

SEQ ID NO: 136208 - RNA, 19 nt, Homo sapiens
  misc_RNA (1)...(19): siRNA sense strand
cuauggcccuaccaacuuu

SEQ ID NO: 136209 - RNA, 19 nt, Homo sapiens
  misc_RNA (1)...(19): siRNA sense strand
gaaugcauccacccugaga

SEQ ID NO: 136210 - RNA, 19 nt, Homo sapiens
  misc_RNA (1)...(19): siRNA sense strand
gccagaaaccuagauaaga

SEQ ID NO: 136211 - RNA, 19 nt, Homo sapiens
  misc_RNA (1)...(19): siRNA sense strand
gcuacgcuuuggaaucuau

SEQ ID NO: 136212 - RNA, 19 nt, Homo sapiens
  misc_RNA (1)...(19): siRNA sense strand
gugaccaucucauugacaa

SEQ ID NO: 136213 - RNA, 19 nt, Homo sapiens
  misc_RNA (1)...(19): siRNA sense strand
gaugggaggcugucagauc

SEQ ID NO: 136214 - RNA, 19 nt, Homo sapiens
  misc_RNA (1)...(19): siRNA sense strand
gacaagcuguucccugcau

SEQ ID NO: 136215 - RNA, 19 nt, Homo sapiens
  misc_RNA (1)...(19): siRNA sense strand
ggacugccucgcaauacuu

SEQ ID NO: 136216 - RNA, 19 nt, Homo sapiens
  misc_RNA (1)...(19): siRNA sense strand
gacccacucugcguccuuu

SEQ ID NO: 136217 - RNA, 19 nt, Homo sapiens
  misc_RNA (1)...(19): siRNA sense strand
caacuuugcacccaucauc

SEQ ID NO: 136218 - RNA, 19 nt, Homo sapiens
  misc_RNA (1)...(19): siRNA sense strand
ccaugucagugaucauugu

SEQ ID NO: 136219 - RNA, 19 nt, Homo sapiens
  misc_RNA (1)...(19): siRNA sense strand
gagcuuggccggacugaac

SEQ ID NO: 136220 - RNA, 19 nt, Homo sapiens
  misc_RNA (1)...(19): siRNA sense strand
ccucgaaccugcccauguc

SEQ ID NO: 136221 - RNA, 19 nt, Homo sapiens
  misc_RNA (1)...(19): siRNA sense strand
ggaauuaaaggacaaucgu

SEQ ID NO: 136222 - RNA, 19 nt, Homo sapiens
  misc_RNA (1)...(19): siRNA sense strand
caggugcaaugcuccgauu

SEQ ID NO: 136223 - RNA, 19 nt, Homo sapiens
  misc_RNA (1)...(19): siRNA sense strand
ucgcagaagugcccacaca

SEQ ID NO: 136224 - RNA, 19 nt, Homo sapiens
  misc_RNA (1)...(19): siRNA sense strand
ucucagcucaggaauuaaa

SEQ ID NO: 136225 - RNA, 19 nt, Homo sapiens
  misc_RNA (1)...(19): siRNA sense strand
aaacagaguacuccuuucu

SEQ ID NO: 136226 - RNA, 19 nt, Homo sapiens
  misc_RNA (1)...(19): siRNA sense strand
cagcuugaguaccgcuuug

SEQ ID NO: 136227 - RNA, 19 nt, Homo sapiens
  misc_RNA (1)...(19): siRNA sense strand
cacaacuggucucauacuu

SEQ ID NO: 136228 - RNA, 19 nt, Homo sapiens
  misc_RNA (1)...(19): siRNA sense strand
cgcaauacuucaugcuguu

SEQ ID NO: 136229 - RNA, 19 nt, Homo sapiens
  misc_RNA (1)...(19): siRNA sense strand
guacuccuuucuggacuau

SEQ ID NO: 136230 - RNA, 19 nt, Homo sapiens
  misc_RNA (1)...(19): siRNA sense strand
gauuguguccagccaggua

SEQ ID NO: 136231 - RNA, 19 nt, Homo sapiens
  misc_RNA (1)...(19): siRNA sense strand
ggagguagaggccagaaac

SEQ ID NO: 136232 - RNA, 19 nt, Homo sapiens
  misc_RNA (1)...(19): siRNA sense strand
cgcaugaauuugccuugaa

SEQ ID NO: 136233 - RNA, 19 nt, Homo sapiens
  misc_RNA (1)...(19): siRNA sense strand
ugguucagcuguccauuuc

SEQ ID NO: 136234 - RNA, 19 nt, Homo sapiens
  misc_RNA (1)...(19): siRNA sense strand
cagcgugguucaggacuau

SEQ ID NO: 136235 - RNA, 19 nt, Homo sapiens
  misc_RNA (1)...(19): siRNA sense strand
gaggccagaaaccuagaua

SEQ ID NO: 136236 - RNA, 19 nt, Homo sapiens
  misc_RNA (1)...(19): siRNA sense strand
caagcuguucccugcauuu

SEQ ID NO: 136237 - RNA, 19 nt, Homo sapiens
  misc_RNA (1)...(19): siRNA sense strand
ggucaaugaguaccugaug

SEQ ID NO: 136238 - RNA, 19 nt, Homo sapiens
  misc_RNA (1)...(19): siRNA sense strand
cggcugaguuugaaugcau

SEQ ID NO: 136239 - RNA, 19 nt, Homo sapiens
  misc_RNA (1)...(19): siRNA sense strand
ggcagucccggcugaguuu

SEQ ID NO: 136240 - RNA, 19 nt, Homo sapiens
  misc_RNA (1)...(19): siRNA sense strand
cauggaagcguuucucagu

SEQ ID NO: 136241 - RNA, 19 nt, Homo sapiens
  misc_RNA (1)...(19): siRNA sense strand
ggccagaaaccuagauaag

SEQ ID NO: 136242 - RNA, 19 nt, Homo sapiens
  misc_RNA (1)...(19): siRNA sense strand
gcccugaguucuccaagac

SEQ ID NO: 136243 - RNA, 19 nt, Homo sapiens
  misc_RNA (1)...(19): siRNA sense strand
uguggguggugcugacuuu

SEQ ID NO: 136244 - RNA, 19 nt, Homo sapiens
  misc_RNA (1)...(19): siRNA sense strand
acaaggacaucggcuccaa

SEQ ID NO: 136245 - RNA, 19 nt, Homo sapiens
  misc_RNA (1)...(19): siRNA sense strand
ccugugaccaucucauuga

SEQ ID NO: 136246 - RNA, 19 nt, Homo sapiens
  misc_RNA (1)...(19): siRNA sense strand
ccgccagggugaugggaaa

SEQ ID NO: 136247 - RNA, 19 nt, Homo sapiens
  misc_RNA (1)...(19): siRNA sense strand
gcagaagugcccacacaac

SEQ ID NO: 136248 - RNA, 19 nt, Homo sapiens
  misc_RNA (1)...(19): siRNA sense strand
gcaauacuucaugcuguug

SEQ ID NO: 136249 - RNA, 19 nt, Homo sapiens
  misc_RNA (1)...(19): siRNA sense strand
gcaggcauccagggcauug

SEQ ID NO: 136250 - RNA, 19 nt, Homo sapiens
  misc_RNA (1)...(19): siRNA sense strand
ucgcaugaauuugccuuga

SEQ ID NO: 136251 - RNA, 19 nt, Homo sapiens
  misc_RNA (1)...(19): siRNA sense strand
cuccaagacucuacagcuu

SEQ ID NO: 136252 - RNA, 19 nt, Homo sapiens
  misc_RNA (1)...(19): siRNA sense strand
ggugcaaugcuccgauuau

SEQ ID NO: 136253 - RNA, 19 nt, Homo sapiens
  misc_RNA (1)...(19): siRNA sense strand
gggacugccucgcaauacu

SEQ ID NO: 136254 - RNA, 19 nt, Homo sapiens
  misc_RNA (1)...(19): siRNA sense strand
acuggcaggucucgcauga

SEQ ID NO: 136255 - RNA, 19 nt, Homo sapiens
  misc_RNA (1)...(19): siRNA sense strand
ucaccugacucccuacacu

SEQ ID NO: 136256 - RNA, 19 nt, Homo sapiens
  misc_RNA (1)...(19): siRNA sense strand
gcgacauugugcaguuugu

SEQ ID NO: 136257 - RNA, 19 nt, Homo sapiens
  misc_RNA (1)...(19): siRNA sense strand
uaguaaccauggagguaga

SEQ ID NO: 136258 - RNA, 19 nt, Homo sapiens
  misc_RNA (1)...(19): siRNA sense strand
gcccaugucagugaucauu

SEQ ID NO: 136259 - RNA, 19 nt, Homo sapiens
  misc_RNA (1)...(19): siRNA sense strand
gaacaaccugaacccuaca

SEQ ID NO: 136260 - RNA, 19 nt, Homo sapiens
  misc_RNA (1)...(19): siRNA sense strand
gaaaccuagauaagaagga

SEQ ID NO: 136261 - RNA, 19 nt, Homo sapiens
  misc_RNA (1)...(19): siRNA sense strand
gcuuugagacaguccagaa

SEQ ID NO: 136262 - RNA, 19 nt, Homo sapiens
  misc_RNA (1)...(19): siRNA sense strand
aacuauccgugucaagauu

SEQ ID NO: 136263 - RNA, 19 nt, Homo sapiens
  misc_RNA (1)...(19): siRNA sense strand
agaccgugcucgcagaagu

SEQ ID NO: 136264 - RNA, 19 nt, Homo sapiens
  misc_RNA (1)...(19): siRNA sense strand
ccgcgacauugugcaguuu

SEQ ID NO: 136265 - RNA, 19 nt, Homo sapiens
  misc_RNA (1)...(19): siRNA sense strand
gaggcugucagaucaacuu

SEQ ID NO: 136266 - RNA, 19 nt, Homo sapiens
  misc_RNA (1)...(19): siRNA sense strand
gcuuuggaaucuaugacau

SEQ ID NO: 136267 - RNA, 19 nt, Homo sapiens
  misc_RNA (1)...(19): siRNA sense strand
cgacauugugcaguuugua

SEQ ID NO: 136268 - RNA, 19 nt, Homo sapiens
  misc_RNA (1)...(19): siRNA sense strand
uguaguaaccauggaggua

SEQ ID NO: 136269 - RNA, 19 nt, Homo sapiens
  misc_RNA (1)...(19): siRNA sense strand
gcugucagaucaacuucac

SEQ ID NO: 136270 - RNA, 19 nt, Homo sapiens
  misc_RNA (1)...(19): siRNA sense strand
uuaaaggacaaucguguag

SEQ ID NO: 136271 - RNA, 19 nt, Homo sapiens
  misc_RNA (1)...(19): siRNA sense strand
ucuauggcccuaccaacuu

SEQ ID NO: 136272 - RNA, 19 nt, Homo sapiens
  misc_RNA (1)...(19): siRNA sense strand
augggaggcugucagauca

SEQ ID NO: 136273 - RNA, 19 nt, Homo sapiens
  misc_RNA (1)...(19): siRNA sense strand
ccagggugaugggaaaugg

SEQ ID NO: 136274 - RNA, 19 nt, Homo sapiens
  misc_RNA (1)...(19): siRNA sense strand
cagcucaggaauuaaagga

SEQ ID NO: 136275 - RNA, 19 nt, Homo sapiens
  misc_RNA (1)...(19): siRNA sense strand
cagaagugcccacacaacu

SEQ ID NO: 136276 - RNA, 19 nt, Homo sapiens
  misc_RNA (1)...(19): siRNA sense strand
acaagcuguucccugcauu

SEQ ID NO: 136277 - RNA, 19 nt, Homo sapiens
  misc_RNA (1)...(19): siRNA sense strand
aagaaaagcuacaagaacu

SEQ ID NO: 136278 - RNA, 19 nt, Homo sapiens
  misc_RNA (1)...(19): siRNA sense strand
gcauccacccugagaagca

SEQ ID NO: 136279 - RNA, 19 nt, Homo sapiens
  misc_RNA (1)...(19): siRNA sense strand
acuccuuucuggacuaugu

SEQ ID NO: 136280 - RNA, 19 nt, Homo sapiens
  misc_RNA (1)...(19): siRNA sense strand
ggguggugcugacuuugag

SEQ ID NO: 136281 - RNA, 19 nt, Homo sapiens
  misc_RNA (1)...(19): siRNA sense strand
gaaaugcgguccuguuuga

SEQ ID NO: 136282 - RNA, 19 nt, Homo sapiens
  misc_RNA (1)...(19): siRNA sense strand
gcagugagaccaugaauga

SEQ ID NO: 136283 - RNA, 19 nt, Homo sapiens
  misc_RNA (1)...(19): siRNA sense strand
gcagagagguuugcuccaa

SEQ ID NO: 136284 - RNA, 19 nt, Homo sapiens
  misc_RNA (1)...(19): siRNA sense strand
gguucuagcugucaacauu

SEQ ID NO: 136285 - RNA, 19 nt, Homo sapiens
  misc_RNA (1)...(19): siRNA sense strand
ccaacagcaucaagaauga

SEQ ID NO: 136286 - RNA, 19 nt, Homo sapiens
  misc_RNA (1)...(19): siRNA sense strand
ucagaauccucaauccuaa

SEQ ID NO: 136287 - RNA, 19 nt, Homo sapiens
  misc_RNA (1)...(19): siRNA sense strand
gcucagcacucgccucugu

SEQ ID NO: 136288 - RNA, 19 nt, Homo sapiens
  misc_RNA (1)...(19): siRNA sense strand
ggagagcccuggaacuaag

SEQ ID NO: 136289 - RNA, 19 nt, Homo sapiens
  misc_RNA (1)...(19): siRNA sense strand
ucacccagcucuucagaau

SEQ ID NO: 136290 - RNA, 19 nt, Homo sapiens
  misc_RNA (1)...(19): siRNA sense strand
aaacccugcuuugcuguua

SEQ ID NO: 136291 - RNA, 19 nt, Homo sapiens
  misc_RNA (1)...(19): siRNA sense strand
gaacaacuugccuguggaa

SEQ ID NO: 136292 - RNA, 19 nt, Homo sapiens
  misc_RNA (1)...(19): siRNA sense strand
ggaaaugcgguccuguuug

SEQ ID NO: 136293 - RNA, 19 nt, Homo sapiens
  misc_RNA (1)...(19): siRNA sense strand
gugcccaacugcuucauga

SEQ ID NO: 136294 - RNA, 19 nt, Homo sapiens
  misc_RNA (1)...(19): siRNA sense strand
ccucacagcuccuggaucu

SEQ ID NO: 136295 - RNA, 19 nt, Homo sapiens
  misc_RNA (1)...(19): siRNA sense strand
ggaagcaaaggaaagcaaa

SEQ ID NO: 136296 - RNA, 19 nt, Homo sapiens
  misc_RNA (1)...(19): siRNA sense strand
gacacacucuuccggaaau

SEQ ID NO: 136297 - RNA, 19 nt, Homo sapiens
  misc_RNA (1)...(19): siRNA sense strand
ggagcuacaugccuacucu

SEQ ID NO: 136298 - RNA, 19 nt, Homo sapiens
  misc_RNA (1)...(19): siRNA sense strand
gaugcccaccugcucauua

SEQ ID NO: 136299 - RNA, 19 nt, Homo sapiens
  misc_RNA (1)...(19): siRNA sense strand
caacuugccuguggaaucg

SEQ ID NO: 136300 - RNA, 19 nt, Homo sapiens
  misc_RNA (1)...(19): siRNA sense strand
ucccagaucucaaaguguu

SEQ ID NO: 136301 - RNA, 19 nt, Homo sapiens
  misc_RNA (1)...(19): siRNA sense strand
ucacagcccucaugaagcu

SEQ ID NO: 136302 - RNA, 19 nt, Homo sapiens
  misc_RNA (1)...(19): siRNA sense strand
caucccagaucucaaagug

SEQ ID NO: 136303 - RNA, 19 nt, Homo sapiens
  misc_RNA (1)...(19): siRNA sense strand
ggaaauacgaccacaugag

SEQ ID NO: 136304 - RNA, 19 nt, Homo sapiens
  misc_RNA (1)...(19): siRNA sense strand
gcaaaggaaagcaaagaag

SEQ ID NO: 136305 - RNA, 19 nt, Homo sapiens
  misc_RNA (1)...(19): siRNA sense strand
caugggcucugcugagaug

SEQ ID NO: 136306 - RNA, 19 nt, Homo sapiens
  misc_RNA (1)...(19): siRNA sense strand
aagaggaagugcuggcauu

SEQ ID NO: 136307 - RNA, 19 nt, Homo sapiens
  misc_RNA (1)...(19): siRNA sense strand
gggccaugcuucuauugga

SEQ ID NO: 136308 - RNA, 19 nt, Homo sapiens
  misc_RNA (1)...(19): siRNA sense strand
gccagccacucgaggauau

SEQ ID NO: 136309 - RNA, 19 nt, Homo sapiens
  misc_RNA (1)...(19): siRNA sense strand
gacaggaacauuagguaug

SEQ ID NO: 136310 - RNA, 19 nt, Homo sapiens
  misc_RNA (1)...(19): siRNA sense strand
gugcuggcauugcuggaaa

SEQ ID NO: 136311 - RNA, 19 nt, Homo sapiens
  misc_RNA (1)...(19): siRNA sense strand
cagccgaaaugccggaaau

SEQ ID NO: 136312 - RNA, 19 nt, Homo sapiens
  misc_RNA (1)...(19): siRNA sense strand
ggaccucaucgaagagauu

SEQ ID NO: 136313 - RNA, 19 nt, Homo sapiens
  misc_RNA (1)...(19): siRNA sense strand
gcucuacguccacauguug

SEQ ID NO: 136314 - RNA, 19 nt, Homo sapiens
  misc_RNA (1)...(19): siRNA sense strand
gaugaggaagcaaaggaaa

SEQ ID NO: 136315 - RNA, 19 nt, Homo sapiens
  misc_RNA (1)...(19): siRNA sense strand
guccugcccuccugaccua

SEQ ID NO: 136316 - RNA, 19 nt, Homo sapiens
  misc_RNA (1)...(19): siRNA sense strand
gugagaccaugaaugacuu

SEQ ID NO: 136317 - RNA, 19 nt, Homo sapiens
  misc_RNA (1)...(19): siRNA sense strand
cggaaaugcgguccuguuu

SEQ ID NO: 136318 - RNA, 19 nt, Homo sapiens
  misc_RNA (1)...(19): siRNA sense strand
ucuuugaggugaacaacuu

SEQ ID NO: 136319 - RNA, 19 nt, Homo sapiens
  misc_RNA (1)...(19): siRNA sense strand
gccaggugguguccaucua

SEQ ID NO: 136320 - RNA, 19 nt, Homo sapiens
  misc_RNA (1)...(19): siRNA sense strand
ggaacugcgaggagauuga

SEQ ID NO: 136321 - RNA, 19 nt, Homo sapiens
  misc_RNA (1)...(19): siRNA sense strand
accaaacgcuggcacauag

SEQ ID NO: 136322 - RNA, 19 nt, Homo sapiens
  misc_RNA (1)...(19): siRNA sense strand
gaucgccuccuccagauuc

SEQ ID NO: 136323 - RNA, 19 nt, Homo sapiens
  misc_RNA (1)...(19): siRNA sense strand
ucccugaacucuccagugu

SEQ ID NO: 136324 - RNA, 19 nt, Homo sapiens
  misc_RNA (1)...(19): siRNA sense strand
gccuggcucugguaaauag

SEQ ID NO: 136325 - RNA, 19 nt, Homo sapiens
  misc_RNA (1)...(19): siRNA sense strand
ccggagagcccuggaacua

SEQ ID NO: 136326 - RNA, 19 nt, Homo sapiens
  misc_RNA (1)...(19): siRNA sense strand
aacagugacaggaacauua

SEQ ID NO: 136327 - RNA, 19 nt, Homo sapiens
  misc_RNA (1)...(19): siRNA sense strand
ccacagaacacagcauauc

SEQ ID NO: 136328 - RNA, 19 nt, Homo sapiens
  misc_RNA (1)...(19): siRNA sense strand
caaccugacccagcugauu

SEQ ID NO: 136329 - RNA, 19 nt, Homo sapiens
  misc_RNA (1)...(19): siRNA sense strand
caacagugacaggaacauu

SEQ ID NO: 136330 - RNA, 19 nt, Homo sapiens
  misc_RNA (1)...(19): siRNA sense strand
cuuggucgcuuccuacuca

SEQ ID NO: 136331 - RNA, 19 nt, Homo sapiens
  misc_RNA (1)...(19): siRNA sense strand
agacaguacucaccaucau

SEQ ID NO: 136332 - RNA, 19 nt, Homo sapiens
  misc_RNA (1)...(19): siRNA sense strand
ccugaacucuccagugucu

SEQ ID NO: 136333 - RNA, 19 nt, Homo sapiens
  misc_RNA (1)...(19): siRNA sense strand
ggugcagucugaucacagu

SEQ ID NO: 136334 - RNA, 19 nt, Homo sapiens
  misc_RNA (1)...(19): siRNA sense strand
gugcugcagucccacaugu

SEQ ID NO: 136335 - RNA, 19 nt, Homo sapiens
  misc_RNA (1)...(19): siRNA sense strand
guggcagccuggugcauug

SEQ ID NO: 136336 - RNA, 19 nt, Homo sapiens
  misc_RNA (1)...(19): siRNA sense strand
uucaggaccucaucgaaga

SEQ ID NO: 136337 - RNA, 19 nt, Homo sapiens
  misc_RNA (1)...(19): siRNA sense strand
acacacucuuccggaaaua

SEQ ID NO: 136338 - RNA, 19 nt, Homo sapiens
  misc_RNA (1)...(19): siRNA sense strand
ggccaugcuucuauuggau

SEQ ID NO: 136339 - RNA, 19 nt, Homo sapiens
  misc_RNA (1)...(19): siRNA sense strand
acagauggagugccugaaa

SEQ ID NO: 136340 - RNA, 19 nt, Homo sapiens
  misc_RNA (1)...(19): siRNA sense strand
gagacaguacucaccauca

SEQ ID NO: 136341 - RNA, 19 nt, Homo sapiens
  misc_RNA (1)...(19): siRNA sense strand
ggagaucuuugaggugaac

SEQ ID NO: 136342 - RNA, 19 nt, Homo sapiens
  misc_RNA (1)...(19): siRNA sense strand
ccucacagcccucaugaag

SEQ ID NO: 136343 - RNA, 19 nt, Homo sapiens
  misc_RNA (1)...(19): siRNA sense strand
agaagacauuucccagcaa

SEQ ID NO: 136344 - RNA, 19 nt, Homo sapiens
  misc_RNA (1)...(19): siRNA sense strand
ugacaggaacauuagguau

SEQ ID NO: 136345 - RNA, 19 nt, Homo sapiens
  misc_RNA (1)...(19): siRNA sense strand
ugacacacucuuccggaaa

SEQ ID NO: 136346 - RNA, 19 nt, Homo sapiens
  misc_RNA (1)...(19): siRNA sense strand
gagagcagugagaccauga

SEQ ID NO: 136347 - RNA, 19 nt, Homo sapiens
  misc_RNA (1)...(19): siRNA sense strand
uaaagcugcgccucaccua

SEQ ID NO: 136348 - RNA, 19 nt, Homo sapiens
  misc_RNA (1)...(19): siRNA sense strand
ucagguggacgaagaggaa

SEQ ID NO: 136349 - RNA, 19 nt, Homo sapiens
  misc_RNA (1)...(19): siRNA sense strand
gagcgggaggugauccaaa

SEQ ID NO: 136350 - RNA, 19 nt, Homo sapiens
  misc_RNA (1)...(19): siRNA sense strand
ccaugcuucuauuggauga

SEQ ID NO: 136351 - RNA, 19 nt, Homo sapiens
  misc_RNA (1)...(19): siRNA sense strand
gcacuuccgaaagguggua

SEQ ID NO: 136352 - RNA, 19 nt, Homo sapiens
  misc_RNA (1)...(19): siRNA sense strand
ccucaccuacgaccacuuu

SEQ ID NO: 136353 - RNA, 19 nt, Homo sapiens
  misc_RNA (1)...(19): siRNA sense strand
gcuugaccuucccugugua

SEQ ID NO: 136354 - RNA, 19 nt, Homo sapiens
  misc_RNA (1)...(19): siRNA sense strand
gaagcaaaggaaagcaaag

SEQ ID NO: 136355 - RNA, 19 nt, Homo sapiens
  misc_RNA (1)...(19): siRNA sense strand
gaacugcgaggagauugag

SEQ ID NO: 136356 - RNA, 19 nt, Homo sapiens
  misc_RNA (1)...(19): siRNA sense strand
gugacaggaacauuaggua

SEQ ID NO: 136357 - RNA, 19 nt, Homo sapiens
  misc_RNA (1)...(19): siRNA sense strand
cagauggagugccugaaac

SEQ ID NO: 136358 - RNA, 19 nt, Homo sapiens
  misc_RNA (1)...(19): siRNA sense strand
ccggaaauacgaccacaug

SEQ ID NO: 136359 - RNA, 19 nt, Homo sapiens
  misc_RNA (1)...(19): siRNA sense strand
uagacaccauccugcaugu

SEQ ID NO: 136360 - RNA, 19 nt, Homo sapiens
  misc_RNA (1)...(19): siRNA sense strand
gguaaauagcuccaaugug

SEQ ID NO: 136361 - RNA, 19 nt, Homo sapiens
  misc_RNA (1)...(19): siRNA sense strand
uggagugccugaaacugau

SEQ ID NO: 136362 - RNA, 19 nt, Homo sapiens
  misc_RNA (1)...(19): siRNA sense strand
aaccaaacgcuggcacaua

SEQ ID NO: 136363 - RNA, 19 nt, Homo sapiens
  misc_RNA (1)...(19): siRNA sense strand
gagcagugagaccaugaau

SEQ ID NO: 136364 - RNA, 19 nt, Homo sapiens
  misc_RNA (1)...(19): siRNA sense strand
cggagagcccuggaacuaa

SEQ ID NO: 136365 - RNA, 19 nt, Homo sapiens
  misc_RNA (1)...(19): siRNA sense strand
uuaccaacagcaucaagaa

SEQ ID NO: 136366 - RNA, 19 nt, Homo sapiens
  misc_RNA (1)...(19): siRNA sense strand
gggcugccauccuggaaaa

SEQ ID NO: 136367 - RNA, 19 nt, Homo sapiens
  misc_RNA (1)...(19): siRNA sense strand
gacaguacucaccaucaug

SEQ ID NO: 136368 - RNA, 19 nt, Homo sapiens
  misc_RNA (1)...(19): siRNA sense strand
gugagggaguacagcugaa

SEQ ID NO: 136369 - RNA, 19 nt, Homo sapiens
  misc_RNA (1)...(19): siRNA sense strand
gguggcagccuggugcauu

SEQ ID NO: 136370 - RNA, 19 nt, Homo sapiens
  misc_RNA (1)...(19): siRNA sense strand
gcuuccuacucaacaguga

SEQ ID NO: 136371 - RNA, 19 nt, Homo sapiens
  misc_RNA (1)...(19): siRNA sense strand
uggccaaacugcucuacgu

SEQ ID NO: 136372 - RNA, 19 nt, Homo sapiens
  misc_RNA (1)...(19): siRNA sense strand
uucagaauccucaauccua

SEQ ID NO: 136373 - RNA, 19 nt, Homo sapiens
  misc_RNA (1)...(19): siRNA sense strand
ucugcuagaucuccuggau

SEQ ID NO: 136374 - RNA, 19 nt, Homo sapiens
  misc_RNA (1)...(19): siRNA sense strand
aaaggaaagcaaagaagca

SEQ ID NO: 136375 - RNA, 19 nt, Homo sapiens
  misc_RNA (1)...(19): siRNA sense strand
gcaagagcugcaggccuuu

SEQ ID NO: 136376 - RNA, 19 nt, Homo sapiens
  misc_RNA (1)...(19): siRNA sense strand
ugaacucuccagugucuuc

SEQ ID NO: 136377 - RNA, 19 nt, Homo sapiens
  misc_RNA (1)...(19): siRNA sense strand
aagcaaaggaaagcaaaga

SEQ ID NO: 136378 - RNA, 19 nt, Homo sapiens
  misc_RNA (1)...(19): siRNA sense strand
gaaugucuacgggaaacug

SEQ ID NO: 136379 - RNA, 19 nt, Homo sapiens
  misc_RNA (1)...(19): siRNA sense strand
cacagcauaucuggaguca

SEQ ID NO: 136380 - RNA, 19 nt, Homo sapiens
  misc_RNA (1)...(19): siRNA sense strand
caucacugccaccaacuuc

SEQ ID NO: 136381 - RNA, 19 nt, Homo sapiens
  misc_RNA (1)...(19): siRNA sense strand
gaaaugcgguccuguuuga

SEQ ID NO: 136382 - RNA, 19 nt, Homo sapiens
  misc_RNA (1)...(19): siRNA sense strand
gcagugagaccaugaauga

SEQ ID NO: 136383 - RNA, 19 nt, Homo sapiens
  misc_RNA (1)...(19): siRNA sense strand
gcagagagguuugcuccaa

SEQ ID NO: 136384 - RNA, 19 nt, Homo sapiens
  misc_RNA (1)...(19): siRNA sense strand
gguucuagcugucaacauu

SEQ ID NO: 136385 - RNA, 19 nt, Homo sapiens
  misc_RNA (1)...(19): siRNA sense strand
ccaacagcaucaagaauga

SEQ ID NO: 136386 - RNA, 19 nt, Homo sapiens
  misc_RNA (1)...(19): siRNA sense strand
ucagaauccucaauccuaa

SEQ ID NO: 136387 - RNA, 19 nt, Homo sapiens
  misc_RNA (1)...(19): siRNA sense strand
gcucagcacucgccucugu

SEQ ID NO: 136388 - RNA, 19 nt, Homo sapiens
  misc_RNA (1)...(19): siRNA sense strand
ggagagcccuggaacuaag

SEQ ID NO: 136389 - RNA, 19 nt, Homo sapiens
  misc_RNA (1)...(19): siRNA sense strand
ucacccagcucuucagaau

SEQ ID NO: 136390 - RNA, 19 nt, Homo sapiens
  misc_RNA (1)...(19): siRNA sense strand
aaacccugcuuugcuguua

SEQ ID NO: 136391 - RNA, 19 nt, Homo sapiens
  misc_RNA (1)...(19): siRNA sense strand
gaacaacuugccuguggaa

SEQ ID NO: 136392 - RNA, 19 nt, Homo sapiens
  misc_RNA (1)...(19): siRNA sense strand
ggaaaugcgguccuguuug

SEQ ID NO: 136393 - RNA, 19 nt, Homo sapiens
  misc_RNA (1)...(19): siRNA sense strand
gugcccaacugcuucauga

SEQ ID NO: 136394 - RNA, 19 nt, Homo sapiens
  misc_RNA (1)...(19): siRNA sense strand
ccucacagcuccuggaucu

SEQ ID NO: 136395 - RNA, 19 nt, Homo sapiens
  misc_RNA (1)...(19): siRNA sense strand
ggaagcaaaggaaagcaaa

SEQ ID NO: 136396 - RNA, 19 nt, Homo sapiens
  misc_RNA (1)...(19): siRNA sense strand
gacacacucuuccggaaau

SEQ ID NO: 136397 - RNA, 19 nt, Homo sapiens
  misc_RNA (1)...(19): siRNA sense strand
ggagcuacaugccuacucu

SEQ ID NO: 136398 - RNA, 19 nt, Homo sapiens
  misc_RNA (1)...(19): siRNA sense strand
gaugcccaccugcucauua

SEQ ID NO: 136399 - RNA, 19 nt, Homo sapiens
  misc_RNA (1)...(19): siRNA sense strand
caacuugccuguggaaucg

SEQ ID NO: 136400 - RNA, 19 nt, Homo sapiens
  misc_RNA (1)...(19): siRNA sense strand
ucccagaucucaaaguguu

SEQ ID NO: 136401 - RNA, 19 nt, Homo sapiens
  misc_RNA (1)...(19): siRNA sense strand
ucacagcccucaugaagcu

SEQ ID NO: 136402 - RNA, 19 nt, Homo sapiens
  misc_RNA (1)...(19): siRNA sense strand
caucccagaucucaaagug

SEQ ID NO: 136403 - RNA, 19 nt, Homo sapiens
  misc_RNA (1)...(19): siRNA sense strand
ggaaauacgaccacaugag

SEQ ID NO: 136404 - RNA, 19 nt, Homo sapiens
  misc_RNA (1)...(19): siRNA sense strand
gcaaaggaaagcaaagaag

SEQ ID NO: 136405 - RNA, 19 nt, Homo sapiens
  misc_RNA (1)...(19): siRNA sense strand
caugggcucugcugagaug

SEQ ID NO: 136406 - RNA, 19 nt, Homo sapiens
  misc_RNA (1)...(19): siRNA sense strand
aagaggaagugcuggcauu

SEQ ID NO: 136407 - RNA, 19 nt, Homo sapiens
  misc_RNA (1)...(19): siRNA sense strand
gggccaugcuucuauugga

SEQ ID NO: 136408 - RNA, 19 nt, Homo sapiens
  misc_RNA (1)...(19): siRNA sense strand
gccagccacucgaggauau

SEQ ID NO: 136409 - RNA, 19 nt, Homo sapiens
  misc_RNA (1)...(19): siRNA sense strand
gacaggaacauuagguaug

SEQ ID NO: 136410 - RNA, 19 nt, Homo sapiens
  misc_RNA (1)...(19): siRNA sense strand
gugcuggcauugcuggaaa

SEQ ID NO: 136411 - RNA, 19 nt, Homo sapiens
  misc_RNA (1)...(19): siRNA sense strand
cagccgaaaugccggaaau

SEQ ID NO: 136412 - RNA, 19 nt, Homo sapiens
  misc_RNA (1)...(19): siRNA sense strand
ggaccucaucgaagagauu

SEQ ID NO: 136413 - RNA, 19 nt, Homo sapiens
  misc_RNA (1)...(19): siRNA sense strand
gcucuacguccacauguug

SEQ ID NO: 136414 - RNA, 19 nt, Homo sapiens
  misc_RNA (1)...(19): siRNA sense strand
gaugaggaagcaaaggaaa

SEQ ID NO: 136415 - RNA, 19 nt, Homo sapiens
  misc_RNA (1)...(19): siRNA sense strand
guccugcccuccugaccua

SEQ ID NO: 136416 - RNA, 19 nt, Homo sapiens
  misc_RNA (1)...(19): siRNA sense strand
gugagaccaugaaugacuu

SEQ ID NO: 136417 - RNA, 19 nt, Homo sapiens
  misc_RNA (1)...(19): siRNA sense strand
cggaaaugcgguccuguuu

SEQ ID NO: 136418 - RNA, 19 nt, Homo sapiens
  misc_RNA (1)...(19): siRNA sense strand
ucuuugaggugaacaacuu

SEQ ID NO: 136419 - RNA, 19 nt, Homo sapiens
  misc_RNA (1)...(19): siRNA sense strand
gccaggugguguccaucua

SEQ ID NO: 136420 - RNA, 19 nt, Homo sapiens
  misc_RNA (1)...(19): siRNA sense strand
ggaacugcgaggagauuga

SEQ ID NO: 136421 - RNA, 19 nt, Homo sapiens
  misc_RNA (1)...(19): siRNA sense strand
accaaacgcuggcacauag

SEQ ID NO: 136422 - RNA, 19 nt, Homo sapiens
  misc_RNA (1)...(19): siRNA sense strand
gaucgccuccuccagauuc

SEQ ID NO: 136423 - RNA, 19 nt, Homo sapiens
  misc_RNA (1)...(19): siRNA sense strand
ucccugaacucuccagugu

SEQ ID NO: 136424 - RNA, 19 nt, Homo sapiens
  misc_RNA (1)...(19): siRNA sense strand
gccuggcucugguaaauag

SEQ ID NO: 136425 - RNA, 19 nt, Homo sapiens
  misc_RNA (1)...(19): siRNA sense strand
ccggagagcccuggaacua

SEQ ID NO: 136426 - RNA, 19 nt, Homo sapiens
  misc_RNA (1)...(19): siRNA sense strand
aacagugacaggaacauua

SEQ ID NO: 136427 - RNA, 19 nt, Homo sapiens
  misc_RNA (1)...(19): siRNA sense strand
ccacagaacacagcauauc

SEQ ID NO: 136428 - RNA, 19 nt, Homo sapiens
  misc_RNA (1)...(19): siRNA sense strand
caaccugacccagcugauu

SEQ ID NO: 136429 - RNA, 19 nt, Homo sapiens
  misc_RNA (1)...(19): siRNA sense strand
caacagugacaggaacauu

SEQ ID NO: 136430 - RNA, 19 nt, Homo sapiens
  misc_RNA (1)...(19): siRNA sense strand
cuuggucgcuuccuacuca

SEQ ID NO: 136431 - RNA, 19 nt, Homo sapiens
  misc_RNA (1)...(19): siRNA sense strand
agacaguacucaccaucau

SEQ ID NO: 136432 - RNA, 19 nt, Homo sapiens
  misc_RNA (1)...(19): siRNA sense strand
ccugaacucuccagugucu

SEQ ID NO: 136433 - RNA, 19 nt, Homo sapiens
  misc_RNA (1)...(19): siRNA sense strand
ggugcagucugaucacagu

SEQ ID NO: 136434 - RNA, 19 nt, Homo sapiens
  misc_RNA (1)...(19): siRNA sense strand
gugcugcagucccacaugu

SEQ ID NO: 136435 - RNA, 19 nt, Homo sapiens
  misc_RNA (1)...(19): siRNA sense strand
guggcagccuggugcauug

SEQ ID NO: 136436 - RNA, 19 nt, Homo sapiens
  misc_RNA (1)...(19): siRNA sense strand
uucaggaccucaucgaaga

SEQ ID NO: 136437 - RNA, 19 nt, Homo sapiens
  misc_RNA (1)...(19): siRNA sense strand
acacacucuuccggaaaua

SEQ ID NO: 136438 - RNA, 19 nt, Homo sapiens
  misc_RNA (1)...(19): siRNA sense strand
ggccaugcuucuauuggau

SEQ ID NO: 136439 - RNA, 19 nt, Homo sapiens
  misc_RNA (1)...(19): siRNA sense strand
acagauggagugccugaaa

SEQ ID NO: 136440 - RNA, 19 nt, Homo sapiens
  misc_RNA (1)...(19): siRNA sense strand
gagacaguacucaccauca

SEQ ID NO: 136441 - RNA, 19 nt, Homo sapiens
  misc_RNA (1)...(19): siRNA sense strand
ggagaucuuugaggugaac

SEQ ID NO: 136442 - RNA, 19 nt, Homo sapiens
  misc_RNA (1)...(19): siRNA sense strand
ccucacagcccucaugaag

SEQ ID NO: 136443 - RNA, 19 nt, Homo sapiens
  misc_RNA (1)...(19): siRNA sense strand
agaagacauuucccagcaa

SEQ ID NO: 136444 - RNA, 19 nt, Homo sapiens
  misc_RNA (1)...(19): siRNA sense strand
ugacaggaacauuagguau

SEQ ID NO: 136445 - RNA, 19 nt, Homo sapiens
  misc_RNA (1)...(19): siRNA sense strand
ugacacacucuuccggaaa

SEQ ID NO: 136446 - RNA, 19 nt, Homo sapiens
  misc_RNA (1)...(19): siRNA sense strand
gagagcagugagaccauga

SEQ ID NO: 136447 - RNA, 19 nt, Homo sapiens
  misc_RNA (1)...(19): siRNA sense strand
uaaagcugcgccucaccua

SEQ ID NO: 136448 - RNA, 19 nt, Homo sapiens
  misc_RNA (1)...(19): siRNA sense strand
ucagguggacgaagaggaa

SEQ ID NO: 136449 - RNA, 19 nt, Homo sapiens
  misc_RNA (1)...(19): siRNA sense strand
gagcgggaggugauccaaa

SEQ ID NO: 136450 - RNA, 19 nt, Homo sapiens
  misc_RNA (1)...(19): siRNA sense strand
ccaugcuucuauuggauga

SEQ ID NO: 136451 - RNA, 19 nt, Homo sapiens
  misc_RNA (1)...(19): siRNA sense strand
gcacuuccgaaagguggua

SEQ ID NO: 136452 - RNA, 19 nt, Homo sapiens
  misc_RNA (1)...(19): siRNA sense strand
ccucaccuacgaccacuuu

SEQ ID NO: 136453 - RNA, 19 nt, Homo sapiens
  misc_RNA (1)...(19): siRNA sense strand
gcuugaccuucccugugua

SEQ ID NO: 136454 - RNA, 19 nt, Homo sapiens
  misc_RNA (1)...(19): siRNA sense strand
gaagcaaaggaaagcaaag

SEQ ID NO: 136455 - RNA, 19 nt, Homo sapiens
  misc_RNA (1)...(19): siRNA sense strand
gaacugcgaggagauugag

SEQ ID NO: 136456 - RNA, 19 nt, Homo sapiens
  misc_RNA (1)...(19): siRNA sense strand
gugacaggaacauuaggua

SEQ ID NO: 136457 - RNA, 19 nt, Homo sapiens
  misc_RNA (1)...(19): siRNA sense strand
cagauggagugccugaaac

SEQ ID NO: 136458 - RNA, 19 nt, Homo sapiens
  misc_RNA (1)...(19): siRNA sense strand
ccggaaauacgaccacaug

SEQ ID NO: 136459 - RNA, 19 nt, Homo sapiens
  misc_RNA (1)...(19): siRNA sense strand
uagacaccauccugcaugu

SEQ ID NO: 136460 - RNA, 19 nt, Homo sapiens
  misc_RNA (1)...(19): siRNA sense strand
gguaaauagcuccaaugug

SEQ ID NO: 136461 - RNA, 19 nt, Homo sapiens
  misc_RNA (1)...(19): siRNA sense strand
uggagugccugaaacugau

SEQ ID NO: 136462 - RNA, 19 nt, Homo sapiens
  misc_RNA (1)...(19): siRNA sense strand
aaccaaacgcuggcacaua

SEQ ID NO: 136463 - RNA, 19 nt, Homo sapiens
  misc_RNA (1)...(19): siRNA sense strand
gagcagugagaccaugaau

SEQ ID NO: 136464 - RNA, 19 nt, Homo sapiens
  misc_RNA (1)...(19): siRNA sense strand
cggagagcccuggaacuaa

SEQ ID NO: 136465 - RNA, 19 nt, Homo sapiens
  misc_RNA (1)...(19): siRNA sense strand
uuaccaacagcaucaagaa

SEQ ID NO: 136466 - RNA, 19 nt, Homo sapiens
  misc_RNA (1)...(19): siRNA sense strand
gggcugccauccuggaaaa

SEQ ID NO: 136467 - RNA, 19 nt, Homo sapiens
  misc_RNA (1)...(19): siRNA sense strand
gacaguacucaccaucaug

SEQ ID NO: 136468 - RNA, 19 nt, Homo sapiens
  misc_RNA (1)...(19): siRNA sense strand
gugagggaguacagcugaa

SEQ ID NO: 136469 - RNA, 19 nt, Homo sapiens
  misc_RNA (1)...(19): siRNA sense strand
gguggcagccuggugcauu

SEQ ID NO: 136470 - RNA, 19 nt, Homo sapiens
  misc_RNA (1)...(19): siRNA sense strand
gcuuccuacucaacaguga

SEQ ID NO: 136471 - RNA, 19 nt, Homo sapiens
  misc_RNA (1)...(19): siRNA sense strand
uggccaaacugcucuacgu

SEQ ID NO: 136472 - RNA, 19 nt, Homo sapiens
  misc_RNA (1)...(19): siRNA sense strand
uucagaauccucaauccua

SEQ ID NO: 136473 - RNA, 19 nt, Homo sapiens
  misc_RNA (1)...(19): siRNA sense strand
ucugcuagaucuccuggau

SEQ ID NO: 136474 - RNA, 19 nt, Homo sapiens
  misc_RNA (1)...(19): siRNA sense strand
aaaggaaagcaaagaagca

SEQ ID NO: 136475 - RNA, 19 nt, Homo sapiens
  misc_RNA (1)...(19): siRNA sense strand
gcaagagcugcaggccuuu

SEQ ID NO: 136476 - RNA, 19 nt, Homo sapiens
  misc_RNA (1)...(19): siRNA sense strand
ugaacucuccagugucuuc

SEQ ID NO: 136477 - RNA, 19 nt, Homo sapiens
  misc_RNA (1)...(19): siRNA sense strand
aagcaaaggaaagcaaaga

SEQ ID NO: 136478 - RNA, 19 nt, Homo sapiens
  misc_RNA (1)...(19): siRNA sense strand
gaaugucuacgggaaacug

SEQ ID NO: 136479 - RNA, 19 nt, Homo sapiens
  misc_RNA (1)...(19): siRNA sense strand
cacagcauaucuggaguca

SEQ ID NO: 136480 - RNA, 19 nt, Homo sapiens
  misc_RNA (1)...(19): siRNA sense strand
caucacugccaccaacuuc

SEQ ID NO: 136481 - RNA, 19 nt, Homo sapiens
  misc_RNA (1)...(19): siRNA sense strand
gugaauaucuggcaaguua

SEQ ID NO: 136482 - RNA, 19 nt, Homo sapiens
  misc_RNA (1)...(19): siRNA sense strand
ggaaauaguucaacacaga

SEQ ID NO: 136483 - RNA, 19 nt, Homo sapiens
  misc_RNA (1)...(19): siRNA sense strand
gaacaggccuaacaucuga

SEQ ID NO: 136484 - RNA, 19 nt, Homo sapiens
  misc_RNA (1)...(19): siRNA sense strand
gaacagaccguuggacuua

SEQ ID NO: 136485 - RNA, 19 nt, Homo sapiens
  misc_RNA (1)...(19): siRNA sense strand
gaaaguaugucuacaaguc

SEQ ID NO: 136486 - RNA, 19 nt, Homo sapiens
  misc_RNA (1)...(19): siRNA sense strand
gcagucaccuggagacaua

SEQ ID NO: 136487 - RNA, 19 nt, Homo sapiens
  misc_RNA (1)...(19): siRNA sense strand
gaagagaaagguaaacaua

SEQ ID NO: 136488 - RNA, 19 nt, Homo sapiens
  misc_RNA (1)...(19): siRNA sense strand
gcaccgaccuuauugugua

SEQ ID NO: 136489 - RNA, 19 nt, Homo sapiens
  misc_RNA (1)...(19): siRNA sense strand
ggaaauaccucuaacaaaa

SEQ ID NO: 136490 - RNA, 19 nt, Homo sapiens
  misc_RNA (1)...(19): siRNA sense strand
ugaagaagcugaaauggaa

SEQ ID NO: 136491 - RNA, 19 nt, Homo sapiens
  misc_RNA (1)...(19): siRNA sense strand
gacaagaccugaccaguga

SEQ ID NO: 136492 - RNA, 19 nt, Homo sapiens
  misc_RNA (1)...(19): siRNA sense strand
gaagggauguccuggauug

SEQ ID NO: 136493 - RNA, 19 nt, Homo sapiens
  misc_RNA (1)...(19): siRNA sense strand
gaacuuguauuucuaaugg

SEQ ID NO: 136494 - RNA, 19 nt, Homo sapiens
  misc_RNA (1)...(19): siRNA sense strand
ugaaauugcugucuaugua

SEQ ID NO: 136495 - RNA, 19 nt, Homo sapiens
  misc_RNA (1)...(19): siRNA sense strand
gggauuagcugaucuggaa

SEQ ID NO: 136496 - RNA, 19 nt, Homo sapiens
  misc_RNA (1)...(19): siRNA sense strand
uagauuagcuucugaguug

SEQ ID NO: 136497 - RNA, 19 nt, Homo sapiens
  misc_RNA (1)...(19): siRNA sense strand
guagucaguugaagaauuu

SEQ ID NO: 136498 - RNA, 19 nt, Homo sapiens
  misc_RNA (1)...(19): siRNA sense strand
ugaaagcccugauaauuug

SEQ ID NO: 136499 - RNA, 19 nt, Homo sapiens
  misc_RNA (1)...(19): siRNA sense strand
gaaauggcuugaacacuug

SEQ ID NO: 136500 - RNA, 19 nt, Homo sapiens
  misc_RNA (1)...(19): siRNA sense strand
gaaagugaguggcuuagau

SEQ ID NO: 136501 - RNA, 19 nt, Homo sapiens
  misc_RNA (1)...(19): siRNA sense strand
aaacuaggcuuaggaaauu

SEQ ID NO: 136502 - RNA, 19 nt, Homo sapiens
  misc_RNA (1)...(19): siRNA sense strand
caaacaugcuauucagaua

SEQ ID NO: 136503 - RNA, 19 nt, Homo sapiens
  misc_RNA (1)...(19): siRNA sense strand
gcaagaagacggugaagaa

SEQ ID NO: 136504 - RNA, 19 nt, Homo sapiens
  misc_RNA (1)...(19): siRNA sense strand
ggaaggaggcaaaguuuaa

SEQ ID NO: 136505 - RNA, 19 nt, Homo sapiens
  misc_RNA (1)...(19): siRNA sense strand
ccaaauagcgagacaagua

SEQ ID NO: 136506 - RNA, 19 nt, Homo sapiens
  misc_RNA (1)...(19): siRNA sense strand
gaaaggcccucuggaguug

SEQ ID NO: 136507 - RNA, 19 nt, Homo sapiens
  misc_RNA (1)...(19): siRNA sense strand
gcaguagacuuucaacuuc

SEQ ID NO: 136508 - RNA, 19 nt, Homo sapiens
  misc_RNA (1)...(19): siRNA sense strand
ugaaauggcuugaacacuu

SEQ ID NO: 136509 - RNA, 19 nt, Homo sapiens
  misc_RNA (1)...(19): siRNA sense strand
gaacgugagucucuuucaa

SEQ ID NO: 136510 - RNA, 19 nt, Homo sapiens
  misc_RNA (1)...(19): siRNA sense strand
caacagcauucuucacauu

SEQ ID NO: 136511 - RNA, 19 nt, Homo sapiens
  misc_RNA (1)...(19): siRNA sense strand
gaacagcacaucccauuau

SEQ ID NO: 136512 - RNA, 19 nt, Homo sapiens
  misc_RNA (1)...(19): siRNA sense strand
gaaaggaggcauuguucua

SEQ ID NO: 136513 - RNA, 19 nt, Homo sapiens
  misc_RNA (1)...(19): siRNA sense strand
gaaaggaugugucuguuac

SEQ ID NO: 136514 - RNA, 19 nt, Homo sapiens
  misc_RNA (1)...(19): siRNA sense strand
gcugaggacucuuugcaua

SEQ ID NO: 136515 - RNA, 19 nt, Homo sapiens
  misc_RNA (1)...(19): siRNA sense strand
uugaacagcuccuggauua

SEQ ID NO: 136516 - RNA, 19 nt, Homo sapiens
  misc_RNA (1)...(19): siRNA sense strand
gacccaagcuuauugaaga

SEQ ID NO: 136517 - RNA, 19 nt, Homo sapiens
  misc_RNA (1)...(19): siRNA sense strand
gaaauuugcucuucagacu

SEQ ID NO: 136518 - RNA, 19 nt, Homo sapiens
  misc_RNA (1)...(19): siRNA sense strand
ggaaauugaucuugaugau

SEQ ID NO: 136519 - RNA, 19 nt, Homo sapiens
  misc_RNA (1)...(19): siRNA sense strand
ccacagguccuauuacuaa

SEQ ID NO: 136520 - RNA, 19 nt, Homo sapiens
  misc_RNA (1)...(19): siRNA sense strand
gaagaagacugggacaugu

SEQ ID NO: 136521 - RNA, 19 nt, Homo sapiens
  misc_RNA (1)...(19): siRNA sense strand
gggacaagcuccagaucua

SEQ ID NO: 136522 - RNA, 19 nt, Homo sapiens
  misc_RNA (1)...(19): siRNA sense strand
caagagaacaccacaguuu

SEQ ID NO: 136523 - RNA, 19 nt, Homo sapiens
  misc_RNA (1)...(19): siRNA sense strand
ggugguaauugaaacuuua

SEQ ID NO: 136524 - RNA, 19 nt, Homo sapiens
  misc_RNA (1)...(19): siRNA sense strand
gaggagaguuuccaugaga

SEQ ID NO: 136525 - RNA, 19 nt, Homo sapiens
  misc_RNA (1)...(19): siRNA sense strand
gaacaaaggaaccacuuga

SEQ ID NO: 136526 - RNA, 19 nt, Homo sapiens
  misc_RNA (1)...(19): siRNA sense strand
gcagaaaccugagagugaa

SEQ ID NO: 136527 - RNA, 19 nt, Homo sapiens
  misc_RNA (1)...(19): siRNA sense strand
gaucagagcagcuaagaga

SEQ ID NO: 136528 - RNA, 19 nt, Homo sapiens
  misc_RNA (1)...(19): siRNA sense strand
ccaauaaucagucaacuuu

SEQ ID NO: 136529 - RNA, 19 nt, Homo sapiens
  misc_RNA (1)...(19): siRNA sense strand
ggagagggccauugaauau

SEQ ID NO: 136530 - RNA, 19 nt, Homo sapiens
  misc_RNA (1)...(19): siRNA sense strand
ccaaguuucucaccaguuu

SEQ ID NO: 136531 - RNA, 19 nt, Homo sapiens
  misc_RNA (1)...(19): siRNA sense strand
gaagcaauauucacugcaa

SEQ ID NO: 136532 - RNA, 19 nt, Homo sapiens
  misc_RNA (1)...(19): siRNA sense strand
ucaacaagcugaagaaagu

SEQ ID NO: 136533 - RNA, 19 nt, Homo sapiens
  misc_RNA (1)...(19): siRNA sense strand
gagcaaagaggaagagaaa

SEQ ID NO: 136534 - RNA, 19 nt, Homo sapiens
  misc_RNA (1)...(19): siRNA sense strand
gaucagcuuugacugcuuu

SEQ ID NO: 136535 - RNA, 19 nt, Homo sapiens
  misc_RNA (1)...(19): siRNA sense strand
caaagauggucauguguau

SEQ ID NO: 136536 - RNA, 19 nt, Homo sapiens
  misc_RNA (1)...(19): siRNA sense strand
cggcauggaugaacaaauu

SEQ ID NO: 136537 - RNA, 19 nt, Homo sapiens
  misc_RNA (1)...(19): siRNA sense strand
gaauguuucucaaccacua

SEQ ID NO: 136538 - RNA, 19 nt, Homo sapiens
  misc_RNA (1)...(19): siRNA sense strand
ggaaaaggauuaguagaua

SEQ ID NO: 136539 - RNA, 19 nt, Homo sapiens
  misc_RNA (1)...(19): siRNA sense strand
gcacagacuccuccaauau

SEQ ID NO: 136540 - RNA, 19 nt, Homo sapiens
  misc_RNA (1)...(19): siRNA sense strand
gaaauguucuucagguauc

SEQ ID NO: 136541 - RNA, 19 nt, Homo sapiens
  misc_RNA (1)...(19): siRNA sense strand
uaaacugagucccaaagua

SEQ ID NO: 136542 - RNA, 19 nt, Homo sapiens
  misc_RNA (1)...(19): siRNA sense strand
ccagguagcugugcauaaa

SEQ ID NO: 136543 - RNA, 19 nt, Homo sapiens
  misc_RNA (1)...(19): siRNA sense strand
gaaagguaguuguuugugu

SEQ ID NO: 136544 - RNA, 19 nt, Homo sapiens
  misc_RNA (1)...(19): siRNA sense strand
caaacaagcaucacauuga

SEQ ID NO: 136545 - RNA, 19 nt, Homo sapiens
  misc_RNA (1)...(19): siRNA sense strand
gagaagaaguggugcagau

SEQ ID NO: 136546 - RNA, 19 nt, Homo sapiens
  misc_RNA (1)...(19): siRNA sense strand
uggaagaaauguaauggua

SEQ ID NO: 136547 - RNA, 19 nt, Homo sapiens
  misc_RNA (1)...(19): siRNA sense strand
ggcagaagcuggaagaaau

SEQ ID NO: 136548 - RNA, 19 nt, Homo sapiens
  misc_RNA (1)...(19): siRNA sense strand
ggcaaauguucucuaguua

SEQ ID NO: 136549 - RNA, 19 nt, Homo sapiens
  misc_RNA (1)...(19): siRNA sense strand
aaagagagcauugggauua

SEQ ID NO: 136550 - RNA, 19 nt, Homo sapiens
  misc_RNA (1)...(19): siRNA sense strand
gguaaacacuuaucagaag

SEQ ID NO: 136551 - RNA, 19 nt, Homo sapiens
  misc_RNA (1)...(19): siRNA sense strand
ugacugcacuggagggaua

SEQ ID NO: 136552 - RNA, 19 nt, Homo sapiens
  misc_RNA (1)...(19): siRNA sense strand
gaaugggccugguuagaau

SEQ ID NO: 136553 - RNA, 19 nt, Homo sapiens
  misc_RNA (1)...(19): siRNA sense strand
uggaucagcuguuguguaa

SEQ ID NO: 136554 - RNA, 19 nt, Homo sapiens
  misc_RNA (1)...(19): siRNA sense strand
gcaagagauugaucaacaa

SEQ ID NO: 136555 - RNA, 19 nt, Homo sapiens
  misc_RNA (1)...(19): siRNA sense strand
gaacagacucucacauugu

SEQ ID NO: 136556 - RNA, 19 nt, Homo sapiens
  misc_RNA (1)...(19): siRNA sense strand
aaacaagcaucacauugaa

SEQ ID NO: 136557 - RNA, 19 nt, Homo sapiens
  misc_RNA (1)...(19): siRNA sense strand
gggcagaacuucguuuaga

SEQ ID NO: 136558 - RNA, 19 nt, Homo sapiens
  misc_RNA (1)...(19): siRNA sense strand
cacuuuaggucguagauua

SEQ ID NO: 136559 - RNA, 19 nt, Homo sapiens
  misc_RNA (1)...(19): siRNA sense strand
caaagaagacagugugaaa

SEQ ID NO: 136560 - RNA, 19 nt, Homo sapiens
  misc_RNA (1)...(19): siRNA sense strand
aaagcuaacuggugaagaa

SEQ ID NO: 136561 - RNA, 19 nt, Homo sapiens
  misc_RNA (1)...(19): siRNA sense strand
gugaaagcccugauaauuu

SEQ ID NO: 136562 - RNA, 19 nt, Homo sapiens
  misc_RNA (1)...(19): siRNA sense strand
gaaggagacuuuggaagau

SEQ ID NO: 136563 - RNA, 19 nt, Homo sapiens
  misc_RNA (1)...(19): siRNA sense strand
gaagagguuugcagaaugg

SEQ ID NO: 136564 - RNA, 19 nt, Homo sapiens
  misc_RNA (1)...(19): siRNA sense strand
ccaaugggaugaagcagaa

SEQ ID NO: 136565 - RNA, 19 nt, Homo sapiens
  misc_RNA (1)...(19): siRNA sense strand
gaauaucgacuucaugaga

SEQ ID NO: 136566 - RNA, 19 nt, Homo sapiens
  misc_RNA (1)...(19): siRNA sense strand
ggaugaacuuguauuucua

SEQ ID NO: 136567 - RNA, 19 nt, Homo sapiens
  misc_RNA (1)...(19): siRNA sense strand
gaguaucaguggcaaauau

SEQ ID NO: 136568 - RNA, 19 nt, Homo sapiens
  misc_RNA (1)...(19): siRNA sense strand
gcacagacaccaguuacua

SEQ ID NO: 136569 - RNA, 19 nt, Homo sapiens
  misc_RNA (1)...(19): siRNA sense strand
gauaucauccugacaaguu

SEQ ID NO: 136570 - RNA, 19 nt, Homo sapiens
  misc_RNA (1)...(19): siRNA sense strand
gagaagggauguccuggau

SEQ ID NO: 136571 - RNA, 19 nt, Homo sapiens
  misc_RNA (1)...(19): siRNA sense strand
ggucagaauuguaccuuug

SEQ ID NO: 136572 - RNA, 19 nt, Homo sapiens
  misc_RNA (1)...(19): siRNA sense strand
gagaaguacuuagccauga

SEQ ID NO: 136573 - RNA, 19 nt, Homo sapiens
  misc_RNA (1)...(19): siRNA sense strand
uguagaagaugaucaaaug

SEQ ID NO: 136574 - RNA, 19 nt, Homo sapiens
  misc_RNA (1)...(19): siRNA sense strand
gcaggaagcagauugaguu

SEQ ID NO: 136575 - RNA, 19 nt, Homo sapiens
  misc_RNA (1)...(19): siRNA sense strand
ggagaaagccgauaucaac

SEQ ID NO: 136576 - RNA, 19 nt, Homo sapiens
  misc_RNA (1)...(19): siRNA sense strand
uaaauaugcugagcuguug

SEQ ID NO: 136577 - RNA, 19 nt, Homo sapiens
  misc_RNA (1)...(19): siRNA sense strand
gcagaaguggguuacaaua

SEQ ID NO: 136578 - RNA, 19 nt, Homo sapiens
  misc_RNA (1)...(19): siRNA sense strand
ccacuucucugaccucaug

SEQ ID NO: 136579 - RNA, 19 nt, Homo sapiens
  misc_RNA (1)...(19): siRNA sense strand
gggaguugcuguucuguau

SEQ ID NO: 136580 - RNA, 19 nt, Homo sapiens
  misc_RNA (1)...(19): siRNA sense strand
ggaaucaaauugccaggau

SEQ ID NO: 136581 - RNA, 19 nt, Homo sapiens
  misc_RNA (1)...(19): siRNA sense strand
ccacagagcagcccaguuc

SEQ ID NO: 136582 - RNA, 19 nt, Homo sapiens
  misc_RNA (1)...(19): siRNA sense strand
agagguaccugcgacauga

SEQ ID NO: 136583 - RNA, 19 nt, Homo sapiens
  misc_RNA (1)...(19): siRNA sense strand
uaucuacacucccaaugug

SEQ ID NO: 136584 - RNA, 19 nt, Homo sapiens
  misc_RNA (1)...(19): siRNA sense strand
gccacaaccuuuccuccaa

SEQ ID NO: 136585 - RNA, 19 nt, Homo sapiens
  misc_RNA (1)...(19): siRNA sense strand
agugagggcuucagcauca

SEQ ID NO: 136586 - RNA, 19 nt, Homo sapiens
  misc_RNA (1)...(19): siRNA sense strand
caugaucgccuuggugauu

SEQ ID NO: 136587 - RNA, 19 nt, Homo sapiens
  misc_RNA (1)...(19): siRNA sense strand
ccuaagaggaggaagaaga

SEQ ID NO: 136588 - RNA, 19 nt, Homo sapiens
  misc_RNA (1)...(19): siRNA sense strand
gggcugcucugcgaucuag

SEQ ID NO: 136589 - RNA, 19 nt, Homo sapiens
  misc_RNA (1)...(19): siRNA sense strand
ccuccuacuugccuaucua

SEQ ID NO: 136590 - RNA, 19 nt, Homo sapiens
  misc_RNA (1)...(19): siRNA sense strand
caucaagucccugcuagga

SEQ ID NO: 136591 - RNA, 19 nt, Homo sapiens
  misc_RNA (1)...(19): siRNA sense strand
caaccagcccugccuacug

SEQ ID NO: 136592 - RNA, 19 nt, Homo sapiens
  misc_RNA (1)...(19): siRNA sense strand
cuacuugccuaucuacacu

SEQ ID NO: 136593 - RNA, 19 nt, Homo sapiens
  misc_RNA (1)...(19): siRNA sense strand
uacgagggcuggaaagacu

SEQ ID NO: 136594 - RNA, 19 nt, Homo sapiens
  misc_RNA (1)...(19): siRNA sense strand
agaggaggaagaagaggua

SEQ ID NO: 136595 - RNA, 19 nt, Homo sapiens
  misc_RNA (1)...(19): siRNA sense strand
gaagagguaccugcgacau

SEQ ID NO: 136596 - RNA, 19 nt, Homo sapiens
  misc_RNA (1)...(19): siRNA sense strand
cuacacucccaauguggua

SEQ ID NO: 136597 - RNA, 19 nt, Homo sapiens
  misc_RNA (1)...(19): siRNA sense strand
agacuacgagggcuggaaa

SEQ ID NO: 136598 - RNA, 19 nt, Homo sapiens
  misc_RNA (1)...(19): siRNA sense strand
ucuagacgcccucuuccaa

SEQ ID NO: 136599 - RNA, 19 nt, Homo sapiens
  misc_RNA (1)...(19): siRNA sense strand
acaccuacuuggccaugau

SEQ ID NO: 136600 - RNA, 19 nt, Homo sapiens
  misc_RNA (1)...(19): siRNA sense strand
gcccaaggacccugcaaag

SEQ ID NO: 136601 - RNA, 19 nt, Homo sapiens
  misc_RNA (1)...(19): siRNA sense strand
cgaucuagacgcccucuuc

SEQ ID NO: 136602 - RNA, 19 nt, Homo sapiens
  misc_RNA (1)...(19): siRNA sense strand
aaaagcaucuacgacguuu

SEQ ID NO: 136603 - RNA, 19 nt, Homo sapiens
  misc_RNA (1)...(19): siRNA sense strand
ggaauauucuuaccucaau

SEQ ID NO: 136604 - RNA, 19 nt, Homo sapiens
  misc_RNA (1)...(19): siRNA sense strand
gaagagcaguauguucuga

SEQ ID NO: 136605 - RNA, 19 nt, Homo sapiens
  misc_RNA (1)...(19): siRNA sense strand
ccaguggcuuccaguauaa

SEQ ID NO: 136606 - RNA, 19 nt, Homo sapiens
  misc_RNA (1)...(19): siRNA sense strand
gaacggcuccucgggcaaa

SEQ ID NO: 136607 - RNA, 19 nt, Homo sapiens
  misc_RNA (1)...(19): siRNA sense strand
caguauaacccgauaagga

SEQ ID NO: 136608 - RNA, 19 nt, Homo sapiens
  misc_RNA (1)...(19): siRNA sense strand
caaagccgccuuagugaag

SEQ ID NO: 136609 - RNA, 19 nt, Homo sapiens
  misc_RNA (1)...(19): siRNA sense strand
gccaaagccgccuuaguga

SEQ ID NO: 136610 - RNA, 19 nt, Homo sapiens
  misc_RNA (1)...(19): siRNA sense strand
ccaaagccgccuuagugaa

SEQ ID NO: 136611 - RNA, 19 nt, Homo sapiens
  misc_RNA (1)...(19): siRNA sense strand
gugaagagcaguauguucu

SEQ ID NO: 136612 - RNA, 19 nt, Homo sapiens
  misc_RNA (1)...(19): siRNA sense strand
ugccaaagccgccuuagug

SEQ ID NO: 136613 - RNA, 19 nt, Homo sapiens
  misc_RNA (1)...(19): siRNA sense strand
cgccgcaguuccuuacaaa

SEQ ID NO: 136614 - RNA, 19 nt, Homo sapiens
  misc_RNA (1)...(19): siRNA sense strand
ccagugcccagcucaaaga

SEQ ID NO: 136615 - RNA, 19 nt, Homo sapiens
  misc_RNA (1)...(19): siRNA sense strand
ggacgacgagagcaaagag

SEQ ID NO: 136616 - RNA, 19 nt, Homo sapiens
  misc_RNA (1)...(19): siRNA sense strand
gaggagcuggcccugaaga

SEQ ID NO: 136617 - RNA, 19 nt, Homo sapiens
  misc_RNA (1)...(19): siRNA sense strand
cguccuaucuucgcuccaa

SEQ ID NO: 136618 - RNA, 19 nt, Homo sapiens
  misc_RNA (1)...(19): siRNA sense strand
gcgccaaguuucgcaagca

SEQ ID NO: 136619 - RNA, 19 nt, Homo sapiens
  misc_RNA (1)...(19): siRNA sense strand
ggagcuggcccugaagauc

SEQ ID NO: 136620 - RNA, 19 nt, Homo sapiens
  misc_RNA (1)...(19): siRNA sense strand
cuuccaguauaacccgaua

SEQ ID NO: 136621 - RNA, 19 nt, Homo sapiens
  misc_RNA (1)...(19): siRNA sense strand
uuagugaagagcaguaugu

SEQ ID NO: 136622 - RNA, 19 nt, Homo sapiens
  misc_RNA (1)...(19): siRNA sense strand
aaagccgccuuagugaaga

SEQ ID NO: 136623 - RNA, 19 nt, Homo sapiens
  misc_RNA (1)...(19): siRNA sense strand
caccagugcccagcucaaa

SEQ ID NO: 136624 - RNA, 19 nt, Homo sapiens
  misc_RNA (1)...(19): siRNA sense strand
gaagacagcaggaagauuu

SEQ ID NO: 136625 - RNA, 19 nt, Homo sapiens
  misc_RNA (1)...(19): siRNA sense strand
gagaaucuguguguaauaa

SEQ ID NO: 136626 - RNA, 19 nt, Homo sapiens
  misc_RNA (1)...(19): siRNA sense strand
caacgacucuuaccgaauu

SEQ ID NO: 136627 - RNA, 19 nt, Homo sapiens
  misc_RNA (1)...(19): siRNA sense strand
caaagaagauguugcuaug

SEQ ID NO: 136628 - RNA, 19 nt, Homo sapiens
  misc_RNA (1)...(19): siRNA sense strand
gaacacagauagaaagaag

SEQ ID NO: 136629 - RNA, 19 nt, Homo sapiens
  misc_RNA (1)...(19): siRNA sense strand
gaaagaagaugaggguguu

SEQ ID NO: 136630 - RNA, 19 nt, Homo sapiens
  misc_RNA (1)...(19): siRNA sense strand
ugaaaggaaucccaauuaa

SEQ ID NO: 136631 - RNA, 19 nt, Homo sapiens
  misc_RNA (1)...(19): siRNA sense strand
ucucaucgcuacuauauuu

SEQ ID NO: 136632 - RNA, 19 nt, Homo sapiens
  misc_RNA (1)...(19): siRNA sense strand
gaagauaccaucccacgaa

SEQ ID NO: 136633 - RNA, 19 nt, Homo sapiens
  misc_RNA (1)...(19): siRNA sense strand
ggaaagaguugugaagcaa

SEQ ID NO: 136634 - RNA, 19 nt, Homo sapiens
  misc_RNA (1)...(19): siRNA sense strand
gauguuaacuucagaaagg

SEQ ID NO: 136635 - RNA, 19 nt, Homo sapiens
  misc_RNA (1)...(19): siRNA sense strand
gcaggaagauuugaugugu

SEQ ID NO: 136636 - RNA, 19 nt, Homo sapiens
  misc_RNA (1)...(19): siRNA sense strand
ggaaagaacauuugcauac

SEQ ID NO: 136637 - RNA, 19 nt, Homo sapiens
  misc_RNA (1)...(19): siRNA sense strand
cgaaugaccuccgcaaaga

SEQ ID NO: 136638 - RNA, 19 nt, Homo sapiens
  misc_RNA (1)...(19): siRNA sense strand
ugauagaacugucugcauu

SEQ ID NO: 136639 - RNA, 19 nt, Homo sapiens
  misc_RNA (1)...(19): siRNA sense strand
gcucugaaauggacaacaa

SEQ ID NO: 136640 - RNA, 19 nt, Homo sapiens
  misc_RNA (1)...(19): siRNA sense strand
ugacaaagcaguggaagua

SEQ ID NO: 136641 - RNA, 19 nt, Homo sapiens
  misc_RNA (1)...(19): siRNA sense strand
gaaagaacauuugcauacu

SEQ ID NO: 136642 - RNA, 19 nt, Homo sapiens
  misc_RNA (1)...(19): siRNA sense strand
gacaacaacugcucaccaa

SEQ ID NO: 136643 - RNA, 19 nt, Homo sapiens
  misc_RNA (1)...(19): siRNA sense strand
aggaagagcuguucagguu

SEQ ID NO: 136644 - RNA, 19 nt, Homo sapiens
  misc_RNA (1)...(19): siRNA sense strand
ggaaaggaaagaacauuug

SEQ ID NO: 136645 - RNA, 19 nt, Homo sapiens
  misc_RNA (1)...(19): siRNA sense strand
gaagaugaggaacaaauga

SEQ ID NO: 136646 - RNA, 19 nt, Homo sapiens
  misc_RNA (1)...(19): siRNA sense strand
ggagagaugugucagaacu

SEQ ID NO: 136647 - RNA, 19 nt, Homo sapiens
  misc_RNA (1)...(19): siRNA sense strand
gaagaaaacagccuuguaa

SEQ ID NO: 136648 - RNA, 19 nt, Homo sapiens
  misc_RNA (1)...(19): siRNA sense strand
aaaggaaucccaauuaaga

SEQ ID NO: 136649 - RNA, 19 nt, Homo sapiens
  misc_RNA (1)...(19): siRNA sense strand
ggaaagagugggagaagau

SEQ ID NO: 136650 - RNA, 19 nt, Homo sapiens
  misc_RNA (1)...(19): siRNA sense strand
gaagagcuguucagguuuu

SEQ ID NO: 136651 - RNA, 19 nt, Homo sapiens
  misc_RNA (1)...(19): siRNA sense strand
gggagaagaugaggaacaa

SEQ ID NO: 136652 - RNA, 19 nt, Homo sapiens
  misc_RNA (1)...(19): siRNA sense strand
ggaacagaaugccguaagu

SEQ ID NO: 136653 - RNA, 19 nt, Homo sapiens
  misc_RNA (1)...(19): siRNA sense strand
gaggaacaaaugaugauaa

SEQ ID NO: 136654 - RNA, 19 nt, Homo sapiens
  misc_RNA (1)...(19): siRNA sense strand
gaaucuguguguaauaaag

SEQ ID NO: 136655 - RNA, 19 nt, Homo sapiens
  misc_RNA (1)...(19): siRNA sense strand
aaagagaaucuguguguaa

SEQ ID NO: 136656 - RNA, 19 nt, Homo sapiens
  misc_RNA (1)...(19): siRNA sense strand
gaaaggaaucccaauuaag

SEQ ID NO: 136657 - RNA, 19 nt, Homo sapiens
  misc_RNA (1)...(19): siRNA sense strand
uuagaaagcccaaaggaaa

SEQ ID NO: 136658 - RNA, 19 nt, Homo sapiens
  misc_RNA (1)...(19): siRNA sense strand
gcuacuauauuucucaauc

SEQ ID NO: 136659 - RNA, 19 nt, Homo sapiens
  misc_RNA (1)...(19): siRNA sense strand
aaaggaaaggugacuauuu

SEQ ID NO: 136660 - RNA, 19 nt, Homo sapiens
  misc_RNA (1)...(19): siRNA sense strand
aaacguggcucugaaaugg

SEQ ID NO: 136661 - RNA, 19 nt, Homo sapiens
  misc_RNA (1)...(19): siRNA sense strand
gauagaacugucugcauuu

SEQ ID NO: 136662 - RNA, 19 nt, Homo sapiens
  misc_RNA (1)...(19): siRNA sense strand
gagaagaugaggaacaaau

SEQ ID NO: 136663 - RNA, 19 nt, Homo sapiens
  misc_RNA (1)...(19): siRNA sense strand
gccagaagauuuugauuuu

SEQ ID NO: 136664 - RNA, 19 nt, Homo sapiens
  misc_RNA (1)...(19): siRNA sense strand
gggaaagaguugugaagca

SEQ ID NO: 136665 - RNA, 19 nt, Homo sapiens
  misc_RNA (1)...(19): siRNA sense strand
aaagucagcuugauagaac

SEQ ID NO: 136666 - RNA, 19 nt, Homo sapiens
  misc_RNA (1)...(19): siRNA sense strand
aagaagauguugcuaugga

SEQ ID NO: 136667 - RNA, 19 nt, Homo sapiens
  misc_RNA (1)...(19): siRNA sense strand
gaaagaguugugaagcaaa

SEQ ID NO: 136668 - RNA, 19 nt, Homo sapiens
  misc_RNA (1)...(19): siRNA sense strand
gaaagaucauugaguucag

SEQ ID NO: 136669 - RNA, 19 nt, Homo sapiens
  misc_RNA (1)...(19): siRNA sense strand
aagaacauuugcauacuga

SEQ ID NO: 136670 - RNA, 19 nt, Homo sapiens
  misc_RNA (1)...(19): siRNA sense strand
caucgcuucugcucaguuu

SEQ ID NO: 136671 - RNA, 19 nt, Homo sapiens
  misc_RNA (1)...(19): siRNA sense strand
caauaccugugcuuuggaa

SEQ ID NO: 136672 - RNA, 19 nt, Homo sapiens
  misc_RNA (1)...(19): siRNA sense strand
uugaaaggaaucccaauua

SEQ ID NO: 136673 - RNA, 19 nt, Homo sapiens
  misc_RNA (1)...(19): siRNA sense strand
caggaagauuugaugugua

SEQ ID NO: 136674 - RNA, 19 nt, Homo sapiens
  misc_RNA (1)...(19): siRNA sense strand
ggaaaacaagccuguauuu

SEQ ID NO: 136675 - RNA, 19 nt, Homo sapiens
  misc_RNA (1)...(19): siRNA sense strand
ccacgaacacagauagaaa

SEQ ID NO: 136676 - RNA, 19 nt, Homo sapiens
  misc_RNA (1)...(19): siRNA sense strand
gaagauuugauguguacuu

SEQ ID NO: 136677 - RNA, 19 nt, Homo sapiens
  misc_RNA (1)...(19): siRNA sense strand
gaugaggaacaaaugauga

SEQ ID NO: 136678 - RNA, 19 nt, Homo sapiens
  misc_RNA (1)...(19): siRNA sense strand
ggcaauaccugugcuuugg

SEQ ID NO: 136679 - RNA, 19 nt, Homo sapiens
  misc_RNA (1)...(19): siRNA sense strand
gaacuucuuaaaccucuug

SEQ ID NO: 136680 - RNA, 19 nt, Homo sapiens
  misc_RNA (1)...(19): siRNA sense strand
aaagaacauuugcauacug

SEQ ID NO: 136681 - RNA, 19 nt, Homo sapiens
  misc_RNA (1)...(19): siRNA sense strand
gaacauuugcauacugaca

SEQ ID NO: 136682 - RNA, 19 nt, Homo sapiens
  misc_RNA (1)...(19): siRNA sense strand
aaggaaaggugacuauuuu

SEQ ID NO: 136683 - RNA, 19 nt, Homo sapiens
  misc_RNA (1)...(19): siRNA sense strand
cugaagaccacaaauuaaa

SEQ ID NO: 136684 - RNA, 19 nt, Homo sapiens
  misc_RNA (1)...(19): siRNA sense strand
cccugaagaccacaaauua

SEQ ID NO: 136685 - RNA, 19 nt, Homo sapiens
  misc_RNA (1)...(19): siRNA sense strand
ccaaaggaaaggugacuau

SEQ ID NO: 136686 - RNA, 19 nt, Homo sapiens
  misc_RNA (1)...(19): siRNA sense strand
uagaaguuguggaaaggaa

SEQ ID NO: 136687 - RNA, 19 nt, Homo sapiens
  misc_RNA (1)...(19): siRNA sense strand
gaacugucugcauuucuga

SEQ ID NO: 136688 - RNA, 19 nt, Homo sapiens
  misc_RNA (1)...(19): siRNA sense strand
ggaagagcuguucagguuu

SEQ ID NO: 136689 - RNA, 19 nt, Homo sapiens
  misc_RNA (1)...(19): siRNA sense strand
uaacuuuacuuccacucau

SEQ ID NO: 136690 - RNA, 19 nt, Homo sapiens
  misc_RNA (1)...(19): siRNA sense strand
augaauaccugacaaagca

SEQ ID NO: 136691 - RNA, 19 nt, Homo sapiens
  misc_RNA (1)...(19): siRNA sense strand
caaguucucagaugaauac

SEQ ID NO: 136692 - RNA, 19 nt, Homo sapiens
  misc_RNA (1)...(19): siRNA sense strand
gaaaggaaagaacauuugc

SEQ ID NO: 136693 - RNA, 19 nt, Homo sapiens
  misc_RNA (1)...(19): siRNA sense strand
gaaugaccuccgcaaagaa

SEQ ID NO: 136694 - RNA, 19 nt, Homo sapiens
  misc_RNA (1)...(19): siRNA sense strand
ucaugggauugguaaauau

SEQ ID NO: 136695 - RNA, 19 nt, Homo sapiens
  misc_RNA (1)...(19): siRNA sense strand
acaaagcaguggaaguauc

SEQ ID NO: 136696 - RNA, 19 nt, Homo sapiens
  misc_RNA (1)...(19): siRNA sense strand
gaacagaaugccguaaguc

SEQ ID NO: 136697 - RNA, 19 nt, Homo sapiens
  misc_RNA (1)...(19): siRNA sense strand
uaaaagggguaucaaguca

SEQ ID NO: 136698 - RNA, 19 nt, Homo sapiens
  misc_RNA (1)...(19): siRNA sense strand
ccugaagaccacaaauuaa

SEQ ID NO: 136699 - RNA, 19 nt, Homo sapiens
  misc_RNA (1)...(19): siRNA sense strand
aaacuucuggcaucauaaa

SEQ ID NO: 136700 - RNA, 19 nt, Homo sapiens
  misc_RNA (1)...(19): siRNA sense strand
gaagauguugcuauggaau

SEQ ID NO: 136701 - RNA, 19 nt, Homo sapiens
  misc_RNA (1)...(19): siRNA sense strand
gaagaugaggguguugaug

SEQ ID NO: 136702 - RNA, 19 nt, Homo sapiens
  misc_RNA (1)...(19): siRNA sense strand
gaaagagugggagaagaug

SEQ ID NO: 136703 - RNA, 19 nt, Homo sapiens
  misc_RNA (1)...(19): siRNA sense strand
agaagauguugcuauggaa

SEQ ID NO: 136704 - RNA, 19 nt, Homo sapiens
  misc_RNA (1)...(19): siRNA sense strand
aagagaaucuguguguaau

SEQ ID NO: 136705 - RNA, 19 nt, Homo sapiens
  misc_RNA (1)...(19): siRNA sense strand
caaaggaaaggugacuauu

SEQ ID NO: 136706 - RNA, 19 nt, Homo sapiens
  misc_RNA (1)...(19): siRNA sense strand
gcccugacaucccaucuac

SEQ ID NO: 136707 - RNA, 19 nt, Homo sapiens
  misc_RNA (1)...(19): siRNA sense strand
uucaugggauugguaaaua

SEQ ID NO: 136708 - RNA, 19 nt, Homo sapiens
  misc_RNA (1)...(19): siRNA sense strand
guuagaaagcccaaaggaa

SEQ ID NO: 136709 - RNA, 19 nt, Homo sapiens
  misc_RNA (1)...(19): siRNA sense strand
aagaugaggguguugauga

SEQ ID NO: 136710 - RNA, 19 nt, Homo sapiens
  misc_RNA (1)...(19): siRNA sense strand
gagcuucaugggauuggua

SEQ ID NO: 136711 - RNA, 19 nt, Homo sapiens
  misc_RNA (1)...(19): siRNA sense strand
uuaaaccucuuggucucua

SEQ ID NO: 136712 - RNA, 19 nt, Homo sapiens
  misc_RNA (1)...(19): siRNA sense strand
uaaucucguucaagaaaca

SEQ ID NO: 136713 - RNA, 19 nt, Homo sapiens
  misc_RNA (1)...(19): siRNA sense strand
caaaagagaaucugugugu

SEQ ID NO: 136714 - RNA, 19 nt, Homo sapiens
  misc_RNA (1)...(19): siRNA sense strand
gaaaggugacuauuuugaa

SEQ ID NO: 136715 - RNA, 19 nt, Homo sapiens
  misc_RNA (1)...(19): siRNA sense strand
caaguaguaguucagaguu

SEQ ID NO: 136716 - RNA, 19 nt, Homo sapiens
  misc_RNA (1)...(19): siRNA sense strand
aauauggcaacgacucuua

SEQ ID NO: 136717 - RNA, 19 nt, Homo sapiens
  misc_RNA (1)...(19): siRNA sense strand
aaagaguugugaagcaaag

SEQ ID NO: 136718 - RNA, 19 nt, Homo sapiens
  misc_RNA (1)...(19): siRNA sense strand
cagcugagguagcaagaac

SEQ ID NO: 136719 - RNA, 19 nt, Homo sapiens
  misc_RNA (1)...(19): siRNA sense strand
ggaagacagcaggaagauu

SEQ ID NO: 136720 - RNA, 19 nt, Homo sapiens
  misc_RNA (1)...(19): siRNA sense strand
acagauagaaagaaggaaa

SEQ ID NO: 136721 - RNA, 19 nt, Homo sapiens
  misc_RNA (1)...(19): siRNA sense strand
ggaaaggugacuauuuuga

SEQ ID NO: 136722 - RNA, 19 nt, Homo sapiens
  misc_RNA (1)...(19): siRNA sense strand
cuggagagaugugucagaa

SEQ ID NO: 136723 - RNA, 19 nt, Homo sapiens
  misc_RNA (1)...(19): siRNA sense strand
gcaacgacucuuaccgaau

SEQ ID NO: 136724 - RNA, 19 nt, Homo sapiens
  misc_RNA (1)...(19): siRNA sense strand
gaugaugccuaguaaauua

SEQ ID NO: 136725 - RNA, 19 nt, Homo sapiens
  misc_RNA (1)...(19): siRNA sense strand
gaaagaugaugccuaguaa

SEQ ID NO: 136726 - RNA, 19 nt, Homo sapiens
  misc_RNA (1)...(19): siRNA sense strand
cagaagagauggauauuga

SEQ ID NO: 136727 - RNA, 19 nt, Homo sapiens
  misc_RNA (1)...(19): siRNA sense strand
ggaaagaugaugccuagua

SEQ ID NO: 136728 - RNA, 19 nt, Homo sapiens
  misc_RNA (1)...(19): siRNA sense strand
gaaacgauccucucaauca

SEQ ID NO: 136729 - RNA, 19 nt, Homo sapiens
  misc_RNA (1)...(19): siRNA sense strand
ucacaaaucauccuaguaa

SEQ ID NO: 136730 - RNA, 19 nt, Homo sapiens
  misc_RNA (1)...(19): siRNA sense strand
gaacagccacgucagcuuu

SEQ ID NO: 136731 - RNA, 19 nt, Homo sapiens
  misc_RNA (1)...(19): siRNA sense strand
uaaccaaagucacaaauca

SEQ ID NO: 136732 - RNA, 19 nt, Homo sapiens
  misc_RNA (1)...(19): siRNA sense strand
gaagagauggauauugaaa

SEQ ID NO: 136733 - RNA, 19 nt, Homo sapiens
  misc_RNA (1)...(19): siRNA sense strand
gguaagaaguucagaagca

SEQ ID NO: 136734 - RNA, 19 nt, Homo sapiens
  misc_RNA (1)...(19): siRNA sense strand
gcgaaacgauccucucaau

SEQ ID NO: 136735 - RNA, 19 nt, Homo sapiens
  misc_RNA (1)...(19): siRNA sense strand
caagagcgaugucuacuac

SEQ ID NO: 136736 - RNA, 19 nt, Homo sapiens
  misc_RNA (1)...(19): siRNA sense strand
gaaaucagacccacaacga

SEQ ID NO: 136737 - RNA, 19 nt, Homo sapiens
  misc_RNA (1)...(19): siRNA sense strand
agacaaacagcaucaauuu

SEQ ID NO: 136738 - RNA, 19 nt, Homo sapiens
  misc_RNA (1)...(19): siRNA sense strand
aaaccagacuugaauacaa

SEQ ID NO: 136739 - RNA, 19 nt, Homo sapiens
  misc_RNA (1)...(19): siRNA sense strand
gaaaagaacccugcuguuu

SEQ ID NO: 136740 - RNA, 19 nt, Homo sapiens
  misc_RNA (1)...(19): siRNA sense strand
gcaagguaccugggaaaua

SEQ ID NO: 136741 - RNA, 19 nt, Homo sapiens
  misc_RNA (1)...(19): siRNA sense strand
caagguaccugggaaauac

SEQ ID NO: 136742 - RNA, 19 nt, Homo sapiens
  misc_RNA (1)...(19): siRNA sense strand
cuucagaacuggaaagaug

SEQ ID NO: 136743 - RNA, 19 nt, Homo sapiens
  misc_RNA (1)...(19): siRNA sense strand
agagauggauauugaaaug

SEQ ID NO: 136744 - RNA, 19 nt, Homo sapiens
  misc_RNA (1)...(19): siRNA sense strand
guaagaaguucagaagcaa

SEQ ID NO: 136745 - RNA, 19 nt, Homo sapiens
  misc_RNA (1)...(19): siRNA sense strand
caguggagaugaagccuaa

SEQ ID NO: 136746 - RNA, 19 nt, Homo sapiens
  misc_RNA (1)...(19): siRNA sense strand
gaagaaggaggaagugauc

SEQ ID NO: 136747 - RNA, 19 nt, Homo sapiens
  misc_RNA (1)...(19): siRNA sense strand
gcaaguacgcaagaaauug

SEQ ID NO: 136748 - RNA, 19 nt, Homo sapiens
  misc_RNA (1)...(19): siRNA sense strand
gcaagagcgaugucuacua

SEQ ID NO: 136749 - RNA, 19 nt, Homo sapiens
  misc_RNA (1)...(19): siRNA sense strand
caaacaaccgguaaccaaa

SEQ ID NO: 136750 - RNA, 19 nt, Homo sapiens
  misc_RNA (1)...(19): siRNA sense strand
aaagaacccugcuguuugg

SEQ ID NO: 136751 - RNA, 19 nt, Homo sapiens
  misc_RNA (1)...(19): siRNA sense strand
aaacgauccucucaaucaa

SEQ ID NO: 136752 - RNA, 19 nt, Homo sapiens
  misc_RNA (1)...(19): siRNA sense strand
gcgagcugcugauacagaa

SEQ ID NO: 136753 - RNA, 19 nt, Homo sapiens
  misc_RNA (1)...(19): siRNA sense strand
agacuugaauacaacauug

SEQ ID NO: 136754 - RNA, 19 nt, Homo sapiens
  misc_RNA (1)...(19): siRNA sense strand
gaaauggacaguggagaug

SEQ ID NO: 136755 - RNA, 19 nt, Homo sapiens
  misc_RNA (1)...(19): siRNA sense strand
gguaaaccagacuugaaua

SEQ ID NO: 136756 - RNA, 19 nt, Homo sapiens
  misc_RNA (1)...(19): siRNA sense strand
gaaacaggaagagcgagua

SEQ ID NO: 136757 - RNA, 19 nt, Homo sapiens
  misc_RNA (1)...(19): siRNA sense strand
ucaaacaaccgguaaccaa

SEQ ID NO: 136758 - RNA, 19 nt, Homo sapiens
  misc_RNA (1)...(19): siRNA sense strand
caaaggucuucaaggaguu

SEQ ID NO: 136759 - RNA, 19 nt, Homo sapiens
  misc_RNA (1)...(19): siRNA sense strand
ggaagaaggaggaagugau

SEQ ID NO: 136760 - RNA, 19 nt, Homo sapiens
  misc_RNA (1)...(19): siRNA sense strand
ggaaauacuguugaucuca

SEQ ID NO: 136761 - RNA, 19 nt, Homo sapiens
  misc_RNA (1)...(19): siRNA sense strand
acccaaaggucuucaagga

SEQ ID NO: 136762 - RNA, 19 nt, Homo sapiens
  misc_RNA (1)...(19): siRNA sense strand
gggaaauacuguugaucuc

SEQ ID NO: 136763 - RNA, 19 nt, Homo sapiens
  misc_RNA (1)...(19): siRNA sense strand
ggagaagaggcuacaagga

SEQ ID NO: 136764 - RNA, 19 nt, Homo sapiens
  misc_RNA (1)...(19): siRNA sense strand
aaacagagacugcgaaacg

SEQ ID NO: 136765 - RNA, 19 nt, Homo sapiens
  misc_RNA (1)...(19): siRNA sense strand
ggaacuacccaaaggucuu

SEQ ID NO: 136766 - RNA, 19 nt, Homo sapiens
  misc_RNA (1)...(19): siRNA sense strand
gcgggaagaggauggauug

SEQ ID NO: 136767 - RNA, 19 nt, Homo sapiens
  misc_RNA (1)...(19): siRNA sense strand
agauggauauugaaaugga

SEQ ID NO: 136768 - RNA, 19 nt, Homo sapiens
  misc_RNA (1)...(19): siRNA sense strand
gaacuacccaaaggucuuc

SEQ ID NO: 136769 - RNA, 19 nt, Homo sapiens
  misc_RNA (1)...(19): siRNA sense strand
uagacaaacagcaucaauu

SEQ ID NO: 136770 - RNA, 19 nt, Homo sapiens
  misc_RNA (1)...(19): siRNA sense strand
agagcgaugucuacuacuu

SEQ ID NO: 136771 - RNA, 19 nt, Homo sapiens
  misc_RNA (1)...(19): siRNA sense strand
acaaggacuuagugcauca

SEQ ID NO: 136772 - RNA, 19 nt, Homo sapiens
  misc_RNA (1)...(19): siRNA sense strand
caagaaauuggaagaagca

SEQ ID NO: 136773 - RNA, 19 nt, Homo sapiens
  misc_RNA (1)...(19): siRNA sense strand
aggaggaagugauccgaaa

SEQ ID NO: 136774 - RNA, 19 nt, Homo sapiens
  misc_RNA (1)...(19): siRNA sense strand
ccauggaacuacccaaagg

SEQ ID NO: 136775 - RNA, 19 nt, Homo sapiens
  misc_RNA (1)...(19): siRNA sense strand
aagaugaugccuaguaaau

SEQ ID NO: 136776 - RNA, 19 nt, Homo sapiens
  misc_RNA (1)...(19): siRNA sense strand
gaagaggcuacaaggacuu

SEQ ID NO: 136777 - RNA, 19 nt, Homo sapiens
  misc_RNA (1)...(19): siRNA sense strand
ccaauuagacaaacagcau

SEQ ID NO: 136778 - RNA, 19 nt, Homo sapiens
  misc_RNA (1)...(19): siRNA sense strand
ggguaaaccagacuugaau

SEQ ID NO: 136779 - RNA, 19 nt, Homo sapiens
  misc_RNA (1)...(19): siRNA sense strand
gauggaagaaggaggaagu

SEQ ID NO: 136780 - RNA, 19 nt, Homo sapiens
  misc_RNA (1)...(19): siRNA sense strand
auacagaagagauggauau

SEQ ID NO: 136781 - RNA, 19 nt, Homo sapiens
  misc_RNA (1)...(19): siRNA sense strand
gagcugcugauacagaaga

SEQ ID NO: 136782 - RNA, 19 nt, Homo sapiens
  misc_RNA (1)...(19): siRNA sense strand
cagcaaguacgcaagaaau

SEQ ID NO: 136783 - RNA, 19 nt, Homo sapiens
  misc_RNA (1)...(19): siRNA sense strand
ggaagagcgaguacagcaa

SEQ ID NO: 136784 - RNA, 19 nt, Homo sapiens
  misc_RNA (1)...(19): siRNA sense strand
cuguugaucucagcaguuu

SEQ ID NO: 136785 - RNA, 19 nt, Homo sapiens
  misc_RNA (1)...(19): siRNA sense strand
gcaaugaugagacccuuuu

SEQ ID NO: 136786 - RNA, 19 nt, Homo sapiens
  misc_RNA (1)...(19): siRNA sense strand
cacaacgaaugaaugaaca

SEQ ID NO: 136787 - RNA, 19 nt, Homo sapiens
  misc_RNA (1)...(19): siRNA sense strand
guaaaccagacuugaauac

SEQ ID NO: 136788 - RNA, 19 nt, Homo sapiens
  misc_RNA (1)...(19): siRNA sense strand
gaagugauccgaaaaucug

SEQ ID NO: 136789 - RNA, 19 nt, Homo sapiens
  misc_RNA (1)...(19): siRNA sense strand
caaacagcaucaauuuuca

SEQ ID NO: 136790 - RNA, 19 nt, Homo sapiens
  misc_RNA (1)...(19): siRNA sense strand
cagaagcaagccucaguug

SEQ ID NO: 136791 - RNA, 19 nt, Homo sapiens
  misc_RNA (1)...(19): siRNA sense strand
gauacagaagagauggaua

SEQ ID NO: 136792 - RNA, 19 nt, Homo sapiens
  misc_RNA (1)...(19): siRNA sense strand
caaguacgcaagaaauugg

SEQ ID NO: 136793 - RNA, 19 nt, Homo sapiens
  misc_RNA (1)...(19): siRNA sense strand
ccacaacgaaugaaugaac

SEQ ID NO: 136794 - RNA, 19 nt, Homo sapiens
  misc_RNA (1)...(19): siRNA sense strand
cagcaucaauuuucaaaca

SEQ ID NO: 136795 - RNA, 19 nt, Homo sapiens
  misc_RNA (1)...(19): siRNA sense strand
gagcgaugucuacuacuuc

SEQ ID NO: 136796 - RNA, 19 nt, Homo sapiens
  misc_RNA (1)...(19): siRNA sense strand
ugaaauggacaguggagau

SEQ ID NO: 136797 - RNA, 19 nt, Homo sapiens
  misc_RNA (1)...(19): siRNA sense strand
agucuccgcugcuguggaa

SEQ ID NO: 136798 - RNA, 19 nt, Homo sapiens
  misc_RNA (1)...(19): siRNA sense strand
cacaaaucauccuaguaau

SEQ ID NO: 136799 - RNA, 19 nt, Homo sapiens
  misc_RNA (1)...(19): siRNA sense strand
cuacaaggacuuagugcau

SEQ ID NO: 136800 - RNA, 19 nt, Homo sapiens
  misc_RNA (1)...(19): siRNA sense strand
gucgcgagcugcugauaca

SEQ ID NO: 136801 - RNA, 19 nt, Homo sapiens
  misc_RNA (1)...(19): siRNA sense strand
uuacagaagaacaaacaga

SEQ ID NO: 136802 - RNA, 19 nt, Homo sapiens
  misc_RNA (1)...(19): siRNA sense strand
aauggacaguggagaugaa

SEQ ID NO: 136803 - RNA, 19 nt, Homo sapiens
  misc_RNA (1)...(19): siRNA sense strand
cacaagcucugcgccaauc

SEQ ID NO: 136804 - RNA, 19 nt, Homo sapiens
  misc_RNA (1)...(19): siRNA sense strand
caaggaguugguccaggua

SEQ ID NO: 136805 - RNA, 19 nt, Homo sapiens
  misc_RNA (1)...(19): siRNA sense strand
guaaccaaagucacaaauc

SEQ ID NO: 136806 - RNA, 19 nt, Homo sapiens
  misc_RNA (1)...(19): siRNA sense strand
acaaacagagacugcgaaa

SEQ ID NO: 136807 - RNA, 19 nt, Homo sapiens
  misc_RNA (1)...(19): siRNA sense strand
cugcaaagcuuuuauuguc

SEQ ID NO: 136808 - RNA, 19 nt, Homo sapiens
  misc_RNA (1)...(19): siRNA sense strand
ccagguagcaaugaugaga

SEQ ID NO: 136809 - RNA, 19 nt, Homo sapiens
  misc_RNA (1)...(19): siRNA sense strand
gauccucucaaucaaaaua

SEQ ID NO: 136810 - RNA, 19 nt, Homo sapiens
  misc_RNA (1)...(19): siRNA sense strand
aaaagaacccugcuguuug

SEQ ID NO: 136811 - RNA, 19 nt, Homo sapiens
  misc_RNA (1)...(19): siRNA sense strand
aaucagacccacaacgaau

SEQ ID NO: 136812 - RNA, 19 nt, Homo sapiens
  misc_RNA (1)...(19): siRNA sense strand
aaacaaccgguaaccaaag

SEQ ID NO: 136813 - RNA, 19 nt, Homo sapiens
  misc_RNA (1)...(19): siRNA sense strand
cgcaagaaauuggaagaag

SEQ ID NO: 136814 - RNA, 19 nt, Homo sapiens
  misc_RNA (1)...(19): siRNA sense strand
cauccuaguaauaaaguga

SEQ ID NO: 136815 - RNA, 19 nt, Homo sapiens
  misc_RNA (1)...(19): siRNA sense strand
gguaaccaaagucacaaau

SEQ ID NO: 136816 - RNA, 19 nt, Homo sapiens
  misc_RNA (1)...(19): siRNA sense strand
caaccgguaaccaaaguca

SEQ ID NO: 136817 - RNA, 19 nt, Homo sapiens
  misc_RNA (1)...(19): siRNA sense strand
aaagaugaugccuaguaaa

SEQ ID NO: 136818 - RNA, 19 nt, Homo sapiens
  misc_RNA (1)...(19): siRNA sense strand
ucagacccacaacgaauga

SEQ ID NO: 136819 - RNA, 19 nt, Homo sapiens
  misc_RNA (1)...(19): siRNA sense strand
uaaaccagacuugaauaca

SEQ ID NO: 136820 - RNA, 19 nt, Homo sapiens
  misc_RNA (1)...(19): siRNA sense strand
agccucaguuggcaaggua

SEQ ID NO: 136821 - RNA, 19 nt, Homo sapiens
  misc_RNA (1)...(19): siRNA sense strand
ggaaaagaacccugcuguu

SEQ ID NO: 136822 - RNA, 19 nt, Homo sapiens
  misc_RNA (1)...(19): siRNA sense strand
ucagauguaacagaacaaa

SEQ ID NO: 136823 - RNA, 19 nt, Homo sapiens
  misc_RNA (1)...(19): siRNA sense strand
augaagacaucaggaaaca

SEQ ID NO: 136824 - RNA, 19 nt, Homo sapiens
  misc_RNA (1)...(19): siRNA sense strand
gaugaugccuaguaaauua

SEQ ID NO: 136825 - RNA, 19 nt, Homo sapiens
  misc_RNA (1)...(19): siRNA sense strand
gaaagaugaugccuaguaa

SEQ ID NO: 136826 - RNA, 19 nt, Homo sapiens
  misc_RNA (1)...(19): siRNA sense strand
ggaaagaugaugccuagua

SEQ ID NO: 136827 - RNA, 19 nt, Homo sapiens
  misc_RNA (1)...(19): siRNA sense strand
gaaacgauccucucaauca

SEQ ID NO: 136828 - RNA, 19 nt, Homo sapiens
  misc_RNA (1)...(19): siRNA sense strand
gguaagaaguucagaagca

SEQ ID NO: 136829 - RNA, 19 nt, Homo sapiens
  misc_RNA (1)...(19): siRNA sense strand
gcgaaacgauccucucaau

SEQ ID NO: 136830 - RNA, 19 nt, Homo sapiens
  misc_RNA (1)...(19): siRNA sense strand
caagagcgaugucuacuac

SEQ ID NO: 136831 - RNA, 19 nt, Homo sapiens
  misc_RNA (1)...(19): siRNA sense strand
gcaagguaccugggaaaua

SEQ ID NO: 136832 - RNA, 19 nt, Homo sapiens
  misc_RNA (1)...(19): siRNA sense strand
caagguaccugggaaauac

SEQ ID NO: 136833 - RNA, 19 nt, Homo sapiens
  misc_RNA (1)...(19): siRNA sense strand
cuucagaacuggaaagaug

SEQ ID NO: 136834 - RNA, 19 nt, Homo sapiens
  misc_RNA (1)...(19): siRNA sense strand
guaagaaguucagaagcaa

SEQ ID NO: 136835 - RNA, 19 nt, Homo sapiens
  misc_RNA (1)...(19): siRNA sense strand
gaagaaggaggaagugauc

SEQ ID NO: 136836 - RNA, 19 nt, Homo sapiens
  misc_RNA (1)...(19): siRNA sense strand
gcaagagcgaugucuacua

SEQ ID NO: 136837 - RNA, 19 nt, Homo sapiens
  misc_RNA (1)...(19): siRNA sense strand
aaacgauccucucaaucaa

SEQ ID NO: 136838 - RNA, 19 nt, Homo sapiens
  misc_RNA (1)...(19): siRNA sense strand
ggaagaaggaggaagugau

SEQ ID NO: 136839 - RNA, 19 nt, Homo sapiens
  misc_RNA (1)...(19): siRNA sense strand
ggaaauacuguugaucuca

SEQ ID NO: 136840 - RNA, 19 nt, Homo sapiens
  misc_RNA (1)...(19): siRNA sense strand
gggaaauacuguugaucuc

SEQ ID NO: 136841 - RNA, 19 nt, Homo sapiens
  misc_RNA (1)...(19): siRNA sense strand
aaacagagacugcgaaacg

SEQ ID NO: 136842 - RNA, 19 nt, Homo sapiens
  misc_RNA (1)...(19): siRNA sense strand
gcgggaagaggauggauug

SEQ ID NO: 136843 - RNA, 19 nt, Homo sapiens
  misc_RNA (1)...(19): siRNA sense strand
agagcgaugucuacuacuu

SEQ ID NO: 136844 - RNA, 19 nt, Homo sapiens
  misc_RNA (1)...(19): siRNA sense strand
aggaggaagugauccgaaa

SEQ ID NO: 136845 - RNA, 19 nt, Homo sapiens
  misc_RNA (1)...(19): siRNA sense strand
aagaugaugccuaguaaau

SEQ ID NO: 136846 - RNA, 19 nt, Homo sapiens
  misc_RNA (1)...(19): siRNA sense strand
gauggaagaaggaggaagu

SEQ ID NO: 136847 - RNA, 19 nt, Homo sapiens
  misc_RNA (1)...(19): siRNA sense strand
cuguugaucucagcaguuu

SEQ ID NO: 136848 - RNA, 19 nt, Homo sapiens
  misc_RNA (1)...(19): siRNA sense strand
gaagugauccgaaaaucug

SEQ ID NO: 136849 - RNA, 19 nt, Homo sapiens
  misc_RNA (1)...(19): siRNA sense strand
cagaagcaagccucaguug

SEQ ID NO: 136850 - RNA, 19 nt, Homo sapiens
  misc_RNA (1)...(19): siRNA sense strand
gagcgaugucuacuacuuc

SEQ ID NO: 136851 - RNA, 19 nt, Homo sapiens
  misc_RNA (1)...(19): siRNA sense strand
uuacagaagaacaaacaga

SEQ ID NO: 136852 - RNA, 19 nt, Homo sapiens
  misc_RNA (1)...(19): siRNA sense strand
acaaacagagacugcgaaa

SEQ ID NO: 136853 - RNA, 19 nt, Homo sapiens
  misc_RNA (1)...(19): siRNA sense strand
gauccucucaaucaaaaua

SEQ ID NO: 136854 - RNA, 19 nt, Homo sapiens
  misc_RNA (1)...(19): siRNA sense strand
aaagaugaugccuaguaaa

SEQ ID NO: 136855 - RNA, 19 nt, Homo sapiens
  misc_RNA (1)...(19): siRNA sense strand
agccucaguuggcaaggua

SEQ ID NO: 136856 - RNA, 19 nt, Homo sapiens
  misc_RNA (1)...(19): siRNA sense strand
guccaagugguaagaaguu

SEQ ID NO: 136857 - RNA, 19 nt, Homo sapiens
  misc_RNA (1)...(19): siRNA sense strand
ccugggaaauacuguugau

SEQ ID NO: 136858 - RNA, 19 nt, Homo sapiens
  misc_RNA (1)...(19): siRNA sense strand
ucagaagcaagccucaguu

SEQ ID NO: 136859 - RNA, 19 nt, Homo sapiens
  misc_RNA (1)...(19): siRNA sense strand
acagaagaacaaacagaga

SEQ ID NO: 136860 - RNA, 19 nt, Homo sapiens
  misc_RNA (1)...(19): siRNA sense strand
agaugaugccuaguaaauu

SEQ ID NO: 136861 - RNA, 19 nt, Homo sapiens
  misc_RNA (1)...(19): siRNA sense strand
ggacagugcuccagugaaa

SEQ ID NO: 136862 - RNA, 19 nt, Homo sapiens
  misc_RNA (1)...(19): siRNA sense strand
ggagauguaugauauuuga

SEQ ID NO: 136863 - RNA, 19 nt, Homo sapiens
  misc_RNA (1)...(19): siRNA sense strand
gaauaacacucuaagaaag

SEQ ID NO: 136864 - RNA, 19 nt, Homo sapiens
  misc_RNA (1)...(19): siRNA sense strand
agacaaaggugaugcagaa

SEQ ID NO: 136865 - RNA, 19 nt, Homo sapiens
  misc_RNA (1)...(19): siRNA sense strand
gaaaggugaauuugcaaua

SEQ ID NO: 136866 - RNA, 19 nt, Homo sapiens
  misc_RNA (1)...(19): siRNA sense strand
aagagagaaucccuuauua

SEQ ID NO: 136867 - RNA, 19 nt, Homo sapiens
  misc_RNA (1)...(19): siRNA sense strand
gggauaagagcacugauua

SEQ ID NO: 136868 - RNA, 19 nt, Homo sapiens
  misc_RNA (1)...(19): siRNA sense strand
caaagaugcugaagaaugg

SEQ ID NO: 136869 - RNA, 19 nt, Homo sapiens
  misc_RNA (1)...(19): siRNA sense strand
gcaaggaauacaauagaua

SEQ ID NO: 136870 - RNA, 19 nt, Homo sapiens
  misc_RNA (1)...(19): siRNA sense strand
gaaagaaagauugcuguuu

SEQ ID NO: 136871 - RNA, 19 nt, Homo sapiens
  misc_RNA (1)...(19): siRNA sense strand
gaggagaauuauaugauga

SEQ ID NO: 136872 - RNA, 19 nt, Homo sapiens
  misc_RNA (1)...(19): siRNA sense strand
ccaauaagcaauccacuaa

SEQ ID NO: 136873 - RNA, 19 nt, Homo sapiens
  misc_RNA (1)...(19): siRNA sense strand
gaucauccucuaccaauaa

SEQ ID NO: 136874 - RNA, 19 nt, Homo sapiens
  misc_RNA (1)...(19): siRNA sense strand
aagaaaggauggaaagaaa

SEQ ID NO: 136875 - RNA, 19 nt, Homo sapiens
  misc_RNA (1)...(19): siRNA sense strand
gaaaggauggaaagaaaga

SEQ ID NO: 136876 - RNA, 19 nt, Homo sapiens
  misc_RNA (1)...(19): siRNA sense strand
gaagaacaaaggaagauga

SEQ ID NO: 136877 - RNA, 19 nt, Homo sapiens
  misc_RNA (1)...(19): siRNA sense strand
gaaaagagagaaucccuua

SEQ ID NO: 136878 - RNA, 19 nt, Homo sapiens
  misc_RNA (1)...(19): siRNA sense strand
caaaggugaugcagaagau

SEQ ID NO: 136879 - RNA, 19 nt, Homo sapiens
  misc_RNA (1)...(19): siRNA sense strand
gauguaaagucuaucuauc

SEQ ID NO: 136880 - RNA, 19 nt, Homo sapiens
  misc_RNA (1)...(19): siRNA sense strand
ugagagaggagaauuauau

SEQ ID NO: 136881 - RNA, 19 nt, Homo sapiens
  misc_RNA (1)...(19): siRNA sense strand
ccaaagaugcugaagaaug

SEQ ID NO: 136882 - RNA, 19 nt, Homo sapiens
  misc_RNA (1)...(19): siRNA sense strand
ucccaaagaugcugaagaa

SEQ ID NO: 136883 - RNA, 19 nt, Homo sapiens
  misc_RNA (1)...(19): siRNA sense strand
ucaggaauuucaagacaaa

SEQ ID NO: 136884 - RNA, 19 nt, Homo sapiens
  misc_RNA (1)...(19): siRNA sense strand
gcugaaauuuguauugcaa

SEQ ID NO: 136885 - RNA, 19 nt, Homo sapiens
  misc_RNA (1)...(19): siRNA sense strand
gaagaugagucaggauagu

SEQ ID NO: 136886 - RNA, 19 nt, Homo sapiens
  misc_RNA (1)...(19): siRNA sense strand
aaagagagaaucccuuauu

SEQ ID NO: 136887 - RNA, 19 nt, Homo sapiens
  misc_RNA (1)...(19): siRNA sense strand
gcagucaaccaauagauga

SEQ ID NO: 136888 - RNA, 19 nt, Homo sapiens
  misc_RNA (1)...(19): siRNA sense strand
uccagacacuauuucauua

SEQ ID NO: 136889 - RNA, 19 nt, Homo sapiens
  misc_RNA (1)...(19): siRNA sense strand
ugaaaucucugcuccugau

SEQ ID NO: 136890 - RNA, 19 nt, Homo sapiens
  misc_RNA (1)...(19): siRNA sense strand
aacaagcagucaaccaaua

SEQ ID NO: 136891 - RNA, 19 nt, Homo sapiens
  misc_RNA (1)...(19): siRNA sense strand
cuaucuaucuucaggaauu

SEQ ID NO: 136892 - RNA, 19 nt, Homo sapiens
  misc_RNA (1)...(19): siRNA sense strand
gccuaaagccuacauaaug

SEQ ID NO: 136893 - RNA, 19 nt, Homo sapiens
  misc_RNA (1)...(19): siRNA sense strand
gaaaguggaagaacaaagg

SEQ ID NO: 136894 - RNA, 19 nt, Homo sapiens
  misc_RNA (1)...(19): siRNA sense strand
acagaaaggugaauuugca

SEQ ID NO: 136895 - RNA, 19 nt, Homo sapiens
  misc_RNA (1)...(19): siRNA sense strand
caacagaaaggugaauuug

SEQ ID NO: 136896 - RNA, 19 nt, Homo sapiens
  misc_RNA (1)...(19): siRNA sense strand
gauaaagacaaacaacaga

SEQ ID NO: 136897 - RNA, 19 nt, Homo sapiens
  misc_RNA (1)...(19): siRNA sense strand
ggagaaaauuuauccaaga

SEQ ID NO: 136898 - RNA, 19 nt, Homo sapiens
  misc_RNA (1)...(19): siRNA sense strand
ggaaagaaagauugcuguu

SEQ ID NO: 136899 - RNA, 19 nt, Homo sapiens
  misc_RNA (1)...(19): siRNA sense strand
ccucagaacgauaugauaa

SEQ ID NO: 136900 - RNA, 19 nt, Homo sapiens
  misc_RNA (1)...(19): siRNA sense strand
gagaggagaauuauaugau

SEQ ID NO: 136901 - RNA, 19 nt, Homo sapiens
  misc_RNA (1)...(19): siRNA sense strand
uacagcagcuucucccaaa

SEQ ID NO: 136902 - RNA, 19 nt, Homo sapiens
  misc_RNA (1)...(19): siRNA sense strand
uaagaaaggauggaaagaa

SEQ ID NO: 136903 - RNA, 19 nt, Homo sapiens
  misc_RNA (1)...(19): siRNA sense strand
cagaaugaauaacacucua

SEQ ID NO: 136904 - RNA, 19 nt, Homo sapiens
  misc_RNA (1)...(19): siRNA sense strand
gaagugauaaagacaaaca

SEQ ID NO: 136905 - RNA, 19 nt, Homo sapiens
  misc_RNA (1)...(19): siRNA sense strand
ucacagcuuucugggauuu

SEQ ID NO: 136906 - RNA, 19 nt, Homo sapiens
  misc_RNA (1)...(19): siRNA sense strand
gauaugauaaagacgauga

SEQ ID NO: 136907 - RNA, 19 nt, Homo sapiens
  misc_RNA (1)...(19): siRNA sense strand
aauaagcaauccacuaaca

SEQ ID NO: 136908 - RNA, 19 nt, Homo sapiens
  misc_RNA (1)...(19): siRNA sense strand
gcacaagaccuuccuuuug

SEQ ID NO: 136909 - RNA, 19 nt, Homo sapiens
  misc_RNA (1)...(19): siRNA sense strand
ccuaaagccuacauaaugg

SEQ ID NO: 136910 - RNA, 19 nt, Homo sapiens
  misc_RNA (1)...(19): siRNA sense strand
ugaaacauuuguagcagau

SEQ ID NO: 136911 - RNA, 19 nt, Homo sapiens
  misc_RNA (1)...(19): siRNA sense strand
agagagaaucccuuauuaa

SEQ ID NO: 136912 - RNA, 19 nt, Homo sapiens
  misc_RNA (1)...(19): siRNA sense strand
gaugagagaggagaauuau

SEQ ID NO: 136913 - RNA, 19 nt, Homo sapiens
  misc_RNA (1)...(19): siRNA sense strand
uguagcagauauacugaaa

SEQ ID NO: 136914 - RNA, 19 nt, Homo sapiens
  misc_RNA (1)...(19): siRNA sense strand
uaccagggauugugggauu

SEQ ID NO: 136915 - RNA, 19 nt, Homo sapiens
  misc_RNA (1)...(19): siRNA sense strand
uaagcguggugaugugauu

SEQ ID NO: 136916 - RNA, 19 nt, Homo sapiens
  misc_RNA (1)...(19): siRNA sense strand
auagauggcuacaguguca

SEQ ID NO: 136917 - RNA, 19 nt, Homo sapiens
  misc_RNA (1)...(19): siRNA sense strand
ggagaauuauaugaugaug

SEQ ID NO: 136918 - RNA, 19 nt, Homo sapiens
  misc_RNA (1)...(19): siRNA sense strand
agaggagaauuauaugaug

SEQ ID NO: 136919 - RNA, 19 nt, Homo sapiens
  misc_RNA (1)...(19): siRNA sense strand
gcagcugaaauuuguauug

SEQ ID NO: 136920 - RNA, 19 nt, Homo sapiens
  misc_RNA (1)...(19): siRNA sense strand
aaucucugcuccugauaaa

SEQ ID NO: 136921 - RNA, 19 nt, Homo sapiens
  misc_RNA (1)...(19): siRNA sense strand
uagcagauauacugaaagg

SEQ ID NO: 136922 - RNA, 19 nt, Homo sapiens
  misc_RNA (1)...(19): siRNA sense strand
ugaucauccucuaccaaua

SEQ ID NO: 136923 - RNA, 19 nt, Homo sapiens
  misc_RNA (1)...(19): siRNA sense strand
guggugugcucucaguaaa

SEQ ID NO: 136924 - RNA, 19 nt, Homo sapiens
  misc_RNA (1)...(19): siRNA sense strand
uggaagugauaaagacaaa

SEQ ID NO: 136925 - RNA, 19 nt, Homo sapiens
  misc_RNA (1)...(19): siRNA sense strand
aaaggugaauuugcaauag

SEQ ID NO: 136926 - RNA, 19 nt, Homo sapiens
  misc_RNA (1)...(19): siRNA sense strand
gaaaucucugcuccugaua

SEQ ID NO: 136927 - RNA, 19 nt, Homo sapiens
  misc_RNA (1)...(19): siRNA sense strand
ugcaauagauggcuacagu

SEQ ID NO: 136928 - RNA, 19 nt, Homo sapiens
  misc_RNA (1)...(19): siRNA sense strand
ggaaauuaggaaccuguug

SEQ ID NO: 136929 - RNA, 19 nt, Homo sapiens
  misc_RNA (1)...(19): siRNA sense strand
aagaauaugaugacccuuu

SEQ ID NO: 136930 - RNA, 19 nt, Homo sapiens
  misc_RNA (1)...(19): siRNA sense strand
ugaugagagaggagaauua

SEQ ID NO: 136931 - RNA, 19 nt, Homo sapiens
  misc_RNA (1)...(19): siRNA sense strand
ggauuugaauggcagaaac

SEQ ID NO: 136932 - RNA, 19 nt, Homo sapiens
  misc_RNA (1)...(19): siRNA sense strand
ucagaacgauaugauaaag

SEQ ID NO: 136933 - RNA, 19 nt, Homo sapiens
  misc_RNA (1)...(19): siRNA sense strand
gagcccaguuuccuccaau

SEQ ID NO: 136934 - RNA, 19 nt, Homo sapiens
  misc_RNA (1)...(19): siRNA sense strand
ggaagaugagucaggauag

SEQ ID NO: 136935 - RNA, 19 nt, Homo sapiens
  misc_RNA (1)...(19): siRNA sense strand
gagagaggagaauuauaug

SEQ ID NO: 136936 - RNA, 19 nt, Homo sapiens
  misc_RNA (1)...(19): siRNA sense strand
uacagugucagaaugaaua

SEQ ID NO: 136937 - RNA, 19 nt, Homo sapiens
  misc_RNA (1)...(19): siRNA sense strand
gguggugugcucucaguaa

SEQ ID NO: 136938 - RNA, 19 nt, Homo sapiens
  misc_RNA (1)...(19): siRNA sense strand
uagcaaggaauacaauaga

SEQ ID NO: 136939 - RNA, 19 nt, Homo sapiens
  misc_RNA (1)...(19): siRNA sense strand
caauagauggcuacagugu

SEQ ID NO: 136940 - RNA, 19 nt, Homo sapiens
  misc_RNA (1)...(19): siRNA sense strand
ugaggauuaugaugagaga

SEQ ID NO: 136941 - RNA, 19 nt, Homo sapiens
  misc_RNA (1)...(19): siRNA sense strand
gaggacagugcuccaguga

SEQ ID NO: 136942 - RNA, 19 nt, Homo sapiens
  misc_RNA (1)...(19): siRNA sense strand
agaacgauaugauaaagac

SEQ ID NO: 136943 - RNA, 19 nt, Homo sapiens
  misc_RNA (1)...(19): siRNA sense strand
gaaugaauaacacucuaag

SEQ ID NO: 136944 - RNA, 19 nt, Homo sapiens
  misc_RNA (1)...(19): siRNA sense strand
aaggugaauuugcaauaga

SEQ ID NO: 136945 - RNA, 19 nt, Homo sapiens
  misc_RNA (1)...(19): siRNA sense strand
cuaacaagcagucaaccaa

SEQ ID NO: 136946 - RNA, 19 nt, Homo sapiens
  misc_RNA (1)...(19): siRNA sense strand
ccauuggcuuggugccuaa

SEQ ID NO: 136947 - RNA, 19 nt, Homo sapiens
  misc_RNA (1)...(19): siRNA sense strand
gucaaccaauagaugauga

SEQ ID NO: 136948 - RNA, 19 nt, Homo sapiens
  misc_RNA (1)...(19): siRNA sense strand
uaacaagcagucaaccaau

SEQ ID NO: 136949 - RNA, 19 nt, Homo sapiens
  misc_RNA (1)...(19): siRNA sense strand
cagcacaagaccuuccuuu

SEQ ID NO: 136950 - RNA, 19 nt, Homo sapiens
  misc_RNA (1)...(19): siRNA sense strand
ggaaccuguuggcagaugu

SEQ ID NO: 136951 - RNA, 19 nt, Homo sapiens
  misc_RNA (1)...(19): siRNA sense strand
cuucaggaauuucaagaca

SEQ ID NO: 136952 - RNA, 19 nt, Homo sapiens
  misc_RNA (1)...(19): siRNA sense strand
cagugaaaguggaagaaca

SEQ ID NO: 136953 - RNA, 19 nt, Homo sapiens
  misc_RNA (1)...(19): siRNA sense strand
gaaacauuuguagcagaua

SEQ ID NO: 136954 - RNA, 19 nt, Homo sapiens
  misc_RNA (1)...(19): siRNA sense strand
acaacagaaaggugaauuu

SEQ ID NO: 136955 - RNA, 19 nt, Homo sapiens
  misc_RNA (1)...(19): siRNA sense strand
ccaguuuccuccaauugca

SEQ ID NO: 136956 - RNA, 19 nt, Homo sapiens
  misc_RNA (1)...(19): siRNA sense strand
gugccuaaagccuacauaa

SEQ ID NO: 136957 - RNA, 19 nt, Homo sapiens
  misc_RNA (1)...(19): siRNA sense strand
gaaccuguuggcagauguu

SEQ ID NO: 136958 - RNA, 19 nt, Homo sapiens
  misc_RNA (1)...(19): siRNA sense strand
ggaagaacaaaggaagaug

SEQ ID NO: 136959 - RNA, 19 nt, Homo sapiens
  misc_RNA (1)...(19): siRNA sense strand
gcuacagugucagaaugaa

SEQ ID NO: 136960 - RNA, 19 nt, Homo sapiens
  misc_RNA (1)...(19): siRNA sense strand
ggauuguacuggagcuuuu

SEQ ID NO: 136961 - RNA, 19 nt, Homo sapiens
  misc_RNA (1)...(19): siRNA sense strand
uaaagaaggucugaaguuu

SEQ ID NO: 136962 - RNA, 19 nt, Homo sapiens
  misc_RNA (1)...(19): siRNA sense strand
ucaauauacucacuccuua

SEQ ID NO: 136963 - RNA, 19 nt, Homo sapiens
  misc_RNA (1)...(19): siRNA sense strand
aaacaagaccucagacaua

SEQ ID NO: 136964 - RNA, 19 nt, Homo sapiens
  misc_RNA (1)...(19): siRNA sense strand
uuacacagcuugauccaaa

SEQ ID NO: 136965 - RNA, 19 nt, Homo sapiens
  misc_RNA (1)...(19): siRNA sense strand
agacauacguggaucauau

SEQ ID NO: 136966 - RNA, 19 nt, Homo sapiens
  misc_RNA (1)...(19): siRNA sense strand
ggauggaucuuacucacuu

SEQ ID NO: 136967 - RNA, 19 nt, Homo sapiens
  misc_RNA (1)...(19): siRNA sense strand
caacuaaguagccuaagua

SEQ ID NO: 136968 - RNA, 19 nt, Homo sapiens
  misc_RNA (1)...(19): siRNA sense strand
ugagugagcuucugacuag

SEQ ID NO: 136969 - RNA, 19 nt, Homo sapiens
  misc_RNA (1)...(19): siRNA sense strand
agaaugaacuggaaugugu

SEQ ID NO: 136970 - RNA, 19 nt, Homo sapiens
  misc_RNA (1)...(19): siRNA sense strand
cuaaguagccuaaguaaau

SEQ ID NO: 136971 - RNA, 19 nt, Homo sapiens
  misc_RNA (1)...(19): siRNA sense strand
gacuuugccuauuccauua

SEQ ID NO: 136972 - RNA, 19 nt, Homo sapiens
  misc_RNA (1)...(19): siRNA sense strand
guaaagaaggucugaaguu

SEQ ID NO: 136973 - RNA, 19 nt, Homo sapiens
  misc_RNA (1)...(19): siRNA sense strand
cuugucaacuuccucauua

SEQ ID NO: 136974 - RNA, 19 nt, Homo sapiens
  misc_RNA (1)...(19): siRNA sense strand
guggaccguuuaucuguua

SEQ ID NO: 136975 - RNA, 19 nt, Homo sapiens
  misc_RNA (1)...(19): siRNA sense strand
gcuacagguuugauagaaa

SEQ ID NO: 136976 - RNA, 19 nt, Homo sapiens
  misc_RNA (1)...(19): siRNA sense strand
gaaacaagaccucagacau

SEQ ID NO: 136977 - RNA, 19 nt, Homo sapiens
  misc_RNA (1)...(19): siRNA sense strand
ggaaaggguauuagucaga

SEQ ID NO: 136978 - RNA, 19 nt, Homo sapiens
  misc_RNA (1)...(19): siRNA sense strand
gaggaaaggguauuaguca

SEQ ID NO: 136979 - RNA, 19 nt, Homo sapiens
  misc_RNA (1)...(19): siRNA sense strand
aagaaggucugaaguuuua

SEQ ID NO: 136980 - RNA, 19 nt, Homo sapiens
  misc_RNA (1)...(19): siRNA sense strand
gaacuggaauguguaacca

SEQ ID NO: 136981 - RNA, 19 nt, Homo sapiens
  misc_RNA (1)...(19): siRNA sense strand
ucaaugaagcacauaguuu

SEQ ID NO: 136982 - RNA, 19 nt, Homo sapiens
  misc_RNA (1)...(19): siRNA sense strand
uagagaugaugguaaagaa

SEQ ID NO: 136983 - RNA, 19 nt, Homo sapiens
  misc_RNA (1)...(19): siRNA sense strand
gaacagccuccaccucuca

SEQ ID NO: 136984 - RNA, 19 nt, Homo sapiens
  misc_RNA (1)...(19): siRNA sense strand
gaaguucuacaauucaaga

SEQ ID NO: 136985 - RNA, 19 nt, Homo sapiens
  misc_RNA (1)...(19): siRNA sense strand
uaacaaugaggaaagcuuu

SEQ ID NO: 136986 - RNA, 19 nt, Homo sapiens
  misc_RNA (1)...(19): siRNA sense strand
gaugcuaaucucuuacaua

SEQ ID NO: 136987 - RNA, 19 nt, Homo sapiens
  misc_RNA (1)...(19): siRNA sense strand
gcuguugaauauagugauu

SEQ ID NO: 136988 - RNA, 19 nt, Homo sapiens
  misc_RNA (1)...(19): siRNA sense strand
gacguacgauguuugugaa

SEQ ID NO: 136989 - RNA, 19 nt, Homo sapiens
  misc_RNA (1)...(19): siRNA sense strand
ucuccuccaucacaaguua

SEQ ID NO: 136990 - RNA, 19 nt, Homo sapiens
  misc_RNA (1)...(19): siRNA sense strand
gaggauaagaggaaggaaa

SEQ ID NO: 136991 - RNA, 19 nt, Homo sapiens
  misc_RNA (1)...(19): siRNA sense strand
uggaauguguaaccaauau

SEQ ID NO: 136992 - RNA, 19 nt, Homo sapiens
  misc_RNA (1)...(19): siRNA sense strand
caucaacccuaccuguaau

SEQ ID NO: 136993 - RNA, 19 nt, Homo sapiens
  misc_RNA (1)...(19): siRNA sense strand
gagcuucaaugacuucaac

SEQ ID NO: 136994 - RNA, 19 nt, Homo sapiens
  misc_RNA (1)...(19): siRNA sense strand
aauugcaccuccucuagua

SEQ ID NO: 136995 - RNA, 19 nt, Homo sapiens
  misc_RNA (1)...(19): siRNA sense strand
caggagacguacgauguuu

SEQ ID NO: 136996 - RNA, 19 nt, Homo sapiens
  misc_RNA (1)...(19): siRNA sense strand
ccaaagcgccauccaucaa

SEQ ID NO: 136997 - RNA, 19 nt, Homo sapiens
  misc_RNA (1)...(19): siRNA sense strand
gaaugaacuggaaugugua

SEQ ID NO: 136998 - RNA, 19 nt, Homo sapiens
  misc_RNA (1)...(19): siRNA sense strand
gacuagagcugaggaaagg

SEQ ID NO: 136999 - RNA, 19 nt, Homo sapiens
  misc_RNA (1)...(19): siRNA sense strand
acaggaagcuaagcaugaa

SEQ ID NO: 137000 - RNA, 19 nt, Homo sapiens
  misc_RNA (1)...(19): siRNA sense strand
ccaucaacccuaccuguaa

SEQ ID NO: 137001 - RNA, 19 nt, Homo sapiens
  misc_RNA (1)...(19): siRNA sense strand
uuugcaagcuccagcagua

SEQ ID NO: 137002 - RNA, 19 nt, Homo sapiens
  misc_RNA (1)...(19): siRNA sense strand
cauccugucucgccguauu

SEQ ID NO: 137003 - RNA, 19 nt, Homo sapiens
  misc_RNA (1)...(19): siRNA sense strand
gauauaacaaugaggaaag

SEQ ID NO: 137004 - RNA, 19 nt, Homo sapiens
  misc_RNA (1)...(19): siRNA sense strand
auuaagagcuucaaugacu

SEQ ID NO: 137005 - RNA, 19 nt, Homo sapiens
  misc_RNA (1)...(19): siRNA sense strand
gccuccaccucucaauaua

SEQ ID NO: 137006 - RNA, 19 nt, Homo sapiens
  misc_RNA (1)...(19): siRNA sense strand
gauggaucuuacucacuuu

SEQ ID NO: 137007 - RNA, 19 nt, Homo sapiens
  misc_RNA (1)...(19): siRNA sense strand
ccguuuaucuguuaguguu

SEQ ID NO: 137008 - RNA, 19 nt, Homo sapiens
  misc_RNA (1)...(19): siRNA sense strand
guauuucuuugaucuaugg

SEQ ID NO: 137009 - RNA, 19 nt, Homo sapiens
  misc_RNA (1)...(19): siRNA sense strand
gaagcaauacgaaaaggua

SEQ ID NO: 137010 - RNA, 19 nt, Homo sapiens
  misc_RNA (1)...(19): siRNA sense strand
agacuuugccuauuccauu

SEQ ID NO: 137011 - RNA, 19 nt, Homo sapiens
  misc_RNA (1)...(19): siRNA sense strand
ccaucugccuugucaacuu

SEQ ID NO: 137012 - RNA, 19 nt, Homo sapiens
  misc_RNA (1)...(19): siRNA sense strand
agaggaagcagaagcagaa

SEQ ID NO: 137013 - RNA, 19 nt, Homo sapiens
  misc_RNA (1)...(19): siRNA sense strand
auacagaggauaagaggaa

SEQ ID NO: 137014 - RNA, 19 nt, Homo sapiens
  misc_RNA (1)...(19): siRNA sense strand
ggagacguacgauguuugu

SEQ ID NO: 137015 - RNA, 19 nt, Homo sapiens
  misc_RNA (1)...(19): siRNA sense strand
agacaacuaaguagccuaa

SEQ ID NO: 137016 - RNA, 19 nt, Homo sapiens
  misc_RNA (1)...(19): siRNA sense strand
guauucagcuacgcaaagu

SEQ ID NO: 137017 - RNA, 19 nt, Homo sapiens
  misc_RNA (1)...(19): siRNA sense strand
caucugccuugucaacuuc

SEQ ID NO: 137018 - RNA, 19 nt, Homo sapiens
  misc_RNA (1)...(19): siRNA sense strand
ucauauggauggaucuuac

SEQ ID NO: 137019 - RNA, 19 nt, Homo sapiens
  misc_RNA (1)...(19): siRNA sense strand
auacguggaucauauggau

SEQ ID NO: 137020 - RNA, 19 nt, Homo sapiens
  misc_RNA (1)...(19): siRNA sense strand
agacguacgauguuuguga

SEQ ID NO: 137021 - RNA, 19 nt, Homo sapiens
  misc_RNA (1)...(19): siRNA sense strand
aaaccgauacccaccugua

SEQ ID NO: 137022 - RNA, 19 nt, Homo sapiens
  misc_RNA (1)...(19): siRNA sense strand
cuuucugccuugccauuua

SEQ ID NO: 137023 - RNA, 19 nt, Homo sapiens
  misc_RNA (1)...(19): siRNA sense strand
ggcugaagaugaugcuaau

SEQ ID NO: 137024 - RNA, 19 nt, Homo sapiens
  misc_RNA (1)...(19): siRNA sense strand
caagauacagaggauaaga

SEQ ID NO: 137025 - RNA, 19 nt, Homo sapiens
  misc_RNA (1)...(19): siRNA sense strand
uuuccgaaguucuacaauu

SEQ ID NO: 137026 - RNA, 19 nt, Homo sapiens
  misc_RNA (1)...(19): siRNA sense strand
aagcaugaacgcauugaaa

SEQ ID NO: 137027 - RNA, 19 nt, Homo sapiens
  misc_RNA (1)...(19): siRNA sense strand
acaacuaaguagccuaagu

SEQ ID NO: 137028 - RNA, 19 nt, Homo sapiens
  misc_RNA (1)...(19): siRNA sense strand
ggaauguguaaccaauauu

SEQ ID NO: 137029 - RNA, 19 nt, Homo sapiens
  misc_RNA (1)...(19): siRNA sense strand
ccgaaguucuacaauucaa

SEQ ID NO: 137030 - RNA, 19 nt, Homo sapiens
  misc_RNA (1)...(19): siRNA sense strand
ucaacuuccucauuaagag

SEQ ID NO: 137031 - RNA, 19 nt, Homo sapiens
  misc_RNA (1)...(19): siRNA sense strand
agagcuggcugaagaugau

SEQ ID NO: 137032 - RNA, 19 nt, Homo sapiens
  misc_RNA (1)...(19): siRNA sense strand
caaugaagcacauaguuuu

SEQ ID NO: 137033 - RNA, 19 nt, Homo sapiens
  misc_RNA (1)...(19): siRNA sense strand
uuccgaaguucuacaauuc

SEQ ID NO: 137034 - RNA, 19 nt, Homo sapiens
  misc_RNA (1)...(19): siRNA sense strand
ucaguucugcuacagguuu

SEQ ID NO: 137035 - RNA, 19 nt, Homo sapiens
  misc_RNA (1)...(19): siRNA sense strand
aaaggaagaagaauugucu

SEQ ID NO: 137036 - RNA, 19 nt, Homo sapiens
  misc_RNA (1)...(19): siRNA sense strand
cuacauccaacuccaucua

SEQ ID NO: 137037 - RNA, 19 nt, Homo sapiens
  misc_RNA (1)...(19): siRNA sense strand
acagcccucuccaccagua

SEQ ID NO: 137038 - RNA, 19 nt, Homo sapiens
  misc_RNA (1)...(19): siRNA sense strand
ccaauugcaccuccucuag

SEQ ID NO: 137039 - RNA, 19 nt, Homo sapiens
  misc_RNA (1)...(19): siRNA sense strand
uuaagagcuucaaugacuu

SEQ ID NO: 137040 - RNA, 19 nt, Homo sapiens
  misc_RNA (1)...(19): siRNA sense strand
ggaucuuacucacuuucug

SEQ ID NO: 137041 - RNA, 19 nt, Homo sapiens
  misc_RNA (1)...(19): siRNA sense strand
aacaagaccucagacauac

SEQ ID NO: 137042 - RNA, 19 nt, Homo sapiens
  misc_RNA (1)...(19): siRNA sense strand
caauauacucacuccuuau

SEQ ID NO: 137043 - RNA, 19 nt, Homo sapiens
  misc_RNA (1)...(19): siRNA sense strand
cagccuccaccucucaaua

SEQ ID NO: 137044 - RNA, 19 nt, Homo sapiens
  misc_RNA (1)...(19): siRNA sense strand
cuaaguaaauaugcugaag

SEQ ID NO: 137045 - RNA, 19 nt, Homo sapiens
  misc_RNA (1)...(19): siRNA sense strand
cgaccaucaucaccuguca

SEQ ID NO: 137046 - RNA, 19 nt, Homo sapiens
  misc_RNA (1)...(19): siRNA sense strand
ccacacagcacugccuaga

SEQ ID NO: 137047 - RNA, 19 nt, Homo sapiens
  misc_RNA (1)...(19): siRNA sense strand
cuacagguuugauagaaaa

SEQ ID NO: 137048 - RNA, 19 nt, Homo sapiens
  misc_RNA (1)...(19): siRNA sense strand
auauugaaguugcuaaugg

SEQ ID NO: 137049 - RNA, 19 nt, Homo sapiens
  misc_RNA (1)...(19): siRNA sense strand
ugcaagauacagaggauaa

SEQ ID NO: 137050 - RNA, 19 nt, Homo sapiens
  misc_RNA (1)...(19): siRNA sense strand
uccaaaggaagaagaauug

SEQ ID NO: 137051 - RNA, 19 nt, Homo sapiens
  misc_RNA (1)...(19): siRNA sense strand
uugaugaaguagauugguu

SEQ ID NO: 137052 - RNA, 19 nt, Homo sapiens
  misc_RNA (1)...(19): siRNA sense strand
caaaggaagaagaauuguc

SEQ ID NO: 137053 - RNA, 19 nt, Homo sapiens
  misc_RNA (1)...(19): siRNA sense strand
uucggaagaugauucagaa

SEQ ID NO: 137054 - RNA, 19 nt, Homo sapiens
  misc_RNA (1)...(19): siRNA sense strand
gaccguuuaucuguuagug

SEQ ID NO: 137055 - RNA, 19 nt, Homo sapiens
  misc_RNA (1)...(19): siRNA sense strand
guauuagucagaccacaug

SEQ ID NO: 137056 - RNA, 19 nt, Homo sapiens
  misc_RNA (1)...(19): siRNA sense strand
gcauauugaaguugcuaau

SEQ ID NO: 137057 - RNA, 19 nt, Homo sapiens
  misc_RNA (1)...(19): siRNA sense strand
gaaggucugaaguuuuaua

SEQ ID NO: 137058 - RNA, 19 nt, Homo sapiens
  misc_RNA (1)...(19): siRNA sense strand
cagcuccucuucagauugc

SEQ ID NO: 137059 - RNA, 19 nt, Homo sapiens
  misc_RNA (1)...(19): siRNA sense strand
uagaagagcagcgugaaca

SEQ ID NO: 137060 - RNA, 19 nt, Homo sapiens
  misc_RNA (1)...(19): siRNA sense strand
aacccuaccuguaaucagu

SEQ ID NO: 137061 - RNA, 19 nt, Homo sapiens
  misc_RNA (1)...(19): siRNA sense strand
gaaccaagcacuggacuau

SEQ ID NO: 137062 - RNA, 19 nt, Homo sapiens
  misc_RNA (1)...(19): siRNA sense strand
gaagaaaggcagcaagaag

SEQ ID NO: 137063 - RNA, 19 nt, Homo sapiens
  misc_RNA (1)...(19): siRNA sense strand
caagaccaggccuucauua

SEQ ID NO: 137064 - RNA, 19 nt, Homo sapiens
  misc_RNA (1)...(19): siRNA sense strand
accaagcacuggacuauga

SEQ ID NO: 137065 - RNA, 19 nt, Homo sapiens
  misc_RNA (1)...(19): siRNA sense strand
gcaagaccaggccuucauu

SEQ ID NO: 137066 - RNA, 19 nt, Homo sapiens
  misc_RNA (1)...(19): siRNA sense strand
caaaccugguguucgugua

SEQ ID NO: 137067 - RNA, 19 nt, Homo sapiens
  misc_RNA (1)...(19): siRNA sense strand
ucucggcgcucaccuggaa

SEQ ID NO: 137068 - RNA, 19 nt, Homo sapiens
  misc_RNA (1)...(19): siRNA sense strand
gagaucuccuacccacuca

SEQ ID NO: 137069 - RNA, 19 nt, Homo sapiens
  misc_RNA (1)...(19): siRNA sense strand
uucaagaccucaagaacga

SEQ ID NO: 137070 - RNA, 19 nt, Homo sapiens
  misc_RNA (1)...(19): siRNA sense strand
ggaaccaagcacuggacua

SEQ ID NO: 137071 - RNA, 19 nt, Homo sapiens
  misc_RNA (1)...(19): siRNA sense strand
cugcaaaccugguguucgu

SEQ ID NO: 137072 - RNA, 19 nt, Homo sapiens
  misc_RNA (1)...(19): siRNA sense strand
aagaagaaaggcagcaaga

SEQ ID NO: 137073 - RNA, 19 nt, Homo sapiens
  misc_RNA (1)...(19): siRNA sense strand
gcugcuaucgccucaagga

SEQ ID NO: 137074 - RNA, 19 nt, Homo sapiens
  misc_RNA (1)...(19): siRNA sense strand
cuacaugggcaacgagauc

SEQ ID NO: 137075 - RNA, 19 nt, Homo sapiens
  misc_RNA (1)...(19): siRNA sense strand
agaagaaaggcagcaagaa

SEQ ID NO: 137076 - RNA, 19 nt, Homo sapiens
  misc_RNA (1)...(19): siRNA sense strand
ggcaagaccaggccuucau

SEQ ID NO: 137077 - RNA, 19 nt, Homo sapiens
  misc_RNA (1)...(19): siRNA sense strand
ccaagcacuggacuaugaa

SEQ ID NO: 137078 - RNA, 19 nt, Homo sapiens
  misc_RNA (1)...(19): siRNA sense strand
gaagaaaccuuaagaauag

SEQ ID NO: 137079 - RNA, 19 nt, Homo sapiens
  misc_RNA (1)...(19): siRNA sense strand
ggacagcacuuuaauauuc

SEQ ID NO: 137080 - RNA, 19 nt, Homo sapiens
  misc_RNA (1)...(19): siRNA sense strand
ggaagaaaccuuaagaaua

SEQ ID NO: 137081 - RNA, 19 nt, Homo sapiens
  misc_RNA (1)...(19): siRNA sense strand
gaacucagcaccagauuua

SEQ ID NO: 137082 - RNA, 19 nt, Homo sapiens
  misc_RNA (1)...(19): siRNA sense strand
gaaaguaugcggaugauaa

SEQ ID NO: 137083 - RNA, 19 nt, Homo sapiens
  misc_RNA (1)...(19): siRNA sense strand
gauuaaaccugcauuagug

SEQ ID NO: 137084 - RNA, 19 nt, Homo sapiens
  misc_RNA (1)...(19): siRNA sense strand
gaaaccaguugugaacaua

SEQ ID NO: 137085 - RNA, 19 nt, Homo sapiens
  misc_RNA (1)...(19): siRNA sense strand
gaaauagcccuaaugaaug

SEQ ID NO: 137086 - RNA, 19 nt, Homo sapiens
  misc_RNA (1)...(19): siRNA sense strand
ggauauccuugaaguaauu

SEQ ID NO: 137087 - RNA, 19 nt, Homo sapiens
  misc_RNA (1)...(19): siRNA sense strand
gaagaaaguaugcggauga

SEQ ID NO: 137088 - RNA, 19 nt, Homo sapiens
  misc_RNA (1)...(19): siRNA sense strand
gaaauucucuuggccuuca

SEQ ID NO: 137089 - RNA, 19 nt, Homo sapiens
  misc_RNA (1)...(19): siRNA sense strand
gaaggaaggagacucaauu

SEQ ID NO: 137090 - RNA, 19 nt, Homo sapiens
  misc_RNA (1)...(19): siRNA sense strand
gcgaaggguuguuauguug

SEQ ID NO: 137091 - RNA, 19 nt, Homo sapiens
  misc_RNA (1)...(19): siRNA sense strand
agaaauagcccuaaugaau

SEQ ID NO: 137092 - RNA, 19 nt, Homo sapiens
  misc_RNA (1)...(19): siRNA sense strand
ggacuuaacauugaagaaa

SEQ ID NO: 137093 - RNA, 19 nt, Homo sapiens
  misc_RNA (1)...(19): siRNA sense strand
gaaagaaauagcccuaaug

SEQ ID NO: 137094 - RNA, 19 nt, Homo sapiens
  misc_RNA (1)...(19): siRNA sense strand
gggaagcguccuuggauua

SEQ ID NO: 137095 - RNA, 19 nt, Homo sapiens
  misc_RNA (1)...(19): siRNA sense strand
aaagaggagugguuuguga

SEQ ID NO: 137096 - RNA, 19 nt, Homo sapiens
  misc_RNA (1)...(19): siRNA sense strand
aagaagaacuagauaagug

SEQ ID NO: 137097 - RNA, 19 nt, Homo sapiens
  misc_RNA (1)...(19): siRNA sense strand
ccaaagccuucccuucuga

SEQ ID NO: 137098 - RNA, 19 nt, Homo sapiens
  misc_RNA (1)...(19): siRNA sense strand
ccaaucugcucacuucuau

SEQ ID NO: 137099 - RNA, 19 nt, Homo sapiens
  misc_RNA (1)...(19): siRNA sense strand
uaagauggauaacaaacug

SEQ ID NO: 137100 - RNA, 19 nt, Homo sapiens
  misc_RNA (1)...(19): siRNA sense strand
aaagaaauagcccuaauga

SEQ ID NO: 137101 - RNA, 19 nt, Homo sapiens
  misc_RNA (1)...(19): siRNA sense strand
ggaaggagacucaauugca

SEQ ID NO: 137102 - RNA, 19 nt, Homo sapiens
  misc_RNA (1)...(19): siRNA sense strand
gaacucuacuuacaugacu

SEQ ID NO: 137103 - RNA, 19 nt, Homo sapiens
  misc_RNA (1)...(19): siRNA sense strand
uggaauaccugaucaagca

SEQ ID NO: 137104 - RNA, 19 nt, Homo sapiens
  misc_RNA (1)...(19): siRNA sense strand
gggaagaaaccuuaagaau

SEQ ID NO: 137105 - RNA, 19 nt, Homo sapiens
  misc_RNA (1)...(19): siRNA sense strand
gcuggugccuucauucaug

SEQ ID NO: 137106 - RNA, 19 nt, Homo sapiens
  misc_RNA (1)...(19): siRNA sense strand
guuuagagaucuuuaagca

SEQ ID NO: 137107 - RNA, 19 nt, Homo sapiens
  misc_RNA (1)...(19): siRNA sense strand
uuaccaaucugcucacuuc

SEQ ID NO: 137108 - RNA, 19 nt, Homo sapiens
  misc_RNA (1)...(19): siRNA sense strand
uaaagcagcaaccaagaaa

SEQ ID NO: 137109 - RNA, 19 nt, Homo sapiens
  misc_RNA (1)...(19): siRNA sense strand
gaagaagaacuagauaagu

SEQ ID NO: 137110 - RNA, 19 nt, Homo sapiens
  misc_RNA (1)...(19): siRNA sense strand
aagcaugcccauacgauua

SEQ ID NO: 137111 - RNA, 19 nt, Homo sapiens
  misc_RNA (1)...(19): siRNA sense strand
agaaagaaauagcccuaau

SEQ ID NO: 137112 - RNA, 19 nt, Homo sapiens
  misc_RNA (1)...(19): siRNA sense strand
ccaguugugaacauaauua

SEQ ID NO: 137113 - RNA, 19 nt, Homo sapiens
  misc_RNA (1)...(19): siRNA sense strand
gcaccagauuuaagaugga

SEQ ID NO: 137114 - RNA, 19 nt, Homo sapiens
  misc_RNA (1)...(19): siRNA sense strand
guugaacucuacuuacaug

SEQ ID NO: 137115 - RNA, 19 nt, Homo sapiens
  misc_RNA (1)...(19): siRNA sense strand
caacuucacggacuuaaca

SEQ ID NO: 137116 - RNA, 19 nt, Homo sapiens
  misc_RNA (1)...(19): siRNA sense strand
ugaaugcuuugacuguaaa

SEQ ID NO: 137117 - RNA, 19 nt, Homo sapiens
  misc_RNA (1)...(19): siRNA sense strand
gaauaccugaucaagcaua

SEQ ID NO: 137118 - RNA, 19 nt, Homo sapiens
  misc_RNA (1)...(19): siRNA sense strand
ccaccuagaugaggaagau

SEQ ID NO: 137119 - RNA, 19 nt, Homo sapiens
  misc_RNA (1)...(19): siRNA sense strand
gcuauugagucacaacuac

SEQ ID NO: 137120 - RNA, 19 nt, Homo sapiens
  misc_RNA (1)...(19): siRNA sense strand
gauaaagcagcaaccaaga

SEQ ID NO: 137121 - RNA, 19 nt, Homo sapiens
  misc_RNA (1)...(19): siRNA sense strand
ugaaguaauugagaaggaa

SEQ ID NO: 137122 - RNA, 19 nt, Homo sapiens
  misc_RNA (1)...(19): siRNA sense strand
ucacggacuuaacauugaa

SEQ ID NO: 137123 - RNA, 19 nt, Homo sapiens
  misc_RNA (1)...(19): siRNA sense strand
cauugcggcugaacucaaa

SEQ ID NO: 137124 - RNA, 19 nt, Homo sapiens
  misc_RNA (1)...(19): siRNA sense strand
ccaagaaaccaguugugaa

SEQ ID NO: 137125 - RNA, 19 nt, Homo sapiens
  misc_RNA (1)...(19): siRNA sense strand
aagauaagcugaggcacuu

SEQ ID NO: 137126 - RNA, 19 nt, Homo sapiens
  misc_RNA (1)...(19): siRNA sense strand
uaauauuccugccaucaca

SEQ ID NO: 137127 - RNA, 19 nt, Homo sapiens
  misc_RNA (1)...(19): siRNA sense strand
gcacaugcaguuggaaaug

SEQ ID NO: 137128 - RNA, 19 nt, Homo sapiens
  misc_RNA (1)...(19): siRNA sense strand
ggagaugagaguauuguag

SEQ ID NO: 137129 - RNA, 19 nt, Homo sapiens
  misc_RNA (1)...(19): siRNA sense strand
ccagcuaacaauaacauuu

SEQ ID NO: 137130 - RNA, 19 nt, Homo sapiens
  misc_RNA (1)...(19): siRNA sense strand
caagaaaccaguugugaac

SEQ ID NO: 137131 - RNA, 19 nt, Homo sapiens
  misc_RNA (1)...(19): siRNA sense strand
uaacuggcuaucuggaaua

SEQ ID NO: 137132 - RNA, 19 nt, Homo sapiens
  misc_RNA (1)...(19): siRNA sense strand
guuguuauguuggcuuuga

SEQ ID NO: 137133 - RNA, 19 nt, Homo sapiens
  misc_RNA (1)...(19): siRNA sense strand
gagaguauuguaggccuua

SEQ ID NO: 137134 - RNA, 19 nt, Homo sapiens
  misc_RNA (1)...(19): siRNA sense strand
auacuugacucugcagaaa

SEQ ID NO: 137135 - RNA, 19 nt, Homo sapiens
  misc_RNA (1)...(19): siRNA sense strand
acacuggacagcacuuuaa

SEQ ID NO: 137136 - RNA, 19 nt, Homo sapiens
  misc_RNA (1)...(19): siRNA sense strand
caauugcagugauccuguu

SEQ ID NO: 137137 - RNA, 19 nt, Homo sapiens
  misc_RNA (1)...(19): siRNA sense strand
gacuuaacauugaagaaag

SEQ ID NO: 137138 - RNA, 19 nt, Homo sapiens
  misc_RNA (1)...(19): siRNA sense strand
gccaaagccuucccuucug

SEQ ID NO: 137139 - RNA, 19 nt, Homo sapiens
  misc_RNA (1)...(19): siRNA sense strand
uguaggagccaaugagaaa

SEQ ID NO: 137140 - RNA, 19 nt, Homo sapiens
  misc_RNA (1)...(19): siRNA sense strand
gagaaagaaauagcccuaa

SEQ ID NO: 137141 - RNA, 19 nt, Homo sapiens
  misc_RNA (1)...(19): siRNA sense strand
caguuccucucuauaauuc

SEQ ID NO: 137142 - RNA, 19 nt, Homo sapiens
  misc_RNA (1)...(19): siRNA sense strand
acaaagauguuuuccaaga

SEQ ID NO: 137143 - RNA, 19 nt, Homo sapiens
  misc_RNA (1)...(19): siRNA sense strand
aaugaaugcuuugacugua

SEQ ID NO: 137144 - RNA, 19 nt, Homo sapiens
  misc_RNA (1)...(19): siRNA sense strand
ggaucugccuccaguugau

SEQ ID NO: 137145 - RNA, 19 nt, Homo sapiens
  misc_RNA (1)...(19): siRNA sense strand
uauguuggcuuugaucuag

SEQ ID NO: 137146 - RNA, 19 nt, Homo sapiens
  misc_RNA (1)...(19): siRNA sense strand
uacaggagaugagaguauu

SEQ ID NO: 137147 - RNA, 19 nt, Homo sapiens
  misc_RNA (1)...(19): siRNA sense strand
ccagauuuaagauggauaa

SEQ ID NO: 137148 - RNA, 19 nt, Homo sapiens
  misc_RNA (1)...(19): siRNA sense strand
aaaguaugcggaugauaaa

SEQ ID NO: 137149 - RNA, 19 nt, Homo sapiens
  misc_RNA (1)...(19): siRNA sense strand
aaauagcccuaaugaaugc

SEQ ID NO: 137150 - RNA, 19 nt, Homo sapiens
  misc_RNA (1)...(19): siRNA sense strand
ccaguuccucucuauaauu

SEQ ID NO: 137151 - RNA, 19 nt, Homo sapiens
  misc_RNA (1)...(19): siRNA sense strand
caaagauguuuuccaagaa

SEQ ID NO: 137152 - RNA, 19 nt, Homo sapiens
  misc_RNA (1)...(19): siRNA sense strand
cuaacuggcuaucuggaau

SEQ ID NO: 137153 - RNA, 19 nt, Homo sapiens
  misc_RNA (1)...(19): siRNA sense strand
ugaagaagaacuagauaag

SEQ ID NO: 137154 - RNA, 19 nt, Homo sapiens
  misc_RNA (1)...(19): siRNA sense strand
ucauuaugcuauugaguca

SEQ ID NO: 137155 - RNA, 19 nt, Homo sapiens
  misc_RNA (1)...(19): siRNA sense strand
gaaauguugaacucuacuu

SEQ ID NO: 137156 - RNA, 19 nt, Homo sapiens
  misc_RNA (1)...(19): siRNA sense strand
gaagcguccuuggauuaca

SEQ ID NO: 137157 - RNA, 19 nt, Homo sapiens
  misc_RNA (1)...(19): siRNA sense strand
gagacucaauugcagugau

SEQ ID NO: 137158 - RNA, 19 nt, Homo sapiens
  misc_RNA (1)...(19): siRNA sense strand
uaaugaaugcuuugacugu

SEQ ID NO: 137159 - RNA, 19 nt, Homo sapiens
  misc_RNA (1)...(19): siRNA sense strand
gacaagcggaauccaaaug

SEQ ID NO: 137160 - RNA, 19 nt, Homo sapiens
  misc_RNA (1)...(19): siRNA sense strand
gugacaagcggaauccaaa

SEQ ID NO: 137161 - RNA, 19 nt, Homo sapiens
  misc_RNA (1)...(19): siRNA sense strand
agaaaccaguugugaacau

SEQ ID NO: 137162 - RNA, 19 nt, Homo sapiens
  misc_RNA (1)...(19): siRNA sense strand
uuggaaauguugaacucua

SEQ ID NO: 137163 - RNA, 19 nt, Homo sapiens
  misc_RNA (1)...(19): siRNA sense strand
augaaugcuuugacuguaa

SEQ ID NO: 137164 - RNA, 19 nt, Homo sapiens
  misc_RNA (1)...(19): siRNA sense strand
gagccaaugagaaagaaau

SEQ ID NO: 137165 - RNA, 19 nt, Homo sapiens
  misc_RNA (1)...(19): siRNA sense strand
cgauuaaaccugcauuagu

SEQ ID NO: 137166 - RNA, 19 nt, Homo sapiens
  misc_RNA (1)...(19): siRNA sense strand
cuggacagcacuuuaauau

SEQ ID NO: 137167 - RNA, 19 nt, Homo sapiens
  misc_RNA (1)...(19): siRNA sense strand
guuccucucuauaauucuu

SEQ ID NO: 137168 - RNA, 19 nt, Homo sapiens
  misc_RNA (1)...(19): siRNA sense strand
uaauuacuccgucucaugu

SEQ ID NO: 137169 - RNA, 19 nt, Homo sapiens
  misc_RNA (1)...(19): siRNA sense strand
uaucuggaauaccugauca

SEQ ID NO: 137170 - RNA, 19 nt, Homo sapiens
  misc_RNA (1)...(19): siRNA sense strand
gcugguguuccuacaagua

SEQ ID NO: 137171 - RNA, 19 nt, Homo sapiens
  misc_RNA (1)...(19): siRNA sense strand
ccuaaugaaugcuuugacu

SEQ ID NO: 137172 - RNA, 19 nt, Homo sapiens
  misc_RNA (1)...(19): siRNA sense strand
aauaccugaucaagcauaa

SEQ ID NO: 137173 - RNA, 19 nt, Homo sapiens
  misc_RNA (1)...(19): siRNA sense strand
uuccuugcaugcuaguuua

SEQ ID NO: 137174 - RNA, 19 nt, Homo sapiens
  misc_RNA (1)...(19): siRNA sense strand
gauaagcugaggcacuuca

SEQ ID NO: 137175 - RNA, 19 nt, Homo sapiens
  misc_RNA (1)...(19): siRNA sense strand
gguguuccuacaaguauuu

SEQ ID NO: 137176 - RNA, 19 nt, Homo sapiens
  misc_RNA (1)...(19): siRNA sense strand
ggguuguuauguuggcuuu

SEQ ID NO: 137177 - RNA, 19 nt, Homo sapiens
  misc_RNA (1)...(19): siRNA sense strand
agucacaacuacaacuuca

SEQ ID NO: 137178 - RNA, 19 nt, Homo sapiens
  misc_RNA (1)...(19): siRNA sense strand
gaaggacgcucuccacuua

SEQ ID NO: 137179 - RNA, 19 nt, Homo sapiens
  misc_RNA (1)...(19): siRNA sense strand
ucacagagcuucauuguuu

SEQ ID NO: 137180 - RNA, 19 nt, Homo sapiens
  misc_RNA (1)...(19): siRNA sense strand
ggacaauggugcacaaaua

SEQ ID NO: 137181 - RNA, 19 nt, Homo sapiens
  misc_RNA (1)...(19): siRNA sense strand
ggcaauaaauguccaauua

SEQ ID NO: 137182 - RNA, 19 nt, Homo sapiens
  misc_RNA (1)...(19): siRNA sense strand
gcauagagcuucucaauca

SEQ ID NO: 137183 - RNA, 19 nt, Homo sapiens
  misc_RNA (1)...(19): siRNA sense strand
gaauggacaugauaaagua

SEQ ID NO: 137184 - RNA, 19 nt, Homo sapiens
  misc_RNA (1)...(19): siRNA sense strand
ucaaagagcugguaaugga

SEQ ID NO: 137185 - RNA, 19 nt, Homo sapiens
  misc_RNA (1)...(19): siRNA sense strand
guagacaguugcacauuaa

SEQ ID NO: 137186 - RNA, 19 nt, Homo sapiens
  misc_RNA (1)...(19): siRNA sense strand
gcacagaucgcuuggauga

SEQ ID NO: 137187 - RNA, 19 nt, Homo sapiens
  misc_RNA (1)...(19): siRNA sense strand
ggaugaaugucuuaagauu

SEQ ID NO: 137188 - RNA, 19 nt, Homo sapiens
  misc_RNA (1)...(19): siRNA sense strand
acagcaaccuuauggauua

SEQ ID NO: 137189 - RNA, 19 nt, Homo sapiens
  misc_RNA (1)...(19): siRNA sense strand
ccagaaacaugcaucauug

SEQ ID NO: 137190 - RNA, 19 nt, Homo sapiens
  misc_RNA (1)...(19): siRNA sense strand
gcaaagaauggacaugaua

SEQ ID NO: 137191 - RNA, 19 nt, Homo sapiens
  misc_RNA (1)...(19): siRNA sense strand
gcauuuaacuguacagcaa

SEQ ID NO: 137192 - RNA, 19 nt, Homo sapiens
  misc_RNA (1)...(19): siRNA sense strand
uaagaucgauucugaagga

SEQ ID NO: 137193 - RNA, 19 nt, Homo sapiens
  misc_RNA (1)...(19): siRNA sense strand
agaagaagcugccacuuug

SEQ ID NO: 137194 - RNA, 19 nt, Homo sapiens
  misc_RNA (1)...(19): siRNA sense strand
gagaagaagcugccacuuu

SEQ ID NO: 137195 - RNA, 19 nt, Homo sapiens
  misc_RNA (1)...(19): siRNA sense strand
gcuaggagauaucaauuau

SEQ ID NO: 137196 - RNA, 19 nt, Homo sapiens
  misc_RNA (1)...(19): siRNA sense strand
ggaaggagguuguucuuac

SEQ ID NO: 137197 - RNA, 19 nt, Homo sapiens
  misc_RNA (1)...(19): siRNA sense strand
gaacacugcacuucacuuu

SEQ ID NO: 137198 - RNA, 19 nt, Homo sapiens
  misc_RNA (1)...(19): siRNA sense strand
guauuuaucuuccuucuuc

SEQ ID NO: 137199 - RNA, 19 nt, Homo sapiens
  misc_RNA (1)...(19): siRNA sense strand
gagaagaucaccagagauu

SEQ ID NO: 137200 - RNA, 19 nt, Homo sapiens
  misc_RNA (1)...(19): siRNA sense strand
uagaauaccucccugaaug

SEQ ID NO: 137201 - RNA, 19 nt, Homo sapiens
  misc_RNA (1)...(19): siRNA sense strand
ugaaauggaugauuaugga

SEQ ID NO: 137202 - RNA, 19 nt, Homo sapiens
  misc_RNA (1)...(19): siRNA sense strand
caagacagguuuaagaaag

SEQ ID NO: 137203 - RNA, 19 nt, Homo sapiens
  misc_RNA (1)...(19): siRNA sense strand
ggugggauguuauuccaua

SEQ ID NO: 137204 - RNA, 19 nt, Homo sapiens
  misc_RNA (1)...(19): siRNA sense strand
aaacaugcaucauugaaga

SEQ ID NO: 137205 - RNA, 19 nt, Homo sapiens
  misc_RNA (1)...(19): siRNA sense strand
cacaggauguuauauauga

SEQ ID NO: 137206 - RNA, 19 nt, Homo sapiens
  misc_RNA (1)...(19): siRNA sense strand
auacgaggcuucugaauga

SEQ ID NO: 137207 - RNA, 19 nt, Homo sapiens
  misc_RNA (1)...(19): siRNA sense strand
ccacugagauuguuaaacu

SEQ ID NO: 137208 - RNA, 19 nt, Homo sapiens
  misc_RNA (1)...(19): siRNA sense strand
caacucaacuggcaucauc

SEQ ID NO: 137209 - RNA, 19 nt, Homo sapiens
  misc_RNA (1)...(19): siRNA sense strand
gagccacaaugcugacaua

SEQ ID NO: 137210 - RNA, 19 nt, Homo sapiens
  misc_RNA (1)...(19): siRNA sense strand
cuacuuggcuuuaaugugu

SEQ ID NO: 137211 - RNA, 19 nt, Homo sapiens
  misc_RNA (1)...(19): siRNA sense strand
caaaggagcuaagccaugu

SEQ ID NO: 137212 - RNA, 19 nt, Homo sapiens
  misc_RNA (1)...(19): siRNA sense strand
gcaauguucuugaauggau

SEQ ID NO: 137213 - RNA, 19 nt, Homo sapiens
  misc_RNA (1)...(19): siRNA sense strand
ccacaaugcugacauaguc

SEQ ID NO: 137214 - RNA, 19 nt, Homo sapiens
  misc_RNA (1)...(19): siRNA sense strand
ggauuuagagcucauauga

SEQ ID NO: 137215 - RNA, 19 nt, Homo sapiens
  misc_RNA (1)...(19): siRNA sense strand
ugcaugaaauggaugauua

SEQ ID NO: 137216 - RNA, 19 nt, Homo sapiens
  misc_RNA (1)...(19): siRNA sense strand
gaacaaaggaauagcagau

SEQ ID NO: 137217 - RNA, 19 nt, Homo sapiens
  misc_RNA (1)...(19): siRNA sense strand
gcuagcagacuauuuaauu

SEQ ID NO: 137218 - RNA, 19 nt, Homo sapiens
  misc_RNA (1)...(19): siRNA sense strand
aaauugagcuaauggagaa

SEQ ID NO: 137219 - RNA, 19 nt, Homo sapiens
  misc_RNA (1)...(19): siRNA sense strand
gcccuuguuuguugaaaua

SEQ ID NO: 137220 - RNA, 19 nt, Homo sapiens
  misc_RNA (1)...(19): siRNA sense strand
caaagaaugcauggaaaua

SEQ ID NO: 137221 - RNA, 19 nt, Homo sapiens
  misc_RNA (1)...(19): siRNA sense strand
ugagcuagcagacuauuua

SEQ ID NO: 137222 - RNA, 19 nt, Homo sapiens
  misc_RNA (1)...(19): siRNA sense strand
cuacaagacauaagugaua

SEQ ID NO: 137223 - RNA, 19 nt, Homo sapiens
  misc_RNA (1)...(19): siRNA sense strand
ucaaucauccuguguguaa

SEQ ID NO: 137224 - RNA, 19 nt, Homo sapiens
  misc_RNA (1)...(19): siRNA sense strand
aaccauaucugagaaauga

SEQ ID NO: 137225 - RNA, 19 nt, Homo sapiens
  misc_RNA (1)...(19): siRNA sense strand
gcuaagccauguaaaucaa

SEQ ID NO: 137226 - RNA, 19 nt, Homo sapiens
  misc_RNA (1)...(19): siRNA sense strand
gaugauagccauuguucuu

SEQ ID NO: 137227 - RNA, 19 nt, Homo sapiens
  misc_RNA (1)...(19): siRNA sense strand
ggaacuucauaccagcuua

SEQ ID NO: 137228 - RNA, 19 nt, Homo sapiens
  misc_RNA (1)...(19): siRNA sense strand
caaagaauggacaugauaa

SEQ ID NO: 137229 - RNA, 19 nt, Homo sapiens
  misc_RNA (1)...(19): siRNA sense strand
cuacacaggauguuauaua

SEQ ID NO: 137230 - RNA, 19 nt, Homo sapiens
  misc_RNA (1)...(19): siRNA sense strand
gggauguuauuccauauau

SEQ ID NO: 137231 - RNA, 19 nt, Homo sapiens
  misc_RNA (1)...(19): siRNA sense strand
gaauuuaggaucuuacugu

SEQ ID NO: 137232 - RNA, 19 nt, Homo sapiens
  misc_RNA (1)...(19): siRNA sense strand
aggaauagcagauggaaua

SEQ ID NO: 137233 - RNA, 19 nt, Homo sapiens
  misc_RNA (1)...(19): siRNA sense strand
caauugcuguuuacuucua

SEQ ID NO: 137234 - RNA, 19 nt, Homo sapiens
  misc_RNA (1)...(19): siRNA sense strand
uaagcaauguucuugaaug

SEQ ID NO: 137235 - RNA, 19 nt, Homo sapiens
  misc_RNA (1)...(19): siRNA sense strand
uaacacaaccgauggaugu

SEQ ID NO: 137236 - RNA, 19 nt, Homo sapiens
  misc_RNA (1)...(19): siRNA sense strand
gaaauccaccaucguguau

SEQ ID NO: 137237 - RNA, 19 nt, Homo sapiens
  misc_RNA (1)...(19): siRNA sense strand
gugcugcccuuguuuguug

SEQ ID NO: 137238 - RNA, 19 nt, Homo sapiens
  misc_RNA (1)...(19): siRNA sense strand
ugaaaugguuggcuuaugg

SEQ ID NO: 137239 - RNA, 19 nt, Homo sapiens
  misc_RNA (1)...(19): siRNA sense strand
gagcuucauuguuugauca

SEQ ID NO: 137240 - RNA, 19 nt, Homo sapiens
  misc_RNA (1)...(19): siRNA sense strand
gauggcuccucuccacaua

SEQ ID NO: 137241 - RNA, 19 nt, Homo sapiens
  misc_RNA (1)...(19): siRNA sense strand
caucguguaucccaacaaa

SEQ ID NO: 137242 - RNA, 19 nt, Homo sapiens
  misc_RNA (1)...(19): siRNA sense strand
gguaauggaugaagacaac

SEQ ID NO: 137243 - RNA, 19 nt, Homo sapiens
  misc_RNA (1)...(19): siRNA sense strand
gaucaaagagcugguaaug

SEQ ID NO: 137244 - RNA, 19 nt, Homo sapiens
  misc_RNA (1)...(19): siRNA sense strand
ugaaggaagugcauaugga

SEQ ID NO: 137245 - RNA, 19 nt, Homo sapiens
  misc_RNA (1)...(19): siRNA sense strand
caaauaauagcgaagcauu

SEQ ID NO: 137246 - RNA, 19 nt, Homo sapiens
  misc_RNA (1)...(19): siRNA sense strand
aguagacaguugcacauua

SEQ ID NO: 137247 - RNA, 19 nt, Homo sapiens
  misc_RNA (1)...(19): siRNA sense strand
cacaccaucuugagccuua

SEQ ID NO: 137248 - RNA, 19 nt, Homo sapiens
  misc_RNA (1)...(19): siRNA sense strand
gacaagaaauaccaaaugc

SEQ ID NO: 137249 - RNA, 19 nt, Homo sapiens
  misc_RNA (1)...(19): siRNA sense strand
gauauaagcaauguucuug

SEQ ID NO: 137250 - RNA, 19 nt, Homo sapiens
  misc_RNA (1)...(19): siRNA sense strand
aggaauggcuuucaacuca

SEQ ID NO: 137251 - RNA, 19 nt, Homo sapiens
  misc_RNA (1)...(19): siRNA sense strand
ugaugaaggucuugcuuga

SEQ ID NO: 137252 - RNA, 19 nt, Homo sapiens
  misc_RNA (1)...(19): siRNA sense strand
uaaaguaguucagcuucuu

SEQ ID NO: 137253 - RNA, 19 nt, Homo sapiens
  misc_RNA (1)...(19): siRNA sense strand
gaagagcauggguacagua

SEQ ID NO: 137254 - RNA, 19 nt, Homo sapiens
  misc_RNA (1)...(19): siRNA sense strand
gaaauaccaaaugcugaua

SEQ ID NO: 137255 - RNA, 19 nt, Homo sapiens
  misc_RNA (1)...(19): siRNA sense strand
uaacuguacagcaaccuua

SEQ ID NO: 137256 - RNA, 19 nt, Homo sapiens
  misc_RNA (1)...(19): siRNA sense strand
ggaauggcuuucaacucaa

SEQ ID NO: 137257 - RNA, 19 nt, Homo sapiens
  misc_RNA (1)...(19): siRNA sense strand
uaaccuacuuggcuuuaau

SEQ ID NO: 137258 - RNA, 19 nt, Homo sapiens
  misc_RNA (1)...(19): siRNA sense strand
ggaaauaccccucugcauu

SEQ ID NO: 137259 - RNA, 19 nt, Homo sapiens
  misc_RNA (1)...(19): siRNA sense strand
gaagcugccacuuugguuu

SEQ ID NO: 137260 - RNA, 19 nt, Homo sapiens
  misc_RNA (1)...(19): siRNA sense strand
gauacgaggcuucugaaug

SEQ ID NO: 137261 - RNA, 19 nt, Homo sapiens
  misc_RNA (1)...(19): siRNA sense strand
ccacuuauauuagcaacug

SEQ ID NO: 137262 - RNA, 19 nt, Homo sapiens
  misc_RNA (1)...(19): siRNA sense strand
uggagaagaucaccagaga

SEQ ID NO: 137263 - RNA, 19 nt, Homo sapiens
  misc_RNA (1)...(19): siRNA sense strand
gagcuaagccauguaaauc

SEQ ID NO: 137264 - RNA, 19 nt, Homo sapiens
  misc_RNA (1)...(19): siRNA sense strand
ugagagcagucaaggcaaa

SEQ ID NO: 137265 - RNA, 19 nt, Homo sapiens
  misc_RNA (1)...(19): siRNA sense strand
gcaaaguggaucagaaauc

SEQ ID NO: 137266 - RNA, 19 nt, Homo sapiens
  misc_RNA (1)...(19): siRNA sense strand
gaagguacuuuuagauuuc

SEQ ID NO: 137267 - RNA, 19 nt, Homo sapiens
  misc_RNA (1)...(19): siRNA sense strand
gucagaggcuccuacaaga

SEQ ID NO: 137268 - RNA, 19 nt, Homo sapiens
  misc_RNA (1)...(19): siRNA sense strand
gcaaaauggugacuuggaa

SEQ ID NO: 137269 - RNA, 19 nt, Homo sapiens
  misc_RNA (1)...(19): siRNA sense strand
cuccgaaacuucaacauga

SEQ ID NO: 137270 - RNA, 19 nt, Homo sapiens
  misc_RNA (1)...(19): siRNA sense strand
gauagaauaccucccugaa

SEQ ID NO: 137271 - RNA, 19 nt, Homo sapiens
  misc_RNA (1)...(19): siRNA sense strand
gugcauuguuucucaguga

SEQ ID NO: 137272 - RNA, 19 nt, Homo sapiens
  misc_RNA (1)...(19): siRNA sense strand
ccagggagccacugagauu

SEQ ID NO: 137273 - RNA, 19 nt, Homo sapiens
  misc_RNA (1)...(19): siRNA sense strand
ggagcuaagccauguaaau

SEQ ID NO: 137274 - RNA, 19 nt, Homo sapiens
  misc_RNA (1)...(19): siRNA sense strand
aaaggugcauuguuucuca

SEQ ID NO: 137275 - RNA, 19 nt, Homo sapiens
  misc_RNA (1)...(19): siRNA sense strand
gcagauggaauacuguguu

SEQ ID NO: 137276 - RNA, 19 nt, Homo sapiens
  misc_RNA (1)...(19): siRNA sense strand
agaaagagcagauggaaca

SEQ ID NO: 137277 - RNA, 19 nt, Homo sapiens
  misc_RNA (1)...(19): siRNA sense strand
gaaggucauucuugauacu

SEQ ID NO: 137278 - RNA, 19 nt, Homo sapiens
  misc_RNA (1)...(19): siRNA sense strand
ggaguuaucauuaccaugu

SEQ ID NO: 137279 - RNA, 19 nt, Homo sapiens
  misc_RNA (1)...(19): siRNA sense strand
caacucaacccucucuuug

SEQ ID NO: 137280 - RNA, 19 nt, Homo sapiens
  misc_RNA (1)...(19): siRNA sense strand
ucugguaucugaaguauca

SEQ ID NO: 137281 - RNA, 19 nt, Homo sapiens
  misc_RNA (1)...(19): siRNA sense strand
uuggugaccuguucaguuu

SEQ ID NO: 137282 - RNA, 19 nt, Homo sapiens
  misc_RNA (1)...(19): siRNA sense strand
gaaguaucauuggccuuga

SEQ ID NO: 137283 - RNA, 19 nt, Homo sapiens
  misc_RNA (1)...(19): siRNA sense strand
caucugguaucugaaguau

SEQ ID NO: 137284 - RNA, 19 nt, Homo sapiens
  misc_RNA (1)...(19): siRNA sense strand
gcaauucuggcccaacuca

SEQ ID NO: 137285 - RNA, 19 nt, Homo sapiens
  misc_RNA (1)...(19): siRNA sense strand
ccaacucaacccucucuuu

SEQ ID NO: 137286 - RNA, 19 nt, Homo sapiens
  misc_RNA (1)...(19): siRNA sense strand
gaguuaucauuaccauguu

SEQ ID NO: 137287 - RNA, 19 nt, Homo sapiens
  misc_RNA (1)...(19): siRNA sense strand
acucaacccucucuuugga

SEQ ID NO: 137288 - RNA, 19 nt, Homo sapiens
  misc_RNA (1)...(19): siRNA sense strand
ucacugugccucucauugu

SEQ ID NO: 137289 - RNA, 19 nt, Homo sapiens
  misc_RNA (1)...(19): siRNA sense strand
gggcuucgucggcuucuug

SEQ ID NO: 137290 - RNA, 19 nt, Homo sapiens
  misc_RNA (1)...(19): siRNA sense strand
ccauguuggugaccuguuc

SEQ ID NO: 137291 - RNA, 19 nt, Homo sapiens
  misc_RNA (1)...(19): siRNA sense strand
ugccuugguucaucccuaa

SEQ ID NO: 137292 - RNA, 19 nt, Homo sapiens
  misc_RNA (1)...(19): siRNA sense strand
guuggugaccuguucaguu

SEQ ID NO: 137293 - RNA, 19 nt, Homo sapiens
  misc_RNA (1)...(19): siRNA sense strand
gguaucugaaguaucauug

SEQ ID NO: 137294 - RNA, 19 nt, Homo sapiens
  misc_RNA (1)...(19): siRNA sense strand
ggugaccuguucaguuugc

SEQ ID NO: 137295 - RNA, 19 nt, Homo sapiens
  misc_RNA (1)...(19): siRNA sense strand
ccuguucaguuugcugcua

SEQ ID NO: 137296 - RNA, 19 nt, Homo sapiens
  misc_RNA (1)...(19): siRNA sense strand
ccaucugguaucugaagua

SEQ ID NO: 137297 - RNA, 19 nt, Homo sapiens
  misc_RNA (1)...(19): siRNA sense strand
ucaaagagcuggagaagua

SEQ ID NO: 137298 - RNA, 19 nt, Homo sapiens
  misc_RNA (1)...(19): siRNA sense strand
gaagaggcaugaugacuuu

SEQ ID NO: 137299 - RNA, 19 nt, Homo sapiens
  misc_RNA (1)...(19): siRNA sense strand
gcaaggagaucaaagauuc

SEQ ID NO: 137300 - RNA, 19 nt, Homo sapiens
  misc_RNA (1)...(19): siRNA sense strand
gaagauguuugacuggaua

SEQ ID NO: 137301 - RNA, 19 nt, Homo sapiens
  misc_RNA (1)...(19): siRNA sense strand
gaauugaguugaucuguga

SEQ ID NO: 137302 - RNA, 19 nt, Homo sapiens
  misc_RNA (1)...(19): siRNA sense strand
gcaaagcacuacuugaugu

SEQ ID NO: 137303 - RNA, 19 nt, Homo sapiens
  misc_RNA (1)...(19): siRNA sense strand
gacaggaucugcaccagua

SEQ ID NO: 137304 - RNA, 19 nt, Homo sapiens
  misc_RNA (1)...(19): siRNA sense strand
ggaaacucgugacguauuu

SEQ ID NO: 137305 - RNA, 19 nt, Homo sapiens
  misc_RNA (1)...(19): siRNA sense strand
ccaagaaacaggugaauuu

SEQ ID NO: 137306 - RNA, 19 nt, Homo sapiens
  misc_RNA (1)...(19): siRNA sense strand
gcagacaaauuucagaugu

SEQ ID NO: 137307 - RNA, 19 nt, Homo sapiens
  misc_RNA (1)...(19): siRNA sense strand
aaacguggcuucacuguca

SEQ ID NO: 137308 - RNA, 19 nt, Homo sapiens
  misc_RNA (1)...(19): siRNA sense strand
gcugaaagccuccaacauu

SEQ ID NO: 137309 - RNA, 19 nt, Homo sapiens
  misc_RNA (1)...(19): siRNA sense strand
gaagagguggcucagaaua

SEQ ID NO: 137310 - RNA, 19 nt, Homo sapiens
  misc_RNA (1)...(19): siRNA sense strand
gugggacacugcuuuguua

SEQ ID NO: 137311 - RNA, 19 nt, Homo sapiens
  misc_RNA (1)...(19): siRNA sense strand
gacaagcacuacagagauu

SEQ ID NO: 137312 - RNA, 19 nt, Homo sapiens
  misc_RNA (1)...(19): siRNA sense strand
cagcagagaucgaccaugu

SEQ ID NO: 137313 - RNA, 19 nt, Homo sapiens
  misc_RNA (1)...(19): siRNA sense strand
uccaaaggaucaccaaaua

SEQ ID NO: 137314 - RNA, 19 nt, Homo sapiens
  misc_RNA (1)...(19): siRNA sense strand
uccaagagaucuacgauuu

SEQ ID NO: 137315 - RNA, 19 nt, Homo sapiens
  misc_RNA (1)...(19): siRNA sense strand
aaacagaggaacaauagua

SEQ ID NO: 137316 - RNA, 19 nt, Homo sapiens
  misc_RNA (1)...(19): siRNA sense strand
cagcaaucaugacagaaua

SEQ ID NO: 137317 - RNA, 19 nt, Homo sapiens
  misc_RNA (1)...(19): siRNA sense strand
ugaaagccauccugaguga

SEQ ID NO: 137318 - RNA, 19 nt, Homo sapiens
  misc_RNA (1)...(19): siRNA sense strand
gaaagcuucugauguccuu

SEQ ID NO: 137319 - RNA, 19 nt, Homo sapiens
  misc_RNA (1)...(19): siRNA sense strand
ucaaguacauccacaggaa

SEQ ID NO: 137320 - RNA, 19 nt, Homo sapiens
  misc_RNA (1)...(19): siRNA sense strand
ugaacaacaugaccuuuga

SEQ ID NO: 137321 - RNA, 19 nt, Homo sapiens
  misc_RNA (1)...(19): siRNA sense strand
gagaagugauucaagaaag

SEQ ID NO: 137322 - RNA, 19 nt, Homo sapiens
  misc_RNA (1)...(19): siRNA sense strand
gaacuacuccagacagaga

SEQ ID NO: 137323 - RNA, 19 nt, Homo sapiens
  misc_RNA (1)...(19): siRNA sense strand
gaagucagcccggaagaaa

SEQ ID NO: 137324 - RNA, 19 nt, Homo sapiens
  misc_RNA (1)...(19): siRNA sense strand
gaacggaagcuagccauga

SEQ ID NO: 137325 - RNA, 19 nt, Homo sapiens
  misc_RNA (1)...(19): siRNA sense strand
cauuaugccucacaacaaa

SEQ ID NO: 137326 - RNA, 19 nt, Homo sapiens
  misc_RNA (1)...(19): siRNA sense strand
ggacacacgaaauauguuu

SEQ ID NO: 137327 - RNA, 19 nt, Homo sapiens
  misc_RNA (1)...(19): siRNA sense strand
ggauuugcaugagugcuua

SEQ ID NO: 137328 - RNA, 19 nt, Homo sapiens
  misc_RNA (1)...(19): siRNA sense strand
gccgauagcuuuguggaaa

SEQ ID NO: 137329 - RNA, 19 nt, Homo sapiens
  misc_RNA (1)...(19): siRNA sense strand
ccaaagaguuguggacaug

SEQ ID NO: 137330 - RNA, 19 nt, Homo sapiens
  misc_RNA (1)...(19): siRNA sense strand
gaacacacacagcucaaga

SEQ ID NO: 137331 - RNA, 19 nt, Homo sapiens
  misc_RNA (1)...(19): siRNA sense strand
gaacauucgagaagugauu

SEQ ID NO: 137332 - RNA, 19 nt, Homo sapiens
  misc_RNA (1)...(19): siRNA sense strand
gagaaucgcgugcugcauu

SEQ ID NO: 137333 - RNA, 19 nt, Homo sapiens
  misc_RNA (1)...(19): siRNA sense strand
gaucuacgauuuccauaac

SEQ ID NO: 137334 - RNA, 19 nt, Homo sapiens
  misc_RNA (1)...(19): siRNA sense strand
caagaacauucgagaagug

SEQ ID NO: 137335 - RNA, 19 nt, Homo sapiens
  misc_RNA (1)...(19): siRNA sense strand
cagaauacguacaccaaug

SEQ ID NO: 137336 - RNA, 19 nt, Homo sapiens
  misc_RNA (1)...(19): siRNA sense strand
ccacggagauaaggaaaug

SEQ ID NO: 137337 - RNA, 19 nt, Homo sapiens
  misc_RNA (1)...(19): siRNA sense strand
gcggaaugcugagguguuu

SEQ ID NO: 137338 - RNA, 19 nt, Homo sapiens
  misc_RNA (1)...(19): siRNA sense strand
ccagaaggcugagcaguuc

SEQ ID NO: 137339 - RNA, 19 nt, Homo sapiens
  misc_RNA (1)...(19): siRNA sense strand
ugaaggaacuuuuaacuug

SEQ ID NO: 137340 - RNA, 19 nt, Homo sapiens
  misc_RNA (1)...(19): siRNA sense strand
cagacaaauuucagaugua

SEQ ID NO: 137341 - RNA, 19 nt, Homo sapiens
  misc_RNA (1)...(19): siRNA sense strand
caaaggaucaccaaauauc

SEQ ID NO: 137342 - RNA, 19 nt, Homo sapiens
  misc_RNA (1)...(19): siRNA sense strand
cauguggcccucaucauua

SEQ ID NO: 137343 - RNA, 19 nt, Homo sapiens
  misc_RNA (1)...(19): siRNA sense strand
gaaagccuccaacauugaa

SEQ ID NO: 137344 - RNA, 19 nt, Homo sapiens
  misc_RNA (1)...(19): siRNA sense strand
uuugagaucuccuugguuu

SEQ ID NO: 137345 - RNA, 19 nt, Homo sapiens
  misc_RNA (1)...(19): siRNA sense strand
caggaugccuuucaagugu

SEQ ID NO: 137346 - RNA, 19 nt, Homo sapiens
  misc_RNA (1)...(19): siRNA sense strand
aggaacugcugaaagaaua

SEQ ID NO: 137347 - RNA, 19 nt, Homo sapiens
  misc_RNA (1)...(19): siRNA sense strand
gcaggaugcugagaagaug

SEQ ID NO: 137348 - RNA, 19 nt, Homo sapiens
  misc_RNA (1)...(19): siRNA sense strand
caacaucaaccgcaucaug

SEQ ID NO: 137349 - RNA, 19 nt, Homo sapiens
  misc_RNA (1)...(19): siRNA sense strand
gggauggaguggaggauau

SEQ ID NO: 137350 - RNA, 19 nt, Homo sapiens
  misc_RNA (1)...(19): siRNA sense strand
cugaaagccuccaacauug

SEQ ID NO: 137351 - RNA, 19 nt, Homo sapiens
  misc_RNA (1)...(19): siRNA sense strand
uaacaacaucuuccucaaa

SEQ ID NO: 137352 - RNA, 19 nt, Homo sapiens
  misc_RNA (1)...(19): siRNA sense strand
cacaaucacuuugccauga

SEQ ID NO: 137353 - RNA, 19 nt, Homo sapiens
  misc_RNA (1)...(19): siRNA sense strand
ccaaacagaggaacaauag

SEQ ID NO: 137354 - RNA, 19 nt, Homo sapiens
  misc_RNA (1)...(19): siRNA sense strand
gagcuuagagcaagaauac

SEQ ID NO: 137355 - RNA, 19 nt, Homo sapiens
  misc_RNA (1)...(19): siRNA sense strand
ccuccaggcugaagucaaa

SEQ ID NO: 137356 - RNA, 19 nt, Homo sapiens
  misc_RNA (1)...(19): siRNA sense strand
gaaacagaagaccaacuuu

SEQ ID NO: 137357 - RNA, 19 nt, Homo sapiens
  misc_RNA (1)...(19): siRNA sense strand
gcagagaucgaccauguca

SEQ ID NO: 137358 - RNA, 19 nt, Homo sapiens
  misc_RNA (1)...(19): siRNA sense strand
aaacaaaggagaaggugaa

SEQ ID NO: 137359 - RNA, 19 nt, Homo sapiens
  misc_RNA (1)...(19): siRNA sense strand
ccaaagaaagccaaugaug

SEQ ID NO: 137360 - RNA, 19 nt, Homo sapiens
  misc_RNA (1)...(19): siRNA sense strand
ccaacuccaucucuuccua

SEQ ID NO: 137361 - RNA, 19 nt, Homo sapiens
  misc_RNA (1)...(19): siRNA sense strand
caccuucuuugaugagaua

SEQ ID NO: 137362 - RNA, 19 nt, Homo sapiens
  misc_RNA (1)...(19): siRNA sense strand
gcgggcaccuucuuugaug

SEQ ID NO: 137363 - RNA, 19 nt, Homo sapiens
  misc_RNA (1)...(19): siRNA sense strand
ggacaagcacuacagagau

SEQ ID NO: 137364 - RNA, 19 nt, Homo sapiens
  misc_RNA (1)...(19): siRNA sense strand
caacaaaucaagcagaucu

SEQ ID NO: 137365 - RNA, 19 nt, Homo sapiens
  misc_RNA (1)...(19): siRNA sense strand
cgaagucaaugaagagaag

SEQ ID NO: 137366 - RNA, 19 nt, Homo sapiens
  misc_RNA (1)...(19): siRNA sense strand
acacagaggauaauaagga

SEQ ID NO: 137367 - RNA, 19 nt, Homo sapiens
  misc_RNA (1)...(19): siRNA sense strand
caacacagaggauaauaag

SEQ ID NO: 137368 - RNA, 19 nt, Homo sapiens
  misc_RNA (1)...(19): siRNA sense strand
guggaugccuggugcaaga

SEQ ID NO: 137369 - RNA, 19 nt, Homo sapiens
  misc_RNA (1)...(19): siRNA sense strand
agacagagaaggcuuaugu

SEQ ID NO: 137370 - RNA, 19 nt, Homo sapiens
  misc_RNA (1)...(19): siRNA sense strand
gaccuggagcuggauauua

SEQ ID NO: 137371 - RNA, 19 nt, Homo sapiens
  misc_RNA (1)...(19): siRNA sense strand
gcaagaguuauuggaauuu

SEQ ID NO: 137372 - RNA, 19 nt, Homo sapiens
  misc_RNA (1)...(19): siRNA sense strand
uugaagagguggcucagaa

SEQ ID NO: 137373 - RNA, 19 nt, Homo sapiens
  misc_RNA (1)...(19): siRNA sense strand
aaacagaagaccaacuuug

SEQ ID NO: 137374 - RNA, 19 nt, Homo sapiens
  misc_RNA (1)...(19): siRNA sense strand
gaucaagaacauucgagaa

SEQ ID NO: 137375 - RNA, 19 nt, Homo sapiens
  misc_RNA (1)...(19): siRNA sense strand
gauccgcaauggagaguca

SEQ ID NO: 137376 - RNA, 19 nt, Homo sapiens
  misc_RNA (1)...(19): siRNA sense strand
gugcaagaguuauuggaau

SEQ ID NO: 137377 - RNA, 19 nt, Homo sapiens
  misc_RNA (1)...(19): siRNA sense strand
uaauuaagccuguccaaag

SEQ ID NO: 137378 - RNA, 19 nt, Homo sapiens
  misc_RNA (1)...(19): siRNA sense strand
acagagaaggcuuauguaa

SEQ ID NO: 137379 - RNA, 19 nt, Homo sapiens
  misc_RNA (1)...(19): siRNA sense strand
agaaucgcgugcugcauuu

SEQ ID NO: 137380 - RNA, 19 nt, Homo sapiens
  misc_RNA (1)...(19): siRNA sense strand
caagaguuauuggaauuuc

SEQ ID NO: 137381 - RNA, 19 nt, Homo sapiens
  misc_RNA (1)...(19): siRNA sense strand
ggauaagccacaacaagga

SEQ ID NO: 137382 - RNA, 19 nt, Homo sapiens
  misc_RNA (1)...(19): siRNA sense strand
gacaccaucuccauugcuu

SEQ ID NO: 137383 - RNA, 19 nt, Homo sapiens
  misc_RNA (1)...(19): siRNA sense strand
cacgaaauauguuuacaag

SEQ ID NO: 137384 - RNA, 19 nt, Homo sapiens
  misc_RNA (1)...(19): siRNA sense strand
gcaacugccugaggaugug

SEQ ID NO: 137385 - RNA, 19 nt, Homo sapiens
  misc_RNA (1)...(19): siRNA sense strand
gauacucacuggagaaagc

SEQ ID NO: 137386 - RNA, 19 nt, Homo sapiens
  misc_RNA (1)...(19): siRNA sense strand
ugauucagcuggccgauag

SEQ ID NO: 137387 - RNA, 19 nt, Homo sapiens
  misc_RNA (1)...(19): siRNA sense strand
gcagcaaucaugacagaau

SEQ ID NO: 137388 - RNA, 19 nt, Homo sapiens
  misc_RNA (1)...(19): siRNA sense strand
guguuggacuggauugaaa

SEQ ID NO: 137389 - RNA, 19 nt, Homo sapiens
  misc_RNA (1)...(19): siRNA sense strand
ggaccuaacccuggcagaa

SEQ ID NO: 137390 - RNA, 19 nt, Homo sapiens
  misc_RNA (1)...(19): siRNA sense strand
ucuaggaccucucagaaca

SEQ ID NO: 137391 - RNA, 19 nt, Homo sapiens
  misc_RNA (1)...(19): siRNA sense strand
cuucaggacacacgaaaua

SEQ ID NO: 137392 - RNA, 19 nt, Homo sapiens
  misc_RNA (1)...(19): siRNA sense strand
aauaucaacugcuccugaa

SEQ ID NO: 137393 - RNA, 19 nt, Homo sapiens
  misc_RNA (1)...(19): siRNA sense strand
guaagggauuugcaugagu

SEQ ID NO: 137394 - RNA, 19 nt, Homo sapiens
  misc_RNA (1)...(19): siRNA sense strand
caagaauaccggagagaug

SEQ ID NO: 137395 - RNA, 19 nt, Homo sapiens
  misc_RNA (1)...(19): siRNA sense strand
gagcagugccuccaauuac

SEQ ID NO: 137396 - RNA, 19 nt, Homo sapiens
  misc_RNA (1)...(19): siRNA sense strand
ugcaagaguuauuggaauu

SEQ ID NO: 137397 - RNA, 19 nt, Homo sapiens
  misc_RNA (1)...(19): siRNA sense strand
gcaaagaaaugcuuacaua

SEQ ID NO: 137398 - RNA, 19 nt, Homo sapiens
  misc_RNA (1)...(19): siRNA sense strand
guacagagcuccagaacua

SEQ ID NO: 137399 - RNA, 19 nt, Homo sapiens
  misc_RNA (1)...(19): siRNA sense strand
ggaguaagguugccugaaa

SEQ ID NO: 137400 - RNA, 19 nt, Homo sapiens
  misc_RNA (1)...(19): siRNA sense strand
gaauaaagauacuggaaga

SEQ ID NO: 137401 - RNA, 19 nt, Homo sapiens
  misc_RNA (1)...(19): siRNA sense strand
gaaguguucuauuccauuu

SEQ ID NO: 137402 - RNA, 19 nt, Homo sapiens
  misc_RNA (1)...(19): siRNA sense strand
gaagaauuguggccauaaa

SEQ ID NO: 137403 - RNA, 19 nt, Homo sapiens
  misc_RNA (1)...(19): siRNA sense strand
gugaugaaguguaggaaua

SEQ ID NO: 137404 - RNA, 19 nt, Homo sapiens
  misc_RNA (1)...(19): siRNA sense strand
gaugguaccuagucuuuga

SEQ ID NO: 137405 - RNA, 19 nt, Homo sapiens
  misc_RNA (1)...(19): siRNA sense strand
gaaagacgcuauccuaagc

SEQ ID NO: 137406 - RNA, 19 nt, Homo sapiens
  misc_RNA (1)...(19): siRNA sense strand
gaaaucaaguuacuaaagc

SEQ ID NO: 137407 - RNA, 19 nt, Homo sapiens
  misc_RNA (1)...(19): siRNA sense strand
guaccuagucuuugaauuu

SEQ ID NO: 137408 - RNA, 19 nt, Homo sapiens
  misc_RNA (1)...(19): siRNA sense strand
uaaagcaacuuaggcauga

SEQ ID NO: 137409 - RNA, 19 nt, Homo sapiens
  misc_RNA (1)...(19): siRNA sense strand
ggugauagauuuagcaaag

SEQ ID NO: 137410 - RNA, 19 nt, Homo sapiens
  misc_RNA (1)...(19): siRNA sense strand
gaacagacauuccccauca

SEQ ID NO: 137411 - RNA, 19 nt, Homo sapiens
  misc_RNA (1)...(19): siRNA sense strand
gauauaaagccagagaaua

SEQ ID NO: 137412 - RNA, 19 nt, Homo sapiens
  misc_RNA (1)...(19): siRNA sense strand
ggacugagacuauaccaau

SEQ ID NO: 137413 - RNA, 19 nt, Homo sapiens
  misc_RNA (1)...(19): siRNA sense strand
acagaaagaugccagaaau

SEQ ID NO: 137414 - RNA, 19 nt, Homo sapiens
  misc_RNA (1)...(19): siRNA sense strand
gaaagaugccagaaauguu

SEQ ID NO: 137415 - RNA, 19 nt, Homo sapiens
  misc_RNA (1)...(19): siRNA sense strand
cgagaaaucaaguuacuaa

SEQ ID NO: 137416 - RNA, 19 nt, Homo sapiens
  misc_RNA (1)...(19): siRNA sense strand
gaauggugaugaaguguag

SEQ ID NO: 137417 - RNA, 19 nt, Homo sapiens
  misc_RNA (1)...(19): siRNA sense strand
aaagaugauuccuuaguug

SEQ ID NO: 137418 - RNA, 19 nt, Homo sapiens
  misc_RNA (1)...(19): siRNA sense strand
ggccauugguugucuggua

SEQ ID NO: 137419 - RNA, 19 nt, Homo sapiens
  misc_RNA (1)...(19): siRNA sense strand
ccacuuacacacaaucuuu

SEQ ID NO: 137420 - RNA, 19 nt, Homo sapiens
  misc_RNA (1)...(19): siRNA sense strand
aaagaugccagaaauguuu

SEQ ID NO: 137421 - RNA, 19 nt, Homo sapiens
  misc_RNA (1)...(19): siRNA sense strand
gaagggaguuauggaaugg

SEQ ID NO: 137422 - RNA, 19 nt, Homo sapiens
  misc_RNA (1)...(19): siRNA sense strand
caaauggacuagacuacca

SEQ ID NO: 137423 - RNA, 19 nt, Homo sapiens
  misc_RNA (1)...(19): siRNA sense strand
ggagaagggaguuauggaa

SEQ ID NO: 137424 - RNA, 19 nt, Homo sapiens
  misc_RNA (1)...(19): siRNA sense strand
gaauuguggccauaaagaa

SEQ ID NO: 137425 - RNA, 19 nt, Homo sapiens
  misc_RNA (1)...(19): siRNA sense strand
caucaggcauuuauaacau

SEQ ID NO: 137426 - RNA, 19 nt, Homo sapiens
  misc_RNA (1)...(19): siRNA sense strand
ggcaauagagcuucaaaug

SEQ ID NO: 137427 - RNA, 19 nt, Homo sapiens
  misc_RNA (1)...(19): siRNA sense strand
gaugaaguguaggaauaaa

SEQ ID NO: 137428 - RNA, 19 nt, Homo sapiens
  misc_RNA (1)...(19): siRNA sense strand
ggagguuuauacugauuau

SEQ ID NO: 137429 - RNA, 19 nt, Homo sapiens
  misc_RNA (1)...(19): siRNA sense strand
acacaauucuugaugacuu

SEQ ID NO: 137430 - RNA, 19 nt, Homo sapiens
  misc_RNA (1)...(19): siRNA sense strand
gcuaugcgauuuuggauuu

SEQ ID NO: 137431 - RNA, 19 nt, Homo sapiens
  misc_RNA (1)...(19): siRNA sense strand
caccaugauuucuuucaaa

SEQ ID NO: 137432 - RNA, 19 nt, Homo sapiens
  misc_RNA (1)...(19): siRNA sense strand
cugaaguggugauagauuu

SEQ ID NO: 137433 - RNA, 19 nt, Homo sapiens
  misc_RNA (1)...(19): siRNA sense strand
gccauugguugucugguaa

SEQ ID NO: 137434 - RNA, 19 nt, Homo sapiens
  misc_RNA (1)...(19): siRNA sense strand
ucugguaacugaaauguuc

SEQ ID NO: 137435 - RNA, 19 nt, Homo sapiens
  misc_RNA (1)...(19): siRNA sense strand
ggaauggugaugaagugua

SEQ ID NO: 137436 - RNA, 19 nt, Homo sapiens
  misc_RNA (1)...(19): siRNA sense strand
gaguaagguugccugaaau

SEQ ID NO: 137437 - RNA, 19 nt, Homo sapiens
  misc_RNA (1)...(19): siRNA sense strand
uggcaaggcuguugaugug

SEQ ID NO: 137438 - RNA, 19 nt, Homo sapiens
  misc_RNA (1)...(19): siRNA sense strand
cuauaccaauucaggguua

SEQ ID NO: 137439 - RNA, 19 nt, Homo sapiens
  misc_RNA (1)...(19): siRNA sense strand
uaccaaugcugaucccaaa

SEQ ID NO: 137440 - RNA, 19 nt, Homo sapiens
  misc_RNA (1)...(19): siRNA sense strand
ccaaguaguucaaaaguau

SEQ ID NO: 137441 - RNA, 19 nt, Homo sapiens
  misc_RNA (1)...(19): siRNA sense strand
ggaagaauuguggccauaa

SEQ ID NO: 137442 - RNA, 19 nt, Homo sapiens
  misc_RNA (1)...(19): siRNA sense strand
guuauggaauggugaugaa

SEQ ID NO: 137443 - RNA, 19 nt, Homo sapiens
  misc_RNA (1)...(19): siRNA sense strand
ggaauuggauuuugucaca

SEQ ID NO: 137444 - RNA, 19 nt, Homo sapiens
  misc_RNA (1)...(19): siRNA sense strand
gugaaucucuuggaagugu

SEQ ID NO: 137445 - RNA, 19 nt, Homo sapiens
  misc_RNA (1)...(19): siRNA sense strand
aaagauacuggaagaauug

SEQ ID NO: 137446 - RNA, 19 nt, Homo sapiens
  misc_RNA (1)...(19): siRNA sense strand
ccuacaccaugauuucuuu

SEQ ID NO: 137447 - RNA, 19 nt, Homo sapiens
  misc_RNA (1)...(19): siRNA sense strand
agaagggaguuauggaaug

SEQ ID NO: 137448 - RNA, 19 nt, Homo sapiens
  misc_RNA (1)...(19): siRNA sense strand
gacugagacuauaccaauu

SEQ ID NO: 137449 - RNA, 19 nt, Homo sapiens
  misc_RNA (1)...(19): siRNA sense strand
gcaauagagcuucaaaugc

SEQ ID NO: 137450 - RNA, 19 nt, Homo sapiens
  misc_RNA (1)...(19): siRNA sense strand
gagaagggaguuauggaau

SEQ ID NO: 137451 - RNA, 19 nt, Homo sapiens
  misc_RNA (1)...(19): siRNA sense strand
ugaaguggugauagauuua

SEQ ID NO: 137452 - RNA, 19 nt, Homo sapiens
  misc_RNA (1)...(19): siRNA sense strand
ucucugaaguggugauaga

SEQ ID NO: 137453 - RNA, 19 nt, Homo sapiens
  misc_RNA (1)...(19): siRNA sense strand
ucacagucacaauaucaua

SEQ ID NO: 137454 - RNA, 19 nt, Homo sapiens
  misc_RNA (1)...(19): siRNA sense strand
uuacagaguggaugagaaa

SEQ ID NO: 137455 - RNA, 19 nt, Homo sapiens
  misc_RNA (1)...(19): siRNA sense strand
gaugauuccuuaguugaag

SEQ ID NO: 137456 - RNA, 19 nt, Homo sapiens
  misc_RNA (1)...(19): siRNA sense strand
agaaagugacgaugacaaa

SEQ ID NO: 137457 - RNA, 19 nt, Homo sapiens
  misc_RNA (1)...(19): siRNA sense strand
uaccuagucuuugaauuug

SEQ ID NO: 137458 - RNA, 19 nt, Homo sapiens
  misc_RNA (1)...(19): siRNA sense strand
uggacuagacuaccaagua

SEQ ID NO: 137459 - RNA, 19 nt, Homo sapiens
  misc_RNA (1)...(19): siRNA sense strand
ugaaaucaaggaaagagaa

SEQ ID NO: 137460 - RNA, 19 nt, Homo sapiens
  misc_RNA (1)...(19): siRNA sense strand
uggaagaauuguggccaua

SEQ ID NO: 137461 - RNA, 19 nt, Homo sapiens
  misc_RNA (1)...(19): siRNA sense strand
ugaaguguaggaauaaaga

SEQ ID NO: 137462 - RNA, 19 nt, Homo sapiens
  misc_RNA (1)...(19): siRNA sense strand
gguuggugaugucaaguau

SEQ ID NO: 137463 - RNA, 19 nt, Homo sapiens
  misc_RNA (1)...(19): siRNA sense strand
ccuagucuuugaauuuguu

SEQ ID NO: 137464 - RNA, 19 nt, Homo sapiens
  misc_RNA (1)...(19): siRNA sense strand
ggacaagccacaacaaaau

SEQ ID NO: 137465 - RNA, 19 nt, Homo sapiens
  misc_RNA (1)...(19): siRNA sense strand
agaaagaugccagaaaugu

SEQ ID NO: 137466 - RNA, 19 nt, Homo sapiens
  misc_RNA (1)...(19): siRNA sense strand
uaagguugccugaaaucaa

SEQ ID NO: 137467 - RNA, 19 nt, Homo sapiens
  misc_RNA (1)...(19): siRNA sense strand
cacaauucuugaugacuug

SEQ ID NO: 137468 - RNA, 19 nt, Homo sapiens
  misc_RNA (1)...(19): siRNA sense strand
guuacagaguggaugagaa

SEQ ID NO: 137469 - RNA, 19 nt, Homo sapiens
  misc_RNA (1)...(19): siRNA sense strand
gcaaugcgagaaaucaagu

SEQ ID NO: 137470 - RNA, 19 nt, Homo sapiens
  misc_RNA (1)...(19): siRNA sense strand
acacaaucuuucugcaguu

SEQ ID NO: 137471 - RNA, 19 nt, Homo sapiens
  misc_RNA (1)...(19): siRNA sense strand
cucaaagacugcagcaaug

SEQ ID NO: 137472 - RNA, 19 nt, Homo sapiens
  misc_RNA (1)...(19): siRNA sense strand
ccucaaagacugcagcaau

SEQ ID NO: 137473 - RNA, 19 nt, Homo sapiens
  misc_RNA (1)...(19): siRNA sense strand
uuccuuaguugaagaaaga

SEQ ID NO: 137474 - RNA, 19 nt, Homo sapiens
  misc_RNA (1)...(19): siRNA sense strand
gguuuauacugauuaugug

SEQ ID NO: 137475 - RNA, 19 nt, Homo sapiens
  misc_RNA (1)...(19): siRNA sense strand
ugaauuuguugaccacaca

SEQ ID NO: 137476 - RNA, 19 nt, Homo sapiens
  misc_RNA (1)...(19): siRNA sense strand
uggauuugcugagagguuu

SEQ ID NO: 137477 - RNA, 19 nt, Homo sapiens
  misc_RNA (1)...(19): siRNA sense strand
gugauagauuuagcaaaga

SEQ ID NO: 137478 - RNA, 19 nt, Homo sapiens
  misc_RNA (1)...(19): siRNA sense strand
gaccacacaauucuugaug

SEQ ID NO: 137479 - RNA, 19 nt, Homo sapiens
  misc_RNA (1)...(19): siRNA sense strand
ucaacaagccucaaagacu

SEQ ID NO: 137480 - RNA, 19 nt, Homo sapiens
  misc_RNA (1)...(19): siRNA sense strand
ugaaagacgcuauccuaag

SEQ ID NO: 137481 - RNA, 19 nt, Homo sapiens
  misc_RNA (1)...(19): siRNA sense strand
cuugaaagacgcuauccua

SEQ ID NO: 137482 - RNA, 19 nt, Homo sapiens
  misc_RNA (1)...(19): siRNA sense strand
uugguugucugguaacuga

SEQ ID NO: 137483 - RNA, 19 nt, Homo sapiens
  misc_RNA (1)...(19): siRNA sense strand
gggagguuuauacugauua

SEQ ID NO: 137484 - RNA, 19 nt, Homo sapiens
  misc_RNA (1)...(19): siRNA sense strand
ccacacaauucuugaugac

SEQ ID NO: 137485 - RNA, 19 nt, Homo sapiens
  misc_RNA (1)...(19): siRNA sense strand
gguaccuagucuuugaauu

SEQ ID NO: 137486 - RNA, 19 nt, Homo sapiens
  misc_RNA (1)...(19): siRNA sense strand
gcuccuacaccaugauuuc

SEQ ID NO: 137487 - RNA, 19 nt, Homo sapiens
  misc_RNA (1)...(19): siRNA sense strand
uccuggagauucugauauu

SEQ ID NO: 137488 - RNA, 19 nt, Homo sapiens
  misc_RNA (1)...(19): siRNA sense strand
gccagagaauauauuaguc

SEQ ID NO: 137489 - RNA, 19 nt, Homo sapiens
  misc_RNA (1)...(19): siRNA sense strand
acaccaugauuucuuucaa

SEQ ID NO: 137490 - RNA, 19 nt, Homo sapiens
  misc_RNA (1)...(19): siRNA sense strand
guugaugugugggccauug

SEQ ID NO: 137491 - RNA, 19 nt, Homo sapiens
  misc_RNA (1)...(19): siRNA sense strand
acaauaucauacacagaga

SEQ ID NO: 137492 - RNA, 19 nt, Homo sapiens
  misc_RNA (1)...(19): siRNA sense strand
cacaaucuuucugcaguug

SEQ ID NO: 137493 - RNA, 19 nt, Homo sapiens
  misc_RNA (1)...(19): siRNA sense strand
guacagaaagaugccagaa

SEQ ID NO: 137494 - RNA, 19 nt, Homo sapiens
  misc_RNA (1)...(19): siRNA sense strand
gaaguggugauagauuuag

SEQ ID NO: 137495 - RNA, 19 nt, Homo sapiens
  misc_RNA (1)...(19): siRNA sense strand
gaaaucaaggaaagagaac

SEQ ID NO: 137496 - RNA, 19 nt, Homo sapiens
  misc_RNA (1)...(19): siRNA sense strand
uaggacaagccacaacaaa

SEQ ID NO: 137497 - RNA, 19 nt, Homo sapiens
  misc_RNA (1)...(19): siRNA sense strand
ggagaggaauuaugagaug

SEQ ID NO: 137498 - RNA, 19 nt, Homo sapiens
  misc_RNA (1)...(19): siRNA sense strand
ggaagaugcuccagaaagg

SEQ ID NO: 137499 - RNA, 19 nt, Homo sapiens
  misc_RNA (1)...(19): siRNA sense strand
ucucagacccuguguauuu

SEQ ID NO: 137500 - RNA, 19 nt, Homo sapiens
  misc_RNA (1)...(19): siRNA sense strand
uaaggaggaugaucucaga

SEQ ID NO: 137501 - RNA, 19 nt, Homo sapiens
  misc_RNA (1)...(19): siRNA sense strand
aggcagagcuggugucaga

SEQ ID NO: 137502 - RNA, 19 nt, Homo sapiens
  misc_RNA (1)...(19): siRNA sense strand
gagcucagaacgucucuaa

SEQ ID NO: 137503 - RNA, 19 nt, Homo sapiens
  misc_RNA (1)...(19): siRNA sense strand
gaacgucucuaaggaggau

SEQ ID NO: 137504 - RNA, 19 nt, Homo sapiens
  misc_RNA (1)...(19): siRNA sense strand
gaucucagacccuguguau

SEQ ID NO: 137505 - RNA, 19 nt, Homo sapiens
  misc_RNA (1)...(19): siRNA sense strand
ggaugaggaugaagaagag

SEQ ID NO: 137506 - RNA, 19 nt, Homo sapiens
  misc_RNA (1)...(19): siRNA sense strand
ggaacaggaagaagaagaa

SEQ ID NO: 137507 - RNA, 19 nt, Homo sapiens
  misc_RNA (1)...(19): siRNA sense strand
ggaugguccugcagagaga

SEQ ID NO: 137508 - RNA, 19 nt, Homo sapiens
  misc_RNA (1)...(19): siRNA sense strand
gaaggugccggcugaggaa

SEQ ID NO: 137509 - RNA, 19 nt, Homo sapiens
  misc_RNA (1)...(19): siRNA sense strand
ggagaaucaucagcugaga

SEQ ID NO: 137510 - RNA, 19 nt, Homo sapiens
  misc_RNA (1)...(19): siRNA sense strand
ggucuaugcccgacaauuc

SEQ ID NO: 137511 - RNA, 19 nt, Homo sapiens
  misc_RNA (1)...(19): siRNA sense strand
ggacacauccagccuaagg

SEQ ID NO: 137512 - RNA, 19 nt, Homo sapiens
  misc_RNA (1)...(19): siRNA sense strand
ccaggaagacgucaaagug

SEQ ID NO: 137513 - RNA, 19 nt, Homo sapiens
  misc_RNA (1)...(19): siRNA sense strand
gggagagcguuaccuaugg

SEQ ID NO: 137514 - RNA, 19 nt, Homo sapiens
  misc_RNA (1)...(19): siRNA sense strand
agaugcagcuccaggaaga

SEQ ID NO: 137515 - RNA, 19 nt, Homo sapiens
  misc_RNA (1)...(19): siRNA sense strand
ggaagacgucaaagugaug

SEQ ID NO: 137516 - RNA, 19 nt, Homo sapiens
  misc_RNA (1)...(19): siRNA sense strand
gcucagaacgucucuaagg

SEQ ID NO: 137517 - RNA, 19 nt, Homo sapiens
  misc_RNA (1)...(19): siRNA sense strand
ggagaaggaaauccagaug

SEQ ID NO: 137518 - RNA, 19 nt, Homo sapiens
  misc_RNA (1)...(19): siRNA sense strand
agaaggaaauccagaugca

SEQ ID NO: 137519 - RNA, 19 nt, Homo sapiens
  misc_RNA (1)...(19): siRNA sense strand
ggaggaugaggaugaagaa

SEQ ID NO: 137520 - RNA, 19 nt, Homo sapiens
  misc_RNA (1)...(19): siRNA sense strand
ucgacacucuugaggauga

SEQ ID NO: 137521 - RNA, 19 nt, Homo sapiens
  misc_RNA (1)...(19): siRNA sense strand
ccaaggaggagauuuuaua

SEQ ID NO: 137522 - RNA, 19 nt, Homo sapiens
  misc_RNA (1)...(19): siRNA sense strand
caggaagacgucaaaguga

SEQ ID NO: 137523 - RNA, 19 nt, Homo sapiens
  misc_RNA (1)...(19): siRNA sense strand
agaagaagaagcagaggaa

SEQ ID NO: 137524 - RNA, 19 nt, Homo sapiens
  misc_RNA (1)...(19): siRNA sense strand
gcagcgggcaucuggaaga

SEQ ID NO: 137525 - RNA, 19 nt, Homo sapiens
  misc_RNA (1)...(19): siRNA sense strand
cauccagccuaagguauga

SEQ ID NO: 137526 - RNA, 19 nt, Homo sapiens
  misc_RNA (1)...(19): siRNA sense strand
ugaggaggaugaggaugaa

SEQ ID NO: 137527 - RNA, 19 nt, Homo sapiens
  misc_RNA (1)...(19): siRNA sense strand
cagaagaggaacaggaaga

SEQ ID NO: 137528 - RNA, 19 nt, Homo sapiens
  misc_RNA (1)...(19): siRNA sense strand
aaaggaggcagaagaggaa

SEQ ID NO: 137529 - RNA, 19 nt, Homo sapiens
  misc_RNA (1)...(19): siRNA sense strand
gagcuucucccaccugucu

SEQ ID NO: 137530 - RNA, 19 nt, Homo sapiens
  misc_RNA (1)...(19): siRNA sense strand
gaugaggcaacgcggauga

SEQ ID NO: 137531 - RNA, 19 nt, Homo sapiens
  misc_RNA (1)...(19): siRNA sense strand
acacauccagccuaaggua

SEQ ID NO: 137532 - RNA, 19 nt, Homo sapiens
  misc_RNA (1)...(19): siRNA sense strand
uuauggagaggaauuauga

SEQ ID NO: 137533 - RNA, 19 nt, Homo sapiens
  misc_RNA (1)...(19): siRNA sense strand
gaagaggaggaggaagaaa

SEQ ID NO: 137534 - RNA, 19 nt, Homo sapiens
  misc_RNA (1)...(19): siRNA sense strand
ccucucaacucgacacucu

SEQ ID NO: 137535 - RNA, 19 nt, Homo sapiens
  misc_RNA (1)...(19): siRNA sense strand
aagaagaggaggaggaaga

SEQ ID NO: 137536 - RNA, 19 nt, Homo sapiens
  misc_RNA (1)...(19): siRNA sense strand
gaggaacagaugcucauuc

SEQ ID NO: 137537 - RNA, 19 nt, Homo sapiens
  misc_RNA (1)...(19): siRNA sense strand
ggcagaagaggaacaggaa

SEQ ID NO: 137538 - RNA, 19 nt, Homo sapiens
  misc_RNA (1)...(19): siRNA sense strand
acgucaaagugauguuaua

SEQ ID NO: 137539 - RNA, 19 nt, Homo sapiens
  misc_RNA (1)...(19): siRNA sense strand
aggaacagaugcucauucu

SEQ ID NO: 137540 - RNA, 19 nt, Homo sapiens
  misc_RNA (1)...(19): siRNA sense strand
cuccagcucuacucagauu

SEQ ID NO: 137541 - RNA, 19 nt, Homo sapiens
  misc_RNA (1)...(19): siRNA sense strand
gaagcacuguguccuaacc

SEQ ID NO: 137542 - RNA, 19 nt, Homo sapiens
  misc_RNA (1)...(19): siRNA sense strand
agacgucaaagugauguua

SEQ ID NO: 137543 - RNA, 19 nt, Homo sapiens
  misc_RNA (1)...(19): siRNA sense strand
aagaggaacaggaagaaga

SEQ ID NO: 137544 - RNA, 19 nt, Homo sapiens
  misc_RNA (1)...(19): siRNA sense strand
ggagacucuuccugguuuc

SEQ ID NO: 137545 - RNA, 19 nt, Homo sapiens
  misc_RNA (1)...(19): siRNA sense strand
agaaucaucagcugagaga

SEQ ID NO: 137546 - RNA, 19 nt, Homo sapiens
  misc_RNA (1)...(19): siRNA sense strand
aggaagacgucaaagugau

SEQ ID NO: 137547 - RNA, 19 nt, Homo sapiens
  misc_RNA (1)...(19): siRNA sense strand
gggcugagacugaaaaguu

SEQ ID NO: 137548 - RNA, 19 nt, Homo sapiens
  misc_RNA (1)...(19): siRNA sense strand
gaacaggaagaagaagaag

SEQ ID NO: 137549 - RNA, 19 nt, Homo sapiens
  misc_RNA (1)...(19): siRNA sense strand
ugaagaagaggaggaggaa

SEQ ID NO: 137550 - RNA, 19 nt, Homo sapiens
  misc_RNA (1)...(19): siRNA sense strand
cggacaagcugcagaucgu

SEQ ID NO: 137551 - RNA, 19 nt, Homo sapiens
  misc_RNA (1)...(19): siRNA sense strand
cucagaacgucucuaagga

SEQ ID NO: 137552 - RNA, 19 nt, Homo sapiens
  misc_RNA (1)...(19): siRNA sense strand
uggaguguguggagcaguu

SEQ ID NO: 137553 - RNA, 19 nt, Homo sapiens
  misc_RNA (1)...(19): siRNA sense strand
gaagacgucaaagugaugu

SEQ ID NO: 137554 - RNA, 19 nt, Homo sapiens
  misc_RNA (1)...(19): siRNA sense strand
uggaagccuugcaggagaa

SEQ ID NO: 137555 - RNA, 19 nt, Homo sapiens
  misc_RNA (1)...(19): siRNA sense strand
agaggaacaggaagaagaa

SEQ ID NO: 137556 - RNA, 19 nt, Homo sapiens
  misc_RNA (1)...(19): siRNA sense strand
gaagaugcuccagaaaggu

SEQ ID NO: 137557 - RNA, 19 nt, Homo sapiens
  misc_RNA (1)...(19): siRNA sense strand
agagagagagggaccugaa

SEQ ID NO: 137558 - RNA, 19 nt, Homo sapiens
  misc_RNA (1)...(19): siRNA sense strand
acucgacacucuugaggau

SEQ ID NO: 137559 - RNA, 19 nt, Homo sapiens
  misc_RNA (1)...(19): siRNA sense strand
aagaagaagcagaggaaga

SEQ ID NO: 137560 - RNA, 19 nt, Homo sapiens
  misc_RNA (1)...(19): siRNA sense strand
gaagaggaacaggaagaag

SEQ ID NO: 137561 - RNA, 19 nt, Homo sapiens
  misc_RNA (1)...(19): siRNA sense strand
ggaggccagccaacagaug

SEQ ID NO: 137562 - RNA, 19 nt, Homo sapiens
  misc_RNA (1)...(19): siRNA sense strand
ggggacacauccagccuaa

SEQ ID NO: 137563 - RNA, 19 nt, Homo sapiens
  misc_RNA (1)...(19): siRNA sense strand
ugggagagcguuaccuaug

SEQ ID NO: 137564 - RNA, 19 nt, Homo sapiens
  misc_RNA (1)...(19): siRNA sense strand
ccagaugcagcuccaggaa

SEQ ID NO: 137565 - RNA, 19 nt, Homo sapiens
  misc_RNA (1)...(19): siRNA sense strand
gaccugcagugugcucauc

SEQ ID NO: 137566 - RNA, 19 nt, Homo sapiens
  misc_RNA (1)...(19): siRNA sense strand
ugauuucgcaggaggcauu

SEQ ID NO: 137567 - RNA, 19 nt, Homo sapiens
  misc_RNA (1)...(19): siRNA sense strand
cgucaaagugauguuauau

SEQ ID NO: 137568 - RNA, 19 nt, Homo sapiens
  misc_RNA (1)...(19): siRNA sense strand
gaaaggcagcgggcaucug

SEQ ID NO: 137569 - RNA, 19 nt, Homo sapiens
  misc_RNA (1)...(19): siRNA sense strand
acaggaagaagaagaagca

SEQ ID NO: 137570 - RNA, 19 nt, Homo sapiens
  misc_RNA (1)...(19): siRNA sense strand
caccuggacaugaauuaug

SEQ ID NO: 137571 - RNA, 19 nt, Homo sapiens
  misc_RNA (1)...(19): siRNA sense strand
uggaggaggagaaucauca

SEQ ID NO: 137572 - RNA, 19 nt, Homo sapiens
  misc_RNA (1)...(19): siRNA sense strand
aggaugaggaugaagaaga

SEQ ID NO: 137573 - RNA, 19 nt, Homo sapiens
  misc_RNA (1)...(19): siRNA sense strand
ggaguguguggagcaguuu

SEQ ID NO: 137574 - RNA, 19 nt, Homo sapiens
  misc_RNA (1)...(19): siRNA sense strand
ucucaacucgacacucuug

SEQ ID NO: 137575 - RNA, 19 nt, Homo sapiens
  misc_RNA (1)...(19): siRNA sense strand
agaagaggaacaggaagaa

SEQ ID NO: 137576 - RNA, 19 nt, Homo sapiens
  misc_RNA (1)...(19): siRNA sense strand
ggagaggaauuaugagaug

SEQ ID NO: 137577 - RNA, 19 nt, Homo sapiens
  misc_RNA (1)...(19): siRNA sense strand
ggaagaugcuccagaaagg

SEQ ID NO: 137578 - RNA, 19 nt, Homo sapiens
  misc_RNA (1)...(19): siRNA sense strand
ucucagacccuguguauuu

SEQ ID NO: 137579 - RNA, 19 nt, Homo sapiens
  misc_RNA (1)...(19): siRNA sense strand
uaaggaggaugaucucaga

SEQ ID NO: 137580 - RNA, 19 nt, Homo sapiens
  misc_RNA (1)...(19): siRNA sense strand
aggcagagcuggugucaga

SEQ ID NO: 137581 - RNA, 19 nt, Homo sapiens
  misc_RNA (1)...(19): siRNA sense strand
gagcucagaacgucucuaa

SEQ ID NO: 137582 - RNA, 19 nt, Homo sapiens
  misc_RNA (1)...(19): siRNA sense strand
gaacgucucuaaggaggau

SEQ ID NO: 137583 - RNA, 19 nt, Homo sapiens
  misc_RNA (1)...(19): siRNA sense strand
gaucucagacccuguguau

SEQ ID NO: 137584 - RNA, 19 nt, Homo sapiens
  misc_RNA (1)...(19): siRNA sense strand
ggaugaggaugaagaagag

SEQ ID NO: 137585 - RNA, 19 nt, Homo sapiens
  misc_RNA (1)...(19): siRNA sense strand
ggaacaggaagaagaagaa

SEQ ID NO: 137586 - RNA, 19 nt, Homo sapiens
  misc_RNA (1)...(19): siRNA sense strand
ggaugguccugcagagaga

SEQ ID NO: 137587 - RNA, 19 nt, Homo sapiens
  misc_RNA (1)...(19): siRNA sense strand
gaaggugccggcugaggaa

SEQ ID NO: 137588 - RNA, 19 nt, Homo sapiens
  misc_RNA (1)...(19): siRNA sense strand
ggagaaucaucagcugaga

SEQ ID NO: 137589 - RNA, 19 nt, Homo sapiens
  misc_RNA (1)...(19): siRNA sense strand
ggucuaugcccgacaauuc

SEQ ID NO: 137590 - RNA, 19 nt, Homo sapiens
  misc_RNA (1)...(19): siRNA sense strand
ggacacauccagccuaagg

SEQ ID NO: 137591 - RNA, 19 nt, Homo sapiens
  misc_RNA (1)...(19): siRNA sense strand
ccaggaagacgucaaagug

SEQ ID NO: 137592 - RNA, 19 nt, Homo sapiens
  misc_RNA (1)...(19): siRNA sense strand
gggagagcguuaccuaugg

SEQ ID NO: 137593 - RNA, 19 nt, Homo sapiens
  misc_RNA (1)...(19): siRNA sense strand
agaugcagcuccaggaaga

SEQ ID NO: 137594 - RNA, 19 nt, Homo sapiens
  misc_RNA (1)...(19): siRNA sense strand
ggaagacgucaaagugaug

SEQ ID NO: 137595 - RNA, 19 nt, Homo sapiens
  misc_RNA (1)...(19): siRNA sense strand
gcucagaacgucucuaagg

SEQ ID NO: 137596 - RNA, 19 nt, Homo sapiens
  misc_RNA (1)...(19): siRNA sense strand
ggagaaggaaauccagaug

SEQ ID NO: 137597 - RNA, 19 nt, Homo sapiens
  misc_RNA (1)...(19): siRNA sense strand
agaaggaaauccagaugca

SEQ ID NO: 137598 - RNA, 19 nt, Homo sapiens
  misc_RNA (1)...(19): siRNA sense strand
ggaggaugaggaugaagaa

SEQ ID NO: 137599 - RNA, 19 nt, Homo sapiens
  misc_RNA (1)...(19): siRNA sense strand
ucgacacucuugaggauga

SEQ ID NO: 137600 - RNA, 19 nt, Homo sapiens
  misc_RNA (1)...(19): siRNA sense strand
ccaaggaggagauuuuaua

SEQ ID NO: 137601 - RNA, 19 nt, Homo sapiens
  misc_RNA (1)...(19): siRNA sense strand
caggaagacgucaaaguga

SEQ ID NO: 137602 - RNA, 19 nt, Homo sapiens
  misc_RNA (1)...(19): siRNA sense strand
agaagaagaagcagaggaa

SEQ ID NO: 137603 - RNA, 19 nt, Homo sapiens
  misc_RNA (1)...(19): siRNA sense strand
gcagcgggcaucuggaaga

SEQ ID NO: 137604 - RNA, 19 nt, Homo sapiens
  misc_RNA (1)...(19): siRNA sense strand
cauccagccuaagguauga

SEQ ID NO: 137605 - RNA, 19 nt, Homo sapiens
  misc_RNA (1)...(19): siRNA sense strand
ugaggaggaugaggaugaa

SEQ ID NO: 137606 - RNA, 19 nt, Homo sapiens
  misc_RNA (1)...(19): siRNA sense strand
cagaagaggaacaggaaga

SEQ ID NO: 137607 - RNA, 19 nt, Homo sapiens
  misc_RNA (1)...(19): siRNA sense strand
aaaggaggcagaagaggaa

SEQ ID NO: 137608 - RNA, 19 nt, Homo sapiens
  misc_RNA (1)...(19): siRNA sense strand
gagcuucucccaccugucu

SEQ ID NO: 137609 - RNA, 19 nt, Homo sapiens
  misc_RNA (1)...(19): siRNA sense strand
gaugaggcaacgcggauga

SEQ ID NO: 137610 - RNA, 19 nt, Homo sapiens
  misc_RNA (1)...(19): siRNA sense strand
acacauccagccuaaggua

SEQ ID NO: 137611 - RNA, 19 nt, Homo sapiens
  misc_RNA (1)...(19): siRNA sense strand
uuauggagaggaauuauga

SEQ ID NO: 137612 - RNA, 19 nt, Homo sapiens
  misc_RNA (1)...(19): siRNA sense strand
gaagaggaggaggaagaaa

SEQ ID NO: 137613 - RNA, 19 nt, Homo sapiens
  misc_RNA (1)...(19): siRNA sense strand
ccucucaacucgacacucu

SEQ ID NO: 137614 - RNA, 19 nt, Homo sapiens
  misc_RNA (1)...(19): siRNA sense strand
aagaagaggaggaggaaga

SEQ ID NO: 137615 - RNA, 19 nt, Homo sapiens
  misc_RNA (1)...(19): siRNA sense strand
gaggaacagaugcucauuc

SEQ ID NO: 137616 - RNA, 19 nt, Homo sapiens
  misc_RNA (1)...(19): siRNA sense strand
ggcagaagaggaacaggaa

SEQ ID NO: 137617 - RNA, 19 nt, Homo sapiens
  misc_RNA (1)...(19): siRNA sense strand
acgucaaagugauguuaua

SEQ ID NO: 137618 - RNA, 19 nt, Homo sapiens
  misc_RNA (1)...(19): siRNA sense strand
aggaacagaugcucauucu

SEQ ID NO: 137619 - RNA, 19 nt, Homo sapiens
  misc_RNA (1)...(19): siRNA sense strand
cuccagcucuacucagauu

SEQ ID NO: 137620 - RNA, 19 nt, Homo sapiens
  misc_RNA (1)...(19): siRNA sense strand
gaagcacuguguccuaacc

SEQ ID NO: 137621 - RNA, 19 nt, Homo sapiens
  misc_RNA (1)...(19): siRNA sense strand
agacgucaaagugauguua

SEQ ID NO: 137622 - RNA, 19 nt, Homo sapiens
  misc_RNA (1)...(19): siRNA sense strand
aagaggaacaggaagaaga

SEQ ID NO: 137623 - RNA, 19 nt, Homo sapiens
  misc_RNA (1)...(19): siRNA sense strand
ggagacucuuccugguuuc

SEQ ID NO: 137624 - RNA, 19 nt, Homo sapiens
  misc_RNA (1)...(19): siRNA sense strand
agaaucaucagcugagaga

SEQ ID NO: 137625 - RNA, 19 nt, Homo sapiens
  misc_RNA (1)...(19): siRNA sense strand
aggaagacgucaaagugau

SEQ ID NO: 137626 - RNA, 19 nt, Homo sapiens
  misc_RNA (1)...(19): siRNA sense strand
gggcugagacugaaaaguu

SEQ ID NO: 137627 - RNA, 19 nt, Homo sapiens
  misc_RNA (1)...(19): siRNA sense strand
gaacaggaagaagaagaag

SEQ ID NO: 137628 - RNA, 19 nt, Homo sapiens
  misc_RNA (1)...(19): siRNA sense strand
ugaagaagaggaggaggaa

SEQ ID NO: 137629 - RNA, 19 nt, Homo sapiens
  misc_RNA (1)...(19): siRNA sense strand
cggacaagcugcagaucgu

SEQ ID NO: 137630 - RNA, 19 nt, Homo sapiens
  misc_RNA (1)...(19): siRNA sense strand
cucagaacgucucuaagga

SEQ ID NO: 137631 - RNA, 19 nt, Homo sapiens
  misc_RNA (1)...(19): siRNA sense strand
uggaguguguggagcaguu

SEQ ID NO: 137632 - RNA, 19 nt, Homo sapiens
  misc_RNA (1)...(19): siRNA sense strand
gaagacgucaaagugaugu

SEQ ID NO: 137633 - RNA, 19 nt, Homo sapiens
  misc_RNA (1)...(19): siRNA sense strand
uggaagccuugcaggagaa

SEQ ID NO: 137634 - RNA, 19 nt, Homo sapiens
  misc_RNA (1)...(19): siRNA sense strand
agaggaacaggaagaagaa

SEQ ID NO: 137635 - RNA, 19 nt, Homo sapiens
  misc_RNA (1)...(19): siRNA sense strand
gaagaugcuccagaaaggu

SEQ ID NO: 137636 - RNA, 19 nt, Homo sapiens
  misc_RNA (1)...(19): siRNA sense strand
agagagagagggaccugaa

SEQ ID NO: 137637 - RNA, 19 nt, Homo sapiens
  misc_RNA (1)...(19): siRNA sense strand
acucgacacucuugaggau

SEQ ID NO: 137638 - RNA, 19 nt, Homo sapiens
  misc_RNA (1)...(19): siRNA sense strand
aagaagaagcagaggaaga

SEQ ID NO: 137639 - RNA, 19 nt, Homo sapiens
  misc_RNA (1)...(19): siRNA sense strand
gaagaggaacaggaagaag

SEQ ID NO: 137640 - RNA, 19 nt, Homo sapiens
  misc_RNA (1)...(19): siRNA sense strand
ggaggccagccaacagaug

SEQ ID NO: 137641 - RNA, 19 nt, Homo sapiens
  misc_RNA (1)...(19): siRNA sense strand
ggggacacauccagccuaa

SEQ ID NO: 137642 - RNA, 19 nt, Homo sapiens
  misc_RNA (1)...(19): siRNA sense strand
ugggagagcguuaccuaug

SEQ ID NO: 137643 - RNA, 19 nt, Homo sapiens
  misc_RNA (1)...(19): siRNA sense strand
ccagaugcagcuccaggaa

SEQ ID NO: 137644 - RNA, 19 nt, Homo sapiens
  misc_RNA (1)...(19): siRNA sense strand
gaccugcagugugcucauc

SEQ ID NO: 137645 - RNA, 19 nt, Homo sapiens
  misc_RNA (1)...(19): siRNA sense strand
ugauuucgcaggaggcauu

SEQ ID NO: 137646 - RNA, 19 nt, Homo sapiens
  misc_RNA (1)...(19): siRNA sense strand
cgucaaagugauguuauau

SEQ ID NO: 137647 - RNA, 19 nt, Homo sapiens
  misc_RNA (1)...(19): siRNA sense strand
gaaaggcagcgggcaucug

SEQ ID NO: 137648 - RNA, 19 nt, Homo sapiens
  misc_RNA (1)...(19): siRNA sense strand
acaggaagaagaagaagca

SEQ ID NO: 137649 - RNA, 19 nt, Homo sapiens
  misc_RNA (1)...(19): siRNA sense strand
caccuggacaugaauuaug

SEQ ID NO: 137650 - RNA, 19 nt, Homo sapiens
  misc_RNA (1)...(19): siRNA sense strand
uggaggaggagaaucauca

SEQ ID NO: 137651 - RNA, 19 nt, Homo sapiens
  misc_RNA (1)...(19): siRNA sense strand
aggaugaggaugaagaaga

SEQ ID NO: 137652 - RNA, 19 nt, Homo sapiens
  misc_RNA (1)...(19): siRNA sense strand
ggaguguguggagcaguuu

SEQ ID NO: 137653 - RNA, 19 nt, Homo sapiens
  misc_RNA (1)...(19): siRNA sense strand
ucucaacucgacacucuug

SEQ ID NO: 137654 - RNA, 19 nt, Homo sapiens
  misc_RNA (1)...(19): siRNA sense strand
agaagaggaacaggaagaa

SEQ ID NO: 137655 - RNA, 19 nt, Homo sapiens
  misc_RNA (1)...(19): siRNA sense strand
ccaccaugcugcugaugaa

SEQ ID NO: 137656 - RNA, 19 nt, Homo sapiens
  misc_RNA (1)...(19): siRNA sense strand
ggccaagucugugccaaug

SEQ ID NO: 137657 - RNA, 19 nt, Homo sapiens
  misc_RNA (1)...(19): siRNA sense strand
gcguggaucccuucaucua

SEQ ID NO: 137658 - RNA, 19 nt, Homo sapiens
  misc_RNA (1)...(19): siRNA sense strand
gaugacagcacgcccucaa

SEQ ID NO: 137659 - RNA, 19 nt, Homo sapiens
  misc_RNA (1)...(19): siRNA sense strand
ucaccugccuggcgcuguu

SEQ ID NO: 137660 - RNA, 19 nt, Homo sapiens
  misc_RNA (1)...(19): siRNA sense strand
acucuauggucacauguau

SEQ ID NO: 137661 - RNA, 19 nt, Homo sapiens
  misc_RNA (1)...(19): siRNA sense strand
ccaagucugugccaaugac

SEQ ID NO: 137662 - RNA, 19 nt, Homo sapiens
  misc_RNA (1)...(19): siRNA sense strand
ugacagcacgcccucaauc

SEQ ID NO: 137663 - RNA, 19 nt, Homo sapiens
  misc_RNA (1)...(19): siRNA sense strand
uggccaugcugcugugcua

SEQ ID NO: 137664 - RNA, 19 nt, Homo sapiens
  misc_RNA (1)...(19): siRNA sense strand
guggaucccuucaucuacu

SEQ ID NO: 137665 - RNA, 19 nt, Homo sapiens
  misc_RNA (1)...(19): siRNA sense strand
uggaucccuucaucuacua

SEQ ID NO: 137666 - RNA, 19 nt, Homo sapiens
  misc_RNA (1)...(19): siRNA sense strand
cugcguggaucccuucauc

SEQ ID NO: 137667 - RNA, 19 nt, Homo sapiens
  misc_RNA (1)...(19): siRNA sense strand
gggcacccacuccucuuug

SEQ ID NO: 137668 - RNA, 19 nt, Homo sapiens
  misc_RNA (1)...(19): siRNA sense strand
ugcugcugcugcugcauua

SEQ ID NO: 137669 - RNA, 19 nt, Homo sapiens
  misc_RNA (1)...(19): siRNA sense strand
cuacgugucggccgaguuc

SEQ ID NO: 137670 - RNA, 19 nt, Homo sapiens
  misc_RNA (1)...(19): siRNA sense strand
uaaagaggcuucaaaucua

SEQ ID NO: 137671 - RNA, 19 nt, Homo sapiens
  misc_RNA (1)...(19): siRNA sense strand
gagcaugauuggaagcuuu

SEQ ID NO: 137672 - RNA, 19 nt, Homo sapiens
  misc_RNA (1)...(19): siRNA sense strand
aaagaggcuucaaaucuaa

SEQ ID NO: 137673 - RNA, 19 nt, Homo sapiens
  misc_RNA (1)...(19): siRNA sense strand
cuaccagucuaugauauua

SEQ ID NO: 137674 - RNA, 19 nt, Homo sapiens
  misc_RNA (1)...(19): siRNA sense strand
ggaaacccuuuguauaugg

SEQ ID NO: 137675 - RNA, 19 nt, Homo sapiens
  misc_RNA (1)...(19): siRNA sense strand
ugagaugucuggucugaau

SEQ ID NO: 137676 - RNA, 19 nt, Homo sapiens
  misc_RNA (1)...(19): siRNA sense strand
ucacuucguuuccagcuuu

SEQ ID NO: 137677 - RNA, 19 nt, Homo sapiens
  misc_RNA (1)...(19): siRNA sense strand
caagggagcaugauuggaa

SEQ ID NO: 137678 - RNA, 19 nt, Homo sapiens
  misc_RNA (1)...(19): siRNA sense strand
uaaagaggaagguguauug

SEQ ID NO: 137679 - RNA, 19 nt, Homo sapiens
  misc_RNA (1)...(19): siRNA sense strand
auuggaagcuuuaucgaua

SEQ ID NO: 137680 - RNA, 19 nt, Homo sapiens
  misc_RNA (1)...(19): siRNA sense strand
aaacacgacuucagguuca

SEQ ID NO: 137681 - RNA, 19 nt, Homo sapiens
  misc_RNA (1)...(19): siRNA sense strand
ggacauguggaucucuaua

SEQ ID NO: 137682 - RNA, 19 nt, Homo sapiens
  misc_RNA (1)...(19): siRNA sense strand
ccaccgauguucuaaagau

SEQ ID NO: 137683 - RNA, 19 nt, Homo sapiens
  misc_RNA (1)...(19): siRNA sense strand
uguauuggcucucuauuca

SEQ ID NO: 137684 - RNA, 19 nt, Homo sapiens
  misc_RNA (1)...(19): siRNA sense strand
gagcuaccagucuaugaua

SEQ ID NO: 137685 - RNA, 19 nt, Homo sapiens
  misc_RNA (1)...(19): siRNA sense strand
gaacucgcaugaugaacca

SEQ ID NO: 137686 - RNA, 19 nt, Homo sapiens
  misc_RNA (1)...(19): siRNA sense strand
gguagugucaggagugaua

SEQ ID NO: 137687 - RNA, 19 nt, Homo sapiens
  misc_RNA (1)...(19): siRNA sense strand
cuaaagaggcuucaaaucu

SEQ ID NO: 137688 - RNA, 19 nt, Homo sapiens
  misc_RNA (1)...(19): siRNA sense strand
cgauauauaccaacaagaa

SEQ ID NO: 137689 - RNA, 19 nt, Homo sapiens
  misc_RNA (1)...(19): siRNA sense strand
gauguuccaugcgcuguuu

SEQ ID NO: 137690 - RNA, 19 nt, Homo sapiens
  misc_RNA (1)...(19): siRNA sense strand
guagaacguuuagaagaug

SEQ ID NO: 137691 - RNA, 19 nt, Homo sapiens
  misc_RNA (1)...(19): siRNA sense strand
gcuaagacaagcaucauau

SEQ ID NO: 137692 - RNA, 19 nt, Homo sapiens
  misc_RNA (1)...(19): siRNA sense strand
gaugggcgauacaauuuua

SEQ ID NO: 137693 - RNA, 19 nt, Homo sapiens
  misc_RNA (1)...(19): siRNA sense strand
caugagaugucuggucuga

SEQ ID NO: 137694 - RNA, 19 nt, Homo sapiens
  misc_RNA (1)...(19): siRNA sense strand
cguagaacguuuagaagau

SEQ ID NO: 137695 - RNA, 19 nt, Homo sapiens
  misc_RNA (1)...(19): siRNA sense strand
gaauuggaaacccuuugua

SEQ ID NO: 137696 - RNA, 19 nt, Homo sapiens
  misc_RNA (1)...(19): siRNA sense strand
guucaaggccaaagcauug

SEQ ID NO: 137697 - RNA, 19 nt, Homo sapiens
  misc_RNA (1)...(19): siRNA sense strand
ugucuggucugaauuggaa

SEQ ID NO: 137698 - RNA, 19 nt, Homo sapiens
  misc_RNA (1)...(19): siRNA sense strand
gacauguggaucucuauaa

SEQ ID NO: 137699 - RNA, 19 nt, Homo sapiens
  misc_RNA (1)...(19): siRNA sense strand
gaagguguauuggcucucu

SEQ ID NO: 137700 - RNA, 19 nt, Homo sapiens
  misc_RNA (1)...(19): siRNA sense strand
guggaaacaugagggcuuu

SEQ ID NO: 137701 - RNA, 19 nt, Homo sapiens
  misc_RNA (1)...(19): siRNA sense strand
uggaagcuuuaucgauaua

SEQ ID NO: 137702 - RNA, 19 nt, Homo sapiens
  misc_RNA (1)...(19): siRNA sense strand
gguucgaacucgcaugaug

SEQ ID NO: 137703 - RNA, 19 nt, Homo sapiens
  misc_RNA (1)...(19): siRNA sense strand
uaagggcacuguugauggu

SEQ ID NO: 137704 - RNA, 19 nt, Homo sapiens
  misc_RNA (1)...(19): siRNA sense strand
ugucaggagugauaucuuc

SEQ ID NO: 137705 - RNA, 19 nt, Homo sapiens
  misc_RNA (1)...(19): siRNA sense strand
uggaaacccuuuguauaug

SEQ ID NO: 137706 - RNA, 19 nt, Homo sapiens
  misc_RNA (1)...(19): siRNA sense strand
uuggaaacccuuuguauau

SEQ ID NO: 137707 - RNA, 19 nt, Homo sapiens
  misc_RNA (1)...(19): siRNA sense strand
ggaaugaugggcgauacaa

SEQ ID NO: 137708 - RNA, 19 nt, Homo sapiens
  misc_RNA (1)...(19): siRNA sense strand
ugccaucguuguaggagua

SEQ ID NO: 137709 - RNA, 19 nt, Homo sapiens
  misc_RNA (1)...(19): siRNA sense strand
guaaagaggaagguguauu

SEQ ID NO: 137710 - RNA, 19 nt, Homo sapiens
  misc_RNA (1)...(19): siRNA sense strand
uggcugaguuugggacuuu

SEQ ID NO: 137711 - RNA, 19 nt, Homo sapiens
  misc_RNA (1)...(19): siRNA sense strand
gggcacuguugaugguauu

SEQ ID NO: 137712 - RNA, 19 nt, Homo sapiens
  misc_RNA (1)...(19): siRNA sense strand
cagcuaaagaggcuucaaa

SEQ ID NO: 137713 - RNA, 19 nt, Homo sapiens
  misc_RNA (1)...(19): siRNA sense strand
guaccacuguaagucauga

SEQ ID NO: 137714 - RNA, 19 nt, Homo sapiens
  misc_RNA (1)...(19): siRNA sense strand
caccgauguucuaaagauu

SEQ ID NO: 137715 - RNA, 19 nt, Homo sapiens
  misc_RNA (1)...(19): siRNA sense strand
gcuaaagaggcuucaaauc

SEQ ID NO: 137716 - RNA, 19 nt, Homo sapiens
  misc_RNA (1)...(19): siRNA sense strand
uagaacguuuagaagauga

SEQ ID NO: 137717 - RNA, 19 nt, Homo sapiens
  misc_RNA (1)...(19): siRNA sense strand
aaugaugggcgauacaauu

SEQ ID NO: 137718 - RNA, 19 nt, Homo sapiens
  misc_RNA (1)...(19): siRNA sense strand
gcuaccagucuaugauauu

SEQ ID NO: 137719 - RNA, 19 nt, Homo sapiens
  misc_RNA (1)...(19): siRNA sense strand
gaugcccguuucaaagaga

SEQ ID NO: 137720 - RNA, 19 nt, Homo sapiens
  misc_RNA (1)...(19): siRNA sense strand
uuacauacgagcagcuaaa

SEQ ID NO: 137721 - RNA, 19 nt, Homo sapiens
  misc_RNA (1)...(19): siRNA sense strand
gcuuauucguagaacguuu

SEQ ID NO: 137722 - RNA, 19 nt, Homo sapiens
  misc_RNA (1)...(19): siRNA sense strand
gaagcgcuuauucguagaa

SEQ ID NO: 137723 - RNA, 19 nt, Homo sapiens
  misc_RNA (1)...(19): siRNA sense strand
ucgcaucuguaaagaggaa

SEQ ID NO: 137724 - RNA, 19 nt, Homo sapiens
  misc_RNA (1)...(19): siRNA sense strand
ccagaaaaguaccacugua

SEQ ID NO: 137725 - RNA, 19 nt, Homo sapiens
  misc_RNA (1)...(19): siRNA sense strand
gaacguuuagaagaugaaa

SEQ ID NO: 137726 - RNA, 19 nt, Homo sapiens
  misc_RNA (1)...(19): siRNA sense strand
guucgaacucgcaugauga

SEQ ID NO: 137727 - RNA, 19 nt, Homo sapiens
  misc_RNA (1)...(19): siRNA sense strand
cacuguaagucaugagaug

SEQ ID NO: 137728 - RNA, 19 nt, Homo sapiens
  misc_RNA (1)...(19): siRNA sense strand
gcgauacaauuuuaacuca

SEQ ID NO: 137729 - RNA, 19 nt, Homo sapiens
  misc_RNA (1)...(19): siRNA sense strand
uaagacaagcaucauaugg

SEQ ID NO: 137730 - RNA, 19 nt, Homo sapiens
  misc_RNA (1)...(19): siRNA sense strand
gugauaucuuccacuauag

SEQ ID NO: 137731 - RNA, 19 nt, Homo sapiens
  misc_RNA (1)...(19): siRNA sense strand
guuuccagcuuuacaugug

SEQ ID NO: 137732 - RNA, 19 nt, Homo sapiens
  misc_RNA (1)...(19): siRNA sense strand
gaaugaugggcgauacaau

SEQ ID NO: 137733 - RNA, 19 nt, Homo sapiens
  misc_RNA (1)...(19): siRNA sense strand
gauauauaccaacaagaag

SEQ ID NO: 137734 - RNA, 19 nt, Homo sapiens
  misc_RNA (1)...(19): siRNA sense strand
gauuggaagcuuuaucgau

SEQ ID NO: 137735 - RNA, 19 nt, Homo sapiens
  misc_RNA (1)...(19): siRNA sense strand
gaaaaguaccacuguaagu

SEQ ID NO: 137736 - RNA, 19 nt, Homo sapiens
  misc_RNA (1)...(19): siRNA sense strand
acauguggaucucuauaag

SEQ ID NO: 137737 - RNA, 19 nt, Homo sapiens
  misc_RNA (1)...(19): siRNA sense strand
aaaguaccacuguaaguca

SEQ ID NO: 137738 - RNA, 19 nt, Homo sapiens
  misc_RNA (1)...(19): siRNA sense strand
ggagcaugauuggaagcuu

SEQ ID NO: 137739 - RNA, 19 nt, Homo sapiens
  misc_RNA (1)...(19): siRNA sense strand
ggauuuaccaaagcuugaa

SEQ ID NO: 137740 - RNA, 19 nt, Homo sapiens
  misc_RNA (1)...(19): siRNA sense strand
cauacgagcagcuaaagag

SEQ ID NO: 137741 - RNA, 19 nt, Homo sapiens
  misc_RNA (1)...(19): siRNA sense strand
uauaagggcacuguugaug

SEQ ID NO: 137742 - RNA, 19 nt, Homo sapiens
  misc_RNA (1)...(19): siRNA sense strand
ugggacauguggaucucua

SEQ ID NO: 137743 - RNA, 19 nt, Homo sapiens
  misc_RNA (1)...(19): siRNA sense strand
gggauuuaccaaagcuuga

SEQ ID NO: 137744 - RNA, 19 nt, Homo sapiens
  misc_RNA (1)...(19): siRNA sense strand
auuggaaacccuuuguaua

SEQ ID NO: 137745 - RNA, 19 nt, Homo sapiens
  misc_RNA (1)...(19): siRNA sense strand
ucuauaagggcacuguuga

SEQ ID NO: 137746 - RNA, 19 nt, Homo sapiens
  misc_RNA (1)...(19): siRNA sense strand
cccggaauaauccuaauuu

SEQ ID NO: 137747 - RNA, 19 nt, Homo sapiens
  misc_RNA (1)...(19): siRNA sense strand
cgaaugcaggcucaaggaa

SEQ ID NO: 137748 - RNA, 19 nt, Homo sapiens
  misc_RNA (1)...(19): siRNA sense strand
gggcaaucgugggacaugu

SEQ ID NO: 137749 - RNA, 19 nt, Homo sapiens
  misc_RNA (1)...(19): siRNA sense strand
cuuggacccuggaacauca

SEQ ID NO: 137750 - RNA, 19 nt, Homo sapiens
  misc_RNA (1)...(19): siRNA sense strand
cagaaaaguaccacuguaa

SEQ ID NO: 137751 - RNA, 19 nt, Homo sapiens
  misc_RNA (1)...(19): siRNA sense strand
cuuauucguagaacguuua

SEQ ID NO: 137752 - RNA, 19 nt, Homo sapiens
  misc_RNA (1)...(19): siRNA sense strand
gguucaaggccaaagcauu

SEQ ID NO: 137753 - RNA, 19 nt, Homo sapiens
  misc_RNA (1)...(19): siRNA sense strand
aauauugucaggaaugaug

SEQ ID NO: 137754 - RNA, 19 nt, Homo sapiens
  misc_RNA (1)...(19): siRNA sense strand
gauguucuaaagauucgaa

SEQ ID NO: 137755 - RNA, 19 nt, Homo sapiens
  misc_RNA (1)...(19): siRNA sense strand
uagccaaucccaccgaugu

SEQ ID NO: 137756 - RNA, 19 nt, Homo sapiens
  misc_RNA (1)...(19): siRNA sense strand
gaauugcuccugcguugcu

SEQ ID NO: 137757 - RNA, 19 nt, Homo sapiens
  misc_RNA (1)...(19): siRNA sense strand
ucccaccgauguucuaaag

SEQ ID NO: 137758 - RNA, 19 nt, Homo sapiens
  misc_RNA (1)...(19): siRNA sense strand
cuaagacaagcaucauaug

SEQ ID NO: 137759 - RNA, 19 nt, Homo sapiens
  misc_RNA (1)...(19): siRNA sense strand
ggacccuggaacaucauuu

SEQ ID NO: 137760 - RNA, 19 nt, Homo sapiens
  misc_RNA (1)...(19): siRNA sense strand
ugcacucuauaaaggauuu

SEQ ID NO: 137761 - RNA, 19 nt, Homo sapiens
  misc_RNA (1)...(19): siRNA sense strand
ccucuaucguggcugaguu

SEQ ID NO: 137762 - RNA, 19 nt, Homo sapiens
  misc_RNA (1)...(19): siRNA sense strand
uuggaagcuuuaucgauau

SEQ ID NO: 137763 - RNA, 19 nt, Homo sapiens
  misc_RNA (1)...(19): siRNA sense strand
ugaauuggaaacccuuugu

SEQ ID NO: 137764 - RNA, 19 nt, Homo sapiens
  misc_RNA (1)...(19): siRNA sense strand
gagaugucuggucugaauu

SEQ ID NO: 137765 - RNA, 19 nt, Homo sapiens
  misc_RNA (1)...(19): siRNA sense strand
augaugggcgauacaauuu

SEQ ID NO: 137766 - RNA, 19 nt, Homo sapiens
  misc_RNA (1)...(19): siRNA sense strand
ucguagaacguuuagaaga

SEQ ID NO: 137767 - RNA, 19 nt, Homo sapiens
  misc_RNA (1)...(19): siRNA sense strand
cuugaagcgcuuauucgua

SEQ ID NO: 137768 - RNA, 19 nt, Homo sapiens
  misc_RNA (1)...(19): siRNA sense strand
auucguagaacguuuagaa

SEQ ID NO: 137769 - RNA, 19 nt, Homo sapiens
  misc_RNA (1)...(19): siRNA sense strand
caaucccaccgauguucua

SEQ ID NO: 137770 - RNA, 19 nt, Homo sapiens
  misc_RNA (1)...(19): siRNA sense strand
uaaagaggcuucaaaucua

SEQ ID NO: 137771 - RNA, 19 nt, Homo sapiens
  misc_RNA (1)...(19): siRNA sense strand
gagcaugauuggaagcuuu

SEQ ID NO: 137772 - RNA, 19 nt, Homo sapiens
  misc_RNA (1)...(19): siRNA sense strand
aaagaggcuucaaaucuaa

SEQ ID NO: 137773 - RNA, 19 nt, Homo sapiens
  misc_RNA (1)...(19): siRNA sense strand
cuaccagucuaugauauua

SEQ ID NO: 137774 - RNA, 19 nt, Homo sapiens
  misc_RNA (1)...(19): siRNA sense strand
ggaaacccuuuguauaugg

SEQ ID NO: 137775 - RNA, 19 nt, Homo sapiens
  misc_RNA (1)...(19): siRNA sense strand
ugagaugucuggucugaau

SEQ ID NO: 137776 - RNA, 19 nt, Homo sapiens
  misc_RNA (1)...(19): siRNA sense strand
ucacuucguuuccagcuuu

SEQ ID NO: 137777 - RNA, 19 nt, Homo sapiens
  misc_RNA (1)...(19): siRNA sense strand
caagggagcaugauuggaa

SEQ ID NO: 137778 - RNA, 19 nt, Homo sapiens
  misc_RNA (1)...(19): siRNA sense strand
uaaagaggaagguguauug

SEQ ID NO: 137779 - RNA, 19 nt, Homo sapiens
  misc_RNA (1)...(19): siRNA sense strand
auuggaagcuuuaucgaua

SEQ ID NO: 137780 - RNA, 19 nt, Homo sapiens
  misc_RNA (1)...(19): siRNA sense strand
aaacacgacuucagguuca

SEQ ID NO: 137781 - RNA, 19 nt, Homo sapiens
  misc_RNA (1)...(19): siRNA sense strand
ggacauguggaucucuaua

SEQ ID NO: 137782 - RNA, 19 nt, Homo sapiens
  misc_RNA (1)...(19): siRNA sense strand
ccaccgauguucuaaagau

SEQ ID NO: 137783 - RNA, 19 nt, Homo sapiens
  misc_RNA (1)...(19): siRNA sense strand
uguauuggcucucuauuca

SEQ ID NO: 137784 - RNA, 19 nt, Homo sapiens
  misc_RNA (1)...(19): siRNA sense strand
gagcuaccagucuaugaua

SEQ ID NO: 137785 - RNA, 19 nt, Homo sapiens
  misc_RNA (1)...(19): siRNA sense strand
gaacucgcaugaugaacca

SEQ ID NO: 137786 - RNA, 19 nt, Homo sapiens
  misc_RNA (1)...(19): siRNA sense strand
gguagugucaggagugaua

SEQ ID NO: 137787 - RNA, 19 nt, Homo sapiens
  misc_RNA (1)...(19): siRNA sense strand
cuaaagaggcuucaaaucu

SEQ ID NO: 137788 - RNA, 19 nt, Homo sapiens
  misc_RNA (1)...(19): siRNA sense strand
cgauauauaccaacaagaa

SEQ ID NO: 137789 - RNA, 19 nt, Homo sapiens
  misc_RNA (1)...(19): siRNA sense strand
gauguuccaugcgcuguuu

SEQ ID NO: 137790 - RNA, 19 nt, Homo sapiens
  misc_RNA (1)...(19): siRNA sense strand
guagaacguuuagaagaug

SEQ ID NO: 137791 - RNA, 19 nt, Homo sapiens
  misc_RNA (1)...(19): siRNA sense strand
gcuaagacaagcaucauau

SEQ ID NO: 137792 - RNA, 19 nt, Homo sapiens
  misc_RNA (1)...(19): siRNA sense strand
gaugggcgauacaauuuua

SEQ ID NO: 137793 - RNA, 19 nt, Homo sapiens
  misc_RNA (1)...(19): siRNA sense strand
caugagaugucuggucuga

SEQ ID NO: 137794 - RNA, 19 nt, Homo sapiens
  misc_RNA (1)...(19): siRNA sense strand
cguagaacguuuagaagau

SEQ ID NO: 137795 - RNA, 19 nt, Homo sapiens
  misc_RNA (1)...(19): siRNA sense strand
gaauuggaaacccuuugua

SEQ ID NO: 137796 - RNA, 19 nt, Homo sapiens
  misc_RNA (1)...(19): siRNA sense strand
guucaaggccaaagcauug

SEQ ID NO: 137797 - RNA, 19 nt, Homo sapiens
  misc_RNA (1)...(19): siRNA sense strand
ugucuggucugaauuggaa

SEQ ID NO: 137798 - RNA, 19 nt, Homo sapiens
  misc_RNA (1)...(19): siRNA sense strand
gacauguggaucucuauaa

SEQ ID NO: 137799 - RNA, 19 nt, Homo sapiens
  misc_RNA (1)...(19): siRNA sense strand
gaagguguauuggcucucu

SEQ ID NO: 137800 - RNA, 19 nt, Homo sapiens
  misc_RNA (1)...(19): siRNA sense strand
guggaaacaugagggcuuu

SEQ ID NO: 137801 - RNA, 19 nt, Homo sapiens
  misc_RNA (1)...(19): siRNA sense strand
uggaagcuuuaucgauaua

SEQ ID NO: 137802 - RNA, 19 nt, Homo sapiens
  misc_RNA (1)...(19): siRNA sense strand
gguucgaacucgcaugaug

SEQ ID NO: 137803 - RNA, 19 nt, Homo sapiens
  misc_RNA (1)...(19): siRNA sense strand
uaagggcacuguugauggu

SEQ ID NO: 137804 - RNA, 19 nt, Homo sapiens
  misc_RNA (1)...(19): siRNA sense strand
ugucaggagugauaucuuc

SEQ ID NO: 137805 - RNA, 19 nt, Homo sapiens
  misc_RNA (1)...(19): siRNA sense strand
uggaaacccuuuguauaug

SEQ ID NO: 137806 - RNA, 19 nt, Homo sapiens
  misc_RNA (1)...(19): siRNA sense strand
uuggaaacccuuuguauau

SEQ ID NO: 137807 - RNA, 19 nt, Homo sapiens
  misc_RNA (1)...(19): siRNA sense strand
ggaaugaugggcgauacaa

SEQ ID NO: 137808 - RNA, 19 nt, Homo sapiens
  misc_RNA (1)...(19): siRNA sense strand
ugccaucguuguaggagua

SEQ ID NO: 137809 - RNA, 19 nt, Homo sapiens
  misc_RNA (1)...(19): siRNA sense strand
guaaagaggaagguguauu

SEQ ID NO: 137810 - RNA, 19 nt, Homo sapiens
  misc_RNA (1)...(19): siRNA sense strand
uggcugaguuugggacuuu

SEQ ID NO: 137811 - RNA, 19 nt, Homo sapiens
  misc_RNA (1)...(19): siRNA sense strand
gggcacuguugaugguauu

SEQ ID NO: 137812 - RNA, 19 nt, Homo sapiens
  misc_RNA (1)...(19): siRNA sense strand
cagcuaaagaggcuucaaa

SEQ ID NO: 137813 - RNA, 19 nt, Homo sapiens
  misc_RNA (1)...(19): siRNA sense strand
guaccacuguaagucauga

SEQ ID NO: 137814 - RNA, 19 nt, Homo sapiens
  misc_RNA (1)...(19): siRNA sense strand
caccgauguucuaaagauu

SEQ ID NO: 137815 - RNA, 19 nt, Homo sapiens
  misc_RNA (1)...(19): siRNA sense strand
gcuaaagaggcuucaaauc

SEQ ID NO: 137816 - RNA, 19 nt, Homo sapiens
  misc_RNA (1)...(19): siRNA sense strand
uagaacguuuagaagauga

SEQ ID NO: 137817 - RNA, 19 nt, Homo sapiens
  misc_RNA (1)...(19): siRNA sense strand
aaugaugggcgauacaauu

SEQ ID NO: 137818 - RNA, 19 nt, Homo sapiens
  misc_RNA (1)...(19): siRNA sense strand
gcuaccagucuaugauauu

SEQ ID NO: 137819 - RNA, 19 nt, Homo sapiens
  misc_RNA (1)...(19): siRNA sense strand
gaugcccguuucaaagaga

SEQ ID NO: 137820 - RNA, 19 nt, Homo sapiens
  misc_RNA (1)...(19): siRNA sense strand
uuacauacgagcagcuaaa

SEQ ID NO: 137821 - RNA, 19 nt, Homo sapiens
  misc_RNA (1)...(19): siRNA sense strand
gcuuauucguagaacguuu

SEQ ID NO: 137822 - RNA, 19 nt, Homo sapiens
  misc_RNA (1)...(19): siRNA sense strand
gaagcgcuuauucguagaa

SEQ ID NO: 137823 - RNA, 19 nt, Homo sapiens
  misc_RNA (1)...(19): siRNA sense strand
ucgcaucuguaaagaggaa

SEQ ID NO: 137824 - RNA, 19 nt, Homo sapiens
  misc_RNA (1)...(19): siRNA sense strand
ccagaaaaguaccacugua

SEQ ID NO: 137825 - RNA, 19 nt, Homo sapiens
  misc_RNA (1)...(19): siRNA sense strand
gaacguuuagaagaugaaa

SEQ ID NO: 137826 - RNA, 19 nt, Homo sapiens
  misc_RNA (1)...(19): siRNA sense strand
guucgaacucgcaugauga

SEQ ID NO: 137827 - RNA, 19 nt, Homo sapiens
  misc_RNA (1)...(19): siRNA sense strand
cacuguaagucaugagaug

SEQ ID NO: 137828 - RNA, 19 nt, Homo sapiens
  misc_RNA (1)...(19): siRNA sense strand
gcgauacaauuuuaacuca

SEQ ID NO: 137829 - RNA, 19 nt, Homo sapiens
  misc_RNA (1)...(19): siRNA sense strand
uaagacaagcaucauaugg

SEQ ID NO: 137830 - RNA, 19 nt, Homo sapiens
  misc_RNA (1)...(19): siRNA sense strand
gugauaucuuccacuauag

SEQ ID NO: 137831 - RNA, 19 nt, Homo sapiens
  misc_RNA (1)...(19): siRNA sense strand
guuuccagcuuuacaugug

SEQ ID NO: 137832 - RNA, 19 nt, Homo sapiens
  misc_RNA (1)...(19): siRNA sense strand
gaaugaugggcgauacaau

SEQ ID NO: 137833 - RNA, 19 nt, Homo sapiens
  misc_RNA (1)...(19): siRNA sense strand
gauauauaccaacaagaag

SEQ ID NO: 137834 - RNA, 19 nt, Homo sapiens
  misc_RNA (1)...(19): siRNA sense strand
gauuggaagcuuuaucgau

SEQ ID NO: 137835 - RNA, 19 nt, Homo sapiens
  misc_RNA (1)...(19): siRNA sense strand
gaaaaguaccacuguaagu

SEQ ID NO: 137836 - RNA, 19 nt, Homo sapiens
  misc_RNA (1)...(19): siRNA sense strand
acauguggaucucuauaag

SEQ ID NO: 137837 - RNA, 19 nt, Homo sapiens
  misc_RNA (1)...(19): siRNA sense strand
aaaguaccacuguaaguca

SEQ ID NO: 137838 - RNA, 19 nt, Homo sapiens
  misc_RNA (1)...(19): siRNA sense strand
ggagcaugauuggaagcuu

SEQ ID NO: 137839 - RNA, 19 nt, Homo sapiens
  misc_RNA (1)...(19): siRNA sense strand
ggauuuaccaaagcuugaa

SEQ ID NO: 137840 - RNA, 19 nt, Homo sapiens
  misc_RNA (1)...(19): siRNA sense strand
cauacgagcagcuaaagag

SEQ ID NO: 137841 - RNA, 19 nt, Homo sapiens
  misc_RNA (1)...(19): siRNA sense strand
uauaagggcacuguugaug

SEQ ID NO: 137842 - RNA, 19 nt, Homo sapiens
  misc_RNA (1)...(19): siRNA sense strand
ugggacauguggaucucua

SEQ ID NO: 137843 - RNA, 19 nt, Homo sapiens
  misc_RNA (1)...(19): siRNA sense strand
gggauuuaccaaagcuuga

SEQ ID NO: 137844 - RNA, 19 nt, Homo sapiens
  misc_RNA (1)...(19): siRNA sense strand
auuggaaacccuuuguaua

SEQ ID NO: 137845 - RNA, 19 nt, Homo sapiens
  misc_RNA (1)...(19): siRNA sense strand
ucuauaagggcacuguuga

SEQ ID NO: 137846 - RNA, 19 nt, Homo sapiens
  misc_RNA (1)...(19): siRNA sense strand
cccggaauaauccuaauuu

SEQ ID NO: 137847 - RNA, 19 nt, Homo sapiens
  misc_RNA (1)...(19): siRNA sense strand
cgaaugcaggcucaaggaa

SEQ ID NO: 137848 - RNA, 19 nt, Homo sapiens
  misc_RNA (1)...(19): siRNA sense strand
gggcaaucgugggacaugu

SEQ ID NO: 137849 - RNA, 19 nt, Homo sapiens
  misc_RNA (1)...(19): siRNA sense strand
cuuggacccuggaacauca

SEQ ID NO: 137850 - RNA, 19 nt, Homo sapiens
  misc_RNA (1)...(19): siRNA sense strand
cagaaaaguaccacuguaa

SEQ ID NO: 137851 - RNA, 19 nt, Homo sapiens
  misc_RNA (1)...(19): siRNA sense strand
cuuauucguagaacguuua

SEQ ID NO: 137852 - RNA, 19 nt, Homo sapiens
  misc_RNA (1)...(19): siRNA sense strand
gguucaaggccaaagcauu

SEQ ID NO: 137853 - RNA, 19 nt, Homo sapiens
  misc_RNA (1)...(19): siRNA sense strand
aauauugucaggaaugaug

SEQ ID NO: 137854 - RNA, 19 nt, Homo sapiens
  misc_RNA (1)...(19): siRNA sense strand
gauguucuaaagauucgaa

SEQ ID NO: 137855 - RNA, 19 nt, Homo sapiens
  misc_RNA (1)...(19): siRNA sense strand
uagccaaucccaccgaugu

SEQ ID NO: 137856 - RNA, 19 nt, Homo sapiens
  misc_RNA (1)...(19): siRNA sense strand
gaauugcuccugcguugcu

SEQ ID NO: 137857 - RNA, 19 nt, Homo sapiens
  misc_RNA (1)...(19): siRNA sense strand
ucccaccgauguucuaaag

SEQ ID NO: 137858 - RNA, 19 nt, Homo sapiens
  misc_RNA (1)...(19): siRNA sense strand
cuaagacaagcaucauaug

SEQ ID NO: 137859 - RNA, 19 nt, Homo sapiens
  misc_RNA (1)...(19): siRNA sense strand
ggacccuggaacaucauuu

SEQ ID NO: 137860 - RNA, 19 nt, Homo sapiens
  misc_RNA (1)...(19): siRNA sense strand
ugcacucuauaaaggauuu

SEQ ID NO: 137861 - RNA, 19 nt, Homo sapiens
  misc_RNA (1)...(19): siRNA sense strand
ccucuaucguggcugaguu

SEQ ID NO: 137862 - RNA, 19 nt, Homo sapiens
  misc_RNA (1)...(19): siRNA sense strand
uuggaagcuuuaucgauau

SEQ ID NO: 137863 - RNA, 19 nt, Homo sapiens
  misc_RNA (1)...(19): siRNA sense strand
ugaauuggaaacccuuugu

SEQ ID NO: 137864 - RNA, 19 nt, Homo sapiens
  misc_RNA (1)...(19): siRNA sense strand
gagaugucuggucugaauu

SEQ ID NO: 137865 - RNA, 19 nt, Homo sapiens
  misc_RNA (1)...(19): siRNA sense strand
augaugggcgauacaauuu

SEQ ID NO: 137866 - RNA, 19 nt, Homo sapiens
  misc_RNA (1)...(19): siRNA sense strand
ucguagaacguuuagaaga

SEQ ID NO: 137867 - RNA, 19 nt, Homo sapiens
  misc_RNA (1)...(19): siRNA sense strand
cuugaagcgcuuauucgua

SEQ ID NO: 137868 - RNA, 19 nt, Homo sapiens
  misc_RNA (1)...(19): siRNA sense strand
auucguagaacguuuagaa

SEQ ID NO: 137869 - RNA, 19 nt, Homo sapiens
  misc_RNA (1)...(19): siRNA sense strand
caaucccaccgauguucua

SEQ ID NO: 137870 - RNA, 19 nt, Homo sapiens
  misc_RNA (1)...(19): siRNA sense strand
gaucagaacuccacaaacu

SEQ ID NO: 137871 - RNA, 19 nt, Homo sapiens
  misc_RNA (1)...(19): siRNA sense strand
caaauacagucucuuaaug

SEQ ID NO: 137872 - RNA, 19 nt, Homo sapiens
  misc_RNA (1)...(19): siRNA sense strand
ggaagaaacggaagaagaa

SEQ ID NO: 137873 - RNA, 19 nt, Homo sapiens
  misc_RNA (1)...(19): siRNA sense strand
ggauugaccucacccagaa

SEQ ID NO: 137874 - RNA, 19 nt, Homo sapiens
  misc_RNA (1)...(19): siRNA sense strand
gagaagaacccaucaaagg

SEQ ID NO: 137875 - RNA, 19 nt, Homo sapiens
  misc_RNA (1)...(19): siRNA sense strand
aaacagagcuccgucuaca

SEQ ID NO: 137876 - RNA, 19 nt, Homo sapiens
  misc_RNA (1)...(19): siRNA sense strand
gcagcuggaaauagaauua

SEQ ID NO: 137877 - RNA, 19 nt, Homo sapiens
  misc_RNA (1)...(19): siRNA sense strand
gauccugaaugacgugauu

SEQ ID NO: 137878 - RNA, 19 nt, Homo sapiens
  misc_RNA (1)...(19): siRNA sense strand
ugaaugacgugauuaccaa

SEQ ID NO: 137879 - RNA, 19 nt, Homo sapiens
  misc_RNA (1)...(19): siRNA sense strand
guauggagcugugagagaa

SEQ ID NO: 137880 - RNA, 19 nt, Homo sapiens
  misc_RNA (1)...(19): siRNA sense strand
ggaagaagaagagcucaaa

SEQ ID NO: 137881 - RNA, 19 nt, Homo sapiens
  misc_RNA (1)...(19): siRNA sense strand
gauggcaugugcaggauug

SEQ ID NO: 137882 - RNA, 19 nt, Homo sapiens
  misc_RNA (1)...(19): siRNA sense strand
ccagaauugucccuuugua

SEQ ID NO: 137883 - RNA, 19 nt, Homo sapiens
  misc_RNA (1)...(19): siRNA sense strand
gggaaagcgucgcagcaaa

SEQ ID NO: 137884 - RNA, 19 nt, Homo sapiens
  misc_RNA (1)...(19): siRNA sense strand
ucaagccaguggauuauga

SEQ ID NO: 137885 - RNA, 19 nt, Homo sapiens
  misc_RNA (1)...(19): siRNA sense strand
cagcaaagcccggaagaaa

SEQ ID NO: 137886 - RNA, 19 nt, Homo sapiens
  misc_RNA (1)...(19): siRNA sense strand
gaaagugggagauccugaa

SEQ ID NO: 137887 - RNA, 19 nt, Homo sapiens
  misc_RNA (1)...(19): siRNA sense strand
cgccaaaucaagccaauua

SEQ ID NO: 137888 - RNA, 19 nt, Homo sapiens
  misc_RNA (1)...(19): siRNA sense strand
gagaauagccaagaguuca

SEQ ID NO: 137889 - RNA, 19 nt, Homo sapiens
  misc_RNA (1)...(19): siRNA sense strand
ccaaauacagucucuuaau

SEQ ID NO: 137890 - RNA, 19 nt, Homo sapiens
  misc_RNA (1)...(19): siRNA sense strand
guccaaauacagucucuua

SEQ ID NO: 137891 - RNA, 19 nt, Homo sapiens
  misc_RNA (1)...(19): siRNA sense strand
agugggagauccugaauga

SEQ ID NO: 137892 - RNA, 19 nt, Homo sapiens
  misc_RNA (1)...(19): siRNA sense strand
gaaccgggcacuacagcaa

SEQ ID NO: 137893 - RNA, 19 nt, Homo sapiens
  misc_RNA (1)...(19): siRNA sense strand
ucaaaggccucucaaagcu

SEQ ID NO: 137894 - RNA, 19 nt, Homo sapiens
  misc_RNA (1)...(19): siRNA sense strand
ucaccaagccucugaagga

SEQ ID NO: 137895 - RNA, 19 nt, Homo sapiens
  misc_RNA (1)...(19): siRNA sense strand
ggagaagagcccuguguuc

SEQ ID NO: 137896 - RNA, 19 nt, Homo sapiens
  misc_RNA (1)...(19): siRNA sense strand
ugagcaaacuggccugugu

SEQ ID NO: 137897 - RNA, 19 nt, Homo sapiens
  misc_RNA (1)...(19): siRNA sense strand
ggaaagcgucgcagcaaag

SEQ ID NO: 137898 - RNA, 19 nt, Homo sapiens
  misc_RNA (1)...(19): siRNA sense strand
caucaaaggccucucaaag

SEQ ID NO: 137899 - RNA, 19 nt, Homo sapiens
  misc_RNA (1)...(19): siRNA sense strand
caagacauccaccgccaaa

SEQ ID NO: 137900 - RNA, 19 nt, Homo sapiens
  misc_RNA (1)...(19): siRNA sense strand
gggagaauauaaagaacca

SEQ ID NO: 137901 - RNA, 19 nt, Homo sapiens
  misc_RNA (1)...(19): siRNA sense strand
gagcaaacuggccugugua

SEQ ID NO: 137902 - RNA, 19 nt, Homo sapiens
  misc_RNA (1)...(19): siRNA sense strand
gaacuccacaaacugauca

SEQ ID NO: 137903 - RNA, 19 nt, Homo sapiens
  misc_RNA (1)...(19): siRNA sense strand
gugagaagaacccaucaaa

SEQ ID NO: 137904 - RNA, 19 nt, Homo sapiens
  misc_RNA (1)...(19): siRNA sense strand
gccaguggauuaugaguac

SEQ ID NO: 137905 - RNA, 19 nt, Homo sapiens
  misc_RNA (1)...(19): siRNA sense strand
gaauaccuccacucacgaa

SEQ ID NO: 137906 - RNA, 19 nt, Homo sapiens
  misc_RNA (1)...(19): siRNA sense strand
gaauugucccuuuguaugg

SEQ ID NO: 137907 - RNA, 19 nt, Homo sapiens
  misc_RNA (1)...(19): siRNA sense strand
ggccuugggucaacaucuu

SEQ ID NO: 137908 - RNA, 19 nt, Homo sapiens
  misc_RNA (1)...(19): siRNA sense strand
aaacuggccuguguagaca

SEQ ID NO: 137909 - RNA, 19 nt, Homo sapiens
  misc_RNA (1)...(19): siRNA sense strand
aaacuggccuguguagaca

SEQ ID NO: 137910 - RNA, 19 nt, Homo sapiens
  misc_RNA (1)...(19): siRNA sense strand
ccgagagucuugaucagau

SEQ ID NO: 137911 - RNA, 19 nt, Homo sapiens
  misc_RNA (1)...(19): siRNA sense strand
ucuccucccuugacuuuga

SEQ ID NO: 137912 - RNA, 19 nt, Homo sapiens
  misc_RNA (1)...(19): siRNA sense strand
caccaagccucugaaggaa

SEQ ID NO: 137913 - RNA, 19 nt, Homo sapiens
  misc_RNA (1)...(19): siRNA sense strand
gcaaagcccggaagaaacg

SEQ ID NO: 137914 - RNA, 19 nt, Homo sapiens
  misc_RNA (1)...(19): siRNA sense strand
cggaagaaacggaagaaga

SEQ ID NO: 137915 - RNA, 19 nt, Homo sapiens
  misc_RNA (1)...(19): siRNA sense strand
gaaacagagcuccgucuac

SEQ ID NO: 137916 - RNA, 19 nt, Homo sapiens
  misc_RNA (1)...(19): siRNA sense strand
ggaggaauaccuagugcau

SEQ ID NO: 137917 - RNA, 19 nt, Homo sapiens
  misc_RNA (1)...(19): siRNA sense strand
caaaauggcccgugugugu

SEQ ID NO: 137918 - RNA, 19 nt, Homo sapiens
  misc_RNA (1)...(19): siRNA sense strand
gaaggugaaccgggcacua

SEQ ID NO: 137919 - RNA, 19 nt, Homo sapiens
  misc_RNA (1)...(19): siRNA sense strand
ugggaacccuuaccucugu

SEQ ID NO: 137920 - RNA, 19 nt, Homo sapiens
  misc_RNA (1)...(19): siRNA sense strand
caaaucaagccaauuacca

SEQ ID NO: 137921 - RNA, 19 nt, Homo sapiens
  misc_RNA (1)...(19): siRNA sense strand
caagugggaggucugaaga

SEQ ID NO: 137922 - RNA, 19 nt, Homo sapiens
  misc_RNA (1)...(19): siRNA sense strand
gcaagugggaggucugaag

SEQ ID NO: 137923 - RNA, 19 nt, Homo sapiens
  misc_RNA (1)...(19): siRNA sense strand
uuucaucgcuggguccaaa

SEQ ID NO: 137924 - RNA, 19 nt, Homo sapiens
  misc_RNA (1)...(19): siRNA sense strand
gaaaguccaaauacagucu

SEQ ID NO: 137925 - RNA, 19 nt, Homo sapiens
  misc_RNA (1)...(19): siRNA sense strand
gacauccaccgccaaauca

SEQ ID NO: 137926 - RNA, 19 nt, Homo sapiens
  misc_RNA (1)...(19): siRNA sense strand
caaacuggccuguguagac

SEQ ID NO: 137927 - RNA, 19 nt, Homo sapiens
  misc_RNA (1)...(19): siRNA sense strand
caaacuggccuguguagac

SEQ ID NO: 137928 - RNA, 19 nt, Homo sapiens
  misc_RNA (1)...(19): siRNA sense strand
gaagaagaagagcucaaag

SEQ ID NO: 137929 - RNA, 19 nt, Homo sapiens
  misc_RNA (1)...(19): siRNA sense strand
gauuaugaguaccgagaag

SEQ ID NO: 137930 - RNA, 19 nt, Homo sapiens
  misc_RNA (1)...(19): siRNA sense strand
ggucaaagugggagacauc

SEQ ID NO: 137931 - RNA, 19 nt, Homo sapiens
  misc_RNA (1)...(19): siRNA sense strand
caagggcacagccaaggaa

SEQ ID NO: 137932 - RNA, 19 nt, Homo sapiens
  misc_RNA (1)...(19): siRNA sense strand
gaauauaaagaaccaagac

SEQ ID NO: 137933 - RNA, 19 nt, Homo sapiens
  misc_RNA (1)...(19): siRNA sense strand
gcagcccucugugacuuug

SEQ ID NO: 137934 - RNA, 19 nt, Homo sapiens
  misc_RNA (1)...(19): siRNA sense strand
agaauugucccuuuguaug

SEQ ID NO: 137935 - RNA, 19 nt, Homo sapiens
  misc_RNA (1)...(19): siRNA sense strand
ucggagaggugcacaggau

SEQ ID NO: 137936 - RNA, 19 nt, Homo sapiens
  misc_RNA (1)...(19): siRNA sense strand
gggcaaacuggccugugua

SEQ ID NO: 137937 - RNA, 19 nt, Homo sapiens
  misc_RNA (1)...(19): siRNA sense strand
cacccagaauugucccuuu

SEQ ID NO: 137938 - RNA, 19 nt, Homo sapiens
  misc_RNA (1)...(19): siRNA sense strand
gaaacucaagccaguggau

SEQ ID NO: 137939 - RNA, 19 nt, Homo sapiens
  misc_RNA (1)...(19): siRNA sense strand
cagaauugucccuuuguau

SEQ ID NO: 137940 - RNA, 19 nt, Homo sapiens
  misc_RNA (1)...(19): siRNA sense strand
gcagcaaagcccggaagaa

SEQ ID NO: 137941 - RNA, 19 nt, Homo sapiens
  misc_RNA (1)...(19): siRNA sense strand
ggaguuccaccgggucaaa

SEQ ID NO: 137942 - RNA, 19 nt, Homo sapiens
  misc_RNA (1)...(19): siRNA sense strand
gugugaaaguccaaauaca

SEQ ID NO: 137943 - RNA, 19 nt, Homo sapiens
  misc_RNA (1)...(19): siRNA sense strand
ggaggagcaggagcaaauu

SEQ ID NO: 137944 - RNA, 19 nt, Homo sapiens
  misc_RNA (1)...(19): siRNA sense strand
caggcugagugugagaaua

SEQ ID NO: 137945 - RNA, 19 nt, Homo sapiens
  misc_RNA (1)...(19): siRNA sense strand
agaagaagagcucaaaguc

SEQ ID NO: 137946 - RNA, 19 nt, Homo sapiens
  misc_RNA (1)...(19): siRNA sense strand
gaagaaacggaagaagaag

SEQ ID NO: 137947 - RNA, 19 nt, Homo sapiens
  misc_RNA (1)...(19): siRNA sense strand
gaaguuuucuguggaggaa

SEQ ID NO: 137948 - RNA, 19 nt, Homo sapiens
  misc_RNA (1)...(19): siRNA sense strand
agaaacagagcuccgucua

SEQ ID NO: 137949 - RNA, 19 nt, Homo sapiens
  misc_RNA (1)...(19): siRNA sense strand
uauaaagaaccaagacauc

SEQ ID NO: 137950 - RNA, 19 nt, Homo sapiens
  misc_RNA (1)...(19): siRNA sense strand
caaggcagcgugagcucaa

SEQ ID NO: 137951 - RNA, 19 nt, Homo sapiens
  misc_RNA (1)...(19): siRNA sense strand
caauguggcccaugcuaca

SEQ ID NO: 137952 - RNA, 19 nt, Homo sapiens
  misc_RNA (1)...(19): siRNA sense strand
gggucaacaucuucaugga

SEQ ID NO: 137953 - RNA, 19 nt, Homo sapiens
  misc_RNA (1)...(19): siRNA sense strand
ggccagcugccaucucuau

SEQ ID NO: 137954 - RNA, 19 nt, Homo sapiens
  misc_RNA (1)...(19): siRNA sense strand
gugagaauagccaagaguu

SEQ ID NO: 137955 - RNA, 19 nt, Homo sapiens
  misc_RNA (1)...(19): siRNA sense strand
cagcugccaucucuaucau

SEQ ID NO: 137956 - RNA, 19 nt, Homo sapiens
  misc_RNA (1)...(19): siRNA sense strand
aaauacagucucuuaaugg

SEQ ID NO: 137957 - RNA, 19 nt, Homo sapiens
  misc_RNA (1)...(19): siRNA sense strand
gugaaaguccaaauacagu

SEQ ID NO: 137958 - RNA, 19 nt, Homo sapiens
  misc_RNA (1)...(19): siRNA sense strand
cggaugacagugagaagaa

SEQ ID NO: 137959 - RNA, 19 nt, Homo sapiens
  misc_RNA (1)...(19): siRNA sense strand
gagcaggagcaaauucucu

SEQ ID NO: 137960 - RNA, 19 nt, Homo sapiens
  misc_RNA (1)...(19): siRNA sense strand
agacauccaccgccaaauc

SEQ ID NO: 137961 - RNA, 19 nt, Homo sapiens
  misc_RNA (1)...(19): siRNA sense strand
gggaaaguccuugcucaca

SEQ ID NO: 137962 - RNA, 19 nt, Homo sapiens
  misc_RNA (1)...(19): siRNA sense strand
uaccuccacucacgaagga

SEQ ID NO: 137963 - RNA, 19 nt, Homo sapiens
  misc_RNA (1)...(19): siRNA sense strand
ggauuaugaguaccgagaa

SEQ ID NO: 137964 - RNA, 19 nt, Homo sapiens
  misc_RNA (1)...(19): siRNA sense strand
ggugugaaaguccaaauac

SEQ ID NO: 137965 - RNA, 19 nt, Homo sapiens
  misc_RNA (1)...(19): siRNA sense strand
gaggagcaggagcaaauuc

SEQ ID NO: 137966 - RNA, 19 nt, Homo sapiens
  misc_RNA (1)...(19): siRNA sense strand
gaggggagaauauaaagaa

SEQ ID NO: 137967 - RNA, 19 nt, Homo sapiens
  misc_RNA (1)...(19): siRNA sense strand
uggaggagcaggagcaaau

SEQ ID NO: 137968 - RNA, 19 nt, Homo sapiens
  misc_RNA (1)...(19): siRNA sense strand
aauacagucucuuaauggu

SEQ ID NO: 137969 - RNA, 19 nt, Homo sapiens
  misc_RNA (1)...(19): siRNA sense strand
gccucucccugucggauga

SEQ ID NO: 137970 - RNA, 19 nt, Homo sapiens
  misc_RNA (1)...(19): siRNA sense strand
cagcaucucugucggaaga

SEQ ID NO: 137971 - RNA, 19 nt, Homo sapiens
  misc_RNA (1)...(19): siRNA sense strand
cagaagagccuauuacauc

SEQ ID NO: 137972 - RNA, 19 nt, Homo sapiens
  misc_RNA (1)...(19): siRNA sense strand
gaagagccuauuacaucua

SEQ ID NO: 137973 - RNA, 19 nt, Homo sapiens
  misc_RNA (1)...(19): siRNA sense strand
caccuggacuccuaugaga

SEQ ID NO: 137974 - RNA, 19 nt, Homo sapiens
  misc_RNA (1)...(19): siRNA sense strand
agaagagccuauuacaucu

SEQ ID NO: 137975 - RNA, 19 nt, Homo sapiens
  misc_RNA (1)...(19): siRNA sense strand
gaccagcgccacuucuuca

SEQ ID NO: 137976 - RNA, 19 nt, Homo sapiens
  misc_RNA (1)...(19): siRNA sense strand
ccaagaaccugcgcaucca

SEQ ID NO: 137977 - RNA, 19 nt, Homo sapiens
  misc_RNA (1)...(19): siRNA sense strand
ggaccagcgccacuucuuc

SEQ ID NO: 137978 - RNA, 19 nt, Homo sapiens
  misc_RNA (1)...(19): siRNA sense strand
ggucacccacagcaaguuu

SEQ ID NO: 137979 - RNA, 19 nt, Homo sapiens
  misc_RNA (1)...(19): siRNA sense strand
ccagaagagccuauuacau

SEQ ID NO: 137980 - RNA, 19 nt, Homo sapiens
  misc_RNA (1)...(19): siRNA sense strand
ccuggacuccuaugagaaa

SEQ ID NO: 137981 - RNA, 19 nt, Homo sapiens
  misc_RNA (1)...(19): siRNA sense strand
gcaggagagcggcuucuac

SEQ ID NO: 137982 - RNA, 19 nt, Homo sapiens
  misc_RNA (1)...(19): siRNA sense strand
caacguggccacucuucag

SEQ ID NO: 137983 - RNA, 19 nt, Homo sapiens
  misc_RNA (1)...(19): siRNA sense strand
ucaagaccuucagcuccaa

SEQ ID NO: 137984 - RNA, 19 nt, Homo sapiens
  misc_RNA (1)...(19): siRNA sense strand
gguaggagcucugccuguu

SEQ ID NO: 137985 - RNA, 19 nt, Homo sapiens
  misc_RNA (1)...(19): siRNA sense strand
gaccagggcuacagugaag

SEQ ID NO: 137986 - RNA, 19 nt, Homo sapiens
  misc_RNA (1)...(19): siRNA sense strand
gaagguggugggcauggua

SEQ ID NO: 137987 - RNA, 19 nt, Homo sapiens
  misc_RNA (1)...(19): siRNA sense strand
uaggagcucugccuguuga

SEQ ID NO: 137988 - RNA, 19 nt, Homo sapiens
  misc_RNA (1)...(19): siRNA sense strand
gagcucugccuguugauga

SEQ ID NO: 137989 - RNA, 19 nt, Homo sapiens
  misc_RNA (1)...(19): siRNA sense strand
gggcuacagugaaguuauc

SEQ ID NO: 137990 - RNA, 19 nt, Homo sapiens
  misc_RNA (1)...(19): siRNA sense strand
gguugcagcuguuucaucu

SEQ ID NO: 137991 - RNA, 19 nt, Homo sapiens
  misc_RNA (1)...(19): siRNA sense strand
ucauacaguucauuucauc

SEQ ID NO: 137992 - RNA, 19 nt, Homo sapiens
  misc_RNA (1)...(19): siRNA sense strand
ggaccagggcuacagugaa

SEQ ID NO: 137993 - RNA, 19 nt, Homo sapiens
  misc_RNA (1)...(19): siRNA sense strand
ccaaauccuaccugaguga

SEQ ID NO: 137994 - RNA, 19 nt, Homo sapiens
  misc_RNA (1)...(19): siRNA sense strand
uaccaaauccuaccugagu

SEQ ID NO: 137995 - RNA, 19 nt, Homo sapiens
  misc_RNA (1)...(19): siRNA sense strand
cuugucacauccgcaaaua

SEQ ID NO: 137996 - RNA, 19 nt, Homo sapiens
  misc_RNA (1)...(19): siRNA sense strand
gcuucuagcccucguguuc

SEQ ID NO: 137997 - RNA, 19 nt, Homo sapiens
  misc_RNA (1)...(19): siRNA sense strand
ccagccaccuuccggcaau

SEQ ID NO: 137998 - RNA, 19 nt, Homo sapiens
  misc_RNA (1)...(19): siRNA sense strand
gcccucguguucagcauca

SEQ ID NO: 137999 - RNA, 19 nt, Homo sapiens
  misc_RNA (1)...(19): siRNA sense strand
guaggagcucugccuguug

SEQ ID NO: 138000 - RNA, 19 nt, Homo sapiens
  misc_RNA (1)...(19): siRNA sense strand
cuucauacaguucauuuca

SEQ ID NO: 138001 - RNA, 19 nt, Homo sapiens
  misc_RNA (1)...(19): siRNA sense strand
gggaccagggcuacaguga

SEQ ID NO: 138002 - RNA, 19 nt, Homo sapiens
  misc_RNA (1)...(19): siRNA sense strand
uggcugagucugaagagaa

SEQ ID NO: 138003 - RNA, 19 nt, Homo sapiens
  misc_RNA (1)...(19): siRNA sense strand
agaagcgguugcagcuguu

SEQ ID NO: 138004 - RNA, 19 nt, Homo sapiens
  misc_RNA (1)...(19): siRNA sense strand
ggcugagucugaagagaag

SEQ ID NO: 138005 - RNA, 19 nt, Homo sapiens
  misc_RNA (1)...(19): siRNA sense strand
gacauugugcacagacaug

SEQ ID NO: 138006 - RNA, 19 nt, Homo sapiens
  misc_RNA (1)...(19): siRNA sense strand
ccagggcuacagugaaguu

SEQ ID NO: 138007 - RNA, 19 nt, Homo sapiens
  misc_RNA (1)...(19): siRNA sense strand
gaagcgguugcagcuguuu

SEQ ID NO: 138008 - RNA, 19 nt, Homo sapiens
  misc_RNA (1)...(19): siRNA sense strand
ggacccagaugcuuaauga

SEQ ID NO: 138009 - RNA, 19 nt, Homo sapiens
  misc_RNA (1)...(19): siRNA sense strand
caucucagcuugcaagucu

SEQ ID NO: 138010 - RNA, 19 nt, Homo sapiens
  misc_RNA (1)...(19): siRNA sense strand
gaaauggacccagaugcuu

SEQ ID NO: 138011 - RNA, 19 nt, Homo sapiens
  misc_RNA (1)...(19): siRNA sense strand
aaauggacccagaugcuua

SEQ ID NO: 138012 - RNA, 19 nt, Homo sapiens
  misc_RNA (1)...(19): siRNA sense strand
ggaccaacaccaaccaucu

SEQ ID NO: 138013 - RNA, 19 nt, Homo sapiens
  misc_RNA (1)...(19): siRNA sense strand
ggugcugggugcuguggaa

SEQ ID NO: 138014 - RNA, 19 nt, Homo sapiens
  misc_RNA (1)...(19): siRNA sense strand
guggggcucucccucauua

SEQ ID NO: 138015 - RNA, 19 nt, Homo sapiens
  misc_RNA (1)...(19): siRNA sense strand
gagaccuccuggaccaaca

SEQ ID NO: 138016 - RNA, 19 nt, Homo sapiens
  misc_RNA (1)...(19): siRNA sense strand
ccaaccaucucagcuugca

SEQ ID NO: 138017 - RNA, 19 nt, Homo sapiens
  misc_RNA (1)...(19): siRNA sense strand
ggaaugugacgcucuucuc

SEQ ID NO: 138018 - RNA, 19 nt, Homo sapiens
  misc_RNA (1)...(19): siRNA sense strand
cgaaauggacccagaugcu

SEQ ID NO: 138019 - RNA, 19 nt, Homo sapiens
  misc_RNA (1)...(19): siRNA sense strand
gcucaaccgcacucuaugg

SEQ ID NO: 138020 - RNA, 19 nt, Homo sapiens
  misc_RNA (1)...(19): siRNA sense strand
acaggacacaccucacuga

SEQ ID NO: 138021 - RNA, 19 nt, Homo sapiens
  misc_RNA (1)...(19): siRNA sense strand
aaacaggacacaccucacu

SEQ ID NO: 138022 - RNA, 19 nt, Homo sapiens
  misc_RNA (1)...(19): siRNA sense strand
ccuggaaugugacgcucuu

SEQ ID NO: 138023 - RNA, 19 nt, Homo sapiens
  misc_RNA (1)...(19): siRNA sense strand
gagcagagguauagccuuu

SEQ ID NO: 138024 - RNA, 19 nt, Homo sapiens
  misc_RNA (1)...(19): siRNA sense strand
gcaaagguaccuaguguuu

SEQ ID NO: 138025 - RNA, 19 nt, Homo sapiens
  misc_RNA (1)...(19): siRNA sense strand
caucaacccucuccuguau

SEQ ID NO: 138026 - RNA, 19 nt, Homo sapiens
  misc_RNA (1)...(19): siRNA sense strand
ucaauugccuucugacugu

SEQ ID NO: 138027 - RNA, 19 nt, Homo sapiens
  misc_RNA (1)...(19): siRNA sense strand
gggaagaaccugaccauuc

SEQ ID NO: 138028 - RNA, 19 nt, Homo sapiens
  misc_RNA (1)...(19): siRNA sense strand
uaacuuguguuucuugcuu

SEQ ID NO: 138029 - RNA, 19 nt, Homo sapiens
  misc_RNA (1)...(19): siRNA sense strand
ucacaucacuaaacucauc

SEQ ID NO: 138030 - RNA, 19 nt, Homo sapiens
  misc_RNA (1)...(19): siRNA sense strand
gugcaaagguaccuagugu

SEQ ID NO: 138031 - RNA, 19 nt, Homo sapiens
  misc_RNA (1)...(19): siRNA sense strand
ggacaaaaguguucacauc

SEQ ID NO: 138032 - RNA, 19 nt, Homo sapiens
  misc_RNA (1)...(19): siRNA sense strand
gagacauucuggaagcauu

SEQ ID NO: 138033 - RNA, 19 nt, Homo sapiens
  misc_RNA (1)...(19): siRNA sense strand
gcccuacaauauugcauuu

SEQ ID NO: 138034 - RNA, 19 nt, Homo sapiens
  misc_RNA (1)...(19): siRNA sense strand
caccagaggaugaauauga

SEQ ID NO: 138035 - RNA, 19 nt, Homo sapiens
  misc_RNA (1)...(19): siRNA sense strand
ggaagcauuuucugacuuu

SEQ ID NO: 138036 - RNA, 19 nt, Homo sapiens
  misc_RNA (1)...(19): siRNA sense strand
acucugcucugcuguguuu

SEQ ID NO: 138037 - RNA, 19 nt, Homo sapiens
  misc_RNA (1)...(19): siRNA sense strand
gcagagcaaugugacaagu

SEQ ID NO: 138038 - RNA, 19 nt, Homo sapiens
  misc_RNA (1)...(19): siRNA sense strand
gcaucaacccucuccugua

SEQ ID NO: 138039 - RNA, 19 nt, Homo sapiens
  misc_RNA (1)...(19): siRNA sense strand
uuauaaaccucagauggaa

SEQ ID NO: 138040 - RNA, 19 nt, Homo sapiens
  misc_RNA (1)...(19): siRNA sense strand
agagcaaugugacaaguau

SEQ ID NO: 138041 - RNA, 19 nt, Homo sapiens
  misc_RNA (1)...(19): siRNA sense strand
cagcuacaaucuggacaaa

SEQ ID NO: 138042 - RNA, 19 nt, Homo sapiens
  misc_RNA (1)...(19): siRNA sense strand
ucagauggaagaccagaaa

SEQ ID NO: 138043 - RNA, 19 nt, Homo sapiens
  misc_RNA (1)...(19): siRNA sense strand
gauggaagaccagaaauac

SEQ ID NO: 138044 - RNA, 19 nt, Homo sapiens
  misc_RNA (1)...(19): siRNA sense strand
guucacaucacuaaacuca

SEQ ID NO: 138045 - RNA, 19 nt, Homo sapiens
  misc_RNA (1)...(19): siRNA sense strand
gcaagagcagcuacaaucu

SEQ ID NO: 138046 - RNA, 19 nt, Homo sapiens
  misc_RNA (1)...(19): siRNA sense strand
uggaagaccagaaauacaa

SEQ ID NO: 138047 - RNA, 19 nt, Homo sapiens
  misc_RNA (1)...(19): siRNA sense strand
gcgaugaggcagagcaaug

SEQ ID NO: 138048 - RNA, 19 nt, Homo sapiens
  misc_RNA (1)...(19): siRNA sense strand
gcucugcuguguuugugau

SEQ ID NO: 138049 - RNA, 19 nt, Homo sapiens
  misc_RNA (1)...(19): siRNA sense strand
agauggaagaccagaaaua

SEQ ID NO: 138050 - RNA, 19 nt, Homo sapiens
  misc_RNA (1)...(19): siRNA sense strand
ggacucaaacgcguggaaa

SEQ ID NO: 138051 - RNA, 19 nt, Homo sapiens
  misc_RNA (1)...(19): siRNA sense strand
aaauaccucugccgcuguu

SEQ ID NO: 138052 - RNA, 19 nt, Homo sapiens
  misc_RNA (1)...(19): siRNA sense strand
ccauuccaccgaaguguaa

SEQ ID NO: 138053 - RNA, 19 nt, Homo sapiens
  misc_RNA (1)...(19): siRNA sense strand
gaucccauguguaaaauuc

SEQ ID NO: 138054 - RNA, 19 nt, Homo sapiens
  misc_RNA (1)...(19): siRNA sense strand
gcuacaaucuggacaaaag

SEQ ID NO: 138055 - RNA, 19 nt, Homo sapiens
  misc_RNA (1)...(19): siRNA sense strand
ucaaacgcguggaaaauau

SEQ ID NO: 138056 - RNA, 19 nt, Homo sapiens
  misc_RNA (1)...(19): siRNA sense strand
ccuguacagugagacauuu

SEQ ID NO: 138057 - RNA, 19 nt, Homo sapiens
  misc_RNA (1)...(19): siRNA sense strand
guuucuaacuuguguuucu

SEQ ID NO: 138058 - RNA, 19 nt, Homo sapiens
  misc_RNA (1)...(19): siRNA sense strand
caagagcagcuacaaucug

SEQ ID NO: 138059 - RNA, 19 nt, Homo sapiens
  misc_RNA (1)...(19): siRNA sense strand
cagagcaaugugacaagua

SEQ ID NO: 138060 - RNA, 19 nt, Homo sapiens
  misc_RNA (1)...(19): siRNA sense strand
gcagagguauagccuuuuc

SEQ ID NO: 138061 - RNA, 19 nt, Homo sapiens
  misc_RNA (1)...(19): siRNA sense strand
ccucauagaaggugaacug

SEQ ID NO: 138062 - RNA, 19 nt, Homo sapiens
  misc_RNA (1)...(19): siRNA sense strand
ucagggagcagagguauag

SEQ ID NO: 138063 - RNA, 19 nt, Homo sapiens
  misc_RNA (1)...(19): siRNA sense strand
gcagcuacaaucuggacaa

SEQ ID NO: 138064 - RNA, 19 nt, Homo sapiens
  misc_RNA (1)...(19): siRNA sense strand
agaaauacaagugugcauu

SEQ ID NO: 138065 - RNA, 19 nt, Homo sapiens
  misc_RNA (1)...(19): siRNA sense strand
guuuccaucugcguaguaa

SEQ ID NO: 138066 - RNA, 19 nt, Homo sapiens
  misc_RNA (1)...(19): siRNA sense strand
augguagucuuccuucuga

SEQ ID NO: 138067 - RNA, 19 nt, Homo sapiens
  misc_RNA (1)...(19): siRNA sense strand
gguugugcuuauccuggua

SEQ ID NO: 138068 - RNA, 19 nt, Homo sapiens
  misc_RNA (1)...(19): siRNA sense strand
ucaacccucuccuguaugc

SEQ ID NO: 138069 - RNA, 19 nt, Homo sapiens
  misc_RNA (1)...(19): siRNA sense strand
ccuggacaaucuccugguu

SEQ ID NO: 138070 - RNA, 19 nt, Homo sapiens
  misc_RNA (1)...(19): siRNA sense strand
gaagaccagaaauacaagu

SEQ ID NO: 138071 - RNA, 19 nt, Homo sapiens
  misc_RNA (1)...(19): siRNA sense strand
ggaagaccagaaauacaag

SEQ ID NO: 138072 - RNA, 19 nt, Homo sapiens
  misc_RNA (1)...(19): siRNA sense strand
ucacucugcucugcugugu

SEQ ID NO: 138073 - RNA, 19 nt, Homo sapiens
  misc_RNA (1)...(19): siRNA sense strand
ucgugggccuguacaguga

SEQ ID NO: 138074 - RNA, 19 nt, Homo sapiens
  misc_RNA (1)...(19): siRNA sense strand
ccugccagcugaugagaca

SEQ ID NO: 138075 - RNA, 19 nt, Homo sapiens
  misc_RNA (1)...(19): siRNA sense strand
uuuauaaaccucagaugga

SEQ ID NO: 138076 - RNA, 19 nt, Homo sapiens
  misc_RNA (1)...(19): siRNA sense strand
gguagucuuccuucugaug

SEQ ID NO: 138077 - RNA, 19 nt, Homo sapiens
  misc_RNA (1)...(19): siRNA sense strand
ggcaccagaggaugaauau

SEQ ID NO: 138078 - RNA, 19 nt, Homo sapiens
  misc_RNA (1)...(19): siRNA sense strand
gagggaagaaccugaccau

SEQ ID NO: 138079 - RNA, 19 nt, Homo sapiens
  misc_RNA (1)...(19): siRNA sense strand
ugcaagagcagcuacaauc

SEQ ID NO: 138080 - RNA, 19 nt, Homo sapiens
  misc_RNA (1)...(19): siRNA sense strand
auacaagugugcauuuagc

SEQ ID NO: 138081 - RNA, 19 nt, Homo sapiens
  misc_RNA (1)...(19): siRNA sense strand
guagucuuccuucugaugu

SEQ ID NO: 138082 - RNA, 19 nt, Homo sapiens
  misc_RNA (1)...(19): siRNA sense strand
gaagcauuuucugacuuua

SEQ ID NO: 138083 - RNA, 19 nt, Homo sapiens
  misc_RNA (1)...(19): siRNA sense strand
agacauucuggaagcauuu

SEQ ID NO: 138084 - RNA, 19 nt, Homo sapiens
  misc_RNA (1)...(19): siRNA sense strand
aagugugcauuuagcagaa

SEQ ID NO: 138085 - RNA, 19 nt, Homo sapiens
  misc_RNA (1)...(19): siRNA sense strand
ucauuggacuguacuucgu

SEQ ID NO: 138086 - RNA, 19 nt, Homo sapiens
  misc_RNA (1)...(19): siRNA sense strand
ugaugggacauuuagcaaa

SEQ ID NO: 138087 - RNA, 19 nt, Homo sapiens
  misc_RNA (1)...(19): siRNA sense strand
cagaggaugaauaugaugu

SEQ ID NO: 138088 - RNA, 19 nt, Homo sapiens
  misc_RNA (1)...(19): siRNA sense strand
cugaugagacauucuggaa

SEQ ID NO: 138089 - RNA, 19 nt, Homo sapiens
  misc_RNA (1)...(19): siRNA sense strand
aacuuguguuucuugcuua

SEQ ID NO: 138090 - RNA, 19 nt, Homo sapiens
  misc_RNA (1)...(19): siRNA sense strand
cuguaugcguuucuugaug

SEQ ID NO: 138091 - RNA, 19 nt, Homo sapiens
  misc_RNA (1)...(19): siRNA sense strand
auaaaccucagauggaaga

SEQ ID NO: 138092 - RNA, 19 nt, Homo sapiens
  misc_RNA (1)...(19): siRNA sense strand
ccuguggcaucauuacaag

SEQ ID NO: 138093 - RNA, 19 nt, Homo sapiens
  misc_RNA (1)...(19): siRNA sense strand
ggaccacgcuggacgaguu

SEQ ID NO: 138094 - RNA, 19 nt, Homo sapiens
  misc_RNA (1)...(19): siRNA sense strand
gcaacgaguucuucuucga

SEQ ID NO: 138095 - RNA, 19 nt, Homo sapiens
  misc_RNA (1)...(19): siRNA sense strand
caacguaggcggcaucaag

SEQ ID NO: 138096 - RNA, 19 nt, Homo sapiens
  misc_RNA (1)...(19): siRNA sense strand
gcagaagauugaggaguuc

SEQ ID NO: 138097 - RNA, 19 nt, Homo sapiens
  misc_RNA (1)...(19): siRNA sense strand
gggagacaauucugacuac

SEQ ID NO: 138098 - RNA, 19 nt, Homo sapiens
  misc_RNA (1)...(19): siRNA sense strand
ugcagaagauugaggaguu

SEQ ID NO: 138099 - RNA, 19 nt, Homo sapiens
  misc_RNA (1)...(19): siRNA sense strand
gcaccaacuucgacgacau

SEQ ID NO: 138100 - RNA, 19 nt, Homo sapiens
  misc_RNA (1)...(19): siRNA sense strand
aggaggagcugcuguacug

SEQ ID NO: 138101 - RNA, 19 nt, Homo sapiens
  misc_RNA (1)...(19): siRNA sense strand
gccgcuaccugcagaagau

SEQ ID NO: 138102 - RNA, 19 nt, Homo sapiens
  misc_RNA (1)...(19): siRNA sense strand
gcacuauccugaccuuccu

SEQ ID NO: 138103 - RNA, 19 nt, Homo sapiens
  misc_RNA (1)...(19): siRNA sense strand
caacgugugcgaugacuac

SEQ ID NO: 138104 - RNA, 19 nt, Homo sapiens
  misc_RNA (1)...(19): siRNA sense strand
gagacaauucugacuacga

SEQ ID NO: 138105 - RNA, 19 nt, Homo sapiens
  misc_RNA (1)...(19): siRNA sense strand
acaauucugacuacgacua

SEQ ID NO: 138106 - RNA, 19 nt, Homo sapiens
  misc_RNA (1)...(19): siRNA sense strand
ccucuuaccgggagacaau

SEQ ID NO: 138107 - RNA, 19 nt, Homo sapiens
  misc_RNA (1)...(19): siRNA sense strand
gccgucggaucaucaucaa

SEQ ID NO: 138108 - RNA, 19 nt, Homo sapiens
  misc_RNA (1)...(19): siRNA sense strand
cgggagacaauucugacua

SEQ ID NO: 138109 - RNA, 19 nt, Homo sapiens
  misc_RNA (1)...(19): siRNA sense strand
gcuaccugcagaagauuga

SEQ ID NO: 138110 - RNA, 19 nt, Homo sapiens
  misc_RNA (1)...(19): siRNA sense strand
ggaccacgcuggacgaguu

SEQ ID NO: 138111 - RNA, 19 nt, Homo sapiens
  misc_RNA (1)...(19): siRNA sense strand
gcaacgaguucuucuucga

SEQ ID NO: 138112 - RNA, 19 nt, Homo sapiens
  misc_RNA (1)...(19): siRNA sense strand
caacguaggcggcaucaag

SEQ ID NO: 138113 - RNA, 19 nt, Homo sapiens
  misc_RNA (1)...(19): siRNA sense strand
gcagaagauugaggaguuc

SEQ ID NO: 138114 - RNA, 19 nt, Homo sapiens
  misc_RNA (1)...(19): siRNA sense strand
gggagacaauucugacuac

SEQ ID NO: 138115 - RNA, 19 nt, Homo sapiens
  misc_RNA (1)...(19): siRNA sense strand
ugcagaagauugaggaguu

SEQ ID NO: 138116 - RNA, 19 nt, Homo sapiens
  misc_RNA (1)...(19): siRNA sense strand
gcaccaacuucgacgacau

SEQ ID NO: 138117 - RNA, 19 nt, Homo sapiens
  misc_RNA (1)...(19): siRNA sense strand
aggaggagcugcuguacug

SEQ ID NO: 138118 - RNA, 19 nt, Homo sapiens
  misc_RNA (1)...(19): siRNA sense strand
gccgcuaccugcagaagau

SEQ ID NO: 138119 - RNA, 19 nt, Homo sapiens
  misc_RNA (1)...(19): siRNA sense strand
gcacuauccugaccuuccu

SEQ ID NO: 138120 - RNA, 19 nt, Homo sapiens
  misc_RNA (1)...(19): siRNA sense strand
caacgugugcgaugacuac

SEQ ID NO: 138121 - RNA, 19 nt, Homo sapiens
  misc_RNA (1)...(19): siRNA sense strand
gagacaauucugacuacga
